(19) United States
(12) Patent Application Publication
(10) Pub. No.: US 2025/0311734 A1
(43) Pub. Date: Oct. 9, 2025

(54) Compositions and Methods for Preventing, Treating, Suppressing and/or Eliminatting Phytopathogenic Infestations and Infections

(71) Applicants: NOVOZYMES A/S, Bagsvaerd (DK); NOVONESIS PLANT BIOSOLUTIONS A/S, Lyngby (DK)

(72) Inventors: Kate Sarah BRANDON SUTTON, Durham, NC (US); Svend Gunnar KAASGAARD, Skovlunde (DK); Ines Marques NUNES, Malmo (SE); Gregory Stephen MALONEY, Durham, NC (US); Casey RUARK-SEWARD, Christianburg, VA (US); Jason QUINLAN, Woodland, CA (US); Mary Ann STRINGER, Soeborg (DK); Sharon INCH, Durham, NC (US); Calum RUSSELL, Durham, NC (US); Louisa LIBERMAN, Durham, NC (US); Jennifer PETITTE, Raleigh, NC (US); Birgitte Gjerde BENNEDSEN, Skovlunde (DK); Adam GINN, Roanoke, VA (US); Cari MCGREGOR, Durham, NC (US); Meaghan THOMPSON, Troutville, VA (US)

(73) Assignees: NOVOZYMES A/S, Bagsvaerd (DK); NOVONESIS PLANT BIOSOLUTIONS A/S, Lyngby (DK)

(21) Appl. No.: 18/864,972

(22) PCT Filed: May 12, 2023
(86) PCT No.: PCT/US2023/066918

§ 371 Date: Nov. 12, 2024

Related U.S. Application Data
(63) Continuation-in-part of application No. PCT/US2022/073761, filed on Jul. 15, 2022.
(60) Provisional application No. 63/342,064, filed on May 14, 2022.
(60) Provisional application No. 63/476,590, filed on Dec. 21, 2022.

(51) Int. Cl. A01N 63/50; A01P 3/00; A01P 7/04; C12N 9/04; C12N 9/08; C12N 9/24; C12N 9/50; C12N 15/82

(52) U.S. Cl. CPC A01N 63/50; A01P 3/00; A01P 7/04; C12N 9/0006; C12N 9/0065; C12N 9/2402; C12N 9/2482; C12N 9/50; C12N 15/8279; C12Y 101/03004; C12Y 111/01006; C12Y 302/01008; C12Y 302/01015; C12Y 304/21

(57) ABSTRACT

The present disclosure provides proteins useful for preventing, treating, suppressing and/or eliminating infestations and infections of plants by various phytopathogenic pests, as well as formulations comprising such proteins, polynucleotides encoding such proteins, organisms expressing such proteins, and methods of using such proteins, formulations, polynucleotides and organisms in agriculture and other fields of endeavor.

### RELATED APPLICATIONS

[0001] The claims priority to International Patent Application No. PCT/US2022/073761, filed Jul. 15, 2022, and published as WO 2023/288,294 on Jan. 19, 2023, and to U.S. Provisional Application Nos. 63/342,064, filed May 14, 2022, and 63/476,590, filed Dec. 21, 2022, the disclosure of each of which is incorporated herein by reference in its entirety.

### REFERENCE TO A SEQUENCE LISTING

[0002] The application contains a Sequence Listing in computer readable form. The name of the file containing the Sequence Listing is SQ.XML, which was created on May 12, 2023, and contains 89,744,839 bytes. The computer readable form is incorporated herein by reference.

### BRIEF DESCRIPTION OF THE DRAWINGS

[0003] FIG. 1 is a table showing significant results of efficacy testing of various enzyme treatments against Blumeria graminis. Results are presented as percent disease control relative to an untreated, uninoculated control (none—uninoculated control) and an untreated, inoculated control (none—inoculated control) at two timepoints/disease pressures. 100% control means no disease was detected in the treatment and 0% control means disease was at the same level as the untreated, inoculated control comparator.

[0004] FIG. 2 is a table showing significant results of efficacy testing of various enzyme treatments against Botrytis cinerea. Results are presented as percentage increase of the spectral parameters (Fv/Fm, ChlIdx and mARI) and the percentage of water-soaked lesions (% WSL) as compared to the untreated, inoculated control (none—inoculated control).

[0005] FIG. 3 is a table showing significant results of efficacy testing of various enzyme treatments against Fusarium graminearum. Results are presented as percentage increase of the spectral parameters (Fv/Fm, ChlIdx and cGFP) as compared to the untreated, inoculated control (none—inoculated control) after 72 hours.

[0006] FIG. 4 is a table showing significant results of efficacy testing of various enzyme treatments against Magnaporthe grisea. Results are presented as the half maximal effective concentration for absorbance at 612 nm (Abs EC₅₀; indicator of mycelia growth inhibition) and half maximal effective concentration for fluorescence after reaction with Resazurin (ex 570 nm-em 585 nm) (Fluorescence EC₅₀; indicator of cell viability).

[0007] FIG. 5 is a table showing significant results of efficacy testing of various enzyme treatments against Phakopsora pachyrhizi. Results are presented as the mean number of combined Phakopsora pachyrhizi lesions and pustules.

[0008] FIG. 6A, FIG. 6B, FIG. 6C and FIG. 6D are tables showing significant results of efficacy testing of various enzyme treatments against Phytophthora infestans. Results for pipette-treated tomato leaf discs treated are presented in FIG. 6A as mean percent disease. Results for spray-treated tomato leaf discs are presented in FIG. 6B as (−) no disease reduction, (+) mild disease reduction, (++) moderate disease reduction or (+++) extreme disease reduction and in FIG. 6C as mean percent disease. Results for spray-treated potato leaf discs are presented in FIG. 6D as mean percent healthy.

[0009] FIG. 7 is a table showing significant results of efficacy testing of various enzyme treatments against Pseudoperonospora cubensis. Results are presented as (−) no disease reduction, (+) mild disease reduction, (++) moderate disease reduction or (+++) extreme disease reduction.

[0010] FIG. 8A and FIG. 8B are tables showing significant results of efficacy testing of various enzyme treatments against Zymoseptoria tritici. Results are presented as percent disease control relative to untreated, inoculated control at various timepoints/disease pressures. 100% control means no disease was detected in the treatment and 0% control means disease was at the same level as the untreated, inoculated control comparator (none—inoculated control).

[0011] FIG. 9 is a table showing significant results of efficacy testing of various enzyme treatments against Botrytis cinerea, Fusarium graminearum, Fusarium virgulforme, and Zymoseptoria tritici. Results are presented as the minimum inhibitory concentration (MIC₅₀) for average hyphal branch length and mycelial area (i.e., the minimum enzyme concentration required to inhibit average hyphal branch length/total mycelium area to 50% or less of the corresponding untreated control).

[0012] FIG. 10A and FIG. 10B are tables showing significant results of efficacy testing of various enzyme treatments against Botrytis cinerea, Fusarium graminerum, Magnaporthe grisea, Penicillium digitatum, Penicillium expansum, Penicillium italicum, Phytophthora infestans and Zymoseptoria tritici. Results are presented as (−) no growth inhibition, (+) visible stress reaction and/or mild growth inhibition, (++) moderate growth inhibition or (+++) extreme growth inhibition.

[0013] FIG. 11 is a table showing significant results of efficacy testing of various enzyme treatments against leaf-eating insect larvae. Results are presented as relative growth rates of the larvae after two days of feeding on treated leaf discs.

[0014] FIG. 12 is a table showing significant results of efficacy testing of various enzyme treatments against leaf-eating insect larvae. Results are presented as relative growth rates of the larvae after two days of feeding on treated leaf discs.

[0015] FIG. 13 is a table showing significant results of efficacy testing of various enzyme treatments against gray mold (Botrvtis cinerea). Results are presented as percent disease.

[0016] FIG. 14A and FIG. 14B are tables showing significant results of efficacy testing of various enzyme treatments against Fusarium graminearum. Results are presented as percentage increase of the spectral parameters (Fv/Fm, ChlIdx and cGFP) as compared to corresponding untreated, inoculated controls (none—inoculated control; none—inoculated Silwet™ control; none—inoculated pH 6 buffer control; none—inoculated pH 7 buffer control; none—inoculated pH 8 buffer control).

[0017] FIG. 15A and FIG. 15B are tables showing significant results of efficacy testing of various enzyme treatments against Puccinia striiformis. Results are presented as area under the disease progress curve.

[0018] FIG. 16 is a table showing results of significant results of efficacy testing of various enzyme treatments against Botrytis cinerea, Fusarium graminerum, Penicillium digitatum, Penicillium expansum, Penicillium italicum, Phytophthora infestans, Pyricularia grisea and Zymoseptoria tritici. Results are presented as the amount of oligosaccharides solubilized after hydrolysis of crude cell wall preparations (mg glucose equivalents per gram of crude cell wall material (mg Glc/g CW)) FIG. 17 is a table showing significant results of efficacy testing of various enzyme treatments against Botrytis cinerea and Penicillium expansum. Results are presented as minimum enzyme concentrations necessary to prevent spore germination in the presence of enzyme, 24 hours after enzyme washout, or 48 hours after enzyme washout.

[0019] FIG. 18 is a table showing significant results of efficacy testing of various enzyme treatments against Botrytis cinerea. Results are presented as the minimum inhibitory concentration (MIC₅₀) for average total mycelial area (i.e., the minimum enzyme concentration required to inhibit average total mycelium area to 50% or less of the corresponding untreated control).

[0020] FIG. 19 is a table showing significant results of efficacy testing of various enzyme treatments against Botrytis cinerea and Penicillium expansum. Results are presented as percent inhibition of germ tube elongation as compared to the corresponding buffer control solution.

### DETAILED DESCRIPTION

[0021] This description is not intended to be a detailed catalog of all the different ways in which the inventive concepts disclosed herein may be implemented or of all the features that may be added thereto. For example, features illustrated with respect to one embodiment may be incorporated into other embodiments and features illustrated with respect to a particular embodiment may be deleted from that embodiment. In addition, numerous variations and additions to the various embodiments suggested herein, which do not depart from the instant inventions, will be apparent to those skilled in the art in light of the instant disclosure. Hence, the following description is intended to illustrate some embodiments of the instant inventions and not to exhaustively specify all permutations, combinations and variations thereof.

[0022] The terminology used herein is for the purpose of describing particular embodiments only and is not intended to be limiting of the instant inventions.

[0023] Unless otherwise defined, all terms (including technical and scientific terms) used herein have the same meaning as commonly understood by one of ordinary skill in the art to which the inventions belong. It will be further understood that terms, such as those defined in commonly used dictionaries, should be interpreted as having a meaning that is consistent with their meaning in the context of the specification and relevant art and should not be interpreted in an idealized or overly formal sense unless expressly so defined herein. For the sake of brevity and/or clarity, well-known functions or constructions may not be described in detail.

[0024] As used herein, the singular forms “a,” “an,” and “the” are intended to include the plural forms as well, unless the context clearly indicates otherwise.

[0025] As used herein, “additive,” when referring to effects of combinations within a composition means that the effects of the combinations are generally about the same as the sum of effects of the individual components of the combination alone. The combination of individual components producing this effect may be called an additive combination.

[0026] As used herein, the terms “agricultural, floricultural, horticultural and/or silvicultural apparatus/facility” and “agricultural/floricultural/horticultural/silvicultural apparatus/facility” refer to an apparatus or facility utilized in one or more aspects of the plant propagation, cultivation and/or harvesting, including, but not limited to, breeding, planting, irrigating, fertilizing, growing, monitoring, testing, pruning, harvesting, processing, packaging and/or storing plants and plant parts. Exemplary apparatuses and facilities include cultivators, seed containers, seeders, planting pots, hydroponic growth systems, growth chambers, greenhouses, broadcasters, fertilization drills, fertilizer spreaders, irrigation systems, harvesting apparatuses, postharvest storage containers, postharvest treatment chambers, and postharvest shipping containers.

[0027] As used herein, the term “agriculturally acceptable carrier” refers to a substance or composition that can be used to deliver a beneficial agent to a plant, plant part or plant growth medium (e.g., soil) without causing/having an unduly adverse effect on plant growth, development and/or yield. As used herein, the term “foliar-compatible carrier” refers to a material that can be foliarly applied to a plant or plant part without causing/having an unduly adverse effect on the plant, plant part, plant growth, plant health, or the like. As used herein, the term “seed-compatible carrier” refers to a material that can be applied to a seed without causing/having an unduly adverse effect on the seed, the plant that grows from the seed, seed germination, or the like. As used herein, the term “soil-compatible carrier” refers to a material that can be added to a soil without causing/having an unduly adverse effect on plant growth, soil structure, soil drainage, or the like.

[0028] As used herein, the term “and/or” is intended to include any and all combinations of one or more of the associated listed items, as well as the lack of combinations when interpreted in the alternative (“or”). Thus, the phrase “A, B and/or C” is to be interpreted as “A, A and B, A and B and C, A and C, B, B and C, or C.”

[0029] As used herein, “antagonistic,” when referring to effects of combinations within a composition means that the effects of the combinations are generally less than the sum of effects of the individual components of the combination alone. These compositions may be called antagonistic combinations.

[0030] As used herein, the term “aqueous” refers to a composition that contains more than a trace amount of water (i.e., more than 0.5% water by weight, based upon the total weight of the composition).

[0031] As used herein, the terms “associated with,” in association with” and “associated therewith,” when used in reference to a relationship between a composition of the present disclosure and a plant or plant part, refer to at least a juxtaposition or close proximity of the composition and the plant or plant part. Such a juxtaposition or close proximity may be achieved by contacting or applying the composition directly to the plant or plant part and/or by applying the composition to the plant growth medium (e.g., soil) in which the plant or plant part will be grown (or is currently being grown). According to some embodiments, the composition is applied as a coating to the outer surface of the plant or plant part. According to some embodiments, the composition is applied to soil at, near or surrounding the site in which the plant or plant part will be grown (or is currently being grown).

[0032] As used herein, the term “beneficial agent” may refer to any agent having at least one agriculturally/floriculturally/horticulturally/silviculturally beneficial property (e.g., an ability to fix atmospheric nitrogen, an ability to solubilize phosphate, an ability to produce one or more agriculturally/floriculturally/horticulturally/silviculturally beneficial small molecules, such as plant signal molecules, an ability to stimulate one or more plant defense systems, and ability to produce one or more photoprotective agents, such as pesticidal toxins).

[0033] As used herein, the term “biostimulant” refers to an agent or combination of agents the application of which enhances one or more metabolic and/or physiological processes of a plant or plant part (e.g., carbohydrate biosynthesis, ion uptake, nucleic acid uptake, nutrient delivery, photosynthesis and/or respiration).

[0034] As used herein, the term “binding module” refers to the region of an enzyme that mediates binding to the enzyme to a substrate.

[0035] As used herein, the term “catalytic domain” refers to the region of an enzyme containing the catalytic machinery of the enzyme.

[0036] As used herein, the term “cDNA” refers to a DNA molecule that can be prepared by reverse transcription from a mature, spliced, mRNA molecule obtained from a eukaryotic or prokaryotic cell. cDNAs lack intron sequences that may be present in the corresponding genomic DNA. The initial, primary RNA transcript is a precursor to mRNA that is processed through a series of steps, including splicing, before appearing as mature spliced mRNA.

[0037] As used herein, the term “coding sequence” refers to a polynucleotide that directly specifies the amino acid sequence of a polypeptide. The boundaries of the coding sequence are generally determined by an open reading frame, which begins with a start codon, such as ATG, GTG, or TTG, and ends with a stop codon, such as TAA, TAG, or TGA. The coding sequence may be a genomic DNA, cDNA, synthetic DNA, or a combination thereof.

[0038] As used herein, the terms “colony forming unit” and “cfu” refer to a microbial cell/spore capable of propagating on or in a suitable growth medium or substrate (e.g., a soil) when conditions (e.g., temperature, moisture, nutrient availability, pH, etc.) are favorable for germination and/or microbial growth.

[0039] As used herein, the term “consists essentially of,” when used in reference to compositions and methods of the present disclosure, means that the compositions/methods may contain additional components/steps so long as the additional components/steps do not materially alter the composition/method. The term “materially alter,” as applied to a composition/method of the present disclosure, refers to an increase or decrease in the effectiveness of the composition/method of at least 20%. For example, a component added to a composition of the present disclosure may be deemed to “materially alter” the composition if it increases or decreases the composition's ability to inhibit the growth of a target phytopathogen by at least 20%.

[0040] As used herein, the term “control sequences” refers to nucleic acid sequences involved in regulation of expression of a polynucleotide in a specific organism or in vitro. Each control sequence may be native (i.e., from the same gene) or heterologous (i.e., from a different gene) to the polynucleotide encoding the polypeptide, and native or heterologous to each other. Such control sequences include, but are not limited to leader, polyadenylation, prepropeptide, propeptide, signal peptide, promoter, terminator, enhancer, and transcription or translation initiator and terminator sequences. At a minimum, the control sequences include a promoter, and transcriptional and translational stop signals. The control sequences may be provided with linkers for the purpose of introducing specific restriction sites facilitating ligation of the control sequences with the coding region of the polynucleotide encoding a polypeptidic.

[0041] As used herein, the term “derived from,” when used in reference to a relationship between an organism and a protein and/or polynucleotide, means that the protein and/or polynucleotide is naturally occurring in said organism.

[0042] As used herein, the term “diazotroph” refers to an organism capable of converting atmospheric nitrogen (N₂) into a form that may be utilized by a plant or plant part (e.g., ammonia (NH₃), ammonium (NH₄+), etc.).

[0043] As used herein, the term “dispersant” refers to an agent or combination of agents the application of which reduces the cohesiveness of like particles, the surface tension of a liquid, the interfacial tension between two liquids and/or the interfacial tension between or a liquid and a solid.

[0044] As used herein, the terms “effective amount,” “effective concentration” and “effective amount/concentration” refer to an amount or concentration that is sufficient to cause a desired effect (e.g., inhibiting plant disease, enhancing plant yield). The absolute value of the amount/concentration that is sufficient to cause the desired effect may be affected by factors such as the type and magnitude of effect desired, the type, size and volume of material to which the composition will be applied, the type(s) of enzymes in the composition, the amount(s) of enzyme(s) in the composition, the stability of the enzyme(s) in the composition and the storage conditions (e.g., temperature, relative humidity, duration). Those skilled in the art will understand how to select an effective amount/concentration using routine dose-response experiments. In some examples, an effective amount of a substance when used alone may be different than an effective amount of the same substance when used as part of a combination.

[0045] As used herein, the term “endogenous gene” refers to a gene consisting of an endogenous polynucleotide.

[0046] As used herein, the term “endogenous polynucleotide” refers to a polynucleotide that is native to the referenced host cell.

[0047] As used herein, the terms “enhanced growth” and “enhanced plant growth” refer to an improvement in one or more characteristics of plant growth and/or development as compared to one or more control plants (e.g., a plant germinated from an untreated seed or an untreated plant). Exemplary plant growth/development characteristics include, but are not limited to, biomass, carbohydrate biosynthesis, chlorophyll content, cold tolerance, drought tolerance, height, leaf length, leaf mass, leaf number, leaf surface area, leaf volume, nutrient uptake (e.g., calcium, magnesium, nitrogen, phosphorous and/or potassium uptake), rate(s) of photosynthesis, root area, root diameter, root length, root mass, root nodulation (e.g., nodule mass, nodule number, nodule volume), root number, root surface area, root volume, salt tolerance, seed germination, seedling emergence, shoot diameter, shoot length, shoot mass, shoot number, shoot surface area, shoot volume, spread, stomatal conductance and survival rate.

[0048] As used herein, the terms “enhanced stability” and “enhanced enzyme stability” refer to an improvement in one or more characteristics of enzyme stability as compared to one or more controls (e.g., a control composition that is identical to a composition of the present disclosure except that it lacks one or more of the components found in the composition of the present disclosure). Exemplary enzyme stability characteristics include, but are not limited to, maintenance of enzymatic activity after being applied to a plant or plant part and/or stored for a defined period of time and the ability to cause a desired effect (e.g., reduced phytopathogenicity of a target pest) after being applied to a plant or plant part and/or stored for a defined period of time.

[0049] As used herein, the terms “enhanced yield” and “enhanced plant yield” refer to an improvement in one or more characteristics of plant yield as compared to one or more control plants (e.g., a control plant germinated from an untreated seed). Exemplary plant yield characteristics include, but are not limited to, biomass; bushels per acre; grain weight per plot (GWTPP); nutritional content; percentage of plants in a given area (e.g., plot) that fail to produce grain; yield at standard moisture percentage (YSMP), such as grain yield at standard moisture percentage (GYSMP); yield per plot (YPP), such as grain weight per plot (GWTPP); and yield reduction (YRED).

[0050] As used herein, the term “expression” refers to any step involved in the production of a polypeptide including, but not limited to, transcription, post-transcriptional modification, translation, post-translational modification, and secretion. Expression can be measured—for example, to detect increased expression—by techniques known in the art, such as measuring levels of mRNA and/or translated polypeptide.

[0051] As used herein, the term “expression vector” refers to a linear or circular DNA construct comprising a DNA sequence encoding a polypeptide, which coding sequence is operably linked to a suitable control sequence capable of effecting expression of the DNA in a suitable host. Such control sequences may include a promoter to effect transcription, an optional operator sequence to control transcription, a sequence encoding suitable ribosome binding sites on the mRNA, enhancers and sequences which control termination of transcription and translation.

[0052] As used herein, the term “extension” refers to an addition of one or more amino acids to the amino and/or carboxyl terminus of a polypeptide.

[0053] As used herein, the term “foliage” refers to those portions of a plant that normally grow above the ground, including, but not limited to, leaves, stalks, stems, flowers, fruiting bodies and fruits.

[0054] As used herein, the terms “foliar application” and “foliarly applied” refer to the application of one or more active ingredients to the foliage of a plant (e.g., to the leaves of the plant). Application may be affected by any suitable means, including, but not limited to, spraying/fogging the plant with a composition comprising the active ingredient(s). In some embodiments, the active ingredient(s) is/are applied to the leaves, stems and/or stalk of the plant and not to the flowers, fruiting bodies or fruits of the plant.

[0055] As used herein, the term “fragment” refers to a polypeptide having one or more amino acids absent from the amino and/or carboxyl terminus of the mature polypeptide.

[0056] As used herein, the term “fusion protein” refers to a polypeptide in which one polypeptide is fused at the N-terminus and/or the C-terminus of a polypeptide of the present disclosure. A fusion protein is produced by fusing a polynucleotide encoding another polypeptide to a polynucleotide of the present disclosure, or by fusing two or more polynucleotides of the present disclosure together. Techniques for producing fusion proteins are known in the art and include ligating the coding sequences encoding the polypeptides so that they are in frame and that expression of the fusion protein is under control of the same promoter(s) and terminator. Fusion proteins may also be constructed using intein technology in which fusion proteins are created post-translationally (Cooper et al., 1993, EMBO J. 12: 2575-2583; Dawson et al., 1994, Science 266: 776-779). A fusion protein can further comprise a cleavage site between the two polypeptides. Upon secretion of the fusion protein, the site is cleaved releasing the two polypeptides. Examples of cleavage sites include, but are not limited to, the sites disclosed in Martin et al., 2003, J. Ind. Microbiol. Biotechnol. 3: 568-576; Svetina et al., 2000, J. Biotechnol. 76: 245-251; Rasmussen-Wilson et al., 1997, Appl. Environ. Microbiol. 63: 3488-3493; Ward et al., 1995, Biotechnology 13: 498-503; and Contreras et al., 1991, Biotechnology 9: 378-381; Eaton et al., 1986, Biochemistry 25: 505-512; Collins-Racie et al., 1995, Biotechnology 13: 982-987; Carter et al., 1989, Proteins: Structure, Function, and Genetics 6: 240-248; and Stevens, 2003, Drug Discovery World 4: 35-48.

[0057] As used herein, the term “heterologous,” when used to describe the relationship between a polynucleotide or polypeptide and a host cell, refers to a polynucleotide or polypeptide that does not naturally occur in the host cell. For the purposes of the present disclosure, extraneous copies of polynucleotides that are otherwise native to the referenced host cell are deemed heterologous polynucleotides.

[0058] As used herein, the term “heterologous,” when used to describe the relationship between a polynucleotide or polypeptide and a control sequence (e.g., a promoter sequence), refers to a polynucleotide or polypeptide is not naturally associated with the control sequence (i.e., the control sequence is from a gene other than the gene encoding the mature polypeptide).

[0059] As used herein, the terms “host strain” and “host cell” refer to an organism into which an expression vector, phage, virus, or other DNA construct, including a polynucleotide encoding a polypeptide of interest (e.g., an amylase) has been introduced. Exemplary host strains are microorganism cells (e.g., bacteria, filamentous fungi, and yeast) and plant cells capable of expressing a protein of interest. The term “host cell” includes protoplasts created from cells.

[0060] As used herein, the terms “inoculant composition” and “inoculum” refer to a composition comprising microbial cells and/or spores, said cells/spores being capable of propagating/germinating on or in a suitable growth medium or substrate (e.g., a soil) when conditions (e.g., temperature, moisture, nutrient availability, pH, etc.) are favorable for germination and/or microbial growth.

[0061] As used herein, the term “introduced,” when used to describe the insertion of a nucleic acid sequence into a cell, encompasses “transfection”, “transformation” or “transduction,” as known in the art.

[0062] As used herein, the term “isolated” refers to a polypeptide, nucleic acid, cell, or other specified material or component that has been separated from at least one other material or component, including but not limited to, other proteins, nucleic acids, cells, etc. An isolated polypeptide, nucleic acid, cell or other material is thus in a form that does not occur in nature. An isolated polypeptide includes, but is not limited to, a culture broth containing the secreted polypeptide expressed in a host cell.

[0063] As used herein, the term “isomer” includes all stereoisomers of the compounds and/or molecules to which it refers, including enantiomers and diastereomers, as well as all conformers, roatmers and tautomers, unless otherwise indicated. Compounds and/or molecules disclosed herein include all enantiomers in either substantially pure levorotatory or dextrorotatory form, or in a racemic mixture, or in any ratio of enantiomers.

[0064] Where embodiments disclose a (D)-enantiomer, that embodiment also includes the (L)-enantiomer; where embodiments disclose a (L)-enantiomer, that embodiment also includes the (D)-enantiomer. Where embodiments disclose a (+)-enantiomer, that embodiment also includes the (−)-enantiomer; where embodiments disclose a (−)-enantiomer, that embodiment also includes the (+)-enantiomer. Where embodiments disclose a (S)-enantiomer, that embodiment also includes the (R)-enantiomer; where embodiments disclose a (R)-enantiomer, that embodiment also includes the (S)-enantiomer. Embodiments are intended to include any diastereomers of the compounds and/or molecules referred to herein in diastereomerically pure form and in the form of mixtures in all ratios. Unless stereochemistry is explicitly indicated in a chemical structure or chemical name, the chemical structure or chemical name is intended to embrace all possible stereoisomers, conformers, rotamers and tautomers of compounds and/or molecules depicted.

[0065] As used herein, the term “mature polypeptide” refers to a polypeptide in its mature form following N-terminal and/or C-terminal processing (e.g., removal of signal peptide).

[0066] As used herein, the term “mature polypeptide coding sequence” refers to a polynucleotide that encodes a mature polypeptide.

[0067] As used herein, the term “modified microbial strain” refers to a microbial strain that is modified from a strain isolated from nature. Modified microbial strains may be produced by any suitable method(s), including, but not limited to, chemical or other form of induced mutation to a polynucleotide within any genome within the strain; the insertion or deletion of one or more nucleotides within any genome within the strain, or combinations thereof; an inversion of at least one segment of DNA within any genome within the strain; a rearrangement of any genome within the strain; generalized or specific transduction of homozygous or heterozygous polynucleotide segments into any genome within the strain; introduction of one or more phage into any genome of the strain; transformation of any strain resulting in the introduction into the strain of stably replicating autonomous extrachromosomal DNA; any change to any genome or to the total DNA composition within the strain isolated from nature as a result of conjugation with any different microbial strain; and any combination of the foregoing. The term modified microbial strains includes a strain with (a) one of more heterologous nucleotide sequences, (b) one or more non-naturally occurring copies of a nucleotide sequence isolated from nature (i.e., additional copies of a gene that naturally occurs in the microbial strain from which the modified microbial strain was derived), (c) a lack of one or more nucleotide sequences that would otherwise be present in the natural reference strain by for example deleting nucleotide sequence, and (d) added extrachromosomal DNA. In some embodiments, modified microbial strains comprise a combination of two or more nucleotide sequences (e.g., two or more naturally occurring genes that do not naturally occur in the same microbial strain) or comprise a nucleotide sequence isolated from nature at a locus that is different from the natural locus.

[0068] As used herein, the term “native” refers to a polynucleotide or polypeptide naturally occurring in a host cell.

[0069] As used herein, the term “naturally occurring” refers to anything (e.g., proteins, amino acids, or nucleic acid sequences) that is found in nature. Conversely, the term “non-naturally occurring” refers to anything that is not found in nature (e.g., recombinant nucleic acids and protein sequences produced in a laboratory, modification of a wild-type sequence, formulations comprising one or more synthetic components, formulations comprising an artificial combination of otherwise naturally occurring components).

[0070] As used herein, the term “non-aqueous” refers to a composition that comprises no more than a trace amount of water (i.e., no more than 0.5% water by weight, based upon the total weight of the composition).

[0071] As used herein, the term “nutrient” refers to a compound or element useful for nourishing a plant (e.g., vitamins, macrominerals, micronutrients, trace minerals, organic acids, etc. that are necessary for plant growth and/or development).

[0072] As used herein, the term “obtained from,” when used in reference to a relationship between an organism and a protein, means that the protein is expressed in the organism, whether from a naturally occurring polynucleotide therein or from a heterologous polynucleotide that was introduced into the organism.

[0073] As used herein, the term “polynucleotide” encompasses DNA, RNA, heteroduplexes, and synthetic molecules capable of encoding a polypeptide. Polynucleotides may be single-stranded or double-stranded and may comprise chemical modifications. The terms “nucleic acid” and “polynucleotide” are used interchangeably. Because the genetic code is degenerate, more than one codon may be used to encode a particular amino acid, and the present compositions and methods encompass nucleotide sequences that encode a particular amino acid sequence. Unless otherwise indicated, nucleic acid sequences are presented in 5′-to-3′ orientation.

[0074] As used herein, the term “nucleic acid construct” refers to a polynucleotide, either single- or double-stranded, which is isolated from a naturally occurring gene or is modified to contain segments of nucleic acids in a manner that would not otherwise exist in nature or which is synthetic, and which comprises one or more control sequences operably linked to the nucleic acid sequence.

[0075] As used herein, the term “operably linked” means that specified components are in a relationship (including but not limited to juxtaposition) permitting them to function in an intended manner. For example, a regulatory sequence is operably linked to a coding sequence such that expression of the coding sequence is under control of the regulatory sequence.

[0076] As used herein, the term “phosphate-solubilizing microorganism” refers to a microorganism capable of converting insoluble phosphate into a soluble form of phosphate.

[0077] As used herein, the term “phytopathogenic pest” includes any organism or virus that negatively affects a plant, including, but not limited to, organisms and viruses that spread disease, damage host plants and/or compete for soil nutrients. The term “phytopathogenic pest” encompasses organisms and viruses that are known to associate with plants and to cause a detrimental effect on the plant's health and/or vigor. Phytopathogenic pests include, but are not limited to, arachnids (e.g., mites, ticks, spiders, etc.), bacteria, fungi, gastropods (e.g., slugs, snails, etc.), invasive plants (e.g., weeds), insects (e.g., white flies, thrips, weevils, etc.), nematodes (e.g., root-knot nematode, soybean cyst nematode, etc.), rodents and viruses (e.g., tobacco mosaic virus (TMV), tomato spotted wilt virus (TSWV), cauliflower mosaic virus (CaMV), etc.).

[0078] As used herein, the term “plant” includes all plant populations, including, but not limited to, agricultural, floricultural, horticultural and silvicultural plants. The term “plant” encompasses plants obtained by conventional plant breeding and optimization methods (e.g., marker-assisted selection) and plants obtained by genetic engineering, including cultivars protectable and not protectable by plant breeders' rights.

[0079] As used herein, the term “plant cell” refers to a cell of an intact plant, a cell taken from a plant, or a cell derived from a cell taken from a plant. Thus, the term “plant cell” includes cells within seeds, suspension cultures, embryos, meristematic regions, callus tissue, leaves, shoots, gametophytes, sporophytes, pollen and microspores.

[0080] As used herein, the term “plant growth regulator” refers to an agent or combination of agents the application of which accelerates or retards the growth/maturation rate of a plant through direct physiological action on the plant or which otherwise alters the behavior of a plant through direct physiological action on the plant. “Plant growth regulator” shall not be interpreted to include any agent or combination of agents excluded from the definition of “plant regulator” that is set forth section 2(v) of the Federal Insecticide, Fungicide, and Rodenticide Act (7 U.S.C. § 136(v)). Thus, “plant growth regulator” does not encompass microorganisms applied to a plant, plant part or plant growth medium for the purpose of enhancing the availability and/or uptake of nutrients, nutrients necessary to normal plant growth, soil amendments applied for the purpose of improving soil characteristics favorable for plant growth or vitamin hormone products as defined by 40 C.F.R. § 152.6(f).

[0081] As used herein, the term “plant part” refers to any part of a plant, including cells and tissues derived from plants. Thus, the term “plant part” may refer to any of plant components or organs (e.g., leaves, stems, roots, etc.), plant tissues, plant cells and seeds. Examples of plant parts, include, but are not limited to, anthers, embryos, flowers, fruits, fruiting bodies, leaves, ovules, pollen, rhizomes, roots, seeds, shoots, stems and tubers, as well as scions, rootstocks, protoplasts, calli and the like.

[0082] As used herein, the term “plant propagation material” refers to a plant part from which a whole plant can be generated. Examples of plant propagation materials include, but are not limited to, cuttings (e.g., leaves, stems), rhizomes, seeds, tubers and cells/tissues that can be cultured into a whole plant.

[0083] As used herein, the term “protein” is not meant to refer to a specific amino acid chain length and encompasses peptides, oligopeptides and polypeptides. It is to be understood that the term “protein” also encompasses two or more polypeptides combined to form an encoded product, as well as hybrid polypeptides and fusion proteins.

[0084] As used herein, the term “purified” refers to a polynucleotide, protein or cell that is substantially free from other components as determined by analytical techniques well known in the art (e.g., a purified polynucleotide or protein may form a discrete band in an electrophoretic gel, chromatographic eluate, and/or a media subjected to density gradient centrifugation). A purified polynucleotide or protein is at least about 50% pure, usually at least about 60%, about 65%, about 70%, about 75%, about 80%, about 85%, about 90%, about 91%, about 92%, about 93%, about 94%, about 95%, about 96%, about 97%, about 98%, about 99%, about 99.5%, about 99.6%, about 99.7%, about 99.8% or more pure (e.g., percent by weight or on a molar basis). In a related sense, a composition is enriched for a molecule when there is a substantial increase in the concentration of the molecule after application of a purification or enrichment technique. The term “enriched” refers to a compound, polynucleotide, protein, cell, nucleic acid, amino acid, or other specified material or component that is present in a composition at a relative or absolute concentration that is higher than a starting composition.

[0085] In one aspect, the term “purified” as used herein refers to the protein or cell being essentially free from components (especially insoluble components) from the production organism. In other aspects, the term “purified” refers to the protein being essentially free of insoluble components (especially insoluble components) from the native organism from which it is obtained. In one aspect, the protein is separated from some of the soluble components of the organism and culture medium from which it is recovered. The protein may be purified (i.e., separated) by one or more of the unit operations filtration, precipitation, or chromatography.

[0086] Accordingly, the protein may be purified such that only minor amounts of other proteins, in particular, other proteins, are present. The term “purified” as used herein may refer to removal of other components, particularly other proteins and most particularly other enzymes present in the cell of origin of the protein. The protein may be “substantially pure”, i.e., free from other components from the organism in which it is produced, e.g., a host organism for recombinantly produced protein. In one aspect, the protein is at least 40% pure by weight of the total protein material present in the preparation. In one aspect, the protein is at least 50%, 60%, 70%, 80% or 90% pure by weight of the total protein material present in the preparation. As used herein, a “substantially pure protein” may denote a protein preparation that contains at most 10%, preferably at most 8%, more preferably at most 6%, more preferably at most 5%, more preferably at most 4%, more preferably at most 3%, even more preferably at most 2%, most preferably at most 1%, and even most preferably at most 0.5% by weight of other protein material with which the protein is natively or recombinantly associated.

[0087] It is, therefore, preferred that the substantially pure protein is at least 92% pure, preferably at least 94% pure, more preferably at least 95% pure, more preferably at least 96% pure, more preferably at least 97% pure, more preferably at least 98% pure, even more preferably at least 99% pure, most preferably at least 99.5% pure by weight of the total protein material present in the preparation. Proteins of the present disclosure are preferably in a substantially pure form (i.e., the preparations are essentially free of other protein material). This can be accomplished, for example by preparing the protein by well-known recombinant methods or by classical purification methods.

[0088] As used herein, the term “recombinant” is used in its conventional meaning to refer to the manipulation, e.g., cutting and rejoining, of nucleic acid sequences to form constellations different from those found in nature. The term recombinant refers to a cell, nucleic acid, protein or vector that has been modified from its native state. Thus, for example, recombinant cells express genes that are not found within the native (non-recombinant) form of the cell, or express native genes at different levels or under different conditions than found in nature. The term “recombinant” is synonymous with “genetically modified” and “transgenic”.

[0089] As used herein, the terms “recover” and “recovery” refer to the removal of a protein from at least one fermentation broth component selected from the list of a cell, a nucleic acid, or other specified material, e.g., recovery of the protein from the whole fermentation broth, or from the cell-free fermentation broth, by protein crystal harvest, by filtration, e.g. depth filtration (by use of filter aids or packed filter medias, cloth filtration in chamber filters, rotary-drum filtration, drum filtration, rotary vacuum-drum filters, candle filters, horizontal leaf filters or similar, using sheed or pad filtration in framed or modular setups) or membrane filtration (using sheet filtration, module filtration, candle filtration, microfiltration, ultrafiltration in either cross flow, dynamic cross flow or dead end operation), or by centrifugation (using decanter centrifuges, disc stack centrifuges, hyrdo cyclones or similar), or by precipitating the protein and using relevant solid-liquid separation methods to harvest the protein from the broth media by use of classification separation by particle sizes. Recovery encompasses isolation and/or purification of the protein.

[0090] As used herein, the relatedness between two amino acid sequences or between two nucleotide sequences is described by the parameter “sequence identity”.

[0091] For purposes of the present disclosure, the sequence identity between two amino acid sequences is determined as the output of “longest identity” using the Needleman-Wunsch algorithm (Needleman and Wunsch, 1970, J. Mol. Biol. 48: 443-453) as implemented in the Needle program of the EMBOSS package (EMBOSS: The European Molecular Biology Open Software Suite, Rice et al., 2000, Trends Genet. 16: 276-277), preferably version 6.6.0 or later. The parameters used are a gap open penalty of 10, a gap extension penalty of 0.5, and the EBLOSUM62 (EMBOSS version of BLOSUM62) substitution matrix. In order for the Needle program to report the longest identity, the -nobrief option must be specified in the command line. The output of Needle labeled “longest identity” is calculated as follows:

(Identical Residues×100)/(Length of Alignment−Total Number of Gaps in Alignment)

For purposes of the present disclosure, the sequence identity between two polynucleotide sequences is determined as the output of “longest identity” using the Needleman-Wunsch algorithm (Needleman and Wunsch, 1970, supra) as implemented in the Needle program of the EMBOSS package (EMBOSS: The European Molecular Biology Open Software Suite, Rice et al., 2000, supra), preferably version 6.6.0 or later. The parameters used are a gap open penalty of 10, a gap extension penalty of 0.5, and the EDNAFULL (EMBOSS version of NCBI NUC4.4) substitution matrix. In order for the Needle program to report the longest identity, the nobrief option must be specified in the command line. The output of Needle labeled “longest identity” is calculated as follows:

(Identical Deoxyribonucleotides×100)/(Length of Alignment−Total Number of Gaps in Alignment).

[0092] As used herein, the term “signal peptide” refers to a sequence of amino acids attached to the N-terminal portion of a protein, which facilitates the secretion of the protein outside the cell. The mature form of an extracellular protein lacks the signal peptide, which is cleaved off during the secretion process.

[0093] As used herein, the terms “stabilizing compound” and “stabilizer” refer to an agent or combination of agents the application of which enhances the stability of an enzyme.

[0094] As used herein, the term “subsequence” refers to a polynucleotide having one or more nucleotides absent from the 5′ and/or 3′ end of a mature protein coding sequence; wherein the subsequence encodes a fragment having enzymatic activity.

[0095] As used herein, the term “variant” refers to a protein comprising a man-made mutation, i.e., a substitution, insertion (including extension), and/or deletion (e.g., truncation), at one or more positions. A substitution means replacement of the amino acid occupying a position with a different amino acid; a deletion means removal of the amino acid occupying a position; and an insertion means adding 1-5 amino acids (e.g., 1-3 amino acids, in particular, 1 amino acid) adjacent to and immediately following the amino acid occupying a position.

[0096] As used herein, the term “wild-type” in reference to an amino acid sequence or nucleic acid sequence means that the amino acid sequence or nucleic acid sequence is a native or naturally occurring sequence.

[0097] While certain aspects of the present disclosure will hereinafter be described with reference to embodiments thereof, it will be understood by those of ordinary skill in the art that various changes in form and details may be made therein without departing from the spirit and scope of the present disclosure as defined by the claims.

[0098] All publications, patent applications, patents and other references mentioned herein are incorporated by reference in their entirety, except insofar as they contradict any disclosure expressly set forth herein.

[0099] The present disclosure provides proteins useful for a) preventing, treating, suppressing and/or eliminating infestations/infections of/by myriad pests, including, but not limited to, phytopathogenic pests, such as arachnids, bacteria, fungi, gastropods, insects, nematodes, oomycetes, protozoa, viruses and weeds; b) treating surfaces/substances that are susceptible to infestation/infection; c) cleansing infested/infected surfaces/substances; d) reducing disease severity in plants and plant parts affected directly or indirectly by phytopathogenic pests; e) enhancing plant growth environments; f) improving nutrient availability in plant growth media; g) reducing the amount(s) of exogenous fertilizer needed to achieve a desired result; h) improving plant growth, development and yield characteristics; i) prolonging the shelf-life of harvested plants and plant parts; j) delaying the ripening of plants and plant parts; k) hastening the ripening of plants and plant parts; l) improving the efficacy of biological/chemical pesticides; m) preventing, treating, suppressing and/or eliminating pesticide-induced resistance/phytotoxicity, as well as polynucleotides encoding such proteins, organisms expressing such proteins, formulations comprising such proteins, polynucleotides and organisms, and methods of using such proteins, polynucleotides, organisms and formulations in agriculture and other fields of endeavor.

[0100] As those skilled in the art will appreciate, proteins, polynucleotides and organisms of the present disclosure may be used (and may be formulated for use) at any time(s) throughout the agricultural, floricultural, horticultural, and silvicultural processes, such as prior to planting, at the time of planting, after planting, prior to germination, after germination, prior to seedling emergence, at the time of seedling emergence, after seedling emergence, prior to the vegetative stage, during the vegetative stage, after the vegetative stage, prior to the reproductive stage, during the reproductive stage, after the reproductive stage, prior to flowering, at the time of flowering, after flowering, prior to fruiting, at the time of fruiting, after fruiting, prior to ripening, at the time of ripening, after ripening, prior to harvest, at the time of harvest, after harvesting, prior to transport/storage, at the time of transport/storage, and/or after transport/storage.

[0101] Accordingly, proteins of the present disclosure may be formulated for any suitable method of application, including, but not limited to, on-seed application, in-furrow application, foliar application, preharvest application, and postharvest application.

[0102] As those skilled in the art will further appreciate, proteins, polynucleotides, organisms and formulations of the present disclosure may affect the desired outcome(s)—including prevention, treatment, suppression and/or elimination of infestations/infections-without being toxic. As will be explained in further detail below, compositions of the present disclosure may exert their effects through various non-lethal means, such as reducing the attraction of a pest to a treated surface by degrading a food source, for example. Moreover, in many instances, otherwise toxic proteins of the present disclosure may be used in non-lethal doses to enhance the efficacy of and/or expand the target pest range of various chemical pesticides and biological pesticides.

[0103] Finally, those skilled in the art will appreciate that proteins, polynucleotides, organisms and formulations of the present disclosure may be used in combination to achieve the desire outcome(s). The present disclosure thus extends to formulations comprising two or more proteins of the present disclosure, to hybrid proteins comprising two or more distinct catalytic domains, to fusion proteins comprising two or more enzymatic polypeptides, etc. Although certain combinations will be described in detail below, it is to be understood that the present disclosure is not limited to those combinations but extends to all possible combinations of proteins, formulations, polynucleotides, and organisms described herein.

[0104] In some embodiments, proteins of the present disclosure exhibit one or more catalytic activities belonging to Enzyme Commission classification number 1 (EC 1). For example, in some embodiments, proteins of the present disclosure exhibit glucose oxidase, cellobiose dehydrogenase, amino acid oxidase, laccase, catalase, peroxidase and/or oxygenase activity useful for a) preventing/treating/suppressing/eliminating/reducing the detrimental effects of infestations/infections of/by various pests, including, but not limited to, phytopathogenic pests, such as acarids, bacteria, fungi, gastropods, insects, nematodes, oomycetes, protozoa, viruses and weeds; b) reducing one or more aspects of disease severity in plants affected by one or more phytopathogenic pests; c) pretreating surfaces/substances that are susceptible to infestation/infection by pests; d) cleaning surfaces/substances that are infested/infected by pests; e) enhancing the environments in which plants are grown by; f) improving nutrient availability in plant growth media; g) reducing the amounts of exogenous fertilizer needed to achieve a desired result; h) improving plant growth, development, and yield characteristics; i) prolonging the shelf-life of harvested plants and plant parts; j) delaying/hastening the ripening of a plant or plant part; k) improving the efficacy of chemical pesticides; and/or l) reducing chemical-pesticide-induced resistance/phytotoxicity.

[0105] In some embodiments, proteins of the present disclosure exhibit one or more oxidoreductase activities belonging to EC 1 and, optionally, comprise, consist essentially of, or consist of an amino acid sequence that is about/at least 60, 61, 62, 63, 64, 65, 66, 67, 68, 69, 70, 71, 72, 73, 74, 75, 76, 77, 78, 79, 80, 81, 82, 83, 84, 85, 86, 87, 88, 89, 90, 91, 92, 93, 94, 95, 96, 97, 98, 99 or 100% identical to one or more of the amino acid sequences set forth herein as SEQ ID NO(s): 1-15 and 183-2755.

[0106] In some embodiments, proteins of the present disclosure exhibit one or more oxidoreductase activities belonging to EC 1.1, such as oxidase activities belonging to EC 1.1.3 (e.g., glucose oxidase activity belonging to EC 1.1.3.4, hexose oxidase activity belonging to EC 3.1.1.5, galactose oxidase activity belonging to EC 1.1.3.9) and/or EC 1.1.99 (e.g., cellobiose oxidase activity belonging to EC 1.1.99.18), and, optionally, comprise, consist essentially of, or consist of an amino acid sequence that is about/at least 60, 61, 62, 63, 64, 65, 66, 67, 68, 69, 70, 71, 72, 73, 74, 75, 76, 77, 78, 79, 80, 81, 82, 83, 84, 85, 86, 87, 88, 89, 90, 91, 92, 93, 94, 95, 96, 97, 98, 99 or 100% identical to one, two, three, four, five or more of the amino acid sequences set forth herein as SEQ ID NO(s): 1-8.

[0107] In some embodiments, the protein is selected from the group consisting of:
[0108] a) a polypeptide having about/at least 60, 61, 62, 63, 64, 65, 66, 67, 68, 69, 70, 71, 72, 73, 74, 75, 76, 77, 78, 79, 80, 81, 82, 83, 84, 85, 86, 87, 88, 89, 90, 91, 92, 93, 94, 95, 96, 97, 98, 99 or 100% sequence identity to one or more of SEQ ID NO(s): 1-5;
[0109] b) a polypeptide having about/at least 60, 61, 62, 63, 64, 65, 66, 67, 68, 69, 70, 71, 72, 73, 74, 75, 76, 77, 78, 79, 80, 81, 82, 83, 84, 85, 86, 87, 88, 89, 90, 91, 92, 93, 94, 95, 96, 97, 98, 99 or 100% sequence identity to a mature polypeptide of any one of SEQ ID NO(s): 1-5;
[0110] c) a polypeptide encoded by a polynucleotide having about/at least 60, 61, 62, 63, 64, 65, 66, 67, 68, 69, 70, 71, 72, 73, 74, 75, 76, 77, 78, 79, 80, 81, 82, 83, 84, 85, 86, 87, 88, 89, 90, 91, 92, 93, 94, 95, 96, 97, 98, 99 or 100% sequence identity to one or more of SEQ ID NO(s): 92-96 or the cDNA sequence thereof;
[0111] d) a polypeptide derived from any one of SEQ ID NO(s): 1-5 by substitution, deletion, or insertion of one or more amino acids;
[0112] e) a polypeptide derived from a mature polypeptide of any one of SEQ ID NO(s): 1-5 by substitution, deletion, or insertion of one or more amino acids;
[0113] f) a polypeptide derived from the polypeptide of any one of a) through e) wherein the N- and/or C-terminal end has been extended by the addition of one or more amino acids; and
[0114] g) a fragment of the polypeptide of any one of a) through f)
   wherein the polypeptide has glucose oxidase activity belonging to EC 1.1.3.4. Examples of proteins that exhibit glucose oxidase activity and have an amino acid sequence that is at least 70% identical to one or more of SEQ ID NOs: 1-5 are set forth herein as SEQ ID NOs: 183-2205.

[0115] In some such embodiments, the protein is derived from Aspergillus (e.g., A. chevalieri, A. cristatus, A. flavus, A. niger, A. niveoglaucus, A. nomiae, A. oryzae., A. terreus, A. tubingensis), Beauveria (e.g., B. bassiana), Escherichia (e.g., E. coli), Komagataella (e.g., K. pastoris), Penicillium (e.g., P. adametzii. P. amagasakiense, P. chrysogenum, P. decumbens, P. expansum, P. polonicum, P. viridicatum), or Talaromyces (e.g., T. bacillisporus, T. flavus, T. stipitatus, T. variabilis). For example, in some embodiments, the protein is a native Aspergillus (e.g., A. chevalieri, A. cristatus, A. flavus, A. niger, A. niveoglaucus, A. nomiae, A. oryzae., A. terreus, A. tubingensis), Beauveria (e.g., B. bassiana), Escherichia (e.g., E. coli), Komagataella (e.g., K pastoris), Penicillium (e.g., P. adametz, P. amagasakiense, P. chrysogenum, P. decumbens, P. expansum, P. polonicum, P. viridicatum), or Talaromyces (e.g., T. bacillisporus, T. flavus, T. stipitatus, T. variabilis) glucose oxidase or is a functional fragment/mutant/variant of a native Aspergillus (e.g., A. chevalieri, A. cristatus, A. flavus, A. niger, A. niveoglaucus, A. nomiae, A. oryzae., A. terreus, A. tubingensis), Beauveria (e.g., B. bassiana), Escherichia (e.g., E. coli), Komagataella (e.g., K. pastoris), Penicillium (e.g., P. adametzii, P. amagasakiense, P. chrysogenum, P. decumbens, P. expansum, P. polonicum, P. viridicatum), or Talaromyces (e.g., T. bacillisporus, T. favus, T. stipitatus, T. variabilis) glucose oxidase.

[0116] In some embodiments, the protein is selected from the group consisting of:
[0117] a) a polypeptide having about/at least 60, 61, 62, 63, 64, 65, 66, 67, 68, 69, 70, 71, 72, 73, 74, 75, 76, 77, 78, 79, 80, 81, 82, 83, 84, 85, 86, 87, 88, 89, 90, 91, 92, 93, 94, 95, 96, 97, 98, 99 or 100% sequence identity to one or more of SEQ ID NO(s): 6-8;
[0118] b) a polypeptide having about/at least 60, 61, 62, 63, 64, 65, 66, 67, 68, 69, 70, 71, 72, 73, 74, 75, 76, 77, 78, 79, 80, 81, 82, 83, 84, 85, 86, 87, 88, 89, 90, 91, 92, 93, 94, 95, 96, 97, 98, 99 or 100% sequence identity to a mature polypeptide of any one of SEQ ID NO(s): 6-8;
[0119] c) a polypeptide encoded by a polynucleotide having about/at least 60, 61, 62, 63, 64, 65, 66, 67, 68, 69, 70, 71, 72, 73, 74, 75, 76, 77, 78, 79, 80, 81, 82, 83, 84, 85, 86, 87, 88, 89, 90, 91, 92, 93, 94, 95, 96, 97, 98, 99 or 100% sequence identity to one or more of SEQ ID NO(s): 97-99 or the cDNA sequence thereof;
[0120] d) a polypeptide derived from any one of SEQ ID NO(s): 6-8 by substitution, deletion, or insertion of one or more amino acids;
[0121] e) a polypeptide derived from a mature polypeptide of any one of SEQ ID NO(s): 6-8 by substitution, deletion, or insertion of one or more amino acids;
[0122] f) a polypeptide derived from the polypeptide of any one of a) through e) wherein the N- and/or C-terminal end has been extended by the addition of one or more amino acids; and
[0123] g) a fragment of the polypeptide of any one of a) through f)
   wherein the polypeptide has cellobiose oxidase activity belonging to EC 1.1.99.18. Examples of proteins that exhibit cellobiose oxidase activity and have an amino acid sequence that is at least 70% identical to one or more of SEQ ID NOs: 6-8 are set forth herein as SEQ ID NOs: 2206-2217.

[0124] In some such embodiments, the protein is derived from Chaetomium, Humicola, Microdochium, Myceliophthora, Myriococcum, Neurospora or Remersonia. For example, in some embodiments, the protein is a native Chaetomium, Humicola, Microdochium, Myceliophthora, Myriococcum, Neurospora or Remersoma cellobiose oxidase or is a functional fragment/mutant/variant of a native Chaetomium, Humicola, Microdochium, Myceliophthora, Myriococcum, Neurospora or Remersonia cellobiose oxidase.

[0125] Those skilled in the art will understand how to identify, isolate, characterize, produce, recover and formulate proteins having one or more oxidoreductase activities belonging to EC 1.1. See, e.g., CN101348794-A; CN101348795-A; CN102517304-A; CN103275942-A; CN103525778-A; CN103614350-A; CN103981159-A; CN104312989-A; CN104711273-A; CN104711274-A; CN105002147-A; CN105420252-A; CN105746635-A; CN105950577-A; CN105950578-A; CN106119219-A; CN107012130-A; CN107988177-A; CN108003244-A; CN108004256-A; CN108118036-A; CN108118037-A; CN108118038-A; CN108251389-A; CN108251390-A; CN108251391-A; CN108251392-A; CN108374001-A; CN108893453-A; CN109207446-A; CN109321586-A; CN109423483-A; CN109666657-A; CN110577939-A; CN110592034-A; CN110628738-A; CN110885801-A; CN111004786-A; CN112143717-A; CN112760299-A; CN112877306-A; CN113061189-A; CN113403290-A; CN113528476-A; CN113862233-A; CN114058637-A; CN114181916-A; CN114395540-A; CN114395541-A; CN114736879-A; CN114736880-A; CN114736881-A; CN115029327-A; CN115029328-A; CN115612628-A; CN1229139-A; EP1892529-A1; EP2415863-A1; EP2562250-A1; EP2796547-A1; EP3572503-A1; EP3984368-A1; FR2979918-A1; JP2011139677-A; JP2012157315-A; JP2015002686-A; JP2018198581-A; U.S. Ser. No. 10/233,430-B1; US2004053425-A1; US2022283151-A1; WO2010039840-A1; WO2010053161-A1; WO2010121933-A1; WO2010135499-A1; WO2011068050-A1; WO2012068236-A2; WO2013026575-A2; WO2013159005-A2; WO2013181760-A; WO2014000746-A1; WO2014013073-A1; WO2014081700-A1; WO2014114810-A1; WO2014173822-A2; WO2015109405-A1; WO2016026842-A1; WO2016031611-A1; WO2016090472-A1; WO2016090473-A1; WO2016050905-A1; WO2018039802-A1; WO2019110497-A1; WO2020125700-A1; WO2020239064-A1; WO2020254336-A1; WO2022138668-A1; WO2022256274-A1; WO2023004432-A2; WO2023288294-A1; WO8912675-A; WO9521924-A1.

[0126] In some embodiments, proteins of the present disclosure exhibit one or more oxidoreductase activities belonging to EC 1.4, such as oxidase activities belonging to EC 1.4.3 (e.g., D-aspartate oxidase activity belonging to EC 1.4.3.1, L-amino acid oxidase activity belonging to EC 1.4.3.2, D-amino acid oxidase activity belonging to EC 1.4.3.3, D-glutamate oxidase activity belonging to EC 1.4.3.7, L-glutamate oxidase activity belonging to EC 1.4.3.11, cyclohexylamine oxidase activity belonging to EC 1.4.3.12, protein-lysine 6-oxidase activity belonging to EC 1.4.3.13, L-lysine oxidase activity belonging to EC 1.4.3.14, D-glutamate(D-aspartate) oxidase activity belonging to EC 1.4.3.15, L-aspartate oxidase activity belonging to EC 1.4.3.16, glycine oxidase activity belonging to EC 1.4.3.19, L-lysine 6-oxidase activity belonging to EC 1.4.3.20, L-arginine oxidase activity belonging to EC 1.4.3.25).

[0127] In some embodiments, proteins of the present disclosure exhibit one or more oxidase activities belonging to EC 1.10, such as activities belonging to EC 1.10.3 (e.g., laccase activity belonging to EC 1.10.3.2), and, optionally, comprise, consist essentially of, or consist of an amino acid sequence that is about/at least 60, 61, 62, 63, 64, 65, 66, 67, 68, 69, 70, 71, 72, 73, 74, 75, 76, 77, 78, 79, 80, 81, 82, 83, 84, 85, 86, 87, 88, 89, 90, 91, 92, 93, 94, 95, 96, 97, 98, 99 or 100% identical to the amino acid sequence set forth herein as SEQ ID NO: 9.

[0128] In some embodiments, the protein is selected from the group consisting of:
[0129] a) a polypeptide having about/at least 60, 61, 62, 63, 64, 65, 66, 67, 68, 69, 70, 71, 72, 73, 74, 75, 76, 77, 78, 79, 80, 81, 82, 83, 84, 85, 86, 87, 88, 89, 90, 91, 92, 93, 94, 95, 96, 97, 98, 99 or 100% sequence identity to one or more of SEQ ID NO(s): 9;
[0130] b) a polypeptide having about/at least 60, 61, 62, 63, 64, 65, 66, 67, 68, 69, 70, 71, 72, 73, 74, 75, 76, 77, 78, 79, 80, 81, 82, 83, 84, 85, 86, 87, 88, 89, 90, 91, 92, 93, 94, 95, 96, 97, 98, 99 or 100% sequence identity to a mature polypeptide of any one of SEQ ID NO(s): 9;
[0131] c) a polypeptide encoded by a polynucleotide having about/at least 60, 61, 62, 63, 64, 65, 66, 67, 68, 69, 70, 71, 72, 73, 74, 75, 76, 77, 78, 79, 80, 81, 82, 83, 84, 85, 86, 87, 88, 89, 90, 91, 92, 93, 94, 95, 96, 97, 98, 99 or 100% sequence identity to one or more of SEQ ID NO(s): 100 or the cDNA sequence thereof,
[0132] d) a polypeptide derived from any one of SEQ ID NO(s): 9 by substitution, deletion, or insertion of one or more amino acids;
[0133] e) a polypeptide derived from a mature polypeptide of any one of SEQ ID NO(s): 9 by substitution, deletion, or insertion of one or more amino acids;
[0134] f) a polypeptide derived from the polypeptide of any one of a) through e) wherein the N- and/or C-terminal end has been extended by the addition of one or more amino acids; and
[0135] g) a fragment of the polypeptide of any one of a) through f)
   wherein the polypeptide has laccase activity belonging to EC 1.10.3.2. Examples of proteins that exhibit laccase activity and have an amino acid sequence that is at least 70% identical to SEQ ID NO: 9 are set forth herein as SEQ ID NOs: 2218-2251.

[0136] In some such embodiments, the protein is derived from Chaetomium, Chrysocorona, Melanocarpus, Myceliophthoora, Myriococcum, or Thermothelomyces. For example, in some embodiments, the protein is a native Chaetomium, Chrysocorona, Melanocarpus, Myceliophthoora, Myriococcum, or Thermothelomyces laccase or is a functional fragment/mutant/variant of a native Chaetomium, Chrysocorona, Melanocarpus, Myceliophthoora, Myriococcum, or Thermothelomyces laccase.

[0137] Those skilled in the art will understand how to identify, isolate, characterize, produce, recover and formulate proteins having one or more oxidase activities belonging to EC 1.10. See, e.g., EP3444323-A1; IN9601521-14; US2008148432-A1; US2009155415-A1; US2012227131-A1; US2022298533-A1; U.S. Pat. No. 6,060,442-A; WO2009075860-A2; WO2012068236-A2; WO2013181760-A1; WO2014081700-A1; WO2015109405-A1; WO2016029107-A1; WO2016090059-A1; WO2016090474-A1; WO2017089304-A1; WO2022029293-A1; WO2022270590-A1; WO2023288294-A1; WO9838286-A1.

[0138] In some embodiments, enzymes of the present disclosure exhibit peroxidase activity belonging to EC 1.11, such as peroxidase activity belonging to EC 1.11.1 (e.g., catalase activity belonging to EC 1.11.1.6, peroxidase activity belonging to EC 1.11.1.7, lignin peroxidase activity belonging to EC 1.11.1.14), and, optionally, comprise, consist essentially of, or consist of an amino acid sequence that is about/at least 60, 61, 62, 63, 64, 65, 66, 67, 68, 69, 70, 71, 72, 73, 74, 75, 76, 77, 78, 79, 80, 81, 82, 83, 84, 85, 86, 87, 88, 89, 90, 91, 92, 93, 94, 95, 96, 97, 98, 99 or 100% identical to one or more of the amino acid sequences set forth herein as SEQ ID NO(s): 10-13.

[0139] In some embodiments, the protein is selected from the group consisting of:
[0140] a) a polypeptide having about/at least 60, 61, 62, 63, 64, 65, 66, 67, 68, 69, 70, 71, 72, 73, 74, 75, 76, 77, 78, 79, 80, 81, 82, 83, 84, 85, 86, 87, 88, 89, 90, 91, 92, 93, 94, 95, 96, 97, 98, 99 or 100% sequence identity to one or more of SEQ ID NO(s): 10-12;
[0141] b) a polypeptide having about/at least 60, 61, 62, 63, 64, 65, 66, 67, 68, 69, 70, 71, 72, 73, 74, 75, 76, 77, 78, 79, 80, 81, 82, 83, 84, 85, 86, 87, 88, 89, 90, 91, 92, 93, 94, 95, 96, 97, 98, 99 or 100% sequence identity to a mature polypeptide of any one of SEQ ID NO(s): 10-12;
[0142] c) a polypeptide encoded by a polynucleotide having about/at least 60, 61, 62, 63, 64, 65, 66, 67, 68, 69, 70, 71, 72, 73, 74, 75, 76, 77, 78, 79, 80, 81, 82, 83, 84, 85, 86, 87, 88, 89, 90, 91, 92, 93, 94, 95, 96, 97, 98, 99 or 100% sequence identity to one or more of SEQ ID NO(s): 101-103 or the cDNA sequence thereof;
[0143] d) a polypeptide derived from any one of SEQ ID NO(s): 10-12 by substitution, deletion, or insertion of one or more amino acids;
[0144] e) a polypeptide derived from a mature polypeptide of any one of SEQ ID NO(s): 10-12 by substitution, deletion, or insertion of one or more amino acids;
[0145] f) a polypeptide derived from the polypeptide of any one of a) through e) wherein the N- and/or C-terminal end has been extended by the addition of one or more amino acids; and
[0146] g) a fragment of the polypeptide of any one of a) through f)
   wherein the polypeptide has catalase activity belonging to EC 1.11.1.6. Examples of proteins that exhibit catalase activity and have an amino acid sequence that is at least 70% identical to one or more of SEQ ID NOs: 10-12 are set forth herein as SEQ ID NOs: 2252-2296.

[0147] In some such embodiments, the protein is derived from Aspergillus, Myceliophthora, Penicillium, Rasamsonia, Talaromyces or Thermoascus. For example, in some embodiments, the protein is a native Aspergillus, Myceliophthora, Penicillium, Rasamsonia, Talaromyces or Thermoascus catalase or is a functional fragment/mutant/variant of a native Aspergillus, Mycehophthora, Penicillium, Rasamsonia, Talaromyces or Thermoascus catalase.

[0148] In some embodiments, the protein is selected from the group consisting of:
[0149] a) a polypeptide having about/at least 60, 61, 62, 63, 64, 65, 66, 67, 68, 69, 70, 71, 72, 73, 74, 75, 76, 77, 78, 79, 80, 81, 82, 83, 84, 85, 86, 87, 88, 89, 90, 91, 92, 93, 94, 95, 96, 97, 98, 99 or 100% sequence identity to one or more of SEQ ID NO(s): 13;
[0150] b) a polypeptide having about/at least 60, 61, 62, 63, 64, 65, 66, 67, 68, 69, 70, 71, 72, 73, 74, 75, 76, 77, 78, 79, 80, 81, 82, 83, 84, 85, 86, 87, 88, 89, 90, 91, 92, 93, 94, 95, 96, 97, 98, 99 or 100% sequence identity to a mature polypeptide of any one of SEQ ID NO(s): 13;
[0151] c) a polypeptide encoded by a polynucleotide having about/at least 60, 61, 62, 63, 64, 65, 66, 67, 68, 69, 70, 71, 72, 73, 74, 75, 76, 77, 78, 79, 80, 81, 82, 83, 84, 85, 86, 87, 88, 89, 90, 91, 92, 93, 94, 95, 96, 97, 98, 99 or 100% sequence identity to one or more of SEQ ID NO(s): 104 or the cDNA sequence thereof,
[0152] d) a polypeptide derived from any one of SEQ ID NO(s): 13 by substitution, deletion, or insertion of one or more amino acids;
[0153] e) a polypeptide derived from a mature polypeptide of any one of SEQ ID NO(s): 13 by substitution, deletion, or insertion of one or more amino acids;
[0154] f) a polypeptide derived from the polypeptide of any one of a) through e) wherein the N- and/or C-terminal end has been extended by the addition of one or more amino acids; and
[0155] g) a fragment of the polypeptide of any one of a) through f)
   wherein the polypeptide has peroxidase activity belonging to EC 1.11.1.7. Examples of proteins that exhibit peroxidase activity and have an amino acid sequence that is at least 70% identical to SEQ ID NO: 13 are set forth herein as SEQ ID NOs: 2297-2381.

[0156] In some such embodiments, the protein is derived from Arthromyces or Coprinopsis. For example, in some embodiments, the protein is a native A Arthromyces or Coprinopsis peroxidase or is a functional fragment/mutant/variant of a native Arthromyces or Coprinopsis peroxidase.

[0157] Those skilled in the art will understand how to identify, isolate, characterize, produce, recover and formulate proteins having one or more peroxidase activities belonging to EC 1.11. See, e.g., CN105441400-A; CN108070574-A; CN112522227-A; EP2295582-A2; EP486067-A2; JP2007143405-A; JP2010044058-A; KR2011013726-A; US2005108791-A1; US2007118916-A1; US2008148432-A1; US2013074202-A1; US2020306342-A1; WO2004108765-A2; WO2006114616-A1; WO2007020428-A1; WO2007044043-A2; WO2009104622-A1; WO2010027755-A1; WO2011068297-A1; WO2012068236-A2; WO2012072777-A1; WO2012130120-A1; WO2013091547-A1; WO2014018368-A2; WO2014081700-A1; WO2014202616-A2; WO2015048332-A2; WO2015182941-A1; WO2017040907-A1; WO2018089391-A1; WO2020200321-A1; WO2020200322-A1; WO2022074170-A1; WO2022251056-A1; WO2023002065-A2; WO2023019266-A2; WO9317721-A1; WO9318166-A2; WO9510602-A1; WO9515391-A2; WO9810060-A1; WO9835026-A1.

[0158] In some embodiments, proteins of the present disclosure exhibit one or more oxygenase activities belonging to EC 1.14, such as oxygenase activities belonging to EC 1.14.16 (e.g., phenylalanine 4-monooxygenase activity belonging to EC 1.14.16.1, tyrosine 3-monooxygenase activity belonging to EC 1.14.16.2, tryptophan 5-monooxygenase activity belonging to EC 1.14.16.4, phenylalanine 3-monooxygenase activity belonging to EC 1.14.16.7), EC 1.14.18 (e.g., tyrosinase activity belonging to EC 1.14.18.1) and/or EC 1.14.99 (e.g., lytic chitin monooxygenase activity belonging to EC 1.14.99.53, lytic cellulose monooxygenase activity belonging to EC 1.14.99.54, lytic starch monooxygenase activity belonging to EC 1.14.99.55, lytic cellulose monooxygenase activity belonging to EC 1.14.99.56, lytic cellulose monooxygenase activity belonging to EC 1.14.99.56), and, optionally, comprise, consist essentially of, or consist of an amino acid sequence that is about/at least 60, 61, 62, 63, 64, 65, 66, 67, 68, 69, 70, 71, 72, 73, 74, 75, 76, 77, 78, 79, 80, 81, 82, 83, 84, 85, 86, 87, 88, 89, 90, 91, 92, 93, 94, 95, 96, 97, 98, 99 or 100% identical to one or more of the amino acid sequences set forth herein as SEQ ID NO(s): 14-15.

[0159] In some embodiments, the protein is selected from the group consisting of:
[0160] a) a polypeptide having about/at least 60, 61, 62, 63, 64, 65, 66, 67, 68, 69, 70, 71, 72, 73, 74, 75, 76, 77, 78, 79, 80, 81, 82, 83, 84, 85, 86, 87, 88, 89, 90, 91, 92, 93, 94, 95, 96, 97, 98, 99 or 100% sequence identity to one or more of SEQ ID NO(s): 14-15;
[0161] b) a polypeptide having about/at least 60, 61, 62, 63, 64, 65, 66, 67, 68, 69, 70, 71, 72, 73, 74, 75, 76, 77, 78, 79, 80, 81, 82, 83, 84, 85, 86, 87, 88, 89, 90, 91, 92, 93, 94, 95, 96, 97, 98, 99 or 100% sequence identity to a mature polypeptide of any one of SEQ ID NO(s): 14-15;
[0162] c) a polypeptide encoded by a polynucleotide having about/at least 60, 61, 62, 63, 64, 65, 66, 67, 68, 69, 70, 71, 72, 73, 74, 75, 76, 77, 78, 79, 80, 81, 82, 83, 84, 85, 86, 87, 88, 89, 90, 91, 92, 93, 94, 95, 96, 97, 98, 99 or 100% sequence identity to one or more of SEQ ID NO(s): 105-106 or the cDNA sequence thereof,
[0163] d) a polypeptide derived from any one of SEQ ID NO(s): 14-15 by substitution, deletion, or insertion of one or more amino acids;
[0164] e) a polypeptide derived from a mature polypeptide of any one of SEQ ID NO(s): 14-15 by substitution, deletion, or insertion of one or more amino acids;
[0165] f) a polypeptide derived from the polypeptide of any one of a) through e) wherein the N- and/or C-terminal end has been extended by the addition of one or more amino acids; and
[0166] g) a fragment of the polypeptide of any one of a) through f)
   wherein the polypeptide has lytic cellulose monooxygenase activity belonging to EC 1.14.99.56. Examples of proteins that exhibit lytic cellulose monooxygenase activity and have an amino acid sequence that is at least 70% identical to one or more of SEQ ID NOs: 14-15 are set forth herein as SEQ ID NOs: 2382-2755.

[0167] In some such embodiments, the protein is derived from Penicillium, Rasamsonia, or Thermoascus. For example, in some embodiments, the protein is a native Penicillium, Rasamsonia, or Thermoascus monooxygenase or is a functional fragment/mutant/variant of a native Penicillium, Rasamsonia, or Thermoascus monooxygenase.

[0168] Those skilled in the art will understand how to identify, isolate, characterize, produce, recover and formulate proteins having one or more oxygenase activities belonging to EC 1.14. See, e.g., CN103232949-A; CN103255072-A; CN106544329-A; CN109554355-A; CN110093326-A; JP2016039821-A; US2008299613-A1; US2011099671-A1; US2014075603-A1; US2018019412-A1; US2019153414-A1; WO2011080267-A2; WO2011121768-A1; WO2011153516-A2; WO2012000892-A1; WO2012021394-A1; WO2012021395-A1; WO2012044835-A1; WO2012044836-A1; WO2012068509-A1; WO2012089023-A1; WO2013028915-A2; WO2013036898-A2; WO2013110242-A1; WO2013119302-A2; WO2014085251-A1; WO2014093835-A1; WO2014138983-A1; WO2014140165-A1; WO2014202616-A2; WO2014202711-A1; WO2015105835-A1; WO2015187935-A1; WO2016045569-A1; WO2016090473-A1; WO2016145358-A1; WO2017070219-A1; WO2018019948-A1; WO2018106656-A1; WO2018142002-A1; WO2019005755-A1; WO2019083831-A1; WO2019229228-A1.

[0169] In some embodiments, proteins of the present disclosure exhibit one or more catalytic activities belonging to Enzyme Commission classification number 2 (EC 2). For example, in some embodiments, proteins of the present disclosure exhibit aminoacyltransferase activity useful for a) preventing/treating/suppressing/eliminating/reducing the detrimental effects of infestations/infections of/by various pests, including, but not limited to, phytopathogenic pests, such as acarids, bacteria, fungi, gastropods, insects, nematodes, oomycetes, protozoa, viruses and weeds; b) reducing one or more aspects of disease severity in plants affected by one or more phytopathogenic pests; c) pretreating surfaces/substances that are susceptible to infestation/infection by pests; d) cleaning surfaces/substances that are infested/infected by pests; e) enhancing the environments in which plants are grown by; f) improving nutrient availability in plant growth media; g) reducing the amounts of exogenous fertilizer needed to achieve a desired result; h) improving plant growth, development, and yield characteristics; i) prolonging the shelf-life of harvested plants and plant parts; j) delaying/hastening the ripening of a plant or plant part; k) improving the efficacy of chemical pesticides; and/or l) reducing chemical-pesticide-induced resistance/phytotoxicity.

[0170] In some embodiments, proteins of the present disclosure exhibit transferase activity belonging to EC 2 and, optionally, comprise, consist essentially of, or consist of an amino acid sequence that is about/at least 60, 61, 62, 63, 64, 65, 66, 67, 68, 69, 70, 71, 72, 73, 74, 75, 76, 77, 78, 79, 80, 81, 82, 83, 84, 85, 86, 87, 88, 89, 90, 91, 92, 93, 94, 95, 96, 97, 98, 99 or 100% identical to one or more of the amino acid sequences set forth herein as SEQ ID NO(s): 16 and 2756-2769.

[0171] In some embodiments, proteins of the present disclosure exhibit one or more acyltransferase activities belonging to EC 2.3, such as aminoacyl transferase activities belonging to EC 2.3.2 (e.g., D-glutamyl transferase activity belonging to EC 2.3.2.1, gamma-glutamyl transferase activity belong to EC 2.3.2.2, aspartyl transferase activity belonging to EC 2.3.2.7, protein-glutamine gamma-glutamyl transferase activity belonging to EC 2.3.2.13, D-alanine gamma-glutamyl transferase activity belonging to EC 2.3.2.14), and, optionally, comprise, consist essentially of, or consist of an amino acid sequence that is about/at least 60, 61, 62, 63, 64, 65, 66, 67, 68, 69, 70, 71, 72, 73, 74, 75, 76, 77, 78, 79, 80, 81, 82, 83, 84, 85, 86, 87, 88, 89, 90, 91, 92, 93, 94, 95, 96, 97, 98, 99 or 100% identical to one or more of the amino acid sequence set forth herein as SEQ ID NO: 16.

[0172] In some embodiments, the protein is selected from the group consisting of:
[0173] a) a polypeptide having about/at least 60, 61, 62, 63, 64, 65, 66, 67, 68, 69, 70, 71, 72, 73, 74, 75, 76, 77, 78, 79, 80, 81, 82, 83, 84, 85, 86, 87, 88, 89, 90, 91, 92, 93, 94, 95, 96, 97, 98, 99 or 100% sequence identity to one or more of SEQ ID NO(s): 16;
[0174] b) a polypeptide having about/at least 60, 61, 62, 63, 64, 65, 66, 67, 68, 69, 70, 71, 72, 73, 74, 75, 76, 77, 78, 79, 80, 81, 82, 83, 84, 85, 86, 87, 88, 89, 90, 91, 92, 93, 94, 95, 96, 97, 98, 99 or 100% sequence identity to a mature polypeptide of any one of SEQ ID NO(s): 16;
[0175] c) a polypeptide encoded by a polynucleotide having about/at least 60, 61, 62, 63, 64, 65, 66, 67, 68, 69, 70, 71, 72, 73, 74, 75, 76, 77, 78, 79, 80, 81, 82, 83, 84, 85, 86, 87, 88, 89, 90, 91, 92, 93, 94, 95, 96, 97, 98, 99 or 100% sequence identity to one or more of SEQ ID NO(s): 107 or the cDNA sequence thereof;
[0176] d) a polypeptide derived from any one of SEQ ID NO(s): 16 by substitution, deletion, or insertion of one or more amino acids;
[0177] e) a polypeptide derived from a mature polypeptide of any one of SEQ ID NO(s): 16 by substitution, deletion, or insertion of one or more amino acids;
[0178] f) a polypeptide derived from the polypeptide of any one of a) through e) wherein the N- and/or C-terminal end has been extended by the addition of one or more amino acids; and
[0179] g) a fragment of the polypeptide of any one of a) through f)
   wherein the polypeptide has gamma-glutamyl transferase activity belonging to EC 2.3.2.2. Examples of proteins that exhibit gamma-glutamyl transferase activity and have an amino acid sequence that is at least 70% identical to SEQ ID NO: 16 are set forth herein as SEQ ID NOs: 2756-2769.

[0180] In some such embodiments, the protein is derived from Bacillus. For example, in some embodiments, the protein is a native Bacillus gamma-glutamyl transferase or is a fragment/mutant/variant of a native Bacillus gamma-glutamyl transferase.

[0181] Those skilled in the art will understand how to identify, isolate, characterize, produce, recover and formulate proteins having one or more acyltransferase activities belonging to EC 2.3. See, e.g., CN107828754-A; CN108611333-A; CN108929866-A; CN112111468-A; CN114806988-A; EP441353-A; KR1814024-B1; WO2003087149-A2; WO2005075652-A1; WO2014081884-A1; WO2015048332-A2; WO2018234382-A1.

[0182] In some embodiments, proteins of the present disclosure exhibit one or more catalytic activities belonging to Enzyme Commission classification number 3 (EC 3). For example, in some embodiments, proteins of the present disclosure exhibit lipase, triacylglycerol lipase, pectinesterase, phospholipase, lysophospholipase, cutinase, amylase, glucosidase, galactosidase, cellulase, glucanase, xylanase, ceramidase, dextranase, chitinase, chitosanase, galacturonase, fucosidase, lysozymes, xylosidase, lucosidass, pullulanase, mannosidase, amidase, aminidase, maltohydrolases, cellobiosidase, pectinase, mannanase, aminopeptidase, serine peptidase and/or metallopeptidase, asparaginase and/or glutaminase activity useful for a) prevent-ing/treating/suppressing/eliminat-ing/reducing the detrimental effects of infestations/infections of/by various pests, including, but not limited to, phytopathogenic posts, such as acarids, bacteria, fungi, gastropods, insects, nematodes, oomycetes, protozoa, viruses and weeds; b) reducing one or more aspects of disease severity in plants affected by one or more phytopathogenic pests; c) pretreating surfaces/substances that are susceptible to infestation/infection by pests; d) cleaning surfaces/substances that are infested/infected by pests; e) enhancing the environments in which plants are grown by; f) improving nutrient availability in plant growth media; g) reducing the amounts of exogenous fertilizer needed to achieve a desired result; h) improving plant growth, development, and yield characteristics; i) prolonging the shelf-life of harvested plants and plant parts; j) delaying/hastening the ripening of a plant or plant part; k) improving the efficacy of chemical pesticides; and/or l) reducing chemical-pesticide-induced resistance/phytotoxicity.

[0183] In some embodiments, proteins of the present disclosure exhibit esterase activity belonging to EC 3 and, optionally, comprise, consist essentially of, or consist of an amino acid sequence that is about/at least 60, 61, 62, 63, 64, 65, 66, 67, 68, 69, 70, 71, 72, 73, 74, 75, 76, 77, 78, 79, 80, 81, 82, 83, 84, 85, 86, 87, 88, 89, 90, 91, 92, 93, 94, 95, 96, 97, 98, 99 or 100% identical to one or more of the amino acid sequences set forth herein as SEQ ID NO(s): 17-90 and 2770-72141.

[0184] In some embodiments, proteins of the present disclosure exhibit one or more esterase activities belonging to EC 3.1, such as lipase activities belonging to EC 3.1.1 (e.g., triacylglycerol lipase activity belong to EC 3.1.1.3, phospholipase A₂ activity belonging to EC 3.1.1.4, lysophospholipase activity belonging to 3.1.1.5, pectinesterase activity belonging to 3.1.1.11, phospholipase A₁ activity belonging to 3.1.1.32, lipoprotein lipase activity belonging to EC 3.1.1.34, cutinase activity belonging to 3.1.1.74), phosphatase activities belonging to EC 3.1.3 (e.g., alkaline phosphatase activity belonging to EC 3.1.3.1, acid phosphatase activity belonging to EC 3.1.3.2, 3-phytase activity belonging to EC 3.1.3.8, glucose-6-phosphatase activity belonging to EC 3.1.3.9, glucose-1-phosphatase activity belonging to EC 3.1.3.10, fructose-biphosphatase activity belonging to EC 3.1.3.11, sugar-phosphatase activity belonging to EC 3.1.3.23, 4-phytase activity belonging to EC 3.1.3.26, fructose-2,6-biphosphate 2-phosphatase activity belonging to EC3.1.3.46, fructose-2,6-biphosphate 6-phosphatase activity belonging to EC 3.1.3.54, 5-phytase activity belonging to EC 3.1.3.72, lipid-phosphate phosphatase activity belonging to EC 3.1.3.76), and/or hydrolase activities belonging to EC 3.1.4 (e.g., phospholipase C activity belonging to 3.1.4.3, phospholipase D activity belonging to EC 3.1.4.4, phoshoinositide phospholipase C activity belonging to 3.1.4.11), and, optionally, comprise, consist essentially of, or consist of an amino acid sequence that is about/at least 60, 61, 62, 63, 64, 65, 66, 67, 68, 69, 70, 71, 72, 73, 74, 75, 76, 77, 78, 79, 80, 81, 82, 83, 84, 85, 86, 87, 88, 89, 90, 91, 92, 93, 94, 95, 96, 97, 98, 99 or 100%/identical to one or more of the amino acid sequences set forth herein as SEQ ID NO(s): 17-33, 72147 and 72149.

[0185] In some embodiments, the protein is selected from the group consisting of
[0186] a) a polypeptide having about/at least 60, 61, 62, 63, 64, 65, 66, 67, 68, 69, 70, 71, 72, 73, 74, 75, 76, 77, 78, 79, 80, 81, 82, 83, 84, 85, 86, 87, 88, 89, 90, 91, 92, 93, 94, 95, 96, 97, 98, 99 or 100% sequence identity to one or more of SEQ ID NO(s): 17-22;
[0187] b) a polypeptide having about/at least 60, 61, 62, 63, 64, 65, 66, 67, 68, 69, 70, 71, 72, 73, 74, 75, 76, 77, 78, 79, 80, 81, 82, 83, 84, 85, 86, 87, 88, 89, 90, 91, 92, 93, 94, 95, 96, 97, 98, 99 or 100% sequence identity to a mature polypeptide of any one of SEQ ID NO(s): 17-22;
[0188] c) a polypeptide encoded by a polynucleotide having about/at least 60, 61, 62, 63, 64, 65, 66, 67, 68, 69, 70, 71, 72, 73, 74, 75, 76, 77, 78, 79, 80, 81, 82, 83, 84, 85, 86, 87, 88, 89, 90, 91, 92, 93, 94, 95, 96, 97, 98, 99 or 100% sequence identity to one or more of SEQ ID NO(s): 108-113 or the cDNA sequence thereof;
[0189] d) a polypeptide derived from any one of SEQ ID NO(s): 17-22 by substitution, deletion, or insertion of one or more amino acids;
[0190] e) a polypeptide derived from a mature polypeptide of any one of SEQ ID NO(s): 17-22 by substitution, deletion, or insertion of one or more amino acids;
[0191] f) a polypeptide derived from the polypeptide of any one of a) through e) wherein the N- and/or C-terminal end has been extended by the addition of one or more amino acids; and
[0192] g) a fragment of the polypeptide of any one of a) through f)
   wherein the polypeptide has triacylglycerol lipase activity belonging to EC 3.1.1.3. Examples of proteins that exhibit triacylglycerol lipase activity and have an amino acid sequence that is at least 70% identical to one or more of SEQ ID NOs: 17-22 are set forth herein as SEQ ID NOs: 2778-10223.

[0193] In some embodiments, the protein is derived from Aspergillus, Bacillus, Cryphonectria, Fusarium, Haloquadratum, Humicola, Penicillium, Scytalidium, Talaromyces, Thermomyces or Thermus. For example, in some embodiments, the protein is a native Aspergillus, Bacillus, Cryphonectria, Fusarium, Haloquadratum, Humicola, Penicillium, Scytalidium, Talaromyces, Thermomyces or Thermus triacylglycerol lipase or is a fragment/mutant/variant of a native Aspergillus, Bacillus, Cryphonectria, Fusarium, Haloquadratum, Humicola, Penicillium, Scytalidium, Talaromyces, Thermomyces or Thermus triacylglycerol lipase.

[0194] In some embodiments, the protein is selected from the group consisting of:
[0195] a) a polypeptide having about/at least 60, 61, 62, 63, 64, 65, 66, 67, 68, 69, 70, 71, 72, 73, 74, 75, 76, 77, 78, 79, 80, 81, 82, 83, 84, 85, 86, 87, 88, 89, 90, 91, 92, 93, 94, 95, 96, 97, 98, 99 or 100% sequence identity to one or more of SEQ ID NO(s): 23;
[0196] b) a polypeptide having about/at least 60, 61, 62, 63, 64, 65, 66, 67, 68, 69, 70, 71, 72, 73, 74, 75, 76, 77, 78, 79, 80, 81, 82, 83, 84, 85, 86, 87, 88, 89, 90, 91, 92, 93, 94, 95, 96, 97, 98, 99 or 100% sequence identity to a mature polypeptide of any one of SEQ ID NO(s): 23;
[0197] c) a polypeptide encoded by a polynucleotide having about/at least 60, 61, 62, 63, 64, 65, 66, 67, 68, 69, 70, 71, 72, 73, 74, 75, 76, 77, 78, 79, 80, 81, 82, 83, 84, 85, 86, 87, 88, 89, 90, 91, 92, 93, 94, 95, 96, 97, 98, 99 or 100% sequence identity to one or more of SEQ ID NO(s): 114 or the cDNA sequence thereof,
[0198] d) a polypeptide derived from any one of SEQ ID NO(s): 23 by substitution, deletion, or insertion of one or more amino acids;
[0199] e) a polypeptide derived from a mature polypeptide of any one of SEQ ID NO(s): 23 by substitution, deletion, or insertion of one or more amino acids;
[0200] f) a polypeptide derived from the polypeptide of any one of a) through e) wherein the N- and/or C-terminal end has been extended by the addition of one or more amino acids; and
[0201] g) a fragment of the polypeptide of any one of a) through f)
   wherein the polypeptide has triacylglycerol lipase activity belonging to EC 3.1.1.3 and/or phospholipase A₁ activity belonging to EC 3.1.1.32. Examples of proteins that exhibit triacylglycerol lipase activity and/or phospholipase A₁ activity and have an amino acid sequence that is at least 70% identical to SEQ ID NO: 23 are set forth herein as SEQ ID NOs: 10243-15978.

[0202] In some embodiments, the protein is derived from Aspergillus, Bacillus, Fusarium, Struthio, Talaromyces or Thermomyces. For example, in some embodiments, the protein is a native Aspergillus, Bacillus, Fusarium, Struthio, Talaromyces or Thermomyces triacylglycerol lipase or is a fragment/mutant/variant of a native Aspergillus, Bacillus, Fusarium, Struthio, Talaromyces or Thermomyces triacylglycerol lipase.

[0203] In some embodiments, the protein is derived from Aspergillus, Bacillus, Fusarium, Struthio, Talaromyces or Thermomyces. For example, in some embodiments, the protein is a native Aspergillus, Bacillus, Fusarium, Struthio, Talaromyces or Thermomyces phospholipase A₁ or is a fragment/mutant/variant of a native Aspergillus, Bacillus, Fusarium, Struthio, Talaromyces or Thermomyces phospholipase A₁.

[0204] In some embodiments, the protein is selected from the group consisting of:
[0205] a) a polypeptide having about/at least 60, 61, 62, 63, 64, 65, 66, 67, 68, 69, 70, 71, 72, 73, 74, 75, 76, 77, 78, 79, 80, 81, 82, 83, 84, 85, 86, 87, 88, 89, 90, 91, 92, 93, 94, 95, 96, 97, 98, 99 or 100% sequence identity to one or more of SEQ ID NO(s): 24;
[0206] b) a polypeptide having about/at least 60, 61, 62, 63, 64, 65, 66, 67, 68, 69, 70, 71, 72, 73, 74, 75, 76, 77, 78, 79, 80, 81, 82, 83, 84, 85, 86, 87, 88, 89, 90, 91, 92, 93, 94, 95, 96, 97, 98, 99 or 100% sequence identity to a mature polypeptide of any one of SEQ ID NO(s): 24;
[0207] c) a polypeptide encoded by a polynucleotide having about/at least 60, 61, 62, 63, 64, 65, 66, 67, 68, 69, 70, 71, 72, 73, 74, 75, 76, 77, 78, 79, 80, 81, 82, 83, 84, 85, 86, 87, 88, 89, 90, 91, 92, 93, 94, 95, 96, 97, 98, 99 or 100% sequence identity to one or more of SEQ ID NO(s): 115 or the cDNA sequence thereof,
[0208] d) a polypeptide derived from any one of SEQ ID NO(s): 24 by substitution, deletion, or insertion of one or more amino acids;
[0209] e) a polypeptide derived from a mature polypeptide of any one of SEQ ID NO(s): 24 by substitution, deletion, or insertion of one or more amino acids;
[0210] f) a polypeptide derived from the polypeptide of any one of a) through e) wherein the N- and/or C-terminal end has been extended by the addition of one or more amino acids; and
[0211] g) a fragment of the polypeptide of any one of a) through f)
   wherein the polypeptide has lysophospholipase activity belonging to EC 3.1.1.5. Examples of proteins that exhibit lysophospholipase activity and have an amino acid sequence that is at least 70% identical to SEQ ID NO: 24 are set forth herein as SEQ ID NOs: 15979-15981.

[0212] In some embodiments, the protein is derived from Aspergillus. For example, in some embodiments, the protein is a native Aspergillus lysophospholipase or is a fragment/mutant/variant of a native Aspergillus lysophospholipase.

[0213] In some embodiments, the protein is selected from the group consisting of:
[0214] a) a polypeptide having about/at least 60, 61, 62, 63, 64, 65, 66, 67, 68, 69, 70, 71, 72, 73, 74, 75, 76, 77, 78, 79, 80, 81, 82, 83, 84, 85, 86, 87, 88, 89, 90, 91, 92, 93, 94, 95, 96, 97, 98, 99 or 100% sequence identity to one or more of SEQ ID NO(s): 25;
[0215] b) a polypeptide having about/at least 60, 61, 62, 63, 64, 65, 66, 67, 68, 69, 70, 71, 72, 73, 74, 75, 76, 77, 78, 79, 80, 81, 82, 83, 84, 85, 86, 87, 88, 89, 90, 91, 92, 93, 94, 95, 96, 97, 98, 99 or 100% sequence identity to a mature polypeptide of any one of SEQ ID NO(s): 25;
[0216] c) a polypeptide encoded by a polynucleotide having about/at least 60, 61, 62, 63, 64, 65, 66, 67, 68, 69, 70, 71, 72, 73, 74, 75, 76, 77, 78, 79, 80, 81, 82, 83, 84, 85, 86, 87, 88, 89, 90, 91, 92, 93, 94, 95, 96, 97, 98, 99 or 100% sequence identity to one or more of SEQ ID NO(s): 116 or the cDNA sequence thereof,
[0217] d) a polypeptide derived from any one of SEQ ID NO(s): 25 by substitution, deletion, or insertion of one or more amino acids;
[0218] e) a polypeptide derived from a mature polypeptide of any one of SEQ ID NO(s): 25 by substitution, deletion, or insertion of one or more amino acids;
[0219] f) a polypeptide derived from the polypeptide of any one of a) through e) wherein the N- and/or C-terminal end has been extended by the addition of one or more amino acids; and
[0220] g) a fragment of the polypeptide of any one of a) through f)
   wherein the polypeptide has pectinesterase activity belonging to EC 3.1.1.11. Examples of proteins that exhibit pectinesterase activity and have an amino acid sequence that is at least 70% identical to SEQ ID NO: 25 are set forth herein as SEQ ID NOs: 2770-2777.

[0221] In some embodiments, the protein is derived from Aspergillus. For example, in some embodiments, the protein is a native Aspergillus pectinesterase or is a fragment/mutant/variant of a native Aspergillus pectinesterase.

[0222] In some embodiments, the protein is selected from the group consisting of:
[0223] a) a polypeptide having about/at least 60, 61, 62, 63, 64, 65, 66, 67, 68, 69, 70, 71, 72, 73, 74, 75, 76, 77, 78, 79, 80, 81, 82, 83, 84, 85, 86, 87, 88, 89, 90, 91, 92, 93, 94, 95, 96, 97, 98, 99 or 100% sequence identity to one or more of SEQ ID NO(s): 26;
[0224] b) a polypeptide having about/at least 60, 61, 62, 63, 64, 65, 66, 67, 68, 69, 70, 71, 72, 73, 74, 75, 76, 77, 78, 79, 80, 81, 82, 83, 84, 85, 86, 87, 88, 89, 90, 91, 92, 93, 94, 95, 96, 97, 98, 99 or 100% sequence identity to a mature polypeptide of any one of SEQ ID NO(s): 26;
[0225] c) a polypeptide encoded by a polynucleotide having about/at least 60, 61, 62, 63, 64, 65, 66, 67, 68, 69, 70, 71, 72, 73, 74, 75, 76, 77, 78, 79, 80, 81, 82, 83, 84, 85, 86, 87, 88, 89, 90, 91, 92, 93, 94, 95, 96, 97, 98, 99 or 100% sequence identity to one or more of SEQ ID NO(s): 117 or the cDNA sequence thereof,
[0226] d) a polypeptide derived from any one of SEQ ID NO(s): 26 by substitution, deletion, or insertion of one or more amino acids;
[0227] e) a polypeptide derived from a mature polypeptide of any one of SEQ ID NO(s): 26 by substitution, deletion, or insertion of one or more amino acids;
[0228] f) a polypeptide derived from the polypeptide of any one of a) through e) wherein the N- and/or C-terminal end has been extended by the addition of one or more amino acids; and
[0229] g) a fragment of the polypeptide of any one of a) through f)
   wherein the polypeptide has phospholipase A₁ activity belonging to EC 3.1.1.32. Examples of proteins that exhibit phospholipase A₁ activity and have an amino acid sequence that is at least 70% identical to SEQ ID NO: 26 are set forth herein as SEQ ID NOs: 10224-10242.

[0230] In some embodiments, the protein is derived from Evansstolkia. For example, in some embodiments, the protein is a native Evansstolkia phospholipase A₁ or is a fragment/mutant/variant of a native Evansstolkia phospholipase A₁.

[0231] In some embodiments, the protein is selected from the group consisting of:
[0232] a) a polypeptide having about/at least 60, 61, 62, 63, 64, 65, 66, 67, 68, 69, 70, 71, 72, 73, 74, 75, 76, 77, 78, 79, 80, 81, 82, 83, 84, 85, 86, 87, 88, 89, 90, 91, 92, 93, 94, 95, 96, 97, 98, 99 or 100% sequence identity to one or more of SEQ ID NO(s): 27-31, 72147 and 72149;
[0233] b) a polypeptide having about/at least 60, 61, 62, 63, 64, 65, 66, 67, 68, 69, 70, 71, 72, 73, 74, 75, 76, 77, 78, 79, 80, 81, 82, 83, 84, 85, 86, 87, 88, 89, 90, 91, 92, 93, 94, 95, 96, 97, 98, 99 or 100% sequence identity to a mature polypeptide of any one of SEQ ID NO(s): 27-31, 72147 and 72149;
[0234] c) a polypeptide encoded by a polynucleotide having about/at least 60, 61, 62, 63, 64, 65, 66, 67, 68, 69, 70, 71, 72, 73, 74, 75, 76, 77, 78, 79, 80, 81, 82, 83, 84, 85, 86, 87, 88, 89, 90, 91, 92, 93, 94, 95, 96, 97, 98, 99 or 100% sequence identity to one or more of SEQ ID NO(s): 118-122, 72148 and 72150 or the cDNA sequence thereof;
[0235] d) a polypeptide derived from any one of SEQ ID NO(s): 27-31, 72147 and 72149 by substitution, deletion, or insertion of one or more amino acids;
[0236] e) a polypeptide derived from a mature polypeptide of any one of SEQ ID NO(s): 27-31, 72147 and 72149 by substitution, deletion, or insertion of one or more amino acids;
[0237] f) a polypeptide derived from the polypeptide of any one of a) through e) wherein the N- and/or C-terminal end has been extended by the addition of one or more amino acids; and
[0238] g) a fragment of the polypeptide of any one of a) through f)
   wherein the polypeptide has cutinase activity belonging to EC 3.1.1.74. Examples of proteins that exhibit cutinase activity and have an amino acid sequence that is at least 70% identical to one or more of SEQ ID NOs: 27-31, 72147 and 72149 are set forth herein as SEQ ID NOs: 15982-16004.

[0239] In some embodiments, the protein is derived from Acrophialophora, Ascomycota, Chaetomium, Humicola, Hypocrea, Myceliophthora, Myriococcum, Pyrenophora, Thermochaetoides or Trichoderma. For example, in some embodiments, the protein is a native Acrophialophora, Ascomycota, Chaetomium, Humicola, Hypocrea, Myceliophthora, Myriococcum, Pyrenophora, Thermochaetoides or Trichoderma cutinase or is a fragment/mutant/variant of a native Acrophialophora, Ascomycota, Chaetomium, Humicola, Hypocrea, Myceliophthora, Myriococcum, Pyrenophora, Thermochaetoides or Trichoderma cutinase.

[0240] In some embodiments, the protein is selected from the group consisting of:
[0241] a) a polypeptide having about/at least 60, 61, 62, 63, 64, 65, 66, 67, 68, 69, 70, 71, 72, 73, 74, 75, 76, 77, 78, 79, 80, 81, 82, 83, 84, 85, 86, 87, 88, 89, 90, 91, 92, 93, 94, 95, 96, 97, 98, 99 or 100% sequence identity to one or more of SEQ ID NO(s): 32;
[0242] b) a polypeptide having about/at least 60, 61, 62, 63, 64, 65, 66, 67, 68, 69, 70, 71, 72, 73, 74, 75, 76, 77, 78, 79, 80, 81, 82, 83, 84, 85, 86, 87, 88, 89, 90, 91, 92, 93, 94, 95, 96, 97, 98, 99 or 100% sequence identity to a mature polypeptide of any one of SEQ ID NO(s): 32;
[0243] c) a polypeptide encoded by a polynucleotide having about/at least 60, 61, 62, 63, 64, 65, 66, 67, 68, 69, 70, 71, 72, 73, 74, 75, 76, 77, 78, 79, 80, 81, 82, 83, 84, 85, 86, 87, 88, 89, 90, 91, 92, 93, 94, 95, 96, 97, 98, 99 or 100% sequence identity to one or more of SEQ ID NO(s): 123 or the cDNA sequence thereof;
[0244] d) a polypeptide derived from any one of SEQ ID NO(s): 32 by substitution, deletion, or insertion of one or more amino acids;
[0245] e) a polypeptide derived from a mature polypeptide of any one of SEQ ID NO(s): 32 by substitution, deletion, or insertion of one or more amino acids;
[0246] f) a polypeptide derived from the polypeptide of any one of a) through e) wherein the N- and/or C-terminal end has been extended by the addition of one or more amino acids; and
[0247] g) a fragment of the polypeptide of any one of a) through f)
   wherein the polypeptide has phospholipase C activity belonging to EC 3.1.4.3. Examples of proteins that exhibit phospholipase C activity and have an amino acid sequence that is at least 70% identical to SEQ ID NO: 32 are set forth herein as SEQ ID NOs: 16396-16412.

[0248] In some embodiments, the protein is derived from Pseudomonas. For example, in some embodiments, the protein is a native Pseudomonas phospholipase C or is a fragment/mutant/variant of a native Pseudomonas phospholipase C.

[0249] In some embodiments, the protein is selected from the group consisting of:
[0250] a) a polypeptide having about/at least 60, 61, 62, 63, 64, 65, 66, 67, 68, 69, 70, 71, 72, 73, 74, 75, 76, 77, 78, 79, 80, 81, 82, 83, 84, 85, 86, 87, 88, 89, 90, 91, 92, 93, 94, 95, 96, 97, 98, 99 or 100% sequence identity to one or more of SEQ ID NO(s): 33;
[0251] b) a polypeptide having about/at least 60, 61, 62, 63, 64, 65, 66, 67, 68, 69, 70, 71, 72, 73, 74, 75, 76, 77, 78, 79, 80, 81, 82, 83, 84, 85, 86, 87, 88, 89, 90, 91, 92, 93, 94, 95, 96, 97, 98, 99 or 100% sequence identity to a mature polypeptide of any one of SEQ ID NO(s): 33;
[0252] c) a polypeptide encoded by a polynucleotide having about/at least 60, 61, 62, 63, 64, 65, 66, 67, 68, 69, 70, 71, 72, 73, 74, 75, 76, 77, 78, 79, 80, 81, 82, 83, 84, 85, 86, 87, 88, 89, 90, 91, 92, 93, 94, 95, 96, 97, 98, 99 or 100% sequence identity to one or more of SEQ ID NO(s): 124 or the cDNA sequence thereof,
[0253] d) a polypeptide derived from any one of SEQ ID NO(s): 33 by substitution, deletion, or insertion of one or more amino acids;
[0254] e) a polypeptide derived from a mature polypeptide of any one of SEQ ID NO(s): 33 by substitution, deletion, or insertion of one or more amino acids;
[0255] f) a polypeptide derived from the polypeptide of any one of a) through c) wherein the N- and/or C-terminal end has been extended by the addition of one or more amino acids; and
[0256] g) a fragment of the polypeptide of any one of a) through f)
   wherein the polypeptide has phosphoinositide phospholipase C activity belonging to EC 3.1.4.11. Examples of proteins that exhibit phosphoinositide phospholipase C activity and have an amino acid sequence that is at least 70% identical to one or more of SEQ ID NOs: 33 are set forth herein as SEQ ID NOs: 16005-16395.

[0257] In some embodiments, the protein is derived from Bacillus, Komagataella or Lysinibacillus. For example, in some embodiments, the protein is a native Bacillus, Komagataella or Lysinibacillus phosphoinositide phospholipase C or is a fragment/mutant/variant of a native Bacillus, Komagataella or Lysinibacillus phosphoinositide phospholipase C.

[0258] Those skilled in the art will understand how to identify, isolate, characterize, produce, recover and formulate proteins having one or more esterase activities belong to EC 3.1. See, e.g., CA2715086-A1; CN102604913-A; CN103045559-A; CN103243038-A; CN103555600-A; CN103865896-A; CN103981160-A; CN104293744-A; CN104878033-A; CN105087614-A; CN106591258-A; CN106632683-A; CN106635846-A; CN106676084-A; CN106884030-A; CN107151660-A; CN107488644-A; CN107488645-A; CN107488646-A; CN107488647-A; CN107488648-A; CN107815460-A; CN108118039-A; CN108239626-A; CN108239627-A; CN108277212-A; CN108315312-A; CN108359655-A; CN108913675-A; CN109321546-A; CN109468301-A; CN109776686-A; CN109929821-A; CN110129301-A; CN110760531-A; CN111378583-A; CN112175976-A; CN112574974-A; CN112592907-A; CN112608912-A; CN113025595-A; CN113025596-A; CN113122520-A; CN113215130-A; CN113338044-A; CN113736817-A; CN113755509-A; CN113846074-A; CN114317490-A; CN114621941-A; CN115521925-A; CN115717134-A; DE102016204813-A1; EP2145904-A1; EP2623586-; 2; EP305216-A; EP3091080-A1; EP3101108-A1; EP3101109-A1; EP3284811-A1; EP3287513-A1; EP3301145-A1; EP3301147-A1; EP3301156-A1; EP3301161-A1; EP3301162-A1; EP3301163-A1; EP3301165-A1; EP3301166-A1; EP3301169-A1; JP09249891-A; JP09249893-A; JP2019165727-A; US2005287250-A1; US2007173430-A1; US2009162480-A1; US2009217463-A1; US2009217464-A1; US2009221033-A1; US2009221034-A1; US2011312057-A1; US2013316458-A; US2018094228-A; US2019093054-A; US2020306342-A1; US2021015105-A1; US2022177812-A1; U.S. Pat. No. 9,102,933-B1; WO2000060063-A1; WO200011211-A1; WO200034450-A1; WO200127251-A1; WO200192502-A1; WO200255679-A2; WO200262973-A2; WO200266622-A2; WO200295127-A2; WO2003060112-A1; WO2003089620-A2; WO2004099400-A2; WO2004111216-A2; WO2005032496-A2; WO2005086900-A2; WO2006084470-A2; WO2006136159-A2; WO2006136160-A2; WO2007080197-A2; WO2007087243-A2; WO2007087318-A2; WO2007087319-A2; WO2007087508-A2; WO2008073169-A2; WO2008079685-A2; WO2008122640-A2; WO2009071550-A1; WO2009083607-A1; WO2009108941-A2; WO2009133177-A1; WO2011046812-A1; WO2011046815-A1; WO2012027282-A2; WO2012078741-A2; WO2012129548-A2; WO2012173658-A1; WO2013098205-A2; WO2013113622-A1; WO2013149858-A1; WO2013171072-A1; WO2013181760-A1; WO2014055778-A2; WO2014059360-A1; WO2014059541-A1; WO2014081700-A1; WO2014081884-A1; WO2014147219-A1; WO2014162001-A1; WO2014184164-A1; WO2014186464-A1; WO2015010009-A2; WO2015017045-A1; WO2015048332-A2; WO2015067161-A1; WO2015085920-A1; WO2015109405-A1; WO2015110058-A1; WO2015110562-A1; WO2015140275-A1; WO2015144780-A2; WO2015173426-A1; WO2016050661-A1; WO2016087401-A1; WO2016090472-A1; WO2016090473-A1; WO2016090474-A1; WO2016091870-A1; WO2016102356-A1; WO2016107567-A1; WO2016109758-A2; WO2016164596-A2; WO2017001673-A1; WO2017005640-A1; WO2017015233-A1; WO2017093318-A1; WO2017101801-A1; WO2017161091-A1; WO2017182666-A1; WO2018001959-A1; WO2018015295-A1; WO2018127486-A1; WO2018171552-A1; WO2018188667-A1; WO2019014118-A1; WO2019060574-A1; WO2019063499-A1; WO2019110462-A1; WO2019137289-A1; WO2019154951-A1; WO2019154952-A1; WO2019154954-A1; WO2019154955-A1; WO2019215078-A1; WO2019236717-A1; WO2020014407-A1; WO2020046613-A1; WO2020076697-A1; WO2020088393-A1; WO2020103861-A1; WO2020135657-A1; WO2020135658-A1; WO2020173817-A1; WO2020190782-A1; WO2021037878-A1; WO2021119304-A1; WO2021170799-A1; WO2021239267-A1; WO2022063699-A1; WO2022090361-A2; WO2022103725-A1; WO2022173694-A1; WO2023032952-A1; WO2023288294-A1; WO9205249-A; WO9219726-A1; WO9425575-A1; WO9425577-A1; WO9522615-A1; WO9613580-A1; WO9704079-A1; WO9707202-A1; WO9707205-A1; WO9707206-A1.

[0259] In some embodiments, proteins of the present disclosure exhibit one or more glycosylase activities belonging to EC 3.2, such as glycosidase activities belonging to EC 3.2.1 (e.g., alpha-amylase activity belong to EC 3.2.1.1, beta-amylase activity belong to EC 3.2.1.2, glucan 1,4-alpha-glucosidase activity belong to 3.2.1.3, cellulase activity belong to 3.2.1.4, endo-1,3(4)-beta-glucanase activity belong to 3.2.1.6, inulinase activity belong to 3.2.1.7, endo-1,4-beta-xylanase activity belong to 3.2.1.8, oligo-1,6-glucosidase activity belong to 3.2.1.10, dextranase activity belong to 3.2.1.11, chitinase activity belong to 3.2.1.14, endo-polygalacturonase (pectinase) activity belong to 3.2.1.15, lysozyme activity belong to 3.2.1.17, alpha-glucosidase activity belong to 3.2.1.20, beta-glucosidase activity belong to 3.2.1.21, alpha-galactosidase activity belong to 3.2.1.22, beta-galactosidase activity belong to 3.2.1.23, alpha-mannosidase activity belong to 3.2.1.24, beta-mannosidase activity belong to 3.2.1.25, beta-fructofuranosidase activity belong to 3.2.1.26, alpha,alpha-trehalase activity belong to 3.2.1.28, endo-1,3-beta-xylanase activity belong to 3.2.1.32, amylo-1,6-glucosidase activity belonging to EC3.2.1.33, xylan 1,4-beta-xylosidase activity belong to 3.2.1.37, glucan endo-1,3-beta-D-glucosidase activity belong to 3.2.1.39, pullulanase activity belong to 3.2.1.41, alpha-L-arabinofuranosidase activity belong to 3.2.1.55, glucan 1,3-beta-glucosidase activity belong to 3.2.1.58, glucan endo-1,3-alpha-glucosidase activity belong to 3.2.1.59, glucan 1,6-alpha-glucosidase activity belonging to EC 3.2.1.70, glucan endo-1,2-beta-glucosidase activity belonging to EC 3.2.1.71, xylan 1,3-beta-xylosidase activity belonging to EC 3.2.1.72, licheninase activity belong to 3.2.1.73, glucan 1,4-beta-glucosidase activity belonging to EC 3.2.1.74, glucan endo-1,6-beta-glucosidase activity belong to 3.2.1.75, mannan 1,2-(1,3)-alpha-mannosidase activity belonging to EC 3.2.1.77, mannan endo-1,4-O-mannosidase activity belonging to 3.2.1.78, glucan 1,3-alpha-glucosidase activity belonging to EC 3.2.1.84, cellulose 1,4-beta-cellobiosidase activity belong to 3.2.1.91, peptidoglycan beta-N-acetylmuramidase activity belonging to EC 3.2.1.92, endo-alpha-N-acetylgalactosaminidase activity belong to 3.2.1.97, mannan 1,4-mannobiosidase activity belonging to EC 3.2.1.100, mannan endo-1,6-alpha-mannosidase activity belong to 3.2.1.101, endogalactosaminidase activity belong to 3.2.1.109, 1,3-alpha-L-fucosidase activity belong to 3.2.1.111, 2-deoxyglucosidase activity belong to 3.2.1.112, glycoprotein endo-alpha-1,2-mannosidase activity belonging to EC 3.2.1.130, chitosanase activity belong to 3.2.1.132, glucan 1,4-alpha-maltohydrolase activity belong to 3.2.1.133, mannan exo-1,2-1,6-alpha-mannosidase activity belonging to EC 3.2.1.137, 1,6-alpha-D-mannosidase activity belonging to 3.2.1.163, 1,4-beta-cellobiosidase activity belonging to 3.2.1.176, galactan endo-beta-1,3-galactanase activity belonging to EC 3.2.1.181, alpha-mannan endo-1,2-alpha-mannanase activity belonging to EC 3.2.1.198, exo-chitinase activity belonging to EC 3.2.1.200, exo-chitinase activity belonging to EC 3.2.1.201), and, optionally, comprise, consist essentially of, or consist of an amino acid sequence that is about/at least 60, 61, 62, 63, 64, 65, 66, 67, 68, 69, 70, 71, 72, 73, 74, 75, 76, 77, 78, 79, 80, 81, 82, 83, 84, 85, 86, 87, 88, 89, 90, 91, 92, 93, 94, 95, 96, 97, 98, 99 or 100% identical to one or more of the amino acid sequences set forth herein as SEQ ID NO(s): 34-80, 45906 and 72144.

[0260] In some embodiments, the protein is selected from the group consisting of:
[0261] a) a polypeptide having about/at least 60, 61, 62, 63, 64, 65, 66, 67, 68, 69, 70, 71, 72, 73, 74, 75, 76, 77, 78, 79, 80, 81, 82, 83, 84, 85, 86, 87, 88, 89, 90, 91, 92, 93, 94, 95, 96, 97, 98, 99 or 100% sequence identity to one or more of SEQ ID NO(s): 34-40;
[0262] b) a polypeptide having about/at least 60, 61, 62, 63, 64, 65, 66, 67, 68, 69, 70, 71, 72, 73, 74, 75, 76, 77, 78, 79, 80, 81, 82, 83, 84, 85, 86, 87, 88, 89, 90, 91, 92, 93, 94, 95, 96, 97, 98, 99 or 100% sequence identity to a mature polypeptide of any one of SEQ ID NO(s): 34-40;
[0263] c) a polypeptide encoded by a polynucleotide having about/at least 60, 61, 62, 63, 64, 65, 66, 67, 68, 69, 70, 71, 72, 73, 74, 75, 76, 77, 78, 79, 80, 81, 82, 83, 84, 85, 86, 87, 88, 89, 90, 91, 92, 93, 94, 95, 96, 97, 98, 99 or 100% sequence identity to one or more of SEQ ID NO(s): 125-131 or the cDNA sequence thereof,
[0264] d) a polypeptide derived from any one of SEQ ID NO(s): 34-40 by substitution, deletion, or insertion of one or more amino acids;
[0265] e) a polypeptide derived from a mature polypeptide of any one of SEQ ID NO(s): 34-40 by substitution, deletion, or insertion of one or more amino acids;
[0266] f) a polypeptide derived from the polypeptide of any one of a) through e) wherein the N- and/or C-terminal end has been extended by the addition of one or more amino acids; and
[0267] g) a fragment of the polypeptide of any one of a) through f)
   wherein the polypeptide has alpha-amylase activity belonging to EC 3.2.1.1. Examples of proteins that exhibit alpha-amylase activity and have an amino acid sequence that is at least 70% identical to one or more of SEQ ID NOs: 34-40 are set forth herein as SEQ ID NOs: 16413-45041.

[0268] In some embodiments, the protein is derived from Alicyclobacillus, Alkalihalobacillus, Anoxybacillus, Aspergillus, Bacillus, Cytophaga, Exiguobacterium, Geobacillus, Hamigera, Homo sapiens, Jeotgalibacillus, Neosartorya, Penicillium, Priestia, Pyrococcus, Rasamsonia, Sutcliffiella or Thermoascus.

[0269] For example, in some embodiments, the protein is a native Alicyclobacillus, Alkalihalobacillus, Anoxybacillus, Aspergillus, Bacillus, Cytophaga, Exiguobacterium, Geobacillus, Hamigera, Homo sapiens, Jeotgalibacillus, Neosartorya, Penicillium, Priestia, Pyrococcus, Rasamsonia, Sutcliffiella or Thermoascus alpha-amylase or is a fragment/mutant/variant of a native Alicyclobacillus, Alkalihalobacillus, Anoxybacillus, Aspergillus, Bacillus, Cytophaga, Exiguobacterium, Geobacillus, Hamigera, Homo sapiens, Jeotgalibacillus, Neosartorya, Penicillium, Priestia, Pyrococcus, Rasamsonia, Sutcliffiella or Thermoascus alpha-amylase.

[0270] In some embodiments, the protein is selected from the group consisting of:
[0271] a) a polypeptide having about/at least 60, 61, 62, 63, 64, 65, 66, 67, 68, 69, 70, 71, 72, 73, 74, 75, 76, 77, 78, 79, 80, 81, 82, 83, 84, 85, 86, 87, 88, 89, 90, 91, 92, 93, 94, 95, 96, 97, 98, 99 or 100% sequence identity to one or more of SEQ ID NO(s): 41-42;
[0272] b) a polypeptide having about/at least 60, 61, 62, 63, 64, 65, 66, 67, 68, 69, 70, 71, 72, 73, 74, 75, 76, 77, 78, 79, 80, 81, 82, 83, 84, 85, 86, 87, 88, 89, 90, 91, 92, 93, 94, 95, 96, 97, 98, 99 or 100% sequence identity to a mature polypeptide of any one of SEQ ID NO(s): 41-42;
[0273] c) a polypeptide encoded by a polynucleotide having about/at least 60, 61, 62, 63, 64, 65, 66, 67, 68, 69, 70, 71, 72, 73, 74, 75, 76, 77, 78, 79, 80, 81, 82, 83, 84, 85, 86, 87, 88, 89, 90, 91, 92, 93, 94, 95, 96, 97, 98, 99 or 100% sequence identity to one or more of SEQ ID NO(s): 132-133 or the cDNA sequence thereof,
[0274] d) a polypeptide derived from any one of SEQ ID NO(s): 41-42 by substitution, deletion, or insertion of one or more amino acids;
[0275] e) a polypeptide derived from a mature polypeptide of any one of SEQ ID NO(s): 41-42 by substitution, deletion, or insertion of one or more amino acids;
[0276] f) a polypeptide derived from the polypeptide of any one of a) through e) wherein the N- and/or C-terminal end has been extended by the addition of one or more amino acids; and
[0277] g) a fragment of the polypeptide of any one of a) through f)
   wherein the polypeptide has glucan 1,4-alpha-glucosidase activity belonging to EC 3.2.1.3. Examples of proteins that exhibit glucan 1,4-alpha-glucosidase activity and have an amino acid sequence that is at least 70% identical to one or more of SEQ ID NOs: 41-42 are set forth herein as SEQ ID NOs: 45756-45904.

[0278] In some embodiments, the protein is derived from Aspergillus, Bos, Elaphocordyceps, Fusarium, Penicillium, Rasamsonia or Saccharomycopsis. For example, in some embodiments, the protein is a native Aspergillus, Bos, Elaphocordyceps, Fusarium, Penicillium, Rasamsonia or Saccharomycopsis glucan 1,4-alpha-glucosidase or is a fragment/mutant/variant of a native Aspergillus, Bos, Elaphocordyceps, Fusarium, Penicillium, Rasamsonia or Saccharomycopsis glucan 1,4-alpha-glucosidase.

[0279] In some embodiments, the protein is selected from the group consisting of:
[0280] a) a polypeptide having about/at least 60, 61, 62, 63, 64, 65, 66, 67, 68, 69, 70, 71, 72, 73, 74, 75, 76, 77, 78, 79, 80, 81, 82, 83, 84, 85, 86, 87, 88, 89, 90, 91, 92, 93, 94, 95, 96, 97, 98, 99 or 100% sequence identity to one or more of SEQ ID NO(s): 43-45;
[0281] b) a polypeptide having about/at least 60, 61, 62, 63, 64, 65, 66, 67, 68, 69, 70, 71, 72, 73, 74, 75, 76, 77, 78, 79, 80, 81, 82, 83, 84, 85, 86, 87, 88, 89, 90, 91, 92, 93, 94, 95, 96, 97, 98, 99 or 100% sequence identity to a mature polypeptide of any one of SEQ ID NO(s): 43-45;
[0282] c) a polypeptide encoded by a polynucleotide having about/at least 60, 61, 62, 63, 64, 65, 66, 67, 68, 69, 70, 71, 72, 73, 74, 75, 76, 77, 78, 79, 80, 81, 82, 83, 84, 85, 86, 87, 88, 89, 90, 91, 92, 93, 94, 95, 96, 97, 98, 99 or 100% sequence identity to one or more of SEQ ID NO(s): 134-136 or the cDNA sequence thereof;
[0283] d) a polypeptide derived from any one of SEQ ID NO(s): 43-45 by substitution, deletion, or insertion of one or more amino acids;
[0284] e) a polypeptide derived from a mature polypeptide of any one of SEQ ID NO(s): 43-45 by substitution, deletion, or insertion of one or more amino acids;
[0285] f) a polypeptide derived from the polypeptide of any one of a) through e) wherein the N- and/or C-terminal end has been extended by the addition of one or more amino acids; and
[0286] g) a fragment of the polypeptide of any one of a) through f)
   wherein the polypeptide has cellulase activity belonging to EC 3.2.1.4. Examples of proteins that exhibit cellulase activity and have an amino acid sequence that is at least 70% identical to one or more of SEQ ID NOs: 43-45 are set forth herein as SEQ ID NOs: 45913-48750.

[0287] In some embodiments, the protein is derived from Acremonium, Alteromonas, Ascomycota, Aspergillus, Bacillus, Chaetomium, Clonostachys, Corynascus, Cylindrocarpon, Escherichia, Fusarium, Humicola, Madurella, Melanocarpus, Myceliophthora, Neurospora, Podospora, Remersonia, Scytalidium, Sordaria, Staphylotrichum, Thermocarpiscus, Thermochaetoides, Thermothielavioides, Thielavia, Trichocladium, Trichothecium or Triticum. For example, in some embodiments, the protein is a native Acremonium, Alteromonas, Ascomycota. Aspergillus, Bacillus, Chaetomium, Clonostachys, Corynascus, Cylindrocarpon, Escherichia, Fusarium, Humicola, Madurella, Melanocarpus, Myceliophthora, Neurospora, Podospora, Remersonia, Scytalidium, Sordaria, Staphylotrichum, Thermocarpiscus, Thermochaetoides, Thermothielavioides, Thielavia, Trichocladium, Trichothecium or Triticum cellulase or is a fragment/mutant/variant of a native Acremonium, Alteromonas, Ascomycota, Aspergillus, Bacillus, Chaetomium, Clonostachys, Corynascus, Cylindrocarpon, Escherichia, Fusarium, Humicola, Madurella, Melanocarpus, Myceliophthora, Neurospora, Podospora, Remersonia, Scytalidium, Sordaria, Staphylotrichum, Thermocarpiscus, Thermochaetoides, Thermothielavioides, Thielavia, Trichocladium, Trichothecium or Triticum cellulase.

[0288] In some embodiments, the protein is selected from the group consisting of:
[0289] a) a polypeptide having about/at least 60, 61, 62, 63, 64, 65, 66, 67, 68, 69, 70, 71, 72, 73, 74, 75, 76, 77, 78, 79, 80, 81, 82, 83, 84, 85, 86, 87, 88, 89, 90, 91, 92, 93, 94, 95, 96, 97, 98, 99 or 100% sequence identity to one or more of SEQ ID NO(s): 46;
[0290] b) a polypeptide having about/at least 60, 61, 62, 63, 64, 65, 66, 67, 68, 69, 70, 71, 72, 73, 74, 75, 76, 77, 78, 79, 80, 81, 82, 83, 84, 85, 86, 87, 88, 89, 90, 91, 92, 93, 94, 95, 96, 97, 98, 99 or 100% sequence identity to a mature polypeptide of any one of SEQ ID NO(s): 46;
[0291] c) a polypeptide encoded by a polynucleotide having about/at least 60, 61, 62, 63, 64, 65, 66, 67, 68, 69, 70, 71, 72, 73, 74, 75, 76, 77, 78, 79, 80, 81, 82, 83, 84, 85, 86, 87, 88, 89, 90, 91, 92, 93, 94, 95, 96, 97, 98, 99 or 100% sequence identity to one or more of SEQ ID NO(s): 137 or the cDNA sequence thereof,
[0292] d) a polypeptide derived from any one of SEQ ID NO(s): 46 by substitution, deletion, or insertion of one or more amino acids;
[0293] e) a polypeptide derived from a mature polypeptide of any one of SEQ ID NO(s): 46 by substitution, deletion, or insertion of one or more amino acids;
[0294] f) a polypeptide derived from the polypeptide of any one of a) through e) wherein the N- and/or C-terminal end has been extended by the addition of one or more amino acids; and
[0295] g) a fragment of the polypeptide of any one of a) through f)
   wherein the polypeptide has endo-1,3(4)-beta-glucanase activity belonging to EC 3.2.1.6. Examples of proteins that exhibit endo-1,3(4)-beta-glucanase activity and have an amino acid sequence that is at least 70% identical to one or more of SEQ ID NOs: 46 are set forth herein as SEQ ID NOs: 49229-49346.

[0296] In some embodiments, the protein is derived from Bacillus, Bispora, Hordeum or Paenibacillus. For example, in some embodiments, the protein is a native Bacillus, Bispora, Hordeum or Paenibacillus endo-1,3(4)-beta-glucanase or is a fragment/mutant/variant of a native Bacillus, Bispora, Hordeum or Paenibacillus endo-1,3(4)-beta-glucanase.

[0297] In some embodiments, the protein is selected from the group consisting of:
[0298] a) a polypeptide having about/at least 60, 61, 62, 63, 64, 65, 66, 67, 68, 69, 70, 71, 72, 73, 74, 75, 76, 77, 78, 79, 80, 81, 82, 83, 84, 85, 86, 87, 88, 89, 90, 91, 92, 93, 94, 95, 96, 97, 98, 99 or 100% sequence identity to one or more of SEQ ID NO(s): 47;
[0299] b) a polypeptide having about/at least 60, 61, 62, 63, 64, 65, 66, 67, 68, 69, 70, 71, 72, 73, 74, 75, 76, 77, 78, 79, 80, 81, 82, 83, 84, 85, 86, 87, 88, 89, 90, 91, 92, 93, 94, 95, 96, 97, 98, 99 or 100% sequence identity to a mature polypeptide of any one of SEQ ID NO(s): 47;
[0300] c) a polypeptide encoded by a polynucleotide having about/at least 60, 61, 62, 63, 64, 65, 66, 67, 68, 69, 70, 71, 72, 73, 74, 75, 76, 77, 78, 79, 80, 81, 82, 83, 84, 85, 86, 87, 88, 89, 90, 91, 92, 93, 94, 95, 96, 97, 98, 99 or 100% sequence identity to one or more of SEQ ID NO(s): 138 or the cDNA sequence thereof;
[0301] d) a polypeptide derived from any one of SEQ ID NO(s): 47 by substitution, deletion, or insertion of one or more amino acids;
[0302] c) a polypeptide derived from a mature polypeptide of any one of SEQ ID NO(s): 47 by substitution, deletion, or insertion of one or more amino acids;
[0303] f) a polypeptide derived from the polypeptide of any one of a) through e) wherein the N- and/or C-terminal end has been extended by the addition of one or more amino acids; and
[0304] g) a fragment of the polypeptide of any one of a) through f)
   wherein the polypeptide has inulinase activity belonging to EC 3.2.1.7. Examples of proteins that exhibit inulinase activity and have an amino acid sequence that is at least 70% identical to one or more of SEQ ID NOs: 47 are set forth herein as SEQ ID NOs: 49347-49419.

[0305] In some embodiments, the protein is derived from Aspergillus, Penicillium, Pseudomonas or Talaromyces. For example, in some embodiments, the protein is a native Aspergillus, Penicillium, Pseudomonas or Talaromyces inulinase or is a fragment/mutant/variant of a native Aspergillus, Penicillium, Pseudomonas or Talaromyces inulinase.

[0306] In some embodiments, the protein is selected from the group consisting of:
[0307] a) a polypeptide having about/at least 60, 61, 62, 63, 64, 65, 66, 67, 68, 69, 70, 71, 72, 73, 74, 75, 76, 77, 78, 79, 80, 81, 82, 83, 84, 85, 86, 87, 88, 89, 90, 91, 92, 93, 94, 95, 96, 97, 98, 99 or 100% sequence identity to one or more of SEQ ID NO(s): 48-53;
[0308] b) a polypeptide having about/at least 60, 61, 62, 63, 64, 65, 66, 67, 68, 69, 70, 71, 72, 73, 74, 75, 76, 77, 78, 79, 80, 81, 82, 83, 84, 85, 86, 87, 88, 89, 90, 91, 92, 93, 94, 95, 96, 97, 98, 99 or 100% sequence identity to a mature polypeptide of any one of SEQ ID NO(s): 48-53;
[0309] c) a polypeptide encoded by a polynucleotide having about/at least 60, 61, 62, 63, 64, 65, 66, 67, 68, 69, 70, 71, 72, 73, 74, 75, 76, 77, 78, 79, 80, 81, 82, 83, 84, 85, 86, 87, 88, 89, 90, 91, 92, 93, 94, 95, 96, 97, 98, 99 or 100% sequence identity to one or more of SEQ ID NO(s): 139-144 or the cDNA sequence thereof;
[0310] d) a polypeptide derived from any one of SEQ ID NO(s): 48-53 by substitution, deletion, or insertion of one or more amino acids;
[0311] e) a polypeptide derived from a mature polypeptide of any one of SEQ ID NO(s): 48-53 by substitution, deletion, or insertion of one or more amino acids;
[0312] f) a polypeptide derived from the polypeptide of any one of a) through e) wherein the N- and/or C-terminal end has been extended by the addition of one or more amino acids; and
[0313] g) a fragment of the polypeptide of any one of a) through f)
   wherein the polypeptide has endo-1,4-beta-xylanase activity belonging to EC 3.2.1.8. Examples of proteins that exhibit endo-1,4-beta-xylanase activity and have an amino acid sequence that is at least 70% identical to one or more of SEQ ID NOs: 48-53 are set forth herein as SEQ ID NOs: 49453-49912.

[0314] In some embodiments, the protein is derived from Anaerocellum, Aspergillus, Bacillus, Caldicellulosiruptor, Clostridium, Dicytoglomus, Evansstolkia, Hordeum, Lactobacillus, Malbranchea, Neosartorya, Nicotiana, Paecilomyces, Paenibacillus, Penicillium, Pyrococcus, Rasamsonia, Saccharomyces, Talaromyces, Thermoclostridium, Thermomyces, Thermus or Viridiplantae. For example, in some embodiments, the protein is a native Anaerocellum, Aspergillus, Bacillus, Caldicellulosiruptor, Clostridium, Dicytoglomus, Evansstolkia, Hordeum, Lactobacillus, Malbranchea, Neosartorya, Nicotiana, Paecilomyces, Paenibacillus, Penicillium, Pyrococcus, Rasamsonia, Saccharomyces, Talaromyces, Thermoclostridium, Thermomyces, Thermus or Viridiplantae endo-1,4-beta-xylanase or is a fragment/mutant/variant of a native Anaerocellum, Aspergillus, Bacillus, Caldicellulosiruptor, Clostridium, Dicytoglomus, Evansstolkia, Hordeum, Lactobacillus, Malbranchea, Neosartorya, Nicotiana, Paecilomyces, Paenibacillus, Penicillium, Pyrococcus, Rasamsonia, Saccharomyces, Talaromyces, Thermoclostridium, Thermomyces, Thermus or Viridiplantae endo-1,4-beta-xylanase.

[0315] In some embodiments, the protein is selected from the group consisting of:
[0316] a) a polypeptide having about/at least 60, 61, 62, 63, 64, 65, 66, 67, 68, 69, 70, 71, 72, 73, 74, 75, 76, 77, 78, 79, 80, 81, 82, 83, 84, 85, 86, 87, 88, 89, 90, 91, 92, 93, 94, 95, 96, 97, 98, 99 or 100% sequence identity to one or more of SEQ ID NO(s): 54;
[0317] b) a polypeptide having about/at least 60, 61, 62, 63, 64, 65, 66, 67, 68, 69, 70, 71, 72, 73, 74, 75, 76, 77, 78, 79, 80, 81, 82, 83, 84, 85, 86, 87, 88, 89, 90, 91, 92, 93, 94, 95, 96, 97, 98, 99 or 100% sequence identity to a mature polypeptide of any one of SEQ ID NO(s): 54;
[0318] c) a polypeptide encoded by a polynucleotide having about/at least 60, 61, 62, 63, 64, 65, 66, 67, 68, 69, 70, 71, 72, 73, 74, 75, 76, 77, 78, 79, 80, 81, 82, 83, 84, 85, 86, 87, 88, 89, 90, 91, 92, 93, 94, 95, 96, 97, 98, 99 or 100% sequence identity to one or more of SEQ ID NO(s): 145 or the cDNA sequence thereof,
[0319] d) a polypeptide derived from any one of SEQ ID NO(s): 54 by substitution, deletion, or insertion of one or more amino acids;
[0320] e) a polypeptide derived from a mature polypeptide of any one of SEQ ID NO(s): 54 by substitution, deletion, or insertion of one or more amino acids;
[0321] f) a polypeptide derived from the polypeptide of any one of a) through e) wherein the N- and/or C-terminal end has been extended by the addition of one or more amino acids; and
[0322] g) a fragment of the polypeptide of any one of a) through f)
   wherein the polypeptide has dextranase activity belonging to EC 3.2.1.11. Examples of proteins that exhibit dextranase activity and have an amino acid sequence that is at least 70% identical to one or more of SEQ ID NOs: 54 are set forth herein as SEQ ID NOs: 45063-45071.

[0323] In some embodiments, the protein is selected from the group consisting of:
[0324] a) a polypeptide having about/at least 60, 61, 62, 63, 64, 65, 66, 67, 68, 69, 70, 71, 72, 73, 74, 75, 76, 77, 78, 79, 80, 81, 82, 83, 84, 85, 86, 87, 88, 89, 90, 91, 92, 93, 94, 95, 96, 97, 98, 99 or 100% sequence identity to one or more of SEQ ID NO(s): 56;
[0325] b) a polypeptide having about/at least 60, 61, 62, 63, 64, 65, 66, 67, 68, 69, 70, 71, 72, 73, 74, 75, 76, 77, 78, 79, 80, 81, 82, 83, 84, 85, 86, 87, 88, 89, 90, 91, 92, 93, 94, 95, 96, 97, 98, 99 or 100% sequence identity to a mature polypeptide of any one of SEQ ID NO(s): 56;
[0326] c) a polypeptide encoded by a polynucleotide having about/at least 60, 61, 62, 63, 64, 65, 66, 67, 68, 69, 70, 71, 72, 73, 74, 75, 76, 77, 78, 79, 80, 81, 82, 83, 84, 85, 86, 87, 88, 89, 90, 91, 92, 93, 94, 95, 96, 97, 98, 99 or 100% sequence identity to one or more of SEQ ID NO(s): 147 or the cDNA sequence thereof,
[0327] d) a polypeptide derived from any one of SEQ ID NO(s): 56 by substitution, deletion, or insertion of one or more amino acids;
[0328] e) a polypeptide derived from a mature polypeptide of any one of SEQ ID NO(s): 56 by substitution, deletion, or insertion of one or more amino acids;
[0329] f) a polypeptide derived from the polypeptide of any one of a) through c) wherein the N- and/or C-terminal end has been extended by the addition of one or more amino acids; and
[0330] g) a fragment of the polypeptide of any one of a) through f)
   wherein the polypeptide has lysozyme activity belonging to EC 3.2.1.17. Examples of proteins that exhibit lysozyme activity and have an amino acid sequence that is at least 70% identical to one or more of SEQ ID NOs: 56 are set forth herein as SEQ ID NOs: 45443-45456.

[0331] In some embodiments, the protein is derived from Clonostachys or Sodiomyces. For example, in some embodiments, the protein is a native Clonostachys or Sodiomyces lysozyme or is a fragment/mutant/variant of a native Clonostachys or Sodiomyces lysozyme.

[0332] In some embodiments, the protein is selected from the group consisting of:
[0333] a) a polypeptide having about/at least 60, 61, 62, 63, 64, 65, 66, 67, 68, 69, 70, 71, 72, 73, 74, 75, 76, 77, 78, 79, 80, 81, 82, 83, 84, 85, 86, 87, 88, 89, 90, 91, 92, 93, 94, 95, 96, 97, 98, 99 or 100% sequence identity to one or more of SEQ ID NO(s): 57;
[0334] b) a polypeptide having about/at least 60, 61, 62, 63, 64, 65, 66, 67, 68, 69, 70, 71, 72, 73, 74, 75, 76, 77, 78, 79, 80, 81, 82, 83, 84, 85, 86, 87, 88, 89, 90, 91, 92, 93, 94, 95, 96, 97, 98, 99 or 100% sequence identity to a mature polypeptide of any one of SEQ ID NO(s): 57;
[0335] c) a polypeptide encoded by a polynucleotide having about/at least 60, 61, 62, 63, 64, 65, 66, 67, 68, 69, 70, 71, 72, 73, 74, 75, 76, 77, 78, 79, 80, 81, 82, 83, 84, 85, 86, 87, 88, 89, 90, 91, 92, 93, 94, 95, 96, 97, 98, 99 or 100% sequence identity to one or more of SEQ ID NO(s): 148 or the cDNA sequence thereof,
[0336] d) a polypeptide derived from any one of SEQ ID NO(s): 57 by substitution, deletion, or insertion of one or more amino acids;
[0337] e) a polypeptide derived from a mature polypeptide of any one of SEQ ID NO(s): 57 by substitution, deletion, or insertion of one or more amino acids;
[0338] f) a polypeptide derived from the polypeptide of any one of a) through e) wherein the N- and/or C-terminal end has been extended by the addition of one or more amino acids; and
[0339] g) a fragment of the polypeptide of any one of a) through f)
   wherein the polypeptide has beta-glucosidase activity belonging to EC 3.2.1.21. Examples of proteins that exhibit beta-glucosidase activity and have an amino acid sequence that is at least 70% identical to one or more of SEQ ID NOs: 57 are set forth herein as SEQ ID NOs: 45457-45754.

[0340] In some embodiments, the protein is derived from Aspergillus, Coccidioides, Evansstolkia, Neosartorya, Penicillium, Rasamsonia, Schizosaccharomyces or Thermoascus. For example, in some embodiments, the protein is a native Aspergillus, Coccidioides, Evansstolkia, Neosartorya, Penicillium, Rasamsonia, Schizosaccharomyces or Thermoascus beta-glucosidase or is a fragment/mutant/variant of a native Aspergillus, Coccidioides, Evansstolkia, Neosartorya, Penicillium, Rasamsonia, Schizosaccharomyces or Thermoascus beta-glucosidase.

[0341] In some embodiments, the protein is selected from the group consisting of:
[0342] a) a polypeptide having about/at least 60, 61, 62, 63, 64, 65, 66, 67, 68, 69, 70, 71, 72, 73, 74, 75, 76, 77, 78, 79, 80, 81, 82, 83, 84, 85, 86, 87, 88, 89, 90, 91, 92, 93, 94, 95, 96, 97, 98, 99 or 100% sequence identity to one or more of SEQ ID NO(s): 58;
[0343] b) a polypeptide having about/at least 60, 61, 62, 63, 64, 65, 66, 67, 68, 69, 70, 71, 72, 73, 74, 75, 76, 77, 78, 79, 80, 81, 82, 83, 84, 85, 86, 87, 88, 89, 90, 91, 92, 93, 94, 95, 96, 97, 98, 99 or 100% sequence identity to a mature polypeptide of any one of SEQ ID NO(s): 58;
[0344] c) a polypeptide encoded by a polynucleotide having about/at least 60, 61, 62, 63, 64, 65, 66, 67, 68, 69, 70, 71, 72, 73, 74, 75, 76, 77, 78, 79, 80, 81, 82, 83, 84, 85, 86, 87, 88, 89, 90, 91, 92, 93, 94, 95, 96, 97, 98, 99 or 100% sequence identity to one or more of SEQ ID NO(s): 149 or the cDNA sequence thereof;
[0345] d) a polypeptide derived from any one of SEQ ID NO(s): 58 by substitution, deletion, or insertion of one or more amino acids;
[0346] e) a polypeptide derived from a mature polypeptide of any one of SEQ ID NO(s): 58 by substitution, deletion, or insertion of one or more amino acids;
[0347] f) a polypeptide derived from the polypeptide of any one of a) through e) wherein the N- and/or C-terminal end has been extended by the addition of one or more amino acids; and
[0348] g) a fragment of the polypeptide of any one of a) through f)
   wherein the polypeptide has alpha-mannosidase activity belonging to EC 3.2.1.24. Examples of proteins that exhibit alpha-mannosidase activity and have an amino acid sequence that is at least 70% identical to one or more of SEQ ID NOs: 58 are set forth herein as SEQ ID NOs: 45755.

[0349] In some embodiments, the protein is derived from Neobacillus. For example, in some embodiments, the protein is a native Neobacillus alpha-mannosidase or is a fragment/mutant/variant of a native Neobacillus alpha-mannosidase.

[0350] In some embodiments, the protein is selected from the group consisting of:
[0351] a) a polypeptide having about/at least 60, 61, 62, 63, 64, 65, 66, 67, 68, 69, 70, 71, 72, 73, 74, 75, 76, 77, 78, 79, 80, 81, 82, 83, 84, 85, 86, 87, 88, 89, 90, 91, 92, 93, 94, 95, 96, 97, 98, 99 or 100% sequence identity to one or more of SEQ ID NO(s): 59-60 and 45906;
[0352] b) a polypeptide having about/at least 60, 61, 62, 63, 64, 65, 66, 67, 68, 69, 70, 71, 72, 73, 74, 75, 76, 77, 78, 79, 80, 81, 82, 83, 84, 85, 86, 87, 88, 89, 90, 91, 92, 93, 94, 95, 96, 97, 98, 99 or 100% sequence identity to a mature polypeptide of any one of SEQ TD NO(s): 59-60 and 45906;
[0353] c) a polypeptide encoded by a polynucleotide having about/at least 60, 61, 62, 63, 64, 65, 66, 67, 68, 69, 70, 71, 72, 73, 74, 75, 76, 77, 78, 79, 80, 81, 82, 83, 84, 85, 86, 87, 88, 89, 90, 91, 92, 93, 94, 95, 96, 97, 98, 99 or 100% sequence identity to one or more of SEQ ID NO(s): 150-151 and 72146 or the cDNA sequence thereof;
[0354] d) a polypeptide derived from any one of SEQ ID NO(s): 59-60 and 45906 by substitution, deletion, or insertion of one or more amino acids;
[0355] e) a polypeptide derived from a mature polypeptide of any one of SEQ ID NO(s): 59-60 and 45906 by substitution, deletion, or insertion of one or more amino acids;
[0356] f) a polypeptide derived from the polypeptide of any one of a) through e) wherein the N- and/or C-terminal end has been extended by the addition of one or more amino acids; and
[0357] g) a fragment of the polypeptide of any one of a) through f)
   wherein the polypeptide has glucan endo-1,3-beta-D-glucosidase activity belonging to EC 3.2.1.39. Examples of proteins that exhibit glucan endo-1,3-beta-D-glucosidase activity and have an amino acid sequence that is at least 70% identical to one or more of SEQ ID NOs: 59-60 and 45906 are set forth herein as SEQ ID NOs: 45905-45912.

[0358] In some embodiments, the protein is derived from Trichoderma. For example, in some embodiments, the protein is a native Trichoderma glucan endo-1,3-beta-D-glucosidase or is a fragment/mutant/variant of a native Trichoderma glucan endo-1,3-beta-D-glucosidase.

[0359] In some embodiments, the protein is selected from the group consisting of:
[0360] a) a polypeptide having about/at least 60, 61, 62, 63, 64, 65, 66, 67, 68, 69, 70, 71, 72, 73, 74, 75, 76, 77, 78, 79, 80, 81, 82, 83, 84, 85, 86, 87, 88, 89, 90, 91, 92, 93, 94, 95, 96, 97, 98, 99 or 100% sequence identity to one or more of SEQ ID NO(s): 61;
[0361] b) a polypeptide having about/at least 60, 61, 62, 63, 64, 65, 66, 67, 68, 69, 70, 71, 72, 73, 74, 75, 76, 77, 78, 79, 80, 81, 82, 83, 84, 85, 86, 87, 88, 89, 90, 91, 92, 93, 94, 95, 96, 97, 98, 99 or 100% sequence identity to a mature polypeptide of any one of SEQ ID NO(s): 61;
[0362] c) a polypeptide encoded by a polynucleotide having about/at least 60, 61, 62, 63, 64, 65, 66, 67, 68, 69, 70, 71, 72, 73, 74, 75, 76, 77, 78, 79, 80, 81, 82, 83, 84, 85, 86, 87, 88, 89, 90, 91, 92, 93, 94, 95, 96, 97, 98, 99 or 100% sequence identity to one or more of SEQ ID NO(s): 152 or the cDNA sequence thereof;
[0363] d) a polypeptide derived from any one of SEQ ID NO(s): 61 by substitution, deletion, or insertion of one or more amino acids;
[0364] e) a polypeptide derived from a mature polypeptide of any one of SEQ ID NO(s): 61 by substitution, deletion, or insertion of one or more amino acids;
[0365] f) a polypeptide derived from the polypeptide of any one of a) through f) wherein the N- and/or C-terminal end has been extended by the addition of one or more amino acids; and
[0366] g) a fragment of the polypeptide of any one of a) through g)
   wherein the polypeptide has pullulanase activity belonging to EC 3.2.1.41. Examples of proteins that exhibit pullulanase activity and have an amino acid sequence that is at least 70% identical to one or more of SEQ ID NOs: 61 are set forth herein as SEQ ID NOs: 48751-49148.

[0367] In some embodiments, the protein is derived from Bacillus, Geobacillus or Pulluanibacillus. For example, in some embodiments, the protein is a native Bacillus, Geobacillus or Pulluanibacillus pullulanase or is a fragment/mutant/variant of a native Bacillus, Geobacillus or Pulluanibacillus pullulanase.

[0368] In some embodiments, the protein is selected from the group consisting of:
[0369] a) a polypeptide having about/at least 60, 61, 62, 63, 64, 65, 66, 67, 68, 69, 70, 71, 72, 73, 74, 75, 76, 77, 78, 79, 80, 81, 82, 83, 84, 85, 86, 87, 88, 89, 90, 91, 92, 93, 94, 95, 96, 97, 98, 99 or 100% sequence identity to one or more of SEQ ID NO(s): 62;
[0370] b) a polypeptide having about/at least 60, 61, 62, 63, 64, 65, 66, 67, 68, 69, 70, 71, 72, 73, 74, 75, 76, 77, 78, 79, 80, 81, 82, 83, 84, 85, 86, 87, 88, 89, 90, 91, 92, 93, 94, 95, 96, 97, 98, 99 or 100% sequence identity to a mature polypeptide of any one of SEQ ID NO(s): 62;
[0371] c) a polypeptide encoded by a polynucleotide having about/at least 60, 61, 62, 63, 64, 65, 66, 67, 68, 69, 70, 71, 72, 73, 74, 75, 76, 77, 78, 79, 80, 81, 82, 83, 84, 85, 86, 87, 88, 89, 90, 91, 92, 93, 94, 95, 96, 97, 98, 99 or 100% sequence identity to one or more of SEQ ID NO(s): 153 or the cDNA sequence thereof,
[0372] d) a polypeptide derived from any one of SEQ ID NO(s): 62 by substitution, deletion, or insertion of one or more amino acids;
[0373] e) a polypeptide derived from a mature polypeptide of any one of SEQ ID NO(s): 62 by substitution, deletion, or insertion of one or more amino acids;
[0374] f) a polypeptide derived from the polypeptide of any one of a) through e) wherein the N- and/or C-terminal end has been extended by the addition of one or more amino acids; and
[0375] g) a fragment of the polypeptide of any one of a) through f)
   wherein the polypeptide has alpha-L-arabinofuranosidase activity belonging to EC 3.2.1.55. Examples of proteins that exhibit alpha-L-arabinofuranosidase activity and have an amino acid sequence that is at least 70% identical to one or more of SEQ ID NOs: 62 are set forth herein as SEQ ID NOs: 49149-49209.

[0376] In some embodiments, the protein is derived from Acremonium, ACrophialophora, Actinomadura, Actinoplanes, Aspergillus, Aureobasidium, Chaetomium, Gliomastix, Humicola, Hypocrea, Microdochium, Myceliophthora, Oculimacula, Penicillium, Streptomyces, Streptosporangium, Talaromyces, Thielavia, Trichoderma or Xylanibacterium. For example, in some embodiments, the protein is a native Acremonium, ACrophialophora, Actinomadura, Actinoplanes, Aspergillus, Aureobasidium, Chaetomium, Gliomastix, Humicola, Hypocrea, Microdochium, Myceliophthora, Oculimacula, Penicillium, Streptomyces, Streptosporangium, Talaromyces, Thielavia, Trichoderma or Xylanibacterium alpha-L-arabinofuranosidase or is a fragment/mutant/variant of a native Acremonium, ACrophialophora, Actinomadura, Actinoplanes, Aspergillus, Aureobasidium, Chaetomium, Gliomastix, Humicola, Hypocrea, Microdochium, Mvceliophthora, Oculimacula, Penicilhum, Streptomyces, Streptosporangium, Talaromyces, Thielavia, Trichoderma or Xylanihacterium alpha-L-arabinofuranosidase.

[0377] In some embodiments, the protein is selected from the group consisting of:
[0378] a) a polypeptide having about/at least 60, 61, 62, 63, 64, 65, 66, 67, 68, 69, 70, 71, 72, 73, 74, 75, 76, 77, 78, 79, 80, 81, 82, 83, 84, 85, 86, 87, 88, 89, 90, 91, 92, 93, 94, 95, 96, 97, 98, 99 or 100% sequence identity to one or more of SEQ ID NO(s): 63-64;
[0379] b) a polypeptide having about/at least 60, 61, 62, 63, 64, 65, 66, 67, 68, 69, 70, 71, 72, 73, 74, 75, 76, 77, 78, 79, 80, 81, 82, 83, 84, 85, 86, 87, 88, 89, 90, 91, 92, 93, 94, 95, 96, 97, 98, 99 or 100% sequence identity to a mature polypeptide of any one of SEQ ID NO(s): 63-64;
[0380] c) a polypeptide encoded by a polynucleotide having about/at least 60, 61, 62, 63, 64, 65, 66, 67, 68, 69, 70, 71, 72, 73, 74, 75, 76, 77, 78, 79, 80, 81, 82, 83, 84, 85, 86, 87, 88, 89, 90, 91, 92, 93, 94, 95, 96, 97, 98, 99 or 100% sequence identity to one or more of SEQ ID NO(s): 154-155 or the cDNA sequence thereof,
[0381] d) a polypeptide derived from any one of SEQ ID NO(s): 63-64 by substitution, deletion, or insertion of one or more amino acids;
[0382] e) a polypeptide derived from a mature polypeptide of any one of SEQ ID NO(s): 63-64 by substitution, deletion, or insertion of one or more amino acids;
[0383] f) a polypeptide derived from the polypeptide of any one of a) through e) wherein the N- and/or C-terminal end has been extended by the addition of one or more amino acids; and
[0384] g) a fragment of the polypeptide of any one of a) through f)
   wherein the polypeptide has glucan endo-1,3-alpha-glucosidase activity belonging to EC 3.2.1.59. Examples of proteins that exhibit glucan endo-1,3-alpha-glucosidase activity and have an amino acid sequence that is at least 70% identical to one or more of SEQ ID NOs: 63-64 are set forth herein as SEQ ID NOs: 49210-49228.

[0385] In some embodiments, the protein is derived from Clonostachys, Hypocrea, Myceliophthora or Trichoderma. For example, in some embodiments, the protein is a native Clonostachys, Hypocrea, Myceliophthora or Trichoderma glucan endo-1,3-alpha-glucosidase or is a fragment/mutant/variant of a native Clonostachys, Hypocrea, Myceliophthora or Trichoderma glucan endo-1,3-alpha-glucosidase.

[0386] In some embodiments, the protein is selected from the group consisting of:
[0387] a) a polypeptide having about/at least 60, 61, 62, 63, 64, 65, 66, 67, 68, 69, 70, 71, 72, 73, 74, 75, 76, 77, 78, 79, 80, 81, 82, 83, 84, 85, 86, 87, 88, 89, 90, 91, 92, 93, 94, 95, 96, 97, 98, 99 or 100% sequence identity to one or more of SEQ ID NO(s): 65;
[0388] b) a polypeptide having about/at least 60, 61, 62, 63, 64, 65, 66, 67, 68, 69, 70, 71, 72, 73, 74, 75, 76, 77, 78, 79, 80, 81, 82, 83, 84, 85, 86, 87, 88, 89, 90, 91, 92, 93, 94, 95, 96, 97, 98, 99 or 100% sequence identity to a mature polypeptide of any one of SEQ ID NO(s): 65;
[0389] c) a polypeptide encoded by a polynucleotide having about/at least 60, 61, 62, 63, 64, 65, 66, 67, 68, 69, 70, 71, 72, 73, 74, 75, 76, 77, 78, 79, 80, 81, 82, 83, 84, 85, 86, 87, 88, 89, 90, 91, 92, 93, 94, 95, 96, 97, 98, 99 or 100% sequence identity to one or more of SEQ ID NO(s): 156 or the cDNA sequence thereof;
[0390] d) a polypeptide derived from any one of SEQ ID NO(s): 65 by substitution, deletion, or insertion of one or more amino acids;
[0391] e) a polypeptide derived from a mature polypeptide of any one of SEQ ID NO(s): 65 by substitution, deletion, or insertion of one or more amino acids;
[0392] f) a polypeptide derived from the polypeptide of any one of a) through e) wherein the N- and/or C-terminal end has been extended by the addition of one or more amino acids; and
[0393] g) a fragment of the polypeptide of any one of a) through f)
   wherein the polypeptide has licheninase activity belonging to EC 3.2.1.73. Examples of proteins that exhibit licheninase activity and have an amino acid sequence that is at least 70% identical to one or more of SEQ ID NOs: 65 are set forth herein as SEQ ID NOs: 49420-49446.

[0394] In some embodiments, the protein is derived from Bacillus or Salipaludibacillus. For example, in some embodiments, the protein is a native Bacillus or Salipaludibacillus licheninase or is a fragment/mutant/variant of a native Bacillus or Salipaludibacillus licheninase.

[0395] In some embodiments, the protein is selected from the group consisting of:
[0396] a) a polypeptide having about/at least 60, 61, 62, 63, 64, 65, 66, 67, 68, 69, 70, 71, 72, 73, 74, 75, 76, 77, 78, 79, 80, 81, 82, 83, 84, 85, 86, 87, 88, 89, 90, 91, 92, 93, 94, 95, 96, 97, 98, 99 or 100% sequence identity to one or more of SEQ ID NO(s): 66-67;
[0397] b) a polypeptide having about/at least 60, 61, 62, 63, 64, 65, 66, 67, 68, 69, 70, 71, 72, 73, 74, 75, 76, 77, 78, 79, 80, 81, 82, 83, 84, 85, 86, 87, 88, 89, 90, 91, 92, 93, 94, 95, 96, 97, 98, 99 or 100% sequence identity to a mature polypeptide of any one of SEQ ID NO(s): 66-67;
[0398] c) a polypeptide encoded by a polynucleotide having about/at least 60, 61, 62, 63, 64, 65, 66, 67, 68, 69, 70, 71, 72, 73, 74, 75, 76, 77, 78, 79, 80, 81, 82, 83, 84, 85, 86, 87, 88, 89, 90, 91, 92, 93, 94, 95, 96, 97, 98, 99 or 100% sequence identity to one or more of SEQ ID NO(s): 157-158 or the cDNA sequence thereof,
[0399] d) a polypeptide derived from any one of SEQ ID NO(s): 66-67 by substitution, deletion, or insertion of one or more amino acids;
[0400] e) a polypeptide derived from a mature polypeptide of any one of SEQ ID NO(s): 66-67 by substitution, deletion, or insertion of one or more amino acids;
[0401] f) a polypeptide derived from the polypeptide of any one of a) through e) wherein the N- and/or C-terminal end has been extended by the addition of one or more amino acids; and
[0402] g) a fragment of the polypeptide of any one of a) through f)
   wherein the polypeptide has glucan endo-1,6-beta-glucosidase activity belonging to EC 3.2.1.75. Examples of proteins that exhibit glucan endo-1,6-beta-glucosidase activity and have an amino acid sequence that is at least 70% identical to one or more of SEQ ID NOs: 66-67 are set forth herein as SEQ ID NOs: 49447-49451.

[0403] In some embodiments, the protein is derived from Trichoderma. For example, in some embodiments, the protein is a native Trichoderma glucan endo-1,6-beta-glucosidase or is a fragment/mutant/variant of a native Trichoderma glucan endo-1,6-beta-glucosidase.

[0404] In some embodiments, the protein is selected from the group consisting of
[0405] a) a polypeptide having about/at least 60, 61, 62, 63, 64, 65, 66, 67, 68, 69, 70, 71, 72, 73, 74, 75, 76, 77, 78, 79, 80, 81, 82, 83, 84, 85, 86, 87, 88, 89, 90, 91, 92, 93, 94, 95, 96, 97, 98, 99 or 100% sequence identity to one or more of SEQ ID NO(s): 68 and 72144;
[0406] b) a polypeptide having about/at least 60, 61, 62, 63, 64, 65, 66, 67, 68, 69, 70, 71, 72, 73, 74, 75, 76, 77, 78, 79, 80, 81, 82, 83, 84, 85, 86, 87, 88, 89, 90, 91, 92, 93, 94, 95, 96, 97, 98, 99 or 100% sequence identity to a mature polypeptide of any one of SEQ ID NO(s): 68 and 72144;
[0407] c) a polypeptide encoded by a polynucleotide having about/at least 60, 61, 62, 63, 64, 65, 66, 67, 68, 69, 70, 71, 72, 73, 74, 75, 76, 77, 78, 79, 80, 81, 82, 83, 84, 85, 86, 87, 88, 89, 90, 91, 92, 93, 94, 95, 96, 97, 98, 99 or 100% sequence identity to one or more of SEQ ID NO(s): 159 and 72145 or the cDNA sequence thereof;
[0408] d) a polypeptide derived from any one of SEQ ID NO(s): 68 and 72144 by substitution, deletion, or insertion of one or more amino acids;
[0409] e) a polypeptide derived from a mature polypeptide of any one of SEQ ID NO(s): 68 and 72144 by substitution, deletion, or insertion of one or more amino acids;
[0410] f) a polypeptide derived from the polypeptide of any one of a) through e) wherein the N- and/or C-terminal end has been extended by the addition of one or more amino acids; and
[0411] g) a fragment of the polypeptide of any one of a) through f)
   wherein the polypeptide has mannan endo-1,4-beta-mannosidase activity belonging to EC 3.2.1.78. Examples of proteins that exhibit mannan endo-1,4-beta-mannosidase activity and have an amino acid sequence that is at least 70% identical to one or more of SEQ ID NOs: 68 and 72144 are set forth herein as SEQ ID NOs: 49452.

[0412] In some embodiments, the protein is derived from Alkalihalobacillus. For example, in some embodiments, the protein is a native Alkalihalobacillus mannan endo-1,4-beta-mannosidase or is a fragment/mutant/variant of a native Alkalihalobacillus mannan endo-1,4-beta-mannosidase.

[0413] In some embodiments, the protein is selected from the group consisting of:
[0414] a) a polypeptide having about/at least 60, 61, 62, 63, 64, 65, 66, 67, 68, 69, 70, 71, 72, 73, 74, 75, 76, 77, 78, 79, 80, 81, 82, 83, 84, 85, 86, 87, 88, 89, 90, 91, 92, 93, 94, 95, 96, 97, 98, 99 or 100% sequence identity to one or more of SEQ ID NO(s): 69;
[0415] b) a polypeptide having about/at least 60, 61, 62, 63, 64, 65, 66, 67, 68, 69, 70, 71, 72, 73, 74, 75, 76, 77, 78, 79, 80, 81, 82, 83, 84, 85, 86, 87, 88, 89, 90, 91, 92, 93, 94, 95, 96, 97, 98, 99 or 100% sequence identity to a mature polypeptide of any one of SEQ ID NO(s): 69;
[0416] c) a polypeptide encoded by a polynucleotide having about/at least 60, 61, 62, 63, 64, 65, 66, 67, 68, 69, 70, 71, 72, 73, 74, 75, 76, 77, 78, 79, 80, 81, 82, 83, 84, 85, 86, 87, 88, 89, 90, 91, 92, 93, 94, 95, 96, 97, 98, 99 or 100% sequence identity to one or more of SEQ ID NO(s): 160 or the cDNA sequence thereof,
[0417] d) a polypeptide derived from any one of SEQ ID NO(s): 69 by substitution, deletion, or insertion of one or more amino acids;
[0418] e) a polypeptide derived from a mature polypeptide of any one of SEQ ID NO(s): 69 by substitution, deletion, or insertion of one or more amino acids;
[0419] f) a polypeptide derived from the polypeptide of any one of a) through c) wherein the N- and/or C-terminal end has been extended by the addition of one or more amino acids; and
[0420] g) a fragment of the polypeptide of any one of a) through f)
   wherein the polypeptide has mannan endo-1,6-alpha-mannosidase activity belonging to EC 3.2.1.101.

[0421] Examples of proteins that exhibit mannan endo-1,6-alpha-mannosidase activity and have an amino acid sequence that is at least 70% identical to one or more of SEQ ID NOs: 69 are set forth herein as SEQ ID NOs: 45042.

[0422] In some embodiments, the protein is derived from Talaromyces. For example, in some embodiments, the protein is a native Talaromyces mannan endo-1,6-alpha-mannosidase or is a fragment/mutant/variant of a native Talaromyces mannan endo-1,6-alpha-mannosidase.

[0423] In some embodiments, the protein is selected from the group consisting of:
[0424] a) a polypeptide having about/at least 60, 61, 62, 63, 64, 65, 66, 67, 68, 69, 70, 71, 72, 73, 74, 75, 76, 77, 78, 79, 80, 81, 82, 83, 84, 85, 86, 87, 88, 89, 90, 91, 92, 93, 94, 95, 96, 97, 98, 99 or 100% sequence identity to one or more of SEQ ID NO(s): 70-75;
[0425] b) a polypeptide having about/at least 60, 61, 62, 63, 64, 65, 66, 67, 68, 69, 70, 71, 72, 73, 74, 75, 76, 77, 78, 79, 80, 81, 82, 83, 84, 85, 86, 87, 88, 89, 90, 91, 92, 93, 94, 95, 96, 97, 98, 99 or 100% sequence identity to a mature polypeptide of any one of SEQ ID NO(s): 70-75;
[0426] c) a polypeptide encoded by a polynucleotide having about/at least 60, 61, 62, 63, 64, 65, 66, 67, 68, 69, 70, 71, 72, 73, 74, 75, 76, 77, 78, 79, 80, 81, 82, 83, 84, 85, 86, 87, 88, 89, 90, 91, 92, 93, 94, 95, 96, 97, 98, 99 or 100% sequence identity to one or more of SEQ ID NO(s): 161-166 or the cDNA sequence thereof,
[0427] d) a polypeptide derived from any one of SEQ ID NO(s): 70-75 by substitution, deletion, or insertion of one or more amino acids;
[0428] e) a polypeptide derived from a mature polypeptide of any one of SEQ ID NO(s): 70-75 by substitution, deletion, or insertion of one or more amino acids;
[0429] f) a polypeptide derived from the polypeptide of any one of a) through e) wherein the N- and/or C-terminal end has been extended by the addition of one or more amino acids; and
[0430] g) a fragment of the polypeptide of any one of a) through f)
   wherein the polypeptide has endogalactosaminidase activity belonging to EC 3.2.1.109. Examples of proteins that exhibit endogalactosaminidase activity and have an amino acid sequence that is at least 70% identical to one or more of SEQ ID NOs: 70-75 are set forth herein as SEQ ID NOs: 45043-45062.

[0431] In some embodiments, the protein is derived from Bjerkandera, Diaporthe, Fusarium, Neonectria, Ostropa, Pseudoplectania, Stenocarpella or Urunula. For example, in some embodiments, the protein is a native Bjerkandera, Diaporthe, Fusarium, Neonectria, Ostropa, Pseudoplectania, Stenocarpella or Urunula endogalactosaminidase or is a fragment/mutant/variant of a native Bjerkandera, Diaporthe, Fusarium, Neonectria, Ostropa, Pseudoplectania, Stenocarpella or Urunula endogalactosaminidase.

[0432] In some embodiments, the protein is selected from the group consisting of:
[0433] a) a polypeptide having about/at least 60, 61, 62, 63, 64, 65, 66, 67, 68, 69, 70, 71, 72, 73, 74, 75, 76, 77, 78, 79, 80, 81, 82, 83, 84, 85, 86, 87, 88, 89, 90, 91, 92, 93, 94, 95, 96, 97, 98, 99 or 100% sequence identity to one or more of SEQ ID NO(s): 76-77;
[0434] b) a polypeptide having about/at least 60, 61, 62, 63, 64, 65, 66, 67, 68, 69, 70, 71, 72, 73, 74, 75, 76, 77, 78, 79, 80, 81, 82, 83, 84, 85, 86, 87, 88, 89, 90, 91, 92, 93, 94, 95, 96, 97, 98, 99 or 100% sequence identity to a mature polypeptide of any one of SEQ ID NO(s): 76-77;
[0435] c) a polypeptide encoded by a polynucleotide having about/at least 60, 61, 62, 63, 64, 65, 66, 67, 68, 69, 70, 71, 72, 73, 74, 75, 76, 77, 78, 79, 80, 81, 82, 83, 84, 85, 86, 87, 88, 89, 90, 91, 92, 93, 94, 95, 96, 97, 98, 99 or 100% sequence identity to one or more of SEQ ID NO(s): 167-168 or the cDNA sequence thereof;
[0436] d) a polypeptide derived from any one of SEQ ID NO(s): 76-77 by substitution, deletion, or insertion of one or more amino acids;
[0437] e) a polypeptide derived from a mature polypeptide of any one of SEQ ID NO(s): 76-77 by substitution, deletion, or insertion of one or more amino acids;
[0438] f) a polypeptide derived from the polypeptide of any one of a) through e) wherein the N- and/or C-terminal end has been extended by the addition of one or more amino acids; and
[0439] g) a fragment of the polypeptide of any one of a) through f)
   wherein the polypeptide has glycoprotein endo-alpha-1,2-mannosidase activity belonging to EC 3.2.1.130 and/or alpha-mannan endo-1,2-alpha-mannanase activity belonging to EC 3.2.1.198.

[0440] In some embodiments, the protein is derived from Chryseobacterium or Lysobacter. For example, in some embodiments, the protein is a native Chryseobacterium or Lysobacter glycoprotein endo-alpha-1,2-mannosidase or is a fragment/mutant/variant of a native Chryseobacterium or Lysobacter glycoprotein endo-alpha-1,2-mannosidase. Similarly, in some embodiments, the protein is a native Chryseobacterium or Lysobacter alpha-mannan endo-1,2-alpha-mannanase or is a fragment/mutant/variant of a native Chryseobacterium or Lysobacter alpha-mannan endo-1,2-alpha-mannanase.

[0441] In some embodiments, the protein is selected from the group consisting of:
[0442] a) a polypeptide having about/at least 60, 61, 62, 63, 64, 65, 66, 67, 68, 69, 70, 71, 72, 73, 74, 75, 76, 77, 78, 79, 80, 81, 82, 83, 84, 85, 86, 87, 88, 89, 90, 91, 92, 93, 94, 95, 96, 97, 98, 99 or 100% sequence identity to one or more of SEQ ID NO(s): 78;
[0443] b) a polypeptide having about/at least 60, 61, 62, 63, 64, 65, 66, 67, 68, 69, 70, 71, 72, 73, 74, 75, 76, 77, 78, 79, 80, 81, 82, 83, 84, 85, 86, 87, 88, 89, 90, 91, 92, 93, 94, 95, 96, 97, 98, 99 or 100% sequence identity to a mature polypeptide of any one of SEQ ID NO(s): 78;
[0444] c) a polypeptide encoded by a polynucleotide having about/at least 60, 61, 62, 63, 64, 65, 66, 67, 68, 69, 70, 71, 72, 73, 74, 75, 76, 77, 78, 79, 80, 81, 82, 83, 84, 85, 86, 87, 88, 89, 90, 91, 92, 93, 94, 95, 96, 97, 98, 99 or 100% sequence identity to one or more of SEQ ID NO(s): 169 or the cDNA sequence thereof;
[0445] d) a polypeptide derived from any one of SEQ ID NO(s): 78 by substitution, deletion, or insertion of one or more amino acids;
[0446] c) a polypeptide derived from a mature polypeptide of any one of SEQ ID NO(s): 78 by substitution, deletion, or insertion of one or more amino acids;
[0447] f) a polypeptide derived from the polypeptide of any one of a) through e) wherein the N- and/or C-terminal end has been extended by the addition of one or more amino acids; and
[0448] g) a fragment of the polypeptide of any one of a) through f)
   wherein the polypeptide has glucan 1,4-alpha-maltohydrase activity belonging to EC 3.2.1.133. Examples of proteins that exhibit glucan 1,4-alpha-maltohydrase activity and have an amino acid sequence that is at least 70% identical to one or more of SEQ ID NOs: 78 are set forth herein as SEQ ID NOs: 45072-45408.

[0449] In some embodiments, the protein is derived from Alicyclobacillus, Bacillus, Effusibacillus or Geobacillus. For example, in some embodiments, the protein is a native Alicyclobacillus, Bacillus, Effusibacillus or Geobacillus glucan 1,4-alpha-maltohydrase or is a fragment/mutant/variant of a native Alicyclobacillus, Bacillus, Effusibacillus or Geobacillus glucan 1,4-alpha-maltohydrase.

[0450] In some embodiments, the protein is selected from the group consisting of:
[0451] a) a polypeptide having about/at least 60, 61, 62, 63, 64, 65, 66, 67, 68, 69, 70, 71, 72, 73, 74, 75, 76, 77, 78, 79, 80, 81, 82, 83, 84, 85, 86, 87, 88, 89, 90, 91, 92, 93, 94, 95, 96, 97, 98, 99 or 100% sequence identity to one or more of SEQ ID NO(s): 79;
[0452] b) a polypeptide having about/at least 60, 61, 62, 63, 64, 65, 66, 67, 68, 69, 70, 71, 72, 73, 74, 75, 76, 77, 78, 79, 80, 81, 82, 83, 84, 85, 86, 87, 88, 89, 90, 91, 92, 93, 94, 95, 96, 97, 98, 99 or 100% sequence identity to a mature polypeptide of any one of SEQ ID NO(s): 79;
[0453] c) a polypeptide encoded by a polynucleotide having about/at least 60, 61, 62, 63, 64, 65, 66, 67, 68, 69, 70, 71, 72, 73, 74, 75, 76, 77, 78, 79, 80, 81, 82, 83, 84, 85, 86, 87, 88, 89, 90, 91, 92, 93, 94, 95, 96, 97, 98, 99 or 100% sequence identity to one or more of SEQ ID NO(s): 170 or the cDNA sequence thereof,
[0454] d) a polypeptide derived from any one of SEQ ID NO(s): 79 by substitution, deletion, or insertion of one or more amino acids;
[0455] e) a polypeptide derived from a mature polypeptide of any one of SEQ ID NO(s): 79 by substitution, deletion, or insertion of one or more amino acids;
[0456] f) a polypeptide derived from the polypeptide of any one of a) through e) wherein the N- and/or C-terminal end has been extended by the addition of one or more amino acids; and
[0457] g) a fragment of the polypeptide of any one of a) through f)
   wherein the polypeptide has 1,6-alpha-D-mannosidase activity belonging to EC 3.2.1.163. Examples of proteins that exhibit 1,6-alpha-D-mannosidase activity and have an amino acid sequence that is at least 70% identical to one or more of SEQ ID NOs: 79 are set forth herein as SEQ ID NOs: 45437-45442.

[0458] In some embodiments, the protein is derived from Aspergillus, Evansstolkia, Penicillium, Rasamsonia, Talaromyces or Thermomyces. For example, in some embodiments, the protein is a native Aspergillus, Evansstolkia, Penicillium, Rasamsonia, Talaromyces or Thermomyces 1,6-alpha-D-mannosidase or is a fragment/mutant/variant of a native Aspergillus, Evansstolkia, Penicillium, Rasamsonia, Talaromyces or Thermomyces 1,6-alpha-D-mannosidase.

[0459] Those skilled in the art will understand how to identify, isolate, characterize, produce, recover and formulate proteins having one or more glycosylase activities belong to EC 3.2. See, e.g., AU2016101771-A4; AU2017203481-A1; BY20193-C1; CN101134949-A; CN101139556-A; CN101173226-A; CN101298604-A; CN101457230-A; CN101492661-A; CN101659948-A; CN101824401-A; CN101870956-A; CN101899458-A; CN101962633-A; CN102021191-A; CN102477437-A; CN102477438-A; CN102492707-A; CN102703480-A; CN102796751-A; CN102827821-A; CN102851266-A; CN102994475-A; CN103060290-A; CN103184163-A; CN103194419-A; CN103343111-A; CN103525793-A; CN103555751-A; CN103789285-A; CN103805579-A; CN103834606-A; CN103966188-A; CN104130988-A; CN104293748-A; CN104313000-A; CN104450650-A; CN104450651-A; CN104480087-A; CN104498456-A; CN104561060-A; CN104789543-A; CN104862290-A; CN104928270-A; CN105039288-A; CN105062991-A; CN105155324-A; CN105176947-A; CN105177084-A; CN105441415-A; CN105623937-A; CN105671019-A; CN105671022-A; CN105695435-A; CN105734034-A; CN105802940-A; CN105802943-A; CN105886520-A; CN105907775-A; CN105969783-A; CN106084016-A; CN106148235-A; CN106190934-A; CN106754825-A; CN106754826-A; CN106801046-A; CN106929495-A; CN107022588-A; CN107058264-A; CN107236692-A; CN107312763-A; CN107326020-A; CN107475219-A; CN107513527-A; CN107586767-A; CN107603965-A; CN108102934-A; CN108588056-A; CN108611339-A; CN108623652-A; CN108795781-A; CN108823186-A; CN108841809-A; CN109022396-A; CN109055439-A; CN109207458-A; CN109234339-A; CN109321552-A; CN109370973-A; CN109439607-A; CN109439641-A; CN109486689-A; CN109486791-A; CN109777795-A; CN109810961-A; CN109825466-A; CN109897842-A; CN110066777-A; CN110157688-A; CN110229800-A; CN110343687-A; CN110423737-A; CN110495549-A; CN110592051-A; CN110628748-A; CN110699337-A; CN110713999-A; CN110724645-A; CN110724646-A; CN110951628-A; CN111454929-A; CN111500558-A; CN111518792-A; CN111621490-A; CN111793613-A; CN111826377-A; CN112063678-A; CN112342208-A; CN112522238-A; CN112552382-A; CN112680433-A; CN112795554-A; CN112795555-A; CN113151327-A; CN113234705-A; CN113584075-A; CN113667662-A; CN113717864-A; CN113817709-A; CN113881654-A; CN114350637-A; CN114369588-A; CN114457056-A; CN114606216-A; CN114686386-A; CN114752583-A; CN114790451-A; CN115029334-A; CN115074345-A; CN115125226-A; CN115197924-A; CN115247165-A; CN115478061-A; CN115703996-A; CN115704017-A; CN115704018-A; CN115704019-A; CN1465699-A; CN1594542-A; CN1834249-A; DD272102-A; DE102004047777-A1; DE102005062984-A1; DE102014018149-A1; DE102014212640-A1; DE102014212643-A1; DE102014225472-1; DE102014225473-A1; DE102020205400-A1; DE10309803-A1; EP1764411-A1; EP208491-; EP2100948-A1; EP2100950-A1; EP2116136-A1; EP2166092-A1; EP2292773-A1; EP2295582-A2; EP2298904-A1; EP2314698-A1; EP2357220-A1; EP2404928-A1; EP2404930-A1; EP2486799-A1; EP2540825-A2; EP2551335-A1; EP260160-; EP285123-A; EP2993230-A1; EP3034592-A1; EP3121270-A2; EP3228703-A1; EP3241890-A1; EP3241891-A1; EP3301154-A1; EP3330349-A1; EP3339422-A1; EP3428260-A2; EP3485734-A1; EP3502242-A1; EP3502243-A1; EP3653705-A1; EP3653706-A1; EP3730595-A2; EP4001389-A1; EP4047088-A1; EP409299-A; EP495257-1; EP540784-A1; EP605040-A1; EP633311-A1; EP683228-A2; EP828002-A2; FR2665178-A; FR2676456-A1; GB2479462-A; IN194800-B; IN201811045754-A; IN9700577-11; IN9702287-14; JP04058889-A; JP07059574-A; JP2000135093-A; JP2000245466-A; JP2004313022-A; JP2005171409-A; JP2011167076-A; JP2011223962-A; JP2016015894-A; JP2019146520-A; JP2020065514-A; JP2020184937-A; JP62104580-A; KR2001027418-A; KR2004006812-A; KR2011017208-A; KR2011106174-A; KR2012140565-A; KR2013112172-A; KR834708-B1; NZ524303-A; RU2574206-C1; TR201404579-A; TW200811294-A; U.S. Ser. No. 10/563,185-B1; US2004191864-A1; US2005108791-A1; US2005196853-A1; US2005214410-A1; US2006246566-A1; US2007044171-A1; US2007244020-A1; US2008044858-A1; US2008148432-A1; US2009111155-A1; US2009117642-A1; US2009158452-A1; US2009181874-A1; US2009203109-A1; US2009209026-A1; US2009238923-A1; US2009252828-A1; US2010021587-A1; US2010124769-A1; US2010204080-A1; US2010323448-A1; US2011039751-A1; US2011099671-A1; US2011195481-A1; US2011252501-A1; US2011269210-A1; US2011287516-A1; US2012156734-A1; US2012252095-A1; US2013011882-A1; US2013074202-A1; US2013252850-A1; US2013269061-A1; US2014017737-A1; US2014127753-A1; US2014256018-A1; US2015064766-A1; US2015299720-A1; US2015337329-A1; US2016032267-A1; US2017247730-A1; US2017342433-A1; US2018010111-A1; US2018155744-A1; US2018163191-A1; US2018216039-A1; US2018258442-A1; US2019194634-A1; US2019359961-A1; US2019360012-A1; US2020181593-A1; US2020270593-A1; US2020306342-A1; US2020339917-A1; US2021122998-A1; US2021163995-A1; US2021230644-A1; US2021254115-A1; US2021292688-A1; US2021317431-A1; US2022154236-A1; US2022204956-A1; US2022347262-A1; US2023002748-A1; U.S. Pat. No. 5,824,532-A; U.S. Pat. No. 5,849,549-A; U.S. Pat. No. 6,682,923-B1; U.S. Pat. No. 6,887,986-B1; U.S. Pat. No. 7,504,490-B1; U.S. Pat. No. 8,409,836-B2; WO200001796-A2; WO200029560-A1; WO200034452-A1; WO200043504-A1; WO200060058-A2; WO200060059-A2; WO200109294-A1; WO200116349-A1; WO200136586-A2; WO200142433-A2; WO200147956-A2; WO200151620-A2; WO200159141-A2; WO200164852-A1; WO200183559-A2; WO200188107-A2; WO200210355-A2; WO200212511-A1; WO200240997-A2; WO200268589-A2; WO200268597-A2; WO2003012071-A2; WO2003014358-A2; WO2003016535-A2; WO2003018766-A2; WO2003089614-A2; WO2004080923-A2; WO2004081171-A2; WO2004091544-A2; WO2004113551-A1; WO2005001036-A2; WO2005001064-A2; WO2005003311-A2; WO2005019443-A2; WO2005045018-A1; WO2005052148-A2; WO2005054475-A1; WO2005056787-A1; WO02005073368-A1; WO2005096804-A2; WO2005108537-A1; WO2005111203-A2; WO2005113785-A2; WO2005117756-A2; WO2006002643-A2; WO2006012899-A1; WO2006012902-A2; WO2006031554-A2; WO2006037483-A2; WO2006066594-A2; WO2006066596-A2; WO2006069290-A2; WO2006117432-A1; WO2006136159-A2; WO2006136160-A2; WO2007028088-A2; WO2007071820-A1; WO2007113292-A2; WO2007146944-A2; WO2007149699-A2; WO2008000632-A1; WO2008006881-A1; WO2008015861-A1; WO2008024372-A2; WO2008057637-A2; WO2008080093-A2; WO2008112459-A2; WO2008148845-A2; WO02008153805-A2; WO2008153934-A2; WO02008153935-A2; WO2009026397-A2; WO2009037279-A1; WO2009061379-A2; WO2009062942-A2; WO2009071550-A1; WO2009074650-A2; WO2009075682-A1; WO2009076655-A2; WO2009098229-A2; WO2009100102-A2; WO2009100138-A2; WO2009100990-A1; WO2009108941-A2; WO2009112992-A1; WO2009126773-A1; WO02009133096-A2; WO2009134670-A2; WO2009149130-A2; WO2009149271-A2; WO2009149395-A2; WO2009158694-A1; WO2009158716-A1; WO2010022518-A1; WO2010027857-A2; WO2010036515-A1; WO2010036970-A2; WO2010072224-A1; WO2010072225-A1; WO2010074999-A1; WO2010102982-A1; WO2010104675-A1; WO2010115021-A2; WO2010115156-A2; WO2010121933-A1; WO2010132157-A2; WO2010135836-A1; WO2010138754-A1; WO2010148148-A2; WO2011020852-A1; WO2011041391-A1; WO2011048852-A1; WO2011057101-A1; WO2011057140-A1; WO2011057159-A1; WO2011057163-A2; WO2011066187-A1; WO2011076123-A1; WO2011076897-A1; WO2011080352-A1; WO2011080353-A1; WO2011080354-A1; WO2011082425-A2; WO2011082429-A1; WO2011127820-A1; WO2011128712-A1; WO2011153516-A2; WO2012013197-A2; WO2012016960-A1; WO2012021399-A1; WO2012021400-A1; WO2012021883-A2; WO2012027282-A2; WO2012027374-A2; WO2012027395-A2; WO2012044835-A1; WO2012044836-A1; WO2012044915-A2; WO2012088303-A2; WO2012088467-A2; WO2012089024-A1; WO2012101206-A2; WO2012106824-A1; WO2012122308-A2; WO2012125865-A1; WO2012125925-A2; WO2012127001-A1; WO2012128260-A1; WO2012129697-A1; WO2012129699-A1; WO2012134626-A2; WO2012159007-A1; WO2013001078-A1; WO2013001087-A2; WO2013023938-A1; WO2013029496-A1; WO2013034106-A1; WO2013039776-A1; WO2013055676-A1; WO2013057141-A2; WO2013057143-A2; WO2013063460-A2; WO2013074956-A2; WO2013076253-A1; WO2013082486-A1; WO2013089889-A2; WO2013096294-A1; WO2013115305-A1; WO2013148993-A1; WO2013160316-A1; WO2013181760-A1; WO2013182671-A1; WO2013184577-A1; WO2014007921-A1; WO2014013073-A1; WO2014013074-A1; WO2014019219-A1; WO2014029808-A1; WO2014055778-A2; WO2014055782-A1; WO2014059541-A1; WO2014060380-A1; WO2014068109-A2; WO2014070841-A1; WO2014081700-A1; WO2014081884-A1; WO2014085439-A1; WO2014093123-A1; WO2014099416-A1; WO2014099653-A1; WO2014101753-A1; WO2014106593-A1; WO2014124927-A2; WO2014131842-A1; WO2014138672-A1; WO2014138983-A1; WO2014140165-A1; WO2014151805-A2; WO2014152878-A2; WO2014161987-A1; WO2014162001-A1; WO2014164777-A1; WO2014164800-A1; WO2014164834-A1; WO2014169101-A1; WO2014169129-A1; WO2014176311-A1; WO2014182990-A1; WO2014183920-A1; WO2014183921-A1; WO2014195356-A2; WO2014197296-A1; WO2014202616-A2; WO2014202622-A2; WO2014209800-A1; WO2015007639-A1; WO2015035914-A1; WO2015042064-A1; WO2015044448-A1; WO2015048332-A2; WO2015048340-A2; WO2015048342-A2; WO2015050723-A1; WO2015058700-A1; WO2015065871-A1; WO2015066492-A1; WO2015077126-A1; WO2015079063-A1; WO2015091959-A2; WO2015091990-A1; WO2015094809-A1; WO2015105835-A1; WO2015109405-A1; WO2015110473-A2; WO2015118123-A1; WO2015143144-A1; WO2015143324-A1; WO2015144782-A1; WO2015144824-A1; WO2015150457-A1; WO2015157656-A1; WO2015162038-A1; WO2015187697-A2; WO2015189370-A1; WO2015189371-A1; WO2015189372-A1; WO2015200659-A1; WO2016020478-A1; WO2016029107-A1; WO2016030448-A1; WO2016036648-A1; WO2016036834-A1; WO2016040464-A1; WO2016062875-A2; WO2016066896-A1; WO2016079110-A2; WO2016079305-A1; WO2016087327-A1; WO2016087445-A1; WO2016090472-A1; WO2016090473-A1; WO2016090474-A1; WO2016095856-A1; WO2016100837-A1; WO2016109758-A2; WO2016117549-A1; WO2016124651-A1; WO2016126294-A1; WO2016145350-A1; WO2016153924-A1; WO2016167235-A1; WO2016180748-A1; WO2016180749-A1; WO2016180792-A1; WO2016196202-A1; WO2016203064-A2; WO2016206621-A1; WO2016208492-A1; WO2016210238-A1; WO2017010833-A1; WO2017014974-A1; WO2017019490-A1; WO2017029238-A2; WO2017083226-A1; WO2017084560-A1; WO2017088820-A1; WO2017097861-A1; WO2017097866-A1; WO2017097896-A1; WO2017097897-A1; WO2017106676-A1; WO2017112540-A1; WO2017112631-A1; WO2017112643-A1; WO2017114891-A1; WO2017129754-A1; WO2017144008-A1; WO2017147690-A1; WO2017152169-A1; WO2017161091-A1; WO2017186928-A1; WO2017191109-A1; WO2017191160-A1; WO2017194487-A1; WO2017205337-A1; WO2017217453-A1; WO2017220422-A1; WO2018002261-A1; WO2018015303-A1; WO2018027131-A1; WO2018053220-A1; WO2018075430-A1; WO2018085524-A2; WO2018094181-A1; WO2018098124-A1; WO2018098381-A1; WO2018102348-A1; WO2018106656-A1; WO2018112123-A1; WO2018127486-A1; WO2018161899-A1; WO2018165594-A1; WO2018167669-A1; WO2018167670-A1; WO2018184004-A1; WO2018185048-A1; WO2018204483-A2; WO2018209345-A1; WO2018219854-A1; WO2018224544-A1; WO2019014118-A1; WO2019036721-A2; WO2019042971-A1; WO2019063543-A1; WO2019068850-A1; WO2019083831-A1; WO2019099235-A1; WO2019110538-A1; WO2019113413-A1; WO2019113415-A1; WO2019121930-A1; WO2019121937-A1; WO2019137289-A1; WO2019161227-A1; WO2019163886-A1; WO2019193102-A1; WO2019201725-A1; WO2019201783-A1; WO2019201785-A1; WO2019228448-A1; WO2019229228-A1; WO2020002574-A1; WO2020007875-A1; WO2020023411-A1; WO2020028443-A1; WO2020053276-A1; WO2020058228-A1; WO2020070199-A1; WO2020076697-A1; WO2020077331-A2; WO2020086430-A2; WO2020088393-A1; WO2020096905-A1; WO2020096907-A1; WO2020106600-A1; WO2020114965-A1; WO2020123463-A1; WO2020127775-A1; WO2020131691-A2; WO2020154387-A1; WO2020156903-A1; WO2020169840-A1; WO2020174070-A1; WO2020187883-A1; WO2020188095-A1; WO2020193532-A1; WO2020193534-A2; WO2020193535-A2; WO2020201403-A1; WO2020208056-A1; WO2020260223-A1; WO2020264552-A1; WO2021025872-A1; WO2021026201-A1; WO2021032881-A1; WO2021055395-A1; WO2021058022-A1; WO2021080948-A2; WO2021099457-A1; WO2021119304-A1; WO2021123184-A2; WO2021127319-A1; WO2021130167-A1; WO2021133658-A1; WO2021133701-A1; WO2021144342-A1; WO2021148364-A1; WO2021152120-A1; WO2021152123-A1; WO2021163030-A2; WO2021163036-A1; WO2021202479-A1; WO2021204838-A1; WO2021212095-A1; WO2021214059-A1; WO2021231621-A1; WO2021231623-A1; WO2021236715-A1; WO2021248045-A2; WO2022014428-A1; WO2022020665-A2; WO2022043273-A2; WO2022043745-A1; WO2022044629-A1; WO2022047264-A1; WO2022071451-A1; WO2022074037-A2; WO2022089571-A1; WO2022171780-A2; WO2022173694-A1; WO2022175435-A1; WO2022214457-A1; WO2022214459-A1; WO2022225696-A2; WO2022226376-A2; WO2022261003-A1; WO2022268885-A1; WO2023002065-A2; WO2023023642-A2; WO2023274282-A1; WO2023288294-A1; WO8402921-A; WO9009436-A; WO9100353-A; WO9117244-A; WO9203540-A; WO9218688-A1; WO9219726-A1; WO9402597-A1; WO9407998-A1; WO9418314-A1; WO9502675-A1; WO9518219-A1; WO9524471-A1; WO9526397-A1; WO9534662-A1; WO9535382-A2; WO9605295-A2; WO9617994-A1; WO9623873-A1; WO9623874-A1; WO9629397-A1; WO9630481-A1; WO9639528-A2; WO9714804-A1; WO9728256-A1; WO9743409-A2; WO9743424-A1; WO9803639-A1; WO9804663-A1; WO9811239-A1; WO9812307-A1; WO9816633-A1; WO9818437-A1; WO9826078-A1; WO9844126-A1; WO9909183-A1; WO9919467-A1; WO9923211-A1; WO9929876-A2; WO9945124-A2; WO9946399-A1; WO9957256-A1; WO9957260-A1.

[0460] In some embodiments, proteins of the present disclosure exhibit one or more peptidase activities belonging to EC 3.4, such as aminopeptidase activities belonging to EC 3.4.11, serine endopeptidase activities belonging to EC 3.4.21 (e.g., chymotrypsin activity belonging to EC 3.4.21.1, trypsin activity belonging to EC 3.4.21.4, alpha-lytic endopeptidase activity belonging to EC 3.4.21.12, glutamyl endopeptidase activity belonging to EC 3.4.21.19, cucumisin activity belonging to EC 3.4.21.25, chymase activity belonging to EC 3.4.21.39, lysyl endopeptidase activity belonging to EC 3.4.21.50, leucyl endopeptidase activity belonging to EC 3.4.21.57, subtilisin activity belonging to 3.4.21.62), cysteine endopeptidase activities belonging to 3.4.22 (e.g., papain activity belonging to EC 3.4.22.2, actinidain activity belonging to EC 3.4.22.14, caricain activity belonging to EC 3.4.22.30, ananain activity belonging to EC 3.4.22.31, bromelain activity belonging to EC 3.4.22.32, bromelain activity belonging to EC 3.4.22.33, legumain activity belonging to EC 3.4.22.34, zingipain activity belonging to EC 3.4.22.67), aspartic endopeptidase activities belonging to EC 3.4.23 (e.g., phytepsin activity belonging to EC 3.4.23.40), and/or metalloendopeptidase activities belonging to EC 3.4.24 (e.g., bacillolysin activity belonging to EC 3.4.24.28), and, optionally, comprise, consist essentially of, or consist of an amino acid sequence that is about/at least 60, 61, 62, 63, 64, 65, 66, 67, 68, 69, 70, 71, 72, 73, 74, 75, 76, 77, 78, 79, 80, 81, 82, 83, 84, 85, 86, 87, 88, 89, 90, 91, 92, 93, 94, 95, 96, 97, 98, 99 or 100% identical to one or more of the amino acid sequences set forth herein as SEQ ID NO(s): 80-88.

[0461] In some embodiments, proteins of the present disclosure exhibit serine endoprotease activity belonging to EC 3.4.21 and, optionally, comprise, consist essentially of, or consist of an amino acid sequence that is about/at least 60, 61, 62, 63, 64, 65, 66, 67, 68, 69, 70, 71, 72, 73, 74, 75, 76, 77, 78, 79, 80, 81, 82, 83, 84, 85, 86, 87, 88, 89, 90, 91, 92, 93, 94, 95, 96, 97, 98, 99 or 100% identical to one or more of the amino acid sequences set forth herein as SEQ ID NO(s): 80-86.

[0462] In some embodiments, the protein is selected from the group consisting of:
[0463] a) a polypeptide having about/at least 60, 61, 62, 63, 64, 65, 66, 67, 68, 69, 70, 71, 72, 73, 74, 75, 76, 77, 78, 79, 80, 81, 82, 83, 84, 85, 86, 87, 88, 89, 90, 91, 92, 93, 94, 95, 96, 97, 98, 99 or 100% sequence identity to one or more of SEQ ID NO(s): 80-81;
[0464] b) a polypeptide having about/at least 60, 61, 62, 63, 64, 65, 66, 67, 68, 69, 70, 71, 72, 73, 74, 75, 76, 77, 78, 79, 80, 81, 82, 83, 84, 85, 86, 87, 88, 89, 90, 91, 92, 93, 94, 95, 96, 97, 98, 99 or 100% sequence identity to a mature polypeptide of any one of SEQ ID NO(s): 80-81;
[0465] c) a polypeptide encoded by a polynucleotide having about/at least 60, 61, 62, 63, 64, 65, 66, 67, 68, 69, 70, 71, 72, 73, 74, 75, 76, 77, 78, 79, 80, 81, 82, 83, 84, 85, 86, 87, 88, 89, 90, 91, 92, 93, 94, 95, 96, 97, 98, 99 or 100% sequence identity to one or more of SEQ ID NO(s): 171-172 or the cDNA sequence thereof;
[0466] d) a polypeptide derived from any one of SEQ ID NO(s): 80-81 by substitution, deletion, or insertion of one or more amino acids;
[0467] e) a polypeptide derived from a mature polypeptide of any one of SEQ ID NO(s): 80-81 by substitution, deletion, or insertion of one or more amino acids;
[0468] f) a polypeptide derived from the polypeptide of any one of a) through e) wherein the N- and/or C-terminal end has been extended by the addition of one or more amino acids; and
[0469] g) a fragment of the polypeptide of any one of a) through f)
   wherein the polypeptide has serine endopeptidase activity belonging to EC 3.4.21. Examples of proteins that exhibit serine endopeptidase activity and have an amino acid sequence that is at least 70% identical to one or more of SEQ ID NOs: 80-81 are set forth herein as SEQ ID NOs: 49913-50777.

[0470] In some embodiments, the protein is derived from Cinereomyces, Dichomitus, Ganoderma, Grifola, Lenzites, Meripilus, Neolentinus, Nocardiopsis, Polyporus or Trametes. For example, in some embodiments, the protein is a native Cinereomyces, Dichomitus, Ganoderma, Grifola, Lenzites, Meripilus, Neolentinus, Nocardiopsis, Polyporus or Trametes serine endopeptidase or is a fragment/mutant/variant of a native Cinereomyces, Dichomitus, Ganoderma, Grifola, Lenzites, Meripilus, Neolentinus, Nocardiopsis, Polyporus or Trametes serine endopeptidase.

[0471] In some embodiments, the protein is selected from the group consisting of:
[0472] a) a polypeptide having about/at least 60, 61, 62, 63, 64, 65, 66, 67, 68, 69, 70, 71, 72, 73, 74, 75, 76, 77, 78, 79, 80, 81, 82, 83, 84, 85, 86, 87, 88, 89, 90, 91, 92, 93, 94, 95, 96, 97, 98, 99 or 100% sequence identity to one or more of SEQ ID NO(s): 82;
[0473] b) a polypeptide having about/at least 60, 61, 62, 63, 64, 65, 66, 67, 68, 69, 70, 71, 72, 73, 74, 75, 76, 77, 78, 79, 80, 81, 82, 83, 84, 85, 86, 87, 88, 89, 90, 91, 92, 93, 94, 95, 96, 97, 98, 99 or 100% sequence identity to a mature polypeptide of any one of SEQ ID NO(s): 82;
[0474] c) a polypeptide encoded by a polynucleotide having about/at least 60, 61, 62, 63, 64, 65, 66, 67, 68, 69, 70, 71, 72, 73, 74, 75, 76, 77, 78, 79, 80, 81, 82, 83, 84, 85, 86, 87, 88, 89, 90, 91, 92, 93, 94, 95, 96, 97, 98, 99 or 100% sequence identity to one or more of SEQ ID NO(s): 173 or the cDNA sequence thereof;
[0475] d) a polypeptide derived from any one of SEQ ID NO(s): 82 by substitution, deletion, or insertion of one or more amino acids;
[0476] e) a polypeptide derived from a mature polypeptide of any one of SEQ ID NO(s): 82 by substitution, deletion, or insertion of one or more amino acids;
[0477] f) a polypeptide derived from the polypeptide of any one of a) through e) wherein the N- and/or C-terminal end has been extended by the addition of one or more amino acids; and
[0478] g) a fragment of the polypeptide of any one of a) through f)
   wherein the polypeptide has glutamyl endopeptidase activity belonging to EC 3.4.21.19. Examples of proteins that exhibit glutamyl endopeptidase activity and have an amino acid sequence that is at least 70% identical to one or more of SEQ ID NOs: 82 are set forth herein as SEQ ID NOs: 50778-50953.

[0479] In some embodiments, the protein is derived from Bacillus. For example, in some embodiments, the protein is a native Bacillus glutamyl endopeptidase or is a fragment/mutant/variant of a native Bacillus glutamyl endopeptidase.

[0480] In some embodiments, the protein is selected from the group consisting of:
[0481] a) a polypeptide having about/at least 60, 61, 62, 63, 64, 65, 66, 67, 68, 69, 70, 71, 72, 73, 74, 75, 76, 77, 78, 79, 80, 81, 82, 83, 84, 85, 86, 87, 88, 89, 90, 91, 92, 93, 94, 95, 96, 97, 98, 99 or 100% sequence identity to one or more of SEQ ID NO(s): 83-87;
[0482] b) a polypeptide having about/at least 60, 61, 62, 63, 64, 65, 66, 67, 68, 69, 70, 71, 72, 73, 74, 75, 76, 77, 78, 79, 80, 81, 82, 83, 84, 85, 86, 87, 88, 89, 90, 91, 92, 93, 94, 95, 96, 97, 98, 99 or 100% sequence identity to a mature polypeptide of any one of SEQ ID NO(s): 83-87;
[0483] c) a polypeptide encoded by a polynucleotide having about/at least 60, 61, 62, 63, 64, 65, 66, 67, 68, 69, 70, 71, 72, 73, 74, 75, 76, 77, 78, 79, 80, 81, 82, 83, 84, 85, 86, 87, 88, 89, 90, 91, 92, 93, 94, 95, 96, 97, 98, 99 or 100% sequence identity to one or more of SQ ID NO(s): 174-178 or the cDNA sequence thereof;
[0484] d) a polypeptide derived from any one of SEQ ID NO(s): 83-87 by substitution, deletion, or insertion of one or more amino acids;
[0485] e) a polypeptide derived from a mature polypeptide of any one of SEQ ID NO(s): 83-87 by substitution, deletion, or insertion of one or more amino acids;
[0486] f) a polypeptide derived from the polypeptide of any one of a) through e) wherein the N- and/or C-terminal end has been extended by the addition of one or more amino acids; and
[0487] g) a fragment of the polypeptide of any one of a) through f)
   wherein the polypeptide has subtilisin activity belonging to EC 3.4.21.62. Examples of proteins that exhibit subtilisin activity and have an amino acid sequence that is at least 70% identical to one or more of SEQ ID NOs: 83-87 are set forth herein as SEQ ID NOs: 50954-70838.

[0488] In some embodiments, the protein is derived from Alkalihalobacillus, Aspergillus, Bacillus, Brevia, Geomicrobium, Homo, Hordeum, Lederbergia, Saccharomyces, Shouchella or Thermus. For example, in some embodiments, the protein is a native Alkalihalobacillus, Aspergillus, Bacillus, Brevia, Geomicrobium, Homo, Hordeum, Lederbergia, Saccharomyces, Shouchella or Thermus subtilisin or is a fragment/mutant/variant of a native Alkalihalobacillus, Aspergillus, Bacillus, Brevia, Geomicrobium, Homo, Hordeum, Lederbergia, Saccharomyces, Shouchella or Thermus subtilisin.

[0489] In some embodiments, the protein is selected from the group consisting of:
[0490] a) a polypeptide having about/at least 60, 61, 62, 63, 64, 65, 66, 67, 68, 69, 70, 71, 72, 73, 74, 75, 76, 77, 78, 79, 80, 81, 82, 83, 84, 85, 86, 87, 88, 89, 90, 91, 92, 93, 94, 95, 96, 97, 98, 99 or 100% sequence identity to one or more of SEQ ID NO(s): 88;
[0491] b) a polypeptide having about/at least 60, 61, 62, 63, 64, 65, 66, 67, 68, 69, 70, 71, 72, 73, 74, 75, 76, 77, 78, 79, 80, 81, 82, 83, 84, 85, 86, 87, 88, 89, 90, 91, 92, 93, 94, 95, 96, 97, 98, 99 or 100% sequence identity to a mature polypeptide of any one of SEQ ID NO(s): 88;
[0492] c) a polypeptide encoded by a polynucleotide having about/at least 60, 61, 62, 63, 64, 65, 66, 67, 68, 69, 70, 71, 72, 73, 74, 75, 76, 77, 78, 79, 80, 81, 82, 83, 84, 85, 86, 87, 88, 89, 90, 91, 92, 93, 94, 95, 96, 97, 98, 99 or 100% sequence identity to one or more of SEQ ID NO(s): 179 or the cDNA sequence thereof,
[0493] d) a polypeptide derived from any one of SEQ ID NO(s): 88 by substitution, deletion, or insertion of one or more amino acids;
[0494] e) a polypeptide derived from a mature polypeptide of any one of SEQ ID NO(s): 88 by substitution, deletion, or insertion of one or more amino acids;
[0495] f) a polypeptide derived from the polypeptide of any one of a) through e) wherein the N- and/or C-terminal end has been extended by the addition of one or more amino acids; and
[0496] g) a fragment of the polypeptide of any one of a) through f)
   wherein the polypeptide has bacillolycin activity belonging to EC 3.4.24.28. Examples of proteins that exhibit bacillolycin activity and have an amino acid sequence that is at least 70% identical to one or more of SEQ ID NOs: 88 are set forth herein as SEQ ID NOs: 70839-71903.

[0497] In some embodiments, the protein is derived from Bacillus. For example, in some embodiments, the protein is a native Bacillus bacillolycin or is a fragment/mutant/variant of a native Bacillus bacillolycin.

[0498] Those skilled in the art will understand how to identify, isolate, characterize, produce, recover and formulate proteins having one or more peptidase activities belong to EC 3.4. See, e.g., CA2829859-A1; CN102676561-A; CN102703482-A; CN103013960-A; CN103243081-A; CN103255156-A; CN103602653-A; CN104232610-A; CN105132397-A; CN105176951-A; CN106350530-; CN106801048-A; CN107384897-A; CN107828765-A; CN107937372-A; CN107937374-A; CN108004220-; CN108359659-A; CN108384771-A; CN108570461-A; CN108570462-A; CN109456957-A; CN109593746-; CN110746494-A; CN110777136-A; CN110819612-A; CN110862979-A; CN110923221-A; CN110923222-; CN111004794-A; CN111334494-A; CN111575265-A; CN111893126-A; CN111909979-A; CN112301023-; CN112458072-A; CN112501149-A; CN112574978-A; CN112662652-A; CN112662653-A; CN113528493-; CN113699138-A; CN113832130-A; CN113832131-A; CN113862244-A; CN114107266-A; CN114317502-; CN114540330-A; CN114561375-A; CN114574469-A; CN114591935-A; CN114774396-A; CN114806990-; CN114836408-A; CN114908074-A; CN114958897-A; CN115029337-A; CN115074347-A; CN115247166-; CN1361279-A; CN1814746-A; CN1814755-A; CN1995343-A; DE102006022224-A1; DE102007044415-1; DE102007049830-A1; DE102007051092-A1; DE102008059446-A1; DE102008059447-A1; DE102009029513-A1; DE102010028951-A; DE102011005354-A; DE102011118032-A1; DE102012215642-A1; DE102012220101-A1; DE102013219467-A1; DE102013221206-A1; DE102014212643-A1; DE102014224825-A1; DE102014226681-A1; DE102015223270-A1; DE102016204814-A1; DE102016204815-A1; DE102016208463-A1; DE102016210628-A1; DE102017215628-A1; DE102017215629-A1; DE102017215631-A1; DE102017223275-A1; DE102018004206-A1; DE102018004207-A1; DE102019111047-A1; DE102019111057-A1; DE102019111075-A1; DE102019210806-A1; DE102020105720-A1; DE102020105721-A1; DE102020205381-A1; DE102020205400-A1; DE10260903-A1; DE19530816-A1; DE3821491-A; DE4224125-A1; DE4411223-A1; EP1160327-A2; EP133756-A; EP2100948-A1; EP2607468-A1; EP3106508-A1; EP3275988-A1; EP3301155-A1; EP3309244-A1; EP3323875-A1; EP3339423-A1; EP3660146-A1; EP3660151-A1; EP398539-A; EP405901-A; EP405902-A; EP415296-A; EP416967-A; EP430637-A; EP443476-A; EP482879-A; EP516200-A1; EP571049-A1; EP687733-A1; JP01137972-A; JP02076586-A; JP11137282-A; JP2004043660-A; JP2004313043-A; JP2008022828-A; JP2011234685-A; JP2016121081-A; JP2017079639-A; JP2022045888-A; US2004091474-A1; US2004197894-A1; US2004223962-A1; US2009087888-A1; US2012067373-A1; US2013123162-A1; US2015125925-A1; US2016032267-A1; US2019185788-A1; US2019185789-A1; US2020306342-A1; US2021122997-A1; US2022098524-A1; U.S. Pat. No. 4,980,288-A; U.S. Pat. No. 5,260,207-A; U.S. Pat. No. 5,316,935-A; U.S. Pat. No. 5,316,941-A; U.S. Pat. No. 5,371,008-A; U.S. Pat. No. 5,472,855-A; U.S. Pat. No. 5,652,136-A; U.S. Pat. No. 5,677,272-A; U.S. Pat. No. 5,679,630-A; U.S. Pat. No. 5,719,021-A; U.S. Pat. No. 6,017,871-A; U.S. Pat. No. 6,271,012-1; U.S. Pat. No. 6,312,936-B1; U.S. Pat. No. 6,440,717-B1; WO200022103-A1; WO200024924-A2; WO200037599-A1; WO200037621-A1; WO200037622-A1; WO200037623-A1; WO200037624-A1; WO200037625-A1; WO200037626-A1; WO200037627-A1; WO200071683-A1; WO200071684-A1; WO200071685-A1; WO200071686-A1; WO200071687-A1; WO200071688-A1; WO200071689-A1; WO200071690-A1; WO200071691-A1; WO200116285-A2; WO200168821-A2; WO200175087-A2; WO200183559-A2; WO200210183-A1; WO200216547-A2; WO200218588-A1; WO200222796-A1; WO200231133-A1; WO200240997-A2; WO200277289-A1; WO200288340-A2; WO2003038082-A2; WO2003054184-A1; WO2003054185-A1; WO2003055974-A2; WO2003057713-A2; WO2003062381-A2; WO2003093453-A2; WO2004003186-A2; WO2004016752-A2; WO2004042049-A1; WO2004064744-A2; WO2004099401-A1; WO2004111219-A1; WO2005024002-A1; WO2005035747-A1; WO2005078074-A2; WO2005079826-A1; WO2005095592-A2; WO2005115445-A1; WO2005118793-A2; WO2005123911-A2; WO2005123914-A1; WO2005124012-A1; WO2006088325-A1; WO2006136159-A2; WO2006136160-A2; WO2007006305-A1; WO2007019858-A2; WO2007044993-A2; WO2007080197-A2; WO2007122175-A1; WO2008010925-A2; WO2008112258-A2; WO2008141281-A1; WO02008153934-A2; WO2008153935-A2; WO2009005647-A2; WO2009021867-A2; WO2009058518-A1; WO2009071550-A1; WO2009074650-A2; WO2009149144-A2; WO2009149145-A2; WO2009149200-A2; WO2010056640-A2; WO2010056653-A2; WO2010056671-A1; WO2010078462-A1; WO2010123754-A1; WO2011014278-A1; WO2011036263-A1; WO2011072099-A2; WO2011072117-A1; WO2011091370-A1; WO2011110625-A1; WO2011130076-A1; WO2011130222-A2; WO2011140316-A1; WO2011140364-A1; WO2012080202-A1; WO2012151480-A2; WO2012151534-A1; WO2013086219-A1; WO2013092635-A1; WO2013110766-A1; WO2013159032-A1; WO2014037438-A1; WO2014055778-A2; WO2014055782-A1; WO2014081884-A1; WO2014194034-A2; WO2014207228-A1; WO2015038792-A1; WO2015048332-A2; WO2015048339-A2; WO2015065871-A1; WO2015089441-A1; WO2015089447-A1; WO2015143360-A2; WO2015144932-A1; WO2015144936-A1; WO2015185689-A1; WO2016040464-A1; WO2016046234-A2; WO2016069552-A1; WO2016069557-A1; WO2016069563-A1; WO2016069569-A2; WO2016097405-A1; WO2016145428-A1; WO2016164096-A1; WO2016174234-A2; WO2016180928-A1; WO2016183509-A1; WO2016203064-A2; WO2016205710-A1; WO2016205755-A1; WO2017006266-A1; WO2017050291-A1; WO2017081274-A1; WO2017089093-A1; WO2017089366-A1; WO2017089456-A1; WO2017106676-A1; WO2017177153-A1; WO2017189720-A1; WO2017192692-A1; WO2017210295-A1; WO2017219011-A1; WO2018015303-A1; WO2018015304-A1; WO2018118917-A1; WO2018118950-A1; WO2018161899-A1; WO2018188667-A1; WO2018222990-A1; WO2019048486-A1; WO2019048495-A1; WO2019108599-A1; WO2019180111-A1; WO2019238761-A1; WO2019245704-A1; WO2019245705-A1; WO2019245838-A1; WO2019245839-A1; WO2020002255-A1; WO2020007863-A1; WO2020023411-A1; WO2020076697-A1; WO2020112599-A1; WO2020114968-A1; WO2020156419-A1; WO2020169564-A1; WO2020176443-A1; WO2020188095-A1; WO2020200198-A1; WO2020201403-A1; WO2020207944-A1; WO2020243738-A1; WO2021013685-A1; WO2021013686-A1; WO2021025872-A1; WO2021030400-A1; WO2021080948-A2; WO2021119304-A1; WO2021122120-A2; WO2021130167-A1; WO2021133701-A1; WO2021148364-A1; WO2021209548-A1; WO2021230359-A1; WO2021231621-A1; WO2021231623-A1; WO2021248045-A2; WO2022043547-A1; WO2022043563-A1; WO2022043745-A1; WO2022106400-A1; WO2022129166-A1; WO2022171120-A1; WO2022171667-A1; WO2022175263-A2; WO2022225696-A2; WO2022226158-A2; WO2022261003-A1; WO2023288294-A1; WO8807581-A; WO9102792-A; WO9106637-A; WO9211348-A1; WO9211357-A1; WO9221760-A1; WO9307276-A1; WO9402618-A1; WO9418329-A2; WO9423053-A1; WO9507991-A2; WO9510591-A1; WO9510615-A1; WO9523221-A1; WO9523614-A1; WO9530011-A2; WO9628557-A2; WO9628566-A2; WO9634935-A2; WO9634946-A1; WO9820115-A1; WO9830682-A1; WO9855634-A1; WO9920770-A2; WO9927082-A1; WO9967370-A1.

[0499] In some embodiments, proteins of the present disclosure exhibit one or more hydrolase activities belonging to EC 3.5, such as amidohydrolase and amidase activities belonging to EC 3.5.1 (e.g., asparaginase activity belong to EC 3.5.1.1, glutaminase activity belonging to 3.5.1.2, amidase activity belonging to 3.5.1.4, urease activity belonging to 3.5.1.5, biotinidase activity belonging to 3.5.1.12, nicotinamidase activity belonging to 3.5.1.19, N-acetylglucosamine deacetylase activity belonging to EC 3.5.1.33, D-glutaminase activity belonging to 3.5.1.35, glutamin-(asparagin-)ase activity belonging to 3.5.1.38, chitin deacetylase activity belonging to 3.5.1.41, peptidyl-glutaminase activity belonging to 3.5.1.43, protein-glutamine glutaminase activity belonging to 3.5.1.44, pentanamidase activity belonging to 3.5.1.50, peptidoglycan-N-acetylglucosamine deacetylase activity belonging to EC 3.5.1.104) aminidase and deiminase activities belonging to EC 3.5.3 (e.g., arginase activity belonging to EC 3.5.3.1, arginine deiminase activity belonging to EC 3.5.3.6, D-arginase activity belonging to EC 3.5.3.10, protein-arginine deiminase activity belonging to EC 3.5.3.15), and/or deaminase activities belonging to EC 3.5.4 (e.g., cytosine deaminase activity belonging to EC 3.5.4.1, adenine deaminase activity belonging to EC 3.5.4.2, guanine deaminase activity belonging to EC 3.5.4.3, adenosine deaminase activity belonging to EC 3.5.4.4), and, optionally, comprise, consist essentially of, or consist of an amino acid sequence that is about/at least 60, 61, 62, 63, 64, 65, 66, 67, 68, 69, 70, 71, 72, 73, 74, 75, 76, 77, 78, 79, 80, 81, 82, 83, 84, 85, 86, 87, 88, 89, 90, 91, 92, 93, 94, 95, 96, 97, 98, 99 or 100% identical to one or more of the amino acid sequences set forth herein as SEQ ID NO(s): 89-90.

[0500] In some embodiments, the protein is selected from the group consisting of
[0501] a) a polypeptide having about/at least 60, 61, 62, 63, 64, 65, 66, 67, 68, 69, 70, 71, 72, 73, 74, 75, 76, 77, 78, 79, 80, 81, 82, 83, 84, 85, 86, 87, 88, 89, 90, 91, 92, 93, 94, 95, 96, 97, 98, 99 or 100% sequence identity to one or more of SEQ ID NO(s): 89-90;
[0502] b) a polypeptide having about/at least 60, 61, 62, 63, 64, 65, 66, 67, 68, 69, 70, 71, 72, 73, 74, 75, 76, 77, 78, 79, 80, 81, 82, 83, 84, 85, 86, 87, 88, 89, 90, 91, 92, 93, 94, 95, 96, 97, 98, 99 or 100% sequence identity to a mature polypeptide of any one of SEQ ID NO(s): 89-90;
[0503] c) a polypeptide encoded by a polynucleotide having about/at least 60, 61, 62, 63, 64, 65, 66, 67, 68, 69, 70, 71, 72, 73, 74, 75, 76, 77, 78, 79, 80, 81, 82, 83, 84, 85, 86, 87, 88, 89, 90, 91, 92, 93, 94, 95, 96, 97, 98, 99 or 100% sequence identity to one or more of SEQ ID NO(s): 180-181 or the cDNA sequence thereof;
[0504] d) a polypeptide derived from any one of SEQ ID NO(s): 89-90 by substitution, deletion, or insertion of one or more amino acids;
[0505] e) a polypeptide derived from a mature polypeptide of any one of SEQ ID NO(s): 89-90 by substitution, deletion, or insertion of one or more amino acids;
[0506] f) a polypeptide derived from the polypeptide of any one of a) through e) wherein the N- and/or C-terminal end has been extended by the addition of one or more amino acids; and
[0507] g) a fragment of the polypeptide of any one of a) through f)
   wherein the polypeptide has asparaginase activity belonging to EC 3.5.1.1. Examples of proteins that exhibit asparaginase activity and have an amino acid sequence that is at least 70% identical to one or more of SEQ ID NOs: 89-90 are set forth herein as SEQ ID NOs: 71904-72141.

[0508] In some embodiments, the protein is derived from Aspergillus. For example, in some embodiments, the protein is a native Aspergillus asparaginase or is a fragment/mutant/variant of a native Aspergillus asparaginase.

[0509] Those skilled in the art will understand how to identify, isolate, characterize, produce, recover and formulate proteins having one or more hydrolase activities belong to EC 3.5. See, e.g., CN109486689-A; EP2295582-A2; U.S. Pat. No. 7,504,490-B1; WO2004032648-A1; WO2008110513-A1; WO2008128974-A1; WO2008128975-A1; WO2011134916-A1; WO2012068047-A2; WO2014027062-A1; WO2014027063-A1; WO2014147189-A1.

[0510] In some embodiments, proteins of the present disclosure exhibit one or more lyase activities belonging to Enzyme Commission classification number 4 (EC 4). For example, in some embodiments, proteins of the present disclosure exhibit lyase activity useful for a) preventing/treating/suppressing/eliminat-ing/reducing the detrimental effects of infestations/infections of/by various pests, including, but not limited to, phytopathogenic pests, such as acarids, bacteria, fungi, gastropods, insects, nematodes, oomycetes, protozoa, viruses and weeds; b) reducing one or more aspects of disease severity in plants affected by one or more phytopathogenic pests; c) pretreating surfaces/substances that are susceptible to infestation/infection by pests; d) cleaning surfaces/substances that are infested/infected by pests; e) enhancing the environments in which plants are grown by; f) improving nutrient availability in plant growth media; g) reducing the amounts of exogenous fertilizer needed to achieve a desired result; h) improving plant growth, development, and yield characteristics; i) prolonging the shelf-life of harvested plants and plant parts; j) delaying/hastening the ripening of a plant or plant part; k) improving the efficacy of chemical pesticides; and/or l) reducing chemical-pesticide-induced resistance/phytotoxicity.

[0511] In some embodiments, proteins of the present disclosure exhibit one or more carbon-carbon lyase activities belonging to EC 4.1, such as carboxy-lyase activities belonging to EC 4.1.1 (e.g., aspartate 1-decarboxylase activity belonging to EC 4.1.1.11, aspartate 4-decarboxylase activity belonging to EC 4.1.1.12, valine decarboxylase activity belonging to EC 4.1.1.14, glutamate decarboxylase activity belonging to EC 4.1.1.15, lysine decarboxylase activity belonging to EC 4.1.1.18, arginine decarboxylase activity belonging to EC 4.1.1.19, histidine decarboxylase activity belonging to EC 4.1.1.22, tyrosine decarboxylase activity belonging to EC 4.1.1.25, phenylalanine decarboxylase activity belonging to EC 4.1.1.53, methionine decarboxylase activity belonging to EC 4.1.1.57, L-tryptophan decarboxylase activity belonging to EC 4.1.1.105) and/or carbon-carbon lyase activities belonging to EC 4.1.99 (e.g., tryptophanase activity belonging to EC 4.1.99.1, tyrosine phenol-lyase activity belonging to EC 4.1.99.2).

[0512] Those skilled in the art will understand how to identify, isolate, characterize, produce, recover and formulate proteins having one or more carbon-carbon lyase activities belong to EC 4.1.

[0513] In some embodiments, proteins of the present disclosure exhibit one or more carbon-oxygen lyase activities belonging to EC 4.2, such as polysaccharide lyase activities belonging to EC 4.2.2 (e.g., pectate lyase activity belong to EC 4.2.2.2, pectin lyase activity belonging to EC 4.2.2.10, glucan lyase activity belonging to EC 4.2.2.13, gellan lyase activity belonging to EC 4.2.2.25, oligo-alginase lyase activity belonging to EC 4.2.2.26, pectin monosaccharide-lyase activity belonging to EC 4.2.2.27), and, optionally, comprise, consist essentially of, or consist of an amino acid sequence that is about/at least 60, 61, 62, 63, 64, 65, 66, 67, 68, 69, 70, 71, 72, 73, 74, 75, 76, 77, 78, 79, 80, 81, 82, 83, 84, 85, 86, 87, 88, 89, 90, 91, 92, 93, 94, 95, 96, 97, 98, 99 or 100% identical to the amino acid sequence set forth herein as SEQ ID NO(s): 91 and 55.

[0514] In some embodiments, the protein is selected from the group consisting of:
[0515] a) a polypeptide having about/at least 60, 61, 62, 63, 64, 65, 66, 67, 68, 69, 70, 71, 72, 73, 74, 75, 76, 77, 78, 79, 80, 81, 82, 83, 84, 85, 86, 87, 88, 89, 90, 91, 92, 93, 94, 95, 96, 97, 98, 99 or 100% sequence identity to one or more of SEQ ID NO(s): 91;
[0516] b) a polypeptide having about/at least 60, 61, 62, 63, 64, 65, 66, 67, 68, 69, 70, 71, 72, 73, 74, 75, 76, 77, 78, 79, 80, 81, 82, 83, 84, 85, 86, 87, 88, 89, 90, 91, 92, 93, 94, 95, 96, 97, 98, 99 or 100% sequence identity to a mature polypeptide of any one of SEQ ID NO(s): 91;
[0517] c) a polypeptide encoded by a polynucleotide having about/at least 60, 61, 62, 63, 64, 65, 66, 67, 68, 69, 70, 71, 72, 73, 74, 75, 76, 77, 78, 79, 80, 81, 82, 83, 84, 85, 86, 87, 88, 89, 90, 91, 92, 93, 94, 95, 96, 97, 98, 99 or 100% sequence identity to one or more of SEQ ID NO(s): 182 or the cDNA sequence thereof,
[0518] d) a polypeptide derived from any one of SEQ ID NO(s): 91 by substitution, deletion, or insertion of one or more amino acids;
[0519] e) a polypeptide derived from a mature polypeptide of any one of SEQ ID NO(s): 91 by substitution, deletion, or insertion of one or more amino acids;
[0520] f) a polypeptide derived from the polypeptide of any one of a) through e) wherein the N- and/or C-terminal end has been extended by the addition of one or more amino acids; and
[0521] g) a fragment of the polypeptide of any one of a) through f)
   wherein the polypeptide has pectate lyase activity belonging to EC 4.2.2.2. Examples of proteins that exhibit pectate lyase activity and have an amino acid sequence that is at least 70% identical to one or more of SEQ ID NOs: 91 are set forth herein as SEQ ID NOs: 72142-72143.

[0522] In some embodiments, the protein is derived from Bacillus. For example, in some embodiments, the protein is a native Bacillus pectate lyase or is a fragment/mutant/variant of a native Bacillus pectate lyase.

[0523] In some embodiments, the protein is selected from the group consisting of:
[0524] a) a polypeptide having about/at least 60, 61, 62, 63, 64, 65, 66, 67, 68, 69, 70, 71, 72, 73, 74, 75, 76, 77, 78, 79, 80, 81, 82, 83, 84, 85, 86, 87, 88, 89, 90, 91, 92, 93, 94, 95, 96, 97, 98, 99 or 100% sequence identity to one or more of SEQ ID NO(s): 55;
[0525] b) a polypeptide having about/at least 60, 61, 62, 63, 64, 65, 66, 67, 68, 69, 70, 71, 72, 73, 74, 75, 76, 77, 78, 79, 80, 81, 82, 83, 84, 85, 86, 87, 88, 89, 90, 91, 92, 93, 94, 95, 96, 97, 98, 99 or 100% sequence identity to a mature polypeptide of any one of SEQ ID NO(s): 55;
[0526] c) a polypeptide encoded by a polynucleotide having about/at least 60, 61, 62, 63, 64, 65, 66, 67, 68, 69, 70, 71, 72, 73, 74, 75, 76, 77, 78, 79, 80, 81, 82, 83, 84, 85, 86, 87, 88, 89, 90, 91, 92, 93, 94, 95, 96, 97, 98, 99 or 100% sequence identity to one or more of SEQ ID NO(s): 146 or the cDNA sequence thereof;
[0527] d) a polypeptide derived from any one of SEQ ID NO(s): 55 by substitution, deletion, or insertion of one or more amino acids;
[0528] e) a polypeptide derived from a mature polypeptide of any one of SEQ ID NO(s): 55 by substitution, deletion, or insertion of one or more amino acids;
[0529] f) a polypeptide derived from the polypeptide of any one of a) through e) wherein the N- and/or C-terminal end has been extended by the addition of one or more amino acids; and
[0530] g) a fragment of the polypeptide of any one of a) through f)
   wherein the polypeptide has pectin lyase activity belonging to EC 4.2.2.10. Examples of proteins that exhibit pectin lyase activity and have an amino acid sequence that is at least 70% identical to one or more of SEQ ID NOs: 55 are set forth herein as SEQ ID NOs: 45409-45436.

[0531] In some embodiments, the protein is derived from Aspergillus, Botrytis, Neosartorya, Penicillium or Pseudomyllocerus. For example, in some embodiments, the protein is a native Aspergillus, Botrytis, Neosartorya, Penicillium or Pseudomyllocerus pectin lyase or is a fragment/mutant/variant of a native Aspergillus, Botrytis, Neosartorya, Penicillium or Pseudomyllocerus pectin lyase.

[0532] Those skilled in the art will understand how to identify, isolate, characterize, produce, recover and formulate proteins having one or more carbon-oxygen lyase activities belong to EC 4.2. See, e.g., US2015045535-A1; WO9927083-A1.

[0533] In some embodiments, proteins of the present disclosure exhibit one or more carbon-nitrogen lyase activities belonging to EC 4.3, such as ammonia-lyase activities belonging to EC 4.3.1 (e.g., aspartate ammonia-lyase activity belonging to EC 4.3.1.1, histidine ammonia-lyase activity belong to EC 4.3.1.3, L-serine ammonia-lyase activity belonging to EC 4.3.1.17, D-serine ammonia-lyase activity belonging to EC 4.3.1.18, threonine ammonia-lyase activity belonging to EC 4.3.1.19, tyrosine ammonia-lyase activity belonging to EC 4.3.1.23, phenylalanine ammonia-lyase activity belonging to EC 4.3.1.24, phenylalanine/tyrosine ammonia-lyase activity belonging to EC 4.3.1.25, L-lysine cyclodeaminase activity belonging to EC 4.3.1.28, L-tryptophan ammonia-lyase activity belonging to EC 4.3.1.31).

[0534] Those skilled in the art will understand how to identify, isolate, characterize, produce, recover and formulate proteins having one or more carbon-nitrogen lyase activities belong to EC 4.3.

[0535] In some embodiments, proteins of the present disclosure exhibit one or more carbon-sulfur lyase activities belonging to 4.4, such as carbon-sulfur lyase activities belonging to EC 4.4.1 (e.g., cysteine lyase activity belonging to EC 4.4.1.10, methionine gamma-lyase activity belonging to EC 4.4.1.11, L-cysteine desulfidase activity belonging to EC 4.4.1.28, L-cysteine beta-lyase activity belonging to EC 4.4.1.35).

[0536] Those skilled in the art will understand how to identify, isolate, characterize, produce, recover and formulate proteins having one or more carbon-sulfur lyase activities belong to EC 4.4.

[0537] In some embodiments, the protein comprises, consists essentially of, or consists of a wild-type polypeptide. For example, in some embodiments, the protein comprises, consists essentially of, or consists of a wild-type polypeptide having about/at least 60, 61, 62, 63, 64, 65, 66, 67, 68, 69, 70, 71, 72, 73, 74, 75, 76, 77, 78, 79, 80, 81, 82, 83, 84, 85, 86, 87, 88, 89, 90, 91, 92, 93, 94, 95, 96, 97, 98, 99 or 100% sequence identity to any one or more of SEQ ID NO(s): 1-91, 45906, 72144, 72147 and 72149 or a mature polypeptide thereof.

[0538] In some embodiments, the protein comprises, consists essentially of, or consists of a variant polypeptide. For example, in some embodiments, the protein comprises, consists essentially of, or consists of a variant polypeptide having about/at least 60, 61, 62, 63, 64, 65, 66, 67, 68, 69, 70, 71, 72, 73, 74, 75, 76, 77, 78, 79, 80, 81, 82, 83, 84, 85, 86, 87, 88, 89, 90, 91, 92, 93, 94, 95, 96, 97, 98, 99 or 100% sequence identity to any one or more of SEQ ID NO(s): 1-91, 45906, 72144, 72147 and 72149 or a mature polypeptide thereof.

[0539] In some embodiments, the protein comprises, consists essentially of or consists of a catalytic domain, a binding module and a linker between said catalytic domain and said binder module.

[0540] The present disclosure extends to proteins capable of exhibiting two, three, four, five or more distinct catalytic activities, including, but not limited to, proteins that inherently exhibit two or more distinct catalytic activities and fusion proteins comprising two or more polypeptides that exhibit distinct catalytic activities.

[0541] In some embodiments, the protein is a hybrid protein.

[0542] In some embodiments, the protein comprises two or more catalytic domains.

[0543] In some embodiments, the protein comprises two or more binding modules.

[0544] In some embodiments, the protein is a fusion protein (e.g., a fusion protein comprising a first polypeptide having a first enzymatic activity and a second polypeptide having a second enzymatic activity).

[0545] In some embodiments, the protein is a fusion protein comprising a first polypeptide and a second polypeptide, said second polypeptide being distinct from said first polypeptide, wherein said first polypeptide is selected from the group consisting of:
[0546] a) a polypeptide having about/at least 60, 61, 62, 63, 64, 65, 66, 67, 68, 69, 70, 71, 72, 73, 74, 75, 76, 77, 78, 79, 80, 81, 82, 83, 84, 85, 86, 87, 88, 89, 90, 91, 92, 93, 94, 95, 96, 97, 98, 99 or 100% sequence identity to any one or more of SEQ ID NO(s): 1-91, 45906, 72144, 72147 and 72149;
[0547] b) a polypeptide having about/at least 60, 61, 62, 63, 64, 65, 66, 67, 68, 69, 70, 71, 72, 73, 74, 75, 76, 77, 78, 79, 80, 81, 82, 83, 84, 85, 86, 87, 88, 89, 90, 91, 92, 93, 94, 95, 96, 97, 98, 99 or 100% sequence identity to a mature polypeptide of any one or more of SEQ ID NO(s): 1-91, 45906, 72144, 72147 and 72149;
[0548] c) a polypeptide encoded by a polynucleotide having about/at least 60, 61, 62, 63, 64, 65, 66, 67, 68, 69, 70, 71, 72, 73, 74, 75, 76, 77, 78, 79, 80, 81, 82, 83, 84, 85, 86, 87, 88, 89, 90, 91, 92, 93, 94, 95, 96, 97, 98, 99 or 100% sequence identity to any one or more of SEQ ID NO(s): 92-182, 72145-72146, 72148 and 72150 or the cDNA sequence thereof;
[0549] d) a polypeptide derived from any one of SEQ ID NO(s): 1-91, 45906, 72144, 72147 and 72149 by substitution, deletion, or insertion of one or more amino acids;
[0550] e) a polypeptide derived from a mature polypeptide any one of SEQ ID NO(s): 1-91, 45906, 72144, 72147 and 72149 by substitution, deletion, or insertion of one or more amino acids;
[0551] f) a polypeptide derived from the polypeptide of any one of a) through e) wherein the N- and/or C-terminal end has been extended by the addition of one or more amino acids; and
[0552] g) a fragment of the polypeptide of any one of a) through f), and, optionally, wherein said second polypeptide is selected from the group consisting of:
[0553] h) a polypeptide having about/at least 60, 61, 62, 63, 64, 65, 66, 67, 68, 69, 70, 71, 72, 73, 74, 75, 76, 77, 78, 79, 80, 81, 82, 83, 84, 85, 86, 87, 88, 89, 90, 91, 92, 93, 94, 95, 96, 97, 98, 99 or 100% sequence identity to any one or more of SEQ ID NO(s): 1-91, 45906, 72144, 72147 and 72149;
[0554] i) a polypeptide having about/at least 60, 61, 62, 63, 64, 65, 66, 67, 68, 69, 70, 71, 72, 73, 74, 75, 76, 77, 78, 79, 80, 81, 82, 83, 84, 85, 86, 87, 88, 89, 90, 91, 92, 93, 94, 95, 96, 97, 98, 99 or 100% sequence identity to a mature polypeptide of any one or more of SEQ ID NO(s): 1-91, 45906, 72144, 72147 and 72149;
[0555] j) a polypeptide encoded by a polynucleotide having about/at least 60, 61, 62, 63, 64, 65, 66, 67, 68, 69, 70, 71, 72, 73, 74, 75, 76, 77, 78, 79, 80, 81, 82, 83, 84, 85, 86, 87, 88, 89, 90, 91, 92, 93, 94, 95, 96, 97, 98, 99 or 100% sequence identity to any one or more of SEQ ID NO(s): 92-182, 72145-72146, 72148 and 72150 or the cDNA sequence thereof;
[0556] k) a polypeptide derived from any one of SEQ ID NO(s): 1-91, 45906, 72144, 72147 and 72149 by substitution, deletion, or insertion of one or more amino acids;
[0557] l) a polypeptide derived from a mature polypeptide any one of SEQ ID NO(s): 1-91, 45906, 72144, 72147 and 72149 by substitution, deletion, or insertion of one or more amino acids;
[0558] m) a polypeptide derived from the polypeptide of any one of h) through 1) wherein the N- and/or C-terminal end has been extended by the addition of one or more amino acids; and
[0559] n) a fragment of the polypeptide of any one of h) through m).

[0560] In preferred embodiments, proteins of the present disclosure comprise, consist essentially of or consist of the amino acid sequence of any one of SEQ ID NO(s): 1-91, 45906, 72144, 72147 and 72149 or a mature polypeptide thereof.

[0561] In preferred embodiments, proteins of the present disclosure are encoded by a polynucleotide that comprises, consists essentially of or consists of one of SEQ ID NO(s): 92-182, 72145-72146, 72148 and 72150 or the cDNA thereof.

[0562] In some embodiments, proteins of the present disclosure comprise, consist essentially of or consist of a fragment of one of SEQ ID NO(s): 1-91, 45906, 72144, 72147 and 72149 or a mature peptide thereof. For example, the protein may be a fragment of any one of SEQ ID NO(s): 1-91, 45906, 72144, 72147 and 72149 or a mature peptide thereof, said fragment comprising at least 85, 86, 87, 88, 89, 90, 91, 92, 93, 94, 95, 96, 97, 98 or 99% of the amino acids found in the original protein.

[0563] As noted above, in some embodiments, proteins of the present disclosure comprise, consist essentially of or consist of any one of SEQ ID NO(s): 1-91, 45906, 72144, 72147 and 72149 or a mature polypeptide thereof with an N-terminal extension of one or more amino acids (e.g., 1, 2, 3, 4, 5, 6, 7, 8, 9, 10, 11, 12, 13, 14, 15, 16, 17, 18, 19, 20 or more amino acids), a C-terminal extension of one or more amino acids (e.g., 1, 2, 3, 4, 5, 6, 7, 8, 9, 10, 11, 12, 13, 14, 15, 16, 17, 18, 19, 20 or more amino acids), one or more substitutions (e.g., 1, 2, 3, 4, 5, 6, 7, 8, 9, 10, 11, 12, 13, 14, 15, 16, 17, 18, 19, 20 or more substitutions), one or more insertions (e.g., 1, 2, 3, 4, 5, 6, 7, 8, 9, 10, 11, 12, 13, 14, 15, 16, 17, 18, 19, 20 or more insertions), and/or one or more deletions (e.g., 1, 2, 3, 4, 5, 6, 7, 8, 9, 10, 11, 12, 13, 14, 15, 16, 17, 18, 19, 20 or more deletions). The amino acid changes may be of a minor nature, that is conservative amino acid substitutions or insertions that do not significantly affect the folding and/or activity of the protein; small deletions, typically of 1-30 amino acids; small amino- or carboxyl-terminal extensions, such as an amino-terminal methionine residue; a small linker peptide of up to 20-25 residues; or a small extension that facilitates purification by changing net charge or another function, such as a poly-histidine tract, an antigenic epitope or a binding module.

[0564] Essential amino acids in a polypeptide can be identified according to procedures known in the art, such as site-directed mutagenesis or alanine-scanning mutagenesis (Cunningham and Wells, 1989, Science 244: 1081-1085). In the latter technique, single alanine mutations are introduced at every residue in the molecule, and the resultant molecules are evaluated for catalytic activity to identify amino acid residues that are critical to the activity of the molecule. See also, Hilton et al., 1996, J Biol. Chem. 271: 4699-4708. The active site of the enzyme or other biological interaction can also be determined by physical analysis of structure, as determined by such techniques as nuclear magnetic resonance, crystallography, electron diffraction, or photoaffinity labeling, in conjunction with mutation of putative contact site amino acids. See, for example, de Vos et al., 1992, Science 255: 306-312; Smith et al., 1992, J Mol. Biol. 224: 899-904; Wlodaver et al., 1992, FEBS Lett. 309: 59-64. The identity of essential amino acids can also be inferred from an alignment with a related polypeptide, and/or be inferred from sequence homology and conserved catalytic machinery with a related polypeptide or within a polypeptide or protein family with polypeptides/proteins descending from a common ancestor, typically having similar three-dimensional structures, functions, and significant sequence similarity. Additionally or alternatively, protein structure prediction tools can be used for protein structure modelling to identify essential amino acids and/or active sites of polypeptides. See, for example, Jumper et al., 2021, “Highly accurate protein structure prediction with AlphaFold”, Nature 596: 583-589.

[0565] Single or multiple amino acid substitutions, deletions, and/or insertions can be made and tested using known methods of mutagenesis, recombination, and/or shuffling, followed by a relevant screening procedure, such as those disclosed by Reidhaar-Olson and Sauer, 1988, Science 241: 53-57; Bowie and Sauer, 1989, Proc. Natl. Acad. Sci. USA 86: 2152-2156; WO 95/17413; or WO 95/22625. Other methods that can be used include error-prone PCR, phage display (e.g., Lowman et al., 1991, Biochemistry 30: 10832-10837; U.S. Pat. No. 5,223,409; WO 92/06204), and region-directed mutagenesis (Derbyshire et al., 1986, Gene 46: 145; Ner et al., 1988, DNA 7: 127).

[0566] Mutagenesis/shuffling methods can be combined with high-throughput, automated screening methods to detect activity of cloned, mutagenized polypeptides expressed by host cells (Ness et al., 1999, Nature Biotechnology 17: 893-896). Mutagenized DNA molecules that encode active polypeptides can be recovered from the host cells and rapidly sequenced using standard methods in the art. These methods allow the rapid determination of the importance of individual amino acid residues in a polypeptide.

[0567] Table 1 provides a non-exhaustive list of proteins useful in compositions and methods of the present disclosure.

TABLE 1
Exemplary proteins of the present disclosure

| | | Polypeptide | Polynucleotide |
|---|---|---|---|
| Enzyme Class | EC # | SEQ ID NO: | SEQ ID NO: |
| glucose oxidase | 1.1.3.4 | 1 | 92 |
| glucose oxidase | 1.1.3.4 | 2 | 93 |
| glucose oxidase | 1.1.3.4 | 3 | 94 |
| glucose oxidase | 1.1.3.4 | 4 | 95 |
| glucose oxidase | 1.1.3.4 | 5 | 96 |
| cellobiose oxidase | 1.1.99.18 | 6 | 97 |
| cellobiose oxidase | 1.1.99.18 | 7 | 98 |
| cellobiose oxidase | 1.1.99.18 | 8 | 99 |
| laccase | 1.10.3.2 | 9 | 100 |
| catalase | 1.11.1.6 | 10 | 101 |
| catalase | 1.11.1.6 | 11 | 102 |
| catalase | 1.11.1.6 | 12 | 103 |
| peroxidase | 1.11.1.7 | 13 | 104 |
| lytic cellulose monooxygenase | 1.14.99.56 | 14 | 105 |
| lytic cellulose monooxygenase | 1.14.99.56 | 15 | 106 |
| gamma-glutamyl transferase | 2.3.2.2 | 16 | 107 |
| triacylglycerol lipase | 3.1.1.3 | 17 | 108 |
| triacylglycerol lipase | 3.1.1.3 | 18 | 109 |
| triacylglycerol lipase | 3.1.1.3 | 19 | 110 |
| triacylglycerol lipase | 3.1.1.3 | 20 | 111 |
| triacylglycerol lipase | 3.1.1.3 | 21 | 112 |
| triacylglycerol lipase | 3.1.1.3 | 22 | 113 |
| triacylglycerol lipase | 3.1.1.3 | 23 | 114 |
| phospholipase A₁ | 3.1.1.32 | | |
| lysophospholipase | 3.1.1.5 | 24 | 115 |
| pectinesterase | 3.1.1.11 | 25 | 116 |
| phospholipase A₁ | 3.1.1.32 | 26 | 117 |
| cutinase | 3.1.1.74 | 27 | 118 |
| cutinase | 3.1.1.74 | 28 | 119 |
| cutinase | 3.1.1.74 | 29 | 120 |
| cutinase | 3.1.1.74 | 30 | 121 |
| cutinase | 3.1.1.74 | 31 | 122 |
| cutinase | 3.1.1.74 | 72147 | 72148 |
| cutinase | 3.1.1.74 | 72149 | 72150 |
| phospholipase C | 3.1.4.3 | 32 | 123 |
| phosphoinositide phospholipase C | 3.1.4.11 | 33 | 124 |
| alpha-amylase | 3.2.1.1 | 34 | 125 |
| alpha-amylase | 3.2.1.1 | 35 | 126 |
| alpha-amylase | 3.2.1.1 | 36 | 127 |
| alpha-amylase | 3.2.1.1 | 37 | 128 |
| alpha-amylase | 3.2.1.1 | 38 | 129 |
| alpha-amylase | 3.2.1.1 | 39 | 130 |
| alpha-amylase | 3.2.1.1 | 40 | 131 |
| glucan 1,4-alpha-glucosidase | 3.2.1.3 | 41 | 132 |
| glucan 1,4-alpha-glucosidase | 3.2.1.3 | 42 | 133 |
| cellulase | 3.2.1.4 | 43 | 134 |
| cellulase | 3.2.1.4 | 44 | 135 |
| cellulase | 3.2.1.4 | 45 | 136 |
| endo-1,3(4)-beta-glucanase | 3.2.1.6 | 46 | 137 |
| inulinase | 3.2.1.7 | 47 | 138 |
| endo-1,4-beta-xylanase | 3.2.1.8 | 48 | 139 |
| endo-1,4-beta-xylanase | 3.2.1.8 | 49 | 140 |
| endo-1,4-beta-xylanase | 3.2.1.8 | 50 | 141 |
| endo-1,4-beta-xylanase | 3.2.1.8 | 51 | 142 |
| endo-1,4-beta-xylanase | 3.2.1.8 | 52 | 143 |
| endo-1,4-beta-xylanase | 3.2.1.8 | 53 | 144 |
| dextranase | 3.2.1.11 | 54 | 145 |
| lysozyme | 3.2.1.17 | 56 | 147 |
| beta-glucosidase | 3.2.1.21 | 57 | 148 |
| alpha-mannosidase | 3.2.1.24 | 58 | 149 |
| glucan endo-1,3-beta-D-glucosidase | 3.2.1.39 | 59 | 150 |
| glucan endo-1,3-beta-D-glucosidase | 3.2.1.39 | 60 | 151 |
| glucan endo-1,3-beta-D-glucosidase | 3.2.1.39 | 45906 | 72146 |
| pullulanase | 3.2.1.41 | 61 | 152 |
| alpha-L-arabinofuranosidase | 3.2.1.55 | 62 | 153 |
| glucan endo-1,3-alpha-glucosidase | 3.2.1.59 | 63 | 154 |
| glucan endo-1,3-alpha-glucosidase | 3.2.1.59 | 64 | 155 |
| licheninase | 3.2.1.73 | 65 | 156 |
| glucan endo-1,6-beta-glucosidase | 3.2.1.75 | 66 | 157 |
| glucan endo-1,6-beta-glucosidase | 3.2.1.75 | 67 | 158 |
| mannan endo-1,4-beta-mannosidase | 3.2.1.78 | 68 | 159 |
| mannan endo-1,4-beta-mannosidase | 3.2.1.78 | 72144 | 72145 |
| mannan endo-1,6-alpha-mannosidase | 3.2.1.101 | 69 | 160 |
| endogalactosaminidase | 3.2.1.109 | 70 | 161 |
| endogalactosaminidase | 3.2.1.109 | 71 | 162 |
| endogalactosaminidase | 3.2.1.109 | 72 | 163 |
| endogalactosaminidase | 3.2.1.109 | 73 | 164 |
| endogalactosaminidase | 3.2.1.109 | 74 | 165 |
| endogalactosaminidase | 3.2.1.109 | 75 | 166 |
| glycoprotein endo-alpha-1,2-mannosidase | 3.2.1.130 | 76 | 167 |
| alpha-mannan endo-1,2-alpha-mannanase | 3.2.1.198 | | |
| glycoprotein endo-alpha-1,2-mannosidase | 3.2.1.130 | 77 | 168 |
| alpha-mannan endo-1,2-alpha-mannanase | 3.2.1.198 | | |
| glucan 1,4-alpha-maltohydrolasc | 3.2.1.133 | 78 | 169 |
| 1,6-alpha-D-mannosidase | 3.2.1.163 | 79 | 170 |
| serine endopeptidase | 3.4.21 | 80 | 171 |
| serine endopeptidase | 3.4.21 | 81 | 172 |
| glutamyl endopeptidase | 3.4.21.19 | 82 | 173 |
| subtilisin | 3.4.21.62 | 83 | 174 |
| subtilisin | 3.4.21.62 | 84 | 175 |
| subtilisin | 3.4.21.62 | 85 | 176 |
| subtilisin | 3.4.21.62 | 86 | 177 |
| subtilisin | 3.4.21.62 | 87 | 178 |
| bacillolycin | 3.4.24.28 | 88 | 179 |
| asparaginase | 3.5.1.1 | 89 | 180 |
| asparaginase | 3.5.1.1 | 90 | 181 |
| pectate lyase | 4.2.2.2 | 91 | 182 |
| pectin lyase | 4.2.2.10 | 55 | 146 |

[0568] Proteins of the present disclosure may be derived from microorganisms of any genus.

[0569] In some embodiments, the protein is derived from and/or obtained from a Gram-negative bacterium, such as Campylobacter, Chryseobacterium (e.g., C. viscerum), Dicytoglomus (e.g., D. thermophilum), Escherichia (e.g., E. coli), Flavobacterium, Fusobacterium, Helicobacter, Ilyobacter, Lysobacter (e.g., L. gummosus), Neisseria, Pseudomonas, Salmonella or Ureaplasma.

[0570] In some embodiments, the protein is derived from a Gram-positive bacterium, such as Alkalihalobacillus (e.g., A. akibai, A. clausii), Bacillus (e.g., B. agaradhaerens, B. alkalophilus, B. amyloliquefaciens, B. brevis, B. circulans, B. clausii, B. coagulans, B. deramificans, B. firmus, B. lautus, B. lentus, B. licheniformis, B. megaterium, B. pumilus, B. stearothermophilus, B. subtilis, B. thuringiensis), Clostridium, Effusibacillus (e.g., E. pohliae), Enterococcus, Geobacillus (e.g., G. stearothermophilus), Lactobacillus, Lactococcus, Lederbergia (e.g., L. lenta), Neobacillus (e.g., N. novalis), Nocardiopsis, Oceanobacillus (e.g., O. barbara), Staphylococcus, Streptococcus (e.g., S. equisimilis, S. pyogenes, S. uberis, and S. equi subsp. Zooepidemicus) or Streptomyces (e.g., S. achromogenes, S. avermitilis, S. coelicolor, S. griseus, S. lividans), Sutcliffiella (e.g., S. halmapala).

[0571] In some embodiments, the protein is derived from a fungus, such as Acremonium, Acrophialophora (e.g., A. fusispora), Aspergillus (e.g., A. aculeatus, A. awamori, A. chevalieri, A. foetidus, A. fumigatus, A. japonicus, A. nidulans, A. niger, A. niveoglaucus, A. oryzae, A. tubingensis), Aureobasidium, Bjerkandera (e.g., B. adusta, B. fumosa), Ceriporiopsis (e.g., C. aneirina, C. caregiea, C. gilvescens, C. pannocinta, C. rivulosa, Ceriporiopsis subrufa, C. subvermispora), Chaetomium (e.g., C. erraticum, C. globosum), Chrysosporium (e.g., C. inops, C. keratinophilum, C. lucknowense, C. merdarium, C. pannicola, C. queenslandicum, C. tropicum, C. zonatum), Colletotrichum (e.g., C. graminicola), Coprinopsis (e.g., C. cinereus), Coprinus (e.g., C. cinereus), Coriolus (e.g., C. hirsutus), Cryphonectria (e.g., C. parasitica), Cryptococcus, Evansstolkia (e.g., E. leycettana), Filibasidium, Fusarium (e.g., F. bactridioides. F. cerealis, F. crookwellense, F. culmorum, F. graminearum, F. graminum, F. heterosporum, F. longipes, F. negundi, F. oxysporum, F. reticulatum, F. roseum, F. sambucinum, F. sarcochroum, F. solani, F. sporotrichioides, F. sulphureum, F. torulosum, F. trichothecioides, F. venenatum), Humicola (e.g., H. insolens, H. lanuginosa), Magnaporthe, Microdochium (e.g., M. nivale), Mucor (e.g., M. miehei), Myceliophthora (e.g., M. thermophila), Neocallimastix, Neurospora (e.g., Neurospora crassa), Ostropa (e.g., O. barbara), Paecilomyces, Penicillium (e.g., P. emersonii, P. purpurogenum, P. thomii, P. viridicatum), Phanerochaete (e.g., P. chrysosporium), Phlebia (e.g., Phlebia radiata), Piromyces, Pleurotus (e.g., Pleurotus eryngii), Pseudoplectania (e.g., P. vogesiaca), Schizophyllum, Sodiomyces (e.g., S. alcalophilus), Stenocarpella (e.g., S. maydis), Talaromyces (e.g., T. bacillisporus, T. emersonii, T. pinophilus), Thermoascus (e.g., T. aurantiacus), Themochaetoides (e.g., T. thermophila), Thermomyces (e.g., T lanuginosus), Thermothielavioides (e.g., T. terrestris), Thermothelomyces (e.g., T. thermophilus), Thielavia (e.g., T. terrestris), Tolypocladium, Trametes (e.g., T. hirsuta, T villosa, T. versicolor), Trichoderma (e.g., T. atroviride, T. harzianum, T. koningii, T. longibrachiatum, T. reesei, T. viride), Trichophaea (e.g., T. saccata), or Urnula (e.g., U. criterium).

[0572] In some embodiments, the protein is derived from a yeast, such as Candida, Hansenula, Komagataella (e.g., K. phaffi.), Kluyveromyces (e.g., Kluyveromyces lactis), Pichia (e.g., P. pastoris), Saccharomyces (e.g., S. carlsbergensis, S. cerevisiae, S. diastaticus, S. douglasii, S. kluyveri, S. norbensis, S. oviformis), Schizosaccharomyces, or Yarrowia (e.g., Yarrowia lipolytica).

[0573] It will be understood that for the aforementioned species, the disclosure encompasses both the perfect and imperfect states, and other taxonomic equivalents, e.g., anamorphs, regardless of the species name by which they are known. Those skilled in the art will readily recognize the identity of appropriate equivalents.

[0574] The proteins may be identified and derived from other sources including microorganisms isolated from nature (e.g., soil, composts, water, etc.) or DNA samples obtained directly from natural materials (e.g., soil, composts, water, etc.) using the above-mentioned probes. Techniques for isolating microorganisms and DNA directly from natural habitats are well known in the art. A polynucleotide encoding the protein may then be obtained by similarly screening a genomic DNA or cDNA library of another microorganism or mixed DNA sample. Once a polynucleotide encoding a protein has been detected with the probe(s), the polynucleotide can be isolated or cloned by utilizing techniques that are known to those of ordinary skill in the art (see, e.g., Davis et al., 2012, Basic Methods in Molecular Biology, Elsevier).

[0575] Proteins of the present disclosure may likewise be derived from plants of any genus.

[0576] In some embodiments, the protein is derived from a plant selected from the families Amaranthaceae (e.g., chard, spinach, sugar beet, quinoa), Asteraceae (e.g., artichoke, asters, chamomile, chicory, chrysanthemums, dahlias, daisies, echinacea, goldenrod, guayule, lettuce, marigolds, safflower, sunflowers, zinnias), Brassicaceae (e.g., arugula, broccoli, bok choy, Brussels sprouts, cabbage, cauliflower, canola, collard greens, daikon, garden cress, horseradish, kale, mustard, radish, rapeseed, rutabaga, turnip, wasabi, watercress, Arabidopsis thaliana), Caricaceae (e.g., papaya), Cucurbitaceae (e.g., cantaloupe, cucumber, honeydew, melon, pumpkin, squash (e.g., acorn squash, butternut squash, summer squash), watermelon, zucchini), Fabaceae (e.g., alfalfa, beans, carob, clover, guar, lentils, mesquite, peas, peanuts, soybeans, tamarind, tragacanth, vetch), Malvaceae (e.g., cacao, cotton, durian, hibiscus, kenaf, kola, okra), Poaceae (e.g., bamboo, barley, corn, fonio, lawn grass (e.g., Bahia grass, Bermudagrass, bluegrass, Buffalograss, Centipede grass, Fescue, or Zoysia), millet, oats, ornamental grasses, rice, rye, sorghum, sugar cane, triticale, wheat and other cereal crops, Polygonaceae (e.g., buckwheat), Rosaceae (e.g., almonds, apples, apricots, blackberry, blueberry, cherries, peaches, plums, quinces, raspberries, roses, strawberries), Solanaceae (e.g., bell peppers, chili peppers, eggplant, petunia, potato, tobacco, tomato) and Vitaceae (e.g., grape). Proteins of the present disclosure may be produced by and obtained from using any suitable method(s), including, but not limited to, shake flask cultivation and large-scale fermentation (including continuous, batch, fed-batch, solid-state and/or microcarrier-based fermentation) methods.

[0577] The present disclosure extends to methods of producing a protein of the present disclosure, comprising (a) cultivating a cell, which in its wild-type form produces the protein, under conditions conducive for production of the protein; and optionally, (b) recovering the protein.

[0578] The present disclosure also extends to methods of producing a protein of the present disclosure, comprising (a) cultivating a recombinant host cell of the present disclosure under conditions conducive for production of the protein; and optionally, (b) recovering the protein.

[0579] In some embodiments, the protein is produced by and obtained from a Gram-negative bacterium, such as Campylobacter, Chryseobacterium (e.g., C. viscerum), Dicytoglomus (e.g., D. thermophilum), Escherichia (e.g., E. coli), Flavobacterium, Fusobacterium, Helicobacter, Ilyobacter, Lysobacter (e.g., L. gummosus), Neisseria, Pseudomonas, Salmonella or Ureaplasma.

[0580] In some embodiments, the protein is produced by and obtained from a Gram-positive bacterium, such as Alkalihalobacillus (e.g., A. akibai, A. clausii), Bacillus (e.g., B. agaradhaerens, B. alkalophilus, B. amyloliquefaciens, B. brevis, B. circulans, B. clausii, B. coagulans, B. deramifcans, B. firmus, B. lautus, B. lentus, B. licheniformis, B. megaterium, B. pumilus, B. stearothermophilus, B. subtilis, B. thuringiensis), Clostridium, Effusibacillus (e.g., E. pohliae), Enterococcus, Geobacillus (e.g., G. stearothermophlus), Lactobacillus, Lactococcus, Lederbergia (e.g., L. lenta), Neobacillus (e.g., N. novalis), Nocardiopsis, Oceanobacillus (e.g., O. barbara), Staphylococcus, Streptococcus (e.g., S. equisimilis, S. pyogenes, S. uberis, and S. equi subsp. Zooepidemicus) or Streptomyces (e.g., S. achromogenes, S. avermitilis, S. coelicolor, S. griseus, S. lividans), Sutcliffiella (e.g., S. halmapala).

[0581] In some embodiments, the protein is produced by and obtained from a fungal cell, such as Acremonium, Acrophialophora (e.g., A. fusispora), Aspergillus (e.g., A. aculeatus, A. awamori, A. chevalieri, A. foetidus, A. fumigatus, A. japonicus, A. nidulans, A. niger, A. niveoglaucus, A. oryzae, A. tubingensis), Aureobasidium, Bjerkandera (e.g., B. adusta, B. fumosa), Ceriporiopsis (e.g., C. aneirina, C. caregiea, C. gilvescens, C. pannocinta, C. rivulosa, Ceriporiopsis subrufa, C. subvermispora), Chaetomium (e.g., C. erraticum, C. globosum), Chrysosporium (e.g., C. inops, C. keratinophilum, C. lucknowense, C. merdarium, C. pannicola, C. queenslandicum, C. tropicum, C. zonatum), Colletotrichum (e.g., C. graminicola), Coprinopsis (e.g., C. cinereus), Coprinus (e.g., C. cinereus), Coriolus (e.g., C. hirsutus), Cryphonectria (e.g., C. parasitica), Cyptococcus, Evansstolkia (e.g., E. leycettana), Filibasidium, Fusarium (e.g., F. bactridioides, F. cerealis, F. crookwellense, F. culmorum, F. graminearum, F. graminum, F. heterosporum, F. longipes, F. negundi, F. oxysporum, F. reticulatum, F. roseum, F. sambucinum, F. sarcochroum, F. solani, F. sporotrichioides, F. sulphureum, F. torulosum, F. trichothecioides, F. venenatum), Humicola (e.g., H. insolens, H. lanuginosa), Magnaporthe, Microdochium (e.g., M. nivale), Mucor (e.g., M. miehei), Myceliophthora (e.g., M. thermophila), Neocallimastix, Neurospora (e.g., Neurospora crassa), Ostropa (e.g., O. barbara), Paecilomyces, Penicillium (e.g., P. emersonii, P. purpurogenum, P. thomii, P. viridicatum), Phanerochaete (e.g., P. chrysosporium), Phlebia (e.g., Phlebia radiata), Piromyces, Pleurotus (e.g., Pleurotus eryngii), Pseudoplectania (e.g., P. vogesiaca), Schizophyllum, Sodiomyces (e.g., S. alcalophilus), Stenocarpella (e.g., S. maydis), Talaromyces (e.g., T. bacillisporus, T. emersonii, T. pinophilus), Thermoascus (e.g., T. aurantiacus), Themochaetoides (e.g., T. thermophila), Thermomyces (e.g., T. lanuginosus), Thermothielavioides (e.g., T. terrestris), Thermothelomyces (e.g., T. thermophilus), Thielavia (e.g., T. terrestris), Tolypocladium, Trametes (e.g., T. hirsuta, T villosa, T. versicolor), Trichoderma (e.g., T. atroviride, T. harzianum, T. koningii, T. longibrachiatum, T reesei, T viride), Trichophaea (e.g., T. saccata), or Urnula (e.g., U. criterium).

[0582] In some embodiments, the protein is produced by and obtained from a yeast cell, such as Candida, Hansenula, Komagataella (e.g., K. phaffii), Kluyveromyces (e.g., K. lactis), Pichia (e.g., P. pastoris), Saccharomyces (e.g., S. carlsbergensis, S. cerevisiae, S. diastaticus, S. douglasii, S. kluyveri, S. norbensis, S. oviformis), Schizosaccharomyces, or Yarrowia (e.g., Y. lipolytica).

[0583] In some embodiments, the protein is produced by and obtained from a plant cell selected from the families Amaranthaceae (e.g., chard, spinach, sugar beet, quinoa), Asteraceae (e.g., artichoke, asters, chamomile, chicory, chrysanthemums, dahlias, daisies, echinacea, goldenrod, guayule, lettuce, marigolds, safflower, sunflowers, zinnias), Brassicaceae (e.g., arugula, broccoli, bok choy, Brussels sprouts, cabbage, cauliflower, canola, collard greens, daikon, garden cress, horseradish, kale, mustard, radish, rapeseed, rutabaga, turnip, wasabi, watercress, Arabidopsis thahiana), Caricaceae (e.g., papaya), Cucurbitaceae (e.g., cantaloupe, cucumber, honeydew, melon, pumpkin, squash (e.g., a corn squash, butternut squash, summer squash), watermelon, zucchini), Fabaceae (e.g., alfalfa, beans, carob, clover, guar, lentils, mesquite, peas, peanuts, soybeans, tamarind, tragacanth, vetch), Malvaceae (e.g., cacao, cotton, durian, hibiscus, kenaf, kola, okra), Poaceae (e.g., bamboo, barley, corn, fonio, lawn grass (e.g., Bahia grass, Bermudagrass, bluegrass, Buffalograss, Centipede grass, Fescue, or Zoysia), millet, oats, ornamental grasses, rice, rye, sorghum, sugar cane, triticale, wheat and other cereal crops, Polygonaceae (e.g., buckwheat), Rosaceae (e.g., almonds, apples, apricots, blackberry, blueberry, cherries, peaches, plums, quinces, raspberries, roses, strawberries), Solanaceae (e.g., bell peppers, chili peppers, eggplant, petunia, potato, tobacco, tomato) and Vitaceae (e.g., grape).

[0584] Cells may be cultivated in a nutrient medium suitable for production of the protein using methods known in the art. For example, the cell may be cultivated by shake flask cultivation, or small-scale or large-scale fermentation (including continuous, batch, fed-batch, or solid-state, and/or microcarrier-based fermentations) in laboratory or industrial fermentors in a suitable medium and under conditions allowing the protein to be expressed and/or isolated. Suitable media are available from commercial suppliers or may be prepared according to published compositions (e.g., in catalogues of the American Type Culture Collection). If the protein is secreted into the nutrient medium, the protein can be recovered directly from the medium. If the protein is not secreted, it can be recovered from cell lysates.

[0585] The protein may be detected using methods known in the art that are specific for the protein, including, but not limited to, the use of specific antibodies, formation of an enzyme product, disappearance of an enzyme substrate, or an assay determining the relative or specific activity of the protein.

[0586] The protein may be recovered from the medium using methods known in the art, including, but not limited to, collection, centrifugation, filtration, extraction, spray-drying, evaporation, or precipitation. In one aspect, a whole fermentation broth comprising the protein is recovered. In another aspect, a cell-free fermentation broth comprising the protein is recovered.

[0587] In some embodiments, the protein is secreted extracellularly.

[0588] In some embodiments, the protein is isolated.

[0589] In some embodiments, the protein is purified.

[0590] The protein may be purified by a variety of procedures known in the art to obtain substantially pure proteins and/or protein fragments (see, e.g., Wingfield, 2015, Current Protocols in Protein Science; 80(1): 6.1.1-6.1.35; Labrou, 2014, Protein Downstream Processing, 1129: 3-10).

[0591] In an alternative aspect, the protein is not recovered.

[0592] The present disclosure also provides cells that naturally express native proteins of the present disclosure and cells that have been engineered to express heterologous proteins of the present disclosure (e.g., recombinant host cells comprising a polynucleotide of the present disclosure operably linked to one or more control sequences that direct the production of a protein of the present disclosure), as well as tools and methods for producing such recombinant host cells, including polynucleotides encoding proteins of the present disclosure and nucleic acid constructs comprising such polynucleotides.

[0593] In some embodiments, the cell is a Gram-negative bacterium, such as Campylobacter, Chryseobacterium (e.g., C. viscerum), Dicytoglomus (e.g., D. thermophilum), Escherichia (e.g., E. coli), Flavobacterium, Fusobacterium, Helicobacter, Ilyobacter, Lysobacter (e.g., L. gummosus), Neisseria, Pseudomonas, Salmonella or Ureaplasma.

[0594] In some embodiments, the cell is a Gram-positive bacterium, such as Alkalihalobacillus (e.g., A. akibai, A. clausii), Bacillus (e.g., B. agaradhaerens, B. alkalophilus, B. amyloliquefaciens, B. brevis, B. circulans, B. clausii, B. coagulans, B. deramificans, B. firmus, B. lautus. B. lentus, B. licheniformis, B. megaterium, B. pumilus, B. stearothermophilus, B. subtilis, B. thuringiensis), Clostridium, Effusibacillus (e.g., E. pohliae), Enterococcus, Geobacillus (e.g., G. stearothermophilus), Lactobacillus, Lactococcus, Lederbergia (e.g., L. lenta), Neobacillus (e.g., N. novalis), Nocardiopsis, Oceanobacillus (e.g., O. barbara), Staphylococcus, Streptococcus (e.g., S. equisimilis, S. pyogenes, S. uberis, and S. equi subsp. Zooepidemicus) or Streptomyces (e.g., S. achromogenes, S. avermitilis, S. coelicolor, S. griseus, S. lividans), Sutcliffiella (e.g., S. halmapala).

[0595] In some embodiments, the cell is a fungal cell, such as Acremonium, Acrophialophora (e.g., A. fusispora), Aspergillus (e.g., A. aculeatus, A. awamori, A. chevalieri, A. foetidus, A. fumigatus, A. japonicus, A. nidulans, A. niger, A. niveoglaucus, A. oryzae, A. tubingensis), Aureobasidium, Bjerkandera (e.g., B. adusta, B. fumosa), Ceriporiopsis (e.g., C. aneirina, C. caregiea, C. gilvescens, C. pannocinta, C. rivulosa, Ceriporiopsis subrufa, C. subvermispora), Chaetomium (e.g., C. erraticum, C. globosum), Chrysosporium (e.g., C. inops, C. keratinophilum, C. lucknowense, C. merdarium, C. pannicola, C. queenslandicum, C. tropicum, C. zonatum), Colletotrichum (e.g., C. graminicola), Coprinopsis (e.g., C. cinereus), Coprinus (e.g., C. cinereus), Coriolus (e.g., C. hirsutus), Cryphonectria (e.g., C. parasitica), Cryptococcus, Evansstolkia (e.g., E. leycettana), Filibasidium, Fusarium (e.g., F. bactridioides, F. cerealis, F. crookwellense, F. culmorum, F. graminearum, F. graminum, F. heterosporum, F. longipes, F. negundi, F. oxysporum, F. reticulatum, F. roseum, F. sambucinum, F. sarcochroum, F. solani, F. sporotrichioides, F. sulphureum, F. torulosum, F. trichothecioides, F. venenatum), Humicola (e.g., H. insolens, H. lanuginosa), Magnaporthe, Microdochium (e.g., M. nivale), Mucor (e.g., M. miehei), Myceliophthora (e.g., M. thermophila), Neocallimastix, Neurospora (e.g., Neurospora crassa), Ostropa (e.g., O. barbara), Paecilomyces, Penicillium (e.g., P. emersonii, P. purpurogenum, P. thomii, P. viridicatum), Phanerochaete (e.g., P. chrysosporium), Phlebia (e.g., Phlebia radiata), Piromyces, Pleurotus (e.g., Pleurotus eryngii), Pseudoplectania (e.g., P. vogesiaca), Schizophyllum, Sodiomyces (e.g., S. alcalophilus), Stenocarpella (e.g., S. maydis), Talaromyces (e.g., T. bacillisporus, T. emersonii, T. pinophilus), Thermoascus (e.g., T. aurantiacus), Themochaetoides (e.g., T. thermophila), Thermomyces (e.g., T. lanuginosus), Thermothielavioides (e.g., T. terrestris), Thermothelomyces (e.g., T. thermophilus), Thielavia (e.g., T. terrestris), Tolypocladium, Trametes (e.g., T. hirsuta, T. villosa, T. versicolor), Trichoderma (e.g., T. atroviride, T. harzianum, T. koningii, T. longibrachiatum, T. reesei, T. viride), Trichophaea (e.g., T. saccata), or Urnula (e.g., U. criterium).

[0596] In some embodiments, the cell is a yeast cell, such as Candida, Hansenula, Komagataella (e.g., K. phaffi), Kluyveromyces (e.g., Kluyveromyces lactis), Pichia (e.g., P. pastoris), Saccharomyces (e.g., S. carlsbergensis, S. cerevisiae, S. diastaticus, S. douglasii, S. kluyveri, S. norbensis, S. oviformis), Schizosaccharomyces, or Yarrowia (e.g., Yarrowia lipolytica).

[0597] In some embodiments, the cell is a plant cell, optionally a plant cell selected from the families Amaranthaceae (e.g., chard, spinach, sugar beet, quinoa), Asteraceae (e.g., artichoke, asters, chamomile, chicory, chrysanthemums, dahlias, daisies, echinacea, goldenrod, guayule, lettuce, marigolds, safflower, sunflowers, zinnias), Brassicaceae (e.g., arugula, broccoli, bok choy, Brussels sprouts, cabbage, cauliflower, canola, collard greens, daikon, garden cress, horseradish, kale, mustard, radish, rapeseed, rutabaga, turnip, wasabi, watercress, Arabidopsis thaliana), Caricaceae (e.g., papaya), Cucurbitaceae (e.g., cantaloupe, cucumber, honeydew, melon, pumpkin, squash (e.g., acorn squash, butternut squash, summer squash), watermelon, zucchini), Fabaceae (e.g., alfalfa, beans, carob, clover, guar, lentils, mesquite, peas, peanuts, soybeans, tamarind, tragacanth, vetch), Malvaceae (e.g., cacao, cotton, durian, hibiscus, kenaf, kola, okra), Poaceae (e.g., bamboo, barley, corn, fonio, lawn grass (e.g., Bahia grass, Bermudagrass, bluegrass, Buffalograss, Centipede grass, Fescue, or Zoysia), millet, oats, ornamental grasses, rice, rye, sorghum, sugar cane, triticale, wheat and other cereal crops, Polygonaceae (e.g., buckwheat), Rosaceae (e.g., almonds, apples, apricots, blackberry, blueberry, cherries, peaches, plums, quinces, raspberries, roses, strawberries), Solanaceae (e.g., bell peppers, chili peppers, eggplant, petunia, potato, tobacco, tomato) and Vitaceae (e.g., grape).

[0598] In some embodiments, the cell expresses:
[0599] a) a polypeptide having about/at least 60, 61, 62, 63, 64, 65, 66, 67, 68, 69, 70, 71, 72, 73, 74, 75, 76, 77, 78, 79, 80, 81, 82, 83, 84, 85, 86, 87, 88, 89, 90, 91, 92, 93, 94, 95, 96, 97, 98, 99 or 100% sequence identity to any one or more of SEQ ID NO(s): 1-91, 45906, 72144, 72147 and 72149;
[0600] b) a polypeptide having about/at least 60, 61, 62, 63, 64, 65, 66, 67, 68, 69, 70, 71, 72, 73, 74, 75, 76, 77, 78, 79, 80, 81, 82, 83, 84, 85, 86, 87, 88, 89, 90, 91, 92, 93, 94, 95, 96, 97, 98, 99 or 100% sequence identity to a mature polypeptide of any one or more of SEQ ID NO(s): 1-91, 45906, 72144, 72147 and 72149; c) a polypeptide encoded by a polynucleotide having about/at least 60, 61, 62, 63, 64, 65, 66, 67, 68, 69, 70, 71, 72, 73, 74, 75, 76, 77, 78, 79, 80, 81, 82, 83, 84, 85, 86, 87, 88, 89, 90, 91, 92, 93, 94, 95, 96, 97, 98, 99 or 100% sequence identity to any one or more of SEQ ID NO(s): 92-182, 72145-72146, 72148 and 72150 or the cDNA sequence thereof;
[0601] d) a polypeptide derived from any one of SEQ ID NO(s): 1-91, 45906, 72144, 72147 and 72149 by substitution, deletion, or insertion of one or more amino acids;
[0602] e) a polypeptide derived from a mature polypeptide any one of SEQ ID NO(s): 1-91, 45906, 72144, 72147 and 72149 by substitution, deletion, or insertion of one or more amino acids;
[0603] f) a polypeptide derived from the polypeptide of any one of a) through e) wherein the N- and/or C-terminal end has been extended by the addition of one or more amino acids; and/or
[0604] g) a fragment of the polypeptide of any one of a) through f).

[0605] In preferred embodiments, the cell expresses a polypeptide that comprises, consists essentially of or consists of the amino acid sequence of any one of SEQ ID NO(s): 1-91, 45906, 72144, 72147 and 72149 or a mature polypeptide thereof.

[0606] In some embodiments, the cell expresses a polypeptide that comprises, consists essentially of or consists of a fragment of one of SEQ ID NO(s): 1-91, 45906, 72144, 72147 and 72149 or a mature peptide thereof. For example, the microorganism may express a fragment of any one of SEQ ID NO(s): 1-91, 45906, 72144, 72147 and 72149 or a mature peptide thereof, said fragment comprising at least 85, 86, 87, 88, 89, 90, 91, 92, 93, 94, 95, 96, 97, 98 or 99% of the amino acids found in the original protein.

[0607] In some embodiments, the cell expresses a polypeptide that comprises, consists essentially of or consists of any one of SEQ ID NO(s): 1-91, 45906, 72144, 72147 and 72149 or a mature polypeptide thereof with an N-terminal extension of one or more amino acids (e.g., 1, 2, 3, 4, 5, 6, 7, 8, 9, 10, 11, 12, 13, 14, 15, 16, 17, 18, 19, 20 or more amino acids), a C-terminal extension of one or more amino acids (e.g., 1, 2, 3, 4, 5, 6, 7, 8, 9, 10, 11, 12, 13, 14, 15, 16, 17, 18, 19, 20 or more amino acids), one or more substitutions (e.g., 1, 2, 3, 4, 5, 6, 7, 8, 9, 10, 11, 12, 13, 14, 15, 16, 17, 18, 19, 20 or more substitutions), one or more insertions (e.g., 1, 2, 3, 4, 5, 6, 7, 8, 9, 10, 11, 12, 13, 14, 15, 16, 17, 18, 19, 20 or more insertions), and/or one or more deletions (e.g., 1, 2, 3, 4, 5, 6, 7, 8, 9, 10, 11, 12, 13, 14, 15, 16, 17, 18, 19, 20 or more deletions). The amino acid changes may be of a minor nature, that is conservative amino acid substitutions or insertions that do not significantly affect the folding and/or activity of the protein; small deletions, typically of 1-30 amino acids; small amino- or carboxyl-terminal extensions, such as an amino-terminal methionine residue; a small linker peptide of up to 20-25 residues; or a small extension that facilitates purification by changing net charge or another function, such as a poly-histidine tract, an antigenic epitope or a binding module.

[0608] In some embodiments, the cell comprises a homologous or heterologous nucleic acid sequence that is at least 60, 61, 62, 63, 64, 65, 66, 67, 68, 69, 70, 71, 72, 73, 74, 75, 76, 77, 78, 79, 80, 81, 82, 83, 84, 85, 86, 87, 88, 89, 90, 91, 92, 93, 94, 95, 96, 97, 98, 99 or 100% identical to one or more of the nucleic acid sequences set forth herein as SEQ ID NO(s): 92-182, 72145-72146, 72148 and 72150 or the cDNA sequence thereof.

[0609] In preferred embodiments, the cell comprises a polynucleotide encodes a polypeptide that comprises, consists essentially of or consists of the amino acid sequence of any one of SEQ ID NO(s): 1-91, 45906, 72144, 72147 and 72149 or a mature polypeptide thereof.

[0610] In some embodiments, the cell comprises a polynucleotide that comprises, consists essentially of or consists of a nucleic acid sequence encoding a polypeptide having about/at least 60, 61, 62, 63, 64, 65, 66, 67, 68, 69, 70, 71, 72, 73, 74, 75, 76, 77, 78, 79, 80, 81, 82, 83, 84, 85, 86, 87, 88, 89, 90, 91, 92, 93, 94, 95, 96, 97, 98, 99 or 100% sequence identity to any one or more of SEQ ID NO(s): 1-91, 45906, 72144, 72147 and 72149.

[0611] In some embodiments, the cell comprises a polynucleotide that comprises, consists essentially of or consists of a nucleic acid sequence encoding a polypeptide having about/at least 60, 61, 62, 63, 64, 65, 66, 67, 68, 69, 70, 71, 72, 73, 74, 75, 76, 77, 78, 79, 80, 81, 82, 83, 84, 85, 86, 87, 88, 89, 90, 91, 92, 93, 94, 95, 96, 97, 98, 99 or 100% sequence identity to a mature polypeptide of any one or more of SEQ ID NO(s): 1-91, 45906, 72144, 72147 and 72149.

[0612] In preferred embodiments, the cell comprises a polynucleotide that comprises, consists essentially of or consists of the nucleic acid sequence of any one of SEQ ID NO(s): 92-182, 72145-72146, 72148 and 72150 or a cDNA sequence thereof.

[0613] In some embodiments, the cell comprises a polynucleotide that encodes a polypeptide that comprises, consists essentially of or consists of a fragment of one of SEQ ID NO(s): 1-91, 45906, 72144, 72147 and 72149 or a mature peptide thereof. For example, the microorganism comprises a polynucleotide that encodes a fragment of any one of SEQ ID NO(s): 1-91, 45906, 72144, 72147 and 72149 or a mature peptide thereof, said fragment comprising at least 85, 86, 87, 88, 89, 90, 91, 92, 93, 94, 95, 96, 97, 98 or 99% of the amino acids found in the original protein.

[0614] In some embodiments, the cell comprises a polynucleotide that encodes a polypeptide that comprises, consists essentially of or consists of any one of SEQ ID NO(s): 1-91, 45906, 72144, 72147 and 72149 or a mature polypeptide thereof with an N-terminal extension of one or more amino acids (e.g., 1, 2, 3, 4, 5, 6, 7, 8, 9, 10, 11, 12, 13, 14, 15, 16, 17, 18, 19, 20 or more amino acids), a C-terminal extension of one or more amino acids (e.g., 1, 2, 3, 4, 5, 6, 7, 8, 9, 10, 11, 12, 13, 14, 15, 16, 17, 18, 19, 20 or more amino acids), one or more substitutions (e.g., 1, 2, 3, 4, 5, 6, 7, 8, 9, 10, 11, 12, 13, 14, 15, 16, 17, 18, 19, 20 or more substitutions), one or more insertions (e.g., 1, 2, 3, 4, 5, 6, 7, 8, 9, 10, 11, 12, 13, 14, 15, 16, 17, 18, 19, 20 or more insertions), and/or one or more deletions (e.g., 1, 2, 3, 4, 5, 6, 7, 8, 9, 10, 11, 12, 13, 14, 15, 16, 17, 18, 19, 20 or more deletions). The amino acid changes may be of a minor nature, that is conservative amino acid substitutions or insertions that do not significantly affect the folding and/or activity of the protein; small deletions, typically of 1-30 amino acids; small amino- or carboxyl-terminal extensions, such as an amino-terminal methionine residue; a small linker peptide of up to 20-25 residues; or a small extension that facilitates purification by changing net charge or another function, such as a poly-histidine tract, an antigenic epitope or a binding module.

[0615] The present disclosure thus encompasses plants and plant parts expressing one or more proteins of the present disclosure, including plants and plant parts that have been engineered to (over)express one or more proteins of the present disclosure, as well as methods producing proteins of the present disclosure comprising cultivating a (transgenic) plant or a plant part comprising a polynucleotide that encodes the protein under conditions conducive for production of the protein, and, optionally, recovering the protein. In alternative embodiments, such plants may be used as is to enhance one or more food/feed characteristics (e.g., improve nutritional value, palatability and/or rheological properties, destroy an antinutritive factor, etc.).

[0616] In some embodiments, the plant expresses:
[0617] a) a polypeptide having about/at least 60, 61, 62, 63, 64, 65, 66, 67, 68, 69, 70, 71, 72, 73, 74, 75, 76, 77, 78, 79, 80, 81, 82, 83, 84, 85, 86, 87, 88, 89, 90, 91, 92, 93, 94, 95, 96, 97, 98, 99 or 100% sequence identity to any one or more of SEQ ID NO(s): 1-91, 45906, 72144, 72147 and 72149;
[0618] b) a polypeptide having about/at least 60, 61, 62, 63, 64, 65, 66, 67, 68, 69, 70, 71, 72, 73, 74, 75, 76, 77, 78, 79, 80, 81, 82, 83, 84, 85, 86, 87, 88, 89, 90, 91, 92, 93, 94, 95, 96, 97, 98, 99 or 100% sequence identity to a mature polypeptide of any one or more of SEQ ID NO(s): 1-91, 45906, 72144, 72147 and 72149;
[0619] c) a polypeptide encoded by a polynucleotide having about/at least 60, 61, 62, 63, 64, 65, 66, 67, 68, 69, 70, 71, 72, 73, 74, 75, 76, 77, 78, 79, 80, 81, 82, 83, 84, 85, 86, 87, 88, 89, 90, 91, 92, 93, 94, 95, 96, 97, 98, 99 or 100% sequence identity to any one or more of SEQ ID NO(s): 92-182, 72145-72146, 72148 and 72150 or the cDNA sequence thereof;
[0620] d) a polypeptide derived from any one of SEQ ID NO(s): 1-91, 45906, 72144, 72147 and 72149 by substitution, deletion, or insertion of one or more amino acids;
[0621] e) a polypeptide derived from a mature polypeptide any one of SEQ ID NO(s): 1-91, 45906, 72144, 72147 and 72149 by substitution, deletion, or insertion of one or more amino acids;
[0622] f) a polypeptide derived from the polypeptide of any one of a) through e) wherein the N- and/or C-terminal end has been extended by the addition of one or more amino acids; and/or
[0623] g) a fragment of the polypeptide of any one of a) through f).

[0624] In preferred embodiments, the plant expresses a polypeptide that comprises, consists essentially of or consists of the amino acid sequence of any one of SEQ ID NO(s): 1-91, 45906, 72144, 72147 and 72149 or a mature polypeptide thereof.

[0625] In some embodiments, the plant expresses a polypeptide that comprises, consists essentially of or consists of a fragment of one of SEQ ID NO(s): 1-91, 45906, 72144, 72147 and 72149 or a mature peptide thereof. For example, the microorganism may express a fragment of any one of SEQ ID NO(s): 1-91, 45906, 72144, 72147 and 72149 or a mature peptide thereof, said fragment comprising at least 85, 86, 87, 88, 89, 90, 91, 92, 93, 94, 95, 96, 97, 98 or 99% of the amino acids found in the original protein.

[0626] In some embodiments, the plant expresses a polypeptide that comprises, consists essentially of or consists of any one of SEQ ID NO(s): 1-91, 45906, 72144, 72147 and 72149 or a mature polypeptide thereof with an N-terminal extension of one or more amino acids (e.g., 1, 2, 3, 4, 5, 6, 7, 8, 9, 10, 11, 12, 13, 14, 15, 16, 17, 18, 19, 20 or more amino acids), a C-terminal extension of one or more amino acids (e.g., 1, 2, 3, 4, 5, 6, 7, 8, 9, 10, 11, 12, 13, 14, 15, 16, 17, 18, 19, 20 or more amino acids), one or more substitutions (e.g., 1, 2, 3, 4, 5, 6, 7, 8, 9, 10, 11, 12, 13, 14, 15, 16, 17, 18, 19, 20 or more substitutions), one or more insertions (e.g., 1, 2, 3, 4, 5, 6, 7, 8, 9, 10, 11, 12, 13, 14, 15, 16, 17, 18, 19, 20 or more insertions), and/or one or more deletions (e.g., 1, 2, 3, 4, 5, 6, 7, 8, 9, 10, 11, 12, 13, 14, 15, 16, 17, 18, 19, 20 or more deletions). The amino acid changes may be of a minor nature, that is conservative amino acid substitutions or insertions that do not significantly affect the folding and/or activity of the protein; small deletions, typically of 1-30 amino acids; small amino- or carboxyl-terminal extensions, such as an amino-terminal methionine residue; a small linker peptide of up to 20-25 residues; or a small extension that facilitates purification by changing net charge or another function, such as a poly-histidine tract, an antigenic epitope or a binding module.

[0627] In some embodiments, the plant comprises a homologous or heterologous nucleic acid sequence that is at least 60, 61, 62, 63, 64, 65, 66, 67, 68, 69, 70, 71, 72, 73, 74, 75, 76, 77, 78, 79, 80, 81, 82, 83, 84, 85, 86, 87, 88, 89, 90, 91, 92, 93, 94, 95, 96, 97, 98, 99 or 100% identical to one or more of the nucleic acid sequences set forth herein as SEQ ID NO(s): 92-182, 72145-72146, 72148 and 72150 or the cDNA sequence thereof.

[0628] In preferred embodiments, the plant comprises a polynucleotide encodes a polypeptide that comprises, consists essentially of or consists of the amino acid sequence of any one of SEQ ID NO(s): 1-91, 45906, 72144, 72147 and 72149 or a mature polypeptide thereof.

[0629] In some embodiments, the plant comprises a polynucleotide that comprises, consists essentially of or consists of a nucleic acid sequence encoding a polypeptide having about/at least 60, 61, 62, 63, 64, 65, 66, 67, 68, 69, 70, 71, 72, 73, 74, 75, 76, 77, 78, 79, 80, 81, 82, 83, 84, 85, 86, 87, 88, 89, 90, 91, 92, 93, 94, 95, 96, 97, 98, 99 or 100% sequence identity to any one or more of SEQ ID NO(s): 1-91, 45906, 72144, 72147 and 72149.

[0630] In some embodiments, the plant comprises a polynucleotide that comprises, consists essentially of or consists of a nucleic acid sequence encoding a polypeptide having about/at least 60, 61, 62, 63, 64, 65, 66, 67, 68, 69, 70, 71, 72, 73, 74, 75, 76, 77, 78, 79, 80, 81, 82, 83, 84, 85, 86, 87, 88, 89, 90, 91, 92, 93, 94, 95, 96, 97, 98, 99 or 100% sequence identity to a mature polypeptide of any one or more of SEQ ID NO(s): 1-91, 45906, 72144, 72147 and 72149.

[0631] In preferred embodiments, the plant comprises a polynucleotide that comprises, consists essentially of or consists of the nucleic acid sequence of any one of SEQ ID NO(s): 92-182, 72145-72146, 72148 and 72150 or a cDNA sequence thereof.

[0632] In some embodiments, the plant comprises a polynucleotide that encodes a polypeptide that comprises, consists essentially of or consists of a fragment of one of SEQ ID NO(s): 1-91, 45906, 72144, 72147 and 72149 or a mature peptide thereof. For example, the microorganism comprises a polynucleotide that encodes a fragment of any one of SEQ ID NO(s): 1-91, 45906, 72144, 72147 and 72149 or a mature peptide thereof, said fragment comprising at least 85, 86, 87, 88, 89, 90, 91, 92, 93, 94, 95, 96, 97, 98 or 99% of the amino acids found in the original protein.

[0633] In some embodiments, the plant comprises a polynucleotide that encodes a polypeptide that comprises, consists essentially of or consists of any one of SEQ ID NO(s): 1-91, 45906, 72144, 72147 and 72149 or a mature polypeptide thereof with an N-terminal extension of one or more amino acids (e.g., 1, 2, 3, 4, 5, 6, 7, 8, 9, 10, 11, 12, 13, 14, 15, 16, 17, 18, 19, 20 or more amino acids), a C-terminal extension of one or more amino acids (e.g., 1, 2, 3, 4, 5, 6, 7, 8, 9, 10, 11, 12, 13, 14, 15, 16, 17, 18, 19, 20 or more amino acids), one or more substitutions (e.g., 1, 2, 3, 4, 5, 6, 7, 8, 9, 10, 11, 12, 13, 14, 15, 16, 17, 18, 19, 20 or more substitutions), one or more insertions (e.g., 1, 2, 3, 4, 5, 6, 7, 8, 9, 10, 11, 12, 13, 14, 15, 16, 17, 18, 19, 20 or more insertions), and/or one or more deletions (e.g., 1, 2, 3, 4, 5, 6, 7, 8, 9, 10, 11, 12, 13, 14, 15, 16, 17, 18, 19, 20 or more deletions). The amino acid changes may be of a minor nature, that is conservative amino acid substitutions or insertions that do not significantly affect the folding and/or activity of the protein; small deletions, typically of 1-30 amino acids; small amino- or carboxyl-terminal extensions, such as an amino-terminal methionine residue; a small linker peptide of up to 20-25 residues; or a small extension that facilitates purification by changing net charge or another function, such as a poly-histidine tract, an antigenic epitope or a binding module.

[0634] Also included within the scope of the present disclosure are the progeny of such plants, plant parts, and plant cells.

[0635] As noted above, the present disclosure extends to tools and methods for producing such recombinant host cells that express one or more proteins of the present disclosure, including polynucleotides encoding proteins of the present disclosure and nucleic acid constructs comprising such polynucleotides.

[0636] The present disclosure provides polynucleotides encoding proteins of the present disclosure, including, but not limited to, nucleic acid constructs and recombinant expression vectors that encode one or more enzymes of the present disclosure, as well as methods of producing such polynucleotides.

[0637] The polynucleotide may be a genomic DNA, a cDNA, a synthetic DNA, a synthetic RNA, a mRNA, or a combination thereof.

[0638] The polynucleotide may be cloned from any suitable genus, species or strain.

[0639] In some embodiments, the protein is cloned from a Gram-negative bacterium, such as Campylobacter, Chryseobacterium (e.g., C. viscerum), Dicytoglomus (e.g., D. thermophilum), Escherichia (e.g., E. coli), Flavobacterium, Fusobacterium, Helicobacter, Ilyobacter, Lysobacter (e.g., L. gummosus), Neisseria, Pseudomonas, Salmonella or Ureaplasma.

[0640] In some embodiments, the polynucleotide is cloned from a Gram-positive bacterium, such as Alkalihalobacillus (e.g., A. akibai, A. clausii), Bacillus (e.g., B. agaradhaerens, B. alkalophilus, B. amyloliquefaciens, B. brevis, B. circulans, B. clausii, B. coagulans, B. deramificans, B. firmus, B. lautus, B. lentus, B. licheniformis, B. megaterium, B. pumilus, B. stearothermophilus, B. subtilis, B. thuringiensis), Clostridium, Effusibacillus (e.g., E. pohliae), Enterococcus, Geobacillus (e.g., G. stearothermophilus), Lactobacillus, Lactococcus, Lederbergia (e.g., L. lenta), Neobacillus (e.g., N. novalis), Nocardiopsis, Oceanobacillus (e.g., O. barbara), Staphylococcus, Streptococcus (e.g., S. equisimilis, S. pyogenes, S. uberis, and S. equi subsp. Zooepidemicus) or Streptomyces (e.g., S. achromogenes, S. avermitilis, S. coelicolor, S. griseus, S. lividans), Sutcliffiella (e.g., S. halmapala).

[0641] In some embodiments, the polynucleotide is cloned from a fungus, such as Acremonium, Acrophialophora (e.g., A. fusispora), Aspergillus (e.g., A. aculeatus, A. awamori, A. chevalieri, A. foetidus, A. funigatus, A. japonicus, A. nidulans, A. niger, A. niveoglaucus, A. oryzae, A. tubingensis), Aureobasidium, Bjerkandera (e.g., B. adusta, B. fumosa), Ceriporiopsis (e.g., C. aneirina, C. caregiea, C. gilvescens, C. pannocinta, C. rivulosa, Ceriporiopsis subrufa, C. subvermispora), Chaetomium (e.g., C. erraticum, C. globosum), Chrysosporium (e.g., C. inops, C. keratinophilum, C. lucknowense, C. merdarium, C. pannicola, C. queenslandicum, C. tropicum, C. zonatum), Colletotrichum (e.g., C. graminicola), Coprinopsis (e.g., C. cinereus), Coprinus (e.g., C. cinereus), Coriolus (e.g., C. hirsutus), Cryphonectria (e.g., C. parasitica), Cryptococcus, Evansstolkia (e.g., F. leycettana), Filibasidium, Fusarium (e.g., F. bactridioides, F cerealis, F crookwellense, F. culmorum, F. graminearum, F. graminum, F. heterosporum, F. longipes, F. negundi, F. oxysporum, F. reticulatum, F. roseum, F. sambucinum, F. sarcochroum, F. solani, F. sporotrichioides, F. sulphureum, F. torulosum, F. trichothecioides, F. venenatum), Humicola (e.g., H. insolens, H. lanuginosa), Magnaporthe, Microdochium (e.g., M. nivale), Mucor (e.g., M. miehei), Mycehophthora (e.g., M. thermophila), Neocallimastix, Neurospora (e.g., Neurospora crassa), Ostropa (e.g., O. barbara), Paecilomyces, Penicillium (e.g., P. emersonii, P. purpurogenum, P. thomii, P. viridicatum), Phanerochaete (e.g., P. chrysosporium), Phlebia (e.g., Phlebia radiata), Piromyces, Pleurotus (e.g., Pleurotus eryngii), Pseudoplectania (e.g., P. vogesiaca), Schizophyllum, Sodiomyces (e.g., S. alcalophilus), Stenocarpella (e.g., S. maydis), Talaromyces (e.g., T. bacillisporus, T. emersonii, T. pinophilus), Thermoascus (e.g., T. aurantiacus), Themochaetoides (e.g., T. thermophila), Thermomyces (e.g., T. lanuginosus), Thermothielavioides (e.g., T. terrestris), Thermothelomyces (e.g., T. thermophilus), Thielavia (e.g., T. terrestris). Tolypocladium, Trametes (e.g., T. hirsuta, T villosa, T. versicolor), Trichoderma (e.g., T. atroviride, T. harzianum, T. koningii, T. longibrachiatum, T. reesei, T. viride), Trichophaea (e.g., T. saccata), or Urnula (e.g., U. criterium).

[0642] In some embodiments, the polynucleotide is cloned from a yeast, such as Candida, Hansenula, Komagataella (e.g., K. phaffii), Kluyveromyces (e.g., K. lactis), Pichia (e.g., P. pastoris), Saccharomyces (e.g., S. carlsbergensis, S. cerevisiae, S. diastaticus, S. douglasii, S. kluyveri, S norbensis, S. oviformis), Schizosaccharomyces, or Yarrowia (e.g., Y. lipolytica).

[0643] In some embodiments, the polynucleotide is cloned from a plant cell selected from the families Amaranthaceae (e.g., chard, spinach, sugar beet, quinoa), Asteraceae (e.g., artichoke, asters, chamomile, chicory, chrysanthemums, dahlias, daisies, echinacea, goldenrod, guayule, lettuce, marigolds, safflower, sunflowers, zinnias), Brassicaceae (e.g., arugula, broccoli, bok choy, Brussels sprouts, cabbage, cauliflower, canola, collard greens, daikon, garden cress, horseradish, kale, mustard, radish, rapeseed, rutabaga, turnip, wasabi, watercress, Arabidopsis thaliana), Caricaceae (e.g., papaya), Cucurbitaceae (e.g., cantaloupe, cucumber, honeydew, melon, pumpkin, squash (e.g., acorn squash, butternut squash, summer squash), watermelon, zucchini), Fabaceae (e.g., alfalfa, beans, carob, clover, guar, lentils, mesquite, peas, peanuts, soybeans, tamarind, tragacanth, vetch), Malvaceac (e.g., cacao, cotton, durian, hibiscus, kenaf, kola, okra), Poaceae (e.g., bamboo, barley, corn, fonio, lawn grass (e.g., Bahia grass, Bermudagrass, bluegrass, Buffalograss, Centipede grass, Fescue, or Zoysia), millet, oats, ornamental grasses, rice, rye, sorghum, sugar cane, triticale, wheat and other cereal crops, Polygonaceae (e.g., buckwheat), Rosaceae (e.g., almonds, apples, apricots, blackberry, blueberry, cherries, peaches, plums, quinces, raspberries, roses, strawberries), Solanaceae (e.g., bell peppers, chili peppers, eggplant, petunia, potato, tobacco, tomato) and Vitaceae (e.g., grape).

[0644] In some embodiments, the polynucleotide encodes:
[0645] a) a polypeptide having about/at least 60, 61, 62, 63, 64, 65, 66, 67, 68, 69, 70, 71, 72, 73, 74, 75, 76, 77, 78, 79, 80, 81, 82, 83, 84, 85, 86, 87, 88, 89, 90, 91, 92, 93, 94, 95, 96, 97, 98, 99 or 100% sequence identity to any one or more of SEQ ID NO(s): 1-91, 45906, 72144, 72147 and 72149;
[0646] b) a polypeptide having about/at least 60, 61, 62, 63, 64, 65, 66, 67, 68, 69, 70, 71, 72, 73, 74, 75, 76, 77, 78, 79, 80, 81, 82, 83, 84, 85, 86, 87, 88, 89, 90, 91, 92, 93, 94, 95, 96, 97, 98, 99 or 100% sequence identity to a mature polypeptide of any one or more of SEQ ID NO(s): 1-91, 45906, 72144, 72147 and 72149;
[0647] c) a polypeptide derived from any one of SEQ ID NO(s): 1-91, 45906, 72144, 72147 and 72149 by substitution, deletion, or insertion of one or more amino acids;
[0648] e) a polypeptide derived from a mature polypeptide any one of SEQ ID NO(s): 1-91, 45906, 72144, 72147 and 72149 by substitution, deletion, or insertion of one or more amino acids;
[0649] f) a polypeptide derived from the polypeptide of any one of a) through e) wherein the N- and/or C-terminal end has been extended by the addition of one or more amino acids; and/or
[0650] g) a fragment of the polypeptide of any one of a) through f).

[0651] In preferred embodiments, the polynucleotide encodes a polypeptide that comprises, consists essentially of or consists of the amino acid sequence of any one of SEQ ID NO(s): 1-91, 45906, 72144, 72147 and 72149 or a mature polypeptide thereof.

[0652] In some embodiments, the polynucleotide comprises, consists essentially of or consists of a nucleic acid sequence having about/at least 60, 61, 62, 63, 64, 65, 66, 67, 68, 69, 70, 71, 72, 73, 74, 75, 76, 77, 78, 79, 80, 81, 82, 83, 84, 85, 86, 87, 88, 89, 90, 91, 92, 93, 94, 95, 96, 97, 98, 99 or 100% sequence identity to any one or more of SEQ ID NO(s): 92-182, 72145-72146, 72148 and 72150 or the cDNA sequence thereof;

[0653] In preferred embodiments, the polynucleotide comprises, consists essentially of or consists of the nucleic acid sequence of any one of SEQ ID NO(s): 92-182, 72145-72146, 72148 and 72150 or a cDNA sequence thereof.

[0654] In some embodiments, the polynucleotide encodes a polypeptide that comprises, consists essentially of or consists of a fragment of one of SEQ ID NO(s): 1-91, 45906, 72144, 72147 and 72149 or a mature peptide thereof. For example, the polynucleotide may encode a fragment of any one of SEQ ID NO(s): 1-91, 45906, 72144, 72147 and 72149 or a mature peptide thereof, said fragment comprising at least 85, 86, 87, 88, 89, 90, 91, 92, 93, 94, 95, 96, 97, 98 or 99% of the amino acids found in the original protein.

[0655] In some embodiments, polynucleotides of the present disclosure encode a polypeptide that comprises, consists essentially of or consists of any one of SEQ ID NO(s): 1-91, 45906, 72144, 72147 and 72149 or a mature polypeptide thereof with an N-terminal extension of one or more amino acids (e.g., 1, 2, 3, 4, 5, 6, 7, 8, 9, 10, 11, 12, 13, 14, 15, 16, 17, 18, 19, 20 or more amino acids), a C-terminal extension of one or more amino acids (e.g., 1, 2, 3, 4, 5, 6, 7, 8, 9, 10, 11, 12, 13, 14, 15, 16, 17, 18, 19, 20 or more amino acids), one or more substitutions (e.g., 1, 2, 3, 4, 5, 6, 7, 8, 9, 10, 11, 12, 13, 14, 15, 16, 17, 18, 19, 20 or more substitutions), one or more insertions (e.g., 1, 2, 3, 4, 5, 6, 7, 8, 9, 10, 11, 12, 13, 14, 15, 16, 17, 18, 19, 20 or more insertions), and/or one or more deletions (e.g., 1, 2, 3, 4, 5, 6, 7, 8, 9, 10, 11, 12, 13, 14, 15, 16, 17, 18, 19, 20 or more deletions). The amino acid changes may be of a minor nature, that is conservative amino acid substitutions or insertions that do not significantly affect the folding and/or activity of the protein; small deletions, typically of 1-30 amino acids; small amino- or carboxyl-terminal extensions, such as an amino-terminal methionine residue; a small linker peptide of up to 20-25 residues; or a small extension that facilitates purification by changing net charge or another function, such as a poly-histidine tract, an antigenic epitope or a binding module.

[0656] Polynucleotides of the present disclosure may be mutated by introduction of nucleotide substitutions that do not result in a change in the amino acid sequence of the protein, but which correspond to the codon usage of the host organism intended for production of the enzyme, or by introduction of nucleotide substitutions that may give rise to a different amino acid sequence. For a general description of nucleotide substitution, see, e.g., Ford et al., 1991, Protein Expression and Purification 2: 95-107.

[0657] In an aspect, the polynucleotide is isolated.

[0658] In another aspect, the polynucleotide is purified.

[0659] The present disclosure also provides nucleic acid constructs comprising a polynucleotide of the present disclosure, wherein the polynucleotide is operably linked to one or more control sequences that direct the expression of the coding sequence in a suitable host cell under conditions compatible with the control sequences.

[0660] The polynucleotide may be manipulated in a variety of ways to provide for expression of the protein. Manipulation of the polynucleotide prior to its insertion into a vector may be desirable or necessary depending on the expression vector. Techniques for modifying polynucleotides utilizing recombinant DNA methods are well known in the art.

[0661] The control sequence may be a promoter, a polynucleotide that is recognized by a host cell for expression of a polynucleotide encoding a protein of the present disclosure. The promoter contains transcriptional control sequences that mediate the expression of the protein. The promoter may be any polynucleotide that shows transcriptional activity in the host cell including mutant, truncated, and hybrid promoters, and may be obtained from genes encoding extracellular or intracellular proteins either homologous or heterologous to the host cell.

[0662] Examples of suitable promoters for directing transcription of the polynucleotide of the present disclosure in a bacterial host cell are described in Sambrook et al., 1989, Molecular Cloning: A Laboratory Manual, Cold Spring Harbor Lab., NY, Davis et al., 2012, supra, and Song et al., 2016, PLOS One 11(7): e0158447.

[0663] Examples of suitable promoters for directing transcription of the polynucleotide of the present disclosure in a filamentous fungal host cell are promoters obtained from Aspergillus, Fusarium, Rhizomucor and Trichoderma cells, such as the promoters described in Mukherjee et al., 2013, “Trichoderma: Biology and Applications”, and by Schmoll and Dattenböck, 2016, “Gene Expression Systems in Fungi: Advancements and Applications”, Fungal Biology.

[0664] For expression in a yeast host, examples of useful promoters are described by Smolke et al., 2018, “Synthetic Biology: Parts, Devices and Applications” (Chapter 6: Constitutive and Regulated Promoters in Yeast: How to Design and Make Use of Promoters in S. cerevisiae), and by Schmoll and Dattenböck, 2016, “Gene Expression Systems in Fungi: Advancements and Applications”, Fungal Biology.

[0665] The control sequence may also be a transcription terminator, which is recognized by a host cell to terminate transcription. The terminator is operably linked to the 3′-terminus of the polynucleotide encoding the protein. Any terminator that is functional in the host cell may be used in the present disclosure.

[0666] Preferred terminators for bacterial host cells may be obtained from the genes for Bacillus clausii alkaline protease (aprH), Bacillus licheniformis alpha-amylase (amyL), and Escherichia coli ribosomal RNA (rrnB).

[0667] Preferred terminators for filamentous fungal host cells may be obtained from Aspergillus or Trichoderma species, such as obtained from the genes for Aspergillus niger glucoamylase, Trichoderma reesei beta-glucosidase, Trichoderma reesei cellobiohydrolase I, and Trichoderma reesei endoglucanase I, such as the terminators described in Mukherjee et al., 2013, “Trichoderma: Biology and Applications”, and by Schmoll and Dattenböck, 2016, “Gene Expression Systems in Fungi: Advancements and Applications”, Fungal Biology.

[0668] Preferred terminators for yeast host cells may be obtained from the genes for Saccharomyces cerevisiae enolase, Saccharomyces cerevisiae cytochrome C (CYC1), and Saccharomyces cerevisiae glyceraldehyde-3-phosphate dehydrogenase. Other useful terminators for yeast host cells are described by Romanos et al., 1992, Yeast 8: 423-488.

[0669] The control sequence may also be an mRNA stabilizer region downstream of a promoter and upstream of the coding sequence of a gene which increases expression of the gene.

[0670] Examples of suitable mRNA stabilizer regions are obtained from a Bacillus thuringiensis cry/IIA gene (WO 94/25612) and a Bacillus subtilis SP82 gene (Hue et al., 1995, J. Bacteriol. 177: 3465-3471).

[0671] Examples of mRNA stabilizer regions for fungal cells are described in Geisberg et al., 2014, Cell 156(4): 812-824, and in Morozov et al., 2006, Eukaryotic Cell 5(11): 1838-1846.

[0672] The control sequence may also be a leader, a non-translated region of an mRNA that is important for translation by the host cell. The leader is operably linked to the 5′-terminus of the polynucleotide encoding the protein. Any leader that is functional in the host cell may be used.

[0673] Suitable leaders for bacterial host cells are described by Hambraeus et al., 2000, Microbiology 146(12): 3051-3059, and by Kaberdin and Blasi, 2006, FEMS Microbiol. Rev. 30(6): 967-979.

[0674] Preferred leaders for filamentous fungal host cells may be obtained from the genes for Aspergillus oryzae TAKA amylase and Aspergillus nidulans triose phosphate isomerase.

[0675] Suitable leaders for yeast host cells may be obtained from the genes for Saccharomyces cerevisiae enolase (ENO-1), Saccharomyces cerevisiae 3-phosphoglycerate kinase, Saccharomyces cerevisiae alpha-factor, and Saccharomyces cerevisiae alcohol dehydrogenase/glyceraldehyde-3-phosphate dehydrogenase (ADH2/GAP).

[0676] The control sequence may also be a polyadenylation sequence, a sequence operably linked to the 3′-terminus of the polynucleotide which, when transcribed, is recognized by the host cell as a signal to add polyadenosine residues to transcribed mRNA. Any polyadenylation sequence that is functional in the host cell may be used.

[0677] Preferred polyadenylation sequences for filamentous fungal host cells are obtained from the genes for Aspergillus nidulans anthranilate synthase, Aspergillus niger glucoamylase, Aspergillus niger alpha-glucosidase, Aspergillus oryzae TAKA amylase, and Fusarium oxysporum trypsin-like protease.

[0678] Useful polyadenylation sequences for yeast host cells are described by Guo and Sherman, 1995, Mol. Cellular Biol. 15: 5983-5990.

[0679] The control sequence may also be a signal peptide coding region that encodes a signal peptide linked to the N-terminus of a protein and directs the protein into the cell's secretory pathway. The 5′-end of the coding sequence of the polynucleotide may inherently contain a signal peptide coding sequence naturally linked in translation reading frame with the segment of the coding sequence that encodes the protein. Alternatively, the 5′-end of the coding sequence may contain a signal peptide coding sequence that is heterologous to the coding sequence. A heterologous signal peptide coding sequence may be required where the coding sequence does not naturally contain a signal peptide coding sequence. Alternatively, a heterologous signal peptide coding sequence may simply replace the natural signal peptide coding sequence to enhance secretion of the protein. Any signal peptide coding sequence that directs the expressed protein into the secretory pathway of a host cell may be used.

[0680] Effective signal peptide coding sequences for bacterial host cells are the signal peptide coding sequences obtained from the genes for Bacillus NCIB 11837 maltogenic amylase, Bacillus licheniformis subtilisin, Bacillus licheniformis beta-lactamase, Bacillus stearothermophilus alpha-amylase, Bacillus stearothermophilus neutral proteases (nprT, nprS, nprM), and Bacillus subtilis prsA. Further signal peptides are described by Freudl, 2018, Microbial Cell Factories 17: 52.

[0681] Effective signal peptide coding sequences for filamentous fungal host cells are the signal peptide coding sequences obtained from the genes for Aspergillus niger neutral amylase, Aspergillus niger glucoamylase, Aspergillus oryzae TAKA amylase, Humicola insolens cellulase, Humicola insolens endoglucanase V, Humicola lanuginosa lipase, and Rhizomucor miehei aspartic proteinase, such as the signal peptide described by Xu et al., 2018, Biotechnology Letters 40: 949-955 Useful signal peptides for yeast host cells are obtained from the genes for Saccharomyces cerevisiae alpha-factor and Saccharomyces cerevisiae invertase. Other useful signal peptide coding sequences are described by Romanos et al., 1992, supra.

[0682] The control sequence may also be a propeptide coding sequence that encodes a propeptide positioned at the N-terminus of a protein. The resultant protein is known as a proenzyme or proprotein (or a zymogen in some cases). A proprotein is generally inactive and can be converted to an active protein by catalytic or autocatalytic cleavage of the propeptide from the proprotein. The propeptide coding sequence may be obtained from the genes for Bacillus subtilis alkaline protease (aprE), Bacillus subtilis neutral protease (nprT), Myceliophthora thermophila laccase (WO 95/33836), Rhizomucor miehei aspartic proteinase, and Saccharomyces cerevisiae alpha-factor.

[0683] Where both signal peptide and propeptide sequences are present, the propeptide sequence is positioned next to the N-terminus of a protein and the signal peptide sequence is positioned next to the N-terminus of the propeptide sequence. Additionally or alternatively, when both signal peptide and propeptide sequences are present, the protein may comprise only a part of the signal peptide sequence and/or only a part of the propeptide sequence. Alternatively, the final or isolated protein may comprise a mixture of mature proteins and proteins which comprise, either partly or in full length, a propeptide sequence and/or a signal peptide sequence.

[0684] It may also be desirable to add regulatory sequences that regulate expression of the protein relative to the growth of the host cell. Examples of regulatory sequences are those that cause expression of the gene to be turned on or off in response to a chemical or physical stimulus, including the presence of a regulatory compound. Regulatory sequences in prokaryotic systems include the lac, tac, and trp operator systems. In yeast, the ADH2 system or GALI system may be used. In filamentous fungi, the Aspergillus niger glucoamylase promoter, Aspergillus oryzae TAKA alpha-amylase promoter, and Aspergillus oryzae glucoamylase promoter, Trichoderma reesei cellobiohydrolase I promoter, and Trichoderma reesei cellobiohydrolase II promoter may be used. Other examples of regulatory sequences are those that allow for gene amplification. In fungal systems, these regulatory sequences include the dihydrofolate reductase gene that is amplified in the presence of methotrexate, and the metallothionein genes that are amplified with heavy metals.

[0685] The control sequence may also be a transcription factor, a polynucleotide encoding a polynucleotide-specific DNA-binding protein that controls the rate of the transcription of genetic information from DNA to mRNA by binding to a specific polynucleotide sequence. The transcription factor may function alone and/or together with one or more other proteins or transcription factors in a complex by promoting or blocking the recruitment of RNA polymerase. Transcription factors are characterized by comprising at least one DNA-binding domain which often attaches to a specific DNA sequence adjacent to the genetic elements which are regulated by the transcription factor. The transcription factor may regulate the expression of a protein of interest either directly, i.e., by activating the transcription of the gene encoding the protein of interest by binding to its promoter, or indirectly, i.e., by activating the transcription of a further transcription factor which regulates the transcription of the gene encoding the protein of interest, such as by binding to the promoter of the further transcription factor. Suitable transcription factors for fungal host cells are described in WO 2017/144177. Suitable transcription factors for prokaryotic host cells are described in Seshasayee et al., 2011, Subcellular Biochemistry 52: 7-23, as well in Balleza et al., 2009, FEMS Microbiol. Rev. 33(1): 133-151.

[0686] The present disclosure also provides recombinant expression vectors comprising a polynucleotide of the present disclosure, a promoter, and transcriptional and translational stop signals. The various nucleotide and control sequences may be joined together to produce a recombinant expression vector that may include one or more convenient restriction sites to allow for insertion or substitution of the polynucleotide encoding the protein at such sites. Alternatively, the polynucleotide may be expressed by inserting the polynucleotide or a nucleic acid construct comprising the polynucleotide into an appropriate vector for expression. In creating the expression vector, the coding sequence is located in the vector so that the coding sequence is operably linked with the appropriate control sequences for expression.

[0687] The recombinant expression vector may be any vector (e.g., a plasmid or virus) that can be conveniently subjected to recombinant DNA procedures and can bring about expression of the polynucleotide. The choice of the vector will typically depend on the compatibility of the vector with the host cell into which the vector is to be introduced. The vector may be a linear or closed circular plasmid.

[0688] The vector may be an autonomously replicating vector, i.e., a vector that exists as an extrachromosomal entity, the replication of which is independent of chromosomal replication, e.g., a plasmid, an extrachromosomal element, a minichromosome, or an artificial chromosome. The vector may contain any means for assuring self-replication. Alternatively, the vector may be one that, when introduced into the host cell, is integrated into the genome and replicated together with the chromosome(s) into which it has been integrated. Furthermore, a single vector or plasmid or two or more vectors or plasmids that together contain the total DNA to be introduced into the genome of the host cell, or a transposon, may be used.

[0689] The vector preferably contains one or more selectable markers that permit easy selection of transformed, transfected, transduced, or the like cells. A selectable marker is a gene the product of which provides for biocide or viral resistance, resistance to heavy metals, prototrophy to auxotrophs, and the like.

[0690] The vector preferably contains at least one element that permits integration of the vector into the host cell's genome or autonomous replication of the vector in the cell independent of the genome.

[0691] For integration into the host cell genome, the vector may rely on the polynucleotide's sequence encoding the protein or any other element of the vector for integration into the genome by homologous recombination, such as homology-directed repair (HDR), or non-homologous recombination, such as non-homologous end-joining (NHEJ).

[0692] For autonomous replication, the vector may further comprise an origin of replication enabling the vector to replicate autonomously in the host cell in question. The origin of replication may be any plasmid replicator mediating autonomous replication that functions in a cell. The term “origin of replication” or “plasmid replicator” means a polynucleotide that enables a plasmid or vector to replicate in vivo.

[0693] More than one copy of a polynucleotide of the present disclosure may be inserted into a host cell to increase production of a protein. For example, 2 or 3 or 4 or 5 or more copies are inserted into a host cell. An increase in the copy number of the polynucleotide can be obtained by integrating at least one additional copy of the sequence into the host cell genome or by including an amplifiable selectable marker gene with the polynucleotide where cells containing amplified copies of the selectable marker gene, and thereby additional copies of the polynucleotide, can be selected for by cultivating the cells in the presence of the appropriate selectable agent.

[0694] The present disclosure also provides methods for producing recombinant host cells comprising a polynucleotide of the present disclosure operably linked to one or more control sequences that direct the production of a protein of the present disclosure.

[0695] A construct or vector comprising a polynucleotide is introduced into a host cell so that the construct or vector is maintained as a chromosomal integrant or as a self-replicating extra-chromosomal vector as described earlier. The choice of a host cell will to a large extent depend upon the gene encoding the protein and its source. The protein can be native or heterologous to the recombinant host cell. Also, at least one of the one or more control sequences can be heterologous to the polynucleotide encoding the protein. The recombinant host cell may comprise a single copy, or at least two copies, e.g., three, four, five, or more copies of the polynucleotide of the present disclosure.

[0696] The host cell may be any cell useful in the recombinant production of a protein of the present disclosure, including, not limited to, prokaryotic cells, fungal cells and plant cells, as described above.

[0697] In an aspect, the host cell is isolated.

[0698] In another aspect, the host cell is purified.

[0699] In some embodiments, the host cell is a Gram-negative bacterium, such as Campylobacter, Chryseobacterium (e.g., C. viscerum), Dicytoglomus (e.g., D. thermophilum), Escherichia (e.g., E. coli), Flavobacterium, Fusobacterium, Helicobacter, Ilyobacter, Lysobacter (e.g., L. gummosus), Neisseria, Pseudomonas, Salmonella or Ureaplasma.

[0700] In some embodiments, the host cell is a Gram-positive bacterium, such as Alkalihalobacillus (e.g., A. akibai, A. clausii), Bacillus (e.g., B. agaradhaerens, B. alkalophilus, B. amyloliquefaciens, B. brevis, B. circulans, B. clausii, B. coagulans, B. deramificans, B. firmus, B. lautus, B. lentus, B. licheniformis, B. megaterium, B. pumilus, B. stearothermophilus, B. subtilis, B. thuringiensis), Clostridium. Effusibacillus (e.g., F. pohliae), Enterococcus, Geobacillus (e.g., G. stearothermophilus), Lactobacillus, Lactococcus, Lederbergia (e.g., L. lenta), Neobacillus (e.g., N. novalis), Nocardiopsis, Oceanobacillus (e.g., O. barbara), Staphylococcus, Streptococcus (e.g., S. equisimilis, S. pyogenes, S. uberis, and S. equi subsp. Zooepidemicus) or Streptomyces (e.g., S. achromogenes, S. avermitilis, S. coelicolor, S. griseus, S. lividans), Sutcliffiella (e.g., S. halmapala).

[0701] Methods for introducing DNA into prokaryotic host cells are well-known in the art, and any suitable method can be used including but not limited to protoplast transformation, competent cell transformation, electroporation, conjugation, transduction, with DNA introduced as linearized or as circular polynucleotide. Persons skilled in the art will be readily able to identify a suitable method for introducing DNA into a given prokaryotic cell depending, e.g., on the genus. Methods for introducing DNA into prokaryotic host cells are for example described in Heinze et al., 2018, BMC Microbiology 18:56, Burke et al., 2001, Proc. Natl. Acad. Sci. USA 98: 6289-6294, Choi et al., 2006, J. Microbiol. Methods 64: 391-397, and Donald et al., 2013, J. Bacteriol. 195(11): 2612-2620.

[0702] In some embodiments, the host cell is a fungal cell, such as Acremonium, Acrophialophora (e.g., A. fusispora), Aspergillus (e.g., A. aculeatus, A. awamori, A. chevalieri, A. foetidus, A. fumigatus, A. japonicus, A. nidulans, A. niger, A. niveoglaucus, A. oryzae, A. tubingensis), Aureobasidium, Bjerkandera (e.g., B. adusta, B. fumosa), Ceriporiopsis (e.g., C. aneirina, C. caregiea, C. gilvescens, C. pannocinta, C. rivulosa, Ceriporiopsis subrufa, C. subvermispora), Chaetomium (e.g., C. erraticum, C. globosum), Chrysosporium (e.g., C. inops, C. keratinophilum, C. lucknowense, C. merdarium, C. pannicola, C. queenslandicum, C. tropicum, C. zonatum), Colletotrichum (e.g., C. graminicola), Coprinopsis (e.g., C. cinereus), Coprinus (e.g., C. cinereus), Coriolus (e.g., C. hirsutus), Cryphonectria (e.g., C. parasitica), Cryptococcus, Evansstolkia (e.g., E. leycettana), Filibasidium, Fusarium (e.g., F. bactridioides, F. cerealis, F. crookwellense, F. culmorum, F. graminearum, F. graminum, F. heterosporum, F. longipes, F. negundi, F. oxysporum, F. reticulatum, F. roseum, F. sambucinum, F. sarcochroum, F. solani, F. sporotrichioides, F. sulphureum, F. torulosum, F. trichothecioides, F. venenatum), Humicola (e.g., H. insolens, H. lanuginosa), Magnaporthe, Microdochium (e.g., M. nivale), Mucor (e.g., M. miehei), Myceliophthora (e.g., M. thermophila), Neocallimastix, Neurospora (e.g., Neurospora crassa), Ostropa (e.g., O. barbara), Paecilomyces, Penicillium (e.g., P. emersonii, P. purpurogenum, P. thomii, P. viridicatum), Phanerochaete (e.g., P. chrysosporium), Phlebia (e.g., Phlebia radiata), Piromyces, Pleurotus (e.g., Pleurotus eryngii), Pseudoplectania (e.g., P. vogesiaca), Schizophyllum, Sodiomyces (e.g., S. alcalophilus), Stenocarpella (e.g., S. maydis), Talaromyces (e.g., T. bacillisporus, T. emersonii, T. pinophilus), Thermoascus (e.g., T. aurantiacus), Themochaetoides (e.g., T. thermophila), Thermomyces (e.g., T. lanuginosus), Thermothielavioides (e.g., T. terrestris), Thermothelomyces (e.g., T. thermophilus), Thielavia (e.g., T. terrestris), Tolypocladium, Trametes (e.g., T. hirsuta, T. villosa, T. versicolor), Trichoderma (e.g., T. atroviride, T. harzianum, T. koningii, T. longibrachiatum, T. reesei, T. viride), Trichophaea (e.g., T. saccata), or Urnula (e.g., U. criterium).

[0703] In some embodiments, the host cell is a yeast cell, such as Candida, Hansenula, Komagataella (e.g., K. phaffii), Kluyveromyces (e.g., Kluyveromyces lactis), Pichia (e.g., P. pastoris), Saccharomyces (e.g., S. carlsbergensis, S. cerevisiae, S. diastaticus, S. douglasii, S. kluyveri, S. norbensis, S. oviformis), Schizosaccharomyces, or Yarrowia (e.g., Yarrowia lipolytica).

[0704] Fungal cells may be transformed by a process involving protoplast-mediated transformation, Agrobacterium-mediated transformation, electroporation, biolistic method and shock-wave-mediated transformation as reviewed by Li et al., 2017, Microbial Cell Factories 16: 168 and procedures described in EP 238023, Yelton et al., 1984, Proc. Natl. Acad. Sci. USA 81: 1470-1474, Christensen et al., 1988, Bio Technology 6: 1419-1422, and Lubertozzi and Keasling, 2009, Biotechn. Advances 27: 53-75. However, any method known in the art for introducing DNA into a fungal host cell can be used, and the DNA can be introduced as linearized or as circular polynucleotide.

[0705] In some embodiments, the host cell is a plant cell, optionally a plant cell selected from the families Amaranthaceae (e.g., chard, spinach, sugar beet, quinoa), Asteraceae (e.g., artichoke, asters, chamomile, chicory, chrysanthemums, dahlias, daisies, echinacea, goldenrod, guayule, lettuce, marigolds, safflower, sunflowers, zinnias), Brassicaceae (e.g., arugula, broccoli, bok choy, Brussels sprouts, cabbage, cauliflower, canola, collard greens, daikon, garden cress, horseradish, kale, mustard, radish, rapeseed, rutabaga, turnip, wasabi, watercress, Arabidopsis thaliana), Caricaceae (e.g., papaya), Cucurbitaceae (e.g., cantaloupe, cucumber, honeydew, melon, pumpkin, squash (e.g., acorn squash, butternut squash, summer squash), watermelon, zucchini), Fabaceae (e.g., alfalfa, beans, carob, clover, guar, lentils, mesquite, peas, peanuts, soybeans, tamarind, tragacanth, vetch), Malvaceae (e.g., cacao, cotton, durian, hibiscus, kenaf, kola, okra), Poaceae (e.g., bamboo, barley, corn, fonio, lawn grass (e.g., Bahia grass, Bermudagrass, bluegrass, Buffalograss, Centipede grass, Fescue, or Zoysia), millet, oats, ornamental grasses, rice, rye, sorghum, sugar cane, triticale, wheat and other cereal crops, Polygonaceae (e.g., buckwheat), Rosaceae (e.g., almonds, apples, apricots, blackberry, blueberry, cherries, peaches, plums, quinces, raspberries, roses, strawberries), Solanaceae (e.g., bell peppers, chili peppers, eggplant, petunia, potato, tobacco, tomato) and Vitaceae (e.g., grape).

[0706] Transgenic plants and plant cells expressing the protein may be constructed in accordance with methods known in the art. In short, the plant or plant cell is constructed by incorporating one or more expression constructs encoding the protein into the plant host genome or chloroplast genome and propagating the resulting modified plant or plant cell into a transgenic plant or plant cell. In an embodiment, a plant cell does not belong to plant varieties.

[0707] The expression construct is conveniently a nucleic acid construct that comprises a polynucleotide encoding a protein, wherein the polynucleotide is operably linked with appropriate regulatory sequences required for expression of the polynucleotide in the plant or plant part of choice. Furthermore, the expression construct may comprise a selectable marker useful for identifying plant cells into which the expression construct has been integrated and DNA sequences necessary for introduction of the construct into the plant in question (the latter depends on the DNA introduction method to be used).

[0708] The choice of regulatory sequences, such as promoter and terminator sequences and optionally signal or transit sequences, is determined, for example, on the basis of when, where, and how the protein is desired to be expressed (Sticklen, 2008, Nature Reviews 9: 433-443). For instance, the expression of the gene encoding a protein may be constitutive or inducible, or may be developmental, stage or tissue specific, and the gene product may be targeted to a specific tissue or plant part such as seeds or leaves. Regulatory sequences are, for example, described by Tague et al., 1988, Plant Physiology 86: 506.

[0709] For constitutive expression, the 35S-CaMV, the maize ubiquitin 1, or the rice actin 1 promoter may be used (Franck et al., 1980, Cell 21: 285-294; Christensen et al., 1992, Plant Mol. Biol. 18: 675-689; Zhang et al., 1991, Plant Cell 3: 1155-1165). Organ-specific promoters may be, for example, a promoter from storage sink tissues such as seeds, potato tubers, and fruits (Edwards and Coruzzi, 1990, Ann. Rev. Genet. 24: 275-303), or from metabolic sink tissues such as meristems (Ito et al., 1994, Plant Mol. Biol. 24: 863-878), a seed specific promoter such as the glutelin, prolamin, globulin, or albumin promoter from rice (Wu et al., 1998, Plant Cell Physiol. 39: 885-889), a Vicia faba promoter from the legumin B4 and the unknown seed protein gene from Vicia faba (Conrad et al., 1998, J. Plant Physiol. 152: 708-711), a promoter from a seed oil body protein (Chen et al., 1998, Plant Cell Physiol. 39: 935-941), the storage protein napA promoter from Brassica napus, or any other seed specific promoter known in the art, e.g., as described in WO 91/14772. Furthermore, the promoter may be a leaf specific promoter such as the rbcs promoter from rice or tomato (Kyozuka et al., 1993, Plant Physiol. 102: 991-1000), the chlorella virus adenine methyltransferase gene promoter (Mitra and Higgins, 1994, Plant Mol. Biol. 26: 85-93), the aldP gene promoter from rice (Kagaya et al., 1995, Mol. Gen. Genet. 248: 668-674), or a wound inducible promoter such as the potato pin2 promoter (Xu et al., 1993, Plant Mol. Biol. 22: 573-588). Likewise, the promoter may be induced by abiotic treatments such as temperature, drought, or alterations in salinity or induced by exogenously applied substances that activate the promoter, e.g., ethanol, oestrogens, plant hormones such as ethylene, abscisic acid, and gibberellic acid, and heavy metals.

[0710] A promoter enhancer element may also be used to achieve higher expression of a protein in the plant. For instance, the promoter enhancer element may be an intron that is placed between the promoter and the polynucleotide encoding a protein. For instance, Xu et al., 1993, supra, disclose the use of the first intron of the rice actin 1 gene to enhance expression.

[0711] The selectable marker gene and any other parts of the expression construct may be chosen from those available in the art.

[0712] The nucleic acid construct is incorporated into the plant genome according to conventional techniques known in the art, including Agrobacterium-mediated transformation, virus-mediated transformation, microinjection, particle bombardment, biolistic transformation, and electroporation (Gasser et al., 1990, Science 244: 1293; Potrykus, 1990, Bio/Technology 8: 535; Shimamoto et al., 1989, Nature 338: 274).

[0713] Agrobacterium tumefaciens-mediated gene transfer is a method for generating transgenic dicots (for a review, see Hooykas and Schilperoort, 1992, Plant Mol. Biol. 19: 15-38) and for transforming monocots, although other transformation methods may be used for these plants. A method for generating transgenic monocots is particle bombardment (microscopic gold or tungsten particles coated with the transforming DNA) of embryonic calli or developing embryos (Christou, 1992, Plant J. 2: 275-281; Shimamoto, 1994, Curr. Opin. Biotechnol. 5: 158-162; Vasil et al., 1992, Bio Technology 10: 667-674). An alternative method for transformation of monocots is based on protoplast transformation as described by Omirulleh et al., 1993, Plant Mol. Biol. 21: 415-428. Additional transformation methods include those described in U.S. Pat. Nos. 6,395,966 and 7,151,204 (both of which are herein incorporated by reference in their entirety).

[0714] Following transformation, the transformants having incorporated the expression construct are selected and regenerated into whole plants according to methods well known in the art. Often the transformation procedure is designed for the selective elimination of selection genes either during regeneration or in the following generations by using, for example, co-transformation with two separate T-DNA constructs or site-specific excision of the selection gene by a specific recombinase.

[0715] In addition to direct transformation of a particular plant genotype with a construct of the present disclosure, transgenic plants may be made by crossing a plant having the construct to a second plant lacking the construct. For example, a construct encoding a protein can be introduced into a particular plant variety by crossing, without the need for ever directly transforming a plant of that given variety. Therefore, the present disclosure encompasses not only a plant directly regenerated from cells which have been transformed in accordance with the present disclosure, but also the progeny of such plants. As used herein, progeny may refer to the offspring of any generation of a parent plant prepared in accordance with the present disclosure. Such progeny may include a DNA construct prepared in accordance with the present disclosure. Crossing results in the introduction of a transgene into a plant line by cross pollinating a starting line with a donor plant line. Non-limiting examples of such steps are described in U.S. Pat. No. 7,151,204.

[0716] Plants may be generated through a process of backcross conversion. For example, plants include plants referred to as a backcross converted genotype, line, inbred, or hybrid.

[0717] Genetic markers may be used to assist in the introgression of one or more transgenes of the disclosure from one genetic background into another. Marker assisted selection offers advantages relative to conventional breeding in that it can be used to avoid errors caused by phenotypic variations. Further, genetic markers may provide data regarding the relative degree of elite germplasm in the individual progeny of a particular cross. For example, when a plant with a desired trait which otherwise has a non-agronomically desirable genetic background is crossed to an elite parent, genetic markers may be used to select progeny which not only possess the trait of interest, but also have a relatively large proportion of the desired germplasm. In this way, the number of generations required to introgress one or more traits into a particular genetic background is minimized.

[0718] The present disclosure encompasses methods of producing a mutant of a parent cell, which comprises disrupting or deleting a polynucleotide, or a portion thereof, encoding a protein of the present disclosure, which results in the mutant cell producing less of the protein than the parent cell when cultivated under the same conditions.

[0719] The mutant cell may be constructed by reducing or eliminating expression of the polynucleotide using methods well known in the art, for example, one or more nucleotide insertions, one or more gene disruptions, one or more nucleotide replacements, or one or more nucleotide deletions.

[0720] The polynucleotide to be modified or inactivated may be, for example, the coding region or a part thereof essential for activity, or a regulatory or control element required for expression of the coding region, e.g., a functional part of a promoter sequence, and/or a regulatory or control element required for the transcription or translation of the polynucleotide. Other control sequences for possible modification include, but are not limited to, a leader, polyadenylation sequence, propeptide sequence, signal peptide sequence, transcription terminator, and transcriptional activator.

[0721] Modification or inactivation of the polynucleotide may be performed by subjecting the parent cell to mutagenesis and selecting for mutant cells in which expression of the polynucleotide has been reduced or eliminated. The mutagenesis, which may be specific or random, may be performed, for example, by use of a suitable physical or chemical mutagenizing agent, by use of a suitable oligonucleotide, or by subjecting the DNA sequence to PCR generated mutagenesis. Furthermore, the mutagenesis may be performed by use of any combination of these mutagenizing agents.

[0722] Examples of a physical or chemical mutagenizing agent include ultraviolet (UV) irradiation, hydroxylamine, N-methyl-N′-nitro-N-nitrosoguanidine (MNNG), O-methyl hydroxylamine, nitrous acid, ethyl methane sulphonate (EMS), sodium bisulphite, formic acid, and nucleotide analogues (see J. L. Bose, Springer Protocols 2016, Methods in Molecular Biology, The Genetic Manipulation of Staphylococci).

[0723] Additionally or alternatively, nucleotides may be inserted or removed so as to result in the introduction of a stop codon, the removal of the start codon, or a change in the open reading frame. Such modification or inactivation may be accomplished by site-directed mutagenesis or PCR generated mutagenesis in accordance with methods known in the art, or by targeted gene editing using one or more nucleases, e.g., zinc-finger nucleases or CRISPR-associated nucleases. Additionally or alternatively, the modification or inactivation may be achieved by gene silencing, genetic repression, genetic activation, and/or post-translational mutagenesis, e.g., by methods employing non-coding RNA, RNAi, siRNA, miRNA, ribozymes, catalytically inactive nucleases, CRISPRi, nucleotide methylation, and/or histone acetylation. The modification may be transient and/or reversible, irreversible and/or stable, or the modification may be dependent on chemical inducers or dependent on cultivation conditions, such as the cultivation temperature.

[0724] The modification may be performed in vivo, i.e., directly on the cell expressing the polynucleotide to be modified, or the modification be performed in vitro.

[0725] An example of a convenient way to eliminate or reduce expression of a polynucleotide is based on techniques of gene replacement, gene deletion, or gene disruption. For example, in the gene disruption method, a nucleic acid sequence corresponding to the endogenous polynucleotide is mutagenized in vitro to produce a defective nucleic acid sequence that is then transformed into the parent cell to produce a defective gene. By homologous recombination, the defective nucleic acid sequence replaces the endogenous polynucleotide. It may be desirable that the defective polynucleotide also encodes a marker that may be used for selection of transformants in which the polynucleotide has been modified or destroyed. In an aspect, the polynucleotide is disrupted with a selectable marker such as those described herein.

[0726] The present disclosure further relates to a mutant cell of a parent cell that comprises a disruption or deletion of a polynucleotide encoding a protein or a control sequence thereof or a silenced gene encoding the protein, which results in the mutant cell producing less of the protein or no protein compared to the parent cell.

[0727] Protein-deficient mutant cells are useful as host cells for expression of native and heterologous proteins. Therefore, the present disclosure further relates to methods of producing a native or heterologous protein, comprising (a) cultivating a protein-deficient mutant cell under conditions conducive for production of a desired protein (e.g., a protein of the present disclosure); and (b) recovering the desired protein. The term “heterologous proteins” means proteins that are not native to the host cell, e.g., a variant of a native protein. The host cell may comprise more than one copy of a polynucleotide encoding a desired native or heterologous protein.

[0728] In some embodiments, the present disclosure relates to a protein product essentially free from [enzyme] activity that is produced by a method of the present disclosure.

[0729] Proteins, polynucleotides and organisms of the present disclosure may be incorporated into any suitable formulation(s), including, but not limited to, formulations comprising one or more seed-compatible carriers, soil-compatible carriers, foliar-compatible carriers, preharvest carriers, and/or postharvest carriers. Selection of appropriate carrier materials will depend on the intended application(s) and the protein(s) to be included in the formulation, as well as any other components that may be present in and/or added to the formulation. In some embodiments, the carrier is a liquid, a gel, a slurry, or a solid. In some embodiments, the carrier consists essentially of or consists of one or more protein-stabilizing compounds.

[0730] The present disclosure encompasses granules/particles comprising one or more proteins of the disclosure. In an embodiment, the granule comprises a core, and optionally one or more coatings (outer layers) surrounding the core.

[0731] The core may have a diameter, measured as equivalent spherical diameter (volume based average particle size), of 20-2000 μm, particularly 50-1500 μm, 100-1500 μm or 250-1200 μm. The core diameter, measured as equivalent spherical diameter, can be determined using laser diffraction, such as using a Malvern Mastersizer and/or the method described under ISO13320 (2020).

[0732] In an embodiment, the core comprises one or more proteins of the present disclosure.

[0733] The core may include additional materials such as fillers, fiber materials (cellulose or synthetic fibers), stabilizing agents, solubilizing agents, suspension agents, viscosity regulating agents, light spheres, plasticizers, salts, lubricants and fragrances.

[0734] The core may include a binder, such as synthetic polymer, wax, fat, or carbohydrate.

[0735] The core may include a salt of a multivalent cation, a reducing agent, an antioxidant, a peroxide decomposing catalyst and/or an acidic buffer component, typically as a homogenous blend.

[0736] The core may include an inert particle with the protein absorbed into it, or applied onto the surface, e.g., by fluid bed coating.

[0737] The core may have a diameter of 20-2000 μm, particularly 50-1500 μm, 100-1500 μm or 250-1200 μm.

[0738] The core may be surrounded by at least one coating, e.g., to improve the storage stability, to reduce dust formation during handling, or for coloring the granule. The optional coating(s) may include a salt coating, or other suitable coating materials, such as polyethylene glycol (PEG), methyl hydroxy-propyl cellulose (MHPC) and polyvinyl alcohol (PVA).

[0739] The coating may be applied in an amount of at least 0.1% by weight of the core, e.g., at least 0.5%, at least 1%, at least 5%, at least 10%, or at least 15%. The amount may be at most 100%, 70%, 50%, 40% or 30%.

[0740] The coating is preferably at least 0.1 m thick, particularly at least 0.5 μm, at least 1 μm or at least 5 μm. In some embodiments, the thickness of the coating is below 100 m, such as below 60 μm, or below 40 μm.

[0741] The coating should encapsulate the core unit by forming a substantially continuous layer. A substantially continuous layer is to be understood as a coating having few or no holes, so that the core unit has few or no uncoated areas. The layer or coating should, in particular, be homogeneous in thickness.

[0742] The coating can further contain other materials as known in the art, e.g., fillers, antisticking agents, pigments, dyes, plasticizers and/or binders, such as titanium dioxide, kaolin, calcium carbonate or talc.

[0743] A salt coating may comprise at least 60% by weight of a salt, e.g., at least 65%, at least 70%, at least 75%, at least 80%, at least 85%, at least 90%, at least 95% or at least 99% by weight.

[0744] To provide acceptable protection, the salt coating is preferably at least 0.1 μm thick, e.g., at least 0.5 μm, at least 1 μm, at least 2 μm, at least 4 μm, at least 5 μm, or at least 8 μm. In a particular embodiment, the thickness of the salt coating is below 100 μm, such as below 60 μm, or below 40 μm.

[0745] The salt may be added from a salt solution where the salt is completely dissolved or from a salt suspension wherein the fine particles are less than 50 μm, such as less than 10 μm or less than 5 m.

[0746] The salt coating may comprise a single salt or a mixture of two or more salts. The salt may be water soluble, in particular, having a solubility at least 0.1 g in 100 g of water at 20° C., preferably at least 0.5 g per 100 g water, e.g., at least 1 g per 100 g water, e.g., at least 5 g per 100 g water.

[0747] The salt may be an inorganic salt, e.g., salts of sulfate, sulfite, phosphate, phosphonate, nitrate, chloride or carbonate or salts of simple organic acids (less than 10 carbon atoms, e.g., 6 or less carbon atoms) such as citrate, malonate or acetate. Examples of cations in these salts are alkali or earth alkali metal ions, the ammonium ion or metal ions of the first transition series, such as sodium, potassium, magnesium, calcium, zinc or aluminum. Examples of anions include chloride, bromide, iodide, sulfate, sulfite, bisulfite, thiosulfate, phosphate, monobasic phosphate, dibasic phosphate, hypophosphite, dihydrogen pyrophosphate, tetraborate, borate, carbonate, bicarbonate, metasilicate, citrate, malate, maleate, malonate, succinate, lactate, formate, acetate, butyrate, propionate, benzoate, tartrate, ascorbate or gluconate. In particular, alkali- or earth alkali metal salts of sulfate, sulfite, phosphate, phosphonate, nitrate, chloride or carbonate or salts of simple organic acids such as citrate, malonate or acetate may be used.

[0748] The salt in the coating may have a constant humidity at 20° C. above 60%, particularly above 70%, above 80% or above 85%, or it may be another hydrate form of such a salt (e.g., anhydrate). The salt coating may be as described in WO 00/01793 or WO 2006/034710.

[0749] Specific examples of suitable salts are NaCl (CH_{20° C.}=76%), Na₂CO₃ (CH_{20° C.}=92%), NaNO₃ (CH_{20° C.}=73%), Na₂HPO₄ (CH_{20° C.}=95%), Na₃PO₄ (CH_{25° C.}=92%), NH₄Cl (CH_{20° C.}=79.5%), (NH₄)₂HPO₄ (CH_{20° C.}=93.0%), NH₄H₂PO₄ (CH_{20° C.}=93.1%), (NH₄)₂SO₄ (CH_{20° C.}=81.1%), KCl (CH_{20° C.}=85%), K₂HiPO₄ (CH_{20° C.}=92%), KH₂PO₄ (CH_{20° C.}=96.5%), KNO₃ (CH_{20° C.}=93.5%), Na₂SO₄ (CH_{20° C.}=93%), K₂SO₄ (CH_{20° C.}=98%), KHSO₄ (CH_{20° C.}=86%), MgSO₄ (CH_{20° C.}=90%), ZnSO₄ (CH_{20° C.}=90%) and sodium citrate (CH_{25° C.}=86%). Other examples include NaH₂PO₄, (NH₄)H₂PO₄, CuSO₄, Mg(NO₃)₂ and magnesium acetate.

[0750] The salt may be in anhydrous form, or it may be a hydrated salt, i.e., a crystalline salt hydrate with bound water(s) of crystallization, such as described in WO 99/32595. Specific examples include anhydrous sodium sulfate (Na₂SO₄), anhydrous magnesium sulfate (MgSO₄), magnesium sulfate heptahydrate (MgSO₄·7H₂O), zinc sulfate heptahydrate (ZnSO₄·7H₂O), sodium phosphate dibasic heptahydrate (Na₂HPO₄·7H₂O), magnesium nitrate hexahydrate (Mg(NO₃)₂(6H₂O)), sodium citrate dihydrate and magnesium acetate tetrahydrate.

[0751] Preferably the salt is applied as a solution of the salt, e.g., using a fluid bed.

[0752] The coating materials can be waxy coating materials and film-forming coating materials. Examples of waxy coating materials are poly(ethylene oxide) products (polyethyleneglycol, PEG) with mean molar weights of 1000 to 20000; ethoxylated nonylphenols having from 16 to 50 ethylene oxide units; ethoxylated fatty alcohols in which the alcohol contains from 12 to 20 carbon atoms and in which there are 15 to 80 ethylene oxide units; fatty alcohols; fatty acids; and mono- and di- and triglycerides of fatty acids. Examples of film-forming coating materials suitable for application by fluid bed techniques are given in GB 1483591.

[0753] The granule may optionally have one or more additional coatings. Examples of suitable coating materials are polyethylene glycol (PEG), methyl hydroxy-propyl cellulose (MHPC) and polyvinyl alcohol (PVA). Examples of enzyme granules with multiple coatings are described in WO 93/07263 and WO 97/23606.

[0754] The core can be prepared by granulating a blend of the ingredients, e.g., by a method comprising granulation techniques such as crystallization, precipitation, pan-coating, fluid bed coating, fluid bed agglomeration, rotary atomization, extrusion, prilling, spheronization, size reduction methods, drum granulation, and/or high shear granulation.

[0755] Methods for preparing the core can be found in the Handbook of Powder Technology; Particle size enlargement by C. E. Capes; Vol. 1; 1980; Elsevier. Preparation methods include known feed and granule formulation technologies, e.g.,

[0756] (a) Spray dried products, wherein a liquid protein-containing solution is atomized in a spray drying tower to form small droplets which during their way down the drying tower dry to form a protein-containing particulate material. Exceedingly small particles can be produced this way (Michael S. Showell (editor); Powdered detergents; Surfactant Science Series, 1998; Vol. 71; pages 140-142; Marcel Dekker).

[0757] (b) Layered products, wherein the protein is coated as a layer around a pre-formed inert core particle, wherein a protein-containing solution is atomized, typically in a fluid bed apparatus wherein the pre-formed core particles are fluidized, and the protein-containing solution adheres to the core particles and dries up to leave a layer of dry protein on the surface of the core particle. Particles of a desired size can be obtained this way if a useful core particle of the desired size can be found. This type of product is described in, e.g., WO 97/23606.

[0758] (c) Absorbed core particles, wherein rather than coating the protein as a layer around the core, the protein is absorbed onto and/or into the surface of the core. Such a process is described in WO 97/39116.

[0759] (d) Extrusion or pelletized products, wherein a protein-containing paste is pressed to pellets or under pressure is extruded through a small opening and cut into particles which are subsequently dried. Such particles usually have a considerable size because of the material in which the extrusion opening is made (usually a plate with bore holes) sets a limit on the allowable pressure drop over the extrusion opening. Also, extremely high extrusion pressures when using a small opening increase heat generation in the protein paste, which is harmful to the protein (Michael S. Showell (editor); Powdered detergents; Surfactant Science Series; 1998; Vol. 71; pages 140-142; Marcel Dekker).

[0760] (e) Prilled products, wherein a protein-containing powder is suspended in molten wax and the suspension is sprayed, e.g., through a rotating disk atomizer, into a cooling chamber where the droplets quickly solidify (Michael S. Showell (editor); Powdered detergents; Surfactant Science Series; 1998; Vol. 71; pages 140-142; Marcel Dekker). The product obtained is one wherein the protein is uniformly distributed throughout an inert material instead of being concentrated on its surface. U.S. Pat. Nos. 4,016,040 and 4,713,245 describe this technique.

[0761] (f) Mixer granulation products, wherein a protein-containing liquid is added to a dry powder composition of conventional granulating components. The liquid and the powder in a suitable proportion are mixed and as the moisture of the liquid is absorbed in the dry powder, the components of the dry powder will start to adhere and agglomerate and particles will build up, forming granulates comprising the protein. Such a process is described in U.S. Pat. No. 4,106,991, EP 170360, EP 304332, EP 304331, WO 90/09440 and WO 90/09428. In a particular aspect of this process, various high-shear mixers can be used as granulators. Granulates consisting of protein, fillers and binders etc. are mixed with cellulose fibers to reinforce the particles to produce a so-called T-granulate. Reinforced particles, are more robust, and release less enzymatic dust.

[0762] (g) Size reduction, wherein the cores are produced by milling or crushing of larger particles, pellets, tablets, briquettes etc. containing the protein. The wanted core particle fraction is obtained by sieving the milled or crushed product. Over and undersized particles can be recycled. Size reduction is described in Martin Rhodes (editor); Principles of Powder Technology; 1990; Chapter 10; John Wiley & Sons.

[0763] (h) Fluid bed granulation. Fluid bed granulation involves suspending particulates in an air stream and spraying a liquid onto the fluidized particles via nozzles. Particles hit by spray droplets get wetted and become tacky. The tacky particles collide with other particles and adhere to them to form a granule.

[0764] (i) The cores may be subjected to drying, such as in a fluid bed drier. Other known methods for drying granules in the feed or enzyme industry can be used by the skilled person. The drying preferably takes place at a product temperature of from 25 to 90° C. For some proteins, it is important the cores comprising the protein contain a low amount of water before coating with the salt. If water sensitive proteins are coated with a salt before excessive water is removed, the excessive water will be trapped within the core and may affect the activity of the protein negatively. After drying, the cores preferably contain 0.1-10% w/w water.

[0765] Non-dusting granulates may be produced, e.g., as disclosed in U.S. Pat. Nos. 4,106,991 and 4,661,452 and may optionally be coated by methods known in the art.

[0766] The granulate may further comprise one or more additional enzymes, e.g., hydrolase, isomerase, ligase, lyase, oxidoreductase, and transferase. The one or more additional enzymes are preferably selected from the group consisting of acetylxylan esterase, acylglycerol lipase, amylase, alpha-amylase, beta-amylase, arabinofuranosidase, cellobiohydrolases, cellulase, feruloyl esterase, galactanase, alpha-galactosidase, beta-galactosidase, beta-glucanase, beta-glucosidase, lysophospholipase, lysozyme, alpha-mannosidase, beta-mannosidase (mannanase), phytase, phospholipase A1, phospholipase A2, phospholipase D, protease, pullulanase, pectin esterase, triacylglycerol lipase, xylanase, beta-xylosidase or any combination thereof. Each enzyme will then be present in more granules securing a more uniform distribution of the enzymes, and also reduces the physical segregation of different enzymes due to different particle sizes. Methods for producing multi-enzyme co-granulates is disclosed in the ip.com disclosure IPCOM000200739D.

[0767] Another example of formulation of proteins by the use of co-granulates is disclosed in WO 2013/188331.

[0768] The present disclosure also relates to protected proteins prepared according to the method(s) disclosed in EP 238216.

[0769] The present disclosure likewise encompasses liquid formulations comprising one or more proteins of the disclosure. The formulation may comprise an enzyme stabilizer (examples of which include polyols such as propylene glycol or glycerol, sugar or sugar alcohol, lactic acid, reversible protease inhibitor, boric acid, or a boric acid derivative, e.g., an aromatic borate ester, or a phenyl boronic acid derivative such as 4—formylphenyl boronic acid).

[0770] In some embodiments, filler(s) or carrier material(s) are included to increase the volume of such formulation. Suitable filler or carrier materials include, but are not limited to, various salts of sulfate, carbonate and silicate as well as talc, clay and the like. Suitable filler or carrier materials for liquid formulation include, but are not limited to, water or low molecular weight primary and secondary alcohols including polyols and diols. Examples of such alcohols include, but are not limited to, methanol, ethanol, propanol and isopropanol. In some embodiments, the formulation contain from about 5% to about 90% of such materials.

[0771] In an aspect, the liquid formulation comprises 20-80% w/w of polyol. In one embodiment, the liquid formulation comprises 0.001-2% w/w preservative.

[0772] In another embodiment, the disclosure relates to liquid formulations comprising:
[0773] (A) 0.001-25% w/w of one or more proteins of the present disclosure;
[0774] (B) 20-80% w/w of polyol;
[0775] (C) optionally 0.001-2% w/w preservative; and
[0776] (D) water.

[0777] In another embodiment, the disclosure relates to liquid formulations comprising:
[0778] (A) 0.001-25% w/w one or more proteins of the present disclosure;
[0779] (B) 0.001-2% w/w preservative;
[0780] (C) optionally 20-80% w/w of polyol; and
[0781] (D) water.

[0782] In another embodiment, the liquid formulation comprises one or more formulating agents, such as a formulating agent selected from the group consisting of polyol, sodium chloride, sodium benzoate, potassium sorbate, sodium sulfate, potassium sulfate, magnesium sulfate, sodium thiosulfate, calcium carbonate, sodium citrate, dextrin, glucose, sucrose, sorbitol, lactose, starch, PVA, acetate and phosphate, preferably selected from the group consisting of sodium sulfate, dextrin, cellulose, sodium thiosulfate, kaolin and calcium carbonate. In one embodiment, the polyols is selected from the group consisting of glycerol, sorbitol, propylene glycol (MPG), ethylene glycol, diethylene glycol, triethylene glycol, 1,2-propylene glycol or 1,3-propylene glycol, dipropylene glycol, polyethylene glycol (PEG) having an average molecular weight below about 600 and polypropylene glycol (PPG) having an average molecular weight below about 600, more preferably selected from the group consisting of glycerol, sorbitol and propylene glycol (MPG) or any combination thereof.

[0783] In another embodiment, the liquid formulation comprises 20-80% polyol (i.e., total amount of polyol), e.g., 25-75% polyol, 30-70% polyol, 35-65% polyol, or 40-60% polyol. In one embodiment, the liquid formulation comprises 20-80% polyol, e.g., 25-75% polyol, 30-70% polyol, 35-65% polyol, or 40-60% polyol, wherein the polyol is selected from the group consisting of glycerol, sorbitol, propylene glycol (MPG), ethylene glycol, diethylene glycol, triethylene glycol, 1,2-propylene glycol or 1,3-propylene glycol, dipropylene glycol, polyethylene glycol (PEG) having an average molecular weight below about 600 and polypropylene glycol (PPG) having an average molecular weight below about 600. In one embodiment, the liquid formulation comprises 20-80% polyol (i.e., total amount of polyol), e.g., 25-75% polyol, 30-70% polyol, 35-65% polyol, or 40-60% polyol, wherein the polyol is selected from the group consisting of glycerol, sorbitol and propylene glycol (MPG).

[0784] In another embodiment, the preservative is selected from the group consisting of sodium sorbate, potassium sorbate, sodium benzoate and potassium benzoate or any combination thereof. In one embodiment, the liquid formulation comprises 0.02-1.5% w/w preservative, e.g., 0.05-1% w/w preservative or 0.1-0.5% w/w preservative. In one embodiment, the liquid formulation comprises 0.001-2% w/w preservative (i.e., total amount of preservative), e.g., 0.02-1.5% w/w preservative, 0.05-1% w/w preservative, or 0.1-0.5% w/w preservative, wherein the preservative is selected from the group consisting of sodium sorbate, potassium sorbate, sodium benzoate and potassium benzoate or any combination thereof.

[0785] It is to be understood that formulations of the present disclosure may comprise combinations of the enzymes, including, but not limited to combinations of enzymes expressly disclosed herein and combinations with enzymes that are not expressly disclosed herein.

[0786] In some embodiments, formulations of the present disclosure comprise 2, 3, 4, 5, 6, 7, 8, 9, 10 or more proteins of the present disclosure. For example, in some embodiments, formulations of the present disclosure comprise 2, 3, 4, 5, 6, 7, 8, 9, 10 or more of the polypeptides set forth herein as SEQ ID NO(s): 1-91, 45906, 72144, 72147 and 72149, a mature polypeptide thereof, or a functional fragment/mutant/variant thereof.

[0787] In some embodiments, formulations of the present disclosure comprise two or more distinct amylases, cellulases, glucanases, hemicellulases, lipases, mannanases, oxidases, pectinases, peptidases, proteases and/or xylanases.

[0788] In some embodiments, formulations of the present disclosure comprise at least one glucanase (e.g., an endo-1,3(4)-beta-glucanase, such as SEQ ID NO: 46 or a functional fragment/mutant/variant thereof) and at least one xylanase (e.g., an endo-1,4-beta-xylanase, such as any one of SEQ ID NOs: 48-53 or a functional fragment/mutant/variant thereof).

[0789] In some embodiments, formulations of the present disclosure comprise at least one arabanase, at least one cellulase, at least one glucanase (e.g., an endo-1,3(4)-beta-glucanase, such as SEQ ID NO: 46 or afunctional fragment/mutant/variant thereof) and at least one xylanase (e.g., an endo-1,4-beta-xylanase, such as any one of SEQ ID NOs: 48-53 or a functional fragment/mutant/variant thereof).

[0790] In some embodiments, formulations of the present disclosure comprise at least one glucanase (e.g., glucan 1,4-alpha-glucosidase), at least one lipase (e.g., a lysophospholipase, such as SEQ ID NO: 24 or a functional fragment/mutant/variant thereof) and at least one pullulanase (e.g., SEQ ID NO: 61 or a functional fragment/mutant/variant thereof).

[0791] In some embodiments, formulations of the present disclosure comprise at least one glucanase (e.g., an endo-1,3(4)-beta-glucanase, such as SEQ ID NO: 46 or a functional fragment/mutant/variant thereof) and at least one pectinase.

[0792] In some embodiments, formulations of the present disclosure comprise at least one catalase (e.g., any one of SEQ ID NOs: 11-12 or a functional fragment/mutant/variant thereof) and at least one glucose oxidase (e.g., any one of SEQ ID NOs: 1-5 or a functional fragment/mutant/variant thereof).

[0793] In some embodiments, formulations of the present disclosure comprise at least one amylase (e.g., any one of SEQ ID NOs: 34-40 or a functional fragment/mutant/variant thereof), at least one chitinase, and at least one glucanase (e.g., an endo-1,3(4)-beta-glucanase, such as SEQ ID NO: 46 or a functional fragment/mutant/variant thereof).

[0794] In some embodiments, formulations of the present disclosure comprise at least one amylase (e.g., any one of SEQ ID NOs: 34-40 or a functional fragment/mutant/variant thereof), at least one glucanase (e.g., an endo-1,3(4)-beta-glucanase, such as SEQ ID NO: 46 or a functional fragment/mutant/variant thereof), and at least one bacillolycin (e.g., SEQ ID NO: 88 or a functional fragment/mutant/variant thereof).

[0795] In some embodiments, formulations of the present disclosure comprise at least one cellulase (e.g., any one of SEQ ID NOs: 43-45 or a functional fragment/mutant/variant thereof), at least one glucanase (e.g., an endo-1,3(4)-beta-glucanase, such as SEQ ID NO: 46 or a functional fragment/mutant/variant thereof), at least one pectinase and at least one pectin lyase (e.g., SEQ ID NO: 88 or a functional fragment/mutant/variant thereof).

[0796] In some embodiments, formulations of the present disclosure comprise at least one glucanase (e.g., an endo-1,3(4)-beta-glucanase, such as SEQ ID NO: 46 or a functional fragment/mutant/variant thereof), at least one oxygenase (e.g., a lytic cellulose monooxygenase, such as any one of SEQ ID NOs: 14-15 or a functional fragment/mutant/variant thereof) and at least one xylanase (e.g., an endo-1,4-beta-xylanase, such as any one of SEQ ID NOs: 48-53 or a functional fragment/mutant/variant thereof).

[0797] In some embodiments, formulations of the present disclosure comprise at least one cellulase(e.g., any one of SEQ ID NOs: 43-45 or a functional fragment/mutant/variant thereof), at least one furanosidase (e.g., an arabinofuranosidase, such as SEQ ID NO: 62 or a functional fragment/mutant/variant thereof) and at least one xylanase (e.g., an endo-1,4-beta-xylanase, such as any one of SEQ ID NOs: 48-53 or a functional fragment/mutant/variant thereof).

[0798] In some embodiments, formulations of the present disclosure comprise at least one subtilisin (e.g., any one of SEQ ID NOs: 83-87 or a functional fragment/mutant/variant thereof), and at least one bacillolysin (e.g., SEQ ID NO: 88 or a functional fragment/mutant/variant thereof).

[0799] In some embodiments, formulations of the present disclosure comprise at least one catalase (e.g., any one of SEQ ID NOs: 11-12 or a functional fragment/mutant/variant thereof) and at least one peptidase (e.g., a bacillolysin, SEQ ID NO: 88 or a functional fragment/mutant/variant thereof; a serine endopeptidase, such as any one of SEQ ID NOs: 80-81 or a functional fragment/mutant/variant thereof).

[0800] In some embodiments, formulations of the present disclosure comprise at least one catalase (e.g., any one of SEQ ID NOs: 11-12 or a functional fragment/mutant/variant thereof), at least one glucanase (e.g., an endo-1,3(4)-beta-glucanase, such as SEQ ID NO: 46 or a functional fragment/mutant/variant thereof) and at least one xylanase (e.g., an endo-1,4-beta-xylanase, such as any one of SEQ ID NOs: 48-53 or a functional fragment/mutant/variant thereof).

[0801] In some embodiments, formulations of the present disclosure comprise at least one peptidase (e.g., a bacillolysin, SEQ ID NO: 88 or a functional fragment/mutant/variant thereof; a serine endopeptidase, such as any one of SEQ ID NOs: 80-81 or a functional fragment/mutant/variant thereof), at least one glucanase (e.g., an endo-1,3(4)-beta-glucanase, such as SEQ ID NO: 46 or a functional fragment/mutant/variant thereof) and at least one xylanase (e.g., an endo-1,4-beta-xylanase, such as any one of SEQ ID NOs: 48-53 or a functional fragment/mutant/variant thereof).

[0802] In some embodiments, formulations of the present disclosure comprise at least one amylase (e.g., any one of SEQ ID NOs: 34-40 or a functional fragment/mutant/variant thereof), at least one glucanase (e.g., an endo-1,3(4)-beta-glucanase, such as SEQ ID NO: 46 or a functional fragment/mutant/variant thereof) and at least one peptidase (e.g., a bacillolysin, SEQ ID NO: 88 or a functional fragment/mutant/variant thereof; a serine endopeptidase, such as any one of SEQ ID NOs: 80-81 or a functional fragment/mutant/variant thereof).

[0803] In some embodiments, formulations of the present disclosure comprise a fermentation broth that comprises 2, 3, 4, 5, 6, 7, 8, 9, 10 or more enzymes.

[0804] In some embodiments, formulations of the present disclosure comprise a fermentation broth that comprises 2, 3, 4, 5, 6, 7, 8, 9, 10 or more proteins of the present disclosure (2, 3, 4, 5, 6, 7, 8, 9, 10 or more of SEQ ID NOs: 1-91, 45906, 72144, 72147 and 72149 or functional fragments/mutants/variants thereof).

[0805] Formulations of the present disclosure may comprise myriad components, including, but not limited to, adhesives (stickers), biological actives, chemical actives, dispersants (spreaders), drying agents, emulsifiers, nutrients, pest attractants and feeding stimulants, pH control components, postharvest treatments, preservatives, rain fasteners, rhealogical agents, safeners, stabilizers, UV protectants and/or wetting agents.

[0806] Examples of actives that may be included in formulations of the present disclosure include, but not are not limited to, acaracides and miticides (e.g., carvacrol, sanguinarine, azobenzene, benzoximate, benzyl benzoate, bromopropylate, chlorbenside, chlorfenethol, chlorfenson, chlorfensulphide, chlorobenzilate, chloropropylate, cyflumetofen, DDT, dicofol, diphenyl sulfone, dofenapyn, fenson, fentrifanil, fluorbenside, genit, hexachlorophene, phenproxide, proclonol, tetradifon, tetrasul, benomyl, carbanolate, carbaryl, carbofuran, methiocarb, metolcarb, promacyl, propoxur, aldicarb, butocarboxim, oxamyl, thiocarboxime, thiofanox, bifenazate, binapacryl, dinex, dinobuton, dinocap-4, dinocap-6, dinocton, dinopenton, dinosulfon, dinoterbon, DNOC, amitraz, chlordimeform, chloromebuform, formetanate, formparanate, medimeform, semiamitraz, afoxolaner, fluralaner, sarolaner, tetranactin 20 avermectin acaricides, abamectin, doramectin, eprinomectin, ivermectin, selamectin, milbemectin, milbemycin oxime, moxidectin, clofentezine, cyromazine, diflovidazin, dofenapyn, fluazuron, flubenzimine, flucycloxuron, flufenoxuron, hexythiazox, bromocyclen, camphechlor, DDT, dienochlor, endosulfan, lindane, chlorfenvinphos, crotoxyphos, dichlorvos, heptenophos, mevinphos, monocrotophos, naled, TEPP, tetrachlorvinphos, amidithion, amiton, azinphos-ethyl, azinphos-methyl, azothoate, benoxafos, bromophos, bromophos-ethyl, carbophenothion, chlorpyrifos, chlorthiophos, coumaphos, cyanthoate, demeton-O, demeton-S, demeton-O-methyl, demeton-S-methyl, demeton-S-methylsulphon, dialifos, diazinon, dimethoate, dioxathion, disulfoton, endothion, ethion, ethoate-methyl, formothion, malathion, mecarbam, methacrifos, omethoate, oxydeprofos, oxydisulfoton, parathion, phenkapton, phorate, phosalone, phosmet, phostin, phoxim, pirimiphos-methyl, prothidathion, prothoate, pyrimitate, quinalphos, quintiofos, sophamide, sulfotep, thiometon, triazophos, trifenofos, vamidothion, trichlorfon, isocarbophos, methamidophos, propetamphos, dimefox, mipafox, schradan, azocyclotin, cyhexatin, fenbutatin oxide, phostin, dichlofluanid, dialifos, phosmet, cyenopyrafen, fenpyroximate, pyflubumide, tebufenpyrad, acetoprole, fipronil, vaniliprole, acrinathrin, bifenthrin, brofluthrinate, cyhalothrin, alpha-cypermethrin, fenpropathrin, fenvalerate, flucythrinate, flumethrin, tau-fluvalinate, pemiethrin, halfenprox, pyrimidifen, chlorfenapyr, sanguinarine, chinomethionat, thioquinox, bifujunzhi, fluacrypyrim, flufenoxystrobin, pyriminostrobin, aramite, propargite, spirodiclofen, clofentezine, diflovidazin, flubenzimine, hexythiazox, fenothiocarb, chloromethiuron, diafenthiuron, acequinocyl. amidoflumet, arsenous oxide, clenpirin, closantel, crotamiton, cycloprate, cymiazole, disulfiram, etoxazole, fenazaflor, fenazaquin, fluenetil, mesulfen, MNAF, nifluridide, nikkomycins, pyridaben, sulfiram, sulfluramid, sulfur, thuringiensin, triarathene, and combinations thereof); fungicides (e.g., strobilurins, such as azoxystrobin, coumethoxystrobin, coumoxystrobin, dimoxystrobin, enestroburin, fluoxastrobin, kresoxim-methyl, metominostrobin, orysastrobin, picoxystrobin, pyraclostrobin, pyrametostrobin, pyraoxystrobin, pyribencarb, trifloxystrobin, 2-[2-(2,5-dimethyl-phenoxymethyl)-phenyl]-3-methoxy-acrylic acid methyl ester and 2-(2-(3-(2,6-dichlorophenyl)-1-methyl-allylideneaminooxymethyl)-phenyl)-2-methoxyimino-N-methyl-acetamide; carboxamides, such as carboxanilides (e.g., benalaxyl, benalaxyl-M, benodanil, bixafen, boscalid, carboxin, fenfuram, fenhexamid, flutolanil, fluxapyroxad, furametpyr, isopyrazam, isotianil, kiralaxyl, mepronil, metalaxyl, metalaxyl-M (mefenoxam), ofurace, oxadixyl, oxycarboxin, penflufen, penthiopyrad, sedaxane, tecloftalam, thifluzamide, tiadinil, 2-amino-4-methyl-thiazole-5-carboxanilide, N-(4′-trifluoromethylthiobiphenyl-2-yl)-3-difluoromethyl-1-methyl-1H-pyra-zole-4-carboxamide, N-(2-(1,3,3-trimethylbutyl)-phenyl)-1,3-dimethyl-5-fluoro-1H-pyrazole-4-carboxamide), carboxylic morpholides (e.g., dimethomorph, flumorph, pyrimorph), benzoic acid amides (e.g., flumetover, fluopicolide, fluopyram, zoxamide), carpropamid, dicyclomet, mandiproamid, oxytetracyclin, silthiofam and N-(6-methoxy-pyridin-3-yl) cyclopropanecarboxylic acid amide; azoles, such as triazoles (e.g., azaconazole, bitertanol, bromuconazole, cyproconazole, difenoconazole, diniconazole, diniconazole-M, epoxiconazole, fenbuconazole, fluquinconazole, flusilazole, flutriafol, hexaconazole, imibenconazole, ipconazole, metconazole, myclobutanil, oxpoconazole, paclobutrazole, penconazole, propiconazole, prothioconazole, simeconazole, tebuconazole, tetraconazole, triadimefon, triadimenol, triticonazole, uniconazole) and imidazoles (e.g., cyazofamid, imazalil, pefurazoate, prochloraz, triflumizol); heterocyclic compounds, such as pyridines (e.g., fluazinam, pyrifenox (cf.D1b), 3-[5-(4-chloro-phenyl)-2,3-dimethyl-isoxazolidin-3-yl]-pyridine, 3-[5-(4-methyl-phenyl)-2,3-dimethyl-isoxazolidin-3-yl]-pyridine), pyrimidines (e.g., bupirimate, cyprodinil, diflumetorim, fenarimol, ferimzone, mepanipyrim, nitrapyrin, nuarimol, pyrimethanil), piperazines (e.g., triforine), pirroles (e.g., fenpiclonil, fludioxonil), morpholines (e.g., aldimorph, dodemorph, dodemorph-acetate, fenpropimorph, tridemorph), piperidines (e.g., fenpropidin), dicarboximides (e.g., fluoroimid, iprodione, procymidone, vinclozolin), non-aromatic 5-membered heterocycles (e.g., famoxadone, fenamidone, flutianil, octhilinone, probenazole, 5-amino-2-isopropyl-3-oxo-4-ortho-tolyl-2,3-dihydro-pyrazole-1-carbothioic acid S-allyl ester), acibenzolar-S-methyl, ametoctradin, amisulbrom, anilazin, blasticidin-S, captafol, captan, chinomethionat, dazomet, debacarb, diclomezine, difenzoquat, difenzoquat-methylsulfate, fenoxanil, Folpet, oxolinic acid, piperalin, proquinazid, pyroquilon, quinoxyfen, triazoxide, tricyclazole, 2-butoxy-6-iodo-3-propylchromen-4-one, 5-chloro-1-(4,6-dimethoxy-pyrimidin-2-yl)-2-methyl-1H-benzoimidazole and 5-chloro-7-(4-methylpiperidin-1-yl)-6-(2,4,6-trifluorophenyl)-[1,2,4]triazolo-[1,5-a]pyrimidine; benzimidazoles, such as carbendazim; and other active substances, such as guanidines (e.g., guanidine, dodine, dodine free base, guazatine, guazatine-acetate, iminoctadine), iminoctadine-triacetate and iminoctadine-tris(albesilate); antibiotics (e.g., kasugamycin, kasugamycin hydrochloride-hydrate, streptomycin, polyoxine and validamycin A); nitrophenyl derivates (e.g., binapacryl, dicloran, dinobuton, dinocap, nitrothal-isopropyl, tecnazen); organometal compounds (e.g., fentin salts, such as fentin-acetate, fentin chloride, fentin hydroxide); sulfur-containing heterocyclyl compounds (e.g., dithianon, isoprothiolane); organophosphorus compounds (e.g., edifenphos, fosctyl, fosctyl-aluminum, iprobenfos, phosphorus acid and its salts, pyrazophos, tolclofos-methyl); organochlorine compounds (e.g., chlorothalonil, dichlofluanid, dichlorophen, flusulfamide, hexachlorobenzene, pencycuron, pentachlorphenole and its salts, phthalide, quintozene, thiophanate-methyl, thiophanate, tolylfluanid, N-(4-chloro-2-nitro-phenyl)-N-ethyl-4-methyl-benzenesulfonamide), inorganic active substances (e.g., Bordeaux mixture, copper acetate, copper hydroxide, copper oxychloride, basic copper sulfate, phosphite salt, sulfur, zinc sulfate), natamycin, and combinations thereof); gastropodicides (e.g., methiocarb, metaldehyde, carbaryl, spinosad, copper sulfate in combination with lime, boric acid, iron phosphate, and combinations thereof); herbicides (e.g., 2,4-dichlorophenoxyacetic acid (2,4-D), 2,4,5-trichlorophenoxyacetic acid (2,4,5-T), ametryn, amicarbazone, aminocyclopyrachlor, acetochlor, acifluorfen, alachlor, atrazine, azafenidin, bentazon, benzofenap, bifenox, bromacil, bromoxynil, butachlor, butafenacil, butroxydim, carfentrazone-ethyl, chlorimuron, chlorotoluro, clethodim, clodinafop, clomazone, cyanazine, cycloxydim, cyhalofop, desmedipham, desmetryn, dicamba, diclofop, dimefuron, diuron, dithiopyr, fenoxaprop, fluazifop, fluazifop-P, fluometuron, flufenpyr-ethyl, flumiclorac-pentyl, flumioxazin, fluoroglycofen, fluthiacet-methyl, fomesafe, fomesafen, glyphosate, glufosinate, haloxyfop, hexazinone, imazamox, imazaquin, imazethapyr, ioxynil, isoproturon, isoxaflutole, lactofen, linuron, mecoprop, mecoprop-P, mesotrion, metamitron, metazochlor, methibenzuron, metolachlor (and S-metolachlor), metoxuron, metribuzin, monolinuron, oxadiargyl, oxadiazon, oxyfluorfen, phenmedipham, pretilachlor, profoxydim, prometon, prometry, propachlor, propanil, propaquizafop, propisochlor, pyraflufen-ethyl, pyrazon, pyrazolynate, pyrazoxyfen, pyridate, quizalofop, quizalofop-P (e.g., quizalofop-ethyl, quizalofop-P-ethyl, clodinafop-propargyl, cyhalofop-butyl, diclofop-methyl, fenoxaprop-P-ethyl, fluazifop-P-butyl, haloxyfop-methyl, haloxyfop-R-methyl), saflufenacil, sethoxydim, siduron, simazine, simetryn, sulcotrione, sulfentrazone, tebuthiuron, tembotrione, tepraloxydim, terbacil, terbumeton, terbuthylazine, thaxtomin (e.g., the thaxtomins described in U.S. Pat. No. 7,989,393), thenylchlor, tralkoxydim, triclopyr, trietazine, tropramezone, salts and esters thereof; racemic mixtures and resolved isomers thereof and combinations thereof); and insecticides and nematicides (e.g., antibiotic insecticides such as allosamidin and thuringiensin; macrocyclic lactone insecticides such as spinosad, spinetoram, and other spinosyns including the 21-butenyl spinosyns and their derivatives; avermectin insecticides such as abamectin, doramectin, emamectin, eprinomectin, ivermectin and selamectin; milbemycin insecticides such as lepimectin, milbemectin, milbemycin oxime and moxidectin; arsenical insecticides such as calcium arsenate, copper acetoarsenite, copper arsenate, lead arsenate, potassium arsenite and sodium arsenite; other biological insecticides, plant incorporated protectant insecticides such as Cry1Ab, Cry1Ac, Cry1F, Cry1A.105, Cry2Ab2, Cry3A, mir Cry3A, Cry3Bb1, Cry34, Cry35, and VIP3A; botanical insecticides such as anabasine, azadirachtin, d-limonene, nicotine, pyrethrins, cinerins, cinerin I, cinerin II, jasmolin I, jasmolin II, pyrethrin I, pyrethrin II, quassia, rotenone, ryania and sabadilla; carbamate insecticides such as bendiocarb and carbaryl; benzofuranyl methylcarbamate insecticides such as benfuracarb, carbofuran, carbosulfan, decarbofuran and furathiocarb; dimethylcarbamate insecticides dimitan, dimetilan, hyquincarb and pirimicarb; oxime carbamate insecticides such as alanycarb, aldicarb, aldoxycarb, butocarboxim, butoxycarboxim, methomyl, nitrilacarb, oxamyl, tazimcarb, thiocarboxime, thiodicarb and thiofanox; phenyl methylcarbamate insecticides such as allyxycarb, aminocarb, bufencarb, butacarb, carbanolate, cloethocarb, dicresyl, dioxacarb, EMPC, ethiofencarb, fenethacarb, fenobucarb, isoprocarb, methiocarb, metolcarb, mexacarbate, promacyl, promecarb, propoxur, trimethacarb, XMC and xylylcarb; dinitrophenol insecticides such as dinex, dinoprop, dinosam and DNOC; fluorine insecticides such as barium hexafluorosilicate, cryolite, sodium fluoride, sodium hexafluorosilicate and sulfluramid; formamidine insecticides such as amitraz, chlordimeform, formetanate and formparanate; fumigant insecticides such as acrylonitrile, carbon disulfide, carbon tetrachloride, chloroform, chloropicrin, para-dichlorobenzene, 1,2-dichloropropane, ethyl formate, ethylene dibromide, ethylene dichloride, ethylene oxide, hydrogen cyanide, iodomethane, methyl bromide, methylchloroform, methylene chloride, naphthalene, phosphine, sulfuryl fluoride and tetrachloroethane; inorganic insecticides such as borax, calcium polysulfide, copper oleate, mercurous chloride, potassium thiocyanate and sodium thiocyanate; chitin synthesis inhibitors such as bistrifluoron, buprofezin, chlorfluazuron, cyromazine, diflubenzuron, flucycloxuron, flufenoxuron, hexaflumuron, lufenuron, novaluron, noviflumuron, penfluoron, teflubenzuron and triflumuron; juvenile hormone mimics such as epofenonane, fenoxycarb, hydroprene, kinoprene, methoprene, pyriproxyfen and triprene; juvenile hormones such as juvenile hormone I, juvenile hormone II and juvenile hormone III; moulting hormone agonists such as chromafenozide, halofenozide, methoxyfenozide and tebufenozide; moulting hormones such as alpha.-ecdysone and ecdysterone; moulting inhibitors such as diofenolan; precocenes such as precocene I, precocene II and precocene III; unclassified insect growth regulators such as dicyclanil; nereistoxin analogue insecticides such as bensultap, cartap, thiocyclam and thiosultap; nicotinoid insecticides such as flonicamid; nitroguanidine insecticides such as clothianidin, dinotefuran, imidacloprid and thiamethoxam; nitromethylene insecticides such as nitenpyram and nithiazine; pyridylmethylamine insecticides such as acetamiprid, imidacloprid, nitenpyram and thiacloprid; organochlorine insecticides such as bromo-DDT, camphechlor, DDT, pp′-DDT, ethyl-DDD, HCH, gamma-HCH, lindane, methoxychlor, pentachlorophenol and TDE; cyclodiene insecticides such as aldrin, bromocyclen, chlorbicyclen, chlordane, chlordecone, dieldrin, dilor, endosulfan, endrin, HEOD, heptachlor, HHDN, isobenzan, isodrin, kelevan and mirex; organophosphate insecticides such as bromfenvinfos, chlorfenvinphos, crotoxyphos, dichlorvos, dicrotophos, dimethylvinphos, fospirate, heptenophos, methocrotophos, mevinphos, monocrotophos, naled, naftalofos, phosphamidon, propaphos, TEPP and tetrachlorvinphos; organothiophosphate insecticides such as dioxabenzofos, fosmethilan and phenthoate; aliphatic organothiophosphate insecticides such as acethion, amiton, cadusafos, chlorethoxyfos, chlormephos, demephion, demephion-O, demephion-S, demeton, demeton-O, demeton-S, demeton-methyl, demeton-O-methyl, demeton-S-methyl, demeton-S-methylsulphon, disulfoton, ethion, ethoprophos, IPSP, isothioate, malathion, methacrifos, oxydemeton-methyl. oxydeprofos, oxydisulfoton, phorate, sulfotep, terbufos and thiometon; aliphatic amide organothiophosphate insecticides such as amidithion, cyanthoate, dimethoate, ethoate-methyl, formothion, mecarbam, omethoate, prothoate, sophamide and vamidothion; oxime organothiophosphate insecticides such as chlorphoxim, phoxim and phoxim-methyl; heterocyclic organothiophosphate insecticides such as azamethiphos, coumaphos, coumithoate, dioxathion, endothion, menazon, morphothion, phosalone, pyraclofos, pyridaphenthion and quinothion; benzothiopyran organothiophosphate insecticides such as dithicrofos and thicrofos; benzotriazine organothiophosphate insecticides such as azinphos-ethyl and azinphos-methyl; isoindole organothiophosphate insecticides such as dialifos and phosmet; isoxazole organothiophosphate insecticides such as isoxathion and zolaprofos; pyrazolopyrimidine organothiophosphate insecticides such as chlorprazophos and pyrazophos; pyridine organothiophosphate insecticides such as chlorpyrifos and chlorpyrifos-methyl; pyrimidinc organothiophosphate insecticides such as butathiofos, diazinon, etrimfos, lirimfos, pirimiphos-ethyl, pirimiphos-methyl, primidophos, pyrimitate and tebupirimfos; quinoxaline organothiophosphate insecticides such as quinalphos and quinalphos-methyl; thiadiazole organothiophosphate insecticides such as athidathion, lythidathion, methidathion and prothidathion; triazole organothiophosphate insecticides such as isazofos and triazophos; phenyl organothiophosphate insecticides such as azothoate, bromophos, bromophos-ethyl, carbophenothion, chlorthiophos, cyanophos, cythioate, dicapthon, dichlofenthion, etaphos, famphur, fenchlorphos, fenitrothion fensulfothion, fenthion, fenthion-ethyl, heterophos, jodfenphos, mesulfenfos, parathion, parathion-methyl, phenkapton, phosnichlor, profenofos, prothiofos, sulprofos, temephos, trichlormetaphos-3 and trifenofos; phosphonate insecticides such as butonate and trichlorfon; phosphonothioate insecticides such as mecarphon; phenyl ethylphosphonothioate insecticides such as fonofos and trichloronat; phenyl phenylphosphonothioate insecticides such as cyanofenphos, EPN and leptophos; phosphoramidate insecticides such as crufomate, fenamiphos, fosthietan, imicyafos, mephosfolan, phosfolan and pirimetaphos; phosphoramidothioate insecticides such as acephate, isocarbophos, isofenphos, methamidophos and propetamphos; phosphorodiamide insecticides such as dimefox, mazidox, mipafox and schradan; oxadiazine insecticides such as indoxacarb; phthalimide insecticides such as dialifos, phosmet and tetramethrin; pyrazole insecticides such as acetoprole, ethiprole, fipronil, pyrafluprole, pyriprole, tebufenpyrad, tolfenpyrad and vaniliprole; pyrethroid ester insecticides such as acrinathrin, allethrin, bioallethrin, barthrin, bifenthrin, bioethanomethrin, cyclethrin, cycloprothrin, cyfluthrin, beta-cyfluthrin, cyhalothrin, gamma-cyhalothrin, lambda-cyhalothrin, cypermethrin, alpha-cypermethrin, beta-cypermethrin, theta-cypermethrin, zeta-cypermethrin, cyphenothrin, deltamethrin, dimefluthrin, dimethrin, empenthrin, fenfluthrin, fenpirithrin, fenpropathrin, fenvalerate, esfenvalerate, flucythrinate, fluvalinate, tau-fluvalinate, furethrin, imiprothrin, metofluthrin, permethrin, biopermethrin, transpermethrin, phenothrin, prallethrin, profluthrin, pyresmethrin, resmethrin, biopermethrin, cismethrin, tefluthrin, terallethrin, tetramethrin, tralomethrin and transfluthrin; pyrethroid ether insecticides such as etofenprox, flufenprox, halfenprox, protrifenbute and silafluofen; pyrimidinamine insecticides such as flufenerim and pyrimidifen; pyrrole insecticides such as chlorfenapyr; tetronic acid insecticides such as spirodiclofen, spiromesifen and spirotetramat; thiourea insecticides such as diafenthiuron; urea insecticides such as flucofuron and sulcofuron; and unclassified insecticides such as AKD-3088, chlorantraniliprole, closantel, crotamiton, cyflumetofen, E2Y45, EXD, fenazaflor, fenazaquin, fenoxacrim, fenpyroximate, FKI-1033, flubendiamide, HGW86, hydramethylnon, IKI-2002, isoprothiolane, malonoben, metaflumizone, metoxadiazone, nifluridide, NNI-9850, NNI-0101, pymetrozine, pyridaben, pyridalyl, pyrifluquinazon, Qcide, rafoxanide, Rynaxypyr™, SYJ-159, triarathene and triazamate, and combinations thereof).

[0807] Non-limiting examples of actives that may be incorporated into formulations of the present disclosure—or into which proteins and other compositions of the present disclosure may be incorporated—include, but are not limited to, commercial products sold under the tradenames ABACUS®, ACROBAT®, ACRONIS®, ADHERE®, ADMIRAL®, AGCELENCE®, AGMUSA®, ALLEGRO®, ALITE 27®, ALTREVIN®, AMP®, AMPLEXUS®, AMPLO®, ARMEZON®, ARESENAL®, ASSIST®, ATECTRA®, ATIVUM®, AUMENAX®, AURA®, BASAGRAN®, BELLIS®, BEYOND®, BLAVITY®, BLITZ®, BOMVORO®, BRIO®, CABRIO®, CARAMBA®, CADRE®, CANTUS®, CAPACITY®, CARAMBA®, CAURIFIX®, CEPTIVA®, CEYVA®, CHOPPER®, CLARITY®, CLEARFIELD®, CLEARPATH®, CLEARSOL®, COLLIS®, COMET®, CONTAIN®, CONVEY®, COPEO®, CREDENZ®, CUPRODUL®, CYCOCEL®, DASH®, DELAN®, DISTINCT®, DORMEX®, DUETT®, DURAVEL®, ENDURA®, ENGENIA®, ENTIGRIS®, EXTREME®, F 500®, FACET®, FASTAC®, FENDONA®, FIBERMAX®, FINALE®, FORUM®, GELFIX®, GESTUS®, GLYTOL®, GRANOURO®, GREEN LAWNGER®, HEADLINER, HEAT®, HERBADOX®, HI-LIGHT®, HICOAT®, HIDROCUP®, HISTICK®, ILEVO®, IMUNIT®, INITIUM®, INTERFIELD®, KIFIX®, KIXOR®, KUMULUS®, LACTOSILO®, LAWNGER®, LIBERTY®, LIBERTYLINK®, LIDERO®, LUPRO-GRAIN®, MEES®, MERIVONR, MUNEO®, NEALTA®, NEPAXIR®, NEWPATH®, NEXICOR®, NODULATOR®, NOMOLT®, OBVIUS®, ONDUTY®, ONLY®, OPERA®, OPTILL®, ORKESTRA®, ORQUESTAR, OUTLOOK®, PENDULUM®, PIRATE®, PIVOT®, PIX®, PLATEAU®, POAST®, POLYACER®, POLYRAM®, PONCHO®, PREMIS®, PRIAXOR®, PRISTINE®, PROVISIA®, PROVYSOL®, PROWL®, PURSUTI®, RAK®, RAPTOR®, REGENT®, RELENYA®, RELY®, RENESTRA®, REVYSOL®, REVYTEK®, RHIZO-FLO®, SEFINA®, SELTIMA®, SEPIRET®, SERIFEL®, SHARPEN®, SISTEMA®, SISTIVA®, SOYTECH®, SPHAEREX®, SPOT®, STAMINA®, STANDAK®, STATUS®, STORM®, STROBY®, SUNFIRE®, SYSTIVA®, TACAZOR, TAJ®, TERAXXA®, TREEVIX®, TUIT®, TUTOR®, TWINLINK®, VABORO®, VALEOS®, VARISTO®, VAULTC, VELTYMA®, VERDICT®, VERISMO®, VERSATILIS®, VERSYS®, VIVANDO®, VOTIVO®, XANTHION®, XEMIUM®, ZAMPOR®, ZIDUA® and ZYNION® from BASF (Ludwigshafen, Germany); CORVUS®, POWERMAX®, DELARO®, PROSARO®, BAYTHROID®, SIVANTO®, FINISH®, GINSTAR®, ACCELERON®, RAXIL®, AERIS®, EVERGOL®, TRILEX®, ALLEGIANCE®, BUTEO, EMESTO®, GAUCHOR and THIRAM® from Bayer Crop Science (Creve Coeur, MO. USA); AGREER, AGRIPHAGE™, AGSIL®, ANCORA, AZATIN®, BOTANIGARD®, BOTEGHA®, BUG-N-SLUGGO®, CARB-O-NATOR®, CRYMAX®, CUEVA®, CYD-X®, DEFGUARD®, DELIVER®, DES-X®, DOUBLE NICKEL®, FIREFIGHTER™, GEMSTAR®, GROTTO®, HOMEPLATE®, JAVELIN®, KALMOR®, KOCIDE®, LIFEGARD®, MADEXR, MELOCON®, MYCOTROL®, NEEMIX®, OSO™, PFR-97™, SEDUCE™, SIL-MATRIX®, SLUGGO®, SOILGARD®, THURICIDE®, TRIACT®, TRIATHLON® and TRILOGY® from Certis (Columbia, MD); ABUNDIT®, ACCENT®, AFFORIA®, APROACH®, BASIS®, BEXFOND®, BLACKHAWK®, CANOPY®, CINCH®, CLINHER®, CURTAIL®, CURZATE®, DELEGATE®, RAINSHIELD®, DITHANE®, FEXAPAN®, VAPORGRIP®, LANNATE®, TANOS®, DURANGO®, DMA®, ELEVORE®, EMBEDK, ENABLE®, ENLIST DUO®, ENLIST ONE®, ENLITE®, ENTRUST®, ENVIVE®, EVERPLEX®, FONTELIS®, FULTIME®, GOLDSKY®, GRANDSTAND®, GRANITE®, GRASP®, HEARKEN®, INDAR®, NXTGENC, INSTINCT®, INTREPID 2F®, INTREPID EDGE®, KERB®, KEYSTONE®, KYBER®, LEADOFF®, LOYANT®, MATRIX®, N-SERVE®, NOVIXID®, OPENSKYC, PERFECTMATCH®, PINDAR®, PIXXARO®, POWERFLEX®, QUELEX®, RADIANT®, RALLY®, REALM®, REBELEX®, RESICORE®, RESOLVE®, REVULIN®, REZUVANT®, RIDGEBACK®, SEQUOIA®, SIMPLICITY®, SONIC®, STARANE®, STEADFAST®, STINGER®, STRONGARM®, SUCCESS®, SURESTART®, SURPASS®, SURVEIL®, SYNCHRONY®, TARZEC®, TRANSFORM®, TRELLIS®, TRIVENCE®, UTRISHA®, VERTISAN®, VYDATE®, WIDEARMATCH®, WIDEMATCHR and ZEST® from Corteva Agroscience (Indianapolis, IN, USA); BIO-SAVE® from Decco U.S. Post-Harvest, Inc. (Monrovia, CA, USA); ACCUDO®, AFFINITYK, AGILITY®, AIM®, ALLY®, ALTACOR®, ANTHEM®, ATHENA®, AUTHORITY®, AVAUNT®, BELEAF®, BRIGADE®, CADET®, CAPTURE®, CARBINE®, COMMAND®, CORAGEN®, DISPLAY®, ELEVEST®, ETHOS®, EXIREL®, EXPRESS®, FINESSE®, FIRSTSHOT®, FURAGRO®, GLADIATOR®, HARMONY®, HERO®, LUCENTO®, MARVEL®, MUSTANG®, OBEY®, PANOFLEX®, PRESENCE®, PREVATHON®, QUARTZO®, RHYME®, ROVRAL®, SEAMAC®, SHARK®, SOLIDA®, SPARTAN®, STEWARD®, TEMITRY®, TERRAC®, TOPGUARD®, UPBEET®, VANTACOR®, VERIMARK®, XYWAY®, ZEUS® and ZIRONAR® from FMC Corporation (Philadelphia, PA, USA); PENTIA®, ABAMEX®, AGRI TIN®, CHAMP®, CHIPTOX®, GIN OUT®, KAISO®, MEPEX®, NUPRID®, RAPPORT®, TERMINATE®, THISTROL®, ULTRA FLOURISH®, GOAL®, GOALTENDER®, GRAPPLE®, TUSCANY®, CHAMPION++, AGRI-MYCIN®, PHOSTROL®, BLIGHTBAN®, CHEETAH®, MYCOSHIELD®, RITEWAY®, TAZER®, MYSTIC®, CUPROXAT® and TYPY® from Nufarm Limited (Victoria, Australia); BIOSPECTRA®, PACRITE®, EFOG®, SHIELD-BRITE®, FUNGAFLOR®, PENBOTEC®, and SOPP from Pace International (Wapato, WA, USA); ACTARA®, ACTELLIC®, ACTIGARD®, ACURON™, ADVION®, AFLAGUARD®, AGRIPRO®, ALTO®, ALUMNI®, AMISTAR®, APIRO®, APRON®, AVICTA®, AWARD®, AXIAL™, AXORIS®, BANNER®, BANVEL®, BARRICADE®, BEACON®, BICEP II MAGNUM®, BION®, BONZI®, BOUNDARY®, BOXER®, BRAVO®, C. C. BENOIST®, CADENCE®, CALARIS®, CALLISTO®, CAMIX®, CAPTORA®, CASPER®, CELEST®, CHAIRMAN®, CHESS®, CITATION®, CLARIVA®, COLZOR®, CRUISER®, CULTAR®, CURACON®, DACONIL®, DISCOVER®, DIVIDEND®, DUAL®, DUAXO®, DURIVO®, DYNASTY®, EDDUS®, ELATIS®, ELUMIS®, ENDEAVOR®, ENVOKE®, EPERON®, EPIVO®, ERIJAN®, FARMORE®, FLAGSHIP®, FLEX®, FLEXSTAR®, FLORIPRO SERVICES®, FOLIO®, FORCE®, FORTENZA®, FUSIFLEX®, FUSILADE®, GESAGARD®, GESAPAX®, GESAPRIM®, GOLD®, GOLDEN HARVESTC, GRADUATE®, GRADUATEA+®, GRAMOXONE®, HALEX®, HERITAGE®, HILLESHOG®, HORIZON®, HYVIDO®, INSEGARR, ISABION®, KARATE ZEON®, LENTAGRAN®, LISTEGO®, LOGRAN®, LUMAX®, MAAG®, MATCH®, MAXIM®, MAXX®, MENTOR®, MERTECT®, MILAGRO®, MINECTO®, MIRAVISR, MODDUS®, NEMATHORIN®, NK®, ORDRAM®, ORONDIS®, PALISADE®, PEAK®, PEGASUS®, PIRIMOR®, POLO®, PREFIX®, PRIMO®, PROCLAIM®, QUANTIS®, REFLECT®, REFLEX®, REGLONE®, RESOLVA®, REVUS®, RIFIT®, ROGERS®, S&G®, SAKALIA®, SALTRO®, SCHOLAR®, SCIMITAR®, SCORE®, SEGURIS®, SEQUESTRENE®, SETOFF®, SOFIT®, SOLVIGO®, STADIUM®, SUPREN®, SWITCH®, SYMETRA®, SYNGENTA®, TAEGRO®, TAVIUM®, TERVIGO®, TILT®, TIMOREX®, TOPIK®, TOPREX®, TRIGARD®, TRIMMIT®, TOUCHDOWN®, UNIX®, VAYANTIS®, VERTIMAC®, VIBRANCE®, WEATHER STIK®, from Syngenta Crop Protection (Basel, Switzerland); and ASULOX®, BALISTIK®, BEETUP®, BELLMAC®, BETASANA®, BETTIX®, BUGUIS®, CENTURION®, CLIOPHAR®, COLZAMID®, CORZAL®, DEFIANT®, DEVRINOL®, MINSTREL®, AFFIX®, AXIDOR®, BUZZ®, MIMIX®, DIOZINOS®, DIPROSPERO®, EVITO®, MANZATE®, MICROTHIOL®, NAUTILE®, PENNCOZEB®, PROMESS®, PROPLANT®, PROXANIL®, PYRUS®, SACRON®, SYLLIT®, TEBUZOL®, THIOPRON®, TOKYO®, UNIZEB®, VACCIPLANT®, VIDEO®, ZOXIS®, CYTHRIN®, DIMILIN®, FORESTER®, FUMICYP®, TALISMA®, B-NINE®, FAZOR®, GYRO®, HIMALAYA®, ICENI®, TRINEXIS®, IODUS®, AUDIT®, BASAGRAN®, BATLIUM®, BOYCOTT®, BROADLOOM®, COYOTE®, COLLIDE®, DUET®, ETHOTRON®, EVEREST®, IMIFLEX®, LIFELINE®, METRICOR®, MOCCASIN®, MOTIF®, PRE-PARE®, SATELLITE®, SHADOW®, SHUTDOWN®, STAM®, SUPERWHAM!®, SUPREMACY®, TRICOR®, TRIZENTA®, CUPROFIX®, DEXTER®, ELEVATE®, ELIXIR®, FORTIX®, FROGHORN®, METEOR®, MICROTHI®, ORANIL®, PH-D®, PROCURE®, RANCOVA®, TEPERA®, TERRAGUARD®, TERRAMASTER®, TERRAZOLE®, TOPSIN®, TRIONIC®, ZIRAM®, ZOLERA®, ADIOS®, GOLDWING®, OFF-SHOOT-T®, PACZOL®, ROYAL®, ROYALTAC®, ACENTHRIN®, ACEPHATE®, ACRAMITE®, ADEPT®, ARGYLE®, ASSAIL®, BANTER®, BIFENTURE®, BIOMITE®, COMITE®, DIMILIN®, ENKOUNTER®, INTRUDER®, KANEMITE®, LAMBDA-CY®, MICROMITE®, OMITE®, PEDESTAL®, PERM-UP®, RIMON®, STRAFER®, TURNSTYLE®, UP-CYDE®, VENDEX®, VIGILANT®, ZYLO®, ATTENDANT®, BEAN GUARD®, ALLEGIANCE®, BELMONT®, ENHANCE®, GRAINGUARD®, MESH®, PRO-GRO®, RANCONA®, STARTUP®, THIRAM®, VITAFLO®, VITAVAX®, MAGNAPHOS®, WEEVIL-CIDE®, AQUASTRIKE®, AQUATHOL®, PEGASUS, GOLIATH, POACONSTRICTOR, RAVEN, T-BIRD, UP-END®, UP-START®, ETHEPHON PEGASUS, GOLIATH, POACONSTRICTOR, RAVEN, T-BIRD, UP-END®, UP-START®, ZEBA® and FLORAMITE® from UPL Limited (Mumbai, Maharashtra, India).

[0808] Formulations of the present disclosure may comprise any suitable combination of actives and may therefore comprise two, three, four, five, six, seven, eight, nine, ten or more of the aforementioned actives. Conversely, in some embodiments, one, two, three, four, five, six, seven, eight, nine, ten or more of the aforementioned actives are expressly excluded from formulations of the present disclosure.

[0809] Examples of adhesives (stickers) that may be included in formulations of the present disclosure include, but not are not limited to, disaccharides (e.g. maltose, sucrose, trehalose), gums (e.g., cellulose gum, guar gum, gum arabic, gum combretum, xantham gum), maltodextrins (e.g., maltodextrins having a DEV of about 10 to about 20), monosaccharides, oils (e.g., mineral oil, olive oil, peanut oil, soybean oil and/or sunflower oil), and oligosaccharides. See generally, e.g., POWERBLOX™ (Dow, Midland, MI, USA), such as POWERBLOX™ ADJ-65 and POWERBLOX™ ADJ-65; EPO 0245970; U.S. Pat. No. 5,496,568; WO 2008/144024; WO 2009/135049; WO 2011/126832; WO 2017/083049; WO 2020/225276; WO 2021/055316; WO 2022/096688; WO 2022/096691; WO 2022/096692; WO 2022/096693; WO 2022/096694; WO/2022/096695; WO 2022/096696.

[0810] Formulations of the present disclosure may comprise any suitable combination of adhesives (stickers) and may therefore comprise two, three, four, five, six, seven, eight, nine, ten or more of the aforementioned adhesives (stickers). Conversely, in some embodiments, one, two, three, four, five, six, seven, eight, nine, ten or more of the aforementioned adhesives (stickers) are expressly excluded from formulations of the present disclosure.

[0811] Examples of dispersants (spreaders) that may be included in formulations of the present disclosure include, but not are not limited to, anionic surfactants, cationic surfactants and non-ionic surfactants. See generally, e.g., EP 0245970; U.S. Pat. No. 5,496,568; WO 2008/144024; WO 2009/135049; WO 2011/126832; WO 2017/083049; WO 2020/225276; WO 2021/055316; WO 2022/096688; WO 2022/096691; WO 2022/096692; WO 2022/096693; WO 2022/096694; WO/2022/096695; WO 2022/096696.

[0812] In some embodiments, formulations of the present disclosure comprise one or more anionic surfactants. For example, in some embodiments, formulations of the present disclosure comprise one or more anionic surfactants selected from the group consisting of alkyl carboxylates (e.g., sodium stearate), alkyl sulfates (e.g., alkyl lauryl sulfate, sodium lauryl sulfate), alkyl ether sulfates, alkyl amido ether sulfates, alkyl aryl polyether sulfates, alkyl aryl sulfates, alkyl aryl sulfonates, alkyl sulfonates, alkyl amide sulfonates, alkyl aryl sulfonates, alkyl benzene sulfonates, alkyl diphenyloxide sulfonate, alpha-olefin sulfonates, alkyl naphthalene sulfonates, paraffin sulfonates, alkyl sulfosuccinates, alkyl ether sulfosuccinates, alkylamide sulfosuccinates, alkyl sulfosuccinamates, alkyl sulfoacetates, alkyl phosphates, alkyl ether phosphates, acyl sarconsinates, acyl isethionates, N-acyl taurates, N-acyl-N-alkyltaurates, benzene sulfonates, cumene sulfonates, dioctyl sodium sulfosuccinate, ethoxylated sulfosuccinates, lignin sulfonates, linear alkylbenzene sulfonates, monoglyceride sulfates, perfluorobutanesulfonate, perfluorooctanesulfonate, phosphate ester, styrene acrylic polymers, toluene sulfonates and xylene sulfonates.

[0813] In some embodiments, formulations of the present disclosure comprise one or more cationic surfactants. For example, in some embodiments, formulations of the present disclosure comprise one or more cationic surfactants selected from the group consisting of alkyltrimethylammonium salts (e.g., cetyl trimethylammonium bromide, cetyl trimethylammonium chloride), cetylpyridinium chloride, benzalkonium chloride, benzethonium chloride, 5-Bromo-5-nitro-1,3-dioxane, dimethyldioctadecylammonium chloride, cetrimonium bromide, dioctadecyldimethylammonium bromide and/or octenidine dihydrochloride.

[0814] In some embodiments, formulations of the present disclosure comprise one or more nonionic surfactants. For example, in some embodiments, formulations of the present disclosure comprise one or more nonionic surfactants selected from the group consisting of alcohol ethoxylates (e.g., TERGITOL™ 15-S surfactants (The Dow Chemical Company, Midland, MI), such as TERGITOL™15-S-9, alkanolamides, alkanolamine condensates, carboxylic acid esters, cetostcaryl alcohol, ectyl alcohol, cocamide DEA, dodecyldimethylamine oxides, ethanolamides, ethoxylates of glycerol ester and glycol esters, ethylene oxide polymers, ethylene oxide-propylene oxide copolymers, glucoside alkyl ethers, glycerol alkyl ethers, glycerol esters, glycol alkyl ethers (e.g., polyoxyethylene glycol alkyl ethers, polyoxypropylene glycol alkyl ethers), glycol alkylphenol ethers (e.g., polyoxyethylene glycol alkylphenol ethers,), glycol esters, monolaurin, pentaethylene glycol monododecyl ethers, poloxamer, polyamines, polyglycerol polyricinoleate, polysorbate, polyoxyethylenated fatty acids, polyoxyethylenated mercaptans, polyoxyethylenated polyoxyproylene glycols, polyoxyethylene glycol sorbitan alkyl esters, polyethylene glycol-polypropylene glycol copolymers, polyoxyethylene glycol octylphenol ethers, polyvinyl pynolidones, sugar-based alkyl polyglycosides, sulfoanylamides, sorbitan fatty acid alcohol ethoxylates, sorbitan fatty acid ester ethoxylates, sorbitan fatty acid ester and/or tertiary acetylenic glycols.

[0815] In some embodiments, formulations of the present disclosure comprise one or more zwitterionic surfactants. For example, in some embodiments, formulations of the present disclosure comprise one or more zwitterionic surfactants selected from the group consisting of 3-[(3-cholamidopropyl)dimethylammonio]-1-propanesulfonate, cocamidopropyl betaine, cocamidopropyl hydroxysultaine, phosphatidylserine, phosphatidylethanolamine, phosphatidylcholine and/or one or more sphingomyelins.

[0816] In some embodiments, formulations of the present disclosure comprise one or more soaps and/or organosilicone surfactants.

[0817] Non-limiting examples of dispersants that may be incorporated into formulations of the present disclosure—or into which proteins and other compositions of the present disclosure may be incorporated—include ATLOX™ (e.g., 4916, 4991; Croda International PLC, Edison, NJ), ATLOX METASPERSE™ (Croda International PLC, Edison, NJ), BIO-SOFT® (e.g., N series, such as N1-3, N1-7, N1-5, N1-9, N23-3, N2.3-6.5, N25-3, N25-7, N25-9, N91-2.5, N91-6, N91-8; Stepan Company, Northfield, IL), MAKON® nonionic surfactants (e.g., DA-4, DA-6 and DA-9; Stepan Company, Northfield, IL), MORWET® powders (Akzo Nobel Surface Chemistry LLC, Chicago, IL), MULTIWET™ surfactants (e.g., MO-85P-PW-(AP); Croda International PLC, Edison, NJ), SAFER® soaps (Woodstream Corporation, Inc., Lancaster, PA), SILWET® surfactants (Momentive Performance Materials, Inc., Niskayuna, NY), SPAN™ surfactants (e.g., 20, 40, 60, 65, 80 and 85; Croda Inc., Edison NJ), TAMOL™ dispersants (The Dow Chemical Company, Midland, MI), TERGITOL™ surfactants (e.g., TMN-6 and TMN-100X; The Dow Chemical Company, Midland, MI), TERSPERSE surfactants (e.g., 2001, 2020, 2100, 2105, 2158, 2700, 4894 and 4896; Hunstman Corp., The Woodlands, TX), TRITON™ surfactants (e.g., X-100; The Dow Chemical Company, Midland, MI), TWEEN® surfactants (e.g., TWEEN® 20 (polyoxyethylenesorbitan monolaurate), 21, 22, 23, 28, 40, 60, 61, 65, 80, 81 and 85; Croda International PLC, Edison, NJ) and combinations thereof. Additional examples of dispersants may be found in BAIRD & ZUBLENA. 1993. SOIL FACTS: USING WETTING AGENTS (NONIONIC SURFACTANTS) ON SOIL (North Carolina Cooperative Extension Service Publication AG-439-25) (1993); BURGES, FORMULATION OF MICROBIAL BIOPESTICIDES: BENEFICIAL MICROORGANISMS, NEMATODES AND SEED TREATMENTS (Springer Science & Business Media) (2012); MCCARTY, WETTING AGENTS (Clemson University Cooperative Extension Service Publication) (2001).

[0818] Formulations of the present disclosure may comprise any suitable combination of dispersants (spreaders) and may therefore comprise two, three, four, five, six, seven, eight, nine, ten or more of the aforementioned dispersants (spreaders). Conversely, in some embodiments, one, two, three, four, five, six, seven, eight, nine, ten or more of the aforementioned dispersants (spreaders) are expressly excluded from formulations of the present disclosure.

[0819] Examples of drying agents that may be included in formulations of the present disclosure include, but not are not limited to, calcium stearate, clay (e.g., attapulgite clay, montmorillonite clay), graphite, magnesium stearate, magnesium sulfate, powdered milk, silica (e.g., fumed silica, hydrophobically-coated silica, precipitated silica), soy lecithin and talc. Additional examples of drying agents may be found in Burges, Formulation of Microbial Biopesticides: Beneficial Microorganisms, Nematodes and Seed Treatments (Springer Science & Business Media) (2012).

[0820] Non-limiting examples of drying agents that may be incorporated into formulations of the present disclosure—or into which proteins and other compositions of the present disclosure may be incorporated—include, but are not limited to, commercial products sold under the tradenames AEROSIL® and SIPERNAT® from Evonik Corporation (Parsippany, NJ), BENTOLITE® from BYK-Chemie GmbH (Wesel, Germany), and INCOTEC® from INCOTEC Inc. (Salinas, CA).

[0821] Formulations of the present disclosure may comprise any suitable combination of drying agents and may therefore comprise two, three, four, five, six, seven, eight, nine, ten or more of the aforementioned drying agents. Conversely, in some embodiments, one, two, three, four, five, six, seven, eight, nine, ten or more of the aforementioned drying agents are expressly excluded from formulations of the present disclosure.

[0822] Examples of microbes that may be included in formulations of the present disclosure include, but not are not limited to, diazotrophs, phosphate-solubilizing microorganisms and biopesticides. See generally, e.g., WO 92/08355; US 2003/082164; US 2008/320615; US 2016/345588; US 2018/168168; US 2005/187107; US 2006/258534; US 2018/279624; U.S. Ser. No. 10/820,594; US 2019/014786; U.S. Ser. No. 10/874,109; U.S. Ser. No. 10/856,552; US 2019/014787; U.S. Ser. No. 11/076,603; US 2020/093125; US 2020/085065; US 2020/000098; US 2019/345572; US 2020/263734; WO 2021/101949; WO 2021/101937; WO 2016/201284; WO 2018/186307; WO 2007/142543; WO 2017/205800; WO 2015/003908; WO 2021/018321; WO 2003/016510; WO 2016/044542; WO 92/11856.

[0823] In some embodiments, formulations of the present disclosure comprise one or more of the following: Azospirillum brasilense Ab-V5, Azospirillum brasilense Ab-V6, Azospirillum brasilense INTA Az-39, Bacillus amyloliquefaciens D747, Bacillus amyloliquefaciens NRRL B-50349, Bacillus amyloliquefaciens TJ1000, Bacillus amyloliquefaciens FZB24, Bacillus amyloliquefaciens FZB42, Bacillus amyloliquefaciens IN937a, Bacillus amyloliquefaciens IT-45, Bacillus amyloliquefaciens TJ1000, Bacillus amyloliquefaciens MBI600, Bacillus amyloliquefaciens BS27 (deposited as NRRL B-5015), Bacillus amyloliquefaciens BS2084 (deposited as NRRL B-50013), Bacillus amyloliquefaciens 15AP4 (deposited as ATCC PTA-6507), Bacillus amyloliquefaciens 3AP4 (deposited as ATCC PTA-6506), Bacillus amyloliquefaciens LSSA01 (deposited as NRRL B-50104), Bacillus amyloliquefaciens ABP278 (deposited as NRRL B-50634), Bacillus amyloliquefaciens 1013 (deposited as NRRL B-50509), Bacillus amyloliquefaciens 918 (deposited as NRRL B-50508), Bacillus amyloliquefaciens 22CP1 (deposited as ATCC PTA-6508) and Bacillus amyloliquefaciens BS18 (deposited as NRRL B-50633), Bacillus amyloliquefaciens SB3778, Bacillus cereus 1-1562, Bacillus firmus I-1582, Bacillus lichenformis BA842 (deposited as NRRL B-50516), Bacillus lichenformis BL21 (deposited as NRRL B-50134), Bacillus megaterium NRRL B-67352, Bacillus megaterium NRRL B-67357, Bacillus megaterium NRRL B-67521, Bacillus megaterium NRRL B-67522, Bacillus megaterium NRRL B-67533, Bacillus megaterium NRRL B-67534, Bacillus megaterium NRRL B-67525, Bacillus megaterium NRRL B-67526, Bacillus megaterium NRRL B-67527, Bacillus megaterium NRRL B-67528, Bacillus megaterium NRRL B-67529, Bacillus megaterium NRRL B-67530, Bacillus mycoides NRRL B-21664, Bacillus pumilus NRRL B-30087, Bacillus pumilus NRRL B 21662, Bacillus pumilus NRRL B-30087, Bacillus pumilus ATCC 55608, Bacillus pumilus ATCC 55609, Bacillus pumilus GB34, Bacillus pumilus KFP9F, Bacillus pumilus QST 2808, Bacillus sp. AQ175 (deposited as ATCC 55608), Bacillus sp. AQ177 (deposited as ATCC 55609), Bacillus subtilis AQ713 (deposited as NRRL B-21661), Bacillus subtilis AQ743 (deposited as NRRL B-21665), Bacillus subtilis ATCC 55078, Bacillus subtilis ATCC 55079, Bacillus subtilis MBI 600, Bacillus subtilis NRRL B-21661, Bacillus subtilis NRRL B-21665, Bacillus subtilis CX-9060, Bacillus subtilis GB03, Bacillus subtilis GB07, Bacillus subtilis QST-713, Bacillus subtilis FZB24, Bacillus subtilis D747, Bacillus subtilis 3BP5 (deposited as NRRL B-50510), Bacillus thuringiensis AQ52 (deposited as NRRL B-21619), Bacillus thuringiensis ATCC 13367, Bacillus thuringiensis GC-91, Bacillus thuringiensis NRRL B-21619, Bacillus thuringiensis ABTS-1857, Bacillus thuringiensis SAN 401 I, Bacillus thuringiensis ABG-6305, Bacillus thuringiensis ABG-6346, Bacillus thuringiensis AM65-52, Bacillus thuringiensis SA-12, Bacillus thuringiensis SB4, Bacillus thuringiensis ABTS-351, Bacillus thuringiensis HD-1, Bacillus thuringiensis EG 2348, Bacillus thuringiensis EG 7826, Bacillus thuringiensis EG 7841, Bacillus thuringiensis DSM 2803, Bacillus thuringiensis NB-125, Bacillus thuringiensis NB-176, Bradyrhizobium spp. 8A57, Bradyrhizobium elkanii SEMIA 501, Bradyrhizobium elkanii SEMIA 587, Bradyrhizobium elkanii SEMIA 5019, Bradyrhizobium japonicum 61A227. Bradyrhizobium japonicum 61A228, Bradyrhizobium japonicum 61A273, Bradyrhizobium japonicum E-109, Bradyrhizobium japonicum NRRL B-50586 (also deposited as NRRL B-59565), Bradyrhizobium japonicum NRRL B-50587 (also deposited as NRRL B-59566), Bradyrhizobium japonicum NRRL B-50588 (also deposited as NRRL B-59567), Bradyrhizobium japonicum NRRL B-50589 (also deposited as NRRL B-59568), Bradyrhizobium japonicum NRRL B-50590 (also deposited as NRRL B-59569), Bradyrhizobium japonicum NRRL B-50591 (also deposited as NRRL B-59570), Bradyrhizobium japonicum NRRL B-50592 (also deposited as NRRL B-59571), Bradyrhizobium japonicum NRRL B-50593 (also deposited as NRRL B-59572), Bradyrhizobium japonicum NRRL B-50594 (also deposited as NRRL B-50493), Bradyrhizobium japonicum NRRL B-50608, Bradyrhizobium japonicum NRRL B-50609, Bradyrhizobium japonicum NRRL B-50610, Bradyrhizobium japonicum NRRL B-50611, Bradyrhizobium japonicum NRRL B-50612, Bradyrhizobium japonicum NRRL B-50726, Bradyrhizobium japonicum NRRL B-50727, Bradyrhizobium japonicum NRRL B-50728, Bradyrhizobium japonicum NRRL B-50729, Bradyrhizobium japonicum NRRL B-50730, Bradyrhizobium japonicum SEMIA 566, Bradyrhizobium japonicum SEMIA 5079, Bradyrhizobium japonicum SEMIA 5080, Bradyrhizobium japonicum USDA 6, Bradyrhizobium japonicum USDA 110, Bradyrhizobium japonicum USDA 122, Bradyrhizobium japonicum USDA 123, Bradyrhizobium japonicum USDA 127, Bradyrhizobium japonicum USDA 129, Bradyrhizobium japonicum USDA 532C, Erwinia billingiae NRRL B-67766, Gliolcadium virens ATCC 52045, Gliocladium virens GL-21, Glomus intraradices RTI-801, Lysinibacillus sphaericus NRRL B-67350, Lysinibacillus sphaericus NRRL B-67351, Lysinibacillus sphaericus NRRL B-67486, Metarhizium anisopliae F52, Paenibacillus graminis NRRL B-68249, Paenibacillus kribbensis NRRL B-68250, Paenibacillus peoriae NRRL B-67884, Paenibacillus peoriae NRRL B-67885, Paenibacillus sonchi NRRL B-68251, Penicillium bilaiae ATCC 18309, Penicillium bilaiae ATCC 20851, Penicillium bilaiae ATCC 22348, Penicillium bilaiae NRRL 50162, Penicillium bilaiae NRRL 50169, Penicillium bilaiae NRRL 50776, Penicillium bilaiae NRRL 50777, Penicillium bilaiae NRRL 50778, Penicillium bilaiae NRRL 50777, Penicillium bilaiae NRRL 50778, Penicillium bilaiae NRRL 50779, Penicillium bilaiae NRRL 50780, Penicillium bilaiae NRRL 50781, Penicillium bilaiae NRRL 50782, Penicillium bilaiae NRRL 50783, Penicillium bilaiae NRRL 50784, Penicillium bilaiae NRRL 50785, Penicillium bilaiae NRRL 50786, Penicillium bilaiae NRRL 50787, Penicillium bilaiae NRRL 50788, Penicillium bilaiae NRRL 67154, Penicillium bilaiae NRRL 67155, Penicillium bilaiae NRRL 67156, Penicillium bilaiae NRRL 67157, Penicillium bilaiae NRRL 67158, Penicillium bilaiae NRRL 67159, Penicillium bilaiae RS7B-SD1, Penicillium brevicompactum AgRF18, Penicillium canescens ATCC 10419, Penicillium expansum ATCC 24692, Penicillium expansum YT02, Penicillium fellatanum ATCC 48694, Penicillium gaestrivorus NRRL 50170, Penicillium glabrum DAOM 239074, Penicillium glabrum CBS 229.28, Penicillium janthinellum ATCC 10455, Penicillium lanosocoeruleum ATCC 48919, Penicillium radicum ATCC 201836, Penicillium radicum FRR 4717, Penicillium radicum FRR 4719, Penicillium radicum N93/47267, Penicillium raistrickii ATCC 10490, Pseudomonas jessenii PS06, Pseudomonas koreensis NRRL B-67883, Rhizobium leguminosarum SO12A-2 (IDAC 080305-01), Sinorhizobium fredii CCBAU114, Sinorhizobium fredii USDA 205. Streptomyces sp. NRRL B-30145, Streptomyces sp. M1064, Streptomyces WYE 53, Streptomyces glabus NRRL 30232, Streptomyces lydicus WYEC 108 (deposited as ATCC 55445), Streptomyces violaceusniger YCED 9, Trichoderma asperellum SKT-1, Trichoderma asperellum ICC 012, Trichoderma atroviride LC52, Trichoderma atroviride CNCM 1-1237, Trichoderma fertile JM41R, Trichoderma gamsii ICC 080, Trichoderma hamatum ATCC 52198, Trichoderma harzianum ATCC 52445, Trichoderma harzianum KRL-AG2, Trichoderma harzianum T-22, Trichoderma harzianum TH-35, Trichoderma harzianum T-39, Trichoderma harzianum ICC012, Trichoderma reesi ATCC 28217, Trichoderma virens ATCC 58678, Trichoderma virens GI-3, Trichoderma virens GI-21, Trichoderma virens GL-21, Trichoderma virens G-41, Trichoderma viridae ATCC 52440, Trichoderma viridae ICC080, Trichoderma viride TV1, Yersinia entomophaga MH96, Yersinia entomophaga NRRL B-67598, Yersinia entomophaga NRRL B-67599, Yersinia entomophaga NRRL B-67600 and Yersinia entomophaga NRRL B-67601.

[0824] Non-limiting examples of microbial compositions that may be incorporated into formulations of the present disclosure—or into which proteins and other compositions of the present disclosure may be incorporated—include, but are not limited to, commercial products sold under the tradenames SERIFEL® from BASF (Ludwigshafen, Germany); VOTIVO® from Bayer Crop Science (Creve Coeur, MO, USA); AGREE®, AGRIPHAGE™, AGSIL®, ANCORA, AZATIN®, BOTANIGARD®, BOTEGHA®, BUG-N-SLUGGO®, CARB-O-NATOR®, CRYMAX®, CUEVA®, CYD-X®, DEFGUARD®, DELIVER®, DES-X®, DOUBLE NICKEL®, FIREFIGHTER™, GEMSTAR®, GROTTO®, HOMEPLATE®, JAVELIN®, KALMORi, KOCIDE®, LIFEGARD®, MADEX®, MELOCON®, MYCOTROL®, NEEMIX®, OSO™, PFR-97™ SEDUCE™, SIL-MATRIX®, SLUGGO®, SOILGARD®, THURICIDE®, TRIACT®, TRIATHLON® and TRILOGY® from Certis (Columbia, MD); BEXFOND™ and HEARKEN® from Corteva Agroscience (Indianapolis, IN, USA); ACCUDO®, FURAGRO®, PRESENCE®, QUARTZO®, SEAMAC® and ZIRONAR® from FMC Corporation (Philadelphia, PA, USA); B.SUB™, BAM™, BIO-N™, BIO-P™, BIO-PLEX™, MICRO-FORCE™, MYCO-FORCE™, PLATFORM™, ROOT-GUARD™, and TRICHO-SHIELD™ from Nutri-Tech Solutions Pty Ltd. (Yandina, Queensland, Australia); PROVEN® and RETURN® from Pivot Bio (Berkeley, CA); ACTINOVATE®, AZOMAX®, B300®, BIONIQ®, CELL-TECH®, CTS-500®, GLYCIMAX®, JUMPSTART®, MYCOPLEX®, NITRAGIN®, OPTIMIZE®, QUICKROOTS®, RHIZOMAX®, RHIZOMYCO®, TAEGRO® and TAGTEAM® from Novozymes.

[0825] Formulations of the present disclosure may comprise any suitable combination of microbial compositions and may therefore comprise two, three, four, five, six, seven, eight, nine, ten or more of the aforementioned microbial compositions. Conversely, in some embodiments, one, two, three, four, five, six, seven, eight, nine, ten or more of the aforementioned microbial compositions are expressly excluded from formulations of the present disclosure.

[0826] Examples of nutrients that may be included in formulations of the present disclosure include, but not are not limited to, organic acids (e.g., acetic acid, citric acid, lactic acid, malic acid, taurine, etc.), macrominerals (e.g., phosphorous, calcium, magnesium, potassium, sodium, iron, etc.), trace minerals (e.g., boron, cobalt, chloride, chromium, copper, fluoride, iodine, manganese, molybdenum, selenium, zinc, etc.), vitamins, (e.g., vitamin A, vitamin B complex (i.e., vitamin B₁, vitamin B₂, vitamin B₃, vitamin B₅, vitamin B₆, vitamin B₇, vitamin B₈, vitamin B₉, vitamin B₁₂, choline) vitamin C, vitamin D, vitamin E, vitamin K, carotenoids (α-carotene, β-carotene, cryptoxanthin, lutein, lycopene, zeaxanthin, etc.), and combinations thereof. See also, generally, e.g., US 2014/235447; WO 2022/029224; WO 2022/029221; WO 2021/255118; WO 2021/247915; US 2021/300837; US 2020/148605; US 2012/247164; US 2016/355443; US 2020/055794; US 2011/154873; US 2006/243009; US 2017/088474.

[0827] Formulations of the present disclosure may comprise any suitable combination of nutrients and may therefore comprise two, three, four, five, six, seven, eight, nine, ten or more of the aforementioned nutrients. Conversely, in some embodiments, one, two, three, four, five, six, seven, eight, nine, ten or more of the aforementioned nutrients are expressly excluded from formulations of the present disclosure.

[0828] Examples of pest attractants and feeding stimulants that may be included in formulations of the present disclosure include, but not are not limited to, brevicomin, ceralure, codlelure, cue-lure, disparlure, dominicalure, eugenol, frontalin, gossyplure, grandlure, hexalure, ipsdienol, ipsenol, japonilure, latitlure, lineatin, litlure, looplure, medlure, megatomic acid, methyl eugenol, moguchun, α-multistriatin, muscalure, orfalure, oryctalure, ostramone, rescalure, siglure, sulcatol, trimedlure, trunc-call, and combinations thereof. See generally, e.g., WO 00/28824; U.S. Pat. Nos. 5,607,684; 4,510,133; 5,290,556; U.S. 60/774,634; U.S. Pat. No. 6,773,727; WO 2022/051661; EP 0563963; WO 2013/164384; WO 2003/020030; U.S. Pat. Nos. 8,420,070; 5,401,506; WO 92/11856.

[0829] Formulations of the present disclosure may comprise any suitable combination of pest attractants and/or feeding stimulants and may therefore comprise two, three, four, five, six, seven, eight, nine, ten or more of the aforementioned pest attractants and/or feeding stimulants. Conversely, in some embodiments, one, two, three, four, five, six, seven, eight, nine, ten or more of the aforementioned pest attractants and/or feeding stimulants are expressly excluded from formulations of the present disclosure.

[0830] Examples of pH control components that may be included in formulations of the present disclosure include phosphate and other salts capable of buffering at the desired pH, and having an aqueous solubility of more than 1% w/w. A preferred pH control component is a phosphate buffer containing the ionic species HPO₄²⁻ and H₂PO₄⁻.

[0831] A pH control component may be a single ionic species that can maintain a constant pH but only provide a buffering effect towards either acidification or basification. An example of such, is HPO₄²⁻ which can ensure an alkaline pH (of approximately 9) and provide a buffering effect against acidification. This may be beneficial in an agricultural setting to keep the pH constant at an alkaline pH, as most environmental factors will cause acidification of the droplet and deposit.

[0832] In preferred embodiments, the pH control component does not significantly change pH (+/−0.5 pH units) or change in a desired direction upon drying when the solvent evaporates from the droplet on the leaf surface. Some buffers will, upon drying, change pH as a result of differences in solubility of the buffer components. As an example, the pH of a sodium phosphate buffer constituting of Na₂HPO₄ and NaH₂PO₄ can reduce to pH 4 or lower upon drying since the dibasic form (Na₂HPO₄) will crystallize to a larger degree. On the contrary, the pH of a potassium phosphate buffer constituting of K₂HPO₄ and KH₂PO₄ will approach pH 9 upon drying since the monobasic form (KH₂PO₄) has the lowest solubility (Sarciaux 1999).

[0833] A pH control component is most effective (highest buffer capacity) when the pKa is close to the desired pH of the composition. This will reduce the amount of buffer needed to maintain a desired pH. In an embodiment, the buffer includes salts having a neutral/alkaline pKa, such as a pKa in the range of 6.5 to 10.

[0834] As a rule of thumb, a pH control component can be used to control the pH of a solution at a pH+/−1 pH-unit from its pKa value. pH control components with a pKa value above 6.5 are useful for controlling the pH at 7.5 or above. Examples of suitable pH control component includes, but are not limited to: Sodium/potassium phosphate (pKa₁ 2.12, pKa₂ 7.21, pKa₃ 12.67), sodium/potassium carbonate (pKa₁ 6.37, pKa₂ 10.32), 2-amino-2-(hydroxymethyl)-1,3-propanediol (TRIS) (pKa 8.1), [Bis(2-hydroxyethyl)amino]acetic acid (Bicine) (pKa 8.35), N-[tris(hydroxymethyl)methyl]glycine (Tricine) (pKa 8.15), 4-(2-hydroxyethyl)-1-piperazineethanesulfonic acid (HEPES) (pKa₁ 3.0, pKa₂ 7.5), N-[tris(hydroxymethyl)methyl]-2-aminoethanesulfonic acid (TES) (pKa 7.55), 3-(N-morpholino)propanesulfonic acid (MOPS) (pKa 7.2), tris(hydroxymethyl)methylamino]propanesulfonic acid (TAPS) (pKa 8.44), N-[tris(hydroxymethyl)methyl]-3-amino-2-hydroxypropanesulfonic acid (TAPSO) (pKa 7.6), glycylglycine (pKa₁ 3.14 pKa₂ 8.17), 2-(N-cyclohexylamino)ethanesulfonic acid (CHES) (pKa 9.3), sodium/potassium borate (pKa₁ 9.24, pKa₂ 12.4, pKa₃ 13.3), 2-amino-2-methyl-1,3-propanediol (ammediol) (pKa 8.8), triethanol amine (pKa 7.74), 2-amino-2-methyl-1-propanol (pKa 9.7), glycine (pKa₁ 2.34, pKa₂ 9.6), histidine (pKa₁ 1.82, pKa2 6.00, pKa₃ 9.17), and other amino acid buffers.

[0835] Non-preferred pH control components include, but are not limited to, pH control components with an unfavorable pKa (pKa <6.5 for an enzyme that requires an alkaline pH), volatile pH control component, pH control component that display significant phytotoxicity (this may sometimes include the above-mentioned “suitable” pH control components, as phytotoxicity is depended on buffer concentration, pH and target crop), and pH control components that are unwanted in the environment and therefore regulated by authorities (this may sometimes include the above-mentioned “suitable” pH control component, as regulations varies throughout the world).

[0836] In some embodiments, formulations of the present disclosure comprise one or more pH control components in an amount of about/at least 0.01-10% w/w, preferably about/at least 0.05-5% w/w.

[0837] In some embodiments, formulations of the present disclosure can maintain an alkaline pH. pH control components may be used to obtain such formulations. For example, in some preferred embodiments, formulations of the present disclosure comprise one or more pH control components selected to provide a composition having an alkaline pH within the operable pH range(s) of each enzyme in the formulation, most preferably within +/−1 pH-unit from the optimal pH value of each enzyme in the formulation. Thus, in some embodiments, formulations of the present disclosure comprise a pH control component, such as a buffer, where an 1% w/w aqueous solution of the pH control component (buffer) has an alkaline pH in which each enzyme in the formulation is operable.

[0838] In some embodiments, formulations of the present disclosure can maintain an acidic pH. pH control components may be used to obtain such formulations. For example, in some preferred embodiments, formulations of the present disclosure comprise one or more pH control components selected to provide a composition having an acidic pH within the operable pH range(s) of each enzyme in the formulation, most preferably within +/−1 pH-unit from the optimal pH value of each enzyme in the formulation. Thus, in some embodiments, formulations of the present disclosure comprise a pH control component, such as a buffer, where an 1% w/w aqueous solution of the pH control component (buffer) has an acidic pH in which each enzyme in the formulation is operable.

[0839] Formulations of the present disclosure may comprise any suitable combination of pH control components and may therefore comprise two, three, four, five, six, seven, eight, nine, ten or more of the aforementioned pH control components. Conversely, in some embodiments, one, two, three, four, five, six, seven, eight, nine, ten or more of the aforementioned pH control components are expressly excluded from formulations of the present disclosure.

[0840] Examples of postharvest treatments that may be included in formulations of the present disclosure include, but not are not limited to, essential oils, ethylene biosynthesis inhibitors (e.g., cyclopropenes), pesticides and waxes. See generally, e.g., WO 00/10386; WO 01/43548; US 2002/058592; US 2002/061822; US 2002/043730; US 2002/198107; US 2004/072694; US 2003/100450; US 2004/077502; US 2005/043179; US 2005/250649; US 2005/261131; US 2005/261132; US 2005/288189; CA 2512254; CA 2512256; US 2007/117720; US 2007/265166; US 2008/113867; US 2010/144533; US 2008/206823; US 2009/035380; US2009/077684; US 2009/118492; US 2009/230350; US 2010/047408; US 2011/321191; US 2011/034335; US 2011/014334; US 2012/272572; US 2012/282380; US2011/293801; US2012/004108; US2013/065764; US2012/258220; US2012/142534; US 2014/127309; US 2013/004634; US 2014/011679; US 2015/208679; WO 2014/120715; WO 2015/175157; WO 2017/180695; US 2014/080710; US 2015/237877; US 2015/272115; US 2016/000072; US 2015/366189; US 2014/242235; US 2014/271758; US 2016/066568; US 2016/095311; US 2015/018430; US 2015/087520; US 2015/231588; US 2015/366230; US 2016/235070; US 2016/324147; US 2017/251673; US 2017/251662; US 2017/251669; US 2017/265462; US 2017/318804; US 2018/139975; US 2018/356384; US 2021/102245; US 2021/238201; WO 2022/094214; EP 2468107; ES 2439616; WO 2014/128321; WO 2018/116027; WO 2018/128807; WO 2019/058211; WO 2020/157714; US 2009/253578; US 2009/253579; US 2004/146617; US 2022/087261; WO 2020/016728; US 2010/173773; US 2010/292080; U.S. Pat. No. 5,858,436; EP 0972450; U.S. Pat. Nos. 6,221,414; 6,723,364; WO 00/49880; U.S. Pat. No. 6,403,139; US 2005/129662; US 2006/228458; US 2005/137090; US 2006/276336; US 2008/175926; US 2008/016766; US 2008/145499; US 2010/092631; US 2010/081636; US 2011/003694; US 2011/008475; US 2010/298147; US 2013/072383; US 2013/156835; US 2013/266670; US 2013/236562; US 2013/178489; US 2014/187570; US 2013/306158; US 2013/341809; US 2016/330987; WO 2017/001502; US 2019/159469; WO 2017/220581; US 2020/060300; US 2020/221719; WO 2020/016154; WO 2020/225066; WO 2021/233900; WO 2005/058014.

[0841] Non-limiting examples of postharvest treatment compositions that may be incorporated into formulations of the present disclosure—or into which proteins and other compositions of the present disclosure may be incorporated—include commercial products sold under the tradenames ACTISEAL™, ACTISEAL™ CONTORL-TEC™, ETHYLBLOC, FRESHCLOUD™, FRESHSTART, HARVISTA™, SMARTCITRUS, SMARTFRESH™, TEYCER, VITAFRESH from AgroFresh, Inc. (Philadelphia, PA, USA); CERAXEL®, CERASULFUR®, CERAQUINT®, ELIMR®, MUSACARE® and CERAFRUTA from CERADIS Crop Protection (Ceradis B.V., Netherlands); APL-LUSTR®, APL-BRITE, BIO-SAVER, CITRUBLUSH, CITRUS BRITE, CITRUS FIX™, CITRUS LUSTR®, DECCO and DECCONATUR™ from Decco U.S. Post-Harvest, Inc. (Monrovia, CA, USA); SEMPERFRESH, LUSTRE DRY, NATURAL SHINE®, PACRITE®, PRIMAFRESH®, SHIELD-BRITE®, EFOG® and XEDAQUIN from Pace International (Wapato, WA, USA); ALUMNI®, CHAIRMAN®, GRADUATER, GRADUATEA+®, MENTOR®, MERTECT®, SCHOLAR® and STADIUM® from Syngenta Crop Protection (Basel, Switzerland); and MAGNAPHOS, QUICKPHLO-R, QUICKPHOS from UPL Limited (Mumbai, Maharashtra, India).

[0842] It is to be understood that many of the compounds described above as “chemical actives” and “chemical active compositions” may be applied to plants and plant parts both preharvest and postharvest and may therefore also be considered “postharvest treatments” and “postharvest treatment compositions.”

[0843] Formulations of the present disclosure may comprise any suitable combination of postharvest treatment compositions and may therefore comprise two, three, four, five, six, seven, eight, nine, ten or more of the aforementioned postharvest treatment compositions. Conversely, in some embodiments, one, two, three, four, five, six, seven, eight, nine, ten or more of the aforementioned v are expressly excluded from formulations of the present disclosure.

[0844] Examples of preservatives that may be included in formulations of the present disclosure include, but are not limited to, benzoates (e.g., sodium benzoate), benzoic acid, methyl paraben, phenoxy ethanol, proprionates (e.g., ammonium proprionate, calcium proprionate, sodium proprionate), proprionic acid, sorbates (e.g., potassium sorbate, sodium sorbate), and 1,2-benzisothiazolin-3-one (PROXEL®; Basel, Switzerland).

[0845] Formulations of the present disclosure may comprise any suitable combination of preservatives and may therefore comprise two, three, four, five, six, seven, eight, nine, ten or more of the aforementioned preservatives. Conversely, in some embodiments, one, two, three, four, five, six, seven, eight, nine, ten or more of the aforementioned preservatives are expressly excluded from formulations of the present disclosure.

[0846] Examples of rain fasteners that may be included in formulations of the present disclosure include, but not are not limited to, organo-modified siloxanes (organosiloxanes), such as trisiloxanes and polysiloxanes. See generally EP 0245970; U.S. Pat. No. 5,496,568; WO 2008/144024; WO 2009/135049; WO 2011/126832; WO 2017/083049; WO 2020/225276; WO 2021/055316; WO 2022/096688; WO 2022/096691; WO 2022/096692; WO 2022/096693; WO 2022/096694; WO/2022/096695; WO 2022/096696.

[0847] In some embodiments, formulations of the present disclosure comprise one or more organo-modified siloxanes having the general molecular structure of Formula 1:

[chemical structure]

[0848] in which
[0849] R¹ represents identical or different from each other hydrocarbon substituents of 1-10 carbons or hydrogen, preferred are methyl, ethyl, propyl and phenyl substituents, particularly preferred are methyl substituents;
[0850] R² represents identical or different from each other polyether substituents of the general Formula II:

[chemical structure]

[0851] wherein
[0852] R³ represents identical or different from each other hydrocarbon moieties of 1-8 carbons, which optionally is interrupted by oxygen atoms. Preferred is linear hydrocarbons of 2-4 carbons, particularly preferred is —CH₂—CH₂—CH₂—
[0853] R⁴ represents identical or different from each other hydrocarbon substituents of 1-12 carbons or hydrogen, preferred is methyl, ethyl, phenyl or hydrogen substituents
[0854] R⁵ represents identical or different from each other hydrocarbon substituents of 1-16 carbons, which optionally contains urethane, carbonyl or carboxylic acid functionality, or hydrogen.

[0855] Methyl or hydrogen substituents are preferred, with hydrogen being most preferred. A is 0-200, preferably 0-1, more preferably 0. B is 0-200, preferably 0.5-2, more preferably 1. In preferred embodiments, A+B>0. C is 0-60, preferably 1-15. D is 0-60, preferably 0-10. E is 0-20, preferably 0-10, more preferably 0. In preferred embodiments, C+D+E>0. A trisiloxane may be defined as a molecule of the general Formula I with A=0 and B=1, whereas a polysiloxane is a molecule of the general formula I with A+B>1 and A>1. Examples of commercially available organo-modified siloxanes include, but are not limited to SILWET™ surfactants (Momentive Performance Materials, Inc., Niskayuna, NY), such as SILWET™ L-77 (polyalkyleneoxide modified heptamethyltrisiloxane), SILWET™ HS-312, SILWET™ 408, SILWET™ 618, SILWET™ 625, SILWET™ 636, SILWET™ 641, SILWET™ 806, SILWET™ DA-40, SILWET™ DRS-60, SILWET™ ECO, SILWET™ HS-604, SILWET™ STIK 2 and SILWET™) and BREAK-THRU® surfactants (Evonik Operations Gmbh, Essen, Germany), such as BREAK-THRU® S 200, BREAK-THRU® S 233, BREAK-THRU® S 240, BREAK-THRU® S 255, BREAK-THRU® S 279, BREAK-THRU® S 301 (polyether trisolxane), BREAK-THRU® SD 260, BREAK-THRU® SF 420, BREAK-THRU® SP 133 (polyglycerol esters and fatty acid esters), BREAK-THRU® UNION, BREAK-THRU® VIBRANT). In some embodiments, formulations of the present disclosure comprise one or more organo-modified siloxanes in an amount of about/at least 0.001-50% w/w, preferably about/at least 0.005-25% w/w.

[0856] Formulations of the present disclosure may comprise any suitable combination of rain fasteners and may therefore comprise two, three, four, five, six, seven, eight, nine, ten or more of the aforementioned rain fasteners. Conversely, in some embodiments, one, two, three, four, five, six, seven, eight, nine, ten or more of the aforementioned rain fasteners are expressly excluded from formulations of the present disclosure.

[0857] Examples of suitable stabilizers include, but not are not limited to, boric acid, boric acid derivatives, inorganic salts, lactic acid, polyols, sugars, sugar alcohols and reversible protease inhibitors. See generally, e.g., WO 2007/113241; WO 01/04279; WO 2013/004636; WO 95/02046; WO 2009/118375; WO 2020/115179; WO 96/41859; WO 2007/025549; WO 96/23062; WO 2018/130654; WO 96/22366; WO 92/17571; WO 2017/044473; WO 2017/044545, WO 2017/116837, WO 2017/116846, WO 2017/210163, WO 2017/210166, WO 2018/118740, WO 2018/175681, WO 2018/183491, WO 2018/218008, WO 2018/218016; WO 2018/218035.

[0858] Formulations of the present disclosure may comprise any suitable combination of stabilizers and may therefore comprise two, three, four, five, six, seven, eight, nine, ten or more of the aforementioned stabilizers.

[0859] Conversely, in some embodiments, one, two, three, four, five, six, seven, eight, nine, ten or more of the aforementioned stabilizers are expressly excluded from formulations of the present disclosure.

[0860] Examples of suitable UV protectants include, but not are not limited to, aromatic amino acids (e.g., tryptophan, tyrosine), carotenoids, cinnamates, lignosulfonates (e.g., calcium lignosulfonate, sodium lignosulfonate), melanins, mycosporines, polyphenols and/or salicylates). Non-limiting examples of UV protectants include Borregaard LignoTech™ lignosulfonates (e.g., Borresperse 3A, Borresperse CA, Borresperse NA, Marasperse AG, Norlig A, Norlig 11D, Ufoxane 3A, Ultrazine NA, Vanisperse CB; Borregaard Lignotech, Sarpsborg, Norway) and combinations thereof. Additional examples of UV protectants may be found in BURGES, FORMULATION OF MICROBIAL BIOPESTICIDES: BENEFICIAL MICROORGANISMS, NEMATODES AND SEED TREATMENTS (Springer Science & Business Media) (2012).

[0861] Formulations of the present disclosure may comprise any suitable combination of UV protectants and may therefore comprise two, three, four, five, six, seven, eight, nine, ten or more of the aforementioned UV protectants. Conversely, in some embodiments, one, two, three, four, five, six, seven, eight, nine, ten or more of the aforementioned UV protectants are expressly excluded from formulations of the present disclosure.

[0862] Examples of suitable wetting agents include, but are not limited to, naphthalene sulfonates, such as alkyl naphthalene sulfonates (e.g., sodium alkyl naphthalene sulfonate), isopropyl naphthalene sulfonates (e.g., sodium isopropyl naphthalene sulfonate) and butyl naphthalene sulfonates (e.g., sodium n-butyl naphthalene sulfonate).

[0863] Formulations of the present disclosure may comprise any suitable combination of wetting agents and may therefore comprise two, three, four, five, six, seven, eight, nine, ten or more of the aforementioned wetting agents. Conversely, in some embodiments, one, two, three, four, five, six, seven, eight, nine, ten or more of the aforementioned wetting agents are expressly excluded from formulations of the present disclosure.

[0864] As will be understood by those skilled in the art, compositions of the present disclosure have many uses, including, but not limited to a) preventing, treating, suppressing and/or eliminating infestations/infections of/by myriad pests, including, but not limited to, phytopathogenic pests, such as arachnids, bacteria, fungi, gastropods, insects, nematodes, oomycetes, protozoa, viruses and weeds; b) treating surfaces/substances that are susceptible to infestation/infection; c) cleansing infested/infected surfaces/substances; d) reducing disease severity in plants and plant parts affected directly or indirectly by phytopathogenic pests; e) enhancing plant growth environments; f) improving nutrient availability/uptake/accumulation; g) reducing the amount(s) of exogenous fertilizer needed to achieve a desired result; h) improving plant growth, development and yield characteristics; i) prolonging the shelf-life of harvested plants and plant parts; j) delaying the ripening of plants and plant parts; k) hastening the ripening of plants and plant parts; l) improving the efficacy of biological/chemical pesticides; m) preventing, treating, suppressing and/or eliminating pesticide-induced resistance/phytotoxicity.

[0865] Compositions of the present disclosure may be particularly useful for protecting plants from environmental pathogens.

[0866] In some embodiments, compositions of the present disclosure are useful for preventing, treating, suppressing, eliminating and/or reducing the severity of acarid infestations by, for example, reducing attraction of an acarid to a surface, inhibiting entry of an acarid into a material, inhibiting inhabitation by an acarid, inhibiting feeding of an acarid, inhibiting amino acid production, degrading one or more amino acids, preventing an acarid from utilizing one or more essential amino acids, producing ammonia in the gut of an acarid, inhibiting the growth of an acarid, inhibiting the reproduction and/or proliferation of an acarid, degrading on one or more structural components of an acarid (e.g. procuticle components, such as chitin, and epicuticle components, such as lipoproteins, hydrocarbons, polyphenols and esters of fatty acids and alcohols), killing an acarid, and/or reducing one or more symptoms of an acarid infestation. In some embodiments, such inhibition is complete or substantially complete, such that the acarid fails to inhabit/feed/grow/reproduce/proliferate at a rate effective to initiate and/or sustain an appreciable infestation. For example, spraying a plant with an enzyme of the present disclosure may reduce the attractiveness of the plant to an acarid, reduce an acarid's desire/ability to inhabit the plant, inhibit an acarid's desire/ability to feed on the plant, inhibit production of one or more amino acids, degrade one or more amino acids, prevent an acarid from utilizing one or more essential amino acids, produce ammonia in the gut of an acarid, inhibiting the growth of an acarid after it inhabits/feeds on the plant, inhibit the reproduction and/or proliferation of an acarid on/in the plant, degrade one or more structural components of an acarid (e.g. one or more chitins, one or more lipoproteins and/or one or more long chain hydrocarbons) on/in the plant, and/or kill an acarid on/in the plant, thereby reducing one or more symptoms of infestation and/or enhancing one or more characteristics of growth and/or yield in the plant, as compared to an untreated control plant.

[0867] Compositions of the present disclosure may be used to prevent, treat, suppress, eliminate and/or reduce the severity of infestations of/by myriad acarids, including, but not limited to, herbivorous acarids, such as broad mites, bulb mites, cyclamen mites, earth mites, eriophyid mites, Lewis mites, russet mites, rust mites, and spider mites. In some embodiments, enzymes of the present disclosure are used to prevent and/or treat an infestation of a plant or plant part by one or more Auculops, (e.g., A. lycopersici), Calacarus (e.g., C. flagelliseta), Eutetranychus (e.g., E. lewesi), Halotydeus (e.g., H. destructor), Polyphagotarsonemus (e.g., P. latus), Rhizoglyphus, Tarsonemus (e.g., T. pallidus), and/or Tetranychus (e.g., T. cinnabarinus, T. evansi, T. ludeni, T urticae).

[0868] In some embodiments, compositions of the present disclosure are useful for preventing, treating, suppressing, eliminating and/or reducing the severity of bacterial infestations/infections by, for example, inhibiting adhesion of a bacterium to a surface, inhibiting entry of a bacterium into a material, inhibiting habitation by a bacterium, inhibiting the growth of a bacterium, inhibiting the reproduction and/or proliferation of a bacterium, degrading on one or more structural components of a bacterium (e.g. cell wall components, such as peptidoglycans and lipopolysaccharides), killing a bacterium, and/or reducing one or more symptoms of a bacterial infestation/infection. In some embodiments, such inhibition is complete or substantially complete, such that the bacterium fails to inhabit/feed/grow/reproduce/proliferate at a rate effective to initiate and/or sustain an appreciable infestation/infection. For example, spraying a plant with an enzyme of the present disclosure may inhibit a bacterium's ability to adhere to the surface of a plant, inhibit a bacterium's ability to enter into the plant, inhibit a bacterium's ability to inhabit the plant, inhibit growth of a bacterium on/in the plant, inhibit the reproduction and/or proliferation of a bacterium on/in the plant, degrade one or more structural components of a bacterium (e.g. one or more peptidoglycans and/or one or more lipopolysaccharides) on/in the plant, and/or kill a bacterium, thereby reducing one or more symptoms of infestation and/or enhancing one or more characteristics of growth and/or yield in the plant, as compared to an untreated control plant.

[0869] Compositions of the present disclosure may be used to prevent, treat, suppress, eliminate and/or reduce the severity of infestations/infections of/by myriad phytopathogenic bacteria, including, but not limited to, phytopathogenic Erwiniaceae and Xanthomonadales. In some embodiments, enzymes of the present disclosure are used to prevent, treat, suppress, eliminate and/or reduce the severity of an infestation/infection of a plant or plant part by one or more Agrobacterium (e.g., A. rhizogenes, A. tumefaciens, A. vitis), Burkholderia (e.g., B. gladioli), Clostridium, Dickeya (e.g., D. dadantii, D. solani), Erwinia (e.g., E. amylovora, E. aphidicola, E. carotovora, E. chrysanthemi, E. papayae, E. persicina, E. psidii, E. pyrifoliae, E. rhapontici, E. tracheiphila), Pectobacterium (e.g., P. atrosepticum, P. carotovorum), Pseudomonas (e.g., P. agarici, P. amygdali, P. avellanae, P. cannabina, P. caricapapayae, P. cichorii, P. coronafaciens, P. costantinii, P. ficuserectae, P. fuseovaginae, P. helianthin, P. meliae, P. savastanoi, P. syringae, P. tolaasii, P. tomato, P. turbinellae, P. viridiflava), Ralstonia (e.g., R. solanacearum), Xanthomonas (e.g., X. alfalfae, X. ampelina, X. arboricola, X. axonopodia, X. boreopolis, X. badrii, X. bromi, X. campestris, X. cassavae, X. citri, X. cucrurbitae, X cyanopsidis, X. cynarae, X. euvesicatoria, X. frageriae, Xigardneri, X. holcicola, X. hortorum, X. hyacinthi, X maliensis, X. malvacearum, X. manihotis, X. melonis, X. oryzae, X. papavericola, X. perforans, X. phaseoli, X pisi, X. populi, X. sacchari, X. theicola, X translucens, X. vasicola, X. vesicatoria), and/or Xylella (e.g., X. fastidiosa).

[0870] In some embodiments, compositions of the present disclosure are useful for preventing, treating, suppressing, eliminating and/or reducing the severity of fungal infestations/infections by, for example, inhibiting adhesion of a fungus to a surface, inhibiting entry of a fungus into a material, inhibiting habitation by a fungus, inhibiting production of one or more amino acids, degrading one or more amino acids, inhibiting the growth of a fungus, inhibiting the reproduction and/or proliferation of a fungus, degrading on one or more structural components of a fungus (e.g. cell wall components, such as chitins, glucans and mannans, and cell membrane components, such as ergosterols), killing a fungus, and/or reducing one or more symptoms of a fungal infestation/infection. In some embodiments, such inhibition is complete or substantially complete, such that the fungus fails to inhabit/feed/grow/reproduce/proliferate at a rate effective to initiate and/or sustain an appreciable infestation/infection. For example, spraying a plant with an enzyme of the present disclosure may inhibit a fungus' ability to adhere to the surface of a plant, inhibit a fungus' ability to enter into the plant, inhibit a fungus' ability to inhabit the plant, inhibit the ability of a fungus to produce one or more amino acids, degrade one or more amino acids, inhibit growth of a fungus on/in the plant, inhibit the reproduction and/or proliferation of a fungus on/in the plant, degrade one or more structural components of a fungus (e.g. one or more chitins, one or more glucans and/or one or more mannans) on/in the plant, and/or kill a fungus, thereby reducing one or more symptoms of infestation and/or enhancing one or more characteristics of growth and/or yield in the plant, as compared to an untreated control plant.

[0871] Compositions of the present disclosure may be used to prevent, treat, suppress, eliminate and/or reduce the severity of infestations/infections of/by myriad phytopathogenic fungi, including, but not limited to, phytopathogenic Ascomycetes, Basidiomycetes, Chytridiomycota, Deueromycota, Peronosporomycota, Plasmodiophoromycota and Zygomycota, such as blasts, blights, bunts, galls, mildews, molds, rots, rusts, scabs, smuts and wilts. In some embodiments, enzymes of the present disclosure are used to prevent, treat, suppress, eliminate and/or reduce the severity of an infestation/infection of a plant or plant part by one or more Aecidium (e.g., A. aechmantherae, A. amaryllidis, A. breyniae, A. campanulastri, A. cannabis, A. cantensis, A. capsicum, A. foeniculi, A. narcissi), Alternaria (e.g., A. alternata, A. alternantherae, A. arachidis, A. arborescens, A. arbusti, A. blumeae, A. brassicae, A. brassicicola, A. burnsii. A. carotiincultae, A. carthami, A. celosiae, A. cinerariae, A. citri, A. conjuncta, A. cucumerina, A. dauci, A. dianthi, A. dianthicola, A. eichhorniae, A. euphorbiicola, A. gaisen, A. helianthi, A. helianthicola, A. hungarica, A. infectoria, A. japonica, A. leucanthemi, A. linicola, A. longipes, A. mali, A. molesta, A. padwickii, A. panax, A. perpunctulata, A. patroselini, A. porri, A. quericola, A. radicina, A. raphani, A. saponariae, A. selini, A. senecionis, A. smyrnii, A. solani, A. sonchi, A. tenuissima, A. triticina, A. ventricosa, A. zinniae), Ascochyta (e.g., A. asparagina, A. bohemica, A., caricae, A. doronici, A. fabae, A. gossypii, A. graminea, A. hordei, A. humuli, A. medicaginicola, A. pinodes, A. pisi, A. prasadii, A. rabiei, A. rhei, A. sorghi, A. sorghinia, A. spinaciae, A. tarda, A. tritici, A. viciae, A. vindobonensis), Ascospora (e.g., A. ruborum), Aspergillus (e.g., A. aculeatus, A. candidus, A. clavatus, A. fisherianus, A. flavus, A. fumigatus, A. niger. A. parasiticus, A. restrictus, A. sojae, A. solani), Asteroma (e.g., A. caryae), Austropuccinia (e.g., A. psidii), Bipolaris (e.g., B. cactivora, B. cookei, B. incurvata, B. sacchari, B. sorghicola, B. sorokiniana, B. zeae), Blumeria (e.g., B. graminis), Boeremia (e.g., B. lycopersici), Botrytis (e.g., B. allii, B. anthophila, B. cinerea, B. citricola, B. citrina, B. elliptica, B. fabae, B. fabiopsis, B. galanthina, B. gladioli, B. gossypina, B. hormini, B. hyacinthi, B. isabellina, B. latebricola, B. liliorum, B. limacidae, B. luteobrunnea, B. lutescens, B. mali, B. monihoides, B. narcissicola, B. necans, B. paeoniae, B. peronosporoides, B. pistiae, B. platensis, B. pruinosa, B. pseudocinerea, B. pyramidalis, B. rivoltae, B. rosea, B. rubescens, B. rudiculoides, B. sekimotoi, B. septospora, B. setuligera, B. sinoallii, B. sonchina, B. splendida, B. squamosa, B. taxi, B. terrestris, B. tracheiphila, B. trifolii, B. tulipae, B. viciae-hirsutae, B. yuae), Calonectria (e.g., C. ilicicola, C. indusiate, C. kyotensis, C. pteridis, C. pyrochroa, C. quinqueseptata), Camarotella (e.g., C. acrocomiae, C. costaricensis), Candida (e.g., C. albicans), Capnodium (e.g., C. theae), Cephalosporium (e.g., C. gramineum), Ceratocystis (e.g., C. fimbriata), Ceratobasidium (e.g., C. cereale), Cercoseptoria (e.g., C. ocellata), Cercospora (e.g., C. angreci, C. apii, C. apiicola, C. arachidicola, C. asparagi. C. atrofiliformis, C. beticola, C. bolleana, C. brachypus, C. brassicola, C. brunkii, C. canescens, C. cannabis, C. cantuariensis, C. capsici, C. caribaea, C. carotae, C. circumscissa, C. citrulline, C. clemensiae, C. coffeicola, C. coryli, C. corylina, C. eleusine, C. fragariae, C. fuchsiae, C. fusca, C. fusimaculans, C. gerberae, C. halstedii, C. handelii, C. hayi, C. hydrangeae, C. kaki, C. kikuchii, C. lentis, C. liquidambraris, C. longipes, C. longissima, C. malloti, C. mamaonis, C. mangiferae, C. medicaginis, C. melongenae, C. minima, C. minuta, C. musae, C. nicotnanae, C. odontoglossi, C. oryzae, C. papayae, C. penniseti, C. personata, C. piaropi, C. pisa-sativae, C. platanicola, C. puderii, C. pulcherrima, C. rhapidicola, C. rosicola, C. rubrotincta, C. sojina, C. solani, C. solani-tuberosi, C. sorghi, C. theae, C. tuberculans, C. vexans, C. vicosae, C. zeae-maydis, C. zebrina, C. zonata), Cercosporella (e.g., C. rubi), Choanephora (e.g., C. cucurbitarum), Cladosporium (e.g., C. arthropodii, C. brassicae, C. brassicola, C. chrysanthemi, C. citri, C. cladosporioides, C. cucumerinum, C. fulvum, C. gossypiicola, C. herbarum, C. hydrangeae, C. leguminicola, C. musae, C. oncobae, C. orchidis, C. pisi, C. rhododendri, C. salinae, C. spharospermum, C. sorghi, C. syringae, C. syringicola, C. yuccae, C. zeae), Claviceps (e.g., C. africana, C. fusiformis, C. paspali, C. purpurea, C. sorghi, C. zizaniae), Clitocybe (e.g., C. parasitica), Coccidioides (e.g., C. immitus), Cochliobolus (e.g., C. carbonum, C. cymbopogonis, C. hawaiiensis, C. heterostrophus, C. lunatus, C. miyabeanus, C. ravenelii, C. sativus, C. setariae, C. spicifer, C. stenospilus, C. tuberculatus, C. victoriae), Coleosporium (e.g., C. helianthi, C. ipomoeae, C. madiae, C. pacificum, C. tussilaginis), Colletotrichum (e.g., C. acutatum, C. agaves, C. arachidis, C. boninense, C. brasiliense, C. brassicola, C. brevisporum, C. cacao, C. capsici, C. caudatum, C. cereale, C. citri, C. citricola, C. coccodes, C. coffeanum, C. crassipes, C. curcumae, C. dematium, C. derridis, C. destructivum, C. fioriniae, C. fragariae, C. fructi, C. fruticola, C. fructivorum, C. gloeosporioides, C. glycines, C. graminicola, C. gossypii, C. hanaui, C. higginsianum, C. jacksonii, C. kahawae, C. lentis, C. limonicola, C. lindemuthianum, C. lini, C. lupini, C. mangenotii, C. melonis, C. miscanthi, C. musae, C. nicholsonii, C. nigrum, C. orbiculare, C. orchidis, C. paspali, C. pisi, C. pisicola, C. radicis, C. roseum, C. serranegrense, C. sojae, C. spinaceae, C. sublineolum, C. sublineola, C. tabacum, C. trichellum. C. trifolii, C. truncatum, C. zoysiae), Coniella, Coniothecium (e.g., C. chomatosporum), Coniothyrium (e.g., C. henriquesii, C. rosarum, C. wernsdorffiae), Coprinopsis (e.g., C. psychromorbida), Cordana (e.g., C. johnstonii, C. musae), Corticum (e.g., C. theae), Cryphonectria (e.g., C. parasitica), Cylindrocarpon (e.g., C. ianthothele, C. magnusianum, C. musae), Cylindrocladiella (e.g., C. camelliae, C. parva), Cylindrocladium (e.g., C. lanceolatum, C. peruvianum), Cylindrosporium (e.g., C. cannabinum, C. juglandis, C. rubi), Cymadothea (e.g., C. trifolii), Cytospora (e.g, C. palmarum, C. personata, C. sacchari, C. sacculus, C. terebinthi), Cytosporina (e.g., C. ludibunda), Diaporthe (e.g., D. arctii, D. asparagi, D. capsici, D. citri, D. coffeae, D. dulcamarae, D. eres, D. helianthi, D. lagunensis, D. lokoyae, D. melonis, D. musae, D. orthoceras, D. perniciosa, D. phaseolorum, D. rudis, D. tanakae, D. viticola), Diplodia (e.g., D. gossypina), Dreschlera (e.g., D. avenacea, D. campanulata, D. dematioidea, D. gigantea, D. glycines, D. graminea, D. hawaiiensis, D. musae, D. poae, D. teres, D. wirreganensis), Eremothcium (formerly Nematospora) (e.g., E. gossypii), Erysiphe (e.g., E. betae, E. cichoracearum, E. communis, E. cruciferarum, E. flexuosa, E. heraclei, E. necator, E. pisi, E. polygoni, E. robiniae, E. syringae), Exserohilum (e.g., E. oryzicola, E. oryzinum), Fusarium (e.g., F. affine, F arthrosporioides, F avenaceum, F circinatum, F crookwellense, F. culmorum, F. fujikuroi, F. graminearum, F. incarnatum, F. langsethiae, F. mangiferae, F. merismoides, F. moniliforme, F. oxysporum, F. pallidoroseum, F. poae, F proliferatum, F redolens, F. roseum, F. sacchari, F. solani, F. sporotrichioides, F. sterilihyphosum, F. subglutinans, F. sulphureum, F. tricinctum, F. verticillioides, F. virguliforme), Gaeumannomyces (e.g., G. graminis), Geotrichum (e.g., G. candidum), Gibberella (e.g., G. fujikuroi, G. pulicaris, G. stilboides, G. tricincta. G. xvlarioides, G. zeae), Gilbertella (e.g., G. persicaria), Glomerella (e.g., G. cingulata), Gymnosporangium (e.g., G. junmperi-virginianae), Helminthosporium (e.g., H. oryzae, H. solani), Hemileia (e.g., H. coffeicola, H. vastatrix), Laetisaria (e.g., L. fuciformis), Leptosphaeria (e.g., L. acuta, L. asparagi, L. cannabina, L. coffaeicida, L. coniothyrium, L. glyceriae, L. gossypii, L. grisea, L. korrae, L. longispora, L. maculans, L. maydis, L. musae, L. oryzicola, L. oryzina, L. pini, L. platanicola, L. pratensis, L. raphani, L. saccharicola, L. solani, L. solanicola, L. trifolii, L. viciae, L. woroninii, L. zeae, L. zeae-maydis), Macrophomina (e.g., M. phaseolina), Magnaporthe (e.g., M. grisea, M. oryzae, M poae), Melamspora (e.g., M. lini), Microdochium (e.g., M. nivale), Monilinia (e.g., M. fructicola), Mucor (e.g., M. piriformis), Mycosphaerella (e.g., M. fijiensis, M. graminicola, M. tassiana, M zeae-maydis), Neofabraea (e.g., N. malicorticus), Ophiostoma (e.g., O. novo-ulmi, O. ulmi), Paracoccidioides (e.g., P. braziliensis), Penicillium (e.g., P. digitatum, P. expansum, P. italicum, P. rugulosum, P. verrucosum), Phakopsora (e.g., P. gossypii, P. meibomiae, P. pachyrhizi), Phialophora (e.g., P. gregata), Phoma (e.g., P. glycinicola), Phomopsis (e.g., P. asparagi, P. coffeae, P. logicolla, P. mangiferae. P. obscurans, P. perseae, P. purnorum, P. sojae, P. sclerotioides, P. tanakae, P. theae, P. vitcola), Phymatotrichopsis (e.g., P. omnivora), Physalospora (e.g., P. obtusa), Phytomyxea, Pneumocystis (e.g., P. carinii), Podosphaera (e.g., P. oxyacanthae), Pseudocercosporella, Puccinia (e.g., P. asparagi, P. cacahata, P. coronata, P. graminis, P. kuehnii, P. melanocephala, P. porri, P. punctiformis, P. recondita, P. schedonnardii, P. sessilis, P. sorghi, P. striiformis, P. tritici, P. triticina), Pyrenophora (e.g., P. tritici-repentis), Pyricularia (e.g., P. grisea), Rhizoctonia (e.g., R. cerealis, R. solani), Rhizopus (e.g., R. nigricans, R. stolonifer), Rhynchosporium, Sclerotinia (e.g., S. borealis, S. bulborum, S. homoeocarpa, S. libertiana, S. minor, S. ricini, S. sclerotiorum, S. spermophila, S. trifoliorum), Sclerotium (e.g., S. rolfsii), Scopulariopsis (e.g., S. brevicaulis), Septoria (e.g., S. apiicola, S. aciculosa, S. ampelina, S. avenae, S. azalea, S. bataticola, S. campanulae, S. caryae, S. citri, S. cucurbitacearum, S. cytisi, S. dianthi, S. eumusae, fragariae, S. fragariaecola, S. glycines, S. helianthin, S. humuli, S. hydrangea, S. lactucae, S. lycopersici, S. malagutii, S. menthae, S. musiva, S. ostryae, S passerinii, S. pisi, S. pistaciae, S. platanifolia, S rhododendri. S. secais, S. selenophomoides), Sporisorium (e.g., S. scitamineum), Synchytrium (e.g., S. endobioticum), Taphrina (e.g., T. deformans), Thielaviopsis (e.g., T. basicola, T ceremica), Tilletia (e.g., T. barclayana, T. caries, T. controversa, T. foetida, T. indica, T. laevis, T. tritici), Typhula (e.g., T. incarnata, T. ishikariensis), Uncinula, Urocystis (e.g., U. agropyri), Uromyces (e.g., U. melanocephala), Ustilago (e.g., U. esculenta, U. maydis, U. nuda, U. scitaminea, U. striiformis, U. tritici, U. virens), Venturia, Verticillium (e.g., V. alfalfae, V. dahliae, V. isaacii, V. longisporum, V. theobromae, V. zaregamsianum), Waitea (e.g., W. circinata) and/or Zymoseptoria (e.g., Z. tritici). Additional examples of fungi that may be targeted using proteins, formulations, polynucleotides and organisms of the present disclosure may be found in Bradley, Managing Diseases, in Illinois Agronomy Handbook (2008).

[0872] In some embodiments, compositions of the present disclosure are useful for preventing, treating, suppressing, eliminating and/or reducing the severity of oomycete infestations/infections by, for example, inhibiting adhesion of an oomycete to a surface, inhibiting entry of an oomycete into a material, inhibiting habitation by an oomycete, inhibiting production of one or more amino acids, degrading one or more amino acids, inhibiting the growth of an oomycete, inhibiting the reproduction and/or proliferation of an oomycete, degrading on one or more structural components of an oomycete (e.g. cell wall components, such as celluloses and other beta-glucans), killing an oomycete, and/or reducing one or more symptoms of an oomycete infestation/infection. In some embodiments, such inhibition is complete or substantially complete, such that the oomycete fails to inhabit/feed/grow/reproduce/proliferate at a rate effective to initiate and/or sustain an appreciable infestation/infection. For example, spraying a plant with an enzyme of the present disclosure may inhibit an oomycete's ability to adhere to the surface of a plant, inhibit an oomycete's ability to enter into the plant, inhibit an oomycete's ability to inhabit the plant, inhibit production of one or more amino acids, degrade one or more amino acids, inhibit growth of an oomycete on/in the plant, inhibit the reproduction and/or proliferation of an oomycete on/in the plant, degrade one or more structural components of an oomycete (e.g. one or more beta-glucans) on/in the plant, and/or kill an oomycete, thereby reducing one or more symptoms of infestation and/or enhancing one or more characteristics of growth and/or yield in the plant, as compared to an untreated control plant.

[0873] Compositions of the present disclosure may be used to prevent and/or treat infestations/infections of myriad phytopathogenic oomycetes, including, but not limited to, phytopathogenic Albuginaceae, Peronosporaceae and Pythiaceae, such as blights, mildews, molds, root rots and rusts In some embodiments, proteins of the present disclosure are used to prevent, treat, suppress, eliminate and/or reduce the severity of an infestation/infection of a plant or plant part by one or more Achlya, Albugo (e.g., A. candida), Aphanomyces (e.g., A. cochhoides, A. euteiches, A. invadans, A. iridis, A. raphani), Bremia (e.g., B. lactucae), Hyaloperonospora (e.g., H. arabidopsidis), Peronospora (e.g., P. belbahrii, P. destructor, P. effusa, P. farinose, P. fulva, P. lotorum, P. manshurica, P. parasitica, P. potentillae, P. rubi, P. schachtii, P. sparsa, P. tabacina, P. trifolii, P. viciae), Phytophthora (e.g., P. agathidicia, P. boehmeriae, P. cactorum, P. cambivora, P. capsica, P. cinnamomi, P. citricola, P. citrophthora, P. cryptogea, P. drechsleri, P. erythroseptica, P. fragariae, P. heveae, P. infestans, P. kernoviae, P. lateralis, P. megakaryam P. megasperma, P. nicotianae, P. palmivora, P. parasitica, P. ramorum, P. sojae, P. syringae), Plasmopara (e.g., P. halstedii, P. viticola), Pseudeoperonospora (e.g., P. cubensis, P. humuli), Pseudosclerospora (e.g., P. philippinesis, P. sacchari, P. sorghi), Pythium (e.g., P. acanthicum, P. aphanidermatum, P. aristosporum, P. arrhenomanes, P. butleri, P. chondricola, P. citrinum, P. cucurbitacearum, P. debaryanum, P. delicense, P. emineosum, P. graminicola, P. heterothallicum, P. hypogynum, P. insidiosum, P. irregulare, P. iwayamae, P. middletonii, P. myriotylum, P. okanoganense, P. oopapillum, P. paddicum, P. paroecandrum, P. perniciosum, P. porphyrae, P. rostratum, P. scleroteichum, P. spinosum, P. splendens, P. sulcatum, P. tardicrescens, P. tracheiphilum, P. ultimum, P. violae, P. volutum), Saprolegnia (e.g., S. parasitica), Sclerophthora (e.g., S. macrospora, S. rayssiae) and/or Sclerospora (e.g., S. graminicola). Additional examples of fungi that may be targeted using proteins, formulations, polynucleotides and organisms of the present disclosure may be found in Bradley, Managing Diseases, in ILLINOIS AGRONOMY HANDBOOK (2008).

[0874] Compositions of the present disclosure may be particularly useful for preventing, treating, suppressing, eliminating and/or reducing the severity of infestations/infections of/by phytopathogenic fungi and oomycetes, such as Albugo (e.g., A. candida, A. occidentalis), Alternaria (e.g., A. alternata, A. alternantherae, A. arachidis, A. arborescens, A. arbusti, A. blumeae, A. brassicae, A. brassicicola, A. burnsii. A. carotiincultae, A. carthami, A. celosiae, A. cinerariae, A. citri, A. conjuncta, A. cucumerina, A. dauci, A. dianthi, A. dianthicola, A. eichhorniae, A. euphorbi/cola, A. gaisen, A. helianthi, A. hehanthicola, A. hungarica, A. infectoria, A. japonica, A. leucanthemi, A. linicola, A. longipes, A. mali, A. molesta, A. padwickii, A. panax, A. perpunctulata, A. patroselini, A. porri, A. quericola, A. radicina, A. raphani, A. saponariae, A. selini, A. senecionis, A. smyrnii, A. solani, A. sonchi, A. tenuissima, A. triticina, A. ventricosa, A. zinniae), Blumeria (e.g., B. graminis), Botrytis (e.g., B. aclada, B. allii, B. cinerea, B. elliptica, B. fabae, B. squamosa), Ceratocystis (e.g., C. fimbriata), Colletotrichum, Diplodia (e.g., D. gossypina), Erwinia (e.g., E. amylovora, E. aphidicola, E. carotovora, E. chrysanthemi, E. papayae, E. persicina, E. psidii, E. pyrifoliae, E. rhapontici, E. tracheiphila), Fusarium (e.g., F. graminearum, F. oxysporum, F. solani, F. virguliforme), Geotrichum (e.g., G. candidum), Gibberella (e.g., G. fujikuroi, G. pulicaris, G. zeae), Gilbertella (e.g., G. persicaria), Glomerella (e.g., G. cingulata), Hyaloperonospora (e.g., H. arabidopsidis), Macrophomina (e.g., M. phaseolina), Magnaporthe (e.g., M. grisea, M. oryzae), Melampsora (e.g., M. lini), Monilinia (e.g., M. fructicola), Mucor (e.g., M. piriformis), Mycosphaerella (e.g., M. graminicola), Neofabraea (e.g., N. malicorticus), Penicillium (e.g., P. digitatum, P. expansum, P. italicum, P. rugulosum, P. verrucosum), Phakopsora (e.g., P. pachyrhizi), Physalospora (e.g., P. obtusa), Phytophthora (e.g., P. capsici, P. cinnamomi, P. infestans, P. parasitica, P. ramorum, P. sojae), Plasmopara (e.g., P. viticola), Pseudoperonospora (e.g., P. cubensis), Puccinia (e.g., P. asparagi, P. cacahata, P. graminis, P. kuehnii, P. melanocephala, P. porri, P. punctiformis, P. recondita, P. schedonnardii, P. sessilis, P. sorghi, P. striiformis, P. tritici, P. triticina), Pythium (e.g., P. butleri, P. ultimum), Rhizoctonia (e.g., R. solani), Rhizopus (e.g., R. nigricans, R. stolonifer), Sclerotinia (e.g., S. borealis, S. bulborum, S. homoeocarpa, S. libertiana, S. minor, S. ricini, S. sclerotiorum, S. spermophila, S. trifoliorum), Septoria (e.g., S. cucurbitacearum, S. glycines, S. lycospersici), Ustilago (e.g., U. esculenta, U. maydis, U. nuda), Zymoseptoria (e.g., Z. tritici).

[0875] Blast infestations/infections, such as those mediated by Magnaporthe (e.g., M. grisea, M oryzae), may be prevented, treated, suppressed and/or eliminated with myriad compositions of the present disclosure, including, but not limited to, proteins exhibiting one or more activities belonging to EC 1.1.3 (e.g., 1.1.3.4), EC 1.1.99 (e.g., 1.1.99.18), 1.11.1 (e.g., 1.11.1.6), 3.1.1 (e.g., 3.1.1.3), 3.2.1 (e.g., 3.2.1.1, 3.2.1.4, 3.2.1.6, 3.2.1.8, 3.2.1.21), 3.4.11 and/or 3.4.21 (and corresponding formulations, polynucleotides and organisms). In some embodiments, such infestations/infections may be prevented, treated, suppressed and/or eliminated using one or more of SEQ ID NO(s): 1-8, 10-12, 14-15, 17-23, 34-40, 43-46, 48-53, 57, and enzymatically active fragments/mutants/variants thereof. In some embodiments, such infestations/infections may be prevented, treated, suppressed and/or eliminated using a combination of enzymes, such as one or more cellulases, one or more hemicellulases and one or more xylanases; one or more peptidases and one or more proteases; one or more cellulases, one or more glucosidases and one or more xylanases.

[0876] Blight infestations/infections, such as those mediated by Alternaria (e.g., A. alternata, A. carotiincultae, A. panax, A. petroselini, A. solani, A. triticina), Colletotrichum, Fusarium (e.g., F. graminearum), Gibberella (e.g., G. zeae), Phytophthora (e.g., P. capsici, P. infestans, P. ramorum), may be prevented, treated, suppressed and/or eliminated with myriad compositions of the present disclosure, including, but not limited to, proteins exhibiting one or more activities belonging to EC 1.1.3 (e.g., 1.1.3.4), EC 1.1.99 (e.g., 1.1.99.18), 1.10.3 (e.g., 1.10.3.2), 1.11.1 (e.g., 1.11.1.6), 3.1.1 (e.g., 3.1.1.5), 3.2.1 (e.g., 3.2.1.1, 3.2.1.3, 3.2.1.4, 3.2.1.5, 3.2.1.6, 3.2.1.8, 3.2.1.11, 3.2.1.15, 3.2.1.39, 3.2.1.41, 3.2.1.58, 3.2.1.75, 3.2.1.78, 3.2.1.111), 3.4.11 (e.g., 3.4.11.1), 3.4.21 (e.g., 3.4.21.19, 3.4.21.62), 3.4.24 (e.g., 3.4.24.28) and/or 4.2.2 (e.g., 4.2.2.2) (and corresponding formulations, polynucleotides and organisms). In some embodiments, such infestations/infections may be prevented, treated, suppressed and/or eliminated using one or more of SEQ ID NO(s): 1-15, 17-25, 34-55, 57, 61, 65, 68, 80-88, 91, 72144, and enzymatically active fragments/mutants/variants thereof. In some embodiments, such infestations/infections may be prevented, treated, suppressed and/or eliminated using a combination of enzymes, such as two or more cellulases; two or more pectinases; two or more glucanases; two or more peptidases; two or more pectinases; one or more cellulases, one or more hemicellulases and one or more xylanases; one or more glucanses and one or more xylanases; one or more amylases, one or more glucanases and one or more xylanases.

[0877] Blotch infestations/infections, such as those mediated by Mycosphaerella (e.g., M. graminicola) and Zymoseptoria (e.g., Z. tritici) may be prevented, treated, suppressed and/or eliminated with myriad compositions of the present disclosure, including, but not limited to, proteins exhibiting one or more activities belonging to EC 1.1.3 (e.g., 1.1.3.4), EC 1.1.99 (e.g., 1.1.99.18), 1.10.3 (e.g., 1.10.3.2), 1.11.1 (e.g., 1.11.1.6), 3.1.1 (e.g., 3.1.1.5), 3.2.1 (e.g., 3.2.1.1, 3.2.1.3, 3.2.1.6, 3.2.1.8, 3.2.1.11, 3.2.1.15, 3.2.1.39, 3.2.1.41, 3.2.1.58, 3.2.1.75, 3.2.1.78, 3.2.1.101, 3.2.1.109, 3.2.1.110, 3.2.1.112), 3.4.11 (e.g., 3.4.11.1), 3.4.21 (e.g., 3.4.21.62), 3.4.24 (e.g., 3.4.24.28) and/or 4.2.2 (e.g., 4.2.2.2) (and corresponding formulations, polynucleotides and organisms). In some embodiments, such infestations/infections may be prevented, treated, suppressed and/or eliminated using one or more of SEQ ID NO(s): 1-12, 17-24, 34-45, 48-54, 61, 80-81, 83-88, 91, and enzymatically active fragments/mutants/variants thereof. In some embodiments, such infestations/infections may be prevented, treated, suppressed and/or eliminated using a combination of enzymes, such as one or more cellulases, one or more lyases and one or more pectinases; as one or more cellulases, one or more hemicellulases and one or more xylanases; two or more cellulases; two or more glucanases; two or more pectinases; one or more glucanses and one or more xylanases; one or more peptidases and one or more proteases.

[0878] Downy mildew infestations/infections, such as those mediated by Bremia (e.g., B. lactucae), Hyaloperonospora (e.g., H. arabidopsidis, H parasitica), Peronospora (e.g., P. belbahrii, P. destructor, P. effusa, P. farinose, P. fulva, P. lotorum, P. manshurica, P. parasitica, P. potentillae, P. rubi, P. schachtii, P. sparsa, P. tabacina, P. trifolii, P. viciae), Peronosclerospora, Plasmopara (e.g., P. halstedii, P. viticola) and Pseudoperonospora (e.g., P. cubensis, P. humuli), may be prevented, treated, suppressed and/or eliminated with myriad compositions of the present disclosure, including, but not limited to, proteins exhibiting one or more activities belonging to EC 3.2.1. (e.g., 3.2.1.8, 3.2.1.78) and/or 3.4.21 (e.g., 3.4.21.19, 3.4.21.62) (and corresponding formulations, polynucleotides and organisms). In some embodiments, such infestations/infections may be prevented, treated, suppressed and/or eliminated using one or more of SEQ ID NO(s): 48-53, 80-87, and enzymatically active fragments/mutants/variants thereof.

[0879] Powdery mildew infestations/infections, such as those mediated by Blumeria (e.g., B. graminis), Erysiphe (e.g., E. cichoracearum, E. necator), Golovinomyces, Levedlula (e.g., L. taurica), Microsphaera (e.g., M. diffusa), Oidium, Phyllactinia, Podosphaera (e.g., P. aphanis, P. leucotricha, P. pannosa, P. xanthii), Sphaerotheca and Uncinula, may be prevented, treated, suppressed and/or eliminated with myriad compositions of the present disclosure, including, but not limited to, proteins exhibiting one or more activities belonging to EC 1.1.3 (e.g., 1.1.3.4), EC 1.11.1 (e.g., 1.11.1.6), 3.2.1 (e.g., 3.2.1.8, 3.2.15) and/or 3.4.21 (and corresponding formulations, polynucleotides and organisms). In some embodiments, such infestations/infections may be prevented, treated, suppressed and/or eliminated using one or more of SEQ ID NO(s): 1-5, 10-12, 48-53, 80-81, and enzymatically active fragments/mutants/variants thereof. In some embodiments, such infestations/infections may be prevented, treated, suppressed and/or eliminated using a combination of enzymes, such as two or more pectinases.

[0880] Mold infestations/infections, such as those mediated by Botrytis (e.g., B. cinerea, B. elliptica), Penicillium (e.g., P. digitatum), Phytophthora (e.g., P. capsici, P. cinnamomi, P. ramorum, P. sojae), may be prevented, treated, suppressed and/or eliminated with myriad compositions of the present disclosure, including, but not limited to, proteins exhibiting one or more activities belonging to EC 1.1.3 (e.g., 1.1.3.4), EC 1.1.99 (e.g., 1.1.99.18), 1.10.3 (e.g., 1.10.3.2), 1.11.1 (e.g., 1.11.1.6, 1.11.1.7), EC 1.14.99 (e.g., 1.14.99.56), EC 3.1.1 (e.g., 3.1.1.3, 3.1.1.5, 3.1.1.32), 3.2.1 (e.g., 3.2.1.1, 3.2.1.3, 3.2.1.4, 3.2.1.5, 3.2.1.6, 3.2.1.8, 3.2.1.11, 3.2.1.15, 3.2.1.17, 3.2.1.21, 3.2.1.24, 3.2.1.39, 3.2.1.41, 3.2.1.59, 3.2.1.75, 3.2.1.78, 3.2.1.101, 3.2.1.109, 3.2.1.110, 3.2.1.111, 3.2.1.112, 3.2.1.130, 3.2.1.133, 3.2.1.163, 3.2.1.198), 3.4.11 (e.g., 3.4.11.1), 3.4.21 (e.g., 3.4.21.62), 3.4.24 (e.g., 3.4.24.28) and/or 4.2.2 (e.g., 4.2.2.2) (and corresponding formulations, polynucleotides and organisms). In some embodiments, such infestations/infections may be prevented, treated, suppressed and/or eliminated using one or more of SEQ ID NO(s): 1-15, 17-24, 34-46, 48-54, 57-64, 68-69, 76-81, 83-88, 91, 45906, 72144, and enzymatically active fragments/mutants/variants thereof. In some embodiments, such infestations/infections may be prevented, treated, suppressed and/or eliminated using a combination of enzymes, such as two or more cellulases; two or more pectinases; one or more cellulases, one or more hemicellulases and one or more xylanases; one or more peptidases and one or more proteases; one or more amylases, one or more glucanases and one or more bacillolysins; one or more cellulases, one or more hemicellulases and one or more xylanases; two or more peptidases; one or more glucanses and one or more xylanases; one or more peptidases and one or more proteases; one or more cellulases, one or more glucosidases and one or more xylanases; one or more cellulases, one or more furanosidases and one or more xylanases.

[0881] Crown/fruit/root/stem rot infestations/infections, such as those mediated by Colletotrichum, Fusarium (e.g., F. solani, F. virguliforme), Phytophthora (e.g., P. capsica, P. cinnamomi, P. nicotianae, P. parasitica, P. sojae), Pythium (e.g., P. graminicola, P. ultimum), Saprolegnia (e.g., S. parasitica), may be prevented, treated, suppressed and/or eliminated with myriad compositions of the present disclosure, including, but not limited to, proteins exhibiting one or more activities belonging to EC 1.1.3 (e.g., 1.1.3.4), EC 1.1.99 (e.g., 1.1.99.18), 1.11.1 (e.g., 1.11.1.6), 3.2.1 (e.g., 3.2.1.6, 3.2.1.8, 3.2.1.11, 3.2.1.39, 3.2.1.58, 3.2.1.75, 3.2.1.109, 3.2.1.110, 3.2.1.111) and/or 3.4.21 (e.g., 3.4.21.19) (and corresponding formulations, polynucleotides and organisms). In some embodiments, such infestations/infections may be prevented, treated, suppressed and/or eliminated using one or more of SEQ ID NO(s): 1-13, 24, 34-41, 46, 48-54, 61, 78, 80-88, and enzymatically active fragments/mutants/variants thereof. In some embodiments, such infestations/infections may be prevented, treated, suppressed and/or eliminated using a combination of enzymes, such as two or more cellulases; two or more pectinases; two or more glucanases; two or more peptidases; one or more amylases, one or more glucanases and one or more bacillolysins; one or more cellulases, one or more lyases and one or more pectinases; one or more cellulases, one or more hemicellulases and one or more xylanases; one or more glucanses and one or more xylanases; one or more peptidases and one or more proteases.

[0882] Rust infestations/infections, such as those mediated by Albugo (e.g., A. candida, A. occidentalis), Hemileia (e.g., H. coffeicola, H. vastatrix), Melamspora (e.g., M. lini), Phakopsora (e.g., P. meibomiae, P. pachyrhizi), Puccinia (e.g., P. asparagi, P. cacahata, P. graminis, P. kuehnii, P. melanocephala, P. porri, P. punctiformis, P. recondita, P. schedonnardii, P. sessilis, P. sorghi, P. striiformis, P. tritici, P. triticina) and Uromyces (e.g., U. appendiculatus), may be prevented and/or treated with myriad compositions of the present disclosure, including, but not limited to, proteins exhibiting one or more activities belonging to EC 1.1.3 (e.g., 1.1.3.4), 1.10.3 (e.g., 1.10.3.2), 3.1.1 (e.g., 3.1.1.5), 3.2.1 (e.g., 3.2.1.1, 3.2.1.3, 3.2.1.4, 3.2.1.5, 3.2.1.6, 3.2.1.8, 3.2.1.15, 3.2.1.41, 3.2.1.58, 3.2.1.78), 3.4.11 (e.g., 3.4.11.1), 3.4.21 (e.g., 3.4.21.19, 3.4.21.62) and/or 3.4.24 (e.g., 3.4.24.28) (and corresponding formulations, polynucleotides and organisms). In some embodiments, such infestations/infections may be prevented, treated, suppressed and/or eliminated using one or more of SEQ ID NO(s): 1-5, 9, 24, 34-46, 48-53, 61, 68, 80-88, 72144, and enzymatically active fragments/mutants/variants thereof. In some embodiments, such infestations/infections may be prevented, treated, suppressed and/or eliminated using a combination of enzymes, such as two or more glucanases; one or more peptidases and one or more proteases; and one or more amylases, one or more glucanases and one or more bacillolysins

[0883] Wilt infestations/infections, such as those mediated by Fusarium (e.g., F. oxysporum,), Phytophthora (e.g., P. capsici, P. infestans, P. ramorum), may be prevented, treated, suppressed and/or eliminated with myriad compositions of the present disclosure, including, but not limited to, proteins exhibiting one or more activities belonging to EC 1.1.3 (e.g., 1.1.3.4), EC 1.1.99 (e.g., 1.1.99.18), 1.10.3 (e.g., 1.10.3.2), 1.11.1 (e.g., 1.11.1.6), 3.1.1 (e.g., 3.1.1.5), 3.2.1 (e.g., 3.2.1.1, 3.2.1.3, 3.2.1.4, 3.2.1.5, 3.2.1.6, 3.2.1.8, 3.2.1.11, 3.2.1.15, 3.2.1.39, 3.2.1.41, 3.2.1.58, 3.2.1.75, 3.2.1.78, 3.2.1.111), 3.4.11 (e.g., 3.4.11.1), 3.4.21 (e.g., 3.4.21.19, 3.4.21.62) and/or 3.4.24 (e.g., 3.4.24.28) (and corresponding formulations, polynucleotides and organisms). In some embodiments, such infestations/infections may be prevented, treated, suppressed and/or eliminated using one or more of SEQ ID NO(s): 1-15, 17-24, 34-46, 48-55, 57, 68, 80-88, 72144, and enzymatically active fragments/mutants/variants thereof. In some embodiments, such infestations/infections may be prevented, treated, suppressed and/or eliminated using a combination of enzymes, such as two or more cellulases; two or more pectinases; two or more glucanases; two or more peptidases; two or more pectinases; one or more cellulases, one or more hemicellulases and one or more xylanases; one or more glucanases and one or more xylanases; one or more amylases, one or more glucanases and one or more xylanases.

[0884] In some embodiments, compositions of the present disclosure are useful for preventing, treating, suppressing, eliminating and/or reducing the severity of gastropod infestations by, for example, reducing attraction of a gastropod to a surface, inhibiting inhabitation by a gastropod, inhibiting feeding of a gastropod, inhibiting the growth of a gastropod, inhibiting the reproduction and/or proliferation of a gastropod, degrading on one or more structural components of a gastropod, killing a gastropod, and/or reducing one or more symptoms of a gastropod infestation. In some embodiments, such inhibition is complete or substantially complete, such that the gastropod fails to inhabit/feed/grow/reproduce/proliferate at a rate effective to initiate and/or sustain an appreciable infestation. For example, spraying a plant with an enzyme of the present disclosure may reduce the attractiveness of the plant to a gastropod, reduce a gastropod's desire/ability to inhabit the plant, inhibit a gastropod's desire/ability to feed on the plant, inhibiting the growth of a gastropod after it inhabits/feeds on the plant, inhibit the reproduction and/or proliferation of a gastropod on/in the plant, degrade one or more structural components of a gastropod on/in the plant, and/or kill a gastropod, thereby reducing one or more symptoms of infestation and/or enhancing one or more characteristics of growth and/or yield in the plant, as compared to an untreated control plant.

[0885] Compositions of the present disclosure may be used to prevent, treat, suppress, eliminate and/or reduce the severity of infestations of/by myriad gastropods, including, but not limited to, slugs and snails.

[0886] In some embodiments, compositions of the present disclosure are useful for preventing, treating, suppressing, eliminating and/or reducing the severity of insect infestations by, for example, reducing attraction of an insect to a surface, inhibiting entry of an insect into a material, inhibiting inhabitation by an insect, inhibiting feeding of an insect, inhibiting production of one or more amino acids, degrading one or more amino acids, preventing an insect from utilizing one or more essential amino acids, producing ammonia in the gut of an insect, inhibiting the growth of an insect, inhibiting the reproduction and/or proliferation of an insect, degrading on one or more structural components of an insect (e.g. procuticle components, such as chitin, and epicuticle components, such as lipoproteins, hydrocarbons, polyphenols and esters of fatty acids and alcohols), killing an insect, and/or reducing one or more symptoms of an insect infestation. In some embodiments, such inhibition is complete or substantially complete, such that the insect fails to inhabit/feed/grow/reproduce/proliferate at a rate effective to initiate and/or sustain an appreciable infestation. For example, spraying a plant with an enzyme of the present disclosure may reduce the attractiveness of the plant to an insect, reduce an insect's desire/ability to inhabit the plant, inhibit an insect's desire/ability to feed on the plant, inhibit production of one or more amino acids, degrade one or more amino acids, prevent an insect from utilizing one or more essential amino acids, produce ammonia in the gut of an insect, inhibit the growth of an insect after it inhabits/feeds on the plant, inhibit the reproduction and/or proliferation of an insect on/in the plant, degrade one or more structural components of an insect (e.g. one or more chitins, one or more lipoproteins and/or one or more long chain hydrocarbons) on/in the plant, and/or kill an insect, thereby reducing one or more symptoms of infestation and/or enhancing one or more characteristics of growth and/or yield in the plant, as compared to an untreated control plant.

[0887] Compositions of the present disclosure may be used to prevent and/or treat infestations of myriad insects, including, but not limited to, Coleoptera, Dermaptera, Diptera, Hemiptera, Homoptera, Hymenoptera, Lepidoptera, Orthoptera and Thysanoptera, such as aphids, armyworms, beetles, bollworms, bugs, caterpillars, cutworms, flies, moths and thrips. In some embodiments, enzymes of the present disclosure are used to prevent, treat, suppress, eliminate and/or reduce the severity of an infestation of by one or more Acalymma, Acanthaoscelides (e.g., A. obtectus,), Anasa (e.g., A. tristis), Anastrepha (e.g., A. ludens), Anoplophora (e.g., A. glabripennis), Anthonomus (e.g., A. eugenii), Acyrthosiphon (e.g., A. pisum), Aphis (e.g., A. gossypii), Aulacorthum (e.g., A. solani), Bactrocera (e.g., B. dosalis), Bemisia (e.g., B. argentifolii, B. tabaci), Brevicoryne (e.g., B. brassicae), Bruchidius (e.g., B. atrolineatus), Bruchus (e.g., B. atomarius, B. dentipes, B. lentis, B. pisorum and/or B. rufipes), Callosobruchus (e.g., C. chinensis, C. maculatus, C. rhodesianus, C. subinnotatus, C. theobromae), Caryedon (e.g., C. serratus), Cassadinae, Ceratitis (e.g., C. capitata), Chrysomelinae, Circuhifer (e.g., C. tenellus), Criocerinae, Cryptocephalinae, Cryptolestes (e.g., C. ferrugineus, C. pusillis, C. pussilloides), Cylas (e.g., C. formicarius), Delia (e.g., D. antiqua), Diabrotica, Diaphania (e.g., D. nitidalis), Diaphorina (e.g., D. citri), Donaciinae, Ephestia (e.g, E. cautella, E. elutella, E., keuhniella), Epilachna (e.g., F. varivestris), Epiphyas (e.g., F. postvittana), Fumolpinae, Galerucinae, Helicoverpa (e.g., H. zea), Heteroligus (e.g., H. meles), Iobesia (e.g., I. botrana), Lamprosomatinae, Lasioderma (e.g., L. serricorne), Leptinotarsa (e.g., L. decemLineata), Leptoglossus, Liriomyza (e.g., L. trifolii), Macrosiphoniella (e.g., M. sanborni), Macrosiphum (e.g., M. euphorbiae), Manducca, Melanoprus (e.g., M. bivitattus, M. differntiahs, M. femurrubrum), Melittia (e.g., M. cucurbitae), Myzus (e.g., M. persicae), Nezara (e.g., N. viridula), Orzaephilus (e.g., O. merator, O. surinamensis), Ostrinia (e.g., O. nubila/is), Phthorimaea (e.g., P. operculella), Pieris (e.g., P. rapae), Plodia (e.g., P. interpunctella), Plutella (e.g., P. xylostella), Popillia (e.g., P. japonica), Prostephanus (e.g., P. truncates), Psila, Rhizopertha (e.g., R. dominica), Rhopalosiphum (e.g., R. maidis), Sagrinae, Solenopsis (e.g., S. Invicta), Spilopyrinae, Sitophilus (e.g., S. granaries, S. oryzae and/or S. zeamais), Sitotroga (e.g., S. cerealella), Spodoptera (e.g., S. frugiperda), Slegobium (e.g., S. paniceum), Synetinae, Tenebrio (e.g., T. malens and/or T. molitor), Thrips (e.g., T. tabaci), Trialeurodes (e.g., T. vaporariorum), Tribolium (e.g., T. castaneum and/or T. confusum), Trichoplusia (e.g., T. ni), Trogoderma (e.g., T. granarium) and/or Trogossitidae (e.g., T. mauritanicus). Additional species of insects that may be targeted using enzymes, formulations, polynucleotides and organisms of the present disclosure may be found in CAPINERA, HANDBOOK OF VEGETABLE PESTS (2001) and Steffey and Gray, Managing Insect Pests, in ILLINOIS AGRONOMY HANDBOOK (2008).

[0888] Compositions of the present disclosure may be particularly useful for preventing, treating, suppressing, eliminating and/or reducing the severity of infestations/infections of/by leaf-eating insects, such as aphids, beetles, grasshoppers, leaf-eating larvae, locusts, thrips and weevils.

[0889] Leaf-eating insect infestations/infections, such as those mediated by leaf-eating larvae, may be prevented, treated, suppressed and/or eliminated with myriad compositions of the present disclosure, including, but not limited to, proteins exhibiting one or more activities belonging to EC 2.3.2 (e.g., 2.3.2.2), EC 3.1.1 (e.g., EC 3.1.1.3, EC 3.1.1.74), EC 3.2.1 (e.g., EC 3.2.1.24, EC 3.2.1.130, EC 3.2.1.163, EC 3.2.1.198), EC 3.5.1 (e.g., EC 3.5.1.1, EC 3.5.1.2, EC 3.5.1.33, EC 3.5.1.35) and EC 3.5.4 (e.g., EC 3.5.4.1, EC 3.5.4.2, EC 3.5.4.3, EC 3.5.4.4) (and corresponding formulations, polynucleotides and organisms). In some embodiments, such infestations/infections may be prevented, treated, suppressed and/or eliminated using one or more of SEQ ID NO(s): 16, 17-23, 27-31, 58, 76-77, 79, 89-90, 72147, 72149 and enzymatically active fragments/mutants/variants thereof. In some embodiments, such infestations/infections may be prevented, treated, suppressed and/or eliminated using a combination of enzymes, such as two or more amidases; two or more aminoacyltransferases; two or more asparaginases; two or more cutinases; two or more glutaminases; two or more mannanases; two or more mannosidases; two or more triacylglycerol lipases; one amidase and one aminoacyltransferase.

[0890] In some embodiments, compositions of the present disclosure are useful for preventing, treating, suppressing, eliminating and/or reducing the severity of nematode infestations/infections by, for example, inhibiting adhesion of a nematode to a surface, inhibiting entry of a nematode into a material, inhibiting habitation by a nematode, inhibiting production of one or more amino acids, degrading one or more amino acids, preventing a nematode from utilizing one or more essential amino acids, inhibiting the growth of a nematode, inhibiting the reproduction and/or proliferation of a nematode, degrading on one or more structural components of a nematode (e.g. cuticle components, such as collagens, cuticlins, glycoproteins and lipids), killing a nematode, and/or reducing one or more symptoms of a nematode infestation/infection. In some embodiments, such inhibition is complete or substantially complete, such that the nematode fails to inhabit/feed/grow/reproduce/proliferate at a rate effective to initiate and/or sustain an appreciable infestation/infection. For example, spraying a plant with an enzyme of the present disclosure may inhibit a nematode's ability to adhere to the surface of a plant, inhibit a nematode's ability to enter into the plant, inhibit a nematode's ability to inhabit the plant, inhibit growth of a nematode on/in the plant, inhibit the reproduction and/or proliferation of a nematode on/in the plant, degrade one or more structural components of a nematode (e.g., one or more collagens, one or more cuticlins, one or more glycoproteins and/or one or more lipids) on/in the plant, and/or kill a nematode, thereby reducing one or more symptoms of infestation and/or enhancing one or more characteristics of growth and/or yield in the plant, as compared to an untreated control plant.

[0891] Compositions of the present disclosure may be used to prevent, treat, suppress, eliminate and/or reduce the severity of infestations/infections of/by myriad phytopathogenic nematodes, including, but not limited to, root-knot nematodes, cyst nematodes, burrowing nematodes, root lesion nematodes, wilt nematodes and reniform nematodes. In some embodiments, enzymes of the present disclosure are used to prevent, treat, suppress, eliminate and/or reduce the severity of an infestation/infection of a plant or plant part by one or more Meloidogyne (e.g., M. arenaria, M. graminicola, M hapla, M. incognita, M. javanica), Globodera (e.g., G. pallida, G. rostochiensis), Heterodera (e.g., H. avenae, H. fzlipjevi, H. glycines, H. schachtii), Pratylenchus (e.g., P. penetrans, P. thornei, P. neglectus, P. zae, P. vulnus, P. coffeae), Radopholus (e.g., R. similis), Ditylenchus (e.g., D. dipsaci, D. angustus, D. desctructor, D. africanus, D. myceliophagus, D. gigas), Bursaphelenchus (e.g., B. xylophilus, B. mucronatus), Rotylenchus (e.g., R. renformis, R. parvus), Xiphinema (e.g., X. index. X italiae, X. viuttenezi, X. diversicaudatun), and/or Nacobbus (e.g., N. aberrans). Additional examples of nematodes that may be targeted by enzymes, formulations, polynucleotides and organisms of the present disclosure may be found in CAPINERA, HANDBOOK OF VEGETABLE PESTS (2001) and Niblack, Nematodes, in ILLINOIS AGRONOMY HANDBOOK (2008)

[0892] The present disclosure thus extends to methods of using compositions of the present disclosure (e.g., proteins, formulations, polynucleotides and organisms of the present disclosure) for a) preventing, treating, suppressing and/or eliminating infestations/infections of/by various pests, including, but not limited to, phytopathogenic pests, such as acarids, bacteria, fungi, gastropods, insects, nematodes, oomycetes, protozoa, viruses and weeds; b) treating surfaces/substances that are susceptible to infestation/infection by pests; c) cleansing surfaces/substances that are infested/infected by pests; d) reducing one or more aspects of disease severity in plants and plant parts affected directly or indirectly by one or more phytopathogenic pests; e) enhancing the environments in which plants are grown; f) improving nutrient availability in plant growth media, optionally boron, calcium, carbon, copper, iron, magnesium, manganese, molybdenum, nitrogen, phosphorous, potassium, sulfur and/or zinc availability; g) improving nutrient uptake and/or accumulation by a plant or plant part, optionally boron, calcium, carbon, copper, iron, magnesium, manganese, molybdenum, nitrogen, phosphorous, potassium, sulfur and/or zinc uptake/accumulation; h) reducing the amounts of exogenous fertilizer needed to achieve a desired result (e.g., the amount of exogenous nitrogen and/or phosphorous required to produce X kilograms of harvested plant material on a given parcel of land); i) improving one or more characteristics of plant growth and/or development; j) improving one or more characteristics of plant yield; k) prolonging the shelf-life of harvested plants and plant parts; l) delaying the ripening of a plant or plant part; m) hastening the ripening of a plant or plant part; n) improving the efficacy of one or more biological pesticides; o) preventing, treating, suppressing and/or eliminating biological-pesticide-induced pest resistance; p) preventing, treating, suppressing and/or eliminating biological-pesticide-induced phytotoxicity; q) improving the efficacy of one or more chemical pesticides; r) preventing, treating, suppressing and/or eliminating chemical-pesticide-induced pest resistance; and/or s) preventing, treating, suppressing and/or eliminating chemical-pesticide-induced phytotoxicity.

[0893] In some embodiments, a protein that exhibits one or more oxidoreductase activities belonging to EC 1—for example, one or more oxidase activities belonging to EC 1.1.3 (e.g., glucose oxidase activity belonging to EC 1.1.3.4, hexose oxidase activity belonging to EC 3.1.1.5, galactose oxidase activity belonging to EC 1.1.3.9), EC 1.1.99 (e.g., cellobiose oxidase activity belonging to EC 1.1.99.18), EC 1.4.3 (e.g., D-aspartate oxidase activity belonging to EC 1.4.3.1, L-amino acid oxidase activity belonging to EC 1.4.3.2, D-amino acid oxidase activity belonging to EC 1.4.3.3, D-glutamate oxidase activity belonging to EC 1.4.3.7, L-glutamate oxidase activity belonging to EC 1.4.3.11, cyclohexylamine oxidase activity belonging to EC 1.4.3.12, protein-lysine 6-oxidase activity belonging to EC 1.4.3.13, L-lysine oxidase activity belonging to EC 1.4.3.14, D-glutamate(D-aspartate) oxidase activity belonging to EC 1.4.3.15, L-aspartate oxidase activity belonging to EC 1.4.3.16, glycine oxidase activity belonging to EC 1.4.3.19, L-lysine 6-oxidase activity belonging to EC 1.4.3.20, L-arginine oxidase activity belonging to EC 1.4.3.25), EC 1.10.3 (e.g., laccase activity belonging to EC 1.10.3.2), EC 1.11.1 (e.g., catalase activity belonging to EC 1.11.1.6, peroxidase activity belonging to EC 1.11.1.7, lignin peroxidase activity belonging to EC 1.11.1.14), EC 1.14.16 (e.g., phenylalanine 4-monooxygenase activity belonging to EC 1.14.16.1, tyrosine 3-monooxygenase activity belonging to EC 1.14.16.2, tryptophan 5-monooxygenase activity belonging to EC 1.14.16.4, phenylalanine 3-monooxygenase activity belonging to EC 1.14.16.7), EC 1.14.18 (e.g., tyrosinase activity belonging to EC 1.14.18.1) and/or EC 1.14.99 (e.g., lytic chitin monooxygenase activity belonging to EC 1.14.99.53, lytic cellulose monooxygenase activity belonging to EC 1.14.99.54, lytic starch monooxygenase activity belonging to EC 1.14.99.55, lytic cellulose monooxygenase activity belonging to EC 1.14.99.56, lytic cellulose monooxygenase activity belonging to EC 1.14.99.56)—or a corresponding formulation, polynucleotide, or organism, optionally a protein comprising, consisting essentially of, or consisting of an amino acid sequence that is about/at least 60, 61, 62, 63, 64, 65, 66, 67, 68, 69, 70, 71, 72, 73, 74, 75, 76, 77, 78, 79, 80, 81, 82, 83, 84, 85, 86, 87, 88, 89, 90, 91, 92, 93, 94, 95, 96, 97, 98, 99 or 100% identical to one or more of the amino acid sequences set forth herein as SEQ TD NO(s): 1-15 or a functional fragment/mutant/variant thereof (or a corresponding formulation, polynucleotide, or organism) is applied to a plant growth medium, plant, plant part (e.g., a seed), or agricultural/floricultural//horticultural/silvicultural apparatus/facility (e.g., an apparatus/facility for planting, irrigating, fertilizing, growing, monitoring, testing, harvesting, processing, packaging and/or storing a plant or plant part, such as a cultivator, seed container, seeder, planting pot, hydroponic growth system, growth chamber, greenhouse, laboratory, broadcaster, fertilization drill, fertilizer spreader, irrigation system, harvesting apparatus, postharvest storage container, postharvest treatment chamber, or postharvest shipping container) in an amount/concentration effective to a) prevent, treat, suppress and/or eliminate infestation/infection of said plant growth medium, plant, plant part or agricultural/floricultural/horticultural/silvicultural apparatus/facility o/by one or more phytopathogenic pests; b) cleanse said plant growth medium, plant, plant part, or agricultural/floricultural/horticultural/silvicultural apparatus/facility of one or more pest(s); c) prevent, treat, suppress and/or eliminate infestation/infection of a plant grown in said plant growth medium; d) reduce one or more aspects of disease severity in a plant grown in said plant growth medium; e) reduce one or more aspects of disease severity in said plant or plant part; f) prevent, treat, suppress and/or eliminate infestation/infection of a plant or plant part grown in or contacted by said agricultural/floricultural/horticultural/silvicultural apparatus/facility; g) reduce one or more aspects of disease severity in a plant or plant part grown in or contacted by said agricultural/floricultural/horticultural/silvicultural apparatus/facility; h) enhance one or more growth and/or development characteristics of a plant grown in said plant growth medium; i) enhance one or more growth and/or development characteristics of said plant or plant part; j) enhance one or more growth and/or development characteristics of a plant grown in or contacted by said agricultural/floricultural/horticultural/silvicultural apparatus/facility; k) enhance one or more yield characteristics of a plant grown in said plant growth medium; l) enhance one or more yield characteristics in said plant or plant part; m) enhance one or more yield characteristics of a plant grown in or contacted by said agricultural/floricultural/horticultural/silvicultural apparatus/facility; n) enhance the availability of one or more nutrients in said plant growth medium for uptake and/or accumulation by a plant grown therein, optionally boron, calcium, carbon, copper, iron, magnesium, manganese, molybdenum, nitrogen, phosphorous, potassium, sulfur and/or zinc; o) enhance uptake and/or accumulation of one or more nutrients by said plant or plant part, optionally boron, calcium, carbon, copper, iron, magnesium, manganese, molybdenum, nitrogen, phosphorous, potassium, sulfur and/or zinc; p) reduce the amount(s) of exogenous fertilizer needed to achieve a desired result (e.g., the amount of exogenous nitrogen and/or phosphorous required to produce X kilograms of harvested plant material); q) prolong the shelf-life of a plant grown in said plant growth medium; r) prolong the shelf-life of said plant or plant part; s) prolong the shelf-life of a plant grown in or contacted by said agricultural/floricultural/horticultural/silvicultural apparatus/facility; t) delay the ripening of a plant grown in said plant growth medium; u) delay the ripening of said plant or plant part; v) delay the ripening of a plant grown in or contacted by said agricultural/floricultural/horticultural/silvicultural apparatus/facility; w) hasten the ripening of a plant grown in said plant growth medium; x) hastening the ripening of a plant or plant part; y) hasten the ripening of a plant grown in or contacted by said agricultural/floricultural/horticultural/silvicultural apparatus/facility; z) improve the efficacy of a biological pesticide that is applied to said plant, plant part, plant growth medium or agricultural/floricultural/horticultural/silvicultural apparatus/facility prior to, concurrently with, or after application of said protein (or corresponding formulation, polynucleotide, or organism); aa) prevent, treat, suppress and/or eliminate biological-pesticide-induced pest resistance of a plant grown in said plant growth medium; bb) prevent, treat, suppress and/or eliminate biological-pesticide-induced pest resistance of a plant grown in or contacted by said agricultural/floricultural/horticultural/silvicultural apparatus/facility; cc) improve the efficacy of a chemical pesticide that is applied to said plant, plant part, plant growth medium or agricultural/floricultural/horticultural/silvicultural apparatus/facility prior to, concurrently with, or after application of said protein (or corresponding formulation, polynucleotide, or organism); dd) prevent, treat, suppress and/or eliminate chemical-pesticide-induced pest resistance of a plant grown in said plant growth medium; and/or cc) prevent, treat, suppress and/or eliminate chemical-pesticide-induced pest resistance of a plant grown in or contacted by said agricultural/floricultural/horticultural/silvicultural apparatus/facility.

[0894] In some embodiments, the protein is selected from the group consisting of:
[0895] a) a polypeptide having about/at least 60, 61, 62, 63, 64, 65, 66, 67, 68, 69, 70, 71, 72, 73, 74, 75, 76, 77, 78, 79, 80, 81, 82, 83, 84, 85, 86, 87, 88, 89, 90, 91, 92, 93, 94, 95, 96, 97, 98, 99 or 100% sequence identity to one or more of SEQ ID NO(s): 1-15;
[0896] b) a polypeptide having about/at least 60, 61, 62, 63, 64, 65, 66, 67, 68, 69, 70, 71, 72, 73, 74, 75, 76, 77, 78, 79, 80, 81, 82, 83, 84, 85, 86, 87, 88, 89, 90, 91, 92, 93, 94, 95, 96, 97, 98, 99 or 100% sequence identity to a mature polypeptide of any one of SEQ ID NO(s): 1-15;
[0897] c) a polypeptide encoded by a polynucleotide having about/at least 60, 61, 62, 63, 64, 65, 66, 67, 68, 69, 70, 71, 72, 73, 74, 75, 76, 77, 78, 79, 80, 81, 82, 83, 84, 85, 86, 87, 88, 89, 90, 91, 92, 93, 94, 95, 96, 97, 98, 99 or 100% sequence identity to one or more of SEQ ID NO(s): 92-106 or the cDNA sequence thereof;
[0898] d) a polypeptide derived from any one of SEQ ID NO(s): 1-15 by substitution, deletion, or insertion of one or more amino acids;
[0899] e) a polypeptide derived from a mature polypeptide of any one of SEQ ID NO(s): 1-15 by substitution, deletion, or insertion of one or more amino acids;
[0900] f) a polypeptide derived from the polypeptide of any one of a) through e) wherein the N- and/or C-terminal end has been extended by the addition of one or more amino acids; and
[0901] g) a fragment of the polypeptide of any one of a) through f)
   wherein the polypeptide exhibits one or more oxidoreductase activities.

[0902] In some embodiments, a protein exhibiting activity belonging to EC 1.1 for example, a protein exhibiting activity belonging to EC 1.1.3 (e.g., EC 1.1.3.4) or EC 1.1.99 (e.g., EC 1.1.99.18)—or a corresponding formulation, polynucleotide, or organism is used to prevent, treat, suppress, eliminate and/or reduce the severity of an infestation/infection of a plant or plant part of/by one or more Blumeria (e.g., B. graminis), Botrytis (e.g., B. cinerea), Fusarium (e.g., F. graminearum, F. oxysporum, F. virgulibforme), Magnaporthe (e.g., M. grisea, M. oryzae), Penicillium (e.g., P. digitatum, P. expansum, P. italicum, P. rugulosum, P. verrucosum), Phakopsora (e.g., P. pachyrhizi), Phytophthora (e.g., P. capsici, P. cinnamomi, P. infestans, P. parasitica, P. ramorum, P. sojae), Puccinia (e.g., P. striiformis) and Zymoseptoria (e.g., Z. tritici). For example, an oxidoreductase, optionally a protein comprising, consisting essentially of or consisting of an amino acid sequence that is about/at least 60, 61, 62, 63, 64, 65, 66, 67, 68, 69, 70, 71, 72, 73, 74, 75, 76, 77, 78, 79, 80, 81, 82, 83, 84, 85, 86, 87, 88, 89, 90, 91, 92, 93, 94, 95, 96, 97, 98, 99 or 100% identical to one or more of the amino acid sequences set forth herein as SEQ ID NO(s): 1-8, (or a corresponding formulation, polynucleotide, or organism) may be applied to a plant or plant part to prevent, treat, suppress, eliminate and/or reducing the severity of such infestations/infections.

[0903] In some embodiments, a protein exhibiting activity belonging to belonging to EC 1.10—for example, a protein exhibiting activity belonging to EC 1.10.3 (e.g., EC 1.10.3.2)—or a corresponding formulation, polynucleotide, or organism is used to prevent, treat, suppress, eliminate and/or reduce the severity of an infestation/infection of a plant or plant part of/by one or more Botrytis (e.g., B. cinerea), Fusarium (e.g., F. graminearum, F. oxysporum, F. virgulforme), Phakopsora (e.g., P. pachyrhizi), Phytophthora (e.g., P. capsici, P. cinnamomi, P. infestans, P. parasitica, P. ramorum, P. sojae) and Zymoseptoria (e.g., Z. tritici). For example, a oxidase, optionally a protein comprising, consisting essentially of or consisting of an amino acid sequence that is about/at least 60, 61, 62, 63, 64, 65, 66, 67, 68, 69, 70, 71, 72, 73, 74, 75, 76, 77, 78, 79, 80, 81, 82, 83, 84, 85, 86, 87, 88, 89, 90, 91, 92, 93, 94, 95, 96, 97, 98, 99 or 100% identical to one or more of the amino acid sequences set forth herein as SEQ ID NO(s): 9, (or a corresponding formulation, polynucleotide, or organism) may be applied to a plant or plant part to prevent, treat, suppress, eliminate and/or reducing the severity of such infestations/infections.

[0904] In some embodiments, a protein exhibiting activity belonging to EC 1.11—for example, a protein exhibiting activity belonging to EC 1.11.1 (e.g., EC 1.11.1.6 and EC 1.11.1.7)—or a corresponding formulation, polynucleotide, or organism is used to prevent, treat, suppress, eliminate and/or reduce the severity of an infestation/infection of a plant or plant part of/by one or more Blumeria (e.g., B. graminis), Botrytis (e.g., B. cinerea), Fusarium (e.g., F. graminearum, F. oxysporum, F. virgulforme), Magnaporthe (e.g., M. grisea, M oryzae), Penicillium (e.g., P. digitatum), Phakopsora (e.g., P. pachyrhizi), Phytophthora (e.g., P. capsici, P. cinnamomi, P. infestans, P. parasitica, P. ramorum, P. sojae), Puccinia (e.g., P. striiformis) and Zymoseptoria (e.g., Z. tritici). For example, a peroxidase, optionally a protein comprising, consisting essentially of or consisting of an amino acid sequence that is about/at least 60, 61, 62, 63, 64, 65, 66, 67, 68, 69, 70, 71, 72, 73, 74, 75, 76, 77, 78, 79, 80, 81, 82, 83, 84, 85, 86, 87, 88, 89, 90, 91, 92, 93, 94, 95, 96, 97, 98, 99 or 100% identical to one or more of the amino acid sequences set forth herein as SEQ ID NO(s): 10-13, (or a corresponding formulation, polynucleotide, or organism) maybe applied to a plant or plant part to prevent, treat, suppress, eliminate and/or reducing the severity of such infestations/infections.

[0905] In some embodiments, a protein exhibiting activity belonging to EC 1.14—for example, a protein exhibiting activity belonging to EC 1.14.99 (e.g., EC 1.14.99.56)—or a corresponding formulation, polynucleotide, or organism is used to prevent, treat, suppress, eliminate and/or reduce the severity of an infestation/infection of a plant or plant part of/by one or more Botrytis (e.g., B. cinerea), Fusarium (e.g., F. graminearum, F. oxysporum, F. virguliforme), Magnaporthe (e.g., M. grisea, M. oryzae), Penicillium (e.g., P. digitatum, P. expansum, P. italicum, P. rugulosum, P. verrucosum), Phakopsora (e.g., P. pachyrhizi), Phytophthora (e.g., P. capsici, P. cinnamomi, P. infestans, P. parasitica, P. ramorum, P. sojae) and Zymoseptoria (e.g., Z. tritici). For example, a oxygenase, optionally a protein comprising, consisting essentially of or consisting of an amino acid sequence that is about/at least 60, 61, 62, 63, 64, 65, 66, 67, 68, 69, 70, 71, 72, 73, 74, 75, 76, 77, 78, 79, 80, 81, 82, 83, 84, 85, 86, 87, 88, 89, 90, 91, 92, 93, 94, 95, 96, 97, 98, 99 or 10000 identical to one or more of the amino acid sequences set forth herein as SEQ ID NO(s): 14-15, (or a corresponding formulation, polynucleotide, or organism) may be applied to a plant or plant part to prevent, treat, suppress, eliminate and/or reducing the severity of such infestations/infections.

[0906] In some embodiments, a protein that exhibits one or more transferase activities belonging to EC 2—for example, one or more aminoacyltransferase activities belonging to EC 2.3.2 (e.g., D-glutamyltransferase activity belonging to EC 2.3.2.1, gamma-glutamyltransferase activity belong to EC 2.3.2.2, aspartyltransferase activity belonging to EC 2.3.2.7, protein-glutamine gamma-glutamyltransferase activity belonging to EC 2.3.2.13, D-alanine gamma-glutamyl transferase activity belonging to EC 2.3.2.14)—or a corresponding formulation, polynucleotide, or organism, optionally a protein comprising, consisting essentially of, or consisting of an amino acid sequence that is about/at least 60, 61, 62, 63, 64, 65, 66, 67, 68, 69, 70, 71, 72, 73, 74, 75, 76, 77, 78, 79, 80, 81, 82, 83, 84, 85, 86, 87, 88, 89, 90, 91, 92, 93, 94, 95, 96, 97, 98, 99 or 100% identical to one or more of the amino acid sequences set forth herein as SEQ ID NO(s): 16 or a functional fragment/mutant/variant thereof (or a corresponding formulation, polynucleotide, or organism) is applied to a plant growth medium, plant, plant part (e.g., a seed), or agricultural/floricultural/horticultural/silvicultural apparatus/facility (e.g., an apparatus/facility for planting, irrigating, fertilizing, growing, monitoring, testing, harvesting, processing, packaging and/or storing a plant or plant part, such as a cultivator, seed container, seeder, planting pot, hydroponic growth system, growth chamber, greenhouse, laboratory, broadcaster, fertilization drill, fertilizer spreader, irrigation system, harvesting apparatus, postharvest storage container, postharvest treatment chamber, or postharvest shipping container) in an amount/concentration effective to a) prevent, treat, suppress and/or eliminate infestation/infection of said plant growth medium, plant, plant part or agricultural/floricultural/horticultural/silvicultural apparatus/facility o/by one or more phytopathogenic pests; b) cleanse said plant growth medium, plant, plant part, or agricultural/floricultural/horticultural/silvicultural apparatus/facility of one or more pest(s); c) prevent, treat, suppress and/or eliminate infestation/infection of a plant grown in said plant growth medium; d) reduce one or more aspects of disease severity in a plant grown in said plant growth medium; e) reduce one or more aspects of disease severity in said plant or plant part; f) prevent, treat, suppress and/or eliminate infestation/infection of a plant or plant part grown in or contacted by said agricultural/floricultural/horticultural/silvicultural apparatus/facility; g) reduce one or more aspects of disease severity in a plant or plant part grown in or contacted by said agricultural/floricultural/horticultural/silvicultural apparatus/facility; h) enhance one or more growth and/or development characteristics of a plant grown in said plant growth medium; i) enhance one or more growth and/or development characteristics of said plant or plant part; j) enhance one or more growth and/or development characteristics of a plant grown in or contacted by said agricultural/floricultural/horticultural/silvicultural apparatus/facility; k) enhance one or more yield characteristics of a plant grown in said plant growth medium; l) enhance one or more yield characteristics in said plant or plant part; m) enhance one or more yield characteristics of a plant grown in or contacted by said agricultural/floricultural/horticultural/silvicultural apparatus/facility; n) enhance the availability of one or more nutrients in said plant growth medium for uptake and/or accumulation by a plant grown therein, optionally boron, calcium, carbon, copper, iron, magnesium, manganese, molybdenum, nitrogen, phosphorous, potassium, sulfur and/or zinc; o) enhance uptake and/or accumulation of one or more nutrients by said plant or plant part, optionally boron, calcium, carbon, copper, iron, magnesium, manganese, molybdenum, nitrogen, phosphorous, potassium, sulfur and/or zinc; p) reduce the amount(s) of exogenous fertilizer needed to achieve a desired result (e.g., the amount of exogenous nitrogen and/or phosphorous required to produce X kilograms of harvested plant material); q) prolong the shelf-life of a plant grown in said plant growth medium; r) prolong the shelf-life of said plant or plant part; s) prolong the shelf-life of a plant grown in or contacted by said agricultural/floricultural/horticultural/silvicultural apparatus/facility; t) delay the ripening of a plant grown in said plant growth medium; u) delay the ripening of said plant or plant part; v) delay the ripening of a plant grown in or contacted by said agricultural/floricultural/horticultural/silvicultural apparatus/facility; w) hasten the ripening of a plant grown in said plant growth medium; x) hastening the ripening of a plant or plant part; y) hasten the ripening of a plant grown in or contacted by said agricultural/floricultural/horticultural/silvicultural apparatus/facility; z) improve the efficacy of a biological pesticide that is applied to said plant, plant part, plant growth medium or agricultural/floricultural/horticultural/silvicultural apparatus/facility prior to, concurrently with, or after application of said protein (or corresponding formulation, polynucleotide, or organism); aa) prevent, treat, suppress and/or eliminate biological-pesticide-induced pest resistance of a plant grown in said plant growth medium; bb) prevent, treat, suppress and/or eliminate biological-pesticide-induced pest resistance of a plant grown in or contacted by said agricultural/floricultural/horticultural/silvicultural apparatus/facility; cc) improve the efficacy of a chemical pesticide that is applied to said plant, plant part, plant growth medium or agricultural/floricultural/horticultural/silvicultural apparatus/facility prior to, concurrently with, or after application of said protein (or corresponding formulation, polynucleotide, or organism); dd) prevent, treat, suppress and/or eliminate chemical-pesticide-induced pest resistance of a plant grown in said plant growth medium; and/or ee) prevent, treat, suppress and/or eliminate chemical-pesticide-induced pest resistance of a plant grown in or contacted by said agricultural/floricultural/horticultural/silvicultural apparatus/facility.

[0907] In some embodiments, the protein is selected from the group consisting of:
[0908] a) a polypeptide having about/at least 60, 61, 62, 63, 64, 65, 66, 67, 68, 69, 70, 71, 72, 73, 74, 75, 76, 77, 78, 79, 80, 81, 82, 83, 84, 85, 86, 87, 88, 89, 90, 91, 92, 93, 94, 95, 96, 97, 98, 99 or 100% sequence identity to one or more of SEQ ID NO(s): 16;
[0909] b) a polypeptide having about/at least 60, 61, 62, 63, 64, 65, 66, 67, 68, 69, 70, 71, 72, 73, 74, 75, 76, 77, 78, 79, 80, 81, 82, 83, 84, 85, 86, 87, 88, 89, 90, 91, 92, 93, 94, 95, 96, 97, 98, 99 or 100% sequence identity to a mature polypeptide of any one of SEQ ID NO(s): 16;
[0910] c) a polypeptide encoded by a polynucleotide having about/at least 60, 61, 62, 63, 64, 65, 66, 67, 68, 69, 70, 71, 72, 73, 74, 75, 76, 77, 78, 79, 80, 81, 82, 83, 84, 85, 86, 87, 88, 89, 90, 91, 92, 93, 94, 95, 96, 97, 98, 99 or 100% sequence identity to one or more of SEQ ID NO(s): 107 or the cDNA sequence thereof;
[0911] d) a polypeptide derived from any one of SEQ ID NO(s): 16 by substitution, deletion, or insertion of one or more amino acids;
[0912] c) a polypeptide derived from a mature polypeptide of any one of SEQ ID NO(s): 16 by substitution, deletion, or insertion of one or more amino acids;
[0913] f) a polypeptide derived from the polypeptide of any one of a) through e) wherein the N- and/or C-terminal end has been extended by the addition of one or more amino acids; and
[0914] g) a fragment of the polypeptide of any one of a) through f)
   wherein the polypeptide exhibits one or more transferase activities.

[0915] In some embodiments, a protein exhibiting activity belonging to EC 2.3—for example, a protein exhibiting activity belonging to EC 2.3.2 (e.g., EC 2.3.2.2)—or a corresponding formulation, polynucleotide, or organism is used to prevent, treat, suppress, eliminate and/or reduce the severity of an infestation of a plant or plant part of/by one or more leaf-eating insects. For example, an aminoacyltransferase, optionally a protein comprising, consisting essentially of or consisting of an amino acid sequence that is about/at least 60, 61, 62, 63, 64, 65, 66, 67, 68, 69, 70, 71, 72, 73, 74, 75, 76, 77, 78, 79, 80, 81, 82, 83, 84, 85, 86, 87, 88, 89, 90, 91, 92, 93, 94, 95, 96, 97, 98, 99 or 100% identical to one or more of the amino acid sequences set forth herein as SEQ ID NO(s): 16 (or a corresponding formulation, polynucleotide, or organism) may be applied to a plant or plant part to prevent, treat, suppress, eliminate and/or reducing the severity of such infestations.

[0916] In some embodiments, a protein that exhibits one or more hydrolase activities belonging to EC 3—for example, one or more esterase activities belonging to EC 3.1.1 (e.g., triacylglycerol lipase activity belong to EC 3.1.1.3, phospholipase A₂ activity belonging to EC 3.1.1.4, lysophospholipase activity belonging to 3.1.1.5, pectinesterase activity belonging to 3.1.1.11, phospholipase A₁ activity belonging to 3.1.1.32, lipoprotein lipase activity belonging to EC 3.1.1.34, cutinase activity belonging to 3.1.1.74), EC 3.1.3 (e.g., alkaline phosphatase activity belonging to EC 3.1.3.1, acid phosphatase activity belonging to EC 3.1.3.2, 3-phytase activity belonging to EC 3.1.3.8, glucose-6-phosphatase activity belonging to EC 3.1.3.9, glucose-1-phosphatase activity belonging to EC 3.1.3.10, fructose-biphosphatase activity belonging to EC 3.1.3.11, sugar-phosphatase activity belonging to EC 3.1.3.23, 4-phytase activity belonging to EC 3.1.3.26, fructose-2,6-biphosphate 2-phosphatase activity belonging to EC3.1.3.46, fructose-2,6-biphosphate 6-phosphatase activity belonging to EC 3.1.3.54, 5-phytase activity belonging to EC 3.1.3.72, lipid-phosphate phosphatase activity belonging to EC 3.1.3.76), and/or EC 3.1.4 (e.g., phospholipase C activity belonging to 3.1.4.3, phospholipase D activity belonging to EC 3.1.4.4, phoshoinositide phospholipase C activity belonging to 3.1.4.11), one or more glycosylase activities belonging to EC 3.2 (e.g., alpha-amylase activity belong to EC 3.2.1.1, beta-amylase activity belong to EC 3.2.1.2, glucan 1,4-alpha-glucosidase activity belong to 3.2.1.3, cellulase activity belong to 3.2.1.4, endo-1,3(4)-beta-glucanase activity belong to 3.2.1.6, inulinase activity belong to 3.2.1.7, endo-1,4-beta-xylanase activity belong to 3.2.1.8, oligo-1,6-glucosidase activity belong to 3.2.1.10, dextranase activity belong to 3.2.1.11, chitinase activity belong to 3.2.1.14, endo-polygalacturonase (pectinase) activity belong to 3.2.1.15, lysozyme activity belong to 3.2.1.17, alpha-glucosidase activity belong to 3.2.1.20, beta-glucosidase activity belong to 3.2.1.21, alpha-galactosidase activity belong to 3.2.1.22, beta-galactosidase activity belong to 3.2.1.23, alpha-mannosidase activity belong to 3.2.1.24, beta-mannosidase activity belong to 3.2.1.25, beta-fructofuranosidase activity belong to 3.2.1.26, alpha,alpha-trehalase activity belong to 3.2.1.28, endo-1,3-beta-xylanase activity belong to 3.2.1.32, amylo-1,6-glucosidase activity belonging to EC3.2.1.33, xylan 1,4-beta-xylosidase activity belong to 3.2.1.37, glucan endo-1,3-beta-D-glucosidase activity belong to 3.2.1.39, pullulanase activity belong to 3.2.1.41, alpha-L-arabinofuranosidase activity belong to 3.2.1.55, glucan 1,3-beta-glucosidase activity belong to 3.2.1.58, glucan endo-1,3-alpha-glucosidase activity belong to 3.2.1.59, glucan 1,6-alpha-glucosidase activity belonging to EC 3.2.1.70, glucan endo-1,2-beta-glucosidase activity belonging to EC 3.2.1.71, xylan 1,3-beta-xylosidase activity belonging to EC 3.2.1.72, licheninase activity belong to 3.2.1.73, glucan 1,4-beta-glucosidase activity belonging to EC 3.2.1.74, glucan endo-1,6-beta-glucosidase activity belong to 3.2.1.75, mannan 1,2-(1,3)-alpha-mannosidase activity belonging to EC 3.2.1.77, mannan endo-1,4-p-mannosidase activity belonging to 3.2.1.78, glucan 1,3-alpha-glucosidase activity belonging to EC 3.2.1.84, cellulose 1,4-beta-cellobiosidase activity belong to 3.2.1.91, peptidoglycan beta-N-acetylmuramidase activity belonging to EC 3.2.1.92, endo-alpha-N-acetylgalactosaminidase activity belong to 3.2.1.97, mannan 1,4-mannobiosidase activity belonging to EC 3.2.1.100, mannan endo-1,6-alpha-mannosidase activity belong to 3.2.1.101, endogalactosaminidase activity belong to 3.2.1.109, 1,3-alpha-L-fucosidase activity belong to 3.2.1.111, 2-deoxyglucosidase activity belong to 3.2.1.112, glycoprotein endo-alpha-1,2-mannosidase activity belonging to EC 3.2.1.130, chitosanase activity belong to 3.2.1.132, glucan 1,4-alpha-maltohydrolase activity belong to 3.2.1.133, mannan exo-1,2-1,6-alpha-mannosidase activity belonging to EC 3.2.1.137, 1,6-alpha-D-mannosidase activity belonging to 3.2.1.163, 1,4-beta-cellobiosidase activity belonging to 3.2.1.176, galactan endo-beta-1,3-galactanase activity belonging to EC 3.2.1.181, alpha-mannan endo-1,2-alpha-mannanase activity belonging to EC 3.2.1.198, exo-chitinase activity belonging to EC 3.2.1.200, exo-chitinase activity belonging to EC 3.2.1.201), one or more aminopeptidase activities belonging to EC 3.4.11, one or more serine endopeptidase activities belonging to EC 3.4.21 (e.g., chymotrypsin activity belonging to EC 3.4.21.1, trypsin activity belonging to EC 3.4.21.4, alpha-lytic endopeptidase activity belonging to EC 3.4.21.12, glutamyl endopeptidase activity belonging to EC 3.4.21.19, cucumisin activity belonging to EC 3.4.21.25, chymase activity belonging to EC 3.4.21.39, lysyl endopeptidase activity belonging to EC 3.4.21.50, leucyl endopeptidase activity belonging to EC 3.4.21.57, subtilisin activity belonging to 3.4.21.62), one or more cysteine endopeptidase activities belonging to 3.4.22 (e.g., papain activity belonging to EC 3.4.22.2, actinidain activity belonging to EC 3.4.22.14, caricain activity belonging to EC 3.4.22.30, ananain activity belonging to EC 3.4.22.31, bromelain activity belonging to EC 3.4.22.32, bromelain activity belonging to EC 3.4.22.33, legumain activity belonging to EC 3.4.22.34, zingipain activity belonging to EC 3.4.22.67), one or more aspartic endopeptidase activities belonging to EC 3.4.23 (e.g., phytopsin activity belonging to EC 3.4.23.40), one or more metalloendopeptidase activities belonging to EC 3.4.24 (e.g., bacillolysin activity belonging to EC 3.4.24.28), one or more amidohydrolase and amidase activities belonging to EC 3.5.1 (e.g., asparaginase activity belong to EC 3.5.1.1, glutaminase activity belonging to 3.5.1.2, amidase activity belonging to 3.5.1.4, urease activity belonging to 3.5.1.5, biotinidase activity belonging to 3.5.1.12, nicotinamidase activity belonging to 3.5.1.19, N-acetylglucosamine deacetylase activity belonging to EC 3.5.1.33, D-glutaminase activity belonging to 3.5.1.35, glutamin-(asparagin-)ase activity belonging to 3.5.1.38, chitin deacetylase activity belonging to 3.5.1.41, peptidyl-glutaminase activity belonging to 3.5.1.43, protein-glutamine glutaminase activity belonging to 3.5.1.44, pentanamidase activity belonging to 3.5.1.50, peptidoglycan-N-acetylglucosamine deacetylase activity belonging to EC 3.5.1.104), one or more aminidase/deiminase activities belonging to EC 3.5.3 (e.g., arginase activity belonging to EC 3.5.3.1, arginine deiminase activity belonging to EC 3.5.3.6, D-arginase activity belonging to EC 3.5.3.10, protein-arginine deiminase activity belonging to EC 3.5.3.15), and/or one or more deaminase activities belonging to EC 3.5.4 (e.g., cytosine deaminase activity belonging to EC 3.5.4.1, adenine deaminase activity belonging to EC 3.5.4.2, guanine deaminase activity belonging to EC 3.5.4.3, adenosine deaminase activity belonging to EC 3.5.4.4)—or a corresponding formulation, polynucleotide, or organism, optionally a protein comprising, consisting essentially of, or consisting of an amino acid sequence that is about/at least 60, 61, 62, 63, 64, 65, 66, 67, 68, 69, 70, 71, 72, 73, 74, 75, 76, 77, 78, 79, 80, 81, 82, 83, 84, 85, 86, 87, 88, 89, 90, 91, 92, 93, 94, 95, 96, 97, 98, 99 or 100/o identical to one or more of the amino acid sequences set forth herein as SEQ ID NO(s): 17-90, 45906, 72144, 72147 and 72149 or a functional fragment/mutant/variant thereof (or a corresponding formulation, polynucleotide, or organism) is applied to a plant growth medium, plant, plant part (e.g., a seed), or agricultural/floricultural/horticultural/silvicultural apparatus/facility (e.g., an apparatus/facility for planting, irrigating, fertilizing, growing, monitoring, testing, harvesting, processing, packaging and/or storing a plant or plant part, such as a cultivator, seed container, seeder, planting pot, hydroponic growth system, growth chamber, greenhouse, laboratory, broadcaster, fertilization drill, fertilizer spreader, irrigation system, harvesting apparatus, postharvest storage container, postharvest treatment chamber, or postharvest shipping container) in an amount/concentration effective to a) prevent, treat, suppress and/or eliminate infestation/infection of said plant growth medium, plant, plant part or agricultural/floricultural/horticultural/silvicultural apparatus/facility o/by one or more phytopathogenic pests; b) cleanse said plant growth medium, plant, plant part, or agricultural/floricultural/horticultural/silvicultural apparatus/facility of one or more pest(s); c) prevent, treat, suppress and/or eliminate infestation/infection of a plant grown in said plant growth medium; d) reduce one or more aspects of disease severity in a plant grown in said plant growth medium; e) reduce one or more aspects of disease severity in said plant or plant part; f) prevent, treat, suppress and/or eliminate infestation/infection of a plant or plant part grown in or contacted by said agricultural/floricultural/horticultural/silvicultural apparatus/facility; g) reduce one or more aspects of disease severity in a plant or plant part grown in or contacted by said agricultural/floricultural/horticultural/silvicultural apparatus/facility; h) enhance one or more growth and/or development characteristics of a plant grown in said plant growth medium; i) enhance one or more growth and/or development characteristics of said plant or plant part; j) enhance one or more growth and/or development characteristics of a plant grown in or contacted by said agricultural/floricultural/horticultural/silvicultural apparatus/facility; k) enhance one or more yield characteristics of a plant grown in said plant growth medium; l) enhance one or more yield characteristics in said plant or plant part; m) enhance one or more yield characteristics of a plant grown in or contacted by said agricultural/floricultural/horticultural/silvicultural apparatus/facility; n) enhance the availability of one or more nutrients in said plant growth medium for uptake and/or accumulation by a plant grown therein, optionally boron, calcium, carbon, copper, iron, magnesium, manganese, molybdenum, nitrogen, phosphorous, potassium, sulfur and/or zinc; o) enhance uptake and/or accumulation of one or more nutrients by said plant or plant part, optionally boron, calcium, carbon, copper, iron, magnesium, manganese, molybdenum, nitrogen, phosphorous, potassium, sulfur and/or zinc; p) reduce the amount(s) of exogenous fertilizer needed to achieve a desired result (e.g., the amount of exogenous nitrogen and/or phosphorous required to produce X kilograms of harvested plant material); q) prolong the shelf-life of a plant grown in said plant growth medium; r) prolong the shelf-life of said plant or plant part; s) prolong the shelf-life of a plant grown in or contacted by said agricultural/floricultural/horticultural/silvicultural apparatus/facility; t) delay the ripening of a plant grown in said plant growth medium; u) delay the ripening of said plant or plant part; v) delay the ripening of a plant grown in or contacted by said agricultural/floricultural/horticultural/silvicultural apparatus/facility; w) hasten the ripening of a plant grown in said plant growth medium; x) hastening the ripening of a plant or plant part; y) hasten the ripening of a plant grown in or contacted by said agricultural/floricultural/horticultural/silvicultural apparatus/facility; z) improve the efficacy of a biological pesticide that is applied to said plant, plant part, plant growth medium or agricultural/floricultural/horticultural/silvicultural apparatus/facility prior to, concurrently with, or after application of said protein (or corresponding formulation, polynucleotide, or organism); aa) prevent, treat, suppress and/or eliminate biological-pesticide-induced pest resistance of a plant grown in said plant growth medium; bb) prevent, treat, suppress and/or eliminate biological-pesticide-induced pest resistance of a plant grown in or contacted by said agricultural/floricultural/horticultural/silvicultural apparatus/facility; cc) improve the efficacy of a chemical pesticide that is applied to said plant, plant part, plant growth medium or agricultural/floricultural/horticultural/silvicultural apparatus/facility prior to, concurrently with, or after application of said protein (or corresponding formulation, polynucleotide, or organism); dd) prevent, treat, suppress and/or eliminate chemical-pesticide-induced pest resistance of a plant grown in said plant growth medium; and/or cc) prevent, treat, suppress and/or eliminate chemical-pesticide-induced pest resistance of a plant grown in or contacted by said agricultural/floricultural/horticultural/silvicultural apparatus/facility.

[0917] In some embodiments, the protein is selected from the group consisting of
[0918] a) a polypeptide having about/at least 60, 61, 62, 63, 64, 65, 66, 67, 68, 69, 70, 71, 72, 73, 74, 75, 76, 77, 78, 79, 80, 81, 82, 83, 84, 85, 86, 87, 88, 89, 90, 91, 92, 93, 94, 95, 96, 97, 98, 99 or 100% sequence identity to one or more of SEQ ID NO(s): 17-90, 45906, 72144, 72147 and 72149;
[0919] b) a polypeptide having about/at least 60, 61, 62, 63, 64, 65, 66, 67, 68, 69, 70, 71, 72, 73, 74, 75, 76, 77, 78, 79, 80, 81, 82, 83, 84, 85, 86, 87, 88, 89, 90, 91, 92, 93, 94, 95, 96, 97, 98, 99 or 100% sequence identity to a mature polypeptide of any one of SEQ ID NO(s): 17-90, 45906, 72144, 72147 and 72149;
[0920] c) a polypeptide encoded by a polynucleotide having about/at least 60, 61, 62, 63, 64, 65, 66, 67, 68, 69, 70, 71, 72, 73, 74, 75, 76, 77, 78, 79, 80, 81, 82, 83, 84, 85, 86, 87, 88, 89, 90, 91, 92, 93, 94, 95, 96, 97, 98, 99 or 100% sequence identity to one or more of SEQ ID NO(s): 108-181, 72145-72146, 72148 and 72150 or the cDNA sequence thereof,
[0921] d) a polypeptide derived from any one of SEQ ID NO(s): 17-90, 45906, 72144, 72147 and 72149 by substitution, deletion, or insertion of one or more amino acids;
[0922] e) a polypeptide derived from a mature polypeptide of any one of SEQ ID NO(s): 17-90, 45906, 72144, 72147 and 72149 by substitution, deletion, or insertion of one or more amino acids; f) a polypeptide derived from the polypeptide of any one of a) through e) wherein the N- and/or C-terminal end has been extended by the addition of one or more amino acids; and
[0923] g) a fragment of the polypeptide of any one of a) through f)
   wherein the polypeptide exhibits one or more hydrolase activities.

[0924] In some embodiments, a protein exhibiting activity belonging to EC 3.1—for example, a protein exhibiting activity belonging to EC 3.1.1 (e.g., EC 3.1.1.3, EC 3.1.1.5, EC 3.1.1.11, and EC 3.1.1.74) and 3.1.4 (e.g., EC 3.1.4.3 and EC 3.1.4.11)—or a corresponding formulation, polynucleotide, or organism is used to prevent, treat, suppress, eliminate and/or reduce the severity of an infestation/infection of a plant or plant part of/by one or more Botrytis (e.g., B. cinerea), Fusarium (e.g., F. graminearum, F. oxysporum, F. virgulforme), Magnaporthe (e.g., M. grisea, M oryzae), Penicillium (e.g., P. digitatum, P. expansum, P. italicum, P. rugulosum, P. verrucosum), Phakopsora (e.g., P. pachyrhizi), Phytophthora (e.g., P. capsici, P. cinnamomi, P. infestans, P. parasitica, P. ramorum, P. sojae), Zymoseptoria (e.g., Z. tritici) and insects. For example, a hydrolase, optionally a protein comprising, consisting essentially of or consisting of an amino acid sequence that is about/at least 60, 61, 62, 63, 64, 65, 66, 67, 68, 69, 70, 71, 72, 73, 74, 75, 76, 77, 78, 79, 80, 81, 82, 83, 84, 85, 86, 87, 88, 89, 90, 91, 92, 93, 94, 95, 96, 97, 98, 99 or 100% identical to one or more of the amino acid sequences set forth herein as SEQ ID NO(s): 17-33, 72147 and 72149 (or a corresponding formulation, polynucleotide, or organism) may be applied to a plant or plant part to prevent, treat, suppress, eliminate and/or reducing the severity of such infestations/infections.

[0925] In some embodiments, a protein exhibiting activity belonging to EC 3.2 for example, a protein exhibiting activity belonging to EC 3.2.1 (e.g., EC 3.2.1.1, EC 3.2.1.3, EC 3.2.1.4, EC 3.2.1.6, EC 3.2.1.7, EC 3.2.1.8, EC 3.2.1.11, EC 3.2.1.15, EC 3.2.1.17, EC 3.2.1.21, EC 3.2.1.24, EC 3.2.1.39, EC 3.2.1.41, EC 3.2.1.55, EC 3.2.1.58, EC 3.2.1.59, EC 3.2.1.73, EC 3.2.1.75, EC 3.2.1.78, EC 3.2.1.101, EC 3.2.1.109, EC 3.2.1.130, EC 3.2.1.133, EC 3.2.1.163 and EC 3.2.1.198)—or a corresponding formulation, polynucleotide, or organism is used to prevent, treat, suppress, eliminate and/or reduce the severity of an infestation/infection of a plant or plant part of/by one or more Blumeria (e.g., B. graminis), Botrytis (e.g., B. cinerea), Fusarium (e.g., F. graminearum, F. oxysporum, F. virgulforme), Magnaporthe (e.g., M. grisea, M. oryzae), Penicillium (e.g., P. digitatum, P. expansum, P. italicum, P. rugulosum, P. verrucosum), Phakopsora (e.g., P. pachyrhizi), Phytophthora (e.g., P. capsici, P. cinnamomi, P. infestans, P. parasitica, P. ramorum, P. sojae), Pseudoperonospora (e.g., P. cubensis), Puccinia (e.g., P. striiformis), Zymoseptoria (e.g., Z. tritici) and insects. For example, a glycosylase, optionally a protein comprising, consisting essentially of or consisting of an amino acid sequence that is about/at least 60, 61, 62, 63, 64, 65, 66, 67, 68, 69, 70, 71, 72, 73, 74, 75, 76, 77, 78, 79, 80, 81, 82, 83, 84, 85, 86, 87, 88, 89, 90, 91, 92, 93, 94, 95, 96, 97, 98, 99 or 100% identical to one or more of the amino acid sequences set forth herein as SEQ ID NO(s): 34-79, 45906 and 72144, (or a corresponding formulation, polynucleotide, or organism) may be applied to a plant or plant part to prevent, treat, suppress, eliminate and/or reducing the severity of such infestations/infections.

[0926] In some embodiments, a protein exhibiting activity belonging to belonging to EC 3.4—for example, a protein exhibiting activity belonging to EC 3.4.11 (e.g., EC 3.4.11.1), EC 3.4.21 (e.g., EC 3.4.21.19, EC 3.4.21.62) and EC 3.4.24 (e.g., EC 3.4.24.28)—or a corresponding formulation, polynucleotide, or organism is used to prevent, treat, suppress, eliminate and/or reduce the severity of an infestation/infection of a plant or plant part of/by one or more Blumeria (e.g., B. graminis), Botrytis (e.g., B. cinerea), Fusarium (e.g., F. graminearum, F. oxysporum, F virguliforme), Magnaporthe (e.g., M. grisea, M. oryzae), Penicillium (e.g., P. digitatum, P. expansum, P. italicum, P. rugulosum, P. verrucosum), Phakopsora (e.g., P. pachyrhizi), Phytophthora (e.g., P. capsici, P. cinnamomi, P. infestans, P. parasitica, P. ramorum, P. sojae), Pseudoperonospora (e.g., P. cubensis), Puccinia (e.g., P. striiformis), Zymoseptoria (e.g., Z. tritici) and insects. For example, a peptidase, optionally a protein comprising, consisting essentially of or consisting of an amino acid sequence that is about/at least 60, 61, 62, 63, 64, 65, 66, 67, 68, 69, 70, 71, 72, 73, 74, 75, 76, 77, 78, 79, 80, 81, 82, 83, 84, 85, 86, 87, 88, 89, 90, 91, 92, 93, 94, 95, 96, 97, 98, 99 or 100% identical to one or more of the amino acid sequences set forth herein as SEQ ID NO(s): 80-88, (or a corresponding formulation, polynucleotide, or organism) may be applied to a plant or plant part to prevent, treat, suppress, eliminate and/or reducing the severity of such infestations/infections.

[0927] In some embodiments, a protein exhibiting activity belonging to EC 3.5—for example, a protein exhibiting activity belonging to EC 3.5.1 (e.g., EC 3.5.1.1 and EC 3.5.1.2)—or a corresponding formulation, polynucleotide, or organism is used to prevent, treat, suppress, eliminate and/or reduce the severity of an infestation/infection of a plant or plant part of/by one or more Blumeria (e.g., B. graminis), Botrytis (e.g., B. cinerea), Penicillium (e.g., P. digitatum, P. expansum, P. italicum, P. rugulosum, P. verrucosum) and insects. For example, a hydrolase, optionally a protein comprising, consisting essentially of or consisting of an amino acid sequence that is about/at least 60, 61, 62, 63, 64, 65, 66, 67, 68, 69, 70, 71, 72, 73, 74, 75, 76, 77, 78, 79, 80, 81, 82, 83, 84, 85, 86, 87, 88, 89, 90, 91, 92, 93, 94, 95, 96, 97, 98, 99 or 100% identical to one or more of the amino acid sequences set forth herein as SEQ ID NO(s): 89-90 (or a corresponding formulation, polynucleotide, or organism) may be applied to a plant or plant part to prevent, treat, suppress, eliminate and/or reducing the severity of such infestations/infections.

[0928] In some embodiments, a protein that exhibits one or more lyase activities belonging to EC 4—for example, one or more carboxy-lyase activities belonging to EC 4.1.1 (e.g., aspartate 1-decarboxylase activity belonging to EC 4.1.1.11, aspartate 4-decarboxylase activity belonging to EC 4.1.1.12, valine decarboxylase activity belonging to EC 4.1.1.14, glutamate decarboxylase activity belonging to EC 4.1.1.15, lysine decarboxylase activity belonging to EC 4.1.1.18, arginine decarboxylase activity belonging to EC 4.1.1.19, histidine decarboxylase activity belonging to EC 4.1.1.22, tyrosine decarboxylase activity belonging to EC 4.1.1.25, phenylalanine decarboxylase activity belonging to EC 4.1.1.53, methionine decarboxylase activity belonging to EC 4.1.1.57, L-tryptophan decarboxylase activity belonging to EC 4.1.1.105), one or more carbon-carbon lyase activities belonging to EC 4.1.99 (e.g., tryptophanase activity belonging to EC EC 4.1.99.1, tyrosine phenol-lyase activity belonging to EC 4.1.99.2), one or more ammonia-lyase activities belonging to EC 4.3.1 (e.g., aspartate ammonia-lyase activity belonging to EC 4.3.1.1. histidine ammonia-lyase activity belong to EC 4.3.1.3, L-serine ammonia-lyase activity belonging to EC 4.3.1.17, D-serine ammonia-lyase activity belonging to EC 4.3.1.18, threonine ammonia-lyase activity belonging to EC 4.3.1.19, tyrosine ammonia-lyase activity belonging to EC 4.3.1.23, phenylalanine ammonia-lyase activity belonging to EC 4.3.1.24, phenylalanine/tyrosine ammonia-lyase activity belonging to EC 4.3.1.25, L-lysine cyclodeaminase activity belonging to EC 4.3.1.28, L-tryptophan ammonia-lyase activity belonging to EC 4.3.1.31), and/or one or more -sulfur lyase activities belonging to EC 4.4.1 (e.g., cysteine lyase activity belonging to EC 4.4.1.10, methionine gamma-lyase activity belonging to EC 4.4.1.11, L-cysteine desulfidase activity belonging to EC 4.4.1.28, L-cysteine beta-lyase activity belonging to EC 4.4.1.35)—or a corresponding formulation, polynucleotide, or organism, optionally a protein comprising, consisting essentially of, or consisting of an amino acid sequence that is about/at least 60, 61, 62, 63, 64, 65, 66, 67, 68, 69, 70, 71, 72, 73, 74, 75, 76, 77, 78, 79, 80, 81, 82, 83, 84, 85, 86, 87, 88, 89, 90, 91, 92, 93, 94, 95, 96, 97, 98, 99 or 100% identical to one or more of the amino acid sequences set forth herein as SEQ ID NO(s): 55 and 91 or a functional fragment/mutant/variant thereof (or a corresponding formulation, polynucleotide, or organism) is applied to a plant growth medium, plant, plant part (e.g., a seed), or agricultural/floricultural/horticultural/silvicultural apparatus/facility (e.g., an apparatus/facility for planting, irrigating, fertilizing, growing, monitoring, testing, harvesting, processing, packaging and/or storing a plant or plant part, such as a cultivator, seed container, seeder, planting pot, hydroponic growth system, growth chamber, greenhouse, laboratory, broadcaster, fertilization drill, fertilizer spreader, irrigation system, harvesting apparatus, postharvest storage container, postharvest treatment chamber, or postharvest shipping container) in an amount/concentration effective to a) prevent, treat, suppress and/or eliminate infestation/infection of said plant growth medium, plant, plant part or agricultural/floricultural/horticultural/silvicultural apparatus/facility o/by one or more phytopathogenic pests; b) cleanse said plant growth medium, plant, plant part, or agricultural/floricultural/horticultural/silvicultural apparatus/facility of one or more pest(s); c) prevent, treat, suppress and/or eliminate infestation/infection of a plant grown in said plant growth medium; d) reduce one or more aspects of disease severity in a plant grown in said plant growth medium; e) reduce one or more aspects of disease severity in said plant or plant part; f) prevent, treat, suppress and/or eliminate infestation/infection of a plant or plant part grown in or contacted by said agricultural/floricultural/horticultural/silvicultural apparatus/facility; g) reduce one or more aspects of disease severity in a plant or plant part grown in or contacted by said agricultural/floricultural/horticultural/silvicultural apparatus/facility; h) enhance one or more growth and/or development characteristics of a plant grown in said plant growth medium; i) enhance one or more growth and/or development characteristics of said plant or plant part; j) enhance one or more growth and/or development characteristics of a plant grown in or contacted by said agricultural/floricultural/horticultural/silvicultural apparatus/facility; k) enhance one or more yield characteristics of a plant grown in said plant growth medium; l) enhance one or more yield characteristics in said plant or plant part; m) enhance one or more yield characteristics of a plant grown in or contacted by said agricultural/floricultural/horticultural/silvicultural apparatus/facility; n) enhance the availability of one or more nutrients in said plant growth medium for uptake and/or accumulation by a plant grown therein, optionally boron, calcium, carbon, copper, iron, magnesium, manganese, molybdenum, nitrogen, phosphorous, potassium, sulfur and/or zinc; o) enhance uptake and/or accumulation of one or more nutrients by said plant or plant part, optionally boron, calcium, carbon, copper, iron, magnesium, manganese, molybdenum, nitrogen, phosphorous, potassium, sulfur and/or zinc; p) reduce the amount(s) of exogenous fertilizer needed to achieve a desired result (e.g., the amount of exogenous nitrogen and/or phosphorous required to produce X kilograms of harvested plant material); q) prolong the shelf-life of a plant grown in said plant growth medium; r) prolong the shelf-life of said plant or plant part; s) prolong the shelf-life of a plant grown in or contacted by said agricultural/floricultural/horticultural/silvicultural apparatus/facility; t) delay the ripening of a plant grown in said plant growth medium; u) delay the ripening of said plant or plant part; v) delay the ripening of a plant grown in or contacted by said agricultural/floricultural/horticultural/silvicultural apparatus/facility; w) hasten the ripening of a plant grown in said plant growth medium; x) hastening the ripening of a plant or plant part; y) hasten the ripening of a plant grown in or contacted by said agricultural/floricultural/horticultural/silvicultural apparatus/facility; z) improve the efficacy of a biological pesticide that is applied to said plant, plant part, plant growth medium or agricultural/floricultural/horticultural/silvicultural apparatus/facility prior to, concurrently with, or after application of said protein (or corresponding formulation, polynucleotide, or organism); aa) prevent, treat, suppress and/or eliminate biological-pesticide-induced pest resistance of a plant grown in said plant growth medium; bb) prevent, treat, suppress and/or eliminate biological-pesticide-induced pest resistance of a plant grown in or contacted by said agricultural/floricultural/horticultural/silvicultural apparatus/facility; cc) improve the efficacy of a chemical pesticide that is applied to said plant, plant part, plant growth medium or agricultural/floricultural/horticultural/silvicultural apparatus/facility prior to, concurrently with, or after application of said protein (or corresponding formulation, polynucleotide, or organism); dd) prevent, treat, suppress and/or eliminate chemical-pesticide-induced pest resistance of a plant grown in said plant growth medium; and/or ee) prevent, treat, suppress and/or eliminate chemical-pesticide-induced pest resistance of a plant grown in or contacted by said agricultural/floricultural/horticultural/silvicultural apparatus/facility.

[0929] In some embodiments, the protein is selected from the group consisting of:
[0930] a) a polypeptide having about/at least 60, 61, 62, 63, 64, 65, 66, 67, 68, 69, 70, 71, 72, 73, 74, 75, 76, 77, 78, 79, 80, 81, 82, 83, 84, 85, 86, 87, 88, 89, 90, 91, 92, 93, 94, 95, 96, 97, 98, 99 or 100% sequence identity to one or more of SEQ ID NO(s): 91;
[0931] b) a polypeptide having about/at least 60, 61, 62, 63, 64, 65, 66, 67, 68, 69, 70, 71, 72, 73, 74, 75, 76, 77, 78, 79, 80, 81, 82, 83, 84, 85, 86, 87, 88, 89, 90, 91, 92, 93, 94, 95, 96, 97, 98, 99 or 100% sequence identity to a mature polypeptide of any one of SEQ ID NO(s): 91;
[0932] c) a polypeptide encoded by a polynucleotide having about/at least 60, 61, 62, 63, 64, 65, 66, 67, 68, 69, 70, 71, 72, 73, 74, 75, 76, 77, 78, 79, 80, 81, 82, 83, 84, 85, 86, 87, 88, 89, 90, 91, 92, 93, 94, 95, 96, 97, 98, 99 or 100% sequence identity to one or more of SEQ ID NO(s): 182 or the cDNA sequence thereof,
[0933] d) a polypeptide derived from any one of SEQ ID NO(s): 91 by substitution, deletion, or insertion of one or more amino acids;
[0934] e) a polypeptide derived from a mature polypeptide of any one of SEQ ID NO(s): 91 by substitution, deletion, or insertion of one or more amino acids;
[0935] f) a polypeptide derived from the polypeptide of any one of a) through e) wherein the N- and/or C-terminal end has been extended by the addition of one or more amino acids; and
[0936] g) a fragment of the polypeptide of any one of a) through f)
   wherein the polypeptide exhibits one or more lyase activities.

[0937] In some embodiments, a protein exhibiting activity belonging to belonging to EC 4.2—for example, a protein exhibiting activity belonging to EC 4.2.2 (e.g., EC 4.2.2.2, 4.2.2.10)—or a corresponding formulation, polynucleotide, or organism is used to prevent, treat, suppress, eliminate and/or reduce the severity of an infestation/infection of a plant or plant part of/by one or more Botrytis (e.g., B. cinerea), Fusarium (e.g., F. graminearum, F. oxysporum, F. virguliforme), Penicillium (e.g., P. digitatum, P. expansum, P. italicum, P. rugulosum, P. verrucosum), Puccinia (e.g., P. striiformis), Phytophthora (e.g., P. capsici, P. cinnamomi, P. infestans, P. parasitica, P. ramorum, P. sojae), Puccinia (e.g., P. striiformis), Zymoseptoria (e.g., Z. tritici) and insects. For example, a carbon-oxygen lyase, optionally a protein comprising, consisting essentially of or consisting of an amino acid sequence that is about/at least 60, 61, 62, 63, 64, 65, 66, 67, 68, 69, 70, 71, 72, 73, 74, 75, 76, 77, 78, 79, 80, 81, 82, 83, 84, 85, 86, 87, 88, 89, 90, 91, 92, 93, 94, 95, 96, 97, 98, 99 or 100% identical to one or more of the amino acid sequences set forth herein as SEQ ID NO(s): 55 and 91, (or a corresponding formulation, polynucleotide, or organism) maybe applied to a plant or plant part to prevent, treat, suppress, eliminate and/or reducing the severity of such infestations/infections.

[0938] In some embodiments, the protein comprises, consists essentially of, or consists of a wild-type polypeptide. For example, in some embodiments, the protein comprises, consists essentially of, or consists of a wild-type polypeptide having about/at least 60, 61, 62, 63, 64, 65, 66, 67, 68, 69, 70, 71, 72, 73, 74, 75, 76, 77, 78, 79, 80, 81, 82, 83, 84, 85, 86, 87, 88, 89, 90, 91, 92, 93, 94, 95, 96, 97, 98, 99 or 100% sequence identity to any one or more of SEQ ID NO(s): 1-91, 45906, 72144, 72147 and 72149 or a mature polypeptide thereof.

[0939] In some embodiments, the protein comprises, consists essentially of, or consists of a variant polypeptide. For example, in some embodiments, the protein comprises, consists essentially of, or consists of a variant polypeptide having about/at least 60, 61, 62, 63, 64, 65, 66, 67, 68, 69, 70, 71, 72, 73, 74, 75, 76, 77, 78, 79, 80, 81, 82, 83, 84, 85, 86, 87, 88, 89, 90, 91, 92, 93, 94, 95, 96, 97, 98, 99 or 100% sequence identity to any one or more of SEQ ID NO(s): 1-91, 45906, 72144, 72147 and 72149 or a mature polypeptide thereof.

[0940] In some embodiments, the protein comprises, consists essentially of or consists of a catalytic domain, a binding module and a linker between said catalytic domain and said binder module.

[0941] In some embodiments, the protein comprises two or more catalytic domains.

[0942] In some embodiments, the protein comprises two or more binding modules.

[0943] In some embodiments, the protein is a fusion protein comprising a first polypeptide and a second polypeptide, said second polypeptide being distinct from said first polypeptide, wherein said first polypeptide is selected from the group consisting of:
[0944] a) a polypeptide having about/at least 60, 61, 62, 63, 64, 65, 66, 67, 68, 69, 70, 71, 72, 73, 74, 75, 76, 77, 78, 79, 80, 81, 82, 83, 84, 85, 86, 87, 88, 89, 90, 91, 92, 93, 94, 95, 96, 97, 98, 99 or 100% sequence identity to any one or more of SEQ ID NO(s): 1-91, 45906, 72144, 72147 and 72149;
[0945] b) a polypeptide having about/at least 60, 61, 62, 63, 64, 65, 66, 67, 68, 69, 70, 71, 72, 73, 74, 75, 76, 77, 78, 79, 80, 81, 82, 83, 84, 85, 86, 87, 88, 89, 90, 91, 92, 93, 94, 95, 96, 97, 98, 99 or 100% sequence identity to a mature polypeptide of any one or more of SEQ ID NO(s): 1-91, 45906, 72144, 72147 and 72149;
[0946] c) a polypeptide encoded by a polynucleotide having about/at least 60, 61, 62, 63, 64, 65, 66, 67, 68, 69, 70, 71, 72, 73, 74, 75, 76, 77, 78, 79, 80, 81, 82, 83, 84, 85, 86, 87, 88, 89, 90, 91, 92, 93, 94, 95, 96, 97, 98, 99 or 100% sequence identity to any one or more of SEQ ID NO(s): 92-182, 72145-72146, 72148 and 72150 or the cDNA sequence thereof;
[0947] d) a polypeptide derived from any one of SEQ ID NO(s): 1-91, 45906, 72144, 72147 and 72149 by substitution, deletion, or insertion of one or more amino acids;
[0948] e) a polypeptide derived from a mature polypeptide any one of SEQ ID NO(s): 1-91, 45906, 72144, 72147 and 72149 by substitution, deletion, or insertion of one or more amino acids;
[0949] f) a polypeptide derived from the polypeptide of any one of a) through e) wherein the N- and/or C-terminal end has been extended by the addition of one or more amino acids; and
[0950] g) a fragment of the polypeptide of any one of a) through f), and, optionally, wherein said second polypeptide is selected from the group consisting of:
[0951] h) a polypeptide having about/at least 60, 61, 62, 63, 64, 65, 66, 67, 68, 69, 70, 71, 72, 73, 74, 75, 76, 77, 78, 79, 80, 81, 82, 83, 84, 85, 86, 87, 88, 89, 90, 91, 92, 93, 94, 95, 96, 97, 98, 99 or 100% sequence identity to any one or more of SEQ ID NO(s): 1-91, 45906, 72144, 72147 and 72149;
[0952] i) a polypeptide having about/at least 60, 61, 62, 63, 64, 65, 66, 67, 68, 69, 70, 71, 72, 73, 74, 75, 76, 77, 78, 79, 80, 81, 82, 83, 84, 85, 86, 87, 88, 89, 90, 91, 92, 93, 94, 95, 96, 97, 98, 99 or 100% sequence identity to a mature polypeptide of any one or more of SEQ ID NO(s): 1-91, 45906, 72144, 72147 and 72149;
[0953] j) a polypeptide encoded by a polynucleotide having about/at least 60, 61, 62, 63, 64, 65, 66, 67, 68, 69, 70, 71, 72, 73, 74, 75, 76, 77, 78, 79, 80, 81, 82, 83, 84, 85, 86, 87, 88, 89, 90, 91, 92, 93, 94, 95, 96, 97, 98, 99 or 100% sequence identity to any one or more of SEQ ID NO(s): 92-182, 72145-72146, 72148 and 72150 or the cDNA sequence thereof;
[0954] k) a polypeptide derived from any one of SEQ ID NO(s): 1-91, 45906, 72144, 72147 and 72149 by substitution, deletion, or insertion of one or more amino acids;
[0955] l) a polypeptide derived from a mature polypeptide any one of SEQ ID NO(s): 1-91, 45906, 72144, 72147 and 72149 by substitution, deletion, or insertion of one or more amino acids;
[0956] m) a polypeptide derived from the polypeptide of any one of h) through 1) wherein the N- and/or C-terminal end has been extended by the addition of one or more amino acids; and
[0957] n) a fragment of the polypeptide of any one of h) through m).

[0958] The present disclosure encompasses methods of using one or more compositions of the present disclosure for enhancing the environments in which plants are grown by, for example, changing the pH of the environment, increasing the availability of nutrients, stimulating beneficial microorganisms and/or suppressing/eliminating harmful microorganisms.

[0959] The present disclosure encompasses methods of using one or more compositions of the present disclosure for improving plant growth, development and/or yield characteristics by, for example, increasing nutrient availability, increasing nutrient uptake, improving nutrient uptake efficiency, improving water use efficiency, stimulating the production of plant growth promoters, stimulating plant defense mechanisms, and/or preventing, treating, suppressing, eliminating and/or reducing the severity of pest infestations/infections.

[0960] The present disclosure encompasses methods of using one or more compositions of the present disclosure for increasing the availability of one or more nutrients by, for example, fixing atmospheric nitrogen, retaining nitrogen in different oxidation stages, solubilizing phosphate, releasing organic acids, and/or solubilizing micronutrients. For example, introducing an enzyme of the present disclosure into soil in the vicinity of a plant may increase the bioavailability of one or more vitamins, macrominerals, micronutrients, organic acids and/or trace minerals, as compared to a control soil lacking said enzyme.

[0961] Nitrogen bioavailability may be increased with myriad compositions of the present disclosure, including, but not limited to, proteins exhibiting one or more activities belonging to EC 1.18.6 (e.g., EC 1.18.6.1), EC 3.1.1 (e.g., EC 3.1.1.4, 3.1.1.32) and EC 3.1.4 (e.g., EC 3.1.4.3, EC 3.1.4.4, EC 3.1.4.11) (and corresponding formulations, polynucleotides and organisms). In some embodiments, nitrogen bioavailability is increased using one or more of SEQ ID NO(s): 26 and 32-33, and enzymatically active fragments/mutants/variants thereof.

[0962] Phosphate bioavailability may be increased with myriad compositions of the present disclosure, including, but not limited to, proteins exhibiting one or more activities belonging to EC 3.1.3 (e.g., EC 3.1.3.1, EC 3.1.3.2, EC 3.1.3.26), 3.1.4 (e.g., EC 3.1.4.3, EC 3.1.4.4, EC 3.1.4.11) and 3.1.21 (e.g., EC 3.1.21.1) (and corresponding formulations, polynucleotides and organisms). In some embodiments, phosphate bioavailability is increased using one or more of SEQ ID NO(s): 32-33, and enzymatically active fragments/mutants/variants thereof.

[0963] The present disclosure encompasses methods of using one or more compositions of the present disclosure for prolonging the shelf-life of harvested plants or plant parts by, for example, treating (e.g., coating) harvested plants and plant parts directly and/or treating post-harvest transport/storage containers. See generally, e.g., US 2019/159470; US 2020/022719; US 2020/352183; US 2011/244095; FR 3038495; WO 2022/049139.

[0964] The present disclosure encompasses methods of using one or more compositions of the present disclosure for reducing the need for chemical pesticides by, for example, reducing chemical pesticide-induced phytotoxicity, pest resistance, etc.

[0965] Compositions of the present disclosure may be applied to/used to treat any plant type, including, but not limited to, row crops and vegetables. In some embodiments, compositions of the present disclosure are formulated for the treatment of one or more plants selected from the families Amaranthaceae (e.g., chard, spinach, sugar beet, quinoa), Asteraceae (e.g., artichoke, asters, chamomile, chicory, chrysanthemums, dahlias, daisies, echinacea, goldenrod, guayule, lettuce, marigolds, safflower, sunflowers, zinnias), Brassicaceae (e.g., arugula, broccoli, bok choy, Brussels sprouts, cabbage, cauliflower, canola, collard greens, daikon, garden cress, horseradish, kale, mustard, radish, rapeseed, rutabaga, turnip, wasabi, watercress, Arabidopsis thaliana), Caricaceae (e.g., papaya), Cucurbitaceae (e.g., cantaloupe, cucumber, honeydew, melon, pumpkin, squash (e.g., acorn squash, butternut squash, summer squash), watermelon, zucchini), Fabaceae (e.g., alfalfa, beans, carob, clover, guar, lentils, mesquite, peas, peanuts, soybeans, tamarind, tragacanth, vetch), Malvaceae (e.g., cacao, cotton, durian, hibiscus, kenaf, kola, okra), Poaceae (e.g., bamboo, barley, corn, fonio, lawn grass (e.g., Bahia grass, Bermudagrass, bluegrass, Buffalograss, Centipede grass, Fescue, or Zoysia), millet, oats, ornamental grasses, rice, rye, sorghum, sugar cane, triticale, wheat and other cereal crops, Polygonaceae (e.g., buckwheat), Rosaceae (e.g., almonds, apples, apricots, blackberry, blueberry, cherries, peaches, plums, quinces, raspberries, roses, strawberries), Solanaceae (e.g., bell peppers, chili peppers, eggplant, petunia, potato, tobacco, tomato) and Vitaceae (e.g., grape).

[0966] Non-limiting examples of plants that may be treated with compositions of the present disclosure include plants sold under the ACCELERON®, AGRIPRO®, AGRISURE®, AGROESTE®, AGVENTURE®, ALFOREX™, ASGROW®, AQUAMAX®, BOLLGARD II™, BOLLGARD™ 3, BREVANT™, CHANNEL™, CONFIDOR™, CORTEVA AGRISCIENCE™, CORVUS™, CREDENZ®, CROPSTAR™ DAIRYLAND™, DEKALB®, DELTAPINE™, DERUITER™, DROUGHTGARD®, ENLIST E3®, ENOGEN®, FIBERMAX®, GAUCHO™, GENUITY®, GOLDENHARVEST®, HOEGEMEYER™ INTACTA RR2 PRO™, INVIGOR®, LIBERTY LINK®, NEXGROW®, NK®, NUTECH SEED®, OPTIMUM®, PHYTOGEN®, PIONEER®, QROME®, RIB COMPLETE®, ROUNDUP READY®, ROUNDUP READY 2 YIELD®, ROUNDUP READY 2 XTEND®, SEMETES AGROCERES™, SEMINIS™, SMARTSTAX®, STONEVILLE®. SYNGENTA®, TRUFLEX™, VT DOUBLE PRO®, VT TRIPLE PRO®, YIELDGARD®, YIELDGARD VT ROOTWORM/RR2®, YIELDGARD VT TRIPLE® and/or XTENDFLEX™ tradenames.

[0967] Compositions of the present disclosure may be applied to any part/portion of a plant. In some embodiments, the compositions are applied to plant propagation materials (e.g., cuttings, rhizomes. seeds and tubers). In some embodiments, the compositions are applied to the roots of a plant. In some embodiments, the compositions are applied to the foliage of a plant. In some embodiments, the compositions are applied to both the roots and the foliage of a plant. In some embodiments, the compositions are applied to plant propagation materials and to the plants that grow from said plant propagation materials.

[0968] Compositions of the present disclosure may be applied to any plant growth medium, including, but not limited to, soil.

[0969] Compositions of the present disclosure may be applied to plants, plant parts and/or plant growth media in any suitable manner, including, but not limited to, on-seed application, in-furrow application and foliar application.

[0970] Compositions of the present disclosure may be applied using any suitable method(s), including, but not limited to, coating, dripping, dusting, encapsulating, fogging, immersing, spraying, and soaking. Batch systems, in which predetermined batch sizes of material and composition are delivered into a mixer, may be employed. Continuous treatment systems, which are calibrated to apply composition at a predefined rate in proportion to a continuous flow of material, may also be employed.

[0971] In some embodiments, compositions of the present disclosure are applied directly to plant propagation material (e.g., seeds). According to some embodiments, plant propagation materials are soaked in a composition of the present disclosure for at least 0.1, 0.2, 0.3, 0.4, 0.5, 0.6, 0.7, 0.8, 0.9, 1, 1.25, 1.5, 1.75, 2, 3, 4, 5, 6, 9, 12, 15, 18, 21, 24, 36, 48 hours. According to some embodiments, plant propagation materials are coated with the compositions. Plant propagation materials may be coated with one or more additional layers (e.g., one or more protective layers that serve to enhance the stability and/or activity of an enzyme/organism of the present disclosure and/or one or more sequestration layers comprising substances that may reduce the stability and/or activity of an enzyme/organism of the present disclosure if included in the same layer as the enzyme/organism of the present disclosure). In some embodiments, the coating comprises, consists essentially of, or consists of a composition of the present disclosure and a drying powder.

[0972] In some embodiments, compositions of the present disclosure are applied directly to a plant growth medium (e.g., a soil). According to some embodiments, the compositions are applied in the vicinity of a plant propagation material (e.g., a seed). According to some embodiments, the compositions are applied to the root zone of a plant. According to some embodiments, the compositions are applied using a drip irrigation system.

[0973] In some embodiments, compositions of the present disclosure are applied directly to plants. According to some embodiments, the compositions are fogged, misted, sprayed and/or sprinkled onto the plant(s) to be treated (e.g., foliar sprays).

[0974] In some embodiments, compositions of the present disclosure are applied to harvested plants and/or plant parts.

[0975] Individual components of the compositions (e.g., proteins of the present disclosure and chemical pesticides) may be applied separately or together. For example, in some embodiments, compositions of the present disclosure may be incorporated into integrated pest management strategies (e.g., a formulation comprising one or more proteins of the present disclosure may be applied to an orchard/vineyard as part of an integrated pest management strategy that includes separate applications of 2, 3, 4, 5 or more distinct pesticides in a rotation designed to reduce/prevent chemical pesticide-induced phytotoxicity and/or pest resistance).

[0976] In some embodiments, compositions of the present disclosure are freeze- spray- or spray-freeze-dried and then applied to plants/plant parts. For examples, in some embodiments, a formulation comprising and enzyme/organism of the present disclosure and one or more stabilizing components (e.g., one or more maltodextrins having a DEV of about 15 to about 20) is freeze- spray- or spray-freeze-dried, mixed with a drying powder (e.g., a drying powder comprising calcium stearate, attapulgite clay, montmorillonite clay, graphite, magnesium stearate, silica (e.g., fumed silica, hydrophobically-coated silica and/or precipitated silica) and/or talc), then coated on seed that was been pre-treated with one or more adhesives (e.g., an adhesive composition comprising one or more maltodextrins, one or more mono-, di- or oligosaccharides, one or more peptones, etc.), one or more pesticides and/or one or more plant signal molecules (e.g., one or more LCOs).

[0977] See, generally, e.g., U.S. Ser. No. 11/472,981; US 2020/0085065; U.S. Ser. No. 10/820,594.

[0978] Compositions of the present disclosure may be applied to plant growth media (e.g., soil), plants, plant parts and agricultural/floricultural/horticultural/silvicultural apparatuses/facilities at any time, including, but not limited to, prior to planting, at the time of planting, after planting, prior to germination, at the time of germination, after germination, prior to seedling emergence, at the time of seedling emergence, after seedling emergence, prior to the vegetative stage, during the vegetative stage, after the vegetative stage, prior to the reproductive stage, during the reproductive stage, after the reproductive stage, prior to flowering, at the time of flowering, after flowering, prior to fruiting, at the time of fruiting, after fruiting, prior to ripening, at the time of ripening, after ripening, prior to harvest, at the time of harvest, and after harvesting. Indeed, compositions of the present disclosure may be used to extend the shelf-life of harvested products by preventing, treating, suppressing, eliminating and/or reducing the severity of infestations/infections of/by acarids, bacteria, fungi, insects, oomycetes and protozoa for many weeks/months post-harvest.

[0979] In some embodiments, compositions of the present disclosure are applied to plant growth media prior to introducing a plant into the plant growth media (e.g., prior to planting seed).

[0980] In some embodiments, compositions of the present disclosure are applied to plant growth media concurrently with the introduction of a plant into the plant growth media (e.g., at the time of planting).

[0981] In some embodiments, compositions of the present disclosure are applied to plant growth media after introducing a plant into the plant growth media (e.g., by drip irrigation following planting).

[0982] In some embodiments, compositions of the present disclosure are applied to plant propagation materials (e.g., seeds) about/at least 1, 2, 3, 4, 5, 6, 7, 8, 9, 10, 11, 12, 13, 14, 15, 16, 17, 18, 19, 20, 21, 22, 23, 24, 28, 32, 36, 40, 44, 48, 52, 56, 60, 64, 68, 72, 76, 80, 84, 88, 92, 96, 100, 104 weeks prior to planting.

[0983] In some embodiments, compositions of the present disclosure are applied to plant propagation materials (e.g., seeds) at the time of planting.

[0984] In some embodiments, compositions of the present disclosure are applied to plant propagation materials (e.g., seeds) after planting but before germination.

[0985] In some embodiments, compositions of the present disclosure are applied to plants following emergence.

[0986] In some embodiments, compositions of the present disclosure are applied to a plant or plant part pre-harvest (i.e., within 1, 2, 3, 4, 5, 6, 7, 8, 9, 10, 11, 12, 13, 14, 15 or more days before the plant or plant part is (to be) harvested).

[0987] In some embodiments, compositions of the present disclosure are applied to a plant or plant part post-harvest (i.e., after the plant or plant part has been harvested).

[0988] In some embodiments, compositions of the present disclosure are applied to a harvested plant or plant part at a processing/shipping facility.

[0989] In some embodiments, compositions of the present disclosure are applied to a processed plant product.

[0990] In some embodiments, compositions of the present disclosure are applied to an agricultural, floricultural, horticultural and/or silvicultural apparatus/facility prior to contacting a plant or plant part with or introducing a plant or plant part into said apparatus/facility.

[0991] In some embodiments, compositions of the present disclosure are applied to an agricultural, floricultural, horticultural and/or silvicultural apparatus/facility concurrently with contacting a plant or plant part with or introducing a plant or plant part into said apparatus/facility.

[0992] In some embodiments, compositions of the present disclosure are applied to an agricultural, floricultural, horticultural and/or silvicultural apparatus/facility after contacting a plant or plant part with or introducing a plant or plant part into said apparatus/facility.

[0993] Compositions of the present disclosure may be applied to plants, plant parts and/or plant growth media in any suitable amount(s)/concentration(s).

[0994] In some embodiments, compositions of the present disclosure comprise one or more proteins of the present disclosure in an amount ranging from about 0.001 to about 100 milligrams per gram and/or milliliter of composition. For example, compositions of the present disclosure may comprise about/at least 0.001, 0.002, 0.003, 0.004, 0.005, 0.006, 0.007, 0.008, 0.009, 0.01, 0.02, 0.03, 0.04, 0.05, 0.06, 0.07, 0.08, 0.09, 0.1, 0.15, 0.2, 0.25, 0.3, 0.35, 0.4, 0.45, 0.5, 0.55, 0.6, 0.65, 0.7, 0.75, 0.8, 0.85, 0.9, 0.95, 1, 1.25, 1.5, 1.75, 2, 2.25, 2.5, 2.75, 3, 3.25, 3.5, 3.75, 4, 4.25, 4.5, 4.75, 5, 6, 7, 8, 9, 10, 11, 12, 13, 14, 15, 16, 17, 18, 19, 20, 21, 22, 23, 24, 25, 26, 27, 28, 29, 30, 35, 40, 45, 50, 55, 60, 65, 70, 75, 80, 85, 90, 95 or 100 milligrams of protein per gram and/or milliliter of composition. In some embodiments, compositions of the present disclosure comprise about/at least 0.05, 0.06, 0.07, 0.08, 0.09, 0.1, 0.15, 0.2, 0.25, 0.3, 0.35, 0.4, 0.45, or 0.5 milligrams of protein per gram and/or milliliter of composition.

[0995] In some embodiments, one or more proteins of the present disclosure comprise about 0.00000001 to about 95% (by weight) of the composition. In some embodiments, one or more proteins of the present disclosure comprise about/at least 1×10⁻¹⁵, 1×10⁻¹⁴, 1×10⁻¹³, 1×10⁻¹², 1×10⁻¹¹, 1×10⁻¹⁰, 1×10⁻⁹, 1×10⁻⁸, 1×10⁻⁷, 1×10⁻⁶, 1×10⁻⁵, 1×10⁻⁴, 1×10⁻³, 1×10⁻², 1×10⁻¹, 0.2, 0.3, 0.4, 0.5, 0.6, 0.7, 0.8, 0.9, 1, 1.25, 1.5, 1.75, 2, 2.25, 2.5, 2.75, 3, 3.25, 3.5, 3.75, 4, 4.25, 4.5, 4.75, 5, 6, 7, 8, 9, 10, 11, 12, 13, 14, 15, 16, 17, 18, 19, 20, 21, 22, 23, 24, 25, 26, 27, 28, 29, 30, 35, 40, 45, 50, 55, 60, 65, 70, 75, 80, 85, 90, 95% or more (by weight) of the composition.

[0996] In some embodiments, the composition is applied at a rate that is equivalent to about 1×10¹ to about 1×10¹⁵ enzyme units (at optimum conditions) of each protein of the present disclosure per kilogram of plant propagation material. According to some embodiments, compositions of the present disclosure are applied in an amount sufficient to ensure the plant propagation materials are coated with about/at least 1×10¹, 1×10², 1×10³, 1×10⁴, 1×10⁵, 1×10⁶, 1×10⁷, 1×10⁸, 1×10⁹, 1×10¹⁰, 1×10¹¹, 1×10¹², 1×10¹³, 1×10¹⁴ or 1×10¹⁵ enzyme units (at optimum conditions) of each protein of the present disclosure per kilogram of plant propagation material. According to some embodiments, one or more compositions of the present disclosure is/are applied in an amount sufficient to ensure that an average of about/at least 1×10⁴, 1×10⁵, 1×10⁶, 1×10⁷, 1×10⁸, 1×10⁹, 1×10¹⁰, 1×10¹¹, or 1×10¹² enzyme units (at optimum conditions) of each protein of the present disclosure is applied to each seed.

[0997] In some embodiments, the composition is applied at a rate that is equivalent to about 1×10¹ to about 1×10¹⁵ enzyme units (at optimum conditions) of each protein of the present disclosure per plant. According to some embodiments, compositions of the present disclosure are applied in an amount sufficient to ensure each plant is treated with about/at least 1×10¹, 1×10², 1×10¹, 1×10⁴, 1×10⁵, 1×10⁶, 1×10⁷, 1×10⁸, 1×10⁹, 1×10¹⁰, 1×10¹¹, 1×10¹², 1×10¹³, 1×10¹⁴ or 1×10¹⁵ enzyme units (at optimum conditions) of each protein of the present disclosure. According to some embodiments, compositions of the present disclosure are applied in an amount sufficient to ensure that an average of about/at least 1×10⁴, 1×10⁵, 1×10⁶, 1×10⁷, 1×10⁸, 1×10⁹, 1×10¹⁰, 1×10¹¹, or 1×10¹² enzyme units (at optimum conditions) of each protein of the present disclosure is applied to each plant.

[0998] In some embodiments, the composition is applied at a rate that is equivalent to about 1×10¹ to about 1×10¹⁵ enzyme units (at optimum conditions) of each protein of the present disclosure per hectare/acre of treated crops. According to some embodiments, compositions of the present disclosure are applied in an amount sufficient to ensure each hectare/acre of treated crops is treated with about/at least 1×10¹, 1×10², 1×10³, 1×10⁴, 1×10⁵, 1×10⁶, 1×10⁷, 1×10⁸, 1×10⁹, 1×10¹⁰, 1×10¹¹, 1×10¹², 1×10¹³, 1×10¹⁴ or 1×10¹⁵ enzyme units (at optimum conditions) of each protein of the present disclosure. According to some embodiments, compositions of the present disclosure are applied in an amount sufficient to ensure that an average of about/at least 1×10⁴, 1×10⁵, 1×10⁶, 1×10⁷, 1×10⁸, 1×10⁹, 1×10¹⁰, 1×10¹¹, or 1×10¹² enzyme units (at optimum conditions) of each protein of the present disclosure is applied to each hectare/acre of treated crops.

[0999] In some embodiments, the composition is applied at a rate that is equivalent to about 1×10¹ to about 1×10¹⁵ enzyme units (at optimum conditions) of each protein of the present disclosure per hectare/acre of plant growth media. According to some embodiments, compositions of the present disclosure are applied in an amount sufficient to ensure each hectare/acre of plant growth media is treated with about/at least 1×10¹, 1×10², 1×10³, 1×10⁴, 1×10⁵, 1×10⁶, 1×10⁷, 1×10⁸, 1×10⁹, 1×10¹⁰, 1×10¹¹, 1×10¹², 1×10¹³, 1×10¹⁴ or 1×10¹⁵ enzyme units (at optimum conditions) of each protein of the present disclosure. According to some embodiments, compositions of the present disclosure are are applied in an amount sufficient to ensure that an average of about/at least 1×10⁴, 1×10⁵, 1×10⁶, 1×10⁷, 1×10⁸, 1×10⁹, 1×10¹⁰, 1×10¹¹, or 1×10¹² enzyme units (at optimum conditions) of each protein of the present disclosure is applied to each hectare/acre of plant growth media.

[1000] In some embodiments, the composition is applied at a rate that is equivalent to about 1×10¹ to about 1×10¹⁵ enzyme units (at optimum conditions) of each protein of the present disclosure per square inch/foot of surface area on an agricultural/floricultural/horticultural/silvicultural apparatus/facility. According to some embodiments, compositions of the present disclosure are applied in an amount sufficient to ensure each square inch/foot is treated with about/at least 1×10¹, 1×10², 1×10³, 1×10⁴, 1×10⁵, 1×10⁶, 1×10⁷, 1×10⁸, 1×10⁹, 1×10¹⁰, 1×10¹¹, 1×10¹², 1×10¹³, 1×10¹⁴ or 1×10¹⁵ enzyme units (at optimum conditions) of each protein of the present disclosure. According to some embodiments, compositions of the present disclosure are are applied in an amount sufficient to ensure that an average of about/at least 1×10⁴, 1×10⁵, 1×10⁶, 1×10⁷, 1×10⁸, 1×10⁹, 1×10¹⁰, 1×10¹¹, or 1×10¹² enzyme units (at optimum conditions) of each protein of the present disclosure is applied to each square inch/foot.

[1001] In some embodiments, the composition is applied at a rate that is equivalent to about 0.001 to about 100 milligrams of protein of the present disclosure per kilogram of plant propagation material. According to some embodiments, compositions of the present disclosure are applied in an amount sufficient to ensure the plant propagation materials are coated with about/at least 0.001, 0.002, 0.003, 0.004, 0.005, 0.006, 0.007, 0.008, 0.009, 0.01, 0.02, 0.03, 0.04, 0.05, 0.06, 0.07, 0.08, 0.09, 0.1, 0.15, 0.2, 0.25, 0.3, 0.35, 0.4, 0.45, 0.5, 0.55, 0.6, 0.65, 0.7, 0.75, 0.8, 0.85, 0.9, 0.95, 1, 1.25, 1.5, 1.75, 2, 2.25, 2.5, 2.75, 3, 3.25, 3.5, 3.75, 4, 4.25, 4.5, 4.75, 5, 6, 7, 8, 9, 10, 11, 12, 13, 14, 15, 16, 17, 18, 19, 20, 21, 22, 23, 24, 25, 26, 27, 28, 29, 30, 35, 40, 45, 50, 55, 60, 65, 70, 75, 80, 85, 90, 95 or 100 milligrams of protein of the present disclosure per kilogram of plant propagation material. According to some embodiments, one or more compositions of the present disclosure is/are applied in an amount sufficient to ensure that an average of about/at least 0.05, 0.06, 0.07, 0.08, 0.09, 0.1, 0.15, 0.2, 0.25, 0.3, 0.35, 0.4, 0.45, or 0.5 milligrams of protein of the present disclosure is applied to each seed.

[1002] In some embodiments, the composition is applied at a rate that is equivalent to about 0.001 to about 100 milligrams of protein of the present disclosure per plant. According to some embodiments, compositions of the present disclosure are applied in an amount sufficient to ensure each plant is treated with about/at least 0.001, 0.002, 0.003, 0.004, 0.005, 0.006, 0.007, 0.008, 0.009, 0.01, 0.02, 0.03, 0.04, 0.05, 0.06, 0.07, 0.08, 0.09, 0.1, 0.15, 0.2, 0.25, 0.3, 0.35, 0.4, 0.45, 0.5, 0.55, 0.6, 0.65, 0.7, 0.75, 0.8, 0.85, 0.9, 0.95, 1, 1.25, 1.5, 1.75, 2, 2.25, 2.5, 2.75, 3, 3.25, 3.5, 3.75, 4, 4.25, 4.5, 4.75, 5, 6, 7, 8, 9, 10, 11, 12, 13, 14, 15, 16, 17, 18, 19, 20, 21, 22, 23, 24, 25, 26, 27, 28, 29, 30, 35, 40, 45, 50, 55, 60, 65, 70, 75, 80, 85, 90, 95 or 100 milligrams of protein of the present disclosure. According to some embodiments, compositions of the present disclosure are applied in an amount sufficient to ensure that an average of about/at least 0.05, 0.06, 0.07, 0.08, 0.09, 0.1, 0.15, 0.2, 0.25, 0.3, 0.35, 0.4, 0.45, or 0.5 milligrams of protein of the present disclosure are applied to each plant.

[1003] In some embodiments, the composition is applied at a rate that is equivalent to about 0.001 to about 100 milligrams of protein of the present disclosure per hectare/acre of treated crops. According to some embodiments, compositions of the present disclosure are applied in an amount sufficient to ensure each hectare/acre of treated crops is treated with about/at least 0.001, 0.002, 0.003, 0.004, 0.005, 0.006, 0.007, 0.008, 0.009, 0.01, 0.02, 0.03, 0.04, 0.05, 0.06, 0.07, 0.08, 0.09, 0.1, 0.15, 0.2, 0.25, 0.3, 0.35, 0.4, 0.45, 0.5, 0.55, 0.6, 0.65, 0.7, 0.75, 0.8, 0.85, 0.9, 0.95, 1, 1.25, 1.5, 1.75, 2, 2.25, 2.5, 2.75, 3, 3.25, 3.5, 3.75, 4, 4.25, 4.5, 4.75, 5, 6, 7, 8, 9, 10, 11, 12, 13, 14, 15, 16, 17, 18, 19, 20, 21, 22, 23, 24, 25, 26, 27, 28, 29, 30, 35, 40, 45, 50, 55, 60, 65, 70, 75, 80, 85, 90, 95 or 100 milligrams of protein of the present disclosure. According to some embodiments, compositions of the present disclosure are applied in an amount sufficient to ensure that an average of about/at least 0.05, 0.06, 0.07, 0.08, 0.09, 0.1, 0.15, 0.2, 0.25, 0.3, 0.35, 0.4, 0.45, or 0.5 milligrams of protein of the present disclosure are applied to each hectare/acre of treated crops.

[1004] In some embodiments, the composition is applied at a rate that is equivalent to about 0.001 to about 100 milligrams of protein of the present disclosure per hectare/acre of plant growth media. According to some embodiments, compositions of the present disclosure are applied in an amount sufficient to ensure each hectare/acre of plant growth media is treated with about/at least 0.001, 0.002, 0.003, 0.004, 0.005, 0.006, 0.007, 0.008, 0.009, 0.01, 0.02, 0.03, 0.04, 0.05, 0.06, 0.07, 0.08, 0.09, 0.1, 0.15, 0.2, 0.25, 0.3, 0.35, 0.4, 0.45, 0.5, 0.55, 0.6, 0.65, 0.7, 0.75, 0.8, 0.85, 0.9, 0.95, 1, 1.25, 1.5, 1.75, 2, 2.25, 2.5, 2.75, 3, 3.25, 3.5, 3.75, 4, 4.25, 4.5, 4.75, 5, 6, 7, 8, 9, 10, 11, 12, 13, 14, 15, 16, 17, 18, 19, 20, 21, 22, 23, 24, 25, 26, 27, 28, 29, 30, 35, 40, 45, 50, 55, 60, 65, 70, 75, 80, 85, 90, 95 or 100 milligrams of protein of the present disclosure. According to some embodiments, compositions of the present disclosure are applied in an amount sufficient to ensure that an average of about/at least 0.05, 0.06, 0.07, 0.08, 0.09, 0.1, 0.15, 0.2, 0.25, 0.3, 0.35, 0.4, 0.45, or 0.5 milligrams of protein of the present disclosure are applied to each hectare/acre of plant growth media.

[1005] In some embodiments, compositions of the present disclosure are applied at a rate of about 0.05 to about 100 milliliters and/or grams of composition per kilogram of plant propagation material. According to some embodiments, one or more compositions of the present disclosure is/are applied in an amount sufficient to ensure the plant propagation materials are coated with about/at least 0.05, 0.1, 0.125, 0.15, 0.175, 0.2, 0.225, 0.2.5, 0.275, 0.3, 0.325, 0.35, 0.375, 0.4, 0.425, 0.45, 0.475, 0.5, 0.55, 0.6, 0.65, 0.7, 0.75, 0.8, 0.85, 0.9, 0.95, 1, 1.25, 1.5, 1.75, 2, 2.25, 2.5, 2.75, 3, 3.25, 3.5, 3.75, 4, 4.25, 4.5, 4.75, 5, 5.5, 6, 6.5, 7, 7.5, 8, 8.5, 9, 9.5, 10, 20, 30, 40, 50, 60, 70, 80, 90 or 100 milliliters and/or grams of compositions per kilogram of plant propagation material. According to some embodiments, one or more compositions of the present disclosure is/are applied in an amount sufficient to ensure that an average of about/at least 0.05, 0.1, 0.125, 0.15, 0.175, 0.2, 0.225, 0.2.5, 0.275, 0.3, 0.325, 0.35, 0.375, 0.4, 0.425, 0.45, 0.475, 0.5, 0.55, 0.6, 0.65, 0.7, 0.75, 0.8, 0.85, 0.9, 0.95, 1, 1.25, 1.5, 1.75, 2, 2.25, 2.5, 2.75, 3, 3.25, 3.5, 3.75, 4, 4.25, 4.5, 4.75 or 5 milliliters and/or grams of composition is applied to each seed.

[1006] In some embodiments, compositions of the present disclosure are applied at a rate of about 0.5 to about 100 milliliters and/or grams of composition per plant. According to some embodiments, one or more compositions of the present disclosure is/are applied in an amount sufficient to ensure each plant is treated with about/at least 0.05, 0.1, 0.125, 0.15, 0.175, 0.2, 0.225, 0.2.5, 0.275, 0.3, 0.325, 0.35, 0.375, 0.4, 0.425, 0.45, 0.475, 0.5, 0.55, 0.6, 0.65, 0.7, 0.75, 0.8, 0.85, 0.9, 0.95, 1, 1.25, 1.5, 1.75, 2, 2.25, 2.5, 2.75, 3, 3.25, 3.5, 3.75, 4, 4.25, 4.5, 4.75, 5, 5.5, 6, 6.5, 7, 7.5, 8, 8.5, 9, 9.5, 10, 20, 30, 40, 50, 60, 70, 80, 90 or 100 milliliters and/or grams of composition. According to some embodiments, one or more compositions of the present disclosure is/are applied in an amount sufficient to ensure that an average of about/at least 0.05, 0.1, 0.125, 0.15, 0.175, 0.2, 0.225, 0.2.5, 0.275, 0.3, 0.325, 0.35, 0.375, 0.4, 0.425, 0.45, 0.475, 0.5, 0.55, 0.6, 0.65, 0.7, 0.75, 0.8, 0.85, 0.9, 0.95, 1, 1.25, 1.5, 1.75, 2, 2.25, 2.5, 2.75, 3, 3.25, 3.5, 3.75, 4, 4.25, 4.5, 4.75 or 5 milliliters and/or grams of composition is applied to each plant.

[1007] In some embodiments, compositions of the present disclosure are applied at a rate of about 0.5 to about 100 milliliters and/or grams of composition per hectare/acre of treated crops. According to some embodiments, one or more compositions of the present disclosure is/are applied in an amount sufficient to ensure each hectare/acre of treated crops is treated with about/at least 0.05, 0.1, 0.125, 0.15, 0.175, 0.2, 0.225, 0.2.5, 0.275, 0.3, 0.325, 0.35, 0.375, 0.4, 0.425, 0.45, 0.475, 0.5, 0.55, 0.6, 0.65, 0.7, 0.75, 0.8, 0.85, 0.9, 0.95, 1, 1.25, 1.5, 1.75, 2, 2.25, 2.5, 2.75, 3, 3.25, 3.5, 3.75, 4, 4.25, 4.5, 4.75, 5, 5.5, 6, 6.5, 7, 7.5, 8, 8.5, 9, 9.5, 10, 20, 30, 40, 50, 60, 70, 80, 90 or 100 milliliters and/or grams of composition. According to some embodiments, one or more compositions of the present disclosure is/are applied in an amount sufficient to ensure that an average of about/at least 0.05, 0.1, 0.125, 0.15, 0.175, 0.2, 0.225, 0.2.5, 0.275, 0.3, 0.325, 0.35, 0.375, 0.4, 0.425, 0.45, 0.475, 0.5, 0.55, 0.6, 0.65, 0.7, 0.75, 0.8, 0.85, 0.9, 0.95, 1, 1.25, 1.5, 1.75, 2, 2.25, 2.5, 2.75, 3, 3.25, 3.5, 3.75, 4, 4.25, 4.5, 4.75 or 5 milliliters and/or grams of composition is applied to each hectare/acre of treated crops.

[1008] In some embodiments, compositions of the present disclosure are applied at a rate of about 0.5 to about 100 milliliters and/or grams of composition per hectare/acre of plant growth media. According to some embodiments, one or more compositions of the present disclosure is/are applied in an amount sufficient to ensure each hectare/acre of plant growth media is treated with about/at least 0.05, 0.1, 0.125, 0.15, 0.175, 0.2, 0.225, 0.2.5, 0.275, 0.3, 0.325, 0.35, 0.375, 0.4, 0.425, 0.45, 0.475, 0.5, 0.55, 0.6, 0.65, 0.7, 0.75, 0.8, 0.85, 0.9, 0.95, 1, 1.25, 1.5, 1.75, 2, 2.25, 2.5, 2.75, 3, 3.25, 3.5, 3.75, 4, 4.25, 4.5, 4.75, 5, 5.5, 6, 6.5, 7, 7.5, 8, 8.5, 9, 9.5, 10, 20, 30, 40, 50, 60, 70, 80, 90 or 100 milliliters and/or grams of composition. According to some embodiments, one or more compositions of the present disclosure is/are applied in an amount sufficient to ensure that an average of about/at least 0.05, 0.1, 0.125, 0.15, 0.175, 0.2, 0.225, 0.2.5, 0.275, 0.3, 0.325, 0.35, 0.375, 0.4, 0.425, 0.45, 0.475, 0.5, 0.55, 0.6, 0.65, 0.7, 0.75, 0.8, 0.85, 0.9, 0.95, 1, 1.25, 1.5, 1.75, 2, 2.25, 2.5, 2.75, 3, 3.25, 3.5, 3.75, 4, 4.25, 4.5, 4.75 or 5 milliliters and/or grams of composition is applied to each hectare/acre of plant growth media.

[1009] In some embodiments, compositions of the present disclosure are applied at a rate of about 0.5 to about 100 milliliters and/or grams of composition per square inch/foot of surface area on an agricultural/floricultural/horticultural/silvicultural apparatus/facility. According to some embodiments, one or more compositions of the present disclosure is/are applied in an amount sufficient to ensure each square inch/foot is treated with about/at least 0.05, 0.1, 0.125, 0.15, 0.175, 0.2, 0.225, 0.2.5, 0.275, 0.3, 0.325, 0.35, 0.375, 0.4, 0.425, 0.45, 0.475, 0.5, 0.55, 0.6, 0.65, 0.7, 0.75, 0.8, 0.85, 0.9, 0.95, 1, 1.25, 1.5, 1.75, 2, 2.25, 2.5, 2.75, 3, 3.25, 3.5, 3.75, 4, 4.25, 4.5, 4.75, 5, 5.5, 6, 6.5, 7, 7.5, 8, 8.5, 9, 9.5, 10, 20, 30, 40, 50, 60, 70, 80, 90 or 100 milliliters and/or grams of composition. According to some embodiments, one or more compositions of the present disclosure is/are applied in an amount sufficient to ensure that an average of about/at least 0.05, 0.1, 0.125, 0.15, 0.175, 0.2, 0.225, 0.2.5, 0.275, 0.3, 0.325, 0.35, 0.375, 0.4, 0.425, 0.45, 0.475, 0.5, 0.55, 0.6, 0.65, 0.7, 0.75, 0.8, 0.85, 0.9, 0.95, 1, 1.25, 1.5, 1.75, 2, 2.25, 2.5, 2.75, 3, 3.25, 3.5, 3.75, 4, 4.25, 4.5, 4.75 or 5 milliliters and/or grams of composition is applied to each square inch/foot.

[1010] In some embodiments, compositions of the present disclosure are applied at a rate sufficient to prevent, treat, suppress and/or eliminate one or more pest infestations/infections. According to some embodiments, one or more compositions of the present disclosure is/are applied in an amount sufficient to ensure the plant, plant part, plant growth medium and/or agricultural/floricultural/horticultural/silvicultural apparatus/facility is treated with an amount sufficient to prevent, treat, suppress and/or eliminate infestation/infection by 1, 2, 3, 4, 5, 6, 7, 8, 9, 10 or more phytopathogenic pests.

[1011] In some embodiments, compositions of the present disclosure are applied at a rate sufficient to reduce one or more aspects of disease severity. According to some embodiments, one or more compositions of the present disclosure is/are applied in an amount sufficient to ensure the plant, plant part, plant growth medium and/or agricultural/floricultural/horticultural/silvicultural apparatus/facility is treated with an amount sufficient to reduce one or more aspects of disease severity by about/at least 5, 10, 15, 20, 25, 30, 35, 40, 45, 50, 55, 60, 65, 70, 75, 80, 85, 90, 95, or 100%, as compared to an untreated control.

[1012] In some embodiments, compositions of the present disclosure are applied at a rate sufficient to enhance nutrient availability, uptake and/or accumulation. According to some embodiments, one or more compositions of the present disclosure is/are applied in an amount sufficient to ensure the plant, plant part, plant growth medium and/or agricultural/floricultural/horticultural/silvicultural apparatus/facility is treated with an amount sufficient to enhance the availability, uptake and/or accumulation of one or more nutrients, optionally one or more of boron, calcium, carbon, copper, iron, magnesium, manganese, molybdenum, nitrogen, phosphorous, potassium, sulfur and/or zinc availability, uptake and/or accumulation, by about/at least 5, 10, 15, 20, 25, 30, 35, 40, 45, 50, 55, 60, 65, 70, 75, 80, 85, 90, 95, 100, 110, 120, 130, 140, 150, 160, 170, 180, 190, 200% or more, as compared to an untreated control.

[1013] In some embodiments, compositions of the present disclosure are applied at a rate sufficient to enhance one or more plant growth and/or development characteristics. According to some embodiments, one or more compositions of the present disclosure is/are applied in an amount sufficient to ensure the plant, plant part, plant growth medium and/or agricultural/floricultural/horticultural/silvicultural apparatus/facility is treated with an amount sufficient to enhance one or more plant growth and/or development characteristics, optionally biomass, carbohydrate biosynthesis, chlorophyll content, cold tolerance, drought tolerance, height, leaf length, leaf mass, leaf number, leaf surface area, leaf volume, nutrient uptake (e.g., calcium, magnesium, nitrogen, phosphorous and/or potassium uptake), rate(s) of photosynthesis, root area, root diameter, root length, root mass, root nodulation (e.g., nodule mass, nodule number, nodule volume), root number, root surface area, root volume, salt tolerance, seed germination, seedling emergence, shoot diameter, shoot length, shoot mass, shoot number, shoot surface area, shoot volume, spread, stomatal conductance and/or survival rate, by about/at least 5, 10, 15, 20, 25, 30, 35, 40, 45, 50, 55, 60, 65, 70, 75, 80, 85, 90, 95, 100, 110, 120, 130, 140, 150, 160, 170, 180, 190, 200%6 or more, as compared to an untreated control.

[1014] In some embodiments, compositions of the present disclosure are applied at a rate sufficient to enhance one or more plant yield characteristics. According to some embodiments, one or more compositions of the present disclosure is/are applied in an amount sufficient to ensure the plant, plant part, plant growth medium and/or agricultural/floricultural/horticultural/silvicultural apparatus/facility is treated with an amount sufficient to enhance one or more plant yield characteristics, optionally biomass; bushels per acre; grain weight per plot (GWTPP); nutritional content; percentage of plants in a given area (e.g., plot) that fail to produce grain; yield at standard moisture percentage (YSMP), such as grain yield at standard moisture percentage (GYSMP); yield per plot (YPP), such as grain weight per plot (GWTPP); and yield reduction (YRED), by about/at least 5, 10, 15, 20, 25, 30, 35, 40, 45, 50, 55, 60, 65, 70, 75, 80, 85, 90, 95, 100, 110, 120, 130, 140, 150, 160, 170, 180, 190, 200%6 or more, as compared to an untreated control.

[1015] In some embodiments, compositions of the present disclosure are applied at a rate sufficient to reduce the need for exogenous fertilizer. According to some embodiments, one or more compositions of the present disclosure is/are applied in an amount sufficient to ensure the plant, plant part, plant growth medium and/or agricultural/floricultural/horticultural/silvicultural apparatus/facility is treated with an amount sufficient to reduce the amount(s) of exogenous fertilizer, optionally exogenous boron, calcium, carbon, copper, iron, magnesium, manganese, molybdenum, nitrogen, phosphorous, potassium, sulfur and/or zinc, needed to achieve a desired result by about/at least 5, 10, 15, 20, 25, 30, 35, 40, 45, 50, 55, 60, 65, 70, 75, 80, 85, 90, 95, or 100%, as compared to an untreated control.

[1016] In some embodiments, compositions of the present disclosure are applied at a rate sufficient to enhance the efficacy of a biological pesticide. According to some embodiments, one or more compositions of the present disclosure is/are applied in an amount sufficient to ensure the plant, plant part, plant growth medium and/or agricultural/floricultural/horticultural/silvicultural apparatus/facility is treated with an amount sufficient to enhance the efficacy of a biological pesticide by about/at least 5, 10, 15, 20, 25, 30, 35, 40, 45, 50, 55, 60, 65, 70, 75, 80, 85, 90, 95, 100, 110, 120, 130, 140, 150, 160, 170, 180, 190, 200% or more, as compared to an untreated control.

[1017] In some embodiments, compositions of the present disclosure are applied at a rate sufficient to enhance the efficacy of a chemical pesticide. According to some embodiments, one or more compositions of the present disclosure is/are applied in an amount sufficient to ensure the plant, plant part, plant growth medium and/or agricultural/floricultural/horticultural/silvicultural apparatus/facility is treated with an amount sufficient to enhance the efficacy of a chemical pesticide by about/at least 5, 10, 15, 20, 25, 30, 35, 40, 45, 50, 55, 60, 65, 70, 75, 80, 85, 90, 95, 100, 110, 120, 130, 140, 150, 160, 170, 180, 190, 200% or more, as compared to an untreated control.

[1018] In some embodiments, compositions of the present disclosure are applied at a rate sufficient to reduce one or more aspects of pesticide-induced pest resistance. According to some embodiments, one or more compositions of the present disclosure is/are applied in an amount sufficient to ensure the plant, plant part, plant growth medium and/or agricultural/floricultural/horticultural/silvicultural apparatus/facility is treated with an amount sufficient to reduce one or more aspects of pesticide-induced pest resistance by about/at least 5, 10, 15, 20, 25, 30, 35, 40, 45, 50, 55, 60, 65, 70, 75, 80, 85, 90, 95, or 100%, as compared to an untreated control.

[1019] In some embodiments, compositions of the present disclosure are applied at a rate sufficient to reduce one or more aspects of pesticide-induced phytotoxicity. According to some embodiments, one or more compositions of the present disclosure is/are applied in an amount sufficient to ensure the plant, plant part, plant growth medium and/or agricultural/floricultural/horticultural/silvicultural apparatus/facility is treated with an amount sufficient to reduce one or more aspects of pesticide-induced phytotoxicity by about/at least 5, 10, 15, 20, 25, 30, 35, 40, 45, 50, 55, 60, 65, 70, 75, 80, 85, 90, 95, or 100%, as compared to an untreated control.

[1020] In some embodiments, compositions of the present disclosure are applied at a rate sufficient to delay ripening of a harvest plant or plant part. According to some embodiments, one or more compositions of the present disclosure is/are applied in an amount sufficient to ensure the plant, plant part, plant growth medium and/or agricultural/floricultural/horticultural/silvicultural apparatus/facility is treated with an amount sufficient to delay ripening of a harvest plant or plant part by about/at least 5, 10, 15, 20, 25, 30, 35, 40, 45, 50, 55, 60, 65, 70, 75, 80, 85, 90, 95, or 100%, as compared to an untreated control.

[1021] In some embodiments, compositions of the present disclosure are applied at a rate sufficient to hasten ripening of a harvest plant or plant part. According to some embodiments, one or more compositions of the present disclosure is/are applied in an amount sufficient to ensure the plant, plant part, plant growth medium and/or agricultural/floricultural/horticultural/silvicultural apparatus/facility is treated with an amount sufficient to hasten ripening of a harvest plant or plant part by about/at least 5, 10, 15, 20, 25, 30, 35, 40, 45, 50, 55, 60, 65, 70, 75, 80, 85, 90, 95, or 100%, as compared to an untreated control.

[1022] In some embodiments, compositions of the present disclosure are applied at a rate sufficient to extend the shelf-life of a harvested plant or plant part. According to some embodiments, one or more compositions of the present disclosure is/are applied in an amount sufficient to ensure the plant, plant part, plant growth medium and/or agricultural/floricultural/horticultural/silvicultural apparatus/facility is treated with an amount sufficient to extend the shelf-life of a harvested plant or plant part by about/at least 5, 10, 15, 20, 25, 30, 35, 40, 45, 50, 55, 60, 65, 70, 75, 80, 85, 90, 95, 100, 110, 120, 130, 140, 150, 160, 170, 180, 190, 200% or more, as compared to an untreated control.

[1023] The present disclosure extends to plant growth media, plants, plant parts and agricultural/floricultural/horticultural/silvicultural apparatuses/facilities that have been treated with a composition of the present disclosure (e.g., plant propagation materials coated with a formulation comprising one or more enzymes of the present disclosure, plants sprayed with a formulation comprising one or more enzymes of the present disclosure, harvested plant parts coated with a formulation comprising one or more enzymes of the present disclosure), to plants grown from plant propagation materials that were treated with a composition of the present disclosure, to plant parts harvested from plants that have been treated with a composition of the present disclosure, to plant parts harvested from plants grown from plant propagation materials that were treated with a composition of the present disclosure, to crops comprising a plurality of plants that were treated with a composition of the present disclosure, to crops comprising a plurality of plants grown from plant propagation materials that were treated with a composition of the present disclosure, to crops treated with a composition of the present disclosure, to processed products derived from plants that were treated with a composition of the present disclosure, to processed products derived from plants grown from plant parts that were treated with a composition of the present disclosure, and to processed products treated with a composition of the present disclosure.

[1024] The present disclosure encompasses coated plant propagation materials comprising, consisting essentially of, or consisting of a plant propagation material and a coating that covers at least a portion of the outer surface of the plant propagation material, said coating comprising, consisting essentially of, or consisting of one or more compositions of the present disclosure.

[1025] In some embodiments, the coating comprises two, three, four, five or more layers. According to some embodiments, the coating comprises an inner layer that contains one or more proteins of the present disclosure and one or more outer layers free or substantially free of proteins of the present disclosure. In some embodiments, the coating comprises an inner layer that is a composition of the present disclosure and an outer layer that is equivalent to a composition of the present disclosure except that it does not contain proteins of the present disclosure.

[1026] In some embodiments, the coating comprises, consists essentially of, or consists of a composition of the present disclosure and a drying powder. Drying powders may be applied in any suitable amount(s)/concentration(s). The absolute value of the amount/concentration that is/are sufficient to cause the desired effect(s) may be affected by factors such as the type, size and volume of material to which the composition will be applied, the type(s) of proteins in the composition, the number of proteins in the composition, the stability of the proteins in the composition and storage conditions (e.g., temperature, relative humidity, duration). Those skilled in the art will understand how to select an effective amount/concentration using routine dose-response experiments. Guidance for the selection of appropriate amounts/concentrations can be found, for example, in International Patent Application Nos. PCT/US2016/050529 and PCT/US2016/050647 and U.S. Provisional Patent Application Nos. 62/296,798; 62/271,857; 62/347,773; 62/343,217; 62/296,784; 62/271,873; 62/347,785; 62/347,794; and 62/347,805. In some embodiments, the drying powder is applied in an amount ranging from about 0.5 to about 10 grams of drying powder per kilogram of plant propagation material. For example, in some embodiments, about 0.5, 1, 1.25, 1.5, 1.75, 2, 2.25, 2.5, 2.75, 3, 3.25, 3.5, 3.75, 4, 4.25, 4.5, 4.75, 5, 5.5, 6, 6.5, 7, 7.5, 8, 8.5, 9, 9.5, 10 grams or more of drying powder (e.g., drying powder comprising magnesium stearate, magnesium sulfate, powdered milk, silica, soy lecithin and/or talc) is applied per kilogram of seed. In some embodiments, a drying powder comprising calcium stearate, attapulgite clay, montmorillonite clay, graphite, magnesium stearate, silica (e.g., fumed silica, hydrophobically-coated silica and/or precipitated silica) and/or talc is applied to seeds coated with a composition of the present disclosure at a rate of about 1, 1.25, 1.5, 1.75, 2, 2.25, 2.5, 2.75, or 3 grams per kilogram of seed.

[1027] In some embodiments, the coating completely covers the outer surface of the plant propagation material.

[1028] In some embodiments, the average thickness of the coating is at least 1.5, 1.6, 1.7, 1.8, 1.9, 2.0, 2.1, 2.2, 2.3, 2.4, 2.5, 2.6, 2.7, 2.8, 2.9, 3.0, 3.1, 3.2, 3.3, 3.4, 3.5, 4, 4.5, 5 μm or more. In some embodiments, the average thickness of the coating is about 1.5 to about 3.0 μm.

[1029] The present disclosure extends to kits comprising, consisting essentially of, or consisting of one or more plants and/or plant parts (e.g., coated plant propagation materials) that have been treated with the compositions of the present disclosure and a container housing the treated plant(s) and/or plant part(s). In some embodiments, the kit further comprises one or more oxygen scavengers, such as activated carbon, ascorbic acid, iron powder, mixtures of ferrous carbonate and metal halide catalysts, sodium chloride and/or sodium hydrogen carbonate.

[1030] The container may comprise any suitable material(s), including, but not limited to, materials that reduce the amount of light, moisture and/or oxygen that contact the coated plant propagation material when the container is sealed. In some embodiments, the container comprises, consists essentially of, or consists of a material having light permeability of less than about 1, 2, 3, 4, 5, 6, 7, 8, 9, 10, 15, 20, 25, 30, 35, 40, 45, 50, 55, 60, 65, 70 or 75%. In some embodiments, the container comprises, consists essentially of, or consists of a material having an oxygen transmission rate of less than about 5, 10, 15, 20, 25, 30, 35, 40, 45, 50, 60, 70, 80, 90, 100, 125, 150, 175, 200, 225, 250, 275, 300, 325, 350, 375, 400, 425, 450, 475, or 500 cm³/m²·day (as measured in accordance with ASTM D3985).

[1031] In some embodiments, the container reduces the amount of ambient light that reaches said coated plant propagation material by about 5, 10, 15, 20, 25, 30, 35, 40, 45, 50, 55, 60, 65, 70, 75, 80, 85, 90, 95 or 100% when sealed.

[1032] In some embodiments, the container reduces the amount of ambient moisture that reaches said plant propagation material by about 5, 10, 15, 20, 25, 30, 35, 40, 45, 50, 55, 60, 65, 70, 75, 80, 85, 90, 95 or 100% when sealed.

[1033] In some embodiments, the container reduces the amount of ambient oxygen that reaches said plant propagation material by about 5, 10, 15, 20, 25, 30, 35, 40, 45, 50, 55, 60, 65, 70, 75, 80, 85, 90, 95 or 100% when sealed.

[1034] In some embodiments, kits of the present disclosure comprise 1, 2, 3, 4, 5 or more additional containers. The additional containers may comprise any suitable component(s) or composition(s), including, but not limited to, agriculturally beneficial microorganisms, biostimulants, drying agents, nutrients, oxidation control components and pesticides. Examples of agriculturally beneficial microorganisms, biostimulants, drying agents, nutrients, oxidation control components and pesticides that may be included in the additional containers are described above.

[1035] As noted above, proteins of the present disclosure may be formulated into compositions comprising a variety of components, such as adhesives (stickers), chemical actives, dispersants (spreaders), drying agents, emulsifiers, microbes, nutrients, pest attractants and feeding stimulants, pH control components, postharvest treatments, rain fasteners, rhcalogical agents, safeners, stabilizers, UV protectants and wetting agents. It is to be understood that compositions and methods of the present disclosure may likewise be used in combination with such components as separate and distinct compositions (as part of an integrated pest management strategy, for example).

[1036] It is to be understood that compositions and methods of the present disclosure may be combined with known compositions and methods, such as fertilization compositions/methods, inoculant compositions/methods, pesticide compositions/methods, and post-harvest compositions/methods.

[1037] In some instances, compositions and methods of the present disclosure are used as part of an Integrated Pest Management program/strategy. According to some embodiments, one or more proteins, organisms and/or formulations of the present disclosure is/are applied to a plant, plant part or plant growth medium as part of an Integrated Pest Management program/strategy comprising one or more biological pesticides and/or one or more chemical pesticides.

[1038] It is to be understood that compositions and methods of the present disclosure are not limited to agricultural/floricultural/horticultural/silvicultural uses. The same activities that make enzymes, formulations, nucleic acids and organisms of the present disclosure useful for preventing, treating, suppressing and/or eliminating infestations/infections of/by phytopathogenic pests likewise render them useful for preventing/treating/suppressing/eliminating/reducing the detrimental effects of infestations/infections of/by arachnids, bacteria, fungi, insects, oomycetes, protozoa and viruses in and on myriad surfaces/substances, such as food storage containers, animal bedding/feed, clothing, hard surfaces, medical instruments, etc. Thus, it is to be understood that compositions and methods of the present disclosure may be modified for use in any other industry or endeavor in which such prevention/treatment/suppression/elimination/reduction may be of benefit.

[1039] For example, in some embodiments, the present disclosure extends to animal feed compositions comprising, consisting essentially of or consisting of a food component and an enzyme component, said enzyme component comprising, consisting essentially of, or consisting of one or more compositions of the present disclosure.

[1040] Animal feed compositions of the present disclosure may comprise any suitable food component, including, but not limited to, fodder (e.g., grains, hay, legumes, silage and/or straw) and forage (e.g., grass).

[1041] Animal feed compositions of the present disclosure may be fed to any suitable animal, including, but not limited to, farm animals, zoo animals, laboratory animals and/or companion animals. In some embodiments, the animal feed composition is formulated to meet the dietary needs of birds (e.g., chickens, ducks, quails and/or turkeys), bovids (e.g., antelopes, bison, cattle, gazelles, goats, impala, oxen, sheep and/or wildebeasts), canines, cervids (e.g., caribou, deer, elk and/or moose), equines (e.g., donkeys, horses and/or zebras), felines, fish, pigs, rabbits, rodents (e.g., guinea pigs, hamsters, mice and/or rats) and the like.

[1042] The following is a non-exhaustive listing of concepts and embodiments encompassed by the present disclosure: Use of a composition of the present disclosure (e.g., a protein or formulation of the present disclosure) for any one, two, three, four, five, six, seven, eight, nine, ten or more of the following:
[1043] 1) preventing, treating, suppressing and/or eliminating infestation/infection of a surface/substance of/by one or more pests, optionally one or more acarids, bacteria, fungi, gastropods, insects, nematodes, oomycetes, protozoa and/or viruses;
[1044] 2) preventing, treating, suppressing and/or eliminating infestation/infection of a plant, plant part, plant growth medium or agricultural/floricultural/horticultural/silvicultural apparatus/facility (e.g., an apparatus/facility for planting, irrigating, fertilizing, growing, monitoring, testing, harvesting, processing, packaging and/or storing a plant or plant part) of/by one or more phytopathogenic pests, optionally one or more arachnids, bacteria, fungi, gastropods, insects, nematodes, oomycetes protozoa, viruses and/or weeds;
[1045] 3) reducing one or more aspects of disease severity in a plant or plant part affected by one or more phytopathogenic pests, optionally one or more arachnids, bacteria, fungi, gastropods, insects, nematodes, oomycetes protozoa, viruses and/or weeds;
[1046] 4) reducing one or more aspects of disease severity in a plant or plant part grown in a plant growth medium that is infested/infected by/with one or more phytopathogenic pests, optionally one or more arachnids, bacteria, fungi, gastropods, insects, nematodes, oomycetes protozoa, viruses and/or weeds;
[1047] 5) reducing one or more aspects of disease severity in a plant or plant part grown in or contacted by agricultural/floricultural/horticultural/silvicultural apparatus/facility that is infested/infected by/with one or more phytopathogenic pests, optionally one or more arachnids, bacteria, fungi, gastropods, insects, nematodes, oomycetes protozoa, viruses and/or weeds;
[1048] 6) treating a surface/substance that is susceptible to infestation/infection by one or more pests, optionally one or more acarids, bacteria, fungi, gastropods, insects, nematodes, oomycetes, protozoa and/or viruses;
[1049] 7) cleaning a surface/substance that is infested/infected by one or more pests, optionally one or more acarids, bacteria, fungi, gastropods, insects, nematodes, oomycetes, protozoa and/or viruses;
[1050] 8) treating (e.g., coating, dipping, drenching, fogging, misting, soaking, spraying) a plant or plant part;
[1051] 9) treating (e.g., drenching, fogging, misting, spraying) a plant growth medium;
[1052] 10) treating (e.g., coating, dipping, drenching, fogging, irrigating, misting, soaking, spraying) an agricultural/floricultural/horticultural/silvicultural apparatus/facility, optionally an apparatus/facility for planting, irrigating, fertilizing, growing, monitoring, testing, harvesting, processing, packaging and/or storing a plant or plant part;
[1053] 11) improving one or more soil characteristics;
[1054] 12) improving nutrient availability/uptake/accumulation, optionally boron, calcium, carbon, copper, iron, magnesium, manganese, molybdenum, nitrogen, phosphorous, potassium, sulfur and/or zinc availability/uptake/accumulation;
[1055] 13) improving one or more characteristics of plant growth and/or development;
[1056] 14) reducing the need for exogenous fertilize;
[1057] 15) reducing the amount(s) of exogenous fertilizer needed to achieve desired result;
[1058] 16) improving one or more characteristics of plant yield;
[1059] 17) prolonging the shelf-life of a harvested plant or plant part;
[1060] 18) delaying the ripening of a harvested plant or plant part;
[1061] 19) hastening the ripening of a harvested plant or plant part;
[1062] 20) improving the efficacy of a chemical pesticide, optionally an acaricide, bactericide, fungicide, gastropodicide, herbicide, insecticide, nematicide, oomyceticide, protozoacide or viricide;
[1063] 21) improving the efficacy of a biological pesticide, optionally an acaricide, bactericide, fungicide, gastropodicide, herbicide, insecticide, nematicide, oomyceticide, protozoacide or viricide;
[1064] 22) improving the efficacy of a preharvest treatment;
[1065] 23) improving the efficacy of a postharvest treatment;
[1066] 24) preventing, treating, suppressing and/or eliminating chemical pesticide-induced pest resistance and/or phytotoxicity;
[1067] 25) preventing, treating, suppressing and/or eliminating biological pesticide-induced pest resistance and/or phytotoxicity;
[1068] 26) inclusion as part of an Integrated Pest Management program/strategy, optionally an Integrated Pest Management program/strategy comprising one or more chemical pesticides.

[1069] Any of the foregoing uses in which any one, two, three, four, five, six, seven, eight, nine, ten or more of the following is true:
[1070] 1) the composition comprises, consists essentially of or consists of an enzyme
[1071] 2) the composition comprises, consists essentially of or consists of an enzyme belonging to EC 1
[1072] 3) the composition comprises, consists essentially of or consists of an enzyme belonging to EC 1.1
[1073] 4) the composition comprises, consists essentially of or consists of an enzyme belonging to EC 1.1.3
[1074] 5) the composition comprises, consists essentially of or consists of an enzyme belonging to EC 1.1.3.4
[1075] 6) the composition comprises, consists essentially of or consists of an enzyme belonging to EC 1.1.99
[1076] 7) the composition comprises, consists essentially of or consists of an enzyme belonging to EC 1.1.99.18
[1077] 8) the composition comprises, consists essentially of or consists of an enzyme belonging to EC 1.4
[1078] 9) the composition comprises, consists essentially of or consists of an enzyme belonging to EC 1.4.3
[1079] 10) the composition comprises, consists essentially of or consists of an enzyme belonging to EC 1.4.3.1
[1080] 11) the composition comprises, consists essentially of or consists of an enzyme belonging to EC 1.4.3.2
[1081] 12) the composition comprises, consists essentially of or consists of an enzyme belonging to EC 1.4.3.3
[1082] 13) the composition comprises, consists essentially of or consists of an enzyme belonging to EC 1.4.3.7
[1083] 14) the composition comprises, consists essentially of or consists of an enzyme belonging to EC 1.4.3.11
[1084] 15) the composition comprises, consists essentially of or consists of an enzyme belonging to EC 1.4.3.12
[1085] 16) the composition comprises, consists essentially of or consists of an enzyme belonging to EC 1.4.3.13
[1086] 17) the composition comprises, consists essentially of or consists of an enzyme belonging to EC 1.4.3.14
[1087] 18) the composition comprises, consists essentially of or consists of an enzyme belonging to EC 1.4.3.15
[1088] 19) the composition comprises, consists essentially of or consists of an enzyme belonging to EC 1.4.3.16
[1089] 20) the composition comprises, consists essentially of or consists of an enzyme belonging to EC 1.4.3.19
[1090] 21) the composition comprises, consists essentially of or consists of an enzyme belonging to EC 1.4.3.20
[1091] 22) the composition comprises, consists essentially of or consists of an enzyme belonging to EC 1.4.3.25
[1092] 23) the composition comprises, consists essentially of or consists of an enzyme belonging to EC 1.10
[1093] 24) the composition comprises, consists essentially of or consists of an enzyme belonging to EC 1.10.3
[1094] 25) the composition comprises, consists essentially of or consists of an enzyme belonging to EC 1.10.3.2
[1095] 26) the composition comprises, consists essentially of or consists of an enzyme belonging to EC 1.11
[1096] 27) the composition comprises, consists essentially of or consists of an enzyme belonging to EC 1.11.1
[1097] 28) the composition comprises, consists essentially of or consists of an enzyme belonging to EC 1.11.1.6
[1098] 29) the composition comprises, consists essentially of or consists of an enzyme belonging to EC 1.11.1.7
[1099] 30) the composition comprises, consists essentially of or consists of an enzyme belonging to EC 1.14
[1100] 31) the composition comprises, consists essentially of or consists of an enzyme belonging to EC 1.14.18
[1101] 32) the composition comprises, consists essentially of or consists of an enzyme belonging to EC 1.14.18.1
[1102] 33) the composition comprises, consists essentially of or consists of an enzyme belonging to EC 1.14.99
[1103] 34) the composition comprises, consists essentially of or consists of an enzyme belonging to EC 1.14.99.56
[1104] 35) the composition comprises, consists essentially of or consists of an enzyme belonging to EC 2
[1105] 36) the composition comprises, consists essentially of or consists of an enzyme belonging to EC 2.3
[1106] 37) the composition comprises, consists essentially of or consists of an enzyme belonging to EC 2.3.2
[1107] 38) the composition comprises, consists essentially of or consists of an enzyme belonging to EC 2.3.2.2
[1108] 39) the composition comprises, consists essentially of or consists of an enzyme belonging to EC 3
[1109] 40) the composition comprises, consists essentially of or consists of an enzyme belonging to EC 3.1
[1110] 41) the composition comprises, consists essentially of or consists of an enzyme belonging to EC 3.1.1
[1111] 42) the composition comprises, consists essentially of or consists of an enzyme belonging to EC 3.1.1.3
[1112] 43) the composition comprises, consists essentially of or consists of an enzyme belonging to EC 3.1.1.5
[1113] 44) the composition comprises, consists essentially of or consists of an enzyme belonging to EC 3.1.1.11
[1114] 45) the composition comprises, consists essentially of or consists of an enzyme belonging to EC 3.1.1.32
[1115] 46) the composition comprises, consists essentially of or consists of an enzyme belonging to EC 3.1.1.74
[1116] 47) the composition comprises, consists essentially of or consists of an enzyme belonging to EC 3.1.4
[1117] 48) the composition comprises, consists essentially of or consists of an enzyme belonging to EC 3.1.4.3
[1118] 49) the composition comprises, consists essentially of or consists of an enzyme belonging to EC 3.1.4.11
[1119] 50) the composition comprises, consists essentially of or consists of an enzyme belonging to EC 3.2
[1120] 51) the composition comprises, consists essentially of or consists of an enzyme belonging to EC 3.2.1
[1121] 52) the composition comprises, consists essentially of or consists of an enzyme belonging to EC 3.2.1.1
[1122] 53) the composition comprises, consists essentially of or consists of an enzyme belonging to EC 3.2.1.2
[1123] 54) the composition comprises, consists essentially of or consists of an enzyme belonging to EC 3.2.1.3
[1124] 55) the composition comprises, consists essentially of or consists of an enzyme belonging to EC 3.2.1.4
[1125] 56) the composition comprises, consists essentially of or consists of an enzyme belonging to EC 3.2.1.5
[1126] 57) the composition comprises, consists essentially of or consists of an enzyme belonging to EC 3.2.1.6
[1127] 58) the composition comprises, consists essentially of or consists of an enzyme belonging to EC 3.2.1.7
[1128] 59) the composition comprises, consists essentially of or consists of an enzyme belonging to EC 3.2.1.8
[1129] 60) the composition comprises, consists essentially of or consists of an enzyme belonging to EC 3.2.1.10
[1130] 61) the composition comprises, consists essentially of or consists of an enzyme belonging to EC 3.2.1.11
[1131] 62) the composition comprises, consists essentially of or consists of an enzyme belonging to EC 3.2.1.14
[1132] 63) the composition comprises, consists essentially of or consists of an enzyme belonging to EC 3.2.1.15
[1133] 64) the composition comprises, consists essentially of or consists of an enzyme belonging to EC 3.2.1.17
[1134] 65) the composition comprises, consists essentially of or consists of an enzyme belonging to EC 3.2.1.20
[1135] 66) the composition comprises, consists essentially of or consists of an enzyme belonging to EC 3.2.1.21
[1136] 67) the composition comprises, consists essentially of or consists of an enzyme belonging to EC 3.2.1.22
[1137] 68) the composition comprises, consists essentially of or consists of an enzyme belonging to EC 3.2.1.23
[1138] 69) the composition comprises, consists essentially of or consists of an enzyme belonging to EC 3.2.1.24
[1139] 70) the composition comprises, consists essentially of or consists of an enzyme belonging to EC 3.2.1.25
[1140] 71) the composition comprises, consists essentially of or consists of an enzyme belonging to EC 3.2.1.26
[1141] 72) the composition comprises, consists essentially of or consists of an enzyme belonging to EC 3.2.1.28
[1142] 73) the composition comprises, consists essentially of or consists of an enzyme belonging to EC 3.2.1.32
[1143] 74) the composition comprises, consists essentially of or consists of an enzyme belonging to EC 3.2.1.37
[1144] 75) the composition comprises, consists essentially of or consists of an enzyme belonging to EC 3.2.1.39
[1145] 76) the composition comprises, consists essentially of or consists of an enzyme belonging to EC 3.2.1.41
[1146] 77) the composition comprises, consists essentially of or consists of an enzyme belonging to EC 3.2.1.55
[1147] 78) the composition comprises, consists essentially of or consists of an enzyme belonging to EC 3.2.1.58
[1148] 79) the composition comprises, consists essentially of or consists of an enzyme belonging to EC 3.2.1.59
[1149] 80) the composition comprises, consists essentially of or consists of an enzyme belonging to EC 3.2.1.73
[1150] 81) the composition comprises, consists essentially of or consists of an enzyme belonging to EC 3.2.1.75
[1151] 82) the composition comprises, consists essentially of or consists of an enzyme belonging to EC 3.2.1.78
[1152] 83) the composition comprises, consists essentially of or consists of an enzyme belonging to EC 3.2.1.91
[1153] 84) the composition comprises, consists essentially of or consists of an enzyme belonging to EC 3.2.1.92
[1154] 85) the composition comprises, consists essentially of or consists of an enzyme belonging to EC 3.2.1.97
[1155] 86) the composition comprises, consists essentially of or consists of an enzyme belonging to EC 3.2.1.101
[1156] 87) the composition comprises, consists essentially of or consists of an enzyme belonging to EC 3.2.1.109
[1157] 88) the composition comprises, consists essentially of or consists of an enzyme belonging to EC 3.2.1.111
[1158] 89) the composition comprises, consists essentially of or consists of an enzyme belonging to EC 3.2.1.112
[1159] 90) the composition comprises, consists essentially of or consists of an enzyme belonging to EC 3.2.1.125
[1160] 91) the composition comprises, consists essentially of or consists of an enzyme belonging to EC 3.2.1.130
[1161] 92) the composition comprises, consists essentially of or consists of an enzyme belonging to EC 3.2.1.132
[1162] 93) the composition comprises, consists essentially of or consists of an enzyme belonging to EC 3.2.1.133
[1163] 94) the composition comprises, consists essentially of or consists of an enzyme belonging to EC 3.2.1.163
[1164] 95) the composition comprises, consists essentially of or consists of an enzyme belonging to EC 3.2.1.176
[1165] 96) the composition comprises, consists essentially of or consists of an enzyme belonging to EC 3.2.1.198
[1166] 97) the composition comprises, consists essentially of or consists of an enzyme belonging to EC 3.4
[1167] 98) the composition comprises, consists essentially of or consists of an enzyme belonging to EC 3.4.11
[1168] 99) the composition comprises, consists essentially of or consists of an enzyme belonging to EC 3.4.11.1
[1169] 100) the composition comprises, consists essentially of or consists of an enzyme belonging to EC 3.4.21
[1170] 101) the composition comprises, consists essentially of or consists of an enzyme belonging to EC 3.4.21.19
[1171] 102) the composition comprises, consists essentially of or consists of an enzyme belonging to EC 3.4.21.62
[1172] 103) the composition comprises, consists essentially of or consists of an enzyme belonging to EC 3.4.24
[1173] 104) the composition comprises, consists essentially of or consists of an enzyme belonging to EC 3.4.24.28
[1174] 105) the composition comprises, consists essentially of or consists of an enzyme belonging to EC 3.5
[1175] 106) the composition comprises, consists essentially of or consists of an enzyme belonging to EC 3.5.1
[1176] 107) the composition comprises, consists essentially of or consists of an enzyme belonging to EC 3.5.1.1
[1177] 108) the composition comprises, consists essentially of or consists of an enzyme belonging to EC 3.5.1.2
[1178] 109) the composition comprises, consists essentially of or consists of an enzyme belonging to EC 3.5.1.4
[1179] 110) the composition comprises, consists essentially of or consists of an enzyme belonging to EC 3.5.1.5
[1180] 111) the composition comprises, consists essentially of or consists of an enzyme belonging to EC 3.5.1.12
[1181] 112) the composition comprises, consists essentially of or consists of an enzyme belonging to EC 3.5.1.19
[1182] 113) the composition comprises, consists essentially of or consists of an enzyme belonging to EC 3.5.1.33
[1183] 114) the composition comprises, consists essentially of or consists of an enzyme belonging to EC 3.5.1.35
[1184] 115) the composition comprises, consists essentially of or consists of an enzyme belonging to EC 3.5.1.38
[1185] 116) the composition comprises, consists essentially of or consists of an enzyme belonging to EC 3.5.1.41
[1186] 117) the composition comprises, consists essentially of or consists of an enzyme belonging to EC 3.5.1.43
[1187] 118) the composition comprises, consists essentially of or consists of an enzyme belonging to EC 3.5.1.44
[1188] 119) the composition comprises, consists essentially of or consists of an enzyme belonging to EC 3.5.1.50
[1189] 120) the composition comprises, consists essentially of or consists of an enzyme belonging to EC 3.5.1.104
[1190] 121) the composition comprises, consists essentially of or consists of an enzyme belonging to EC 4
[1191] 122) the composition comprises, consists essentially of or consists of an enzyme belonging to EC 4.2
[1192] 123) the composition comprises, consists essentially of or consists of an enzyme belonging to EC 4.2.2
[1193] 124) the composition comprises, consists essentially of or consists of an enzyme belonging to EC 4.2.2.2
[1194] 125) the composition comprises, consists essentially of or consists of an enzyme belonging to EC 4.2.2.10
[1195] 126) the composition comprises, consists essentially of or consists of an enzyme belonging to EC 4.2.2.13
[1196] 127) the composition comprises, consists essentially of or consists of an enzyme belonging to EC 4.2.2.25
[1197] 128) the composition comprises, consists essentially of or consists of an enzyme belonging to EC 4.2.2.26
[1198] 129) the composition comprises, consists essentially of or consists of an enzyme belonging to EC 4.2.2.27
[1199] 130) the composition comprises, consists essentially of or consists of an enzyme belonging to EC 4.3
[1200] 131) the composition comprises, consists essentially of or consists of an enzyme belonging to EC 4.3.1
[1201] 132) the composition comprises, consists essentially of or consists of an enzyme belonging to EC 4.3.1.1
[1202] 133) the composition comprises, consists essentially of or consists of an enzyme belonging to EC 4.3.1.3
[1203] 134) the composition comprises, consists essentially of or consists of an enzyme belonging to EC 4.3.1.17
[1204] 135) the composition comprises, consists essentially of or consists of an enzyme belonging to EC 4.3.1.18
[1205] 136) the composition comprises, consists essentially of or consists of an enzyme belonging to EC 4.3.1.19
[1206] 137) the composition comprises, consists essentially of or consists of an enzyme belonging to EC 4.3.1.23
[1207] 138) the composition comprises, consists essentially of or consists of an enzyme belonging to EC 4.3.1.24
[1208] 139) the composition comprises, consists essentially of or consists of an enzyme belonging to EC 4.3.1.25
[1209] 140) the composition comprises, consists essentially of or consists of an enzyme belonging to EC 4.3.1.31
[1210] 141) the composition comprises, consists essentially of or consists of one or more polypeptides having about/at least 60, 61, 62, 63, 64, 65, 66, 67, 68, 69, 70, 71, 72, 73, 74, 75, 76, 77, 78, 79, 80, 81, 82, 83, 84, 85, 86, 87, 88, 89, 90, 91, 92, 93, 94, 95, 96, 97, 98, 99 or 100% sequence identity to one or more of SEQ ID NO(s): 1-91, 45906, 72144, 72147 and 72149 or a mature polypeptide thereof
[1211] 142) the composition comprises, consists essentially of or consists of one or more polypeptides encoded by a polynucleotide having about/at least 60, 61, 62, 63, 64, 65, 66, 67, 68, 69, 70, 71, 72, 73, 74, 75, 76, 77, 78, 79, 80, 81, 82, 83, 84, 85, 86, 87, 88, 89, 90, 91, 92, 93, 94, 95, 96, 97, 98, 99 or 100% sequence identity to any one or more of SEQ ID NO(s): 92-182, 72145-72146, 72148 and 72150 or the cDNA sequence thereof
[1212] 143) the composition comprises, consists essentially of or consists of one or more polypeptides derived from any one of SEQ ID NO(s): 1-91, 45906, 72144, 72147 and 72149 by substitution, deletion, or insertion of one or more amino acids
[1213] 144) the composition comprises, consists essentially of or consists of one or more polypeptides derived from a mature polypeptide of any one of SEQ ID NO(s): 1-91, 45906, 72144, 72147 and 72149 by substitution, deletion, or insertion of one or more amino acids
[1214] 145) the composition comprises, consists essentially of or consists of one or more polypeptides derived from any one of 71) through 74) wherein the N- and/or C-terminal end has been extended by the addition of one or more amino acids
[1215] 146) the composition comprises, consists essentially of or consists of a fragment of any one of 71) through 75)
[1216] 147) the composition comprises, consists essentially of or consists of an enzymatically active fragment/mutant/variant of any one of SEQ ID NO(s): 1-91, 45906, 72144, 72147 and 72149 or a mature polypeptide thereof
[1217] 148) the composition comprises a fusion protein, optionally a fusion protein comprising a first polypeptide and a second polypeptide wherein at least one of said first and second polypeptides is a protein of the present disclosure
[1218] 149) the composition comprises 2, 3, 4, 5, 6, 7, 8, 9, 10 or more proteins of the present disclosure or enzymatically active fragments/mutations/variants thereof
[1219] 150) the composition is an aqueous enzyme solution, optionally an aqueous enzyme solution comprising, consisting essentially of or consisting of water, one or more proteins of the present disclosure and one or more preservatives (e.g., potassium sorbate, sodium benzoate, 1,2-benzisothiazolin-3-one) and/or stabilizers (e.g., glycerol, potassium chloride, propylene glycol, sodium chloride, sorbitol)
[1220] 151) the composition comprises an agriculturally acceptable carrier
[1221] 152) the composition comprises a seed-compatible carrier
[1222] 153) the composition comprises a foliar-compatible carrier
[1223] 154) the composition comprises a soil-compatible carrier
[1224] 155) the composition comprises one or more adhesives (stickers), optionally one or more disaccharides (e.g., sucrose), gums and/or maltodextrins
[1225] 156) the composition comprises one or more beneficial agents
[1226] 157) the composition comprises one or more microorganisms
[1227] 158) the composition comprises one or more diazotrophs
[1228] 159) the composition comprises one or more phosphate-solubilizing microorganisms
[1229] 160) the composition comprises one or more bacteria, optionally one or more Alkalihalobacillus, Azospirillum, Bacillus, Bradyrhizobium, Campylobacter, Chryseobacterium, Clostridium, Dicytoglomus, Effusibacillus, Enterococcus, Erwinia, Escherichia, Flavobacterium, Fusobacterium, Geobacillus, Helicobacter, Ilyobacter, Lactobacillus, Lactococcus, Lederbergia, Lysinibacillus, Lysobacter, Neisseria, Neobacillus, Nocardiopsis, Oceanobacillus, Paenibacillus, Pseudomonas, Rhizobium, Salmonella, Sinorhizobium, Staphylococcus, Streptococcus, Streptomyces, Sutcliffiella, Ureaplasma and/or Yersinia
[1230] 161) the composition comprises one or more fungi, optionally one or more Acremonium, Acrophialophora, Aspergillus, Aureobasidium, Bjerkandera, Ceriporiopsis, Chaetomium, Chrysosporium, Colletotrichum, Coprinopsis, Coprinus, Coriolus, Cryphonectria, Cryptococcus, Evansstolkia, Filibasidium, Fusarium, Gliocladium, Glomus, Humicola, Magnaporthe, Metarhizium, Microdochium, Mucor, Myceliophthora, Neocallimastix, Neurospora, Ostropa, Paecilomyces, Penicilhum, Phlebia, Piromyces, Pleurotus, Pseudoplectania, Schizophyllum, Sodiomyces, Stenocarpella, Talaromyces, Thermoascus, Themochaetoides, Thermomyces, Thermothielavioides, Thermothelomyces, Thielavia, Tolypocladium, Trametes, Trichoderma, Trichophaea and/or Urnula
[1231] 162) the composition comprises one or more yeast, optionally one or more Candida, Hansenula, Komagataella, Kluyveromyces, Pichia, Saccharomyces, Schizosaccharomyces and/or Yarrowia
[1232] 163) the composition comprises one or more plant cells, optionally one or more Amaranthaceae, Asteraceae, Brassicaceae, Caricaceae, Cucurbitaceae, Fabaceae, Malvaceac, Poaceae, Polygonaceae, Rosaceae, Solanaceae and/or Vitaceae cells
[1233] 164) the composition comprises one or more biological pesticides, optionally one ormore biological acaricides, biological bactericides, biological fungicides, biological gastropodicides, biological herbicides, biological insecticides, biological miticides, biological nematicides, biological oomyceticides and/or biological protozoacides
[1234] 165) the composition comprises one or more chemical pesticides, optionally one or more chemical acaricides, chemical bactericides, chemical fungicides, chemical gastropodicides, chemical herbicides, chemical insecticides, chemical miticides, chemical nematicides, chemical oomyceticides and/or chemical protozoacides
[1235] 166) the composition comprises one or more microbial pesticides, optionally one or more microbial acaricides, microbial bactericides, one or more microbial fungicides, microbial gastropodicides, microbial herbicides, microbial insecticides, microbial miticides, microbial nematicides, microbial oomyceticides and/or microbial protozoacides
[1236] 167) the composition comprises one or more dispersants, optionally one or more alcohol ethoxylates and/or polyvinylpyrrolidones
[1237] 168) the composition comprises one or more drying agents
[1238] 169) the composition comprises one or more nutrients, optionally one or more organic acids (e.g., acetic acid, citric acid, lactic acid, malic acid, taurine, etc.), macrominerals (e.g., phosphorous, calcium, magnesium, potassium, sodium, iron, etc.), trace minerals (e.g., boron, cobalt, chloride, chromium, copper, fluoride, iodine, manganese, molybdenum, selenium, zinc, etc.), and/or vitamins (e.g., vitamin A, vitamin B complex (i.e., vitamin B₁, vitamin B₂, vitamin B₃, vitamin B₅, vitamin B₆, vitamin B₇, vitamin B₈, vitamin B₉, vitamin B₁₂, choline) vitamin C, vitamin D, vitamin E, vitamin K, carotenoids (α-carotene, β-carotene, cryptoxanthin, lutein, lycopene, zeaxanthin, etc.)
[1239] 170) the composition comprises one or more pest attractants
[1240] 171) the composition comprises one or more pest feeding stimulants
[1241] 172) the composition comprises one or more pH control components
[1242] 173) the composition has a pH within the operable range for each enzyme therein
[1243] 174) the composition has a pH within +/−1 pH-unit of the optimal pH for at least one enzyme therein
[1244] 175) the composition has a pH within +/−1 pH-unit of the optimal pH for each enzyme therein
[1245] 176) the composition has a pH of about 2.5 to about 7
[1246] 177) the composition has a pH of about 2.5 to about 6.5
[1247] 178) the composition has a pH of about 2.5 to about 6
[1248] 179) the composition has a pH of about 2.5 to about 5.5
[1249] 180) the composition has a pH of about 2.5 to about 5
[1250] 181) the composition has a pH of about 2.5 to about 4.5
[1251] 182) the composition has a pH of about 2.5 to about 4
[1252] 183) the composition has a pH of about 2.5 to about 3.5
[1253] 184) the composition has a pH of about 2.5 to about 3
[1254] 185) the composition has a pH of about 3 to about 7
[1255] 186) the composition has a pH of about 3 to about 6.5
[1256] 187) the composition has a pH of about 3 to about 6
[1257] 188) the composition has a pH of about 3 to about 5.5
[1258] 189) the composition has a pH of about 3 to about 5
[1259] 190) the composition has a pH of about 3 to about 4.5
[1260] 191) the composition has a pH of about 3 to about 4
[1261] 192) the composition has a pH of about 3 to about 3.5
[1262] 193) the composition has a pH of about 3.5 to about 7
[1263] 194) the composition has a pH of about 3.5 to about 6.5
[1264] 195) the composition has a pH of about 3.5 to about 6
[1265] 196) the composition has a pH of about 3.5 to about 5.5
[1266] 197) the composition has a pH of about 3.5 to about 5
[1267] 198) the composition has a pH of about 3.5 to about 4.5
[1268] 199) the composition has a pH of about 3.5 to about 4
[1269] 200) the composition has a pH of about 4 to about 7
[1270] 201) the composition has a pH of about 4 to about 6.5
[1271] 202) the composition has a pH of about 4 to about 6
[1272] 203) the composition has a pH of about 4 to about 5.5
[1273] 204) the composition has a pH of about 4 to about 5
[1274] 205) the composition has a pH of about 4 to about 4.5
[1275] 206) the composition has a pH of about 4.5 to about 8.5
[1276] 207) the composition has a pH of about 4.5 to about 8
[1277] 208) the composition has a pH of about 4.5 to about 7.5
[1278] 209) the composition has a pH of about 4.5 to about 7
[1279] 210) the composition has a pH of about 4.5 to about 6.5
[1280] 211) the composition has a pH of about 4.5 to about 6
[1281] 212) the composition has a pH of about 4.5 to about 5.5
[1282] 213) the composition has a pH of about 4.5 to about 5
[1283] 214) the composition has a pH of about 5 to about 9
[1284] 215) the composition has a pH of about 5 to about 8.5
[1285] 216) the composition has a pH of about 5 to about 8
[1286] 217) the composition has a pH of about 5 to about 7.5
[1287] 218) the composition has a pH of about 5 to about 7
[1288] 219) the composition has a pH of about 5 to about 6.5
[1289] 220) the composition has a pH of about 5 to about 6
[1290] 221) the composition has a pH of about 5 to about 5.5
[1291] 222) the composition has a pH of about 5.5 to about 8.5
[1292] 223) the composition has a pH of about 5.5 to about 8
[1293] 224) the composition has a pH of about 5.5 to about 7.5
[1294] 225) the composition has a pH of about 5.5 to about 7
[1295] 226) the composition has a pH of about 5.5 to about 6.5
[1296] 227) the composition has a pH of about 5.5 to about 6
[1297] 228) the composition has a pH of about 6 to about 11
[1298] 229) the composition has a pH of about 6 to about 10.5
[1299] 230) the composition has a pH of about 6 to about 10
[1300] 231) the composition has a pH of about 6 to about 9.5
[1301] 232) the composition has a pH of about 6 to about 9
[1302] 233) the composition has a pH of about 6 to about 8.5
[1303] 234) the composition has a pH of about 6 to about 8
[1304] 235) the composition has a pH of about 6 to about 7.5
[1305] 236) the composition has a pH of about 6 to about 7
[1306] 237) the composition has a pH of about 6 to about 6.5
[1307] 238) the composition has a pH of about 6.5 to about 11
[1308] 239) the composition has a pH of about 6.5 to about 10.5
[1309] 240) the composition has a pH of about 6.5 to about 10
[1310] 241) the composition has a pH of about 6.5 to about 9.5
[1311] 242) the composition has a pH of about 6.5 to about 9
[1312] 243) the composition has a pH of about 6.5 to about 8.5
[1313] 244) the composition has a pH of about 6.5 to about 8
[1314] 245) the composition has a pH of about 6.5 to about 7.5
[1315] 246) the composition has a pH of about 6.5 to about 7
[1316] 247) the composition has a pH of about 7 to about 11
[1317] 248) the composition has a pH of about 7 to about 10.5
[1318] 249) the composition has a pH of about 7 to about 10
[1319] 250) the composition has a pH of about 7 to about 9.5
[1320] 251) the composition has a pH of about 7 to about 9
[1321] 252) the composition has a pH of about 7 to about 8.5
[1322] 253) the composition has a pH of about 7 to about 8
[1323] 254) the composition has a pH of about 7 to about 7.5
[1324] 255) the composition has a pH of about 7.5 to about 11
[1325] 256) the composition has a pH of about 7.5 to about 10.5
[1326] 257) the composition has a pH of about 7.5 to about 10
[1327] 258) the composition has a pH of about 7.5 to about 9.5
[1328] 259) the composition has a pH of about 7.5 to about 9
[1329] 260) the composition has a pH of about 7.5 to about 8.5
[1330] 261) the composition has a pH of about 7.5 to about 8
[1331] 262) the composition has a pH of about 8 to about 11
[1332] 263) the composition has a pH of about 8 to about 10.5
[1333] 264) the composition has a pH of about 8 to about 10
[1334] 265) the composition has a pH of about 8 to about 9.5
[1335] 266) the composition has a pH of about 8 to about 9
[1336] 267) the composition has a pH of about 8 to about 8.5
[1337] 268) the composition has a pH of about 8.5 to about 11
[1338] 269) the composition has a pH of about 8.5 to about 10.5
[1339] 270) the composition has a pH of about 8.5 to about 10
[1340] 271) the composition has a pH of about 8.5 to about 9.5
[1341] 272) the composition has a pH of about 8.5 to about 9
[1342] 273) the composition has a pH of less than 4
[1343] 274) the composition has a pH of more than 4
[1344] 275) the composition has a pH of less than 5
[1345] 276) the composition has a pH of more than 5
[1346] 277) the composition has a pH of less than 6
[1347] 278) the composition has a pH of more than 6
[1348] 279) the composition has a pH of less than 6.5
[1349] 280) the composition has a pH of more than 6.5
[1350] 281) the composition has a pH of less than 7
[1351] 282) the composition has a pH of more than 7
[1352] 283) the composition has a pH of less than 7.5
[1353] 284) the composition has a pH of more than 7.5
[1354] 285) the composition has a pH of less than 8
[1355] 286) the composition has a pH of more than 8
[1356] 287) the composition has a pH of less than 9
[1357] 288) the composition has a pH of more than 9
[1358] 289) the composition comprises one or more postharvest treatments
[1359] 290) the composition comprises one or more essential oils
[1360] 291) the composition comprises one or more ethylene biosynthesis inhibitors
[1361] 292) the composition comprises one or more cyclopropenes
[1362] 293) the composition comprises one or more waxes
[1363] 294) the composition comprises one or more preservatives
[1364] 295) the composition comprises one or more benzoates (e.g., sodium benzoate)
[1365] 296) the composition comprises benzoic acid
[1366] 297) the composition comprises methyl paraben
[1367] 298) the composition comprises phenoxy ethanol
[1368] 299) the composition comprises one or more proprionates (e.g., ammonium proprionate, calcium proprionate, sodium proprionate)
[1369] 300) the composition comprises proprionic acid
[1370] 301) the composition comprises one or more sorbates (e.g., potassium sorbate, sodium sorbate)
[1371] 302) the composition comprises 1,2-benzisothiazolin-3-one (PROXEL®; Basel, Switzerland)
[1372] 303) the composition comprises one or more rain fasteners
[1373] 304) the composition comprises one or more organo-modified siloxanes
[1374] 305) the composition comprises one or more trisiloxanes
[1375] 306) the composition comprises one or more polysiloxanes
[1376] 307) the composition comprises one or more rhealogical agents
[1377] 308) the composition comprises one or more safeners
[1378] 309) the composition comprises one or more stabilizers, optionally one or more boric acid derivatives, inorganic salts, lactic acid, polyols, sugars, sugar alcohols and/or reversible protease inhibitors
[1379] 310) the composition comprises boric acid
[1380] 311) the composition comprises glycerol
[1381] 312) the composition comprises one or more UV protectants, optionally one or more aromatic amino acids, carotenoids, cinnamates, lignosulfonates, melanins, mycosporines, polyphenols and/or salicylates
[1382] 313) the composition comprises one or more wetting agents, optionally one or more naphthalene sulfonates
[1383] 314) the composition is applied in a pesticidally effective amount
[1384] 315) the composition is applied in an acaricidally effective amount
[1385] 316) the composition is applied in a bactericidally effective amount
[1386] 317) the composition is applied in a fungicidally effective amount
[1387] 318) the composition is applied in a gastropodicidally effective amount
[1388] 319) the composition is applied in an herbicidally effective amount
[1389] 320) the composition is applied in an insecticidally effective amount
[1390] 321) the composition is applied in an miticidally effective amount
[1391] 322) the composition is applied in a nematicidally effective amount
[1392] 323) the composition is applied in an oomyceticidally effective amount
[1393] 324) the composition is applied in a protozoacidally effective amount
[1394] 325) the composition is applied in a pesticidally ineffective amount (e.g., as an adjuvant)
[1395] 326) the composition is applied in an acaricidally ineffective amount (e.g., as an adjuvant)
[1396] 327) the composition is applied in a bactericidally ineffective amount (e.g., as an adjuvant)
[1397] 328) the composition is applied in a fungicidally ineffective amount (e.g., as an adjuvant)
[1398] 329) the composition is applied in a gastropodicidally ineffective amount (e.g., as an adjuvant)
[1399] 330) the composition is applied in a herbicidially ineffective amount (e.g., as an adjuvant)
[1400] 331) the composition is applied in an insecticidally ineffective amount (e.g., as an adjuvant)
[1401] 332) the composition is applied in an miticidally ineffective amount (e.g., as an adjuvant)
[1402] 333) the composition is applied in a nematicidally ineffective amount (e.g., as an adjuvant)
[1403] 334) the composition is applied in an oomyceticidally ineffective amount (e.g., as an adjuvant)
[1404] 335) the composition is applied in a protozoacidally ineffective amount (e.g., as an adjuvant)
[1405] 336) the composition is applied prior to planting
[1406] 337) the composition is applied at the time of planting
[1407] 338) the composition is applied after planting
[1408] 339) the composition is applied prior to germination
[1409] 340) the composition is applied at the time of germination
[1410] 341) the composition is applied after germination
[1411] 342) the composition is applied prior to seedling emergence
[1412] 343) the composition is applied at the time of seedling emergence
[1413] 344) the composition is applied after seeding emergence
[1414] 345) the composition is applied prior to vegetative stage
[1415] 346) the composition is applied during vegetative stage
[1416] 347) the composition is applied after vegetative stage
[1417] 348) the composition is applied prior to reproductive stage
[1418] 349) the composition is applied during reproductive stage
[1419] 350) the composition is applied after reproductive stage
[1420] 351) the composition is applied prior to flowering
[1421] 352) the composition is applied at the time of flowering
[1422] 353) the composition is applied after flowering
[1423] 354) the composition is applied prior to fruiting
[1424] 355) the composition is applied at the time of fruiting
[1425] 356) the composition is applied after fruiting
[1426] 357) the composition is applied prior to ripening
[1427] 358) the composition is applied at the time of ripening
[1428] 359) the composition is applied after ripening
[1429] 360) the composition is applied prior to pruning
[1430] 361) the composition is applied at the time of pruning
[1431] 362) the composition is applied after pruning
[1432] 363) the composition is applied prior to harvest
[1433] 364) the composition is applied at the time of harvest
[1434] 365) the composition is applied after harvest
[1435] 366) the composition is applied prior to storage and/or transport
[1436] 367) the composition is applied at the time of storage and/or transport
[1437] 368) the composition is applied after storage and/or transport
[1438] 369) the composition is used in combination with one or more adhesives
[1439] 370) the composition is used in combination with one or more beneficial agents
[1440] 371) the composition is used in combination with one or more microorganisms
[1441] 372) the composition is used in combination with one or more diazotrophs
[1442] 373) the composition is used in combination with one or more phosphate-solubilizing microorganisms
[1443] 374) the composition is used in combination with one or more bacteria, optionally one or more Alkalihalobacillus, Azospirillum, Bacillus, Bradyrhizobium, Campylobacter, Chryseobacterium, Clostridium, Dicytoglomus, Effusibacillus, Enterococcus, Erwinia, Escherichia, Flavobacterium, Fusobacterium, Geobacillus, Helicobacter, Ivobacter, Lactobacillus, Lactococcus, Lederbergia, Lysinibacillus, Lysobacter, Neisseria, Neobacillus, Nocardiopsis, Oceanobacillus, Paenibacillus, Pseudomonas, Rhizobium, Salmonella, Sinorhizobium, Staphylococcus, Streptococcus, Streptomyces, Sutclffiella, Ureaplasma and/or Yersinia 375) the composition is used in combination with one or more fungi, optionally one or more Acremonium, Acrophialophora, Aspergillus, Aureobasidium, Bjerkandera, Ceriporiopsis, Chaetomium, Chrysosporium, Colletotrichum, Coprinopsis, Coprinus, Coriolus, Cryphonectria, Cryptococcus, Fvansstolkia, Filibasidium, Fusarium, Gliocladium, Glomus, Humicola, Magnaporthe, Metarhizium, Microdochium, Mucor, Mycelhophthora, Neocallimastix, Neurospora, Ostropa, Paecilomyces, Penicilhum, Phlebia, Piromyces, Pleurotus, Pseudoplectania, Schizophyllum, Sodiomyces, Stenocarpella, Talaromyces, Thermoascus, Themochaetoides, Thermomyces, Thermothielavioides, Thermothelomyces, Thielavia, Tolypocladium, Trametes, Trichoderma, Trichophaea and/or Urnula 376) the composition is used in combination with one or more yeast, optionally one or more Candida, Hansenula, Komagataella, Kluyveromyces, Pichia, Saccharomyces, Schizosaccharomyces and/or Yarrowia
[1444] 377) the composition is used in combination with one or more biological pesticides, optionally one or more biological acaricides, biological bactericides, biological fungicides, biological gastropodicides, biological herbicides, biological insecticides, biological miticides, biological nematicides, biological oomyceticides and/or biological protozoacides
[1445] 378) the composition is used in combination with one or more chemical pesticides, optionally one or more chemical acaricides, chemical bactericides, chemical fungicides, chemical gastropodicides, chemical herbicides, chemical insecticides, chemical miticides, chemical nematicides, chemical oomyceticides and/or chemical protozoacides
[1446] 379) the composition is used in combination with one or more microbial pesticides, optionally one or more microbial acaricides, microbial bactericides, one or more microbial fungicides, microbial gastropodicides, microbial herbicides, microbial insecticides, microbial miticides, microbial nematicides, microbial oomyceticides and/or microbial protozoacides
[1447] 380) the composition is used in combination with one or more pest attractants
[1448] 381) the composition is used in combination with one or more pest feeding stimulants
[1449] 382) the composition is used in combination with one or more plant growth regulators
[1450] 383) the composition is used in combination with one or more rain fasteners
[1451] 384) the composition is used in combination with one or more organo-modified siloxanes
[1452] 385) the composition is used in combination with one or more trisiloxanes
[1453] 386) the composition is used in combination with one or more polysiloxanes
[1454] 387) the composition is used in combination with one or more preharvest treatments
[1455] 388) the composition is used in combination with one or more postharvest treatments
[1456] 389) the composition is used in combination with one or more essential oils
[1457] 390) the composition is used in combination with one or more ethylene biosynthesis inhibitors
[1458] 391) the composition is used in combination with one or more cyclopropenes
[1459] 392) the composition is used in combination with one or more waxes
[1460] 393) the composition is used in combination with one or more stabilizers, optionally one or more boric acid derivatives, inorganic salts, lactic acid, polyols, sugars, sugar alcohols and/or reversible protease inhibitors
[1461] 394) the composition is used in combination with one or more UV protectants, optionally one ormore aromatic amino acids, carotenoids, cinnamates, lignosulfonates, melanins, mycosporines, polyphenols and/or salicylates
[1462] 395) the composition is used in combination with one or more wetting agents, optionally one or more naphthalene sulfonates

[1463] Transgenic microorganisms, plants or plant parts for which any one, two, three, four, five, six, seven, eight, nine, ten or more of the following are true:
[1464] 1) comprises one or more polynucleotides encoding a polypeptide having about/at least 60, 61, 62, 63, 64, 65, 66, 67, 68, 69, 70, 71, 72, 73, 74, 75, 76, 77, 78, 79, 80, 81, 82, 83, 84, 85, 86, 87, 88, 89, 90, 91, 92, 93, 94, 95, 96, 97, 98, 99 or 100% sequence identity to one or more of SEQ ID NO(s): 1-91, 45906, 72144, 72147 and 72149 or a mature polypeptide thereof
[1465] 2) comprises one or more polynucleotides having about/at least 60, 61, 62, 63, 64, 65, 66, 67, 68, 69, 70, 71, 72, 73, 74, 75, 76, 77, 78, 79, 80, 81, 82, 83, 84, 85, 86, 87, 88, 89, 90, 91, 92, 93, 94, 95, 96, 97, 98, 99 or 100% sequence identity to any one or more of SEQ ID NO(s): 92-182, 72145-72146, 72148 and 72150 or the cDNA sequence thereof
[1466] 3) expresses one or more polypeptides having about/at least 60, 61, 62, 63, 64, 65, 66, 67, 68, 69, 70, 71, 72, 73, 74, 75, 76, 77, 78, 79, 80, 81, 82, 83, 84, 85, 86, 87, 88, 89, 90, 91, 92, 93, 94, 95, 96, 97, 98, 99 or 100% sequence identity to one or more of SEQ ID NO(s): 1-91, 45906, 72144, 72147 and 72149 or a mature polypeptide thereof
[1467] 4) comprises one or more polynucleotides encoding a polypeptide derived from any one of SEQ ID NO(s): 1-91, 45906, 72144, 72147 and 72149 by substitution, deletion, or insertion of one or more amino acids
[1468] 5) expresses one or more polypeptides derived from any one of SEQ ID NO(s): 1-91, 45906, 72144, 72147 and 72149 by substitution, deletion, or insertion of one or more amino acids
[1469] 6) comprises one or more polynucleotides encoding a polypeptide derived from a mature polypeptide of any one of SEQ ID NO(s): 1-91, 45906, 72144, 72147 and 72149 by substitution, deletion, or insertion of one or more amino acids
[1470] 7) expresses one or more polypeptides derived from a mature polypeptide of any one of SEQ ID NO(s): 1-91, 45906, 72144, 72147 and 72149 by substitution, deletion, or insertion of one or more amino acids
[1471] 8) comprises one or more polynucleotides encoding a polypeptide derived from any one of any one of SEQ ID NO(s): 1-91, 45906, 72144, 72147 and 72149 above wherein the N- and/or C-terminal end has been extended by the addition of one or more amino acids
[1472] 9) expresses one or more polypeptides derived from any one of SEQ ID NO(s): 1-91, 45906, 72144, 72147 and 72149 wherein the N- and/or C-terminal end has been extended by the addition of one or more amino acids
[1473] 10) comprises one or more polynucleotides encoding an enzymatically active fragment of any one of SEQ ID NO(s): 1-91, 45906, 72144, 72147 and 72149
[1474] 11) expresses an enzymatically active fragment of any one SEQ ID NO(s): 1-91, 45906, 72144, 72147 and 72149
[1475] 12) expresses an enzymatically active a fusion protein comprising a first polypeptide and a second polypeptide wherein at least one of said first and second polypeptides is a protein of the present disclosure.

### EXAMPLES

[1476] The following examples are provided to illustrate certain embodiments and are not to be construed as limiting the inventive concepts described in the present disclosure. Enzyme treatments are described in the corresponding Figures with reference to the predominant enzyme(s) comprised therein. It is to be understood that enzyme treatments may possess other enzymatic activities not expressly disclosed in the corresponding Figures. For example, an enzyme treatment having a predominant beta-glucanase activity may exhibit lesser side activities, such as cellulase activity and/or xylanase activity.

### Example 1

### Effective Control of Powdery Mildew

### Principle

[1477] Tested the efficacy of enzyme solutions for control of powdery mildew on wheat plants. Plants were sprayed with buffered enzyme solutions and subsequently inoculated with Blumeria graminis. Percent leaf area attacked was assessed nine days post-inoculation and again with two-day intervals until the full effects were seen. For scoring the standard EPPO scales (PP2/.10 (1)) were used. Experiments were conducted by Arhus University, Flakkebjerg, Denmark.

### Procedures

[1478] 1) Powdery mildew-susceptible wheat plants (var. Anja) were grown in a greenhouse for approximately two weeks until reaching the two-leaf crop growth stage (BBCH12).
[1479] 2) Plants were then sprayed with an enzyme solution comprising 0.1% TWEEN® 20, or a control solution comprising 0.1% TWEEN® 20 with no enzyme added, using a cabin sprayer (volume 600 mL; 150 L/ha, 3.6 km/hour, yellow nozzles 0.2). Six replicates were made for each condition.
[1480] 3) 24 hours after the initial spray application, the plants were sprayed with a Blumeria graminis spore suspension.
[1481] 4) After Blumeria graminis inoculation, the plants were kept under high relative humidity for 24 hours to ensure infection before being placed under normal greenhouse conditions.
[1482] 5) Percent leaf area attacked by powdery mildew was determined nine days after inoculation and again every two days until the full effects were found. For scoring, the standard EPPO scale was used (EPPO standards: Guidelines on good plant protection practice. Wheat. PP 2/10(1)).

### Results

[1483] Enzymes were evaluated for efficacy against Blumeria graminis as described above. Results are presented in FIG. 1 as percent disease control relative to an untreated, uninoculated control and an untreated, inoculated control at two timepoints/disease pressures. 100% control means no disease was detected in the treatment and 0% control means disease was at the same level as the untreated, inoculated control comparator.

### Example 2

### Effective Control of Gray Mold

### Principle

[1484] Evaluated the efficacy of enzyme solutions for control of gray mold on tomato leaf discs. Leaf discs were painted with buffered enzyme solutions and subsequently inoculated with Botrytis cinerea. After incubation for 24-96 hours, selected plant health parameters were evaluated using multispectral analysis. Testing was conducted at Ghent University (Ghent, Belgium).

### Procedures

[1485] 1) Tomato plants were grown in potting soil for 28 days. Leaf discs (diameter 20 mm) were cut from the 4^{th} composite leaves using a cork bore. Only one disc was punched from each leaf. All leaf discs were kept in a water bath until use.
[1486] 2) One leaf disc was placed in each well of a 24-well microtiter plate.
[1487] 3) Leaf discs were painted with enzyme solutions comprising 1 mg enzyme protein per mL in a 10 mM buffer solution (sodium acetate pH 5, potassium phosphate pH 6, potassium phosphate pH 7, or potassium phosphate pH 8), with or without 0.1% w/v surfactant (BREAK-THRU® S 301 or SILWET™ L-77), or with a corresponding control solution comprising no enzyme, and then air dried. Six replicates were made for each condition.
[1488] 4) After drying, discs were inoculated with two 5 μL drops of Botrytis cinerea spore suspension (106 spores per mL in 10 mM glucose, 0.067 mM K-phosphate buffer, pH 5) or with a corresponding solution comprising no Botrytis cinerea spores.
[1489] 5) Disease progression was monitored through multispectral imaging and visual inspection for water-soaked lesions. Multispectral images were taken at the start of the experiment (To) and after incubation for 24, 48, 72 and 96 hours. Fv/Fm, ChlIdx and mARI were evaluated from the spectral images. See Table 2. Mean Fv/Fm, ChlIdx and mARI values for leaves at T₀ were used as a reference (100%) to evaluate the Fv/Fm, ChlIdx and mARI values for treated leaves.

TABLE 2
Multispectral imaging parameters

| Parameter | Description | Reference |
|---|---|---|
| Fv/Fm | Efficiency of photosystem II in a dark-adapted state. Fv/Fm is deemed | Baker, ANN. REV. |
| | to be a proxy for potential phytotoxic effects of the enzyme on the | PLANT BIOL. |
| | photosynthesis for early time points. At later time points, the ratio is a | 59: 89-113 (2008). |
| | proxy for damage due to progressing infection by B. cinerea. The | |
| | higher values preferred. | |
| ChlIdx | Chlorophyll index, vegetation index for estimation of chlorophyll | Gitelson et al., J. |
| | content in leaves. Higher the chlorophyll indices indicate healthier leaf | PLANT PHYSIOL. |
| | tissue. | 160: 271-82 (2003). |
| mARI | Modified anthocyanin reflectance index; index for estimation of | Gitelson et al., AM. |
| | anthocyanin content in leaves. Anthocyanins play a dual role in plants | J. BOT. |
| | and can be associated with plant defense as well as with phytotoxicity | 96(10): 1861-68 |
| | and pathogenicity. Higher mARI values coincide with a lower | (2009). |
| | percentage of water-soaked lesions. | |
| cGFP | GFP fluorescence, corrected for autofluorescence due to leaf | |
| | senescence. Accumulation of GPF-tagged Fusarium graminearum PH- | |
| | 1 actively growing biomass was evaluated by means of its (corrected) | |
| | GFP-signal (cGFP). | |

### Results

[1490] Enzymes were evaluated for efficacy against Botrytis cinerea as described above. Results are presented in FIG. 2 as percentage increase of the spectral parameters (Fv/Fm, ChlIdx and mARI) and the percentage of water-soaked lesions (% WSL) as compared to the untreated, inoculated control.

### Example 3

### Effective Control of Head Blight

### Principle

[1491] Evaluated the efficacy of enzyme solutions for control of Fusarium head blight on detached wheat leaves. Detached leaves were treated with enzyme solution and subsequently inoculated with GFP-transformed Fusarium graminearum. Pathogen biomass was quantified via GFP, and plant health parameters were collected up to 96 hours post-inoculation. Testing was conducted at Ghent University (Ghent, Belgium).

### Procedures

[1492] 1) GFP-transformed Fusarium graminearum strain PH-1 was grown on potato dextrose agar for seven days at 21° C. under a regime of 12 h dark and 12 h combined UVA and UVC light to induce sporulation.
[1493] 2) A working spore suspension was created by adding approx. 20 mL of phosphate buffered saline containing 0.01% TWEEN® 80, pH 7.2-7.4, to the petri dish, agitating the mycelium with a spatula, separating spores from mycelium using a sterile filter, and then diluting to a concentration of 0.5×10⁶ spores per mL.
[1494] 3) Wheat plants were grown in potting soil for 10 days, after which leaves (approx. 6 cm) were detached and used in the bioassays described below.
[1495] 4) Detached leaves (leaf tops) were placed on their abaxial surface in rectangular petri dishes containing 0.5% (w/v) water agar supplemented with 40 mg benzimidazole per mL. The centers of the leaves were wounded with a scalpel by gently scraping the epidermal layer of the leaves.
[1496] 5) Wounded leaves were painted with enzyme solutions comprising 1 mg enzyme protein per mL in a 10 mM buffer solution (sodium acetate pH 5, potassium phosphate pH 6, potassium phosphate pH 7, or potassium phosphate pH 8), with or without 0.1% w/v surfactant (BREAK-THRU© S 301 or SILWET™ L-77), or with a corresponding control solution comprising no enzyme, and then air dried.

[1497] Six replicates were made for each condition.
[1498] 6) After drying, each leaf was inoculated with a 10 μl droplet of the Fusarium graminearum PH-1 spore suspension or with a corresponding solution comprising no Fusarium graminearum spores.
[1499] 7) Plates were sealed with parafilm and incubated at 18° C. under a 16-hour light/8-hour dark cycle.
[1500] 8) Disease progression was monitored through multispectral imaging and visual inspection. Multispectral images were taken at start of experiment (To) and after incubation for 24, 48, 72 and 96 hours. Fv/Fm, ChlIdx and cGFP were evaluated from the spectral images. See Table 2. Mean Fv/Fm, ChlIdx and cGFP values for leaves at T₀ were used as a reference (100%) to evaluate the Fv/Fm, ChlIdx and cGFP values for treated leaves.

### Results

[1501] Enzymes were evaluated for efficacy against Fusarium graminearum as described above. Results are presented in FIG. 3A as percentage increase of the spectral parameters (Fv/Fm, ChlIdx and cGFP) as compared to the untreated, inoculated control after 72 hours.

### Example 4

### Effective Control of Rice Blast

### Principle

[1502] Evaluated the efficacy of enzyme solutions for control of Magnaporthe grisea using high-throughput imaging. Serial dilutions were used to determine the half maximal effective concentration (EC₅₀) for two distinct indicators of fungal inhibition: absorbance at 612 nm (indicator of mycelia growth inhibition) and fluorescence after reaction with Resazurin (ex 570 nm-em 585 nm; indicator of cell viability). Experiments were conducted by Fundación Medina, Centro de Exelencia en Investigación de Medicamentos Innovadores en Andalucia (Granada, Spain).

### Procedures

[1503] 1) Starting with 10 mg/mL enzyme stock solutions, a 1:2 dilution series of each enzyme was prepared (1×, 0.5×, 0.25×, 0.05×, 0.025×, 0.0125×, 0.00625× and 0.00325×) in 1/10 PBS buffer in 96 well plates, obtaining eight doses ranging from 10 mg/mL to 0.03125 mg/mL.
[1504] 2) Final enzyme test concentrations ranging from 3.91 to 500 μg/mL were obtained by adding 5 μL of each enzyme dose to 95 μL of Magnaporthe grisea CF-105765 conidia suspension in triplicate.
[1505] 3) 10 μL of 500 μg/mL Amphotericin B in 90 μL conidia suspension was used as a positive control (assay final concentration of 50 μg/mL) and 10 μL 20% DMSO in 90 μL conidia suspension was used as a negative control (assay final concentration of 2%). All assay plates included quadruplicates of both the positive and the negative control. Furthermore, all assay plates also included an Amphotericin B standard curve consisting of a 1:2 serial dilution ranging from 50 μg/mL to 0.390625 μg/mL.
[1506] 4) Assay plates were incubated for 24 h at _° C.
[1507] 5) Absorbance at 612 nm was measured before (T₀) and after the 24 h incubation period (T_{f}) using a spectrophotometer.
[1508] 6) Resazurin was then added to each reaction well (0.002% per well) and fluorescence at ex. 570 nm-em. 585 nm measured using a spectrophotometer after 2 h incubation at _° C. The percent of inhibition (% NH) based on absorbance (Abs) was calculated following the formula:

$$\% INH ( X ) = 100 - \frac{X ( Tf - T 0 ) - I nhibitor ( Tf - T 0 )}{Neutral ( Tf - T 0 ) - I nhibitor ( Tf - T 0 )} \times 100$$

[1509] where:
[1510] X=Abs value of enzyme candidate
[1511] Inhibitor=100% of inhibition (Amphotericin B at 50 μg/mL)
[1512] Neutral=0% of inhibition (DMSO at 2%)
[1513] T₀: Abs at time zero
[1514] T_{F}: Abs after incubation time-final Abs
[1515] 7) The % of inhibition based on fluorescence was calculated following the formula:

$$\% de Reduction = \frac{Inhibitor - Neutral}{X - Neutral} \cdot 100$$

$$\% of Inhibition = 100 - \% of Reduction$$

[1516] where:
[1517] Inhibitor=Fluorescence intensity of 100% of Amphotericin B at 50 μg/mL
[1518] Neutral=Fluorescence intensity of vehicle
[1519] X=Fluorescence intensity of enzyme candidate

### Results

[1520] Enzymes were evaluated for efficacy against Magnaporthe grisea as described above. Data were normalized to two controls, a 100% inhibition control (50 μg/m Lamphotericin B) and a 0% inhibition control (2% dimethylsulfoxide). Results are presented in FIG. 4 as the half maximal effective concentration (EC₅₀) for absorbance at 612 nm (indicator of mycelia growth inhibition) and fluorescence after reaction with Resazurin (ex 570 nm-em 585 nm; indicator of cell viability). Data are presented as averages of triplicate samples.

### Example 5

### Effective Control of Asian Soybean Rust

### Principle

[1521] Evaluated the efficacy of enzyme solutions for control of Asian soybean rust on detached soybean leaves. Detached leaves were treated with buffered enzyme solutions and subsequently inoculated with Phakopsora pachyrhizi. The leaves were incubated in clear plastic clamshell containers for two weeks and evaluated for severity of ASR (lesion and pustule counts). Efficacy was evaluated in two separate experiments conducted at the University of Florida.

### Procedures

[1522] 1) ASR-susceptible soybean plants (Williams 82) were grown in a greenhouse to growth stage V2.5, at which point fully expanded trifoliate leaves were excised and used in the detach leaf assays described below.
[1523] 2) Detached leaves were placed, top (adaxial) side up, into clamshell incubation containers lined with moistened paper towels. Two leaves (six leaflets) were placed in each container. Each DLA experiment was repeated as two blocks (six leaflets per treatment in each block) for a total of four trifoliate leaves (12 leaflets) per treatment. Incubation containers were kept at room temperature, 21° C.±1°, under 12-24 hours of natural and fluorescent light per day.
[1524] 3) On Day 1 of the assays, leaves were sprayed with enzyme solutions comprising 0.5 mg enzyme protein per mL in a 0.1×PBS buffer (pH 7.3), with or without 0.1% TWEEN® 20, or with a corresponding control solution comprising no enzyme. The treatments were sprayed on the top side of the soybean leaves up to the point just before runoff, which was approximately 0.6 mL per leaf. Separate, 2 fl. oz hand-pump sprayers (Hydior™) were used to make each application.
[1525] 4) On Day 2 of the assays, leaves were inoculated with a suspension of soybean rust spores collected on the day of the inoculation. The top side of each leaf was sprayed with 0.6 mL of a Phakopsora pachyrhizi spore suspension (in water with 0.1% TWEEN). For the first experimental replicate, naturally occurring Phakopsora pachyrhizi spores were isolated directly from wild kudzu and suspended (1.62×10⁵ spores per mL). For the second experimental replicate, spores derived from the Phakopsorapachyrhizi strain were cultured on Williams 82 soybeans, then isolated and suspended (1.75×10⁶ spores per mL).
[1526] 5) Leaves were maintained at room temperature and moisture levels were maintained as needed.
[1527] 6) Leaves were examined using a dissecting microscope. The underside (abaxial side) of each leaflet was examined, where pustules (uredinia) develop. A 1.0 or 0.4 sq cm circle was placed on the leaflet and the number of ASR pustules and or lesions found within the circle were counted. Both sides of the leaflet (divided by the midvein) were counted and recorded for a total of two counts/leaflet. The counting circle was placed to avoid any areas of the leaflet with decaying tissue. A rating of leaflet decay (as % affected area) was also performed for each leaflet. For the first experimental replicate, sampling and rating of leaves occurred from days 15 to 18 days post-infection. For the second experimental replicate, sampling and rating was conducted from days 12 to 16 days post-infection.

### Results

[1528] Enzymes were evaluated for efficacy against Phakopsora pachyrhizi as described above. Results are presented in FIG. 5 as the mean number of combined lesions and pustules from experimental replicates 1 and 2.

### Example 6

### Effective Control of Late Blight

### Principle

[1529] Evaluated the efficacy of enzyme solutions for control of late blight on tomato and potato leaf discs. Leaf discs were treated with enzyme and then inoculated with Phytophthora infestans US 23. Disease was assessed up to six days post-inoculation. Experiments were conducted by Novozymes Biologicals, Salem, VA.

### Procedures

[1530] 1) Blight-susceptible tomato and potato plants were grown in a greenhouse for approximately three weeks. Leaves were detached from the mid-region of each plant, and leaf discs were excised using a cork bore (diameter 14 mm) and randomized amongst treatments.
[1531] 2) One leaf disc was placed, adaxial side up, in each well of a 24-well microtiter plate comprising solidified 0.5% Butterfield's Buffer agar (5 g agar per liter of Butterfield's Buffer).
[1532] 3) Leaf discs were treated with enzymes in Butterfield's Buffer (8.3 mM phosphate, pH 7.2) or potassium phosphate buffer (0.05 M, pH 7.88 or pH 8), with or without 0.1% w/v surfactant (BREAK-THRU® SP 133 or SILWET™ L-77), or with a corresponding control solution comprising no enzyme, and then air dried. Enzyme solutions were applied using two different methods: A) 50 μL was pipetted onto the adaxial surface of leaf disc, spreading with sterile inoculation loop as necessary; B) enzyme solution was sprayed onto the adaxial surface of leaf disc using an atomizer spray bottle, two pumps each, which adequately covered the surface without pooling.
[1533] 4) After drying, discs were inoculated with 10 μL of Phytophthora infestans isolate US 23 spore suspension (1×10 spores per mL in distilled water) or sterile water comprising no Phytophthora infestans spores.
[1534] 5) Plates were sealed with parafilm and incubated at 18° C. under a 16-hour light/8-hour dark cycle.
[1535] 6) Images of the leaf disk plates were captured and analyzed for disease at 6 days post-infection.

### Results

[1536] Enzymes were evaluated for efficacy against Phytophthora infestans as described above. A minimum two experimental repeats with four replicates were completed for each treatment. Results for pipette-treated tomato leaf discs treated are presented in FIG. 6A as mean percent disease. Results for spray-treated tomato leaf discs are presented in FIG. 6B as (−) no disease reduction, (+) mild disease reduction, (++) moderate disease reduction or (+++) extreme disease reduction and in FIG. 6C as mean percent disease. Results for spray-treated potato leaf discs are presented in FIG. 6D as mean percent healthy.

### Example 7

### Effective Control of Downy Mildew

### Principle

[1537] Evaluated the efficacy of enzyme solutions for control of downy mildew on cucumber leaf discs. Leaf discs were treated with buffered enzyme solutions and subsequently inoculated with Pseudoperonospora cubensis. Plates of inoculated leaf discs were incubated and assessed for disease severity after five days.

### Procedures

[1538] 1) Downy mildew-susceptible cucumber plants were grown in a greenhouse for approximately four weeks. Leaves were detached from the mid-region of each plant, and leaf discs were excised using a cork bore (diameter 8 mm).
[1539] 2) One leaf disc was placed, abaxial side up, in each well of a 48-well microtiter plate comprising solidified 1% water agar.
[1540] 3) Leaf discs were treated with enzymes in a buffer solution-20 mM sodium acetate, pH 5; 1M potassium phosphate, pH 7; or 20 mM TRIS, pH 8), with or without surfactant (SAFER® insecticidal soap or TWEEN® 20), or with a corresponding control solution comprising no enzyme, and then air dried. Six replicates were made for each condition. Enzyme treatments were applied by pipetting 15 μL of the treatment solution onto center of the abaxial surface of the leaf disc.
[1541] 4) After drying, discs were inoculated with 10 μL of Pseudoperonospora cubensis spore suspension (1-3×10⁵ spores per mL in distilled water) or sterile water comprising no Pseudoperonospora cubensis spores.
[1542] 5) Plates were sealed with parafilm and incubated at 18° C. under a 16-hour light/8-hour dark cycle.
[1543] 6) Images of the leaf disk plates were captured and analyzed for disease five days post-infection.

### Results

[1544] Enzymes were evaluated for efficacy against Pseudoperonospora cubensis as described above. Results are presented in FIG. 7 as (−) no disease reduction, (+) mild disease reduction, (++) moderate disease reduction or (+++) extreme disease reduction. A minimum six replicates were completed for each treatment.

### Example 8

### Effective Control of Septoria Tritici Blotch

### Principle

[1545] Evaluated the efficacy of enzyme solutions for control of Septoria tritici blotch (STB) on wheat plants. A winter wheat cultivar (var. Hereford) growing in 1 L pots was first sprayed with enzyme and after 24 hours sprayed with a spore suspension of Zymoseptoria tritici. Percent leaf area attacked was assessed 14 days after inoculation and again with 3 days interval until the full effects were found. For scoring the standard EPPO scales were used (EPPO standards: Guidelines on good plant protection practice. Wheat. PP 2/10(1)). Experiments were conducted by Aarhus University, Flakkebjerg, Denmark.

### Procedures

[1546] 1) STB-susceptible wheat plants (var. Hereford) were grown in a greenhouse for approximately two weeks until reaching the two-leaf crop growth stage (BBCH12).
[1547] 2) Plants were sprayed with an enzyme solution comprising 0.1% w/v surfactant (BREAK-THRU© S 301, SILWET™ L-77, or TWEEN® 20) in a 10 mM buffer (sodium acetate, pH 5; potassium phosphate, pH 6; potassium phosphate, pH 7; or potassium phosphate, pH 8), or with a corresponding control solution comprising no enzyme and/or buffer, using a cabin sprayer (volume—600 mL; 150 L/ha, 3.6 km/hour, yellow nozzles 0.2). Six replicates were made for each condition.
[1548] 3) 24 hours after the initial spray application, the plants were sprayed with a Zymoseptoria tritici spore suspension (2×10⁶ spores per mL in 0.1% TWEEN® 20). Two distinct Zymoseptoria tritici cultures were used: A) a culture comprising five isolates collected from naturally infected plant in Denmark in 2020 and B) a culture comprising five isolates collected from naturally infected plant in Denmark in 2021.
[1549] 4) After Zymoseptoria tritici inoculation, the plants were kept under high relative humidity for 24 hours to ensure infection before being placed under normal greenhouse conditions.
[1550] 5) Percent leaf area attacked by STB was determined 14 days after inoculation and again every three days until the full effects were found. For scoring, the standard EPPO scale was used (EPPO standards: Guidelines on good plant protection practice. Wheat. PP 2/10(1)).

### Results

[1551] Enzymes were evaluated for efficacy on Zymoseptoria tritici infected winter wheat as described above using Inoculum A or Inoculum B. Results are presented in FIG. 8A (2020 inoculum) and FIG. 8B (2021 inoculum) as percent disease control relative to untreated, inoculated control at various timepoints/disease pressures. 100% control means no disease was detected in the treatment and 0% control means disease was at the same level as the untreated, inoculated control comparator.

### Example 9

### Effective Fungal Growth Inhibition

### Principle

[1552] Evaluated the efficacy of enzyme solutions for inhibiting fungal growth using high-throughput imaging. Serial dilutions were used to determine the minimum inhibitory concentration (MIC₅₀) for each enzyme against four fungal phytopathogens: Botrytis cinerea, Fusarium graminearum, Fusarium virguliforme, and Zymoseptoria tritici.

### Procedures

[1553] 1) Enzyme dilution series ranging from 0.0078 to 0.5 mg/mL were added in quadruplicate to 384-well imaging plates. Plates were centrifuged for two minutes at 2500 rpm to ensure all enzyme samples were at the bottom of the wells.
[1554] 2) Fungal spore suspensions comprising 2-2.5×10⁴ spores per mL of sterile growth medium were added to the wells. Four fungal phytopathogens were analyzed: Botrytis cinerea, Fusarium graminearum, Fusarium virguliforme, and Zymoseptoria tritici. Sterile growth medium comprised one part Potato Dexrtrose Broth and nine parts M9 minimal medium (200 mL M9 salt solution (64.0 g Na₂HPO₄ 2H₂O, 15 g KH₂PO₄, 2.5 g NaCl, 5.0 g NH₄Cl ad 1 L distilled water), 2 mL 1 M MgSO₄, 20 mL 20% glucose, 100 μl 1 M CaCl₂ in 1 L distilled water).
[1555] 3) Plates were sealed with BREATHE-EASY® sealing membrane (SIGMA-ALDRICH® catalog no. Z380059) and placed in a lidded plastic container with a wet paper towel.
[1556] 4) Following incubation at room temperature, 21° C.±1°, for 48 hours, plates were imaged with a high-throughput microscope using a 10× objective, capturing four non-overlapping fields per well.
[1557] 5) GE Developer software and proprietary, in-house scripts were used to determine total mycelium area, total counts, total end nodes, total hyphae length, average hyphal branch length, intensity levels, and total ungerminated spores.

### Results

[1558] Enzymes were evaluated for efficacy against Botrytis cinerea, Fusarium graminearum, Fusarium virgulforme and Zymoseptoria tritici as described above. Data were normalized to two controls, a 100% inhibition control (cycloheximide) and a 0% inhibition control (1:9 Potato Dextrose Broth:M9; MILLIPORE® catalog no. P6685). Results are presented in FIG. 9 as the minimum inhibitory concentration (MIC₅₀) for average hyphal branch length and total mycelium area (i.e., the enzyme concentration required to inhibit average hyphal branch length/total mycelium area to 50% or less as compared to that of corresponding untreated control). Data are presented as averages of quadruplicate samples.

### Example 10

### Effective Fungal Growth Inhibition

### Principle

[1559] Evaluated the efficacy of enzyme solutions for inhibiting fungal growth using Radial Diffusion Assays (RDA), which consisted of plating a fungal pathogen in potato dextrose agar (PDA) in sufficient amount to obtain a homogeneous mat of mycelium, allowing the mycelium mat to dry, and then adding a 5 μL drop of enzyme solution. Growth inhibition was scored as the presence/absence of an inhibition- or stress-zone created by the enzyme after incubation of the assay plates at 26° C. up to 15 days.

### Procedures

[1560] 1) Plates comprising potato dextrose agar were inoculated with a fungal phytopathogen-Botrytis cinerea ATCC56594, Fusarium graminearum Schwabe ATCC 36885, Magnaporthe grisea, Penicillium digitatum CBS658.68, Penicillium expansum DSM1282, Penicillium italicum. Phytophthora infestans, or Zymoseptoria tritici GPD-GFPB3 (Rohel et al., MOL. PLANT MICROBE INTERACT. 14(2):156-63 (February 2001))—by adding a droplet of fungal suspension and spreading the droplet “pprox.”y across the surface of the medium using glass beads.
[1561] 2) After the plates were dry, test plates were treated with an enzyme solution, with or without buffer (potassium phosphate, pH 6; potassium phosphate, pH 7; or potassium phosphate, pH 8), and with or without surfactant (SILWET™ L-77). Tests were conducted in duplicate. An untreated control plate was kept for each fungal phytopathogen.
[1562] 3) Plates were incubated at 26° C. and assessed daily for 15 days.

### Results

[1563] Enzymes were evaluated for efficacy against Botrytis cinerea, Fusarium graminerum, Magnaporthe grisea, Penicilium digitatum, Penicillium expansum, Penicillium italicum, Phytophthora infestans and Zymoseptoria tritici as described above. Results are presented in FIG. 10A and FIG. 10B as (−) no growth inhibition, (+) visible stress reaction and/or mild growth inhibition, (++) moderate growth inhibition or (+++) extreme growth inhibition.

### Example 11

### Effective Control of Leaf-Eating Insects

### Principle

[1564] Evaluated the efficacy of enzyme solutions for inhibiting growth/development of leaf-eating insects. Leaf discs were treated with buffered enzyme solutions and subsequently exposed to 2^{nd} instar cabbage looper larvae. The relative growth rate of each larvae was determined after two days of feeding.

### Procedures

[1565] 1) Leaves were detached from Chinese cabbage plants (var. Minuet) and leaf discs were excised using a #12 cork borer. Only one disc was punched from each leaf. All leaf discs were kept in a water bath until use.
[1566] 2) One leaf disc was placed in each well of a 12-well plate comprising solidified 1% water agar.
[1567] 3) Leaf discs were painted with enzyme solutions comprising 1 mg enzyme protein per mL in a phosphate buffer solution (0.163 g K₂HPO₄ and 0.09 g of KH₂PO₄ in 100 mL distilled water) comprising 0.05% SILWET™ L-77, or with a corresponding control solution comprising no enzyme, and then air dried. Twelve replicates were made for each condition.
[1568] 4) After drying, one 2ⁿ instar cabbage looper larva that had been weighed to the nearest tenth of a milligram was added to each leaf disc.
[1569] 5) Cabbage loopers were reweighed after two days.
[1570] 6) The growth rate of the cabbage loopers were determined using the following equation from Bouvaine et al., PLOS ONE 9(1):e86256 (2014):

$$Relative Growth Rate ( RGR ) = [ ln ( final weight / initial weight ) ] / days$$

### Results

[1571] Enzymes were evaluated for efficacy against leaf-eating insects as described above. Results are presented in FIG. 11 as relative growth rates (RGR) after two days of feeding on treated leaf discs.

### Example 12

### Effective Control of Leaf-Eating Insects

### Principle

[1572] Evaluated the efficacy of enzyme solutions for inhibiting growth/development of leaf-eating insects was evaluated. Leaf discs were treated with buffered enzyme solutions and subsequently exposed to 2^{nd} instar cabbage looper larvae. The relative growth rate of each larvae was determined after two days of feeding.

### Procedures

[1573] 1) Leaves were detached from Chinese cabbage plants (var. Minuet) and leaf discs were excised using a #12 cork borer. Only one disc was punched from each leaf. All leaf discs were kept in a water bath until use.
[1574] 2) One leaf disc was placed in each well of a 12-well plate comprising solidified 1% water agar.
[1575] 3) Leaf discs were painted with enzyme solutions comprising 1 mg enzyme protein per mL in a phosphate buffer solution (0.163 g K₂HPO₄ and 0.09 g of KH₂PO₄ in 100 mL distilled water) comprising 0.05% SILWET™ L-77, or with a corresponding control solution comprising no enzyme, and then air dried. Twelve replicates were made for each condition.
[1576] 4) After drying, one 2^{nd} instar cabbage looper larva that had been weighed to the nearest tenth of a milligram was added to each leaf disc.
[1577] 5) Cabbage loopers were reweighed after two days.
[1578] 6) The growth rate of the cabbage loopers were determined using the following equation from Bouvaine et al., PLOS ONE 9(1):e86256 (2014):

$$Relative Growth Rate ( RGR ) = [ ln ( final weight / initial weight ) ] / days$$

### Results

[1579] Enzymes were evaluated for efficacy against leaf-eating insects as described above. Results are presented in FIG. 12 as relative growth rates (RGR) after two days of feeding on treated leaf discs.

### Example 13

### Effective Control of Gray Mold

### Principle

[1580] Evaluated the efficacy of enzyme solutions for control of gray mold on grapes. Harvested grapes were surface sterilized, inoculated with Botrytis cinerea, wounded, and then treated with buffered enzyme solution. Disease severity was assessed after 14 days. Experiments were conducted by Novozymes Biologicals (Salem, VA).

### Procedures

[1581] 1. Table grapes were cut into bunches containing 6 grapes. Bunches were washed for five minutes in tap water, two minutes in a 10% bleach solution, and one minute in DI water. Grapes were then allowed to dry for approximately 1-hour.
[1582] 2. A 10 μl droplet of Botrytis cinerea conidia suspension (1.5×10⁶ conidia per ml water) was pipetted onto the surface of each grape. The inoculum was dried for approximately 1-hour.
[1583] 3. The skin of each grape was then gently punctured at the site of dried inoculum using a sterile dissecting needle.
[1584] 4. Grapes were treated with enzyme solutions comprising 2.5 mg enzyme protein per mL in a 0.05 M buffer solution (sodium acetate pH 5, potassium phosphate pH 7, or potassium phosphate pH 8). Enzyme treatments were applied via atomizer sprayer, adequately covering the fruit surface with no pooling.
[1585] 5. Enzyme treatments were dried onto the fruit for approximately three hours. Each grape bunch was stored in an individual plastic container with lid.
[1586] 6. Grapes were incubated at 20° C. in the dark for a 14-day period. Disease progression was monitored for 14-days and expressed as a percentage of lesion area to total grape area on a 2D plane.

### Results

[1587] Enzymes were evaluated for efficacy against Botrytis cinerea as described above. Results are presented in FIG. 13 as mean percent disease. A minimum three experimental repeats with six replicates were completed for each treatment.

### Example 14

### Effective Control of Head Blight

### Principle

[1588] Evaluated the efficacy of enzyme solutions for control of Fusarium head blight on wheat plants. Plants were treated with enzyme solution and subsequently inoculated with GFP-transformed Fusarium graminearum.

[1589] Pathogen biomass was quantified via GFP, and plant health parameters were collected up to 14 days post-inoculation. Testing was conducted at Ghent University (Ghent, Belgium).

### Procedures

[1590] 1) GFP-transformed Fusarium graminearum strain PH-1 was grown on potato dextrose agar for seven days at 21° C. under a regime of 12 h dark and 12 h combined UVA and UVC light to induce sporulation. 2) A working spore suspension was created by adding “pprox. 20 mL of phosphate buffered saline containing 0.01% TWEEN® 80, pH 7.2-7.4, to the petri dish, agitating the mycelium with a spatula, separating spores from mycelium using a sterile filter, and then diluting to a concentration of 0.5×10⁶ spores per mL.
[1591] 3) Wheat plants were grown in potting soil for three months under controlled greenhouse conditions (T_{day} 21° C., T_{night} 16° C., 60% relative humidity). Two separate pots, each containing approximately 10 wheat ears in anthesis, were selected for each treatment in the bioassays described below.
[1592] 4) Plants were sprayed until runoff with enzyme solutions comprising 0.5 or 1 mg enzyme protein per mL in a 10 mM buffer solution (sodium acetate pH 5, potassium phosphate pH 6, potassium phosphate pH 7, or potassium phosphate pH 8), with or without 0.05% w/v surfactant (SILWET™ L-77), or with a corresponding control solution comprising no enzyme, one day prior to inoculation with Fusarium graminearum PH-1 spore suspension.
[1593] 5) Plants were double-inoculated with Fusarium graminearum PH-1: (i) six ears per plant were point-inoculated on one spikelet with a 10 μl droplet of the Fusarium graminearum PH-1 spore suspension or with a corresponding solution comprising no Fusarium graminearum spores, and (ii) plants were sprayed until runoff with the Fusarium graminearum PH-1 spore suspension or with a corresponding solution comprising no Fusarium graminearum spores.
[1594] 6) Infected plants and uninoculated control plants were grown under controlled greenhouse conditions (T_{day} 21° C., T_{night} 16° C., 60% relative humidity), except that infected plants were kept at 100% relative humidity during the first 48 hours post-inoculation. Infected plants were grown in a quarantine compartment to prevent infection of uninoculated control plants.
[1595] 7) Disease progression was monitored through visual inspection and multispectral imaging. Fv/Fm, ChlIdx and cGFP were evaluated from the multispectral images. See Table 2. Mean Fv/Fm, ChlIdx and cGFP values for untreated, inoculated control plants were used as a reference (100%) to evaluate the Fv/Fm, ChlIdx and cGFP values for treated leaves.

### Results

[1596] Enzymes were evaluated for efficacy against Fusarium graminearum as described above. Results are presented in FIG. 14A (four days post-inoculation) and FIG. 14B (twelve and thirteen days post-inoculation) as percentage increase of the spectral parameters (Fv/Fm, ChlIdx and cGFP) as compared to a corresponding untreated, inoculated controls.

### Example 15

### Effective Control of Yellow Rust

### Principle

[1597] Evaluated the efficacy of enzyme solutions for control of yellow rust on winter wheat plants. Plants were treated with buffered enzyme solution and subsequently inoculated with Puccinia striiformis. Percent leaf area attacked was assessed fifteen days post-inoculation and again with two- or three-day intervals until the full effects were seen. For scoring the standard EPPO scales were used. Experiments were conducted by Arhus University, Flakkebjerg, Denmark.

### Procedures

[1598] 1) Winter wheat kernels (var. Morocco) were sown 10 seeds/plants per pot in 0.5 L pots and allowed to germinate and grow in a greenhouse for approximately two weeks until reaching the two-leaf crop growth stage (BBCH12).
[1599] 2) Plants were then sprayed with enzyme solution comprising 0.1 to 0.132 mg enzyme protein per mL in a 10 mM buffer solution (sodium acetate pH 5, potassium phosphate pH 6, potassium phosphate pH 7, or potassium phosphate pH 8) with 0.1% w/v surfactant (SILWET™ L-77), or with a corresponding control solution comprising no enzyme, using a cabin sprayer (volume 600 mL; 150 L/ha, 5.5 km/hour, yellow nozzles 0.2; 2.24 bar). Six replicates were made for each condition.
[1600] 3) 24 hours after the initial spray application, the plants were sprayed with a Puccinia striiformis spore suspension (Puccinia striiformis f. sp. tritici Dk229/19).
[1601] 4) After Puccinia striiformis inoculation, the plants were kept under high relative humidity for 24 hours at 10-12° C. to ensure infection before being placed under normal greenhouse conditions.
[1602] 5) Percent leaf area attacked by yellow rust was determined fifteen days after inoculation and again every two to three days until the full effects were found. For scoring, the standard EPPO scale (EPPO standards: Guidelines on good plant protection practice. Wheat. PP/26 (4)) was used. The area under the disease progress curve was calculated to summarize effects across the performed assessments.

### Results

[1603] Enzymes were evaluated for efficacy against Puccinia striiformis as described above. Results are presented in FIG. 15 as area under the disease progress curve.

### Example 16

### Degradation of Fungal Cell Wall Components

### Principle

[1604] Evaluated the efficacy of enzyme solutions for degradation of fungal cell wall components. Fungal mycelium were isolated and treated with buffered enzyme solution. A reducing end assay was used to analyze cell wall degradation.

### Procedures

[1605] 1) Shake flasks comprising sterile YP media with 2% glucose were inoculated with a fungal phytopathogen—Botrytis cinerea ATCC56594, Fusarium graminerum Schwabe ATCC 36885, Penicilhum digitatum CBS658.68, Penicillium expansum DSM1282, Penicillium italicum, Phytophthora infestans, Pyricularia grisea, or Zymoseptoria tritici—and incubated for seven days at 26° C. with shaking.
[1606] 2) After incubation, mycelia were harvested by centrifugation (10 minutes, 3000 rpm). Supernatant was removed by decanting, and pellet was washed 3 times in 3×50 mL demineralized water.
[1607] 3) After final wash, pellet was suspended in 5 mL demineralized water and homogenized in ball mill with 2 glass beads for 150 seconds at room temperature.
[1608] 4) Homogenate was washed thoroughly in 50 mL centrifuge tube with 2×20 mL demineralized water
[1609] 5) The washed pellet was freeze dried and the dried product homogenized in mortar and kept frozen until use. This material is the crude cell wall preparation.
[1610] 6) For the hydrolysis, 250 L of 20 mg/mL crude cell wall preparation suspended in phosphate buffer was mixed with 250 μL buffered enzyme solution (sodium acetate pH 5, potassium phosphate pH 6, potassium phosphate pH 7, or potassium phosphate pH 8), or with a corresponding solution comprising no enzyme, in 1.5 mL Eppendorf tube and incubated overnight at 40° C. with shaking. Enzymes were evaluated as duplicates.
[1611] 7) After hydrolysis, the supernatant was isolated by centrifugation (5 minutes at 14000 rpm) and the amount of solubilized oligosaccharides were determined by measuring the reducing ends using the PAHBAH assay:
   [1612] a. 20 μL supernatant from hydrolysis or 20 μL standard plus 80 μL demineralized water is mixed with 75 μL freshly prepared PAHBAH solution (15 mg/mL 4-hydroxybenzhydrazide in PAHBAH buffer (50 g/L K—Na-tartrate tetrahydrate+20 g/L NaOH)) in a 96 well PCR plate.
   [1613] b. The plate is incubated for 10 minutes at 95° C. in PCR machine and then cooled down to room temperature.
   [1614] c. 100 μL is then transferred to new 96 well transparent microtiter plate and the absorbance is measured at 405 nm.
   [1615] d. A standard curve is prepared by plotting the absorbance of glucose standards (0.0125 to 0.25 mg/mL) against the glucose concentration and the number of reducing ends are calculated as glucose equivalents from the standard curve. The results are given as mg glucose equivalents per gram of crude cell wall material (mg Glc/g CW).

### Results

[1616] Enzymes were evaluated for efficacy against Botrytis cinerea, Fusarium graminerum, Penicillium digitatum, Penicillium expansum, Penicillium italicum, Phytophthora infestans, Pyricularia grisea and Zymoseptoria tritici as described above. Results are presented in FIG. 16 as mg glucose equivalents per gram of crude cell wall material (mg Glc/g CW).

### Example 17

### Effective Fungal Germination Inhibition

Principle Evaluated the efficacy of enzyme solutions for inhibiting fungal germination. Serial dilutions were used to determine the minimum enzyme concentration required to prevent germination of Botrytis cinerea and Penicillium expansum spores.

### Procedures

[1617] 1) Enzyme dilution series ranging from 0.002 to 2 mg/mL in 100 μL 10 mM buffer solution (sodium citrate pH 3, sodium citrate pH 4, sodium citrate pH 5, potassium phosphate pH 6, potassium phosphate pH 7, or potassium phosphate pH 8) were added in triplicate to 96-well imaging plates, alongside corresponding control solutions comprising no enzyme.
[1618] 2) Fungal spore suspensions comprising 5×10⁴ spores per mL of sterile growth medium (Potato Dextrose Broth) were added to the wells. Two fungal phytopathogens were analyzed: Botrytis cinerea and Penicillium expansum.
[1619] 3) Plates were sealed with BREATHE-EASY® sealing membrane (SIGMA-ALDRICH® catalog no. Z380059) and placed in a 25° C. incubator until ready for imaging.
[1620] 4) Following incubation at 25° C. for 24 hours, plates were imaged using a high-throughput inverted microscope using a 10× objective. Images were visually analyzed to determine which enzyme treatments allowed/prevented spore germination. Untreated control solutions exhibiting (substantially) complete germination were used as positive controls.
[1621] 5) After imaging, enzyme solutions were replaced with sterile PBS. Plates were centrifuged at 3000 rpm for ten minutes, supernatant was removed, and sterile PBS was added. Steps were repeated twice more to ensure thorough enzyme washout.
[1622] 6) Washed fungal spore suspensions were replated in fresh 96-well imaging plates containing sterile growth medium (Potato Dextrose Broth) and incubated for up to 48 hours at 25° C.
[1623] 7) Washed and replated fungal spore suspensions were reimaged after 24 hours and 48 hours at 25° C. to determine which enzyme treatments allowed/prevented germination even after washout.

### Results

[1624] Enzymes were evaluated for efficacy against Botrytis cinerea and Penicillium expansum as described above. Results are presented in FIG. 17 as the minimum enzyme concentration that completely prevent fungal spore germination after 24 hours with enzyme, 24 hours after enzyme washout, and 48 hours after enzyme washout. Data are presented as averages of triplicate samples.

### Example 18

### Effective Fungal Growth Inhibition

Principle Evaluated the efficacy of enzyme solutions for inhibiting fungal growth using high-throughput imaging. Serial dilutions were used to determine the minimum inhibitory concentration (MIC₅₀) of enzyme needed to inhibit growth of Botrytis cinerea.

### Procedures

[1625] 1) Enzyme dilution series ranging from 0.0078 to 0.5 mg/mL were added in quadruplicate to 384-well imaging plates. A serial dilution of fludioxonil (SCHOLAR® SC; Syngenta Crop Protection, LLC (Greensboro, NC)) was included as a positive control. Plates were centrifuged for two minutes at 2500 rpm to ensure all enzyme samples were at the bottom of the wells.
[1626] 2) Fungal spore suspensions comprising 2-2.5×10⁴ spores of Botrytis cinerea per mL of sterile growth medium were added to the wells. Sterile growth medium comprised one part Potato Dexrtrose Broth and nine parts M9 minimal medium (200 mL M9 salt solution (64.0 g Na₂HPO₄ 2H₂O, 15 g KH₂PO₄, 2.5 g NaCl, 5.0 g NH₄Cl ad 1 L distilled water), 2 mL 1 M MgSO₄, 20 mL 20% glucose, 100 μl 1 M CaCl₂ in 1 L distilled water).
[1627] 3) Plates were sealed with BREATHE-EASY® sealing membrane (SIGMA-ALDRICH® catalog no. Z380059) and placed in a lidded plastic container with a wet paper towel.
[1628] 4) Following incubation at room temperature, 21° C.±1°, for 48 hours, plates were imaged with a high-throughput microscope using a 10× objective, capturing four non-overlapping fields per well.
[1629] 5) Proprietary, in-house scripts were used to quantify total mycelium area, average hyphal branch length, and total ungerminated spores.

### Results

[1630] Enzymes were evaluated for efficacy against Botrytis cinerea as described above. Data were normalized to two controls, a 100% inhibition control (cycloheximide) and a 0% inhibition control (1:9 Potato Dextrose Broth:M9; MILLIPORE® catalog no. P6685). Results are presented in FIG. 18 as the minimum inhibitory concentration (MIC₅₀) for average total mycelium area (i.e., the enzyme concentration required to inhibit mycelial area to 50% or less as compared to that of corresponding untreated control). Data are presented as averages of three biological replicates with quadruplicate technical replicates.

### Example 19

### Effective Fungal Growth Inhibition

### Principle

[1631] Evaluated the efficacy of enzyme solutions for inhibiting germ tube elongation in Botrytis cinerea and Penicillium expansum using high-throughput imaging.

### Procedures

[1632] 1) Fungal spore suspensions comprising 5×10⁴ spores per mL of sterile growth medium (Potato Dextrose Broth) were added to 384-well imaging plates.
[1633] 2) Plates were sealed with BREATHE-EASY® sealing membrane (SIGMA-ALDRICH® catalog no. Z380059), centrifuged for one minute at 1000 rpm, and incubated at 18° C. for six hours.
[1634] 3) Each well was treated with an enzyme solution comprising enzyme protein in 10 mM buffer solution (sodium citrate pH 3, sodium citrate pH 4, sodium citrate pH 5, potassium phosphate pH 6, potassium phosphate pH 7, or potassium phosphate pH 8) to a final concentration of 2 mg per mL, or with a corresponding control solution comprising no enzyme. All treatments were performed in triplicate.
[1635] 4) Plates were sealed with BREATHE-EASY® sealing membrane (SIGMA-ALDRICH® catalog no. Z380059), centrifuged for one minute at 1000 rpm, and incubated at 18° C. under ready for imaging.
[1636] 5) Plates were imaged with a high-throughput microscope using a 20× objective, capturing four non-overlapping fields per well.
[1637] 6) Proprietary, in-house scripts were used to quantify total hyphal area and germ tube length.

### Results

[1638] Enzymes were evaluated for efficacy against Botrytis cinerea and Penicillium expansum as described above. Results are presented in FIG. 19 as percent inhibition of germ tube elongation as compared to the corresponding buffer control solution. Data are presented as averages of triplicate samples.

### Example 20

### Exemplary Polypeptide Sequences of the Present Disclosure

<AA; Aspergillus niger>
SEQ ID NO: 1
MQTLLVSSLVVSLAAALPHYIRSNGIEASLLTDPKDVSGRTVDYIIAGGGLTGLTTAARLTENPNISVL
VIESGSYESDRGPIIEDLNAYGDIFGSSVDHAYETVELATNNQTALIRSGNGLGGSTLVNGGTWTRPHK
AQVDSWETVFGNEGWNWDNVAAYSLQAERARAPNAKQIAAGHYFNASCHGTNGTVHAGPRDTGDDYSPI
VKALMSAVEDRGVPTKKDFGCGDPHGVSMFPNTLHEDQVRSDAAREWLLPNYQRPNLQVLTGQYVGKVL
LSQNGTTPRAVGVEFGTHKGNTHNVYAEHEVLLAAGSAVSPTILEYSGIGMKSILEPLGIDTVVDLPVG
LNLQDQTTATVRSRITSAGAGQGQAAWFATFNETFGDYSEKAHELLNTKLEQWAEEAVARGGFHNTTAL
LIQYENYRDWIVNHNVAYSELFLDTAGVASFDVWDLLPFTRGYVHILDKDPYLHHFAYDPQYFLNELDL
LGQAAATQLARNISNSGAMQTYFAGETIPGDNLAYDADLSAWTEYIPYHFRPNYHGVGTCSMMPKEMGG
VVDNAARVYGVQGLRVIDGSIPPTQMSSHVMTVFYAMALKISDAILEDYASMQ;
<AA; Aspergillus chevalieri>
SEQ ID NO: 2
MKPLLWSLFLSVATALPKFPREHLGVEPQLLTDPTVLANTTVDYIIAGGGLTGLTIAARLTEDPNIKVL
VIESGYFESNRGPIIEDLNRYGEIFGTEVDHAFETVQLAVNNRTEIIRSGNGLGGSTLINGGTWTRPHK
VQVDSWETVFGNQGWNWDDLLPYMLKIEKARPPNQRQIEAGHYFNPQCHGFNGSVHAGPRDTGEPYSPI
MRALMDTVSAEGVPVRKDLCCGDPHGVSMFLNTLYPSQIRADAAREYLVPNYYRPNFQVLTGQRVGKVL
LDKTVPGSPKAIGVEFGTHRTRKYEAYARREVLLAAGSTISPTILEYSGIGMKSVLDSVGIEQVVELPV
GVNLQDQTTVHVESRITPAGAGQGQAAYFATFNETFGDFAPQAHELLNTKLDQWAEEVVARGGFNNATA
LRIQYENYRNWLVNDNVAFSELFLDTAGKISFDVWDLIPFTRGYVHIADKDPYLRRLYNNPQYLLNELD
VLGEAAASKLARELSSKGAMAQYYAGETVPGFDHLPADASLRDWAKYVKDRFRPNYHAVSTCAMMSKEL
GGVVDSAARVYDVERLRVVDGSIPPTQVSSHVMTVFYGMAEKIAEAILQDYHARK;
<AA; Penicillium viridicatum>
SEQ ID NO: 3
MKLLGVLSGLGLVVVATALPLQELDLQSTLLTDPRKVAGETFDYVIAGGGLTGLTVAARLTENPDINVL
VIESGFYESNIGPIIENLNHYGDIFTTSVDQAFETVPLAIHNRTEIVRSGKGLGGSTLVNGGSWTRPHK
AQINSWEKVFGMEGWNWDNLLPYMNKVEASRPPNAAQIAAGHYFDPACHGVNGTVQVGPRDTGESYSPM
IKSLMETAKKSGVPVQKDFSCGVPHGISMFPNDVHEDQTRSDAAREWLLPNYKRKNLKVLTGQMVGRVL
FDTTTSTPKAVGVNFGTHNKVNFDVHAKHEVLLAAGSTVSPQILEHSGVGLKTVLDKVGIKQVVELPVG
LNLQDQTTTTVRSAINPIGAGQGQAAYFATFNETFGDQAPRAHQLLNTKLEEWAKDAVSRGGFHNETAL
LIQYQNYRDWLVNSDVSYAEIFIDTAGKLSLDLWDLIPFTRGYVHILDSDPYLRRFAYDPQYFLNELDL
LGQAAASKLAREISNKGEMTKYFNSETVPGNNLAYNATLDQWVDYVKQNFRPNYHGVGTCSMMSKELGG
VVDAAARVYDVEGLRVIDGSIPPTQVSSHVMTVFYGMAEKISEAVLSDYHASN;
<AA; Aspergillus niveoglaucus>
SEQ ID NO: 4
MRPLIWPLFLSVATALPKFPREHFDVQPQLLTDPTVLANTTVDYIIAGGGLTGLTIAARLTEDPKIKVL
VIESGFFESNRGPIIEDLNSYGEIFGTEVDHAFETVSLAVNNRTENIRSGNGLGGSTLINGGTWTRPHK
VQIDSWERVFGNEGWNWDDLLPYMLGIEKARHPNQRQIEAGHYFNPQCHGSNGTVHAGPRDTGESYSPI
MKALMDTVSADGVPVRKDLGCGDPHGVSMFPNSLYESQIRADAAREWLVPNYYRPNLQVLTGQSVGKVL
LDKTVPGAPKAIGVEFGTHRTRKYETFASREVLLAAGSTISPTILEYSGIGIKSVLDSVGIEQVVDLPV
GLNLQDQTTVNLQSRITPDGAGQGQAAYFATFNETFGDFAPQAHELLNTKLDQWAEEVVARGGFHNATA
LRIQYENYRDWLVNDNVAYSELFLDTAGKISFDVWDLIPFTRGYVHIADKDPYLRRLSNDPQYFLNELD
VLGQAAASKLARELSSRGAMAQYFASETVPGYDRLPADASLQDWAKYVKDRFRANYHAVSTCSMMPKEM
GGVVDSTARVYGVERLRVVDGSIPPTQVSSHVMTVFYGMAVKIAEAILQDHHTRK;
<AA; Talaromyces bacillisporus>
SEQ ID NO: 5
MKSILIVSALASLAGAQGYTPAEQIDVQSSLISDPKNVSGRTFDYIIAGGGLTGLTVAAKLSEDPNISV
LVIEKGFYESNDGPIIENPNDYGLIFGSSVDQNYLTVPMAINNRTLDIKSGKGLGGSTLINGDSWTGPD
KVQIDSWETVLGNPGWNYHALKEYMNKAERARYPTTTQIAAGMYFNSTCHGFNGTVNSGPRDDGRPYSP
LMKALMNTTSAMGVPTQADLLCGHPRGVSMIYNNLLPDQTRADAAREWLLPNYKRPNLSILTGQIVGKV
LFDKTPTGPRAVGVNFGTNKAVNFNVSAKHEVLLAAGSNVSPLILEHSGIGLKSVLDQFNISQLVELPV
GLNMQDQTTTTVRARAKASAAGQGQAVYFANFTEVFGNHTAQATNLLNTKLEQWANETVARGGFNNATA
LLIQYENYRKWLLDEDVAYVELFFDTNGKMNFDLWDLIPFTRGSVHIAHADPYLQSFSNNPMFLLNELD
LLGQAAGSMLARELQNSGELSTYFDGEDIPGAELLPYDATLDGWVGYVKDNFRANWHAVSTCSMMPKEL
GGVVDSAARVYGTQGLRVIDGSIPPTQVSSHVMTVFYAMALKIADAILADYTA;
<AA; Microdochium nivale>
SEQ ID NO: 6
LVTRGAIEACLSAAGVPIDIPGTADYERDVEPFNIRLPYIPTAIAQTQTTAHIQSAVQCAKKLNLKVSA
KSGGHSYASFGFGGENGHLMVQLDRMIDVISYNDKTGIAHVEPGARLGHLATVLNDKYGRAISHGTCPG
VGISGHFAHGGFGFSSHMHGLAVDSVVGVTVVLADGRIVEASATENADLFWGIKGAGSNFGIVAVWKLA
TFPAPKVLTRFGVTLNWKNKTSALKGIEAVEDYARWVAPREVNFRIGDYGAGNPGIEGLYYGTPEQWRA
AFQPLLDTLPAGYVVNPTTSLNWIESVLSYSNFDHVDFITPQPVENFYAKSLTLKSIKGDAVKNFVDYY
FDVSNKVKDRFWFYQLDVHGGKNSQVTKVTNAETAYPHRDKLWLIQFYDRYDNNQTYPETSFKFLDGWV
NSVTKALPKSDWGMYINYADPRMDRDYATKVYYGENLARLQKLKAKFDPTDRFYYPQAVRPVK;
<AA; Chaetomium globosum>
SEQ ID NO: 7
MQTLAPLLALLGLAATSHATSFARFTNETGTLTDCLTKAGVPIGESGTPEYKIDVASFNLRLNYTPAAV
VAASTAQHVQDAVVCANKFGIKPTAKCGGHSYASFGLGGEDGHLVIEMSRMNKVVLDNVTGIATAEGGT
RLGHLAMELYTQGKRAISHGTCPGVGVGGHLLHGGYGMSSHTHGLALDYVIGATVVLANGTVVECSETQ
HGELFWALRGAGASMGIVTEFRLKTFEAPGQLTYFVAPVQWPTEARALVGVTAVQEFAKTMPAELNMRL
FIARRFVNLEGLFYGDKEDLKAALAPLVAKTNATLALATTGDWMEQIKHFGGGSNIDQGHGYEEHETFY
STSLYTKELNDEQLQNFVGYWFNQAKNNTRDWYVQIDLHGGENSAVSAPAADSTAYAHRDYLLMYLLYD
RVDKGEYPAEGHTVMENFAGNITQGMERSDWGMYINYPNSRLDQKDAQLNYWGDNLPKLQAIKKDVDPE
DVFHFPQGVMPAVRHQHQHQH;
<AA; Neurospora crassa>
SEQ ID NO: 8
MWLPLILLTATAAPILANPLSSPLNKRAAIDDCLKSAGVPADAQGSSEWRTDVNPFNQRLPYTPVAIAV
PTTIEHIQGAVSCATKLGIKVTPKSGGHSYASFGLGGENGHLVVELDRMSKVTLDKTTNIADVQSGARL
GHVATELPYFLAWPGLTKEGNRVGVGGHSLHGGFGFSSHTYGLAVDWIAAATVVLANSTVVTASPTENP
DLFWALRGAGSNFGIVASFKFNTFAAPSQVTAFQINLPWNSASSIASGWEKLQDWLAAGNMPKEMNMRV
FGSPSQTQLQGLYHGSSSALRTAVQPLLSTLGASLSNAQQYDWMGAFTYYTYGGTVDVTHPYNTVETFY
SKSLVTTALPSAALNSVANYWINTAKRVSRDWFIIIDMHGGPKSAITSSTTNSANYTSSYAYRAPEYLF
LYELYDRVMFGSYPSNGFSFLDGWVKSFTDNMKQEQWGMYINYADPTMKRAEAVGNYYRSSLSRLQKVK
AQYDPNEVFYYPQSVEPARHQHQHQH;
<AA; Thermothelomyces thermophilus>
SEQ ID NO: 9
MKSFISAATLLVGILTPSVAAAPPSTPEQRDLLVPITEREEAAVKARQQSCNTPSNRACWTDGYDINTD
YEVDSPDTGVVRPYTLTLTEVDNWTGPDGVVKEKVMLVNNSIIGPTIFADWGDTIQVTVINNLETNGTS
IHWHGLHQKGTNLHDGANGITECPIPPKGGRKVYRFKAQQYGTSWYHSHFSAQYGNGVVGAIQINGPAS
LPYDTDLGVFPISDYYYSSADELVELTKNSGAPFSDNVLFNGTAKHPETGEGEYANVTLTPGRRHRLRL
INTSVENHFQVSLVNHTMTIIAADMVPVNAMTVDSLFLGVGQRYDVVIEASRTPGNYWFNVTFGGGLLC
GGSRNPYPAAIFHYAGAPGGPPTDEGKAPVDHNCLDLPNLKPVVARDVPLSGFAKRPDNTLDVTLDTTG
TPLFVWKVNGSAINIDWGRPVVDYVLTQNTSFPPGYNIVEVNGADQWSYWLIENDPGAPFTLPHPMHLH
GHDFYVLGRSPDESPASNERHVFDPARDAGLLSGANPVRRDVTMLPAFGWVVLAFRADNPGAWLFHCHI
AWHVSGGLGVVYLERADDLRGAVSDADADDLDRLCADWRRYWPTNPYPKSDSGLKHRWVEEGEWLVKA;
<AA; unidentified>
SEQ ID NO: 10
QCPYLSGEMSFTQEQDNAGDTIEVTEQTIDNTLYVNDTGSYMTTDFGTPISDQYSLKAGRRGPTLLEDF
IFRQKLQRFDHERVPERVVHARGAGAYGTFKSYADWSNVTAADFLSANEKETPMFCRFSTVVGFRGSVD
TARDVHGHACRFYTDEGNYDIVGINFAPFFIQDAIQFPDLVHAIKPMPNNEIPQAATAHTSAWDFFSQQ
STALHSALWLMSGNGIPRSFRHMNGYGVHSFRFVAANGTSKVVRYRWKSQQGVASLVWEEAQAAAGKNS
DYHRQDLYNAIANGHYPKYELQAQIMDEADMLRFGFDLLDPTKLVPEEVVPYTPLGMMELNANPTNYFA
EVEQAGFQPGHVVPGIDFTDDPLLQGRLFSYLDTQLTRHGGPNFEQIPVNRPRKPVHNNNRDGFGQQQI
PTNNWAYTPNTMSNGYPMQANQTHGHGFFTSPYRYASGHLIREPSPTFHDHWSQPAMFWNSLIPAEQQM
VVNAIVFENSKVNSPHVRKNVVNQLNMVNNNLAVRVARGLGLDEPSPNPTYYTSNKTSNVGTFGKPLLS
IEGLQVGFLASNSHPESIKQGQAMAAQFSAAGVDLNIVTEAYADGVNTTYALSDAIDFDALIIADGVQS
LFASPSLANQMNSTATSTLYPPARPYQILVDSFRYGKPVAAVGSGSAALKNAGIDTSRSGVYTGSSETT
ENIAKEVLKGLYTFRFVDRFALDE;
<AA; Thermoascus aurantiacus>
SEQ ID NO: 11
MRAIGLLPGIIGIAGAACPYMTGELPRSFAENPHAINRRAEGGGGAAAETEKFLSQFYLNDNDTFMTTD
VGGPIEDQNSLSAGDRGPTLLEDFILRQKIQRFDHERVPERAVHARGAGAHGVFTSYADWSNITAASFL
SAAGKETPVFVRFSTVAGSRGSADTARDVHGFATRFYTDEGNFDIVGNNIPVFFIQDAIQFPDLIHAVK
PSPNNEIPQAATAHDSAWDFFSQQPSSLHTLFWAMAGHGIPRSYRNMDGFGIHTFRFVTDDGASKLVKF
HWTSLQGKASLVWEEAQAVAGKNADYHRQDLWDAIEAGRYPEWELGVQIMDEEDQLRFGFDLLDPTKIV
PEEYVPITKLGKMQLNRNPLNYFAETEQIMFQPGHVVRGIDFTEDPLLQGRLFSYLDTQLNRHGGPNFE
QIPINRPRTPIHNNNRDGAAQMYIPLNKAAYTPNTLNNGSPKQANQTVGKGFFTTPGRTASGRLVRAVS
STFADVWSQPRLFYNSLVPAEQQFLINAIRFETAHITSDVVKNNVIIQLNRVSNNLAKRVARAIGVAEP
EPDPTLYHNNKTANVGVFGKPLARLDGLQVGVLATVNKPDSIKQAASLKASFAADNVDVKVVAERLADG
VDETYSAADAVNFDAILVANGAEGLFARDSFTARPANSTTATLYPAGRPLQILVDGFRYGKPVGALGSG
AKALDAAEISTTRAGVYVANSTTDSFINGVRDGLRTFKFLDRFAIDEDAE;
<AA; Thermoascus aurantiacus>
SEQ ID NO: 12
ACPYMTGELPRSFAENPHAINRRAEGGGGAAAETEKFLSQFYLNDNDTFMTTDVGGPIEDQNSLSAGDR
GPTLLEDFILRQKIQRFDHERVPERAVHARGAGAHGVFTSYADWSNITAASFLSAAGKETPVFVRFSTV
AGSRGSADTARDVHGFATRFYTDEGNFDIVGNNIPVFFIQDAIQFPDLIHAVKPSPNNEIPQAATAHDS
AWDFFSQQPSSLHTLFWAMAGHGIPRSYRNMDGFGIHTFRFVTDDGASKLVKFHWTSLQGKASLVWEEA
QAVAGKNADYHRQDLWDAIEAGRYPEWELGVQIMDEEDQLRFGFDLLDPTKIVPEEYVPITKLGKMQLN
RNPLNYFAETEQIMFQPGHVVRGIDFTEDPLLQGRLFSYLDTQLNRHGGPNFEQIPINRPRTPIHNNNR
DGAAQMYIPLNKAAYTPNTLNNGSPKQANQTVGKGFFTTPGRTASGRLVRAVSSTFADVWSQPRLFYNS
LVPAEQQFLINAIRFETAHITSDVVKNNVIIQLNRVSNNLAKRVARAIGVAEPEPDPTLYHNNKTANVG
VFGKPLARLDGLQVGVLATVNKPDSIKQAASLKASFAADNVDVKVVAERLADGVDETYSAADAVNFDAI
LVANGAEGLFARDSFTARPANSTTATLYPAGRPLQILVDGFRYGKPVGALGSGAKALDAAEISTTRAGV
YVANSTTDSFINGVRDGLRTFKFLDRFAIDEDAE;
<AA; Coprinopsis cinerea>
SEQ ID NO: 13
MKLSLLSTFAAVIIGALALPQGPGGGGSVTCPGGQSTSNSQCCVWFDVLDDLQTNFYQGSKCESPVRKI
LRIVFHDAIGFSPALTAAGQFGGGGADGSIIAHSNIELAFPANGGLTDTVEALRAVGINHGVSFGDLIQ
FATAVGMSNCPGSPRLEFLTGRSNSSQPSPPSLIPGPGNTVTAILDRMGDAGFSPDEVVDLLAAHSLAS
QEGLNSAIFRSPLDSTPQVFDTQFYIETLLKGTTQPGPSLGFAEELSPFPGEFRMRSDALLARDSRTAC
RWQSMTSSNEVMGQRYRAAMAKMSVLGFDRNALTDCSDVIPSAVSNNAAPVIPGGLTVDDIEVSCPSEP
FPEIATASGPLPSLAPAP;
<AA; Penicillium emersonii>
SEQ ID NO: 14
MLSSTTRTLAFTGLAGLLSAPLVKAHGFVQGIVIGDQFYSGYIVNSFPYESNPPPVIGWATTATDLGFV
DGTGYQGPDIICHRNATPAPLTAPVAAGGTVELQWTPWPDSHHGPVITYLAPCNGNCSTVDKTTLEFFK
IDQQGLIDDTSPPGTWASDNLIANNNSWTVTIPNSVAPGNYVLRHEIIALHSANNKDGAQNYPQCINIE
VTGGGSDAPEGTLGEDLYHDTDPGILVDIYEPIATYTIPGPPEPTF;
<AA; Thermoascus aurantiacus>
SEQ ID NO: 15
MSFSKIIATAGVLASASLVAGHGFVQNIVIDGKNYGGYLVNQYPYMSNPPEVIAWSTTATDLGFVDGTG
YQTPDIICHRGAKPGALTAPVSPGGTVELQWTPWPDSHHGPVINYLAPCNGDCSTVDKTQLEFFKIAES
GLINDDNPPGIWASDNLIAANNSWTVTIPTTIAPGNYVLRHEIIALHSAQNQDGAQNYPQCINLQVTGG
GSDNPAGTLGTALYHDTDPGILINIYQKLSSYIIPGPPLYTG;
<AA; Bacillus licheniformis>
SEQ ID NO: 16
EGVMSGGGGDKVAVGKDGMVATAHPLASKIGAEVLKKGGNAIDAAIAIQYALNVTEPMMSGIGGGGFMM
VYDGETKETSIINSRERAPEGAKPDMFLDGDGKVIPFSERSRHGNAVGVPGTLKGLEAAHKKWGTKKME
DLISPSIKLAEEGFPIDSVLADAIKDHQDKLSKTAAKDIFLPDGEPLKEGDILVQKDLAKTFKLIRKEG
SKAFYDGEIGRAIADVVQDFGGSMTPDDLSRYEVTTDKPIWGEYHGYDIASMPPPSSGGVFMLQMLKLI
DDFHLSQYDPKSFEKYHLLAETMHLSYADRAAYAGDPEFVDVPLRGLLDPDYIKERQKLISLDSMNRDV
KEGDPWKYEEGEPNYEIVPQPEDKTIGETTHFTVTDQWGNVVSYTTTIEQLFGTGILVPGYGLFLNNEL
TDFDAVPGGANEVQPNKRPLSSMTPTIVFKDEKPVLTVGSPGGTTIIASVFQTILNYFEYGMSLQDAIE
EPRIYTNSLTSYRYESGMPEDVRRKLNDFGHKFGANPVDIGNVQSIFIDRENKTFMGVADSSRNGTAVG
VNIKTSAK;
<AA; Thermomyces lanuginosus>
SEQ ID NO: 17
MRSSLVLFFVSAWTALASPIRREVSQDLFNQFNLFAQYSAAAYCGKNNDAPAGTNITCTGNACPEVEKA
DATFLYSFEDSGVGDVTGFLALDNTNKLIVLSFRGSRSIENWIGNLNFDLKEINDICSGCRGHDGFTSS
WRSVADTLRQKVEDAVREHPDYRVVFTGHSLGGALATVAGADLRGNGYDIDVFSYGAPRVGNRAFAEFL
TVQTGGTLYRITHTNDIVPRLPPREFGYSHSSPEYWIKSGTLVPVTRNDIVKIEGIDATGGNNQPNIPD
IPAHLWYFGLIGTCL;
<AA; Thermomyces lanuginosus>
SEQ ID NO: 18
EVSQDLFNQFNLFAQYSAAAYCGKNNRAPAGTNITCTGNACPEVEKADATFLYSFEDSGVGDVTGFLAL
DNTNKLIVLSFRGSRSIENWINNLRFDLKEINDICSGCRGHAGFTSSWRSVADTLRQKVEDAVREHPDY
RVVFTGHSLGGALATVAGADLRGNGYDIDVFSYGAPRVGNRAFAEFLTVQTGGTLYRITHTNDIVPRLP
PREFGYSHPSPEYWIKSGTGVPVTRNDIVKIEGIDATGGNNQPNIPDITAHLWYFGLIGTCL;
<AA; Humicola insolens>
SEQ ID NO: 19
QLGAIQNDLESGSPDACPDAILIFARGSTEPGNMGITVGPALANGLKEHIPNIWIQGVGGPYDAALATN
FLPRGTSQANIDEGKRLFHLAHQKCPNTPVVAGGYSQGAALIAAAVSELSGAVKEQVKGVVLFGYTQNL
QNRGGIPNYPRERTKVFCNVGDAVCTGTLIITPAHLSYTIQARGEAARFLVDRIRA;
<AA; Thermomyces lanuginosus>
SEQ ID NO: 20
SPIRREVSQDLFNQFNLFAQYSAAAYCGKNNDAPAGTNITCTGNACPEVEKADATFLYSFEDSGVGDVT
GFLALDNTNKLIVLSFRGSRSIENWIGNLNFDLKEINDICSGCRGHDGFTSSWRSVADTLRQKVEDAVR
EHPDYRVVFTGHSLGGALATVAGADLRGNGYDIDVFSYGAPRVGNRAFAEFLTVQTGGTLYRITHTNDI
VPRLPPREFGYSHSSPEYWIKSGTLVPVRRRDIVKIEGIDATGGNNQPNIPDIPAHLWYFGLIGTCL;
<AA; Penicillium thomii>
SEQ ID NO: 21
FPAIQERATADTAAWSFLQRAADLSSAAYTGCLGTAFDVTITKQIYDAATNAKGFVGYSTINKKISVVM
KGSTTETDIMNDVDTTLVTPSLSGVTFPSGAQIMHGISSPWSAVHDTIISEVKTLVEKYPDYTLESTGH
SLGGSLTYISYVALSANFPDKEVTSNAMAAFPIGNQAWATFAESFNGTLNRGNNVDDGVPNMYIELPYD
FVHYGTEYYSYGTEATVLKCSGERDTSCSAGNGQYGVTAGHFSSFGVEMGYAGCSSL;
<AA; Cryphonectria parasitica>
SEQ ID NO: 22
SPLQARDSAVLDETSYENMKYYVQYAASAYCDSEDAVGTLVSCGDSGCPNVTANGATIVGTMPTTTTFD
LEGYVAVDPTREEIVVAFRGSSDLRNWIADFDFIEVAYSDCTGCYVHDGFYESWKEIQTYAVGYVEAAY
ETYPDYTLVITGHSLGAAVATLAGVQFRIDGYPCDIYTVGSPRIGNLAWAEFVTAQDGAEYRATHYDDP
VPRLPPIVLGYYHTSPEFWLAAGPATNIDYTIDGIDVCVGNANTSCNAGTTGFDADAHEYYFQYMGCGD
ESNGIDMRKRNITDAELAQKLTNYTMQDIAFSEKLASSS;
<AA; Thermomyces lanuginosus>
SEQ ID NO: 23
EVSQDLFNQFNLFAQYSAAAYCGKNNDAPAGTNITCTGNACPEVEKADATFLYSFEDSGVGDVTGFLAL
DNTNKLIVLSFRGSRSIENWIANLNFWLKKINDICSGCRGHDGFTSSWRSVADTLRQKVEDAVREHPDY
RVVFTGHSLGGALATVAGADLRGNGYDIDVFSYGAPRVGNRAFAEFLTVQTGGTLYRITHTNDIVPRLP
PREFGYSHSSPEYWIKSGTLVPVTRNDIVKIEGIDATGGNNQPNIPDIPAHLWYFQATDACNAGGFS;
<AA; Aspergillus niger>
SEQ ID NO: 24
MKLPLFAAAAAGLANAASLPVERAEAEVASVAADLIVRALPNAPDGYTPSNVTCPSTRPSIRDASGIST
NETEWLKVRRNATLTPMKNLLSRLNLTGFDTTSYINEHSSNISNIPNIAIAASGGGYRALTNGAGALKA
FDSRSDNATNSGQLGGLLQAATYVSGLSGGSWLVGSMFVNNFSSIGELQASEKVWRFDKSLLEGPNFDH
IQIVSTVEYWKDITEEVDGKANAGENTSFTDYWGRALSYQLVNASDDKGGPDYTWSSIALMDDFKNGQY
PMPIVVADGRNPGEIIVETNATVYEVNPWEFGSFDPSVYAFAPLQYLGSRFENGSIPDNGTCVSGFDNA
GFIMGSSSTLFNQFLLQINSTSIPTILKDAFTDILEDLGERNDDIAVYSPNPFSGYRDSSEDYATAKDL
DVVDGGEDGENIPLHPLIQPERAVDVIFAIDSSADTDYYWPNGTSLVATYERSLEPSIANGTAFPAVPD
QNTFVNLGLNSRPTFFGCDPKNISGTAPLVIYLPNSPYTYDSNFSTFKLTYSDEERDSVITNGWNVVTR
GNGTVDDNFPSCVACAILQRSTYRTNTSLPDICTTCFNDYCWNGTTNSTTPGAYEPSV;
<AA; Aspergillus aculeatus>
SEQ ID NO: 25
MVKSVLASALFAVSALAASRTTAPSGAIVVAKSGGDYTTIGDAIDALSTSTTDTQTIFIEEGTYDEQVY
LPAMTGKVIIYGQTENTDSYADNLVTITHAISYEDAGESDDLTATFRNKAVGSQVYNLNIANTCGQACH
QALALSAWADQQGYYGCNFTGYQDTLLAQTGNQLYINSYIEGAVDFIFGQHARAWFQNVDIRVVEGPTS
ASITANGRSSETDTSYYVINKSTVAAKEGDDVAEGTYYLGRPWSEYARVVFQQTSMTNVINSLGWTEWS
TSTPNTEYVTFGEYANTGAGSEGTRASFAEKLDAKLTITDILGSDYTSWVDTSYF;
<AA; Evansstolkia leycettana>
SEQ ID NO: 26
MHRPLQLWALAALTSLVTAAPAPVLRRDVSSSVLSELDLFAQYSAAAYCSSNIGSPGTKLTCSVGNCPR
VEAADTETLIEFNESSSFGDVTGYIAVDRTNSLLVLAFRGSSTVSNWEADLDFPLTDASSLCSGCEIHS
GFWAAWQTVQASITSTLESAIASYPGYTLVFTGHSYGAALAAIAATTLRNAGYTIQLYDYGQPRLGNLA
LAQYITAQTQGANYRVTHTDDIVPKLPPELFGYHHFSPEYWITSGDNVTVTTSDVQVVTGIDSTAGNDG
TLLDSTSAHDWYIVYIDGCD;
<AA; Nemania serpens>
SEQ ID NO: 27
IPMTLDLSEEMIDKLKAGKASGVSEATATGTTANEFLDGGCRPVIFLFARGSRQEGNVGGTPGPQTIDQ
LKARLGDGAVAAQGLEYPADLLDNLRSGGCDPADVDSFGALIARAAAECPGSRLVLSGYSQGAALVHAA
ARKLAADVVVRIAAAVTYGDTRKEQDGGVIPGIDPARTLILCHDGDLVCDGTLIVTDNHYDYDDLAPTA
VDFIASKV;
<AA; Trichophaea saccata>
SEQ ID NO: 28
TPFTGLDTPIDHFKRDENGTVPTRTLDISTSIYEKWDALFSAAATPSASSAASVKIRTSSDVREDLNNG
MCGNVVLIYARGTYSSGNIGIGVGVAFVDALAAALPNQVIVQGVEPYDNDIAGYLAGGDETGANSMVAL
TQKAASQCPSAKIVWGGYSQGAQVTHKAGERLPSALYPRIAGIMLFGDPDNGDPFPGSLNNHVKTYCHS
DDPICDGIPLPIAGHLTYDENATEAAAVVATWV;
<AA; Thermochaetoides thermophila>
SEQ ID NO: 29
LPTAPVEETASHLEARQSTTRNDLENGNSNNCPGVIFIFARASTEPGNMGISAGPNVANGLAAHYGSNL
WVQGVGGPYTAALADNFLPAGTSRAAIDEAKRLFNLASTKCPNAAIVAGGYSQGTAVMSNAISELSSSV
RDKVKGVVLFGYTKNLQNGGQIPNYPSNRLEVYCNASDAVCWGTLFITPAHFLYTTESTIDAPRFLISK
VGF;
<AA; Pyrenophora tritici-repentis>
SEQ ID NO: 30
APTPETGVSFPITDLLDSDLTINEYAAQLEAKNVEERDLTKRQYNSDTYNQLTDGTACRPITVIWARGT
TQSGNVGEPNSEGPVFFNAIAARVGGISRLAIQGVTYPANVFGFLAGGDAAGATTMFNLINQAISQCPS
TKIVVTGYSQGAQLVHTATQRLSAAAAARVTAVVTFGDADRDESFGSVAASKVLIICHEGDNICDNGII
ITPQHRNYEIDAPTAAAFVAARV;
<AA; Acrophialophora fusispora>
SEQ ID NO: 31
FPTAPVELESTAEIEARQLSSTRTDLESGSSSNCPRVIFIFARASTETGNMGLSAGPNVANGLAARYGS
NLWVQGVGGPYTAGLAENFLPAGTSRAAIDEAKRLFTMANQKCPNAAVVAGGYSQGTAVMSNAISELST
TIKNQIKGVVLFGYTKNLQNGGRIPNFDTAKTEVYCNVSDAVCWGTLFIAPAHFLYTTDSTINAPAFLI
SKIGA;
<AA; Fusarium longipes>
SEQ ID NO: 72147
MKPTQVLLALAAIAYAAPVAEDTKVEAVEFDDDFPLAELEAYFENHLNGQASESGSLQARQFSSSTYNQ
LTDGTPCRPVTMIYARGTTQAGNVGDPAAVGPVLFNNLASRIGLNNLAVQGVTYPANVAGFLAGGDAAG
SRTMATLISRAASQCPSTKIIISGYSQGAQLVHNAAGMLSASVANRVTAAVTFGDPKQNEAFGTIPSSR
TRVYCRSGDNICTGGIIITPAHSQYQQDAPAAAQWIAARV;
<AA; Colletotrichum graminicola>
SEQ ID NO: 72149
MHRSTPALLLAVLGMASASPFAIVPRQADFSGNQQDGLSGPCQPTMVIFARGTTERGNVGTLAGPPFFQ
ALSAQVGGALAVQGVEYPASVQGFLAGGDAKGSQTMATLTEQAITKCPNSSIIMSGYSQGGQLVHNAAA
MMSQSMVASVAGAVIFGDPLNGQPVQGVPTQRTMVICHNGDNICEGGSQIRRAHLTYGDNAAEAAQFAA
SMTPPSAAAA;
<AA; Pseudomonas sp.>
SEQ ID NO: 32
AQESPAFIDPASWNTPFNGIAQVACHNCYEKQYANTFSSVLDSVRTLELDFWDQRDAVSGGSPHHWFVR
HNPGTLFQSGNDNNCTGDGTGKNDLEACLNDVKNWSDKHPGHFPITLILDKKQGWSKESSGRTPKDFDE
LVARVFQGKLFTPQDLATHIGSGAGALQGNLKGKSWPTANDLQGKVLLVLNHSENQKLSQYAEARTSKA
KVFISPVTNGQNDISGKVSGMSSQSSGYVAMNNMGKGDKSWAKQAFAYSHIGRVWGDDEVSFAQHINQK
INLSAYYRFAAQSAGGYRIRPF;
<AA; Bacillus thuringiensis>
SEQ ID NO: 33
WSAEDKHKEGVNSHLWIVNRAIDIMSRNTTLVKQDRVAQLNEWRTELENGIYAADYENPYYDNSTFASH
FYDPDNGKTYIPFAKQAKETGAKYFKLAGESYKNKDMKQAFFYLGLSLHYLGDVNQPMHAANFTNLSYP
QGFHSKYENFVDTIKDNYKVTDGNGYWNWKGTNPEDWIHGAAVVAKQDYSGIVNDNTKDWFVKAAVSQE
YADKWRAEVTPMTGKRLMDAQRVTAGYIQLWFDTYGDR;
<AA; Geobacillus stearothermophilus>
SEQ ID NO: 34
APFNGTMMQYFEWYLPDDGTLWTKVANEANNLSSLGITALWLPPAYKGTSRSDVGYGVYDLYDLGEFNQ
KGTVRTKYGTKAQYLQAIQAAHAAGMQVYADVVFDHKGGADGTEWVDAVEVNPSDRNQEISGTYQIQAW
TKFDFPGRGNTYSSFKWRWYHFDGVDWDESRKLSRIYKFRGKAWDWEVDTEFGNYDYLMYADLDMDHPE
VVTELKNWGKWYVNTTNIDGFRLDAVKHIKFSFFPDWLSYVRSQTGKPLFTVGEYWSYDINKLHNYITK
TDGTMSLFDAPLHNKFYTASKSGGAFDMRTLMTNTLMKDQPTLAVTFVDNHDTEPGQALQSWVDPWFKP
LAYAFILTRQEGYPCVFYGDYYGIPQYNIPSLKSKIDPLLIARRDYAYGTQHDYLDHSDIIGWTREGGT
EKPGSGLAALITDGPGGSKWMYVGKQHAGKVFYDLTGNRSDTVTINSDGWGEFKVNGGSVSVWVPRKTT
VS;
<AA; Geobacillus stearothermophilus>
SEQ ID NO: 35
MKQQKRLYARLLTLLFALIFLLPHSAAAAPFNGTMMQYFEWYLPDDGTLWTKVANEANNLSSLGITALW
LPPAYKGTSRSDVGYGVYDLYDLGEFNQKGTVRTKYGTKAQYLQAIQAAHAAGMQVYADVVFDHKGGAD
GTEWVDAVEVNPSDRNQEISGTYQIQAWTKFDFPGRGNTYSSFKWRWYHFDGVDWDESRKLSRIYKFRG
KAWDWEVDTEFGNYDYLMYADLDMDHPEVVTELKNWGKWYVNTTNIDGFRLDAVKHIKFSFFPDWLSYV
RSQTGKPLFTVGEYWSYDINKLHNYITKTDGTMSLFDAPLHNKFYTASKSGGAFDMRTLMTNTLMKDQP
TLAVTFVDNHDTEPGQALQSWVDPWFKPLAYAFILTRQEGYPCVFYGDYYGIPQYNIPSLKSKIDPLLI
ARRDYAYGTQHDYLDHSDIIGWTREGGTEKPGSGLAALITDGPGGSKWMYVGKQHAGKVFYDLTGNRSD
TVTINSDGWGEFKVNGGSVSVWVPRKTTVSTIARPITTRPWTGEFVRWTEPRLVAWP;
<AA; Sutcliffiella halmapala>
SEQ ID NO: 36
HHNGTNGTMMQYFEWHLPNDGNHWNRLRDDASNLRNRGITAIWIPPAWKGTSQNDVGYGAYDLYDLGEF
NQKGTVRTKYGTRSQLESAIHALKNNGVQVYGDVVMNHKGGADATENVLAVEVNPNNRNQEISGDYTIE
AWTKFDFPGRGNTYSDFKWRWYHFDGVDWDQSRQFQNRIYKFRGKAWDWEVDSENGNYDYLMYADVDMD
HPEVVNELRRWGEWYTNTLNLDGFRIDAVKHIKYSFTRDWLTHVRNATGKEMFAVAEFWKNDLGALENY
LNKTNWNHSVFDVPLHYNLYNASNSGGNYDMAKLLNGTVVQKHPMHAVTFVDNHDSQPGESLESFVQEW
FKPLAYALILTREQGYPSVFYGDYYGIPTHSVPAMKAKIDPILEARQNFAYGTQHDYFDHHNIIGWTRE
GNTTHPNSGLATIMSDGPGGEKWMYVGQNKAGQVWHDITGNKPGTVTINADGWANFSVNGGSVSIWVK
R;
<AA; Bacillus amyloliquefaciens>
SEQ ID NO: 37
VNGTLMQYFEWYTPNDGQHWKRLQNDAEHLSDIGITAVWIPPAYKGLSQSDNGYGPYDLYDLGEFQQKG
TVRTKYGTKSELQDAIGSLHSRNVQVYGDVVLNHKAGADATEDVTAVEVNPANRNQETSEEYQIKAWTD
FRFPGRGNTYSDFKWHWYHFDGADWDESRKISRIFKFRGEGKAWDWEVSSENGNYDYLMYADVDYDHPD
VVAETKKWGIWYANELSLDGFRIDAAKHIKFSFLRDWVQAVRQATGKEMFTVAEYWQNNAGKLENYLNK
TSFNQSVFDVPLHFNLQAASSQGGGYDMRRLLDGTVVSRHPEKAVTFVENHDTQPGQSLESTVQTWFKP
LAYAFILTRESGYPQVFYGDMYGTKGTSPKEIPSLKDNIEPILKARKEYAYGPQHDYIDHPDVIGWTRE
GDSSAAKSGLAALITDGPGGSKRMYAGLKNAGETWYDITGNRSDTVKIGSDGWGEFHVNDGSVSIYVQ
K;
<AA; Aspergillus oryzae>
SEQ ID NO: 38
MVAWWSLFLYGLQVAAPALAATPADWRSQSIYFLLTDRFARTDGSTTATCNTADQKYCGGTWQGIIDKL
DYIQGMGFTAIWITPVTAQLPQTTAYGDAYHGYWQQDIYSLNENYGTADDLKALSSALHERGMYLMVDV
VANHMGYDGAGSSVDYSVFKPFSSQDYFHPFCFIQNYEDQTQVEDCWLGDNTVSLPDLDTTKDVVKNEW
YDWVGSLVSNYSIDGLRIDTVKHVQKDFWPGYNKAAGVYCIGEVLDGDPAYTCPYQNVMDGVLNYPIYY
PLLNAFKSTSGSMDDLYNMINTVKSDCPDSTLLGTFVENHDNPRFASYTNDIALAKNVAAFIILNDGIP
IIYAGQEQHYAGGNDPANREATWLSGYPTDSELYKLIASANAIRNYAISKDTGFVTYKNWPIYKDDTTI
AMRKGTDGSQIVTILSNKGASGDSYTLSLSGAGYTAGQQLTEVIGCTTVTVGSDGNVPVPMAGGLPRVL
YPTEKLAGSKICSSS;
<AA; Geobacillus stearothermophilus>
SEQ ID NO: 39
MKQQKRLYARLLTLLFALIFLLPHSAAAAAPFNGTMMQYFEWYLPDDGTLWTKVANEANNLSSLGITAL
WLPPAYKGTSRSDVGYGAYDLYDLGEFNQKGTVRTKYGTKAQYLQAIQAAHAAGMQVYADVVFDHKGGA
DGTEWVDAVEVNPSDRNQVISGTYQIQAWTKFDFPGRGNTYSSFKWRWYHFDGVDWDESRKLSRIYLFS
GKQWDWPVDNEFGNYDYLMYADLDMDHPEVTTELKNWGKWYVNTTNIDGFRLDAVKHIKFYFFPDWLSY
VRSSTGKPLFTVGEYWSGDINKLHNYITITDGTVSLFDAPLHYKFYNASKSGGAFDMRTLMTNTLMKDQ
PTLAVTFVDNHDTEPGQALQSWVDPWFKPLAYAFILTRQEGYPCVFYGDYYGIPQYNIPSLKSKIDPLL
IARRDYAYGTQHDYLDHSDIIGWTREGGTEKPGSGLAALITDGPGGSKWMYVGKQHAGKVFYDLTGNRS
DTVTINSDGWGEFKVNGGSVSVWVPRKTTVSTIARP;
<AA; Alkalihalobacillus akibai>
SEQ ID NO: 40
HHNGTNGTMMQYFEWYLPNDGNHWNRLRSDASNLKDKGISAVWIPPAWKGASQNDVGYGAYDLYDLGEF
NQKGTIRTKYGTRNQLQAAVNALKSNGIQVYGDVVMNHKGGADATEMVKAVEVNPNNRNQEVSGEYTIE
AWTKFDFPGRGNTHSNFKWRWYHFDGVDWDQSRKLNNRIYKFRGKGWDWEVDTEFGNYDYLMYADIDMD
HPEVVNELRNWGVWYTNTLGLDGFRIDAVKHIKYSFTRDWINHVRSATGKNMFAVAEFWKNDLGAIENY
LNKTNWNHSVFDVPLHYNLYNASKSGGNYDMRQIFNGTVVQKHPMHAVTFVDNHDSQPEEALESFVEEW
FKPLAYALTLTREQGYPSVFYGDYYGIPTHGVPAMKSKIDPILEARQKYAYGRONDYLDHHNIIGWTRE
GNTAHPNSGLATIMSDGAGGNKWMFVGRNKAGQVWTDITGNKAGTVTINADGWGNFSVNGGSVSIWVN
K;
<AA; Aspergillus niger>
SEQ ID NO: 41
MSFRSLLALSGLVCTGLANVISKRATLDSWLSNEATVARTAILNNIGADGAWVSGADSGIVVASPSTDN
PDYFYTWTRDSGLVLKTLVDLFRNGDTSLLSTIENYISAQAIVQGISNPSGDLSSGAGLGEPKFNVDET
AYTGSWGRPQRDGPALRATAMIGFGQWLLDNGYTSTATDIVWPLVRNDLSYVAQYWNQTGYDLWEEVNG
SSFFTIAVQHRALVEGSAFATAVGSSCSWCDSQAPEILCYLQSFWTGSFILANFDSSRSGKDANTLLGS
IHTFDPEAACDDSTFQPCSPRALANHKEVVDSFRSIYTLNDGLSDSEAVAVGRYPEDTYYNGNPWFLCT
LAAAEQLYDALYQWDKQGSLEVTDVSLDFFKALYSDAATGTYSSSSSTYSSIVDAVKTFADGFVSIVET
HAASNGSMSEQYDKSDGEQLSARDLTWSYAALLTANNRRNSVVPASWGETSASSVPGTCAATSAIGTYS
SVTVTSWPSIVATGGTTTTATPTGSGSVTSTSKTTATASKTSTSTSSTSCTTPTAVAVTFDLTATTTYG
ENIYLVGSISQLGDWETSDGIALSADKYTSSDPLWYVTVTLPAGESFEYKFIRIESDDSVEWESDPNRE
YTVPQACGTSTATVTDTWR;
<AA; Aspergillus niger>
SEQ ID NO: 42
ATLDSWLSNEATVARTAILNNIGADGAWVSGADSGIVVASPSTDNPDYFYTWTRDSGLVLKTLVDLFRN
GDTSLLSTIENYISAQAIVQGISNPSGDLSSGAGLGEPKFNVDETAYTGSWGRPQRDGPALRATAMIGF
GQWLLDNGYTSTATDIVWPLVRNDLSYVAQYWNQTGYDLWEEVNGSSFFTIAVQHRALVEGSAFATAVG
SSCSWCDSQAPEILCYLQSFWTGSFILANFDSSRSGKDANTLLGSIHTFDPEAACDDSTFQPCSPRALA
NHKEVVDSFRSIYTLNDGLSDSEAVAVGRYPEDTYYNGNPWFLCTLAAAEQLYDALYQWDKQGSLEVTD
VSLDFFKALYSDAATGTYSSSSSTYSSIVDAVKTFADGFVSIVETHAASNGSMSEQYDKSDGEQLSARD
LTWSYAALLTANNRRNSVVPASWGETSASSVPGTCAATSAIGTYSSVTVTSWPSIVATGGTTTTATPTG
SGSVTSTSKTTATASKTSTSTSSTSCTTPTAVAVTFDLTATTTYGENIYLVGSISQLGDWETSDGIALS
ADKYTSSDPLWYVTVTLPAGESFEYKFIRIESDDSVEWESDPNREYTVPQACGTSTATVTDTWR;
<AA; Humicola insolens>
SEQ ID NO: 43
MARGTALLGLTALLLGLVNGQKPGETKEVHPQLTTFRCTKRGGCKPATNFIVLDSLSHPIHRAEGLGPG
GCGDWGNPPPKDVCPDVESCAKNCIMEGIPDYSQYGVTTNGTSLRLQHILPDGRVPSPRVYLLDKTKRR
YEMLHLTGFEFTFDVDATKLPCGMNSALYLSEMHPTGAKSKYNPGGAYYGTGYCDAQCFVTPFINGLGN
IEGKGSCCNEMDIWEANSRASHVAPHTCNKKGLYLCEGEECAFEGVCDKNGCGWNNYRVNVTDYYGRGE
EFKVNTLKPFTVVTQFLANRRGKLEKIHRFYVQDGKVIESFYTNKEGVPYTNMIDDEFCEATGSRKYME
LGATQGMGEALTRGMVLAMSIWWDQGGNMEWLDHGEAGPCAKGEGAPSNIVQVEPFPEVTYTNLRWGEI
GSTYQEVQKPKPKPGHGPRSD;
<AA; Humicola insolens>
SEQ ID NO: 44
MRSSPLLRSAVVAALPVLALAADGRSTRYWDCCKPSCGWAKKAPVNQPVFSCNANFQRITDFDAKSGCE
PGGVAYSCADQTPWAVNDDFALGFAATSIAGSNEAGWCCACYELTFTSGPVAGKKMVVQSTSTGGDLGS
NHFDLNIPGGGVGIFDGCTPQFGGLPGQRYGGISSRNECDRFPDALKPGCYWRFDWFKNADNPSFSFRQ
VQCPAELVARTGCRRNDDGNFPAVQIPSSSTSSPVNQPTSTSTTSTSTTSSPPVQPTTPSGCTAERWAQ
CGGNGWSGCTTCVAGSTCTKINDWYHQCL;
<AA; Thermothielavioides terrestris>
SEQ ID NO: 45
MRSTPVLRTTLAAALPLVASAASGSGQSTRYWDCCKPSCAWPGKAAVSQPVYACDANFQRLSDENVQSG
CNGGSAYSCADQTPWAVNDNLAYGFAATSIAGGSESSWCCACYALTFTSGPVAGKTMVVQSTSTGGDLG
SNHFDIAMPGGGVGIFNGCSSQFGGLPGAQYGGISSRDQCDSFPAPLKPGCQWRFDWFQNADNPTFTFQ
QVQCPAEIVARSGCKRNDDSSFPVFTPPSGGNGGTGTPTSTAPGSGQTSPGGGSGCTSQKWAQCGGIGF
SGCTTCVSGTTCQKLNDYYSQCL;
<AA; Bacillus amyloliquefaciens>
SEQ ID NO: 46
FNSYNSGLWQKADGYSNGDMFNCTWRANNVSMTSSGEMRLALTSPSYNKFDCGENRSVQTYGYGLYEVR
MKPAKNTGIVSSFFTYTGPTEGTPWDEIDIEFLGKDTTKVQFNYYTNGAGNHEKLADLGFDAANAYHTY
AFDWQPNSIKWYVDGQLKHTATTQIPAAPGKIMMNLWNGTGVDDWLGSYNGVNPLYAHYDWVRYT;
<AA; Aspergillus niger>
SEQ ID NO: 47
MLNPKVAYMVWMTCLGLTLPSQAQSNDYRPSYHFTPDQYWMNEPNGLIKIGSTWHLFFQHNPTANVWGN
ICWGHATSTDLMHWAHKPTAIADENGVEAFTGTAYYDPNNTSGLGDSANPPYLAWFTGYTTSSQTQDQR
LAFSVDNGATWTKFQGNPIISTSQEAPHDITGGLESRDPKVFFHRQSGNWIMVLAHGGQDKLSFWTSAD
TINWTWQSDLKSTSINGLSSDITGWEVPDMFELPVEGTEETTWVVMMTPAEGSPAGGNGVLAITGSFDG
KSFTADPVDASTMWLDNGRDFDGALSWVNVPASDGRRIIAAVMNSYGSNPPTTTWKGMLSFPRTLSLKK
VGTQQHFVQQPITELDTISTSLQILANQTITPGQTLLSSIRGTALDVRVAFYPDAGSVLSLAVRKGASE
QTVIKYTQSDATLSVDRTESGDISYDPAAGGVHTAKLEEDGTGLVSIRVLVDTCSVEVFGGQGEAVISD
LIFPSDSSDGLALEVTGGNAVLQSVDVRSVSLE;
<AA; Aspergillus niger>
SEQ ID NO: 48
MVGLLSITAALAATVLPNIVSAVGLDQAAVAKGLQYFGTATDNPELTDIPYVTQLNNTADFGQITPGNS
MKWDATEPSQGTFTFTKGDVIADLAEGNGQYLRCHTLVWYNQLPSWVTSGTWTNATLTAALKNHITNVV
SHYKGKCLHWDVVNEALNDDGTYRTNIFYTTIGEAYIPIAFAAAAAADPDAKLFYNDYNLEYGGAKAAS
ARAIVQLVKNAGAKIDGVGLQAHFSVGTVPSTSSLVSVLQSFTALGVEVAYTEADVRILLPTTATTLAQ
QSSDFQALVQSCVQTTGCVGFTIWDWTDKYSWVPSTFSGYGAALPWDENLVKKPAYNGLLAGMGVTVTT
TTTTTTATATGKTTTTTTGATSTGTTAAHWGQCGGLNWSGPTACATGYTCTYVNDYYSQCL;
<AA; Dictyoglomus thermophilum>
SEQ ID NO: 49
MQTSITLTSNASGTFDGYYYELWKDTGNTTMTVYTQGRFSCQWSNINNALFRTGKKYNQNWQSLGTIRI
TYSATYNPNGNSYLCIYGWSTNPLVEFYIVESWGNWRPPGATSLGQVTIDGGTYDIYRTTRVNQPSIVG
TATFDQYWSVRTSKRTSGTVTVTDHFRAWANRGLNLGTIDQITLCVEGYQSSGSANITQNTFSQGS;
<AA; Thermomyces lanuginosus>
SEQ ID NO: 50
MVGFTPVALAALAATGALAFPAGNATELEKRQTTPNSEGWHDGYYYSWWSDGGAQATYTNLEGGTYEIS
WGDGGNLVGGKGWNPGLNARAIHFEGVYQPNGNSYLAVYGWTRNPLVEYYIVENFGTYDPSSGATDLGT
VECDGSIYRLGKTTRVNAPSIDGTQTFDQYWSVRQDKRTSGTVQTGCHFDAWARAGLNVNGDHYYQIVA
TEGYFSSGYARITVADVG;
<AA; Bacillus agaradhaerens>
SEQ ID NO: 51
QIVTDNSIGNHDGYDYEFWKDSGGSGTMILNHGGTFSAQWNNVNNILFRKGKKFNETQTHQQVGNMSIN
YGANFQPNGNAYLCVYGWTVDPLVEYYIVDSWGNWRPPGATPKGTITVDGGTYDIYETLRVNQPSIKGI
ATFKQYWSVRRSKRTSGTISVSNHFRAWENLGMNMGKMYEVALTVEGYQSSGSANVYSNTLRINGNPL;
<AA; Aspergillus fumigatus>
SEQ ID NO: 52
MVHLSSLAAALAALPLVYGAGLNTAAKAKGLKYFGSATDNPELTDSAYVAQLSNTDDFGQITPGNSMKW
DATEPSQNSFSFANGDAVVNLANKNGQLMRCHTLVWHSQLPNWVSSGSWTNATLLAAMKNHITNVVTHY
KGKCYAWDVVNEALNEDGTFRNSVFYQIIGPAYIPIAFATAAAADPDVKLYYNDYNIEYSGAKATAAQN
IVKMIKAYGAKIDGVGLQAHFIVGSTPSQSDLTTVLKGYTALGVEVAYTELDIRMQLPSTAAKLAQQST
DFQGVAAACVSTTGCVGVTIWDWTDKYSWVPSVFQGYGAPLPWDENYVKKPAYDGLMAGLGASGSGTTT
TTTTTSTTTGGTDPTGVAQKWGQCGGIGWTGPTTCVSGTTCQKLNDWYSQCL;
<AA; Evansstolkia leycettana>
SEQ ID NO: 53
MVHLSSLALALAAGSQLAQAAGLNTAAKAIGKLYFGTATDNPELSDSTYMQETDNTDDFGQLTPANSMK
WDATEPSQNTFTFTNGDQIANLAKSNGQMLRCHNLVWYNQLPSWVTSGSWTNATLLAAMKNHITNVVTH
YKGQCYAWDVVNEALNDDGTYRSNVFYQYIGEAYIPIAFATAAAADPNAKLYYNDYNIEYPGAKATAAQ
NIVKMVKAYGAKIDGVGLQSHFIVGSTPSQSSQQSNMAAFTALGVEVAITELDIRMTLPSTSALLAQQS
TDYQSTVSACVNTPKCIGITLWDWTDKYSWVPNTFSGQGDACPWDSNYQKKPAYYGILTALGGSASTST
TTTLVTSTRTSTTTSTSATSTSTGVAQHWGQCGGIGWTGPTTCASPYTCQELNPYYYQCL;
<AA; unidentified>
SEQ ID NO: 54
IRQRAGNHTVCNSQLCTWWHDNGEINTASMVQLGNVRQSHKYLVQVSIAGVNDFYDSFAYESIPRNGRG
RIYSPWDPPNSDTLGSDVDDGITIETSAGINMAWSQFEYSTGVDVKILTRDGSRLPDPSGVKIRPTAIS
YDIRSSSDGGIVIRVPHDPNGRRFSVEFDNDLYTYRSDGSRYVSSGGSIVGVEPRNALVIFASPFLPDN
MVPRIDGPDTKVMTPGPINQGDWGSSGILYFPPGVYWMNSNQQGQTPKIGENHIRLHPNTYWAYLAPGA
YVKGAIEYSTKSDFYATGHGVLSGEHYVYQANPATYYQALKSDATSLRMWWHNNLGGGQTWYCQGPTIN
APPFNTMDFHGSSDITTRISDYKQVGAFFFQTDGPQMYPNSQVHDVFYHVNDDAIKTYYSGVTVTRATI
WKAHNDPIIQMGWDTRDVTGVTLQDLYIIHTRYIKSETYVPSAIIGASPFYMPGRSVDPAKSISMTISN
LVCEGLCPALMRITPLQNYRDFRIQNVAFPDGLQANSIGTGKSIVPASSGLKFGVAISNWTVGGEQVTM
SNFQSDSLGQLDIDVSYWGQWVIR;
<AA; Sodiomyces alcalophilus>
SEQ ID NO: 56
RIPGFDISGWQPTTDFARAYANGDRFVYIKATEGTTFKSSAFSRQYTGATQNGFIRGAYHFAQPAASSG
AAQARYFASNGGGWSKDGITLPGALDIEYNPNGATCYGLSQSAMVNWIEDFVTTYHGITSRWPVIYTTT
DWWTQCTGNSNRFANRCPLWIARYASSVGTLPNGWGFYTFWQYNDKYPQGGDSNWFNGDASRLRALANG
D;
<AA; Aspergillus fumigatus>
SEQ ID NO: 57
MRFGWLEVAALTAASVANAQELAFSPPFYPSPWADGQGEWADAHRRAVEIVSQMTLAEKVNLTTGTGWE
MDRCVGQTGSVPRLGINWGLCGQDSPLGIRDSDLNSAFPAGTNVAATWDKTLAYLRGKAMGEEFNDKGV
DILLGPAAGPLGKYPDGGRIWEGFSPDPVLTGVLFAETIKGIQDAGVIATAKHYILNEQEHFRQVGEAQ
GYGYNITETISSNVDDKTMHELYLWPFADAVRAGVGAVMCSYNQINNSYGCQNSQTLNKLLKAELGFQG
FVMSDWGAHHSGVGAALAGLDMSMPGDISFDDGLSFWGTNLTVSVLNGTVPAWRVDDMAVRIMTAYYKV
GRDRLRIPPNFSSWTRDEYGWEHSAVSEGAWTKVNDFVNVQRSHSQIIREIGAASTVLLKNTGALPLTG
KEVKVGVLGEDAGSNPWGANGCPDRGCDNGTLAMAWGSGTAEFPYLVTPEQAIQREVISNGGNVFAVTD
NGALSQMADVASQSSVSLVFVNADSGEGYISVDGNEGDRKNLTLWKNGEAVIDTVVSHCNNTIVVIHSV
GPVLIDRWYDNPNVTAIIWAGLPGQESGNSLVDVLYGRVNPSAKTPFTWGKTRESYGAPLLTEPNNGNG
APQDDFNEGVFIDYRHFDKRNETPIYEFGHGLSYTTFGYSHLRVQALNSSSSAYVPTSGETKPAPTYGE
IGSAADYLYPEGLKRITKFIYPWLNSTDLEDSSDDPNYGWEDSEYIPEGARDGSPQPLLKAGGAPGGNP
TLYQDLVRVSATITNTGNVAGYEVPQLYVSLGGPNEPRVVLRKFDRIFLAPGEQKVWTTTLNRRDLANW
DVEAQDWVITKYPKKVHVGSSSRKLPLRAPLPRVY;
<AA; Neobacillus novalis>
SEQ ID NO: 58
SSDSTSASKTDFFSSFEKSDLQLTWTNTVETDANGKKMSSGIDGNVKRDLILGDITDKVVQVTASANNP
PNEIDSKLIDGDPTTKWLAFEPTANIVLKLAEPVAVVKYALTSANDAKGRDPKNWTLYGSLDGTNWTAV
DTREGEDFKDRFQRNMYDLKNTTKYLYYKLDITKNAGDSITQLAEISLSDGIEVPAPPPGDMKSLIGKG
PTSSYTAKTNVGWTGLGALNYSGTHLSDGRAYSYNKLYDVDILVTPATELSYFIAPEFTDKNHNDYSST
YVSVDLAFSDGTYLHDLKAVDQYGVGLNPKDQGDSKYLYVNQWNTIKSTIGSVAAGKTIKRILVAYDNP
KGPGAFRGSIDDIKIDGKPVQKAFGSPIDYVNILRGTQSNGSFSRGNNFPAVAIPHGFNFWTPTTNAGS
SWIYQYHESNSVNNLPQIQAFSVSHEPSPWMGDRQTFQVMPSASTAATPNANRDSRALEFNHANEIAQP
HYYSVKFENGIRTEMTPTDHAAMFKFTFTGATSNLIFDNVNNNGGLTIDAKSGEITGYSDVKSGLSTGA
TRLFVYAAFDKPVIKSGKLTGESRNNVTGYVRFDTSKDEDKVVTMKIATSLISVEQAKKNLEQEIGLND
TFEGLKEKAKTEWNKKLGIIEVEGASEDQLVTLYSNLYRLFLYPNSAFENVGTTTDPVYKYASPYSAAT
GQDTATTTGAKIVDGKTYVNNGFWDTYRTAWPAYSLLTPTFAGELIDGFVQQYRDGGWIARWSSPGFAN
LMPGTSSDVAFADAYLKGVTNFDVQSFYQSAIRNAEAVSPNAGTGRKGLTTSIFDGYTNTSTGEGLAWA
MDGYINDFGIANLAKALKEKGDKSDPYYANYAADYQYFLNRAQNYVHMFNPSIEFFNGRTANGAWRSTP
DNFNPAVWGSDYTETNGWNMAFHVPQDGQGLANLYGGKEGLATKLDQFFSTSETGLFPGSYGGTIHEMR
EARDVRMGMYGHSNQPSHHIAYMYDYAGQPWKTQEKVREALNRLYIGSAIGQGYSGDEDNGEMSAWYIL
SAMGFYPLKMGTPEYAIGAPLFKKATIHLENGKSIVINAPNNSKENKYVQSMKVNGKAYAKTSILHADI
ANGAVIDFEMGSKPSKWGSGDQDILQSITPGSTDGTSLSPLPLRDVTDRLIAAEKGAVTVSDEGNGQLL
FDNTSNTQLSMKSKTPSIVYQFKEGKQNVKMYTLTSSKASQNEDPKSWVLKGSNDGKSWSVLDQRKNET
FQWRQYTRAFTIQHPGKYSQYKLEITENAGAEVTTLAELELLGYDDVTNSYQAVYELMEQFKQSKDLTG
PMAVQLNNSLTTSLDHFKKDHKDQAIKHLEDFLKHLNNKGLQDRISSKAKGVLSADANQLIVLLARD;
<AA; Trichoderma atroviride>
SEQ ID NO: 59
MKSLTAVVALLGAVAASPAVVRHHGRSALQPRANSSFWYAAMDHTGQFKGSAPYVDASYNVFVAVSPGD
AGSLQNAIDSAGSGNRQNEWLASQPRVVYIPSGTYELSSTLNMRTDTILFGDATNPPVIKAAAGFSDNY
LVNGQDPSTGDAGELSFAVGLKNVVLDTTAVDGSSSISALYWGVAQACQLQNVKITLAPSVNGKGHTGV
QLGRGSTLALADIRIENGQTGIWHNGHQQALYKSIYFYKNTVGMLISGGNTISLLNPTFDSVGTGVSNT
GGSPFIGIVDATSINSGVTFTTSVYPSIVIDNLTKDTDSDVAVIRGTTTVGASKNVVNYSYGNTVGANP
VYGGVNGNTTRPSGVAPGGRIPAVAVPNYANNPVTDFVNVKDPSQNGGQTVKGDGSTDDSAALNKVLQF
AATNNKIAYFPFGDYRVESTLLVPVGSQLVGEAWATISGGGDFFKDASSPKPVVQVGNEGDVGVAQIQD
FRFTVSDVLPGAIIVQFNAAGSKPGDVALFNSLVTVGGTHGADALTNACTDASNECQAAFLGLHFTEGS
SAYVENTWNWVADHITEGFSGGSNIAAKGGALVESTKGTWLNGLGSEHWWLYQLNLKAASNVAVTLLQS
ETNYDQGDNTKQVPPAPWTADVQGWGDPDFSWCDSTARCHMGLANYVNGGSDIYYYGSASWAFFSGPGY
QGCAGSYQCQDYMHFISATPTNLQMYGMCSKDTSVALRLGDGTKINAQPDFTGGWSPGADIGRYTS;
<AA; Trichoderma harzianum>
SEQ ID NO: 60
MKLLPSLIGLASLASLAVAAPSLIPRVSPFSIAKPGGVDDIVITANNTLNGTYHSSTTVSKNVIQTRAQ
AGHLPIQLVNNFSGSQVNAYISGLDTDNRVVFVRGDGSLVYPSSGGSSVPVAISTPINIALPAQGQSIT
VNVPIVISSARIYFSVGDLQFFMVKIPNGDGLVQPSQFNLQDPSAGLLWGFVELTYTTDLAVYANISYV
DFVGMILSMSLSATDGSATQTTKGLGSSALTQICQGLVQQASVDGFPWSSMCIANSAGTLVRALSPGDY
SVINAAAFQNYWSAYVDQVWSQYTNTPLTINTQTSAGSVNCQVSGDTLNCNGDNRGYAKPAAGDIWGCN
SGPFAIQSGDNAVHSAVVPRLCAAFVRSTLLLAGGNVQPGLGQSSYYTVSPTNHYSRLVHQFEIDGRGY
AFPYDDVNPDGNENASGTLASGAPNVLTVYVGAPPS;
<AA; Trichoderma harzianum>
SEQ ID NO: 45906
APSLIPRVSPFSIAKPGGVDDIVITANNTLNGTYHSSTTVSKNVIQTRAQAGHLPIQLVNNFSGSQVNA
YISGLDTDNRVVFVRGDGSLVYPSSGGSSVPVAISTPINIALPAQGQSITVNVPIVISSARIYFSVGDL
QFFMVKIPNGDGLVQPSQFNLQDPSAGLLWGFVELTYTTDLAVYANISYVDFVGMILSMSLSATDGSAT
QTTKGLGSSALTQICQGLVQQASVDGFPWSSMCIANSAGTLVRALSPGDYSVINAAAFQNYWSAYVDQV
WSQYTNTPLTINTQTSAGSVNCQVSGDTLNCNGDNRGYAKPAAGDIWGCNSGPFAIQSGDNAVHSAVVP
RLCAAFVRSTLLLAGGNVQPGLGQSSYYTVSPTNHYSRLVHQFEIDGRGYAFPYDDVNPDGNENASGTL
ASGAPNVLTVYVGAPPS;
<AA; Bacillus deramificans>
SEQ ID NO: 61
MAKKLIYVCLSVCLVLTWAFNVKGQSAHADGSTTTIIVHYFRPAGDYQPWSLWMWPEGGSGAEYDFNGT
DSYGEVANVSIPGNPSQVGIIVRTQDWTKDVSADRYIDLSKGHEVWLVQGNSQIFYNEKDAEDAAKPAV
SNAYLDASNQVLVKLSQPFTLGEGASGFTVHDDTVNKDIPVTSVTDASLGQNVTAVLAGTFQHIFGGSD
WAPDNHSTLLKKVNNNLYQFSGDLPEGNYQYKVALNDSWNNPSYPSNNIDLTVPTGGAHVTFSYVPSTH
AVYDSINNPGADLPVNGSGVKTDLVTVTLGEDPDVSHTLSIQTDGYQAKQVISRNVLDSSQYYYSGDDL
GNTYTHKATTFKVWAPTSTQVNVLLYNSATGSVTKTVPMTASGHGVWEATVNONLENWYYMYEVTGQGS
TRTAVDPYATAIAPNGTRGMIVDLAKTDPAGWNSDKHITPKNIEDEVIYEMDVRDFSIDPNSGMKNKGK
YLALTEKGTKGPDNVKTGIDSLKQLGITHVQLMPVFAFNSVDETDPTQDNWGYDPRNYDVPEGQYATNA
NGTARIKEFKEMVLSLHREHIGVNMDVVYNHTFATQISDFDKIVPEYYYRTDDAGNYTNGSGTGNEIAA
ERPMVQKFIIDSLKYWVNEYHIDGFRFDLMALLGKDTMSKAASELHAINPGIALYGEPWTGGTSALPED
QLLTKGAQKGMGVAVFNDNLRNALDGNVFDSSAQGFATGATGLTDAIKNGVEGSINDFTSSPGETINYV
TSHDNYTLWDKIALSNPNDSEADRIKMDELAQAVVMTSQGVPFMQGGEEMLRTKGGNDNSYNAGDTVNE
FDWSRKAQYPDVFNYYSGLIHLRLDHPAFRMTTANEINSHLQFLNSPENTVAYELTDHVNKDKWGNIIV
VYNPNKTAATINLPSGKWAINATSGKVGESTLGQAEGSVQVPGISMMILHQEVSPDHGKK;
<AA; Talaromyces pinophilus>
SEQ ID NO: 62
MHFLAALLAVLPLVSGSPVPEKRSGCALPSTYKWTSTGPLASPKSGLVALRDYSHVIYNGQHLVYGSTA
NTAGSYGSMNFGLFSDWSEMSSASQNTMSTGAVAPTIFYFAPKSVWILAYQWGPYAFSYRTSTDPSNAN
GWSSPQPLFTGTISGSSTGVIDQTVIGDSENMYLFFAGDNGHIYRASMPIGDFPGSFGSASTIVLSDST
NNLFEAVEVYTVEGQNQYLMIVEAIGANGRYFRSFTASSLGGTWTAQASTESNPFAGKANSGATWTNDI
SSGDLVRTNPDQTQTIDACNLQFLYQGRSTSSGGDYNLLPYQPGLLTLA;
<AA; Clonostachys rosea>
SEQ ID NO: 63
MLFKTAFLGLIATVNFVHGAAIGHAAEQTSLEKRAEAADRLVFCHFMIGIVGNRNSASQYDDDMRRAKA
AGIDAFALNIGVDGYTDAQLDLAYKSAADNDMKVFISFDFNWFKTGEAATVGQKIAKYANQAAQLKVDN
RVFASSFAGDGLDVAAMKNAAGVDVFFVPNFHPEQTANPDSIDGGFNWMAWPNDGNNKAPKPGSSISVE
DGDNKYLSWLGTKPYMAPISPWFFTHFGPEVSFSKNWVFPGGALIFDRWNQILDKGFPLVEMITWNDYG
ESHHFGPLSSPHYDDGNSKWTNDLPHNGWLELSKPFIAAYKAKEKAVDKYITGDQIVYWYRRTLKGLDC
DATDTTAGRPANNDSGNYFMGRPDGWELMDDVVYVATLLKEAGTLTVNSGGQSVEKEVPAGANLIQVPA
AVGSQTFSLSRNGKVVLEDKSLMDISNICPCGLYNFNPYVGTVPPGESDPLQPDGLASLTIGLHVSTCQ
ATPSLGTNPPISTTGGSPPPSSTGSSPPPSTTAGPTSTGGSVPSQTSSVPAPTSTGSSQPCNGGTNADG
ESGNYSGLCSFACSYGYCPPGPCKCTSNGTPGNPPSGDGRNGCPADGLGDGYKGLCSFACSHGYCPDTA
CKYC;
<AA; Trichoderma harazianum>
SEQ ID NO: 64
MLGVVRRLGLGALAAAALSSLGSAAPANVAIRSLEERASSADRLVFCHFMIGIVGDRGSSADYDDDMQR
AKAAGIDAFALNIGVDGYTDQQLGYAYDSADRNGMKVFISFDFNWWSPGNAVGVGQKIAQYASRPAQLY
VDNRPFASSFAGDGLDVNALRSAAGSNVYFVPNFHPGQSSPSNIDGALNWMAWDNDGNNKAPKPGQTVT
VADGDNAYKNWLGGKPYLAPVSPWFFTHFGPEVSYSKNWVFPGGPLIYNRWQQVLQQGFPMVEIVTWND
YGESHYVGPLKSKHFDDGNSKWVNDMPHDGFLDLSKPFIAAYKNRDTDISKYVQNEQLVYWYRRNLKAL
DCDATDTTSNRPANNGSGNYFMGRPDGWQTMDDTVYVAALLKTAGSVTVTSGGTTQTFQANAGANLFQI
PASIGQQKFALTRNGQTVFSGTSLMDITNVCSCGIYNFNPYVGTIPAGFDDPLQADGLFSLTIGLHVTT
CQAKPSLGTNPPVTSGPVSSLPASSTTRASSPPVSSTRVSSPPVSSPPVSRTSSPPPPPASSTPPSGQV
CVAGTVADGESGNYIGLCQFSCNYGYCPPGPCKCTAFGAPISPPASNGRNGCPLPGEGDGYLGLCSFSC
NHNYCPPTACQYC;
<AA; Salipaludibacillus agaradhaerens>
SEQ ID NO: 65
MIKINKTIKILMLTLLMMSFAGAAYAHNPVTDEEVYHSFNSHDWQNWNMSDGWKNDDYFFGCHWSQNRV
NFYGGQMELSLRTNYSYAPPYNYECAEYTTNNFYGYGLYEVSMKPAKVSGVISSFFTYTGPSYNGAPWD
EIDIEFLGNDTTKVQFNYYTDGVGGNEILYDLGFDAADSYNTYAFDWQENYINWYVNGQLVATATENIP
SNPSKIMMNIWNTYGIDEWAGRYYGEDANASYNWVRYTPNR;
<AA; Trichoderma atroviride>
SEQ ID NO: 66
MLSAYAFSLLVASASAWTPQSNAKVFSRDTEGVMRWLPGNDKFRGVNLGSQFIIEPWMASDEFSGMGCG
GLNDEWSCVQSLGQDAADAAFQKHWDSWITQDDITQIKNLGLNTVRIPVGFWIREDLVQQGEFFPRGGI
QYLDRLVGWCNDAGIYVIMDLHGGPGAQFPNQQYTGHGVSQPGFYTEANYERAANFLEWMTERIHTNAT
YASVGMLEVINEPVHSGDFPSQAADMVNTYYPLAWNRIRDTESKLGVSDDKRLHIQFMASAWGSGDPTS
ALPSTDFAAFDDHRYLKWDTSVTATKDGYLNAACSDKRDDNVIVGEWSISVADNVQDNDELGIKNRSDQ
ADWYQKFWAAQVLAFEKSAGWVFWTWKCNWITGYDDWRWCYQSAVAAGAIPKDAGSAASINPC;
<AA; unidentified>
SEQ ID NO: 67
ATSFYYPNMDHVNAPRGFAPDLDGDFNYPIYQTVNAGDGNALQNAITTDGKGGSRHPQWFASQPRVVYI
PPGTYTISKTLRFNTDTILMGDPTNPPIIKAAAGFSGDQTLISAQDPSTNEKGELSFAVAIKNVVLDTT
AIPGGNSFTALWWGVAQAAHLQNVRITMSSSSGGNGHTGIRMGRGSTLGLADVRVERGQNGIWIDGHQQ
ASFHNIYFFQNTIGMLISGGNTFSIFSSTFDTCGTGISNTGGSPWIALIDAKSINSGVTFTTNQFPSFM
IENLTKDNGTPVVVVRGSTLVGASSHVNTYSYGNTVGRNPTYGDVTSSNTRPGALAPGGRYPYVAPPTY
GDLPISSFLNVKDPAQNGGRTVKGDNTIDEAATLNAILELAASQNKVAYFPFGKYRVDSTLFIPKGSRI
VGEAWATITGNGNFFKNENSPQPVVSVGRAGDVGIAQIQDMRFTVNDVLSGAIVVQFNMAGNNPGDVAL
WNSLVTVGGTRGASALANACTNNSNECKGAFIGIHVAKGSSPYIQNVWNWVADHIAENFSGGTSIAGKG
GILVQSTKATWLYAIGSEHWWLYQLNLHNAANVVVSLLQAETNYHQGANTQQIPPAPWVANIGTWGDPD
FAWCNGGDKRCRMGPANFINGGSNIYTYASAAWAFFSGPGQGCAQFECQQTMHWIASTPSNLQAFGLCS
KDSVNTLRLGDGTFINTQNGYTGGWTPGGGDVGRYTT;
<AA; Alkalihalobacillus bogoriensis>
SEQ ID NO: 68
MKNLLIAFLLILFVTGCAEPEQQQTEEATDNIEETQEELEVNEEPIVIADNLDIPWSIEKAGDTFYITE
RGGHIVKVENGAMERQTVHLEQELSSVPEAGLLGFVLNPNFPDTNLAYAYYTYEKNADPYNRIVTLRYE
NDQWQEENILLDNIPSGTYHHGGRLKIGPDGFLYATTGDASIPEIAQDIDSLGGKIIRVELDGAIPEDN
PFANSSIYSFGHRNPQGLTWAIDGSFYSSEHGSSANDEINEIEPGLNYGWPIIQGDEEREGMVSPLFTS
GNESTWAPSGMDYYNNRLYVAALRGAAIIEFNLETGEHQEIITDLGRIRDIKIEDDTLYFISNNTDGRG
NPEEDDDKLYRLSLQE;
<AA; Alkalihalobacillus bogoriensis>
SEQ ID NO: 72144
MKQQKRLYARLLTLLFALIFLLPHSAAAANSGFYVSGTTLYDANGNPFVMRGINHGHTWYKDQATTAIE
GIANTGANTVRIVLSDGGQWTKDDIHTVRNLISLAEDNHLVAVLEVHDATGQDDIASLNRAVDYWIEMR
SALIGKEKTVIINIANEWFGSWEGDPWARGYKQAIPRLRNAGLNHTLMVDAAGWGQFPQSIHDYGREVF
NADPQRNTMFSIHMYEYAGGTARQVRTNIDGVLNQDLALVIGEFGHRHTNGDVDEATIMSYSEQRGVGW
LAWSWKGNGPEFEYLDLSNDWAGNNLTAWGNTIVHGPYGIRETSRPVTVFTGGGSDGGTSP;
<AA; Talaromyces pinophilus>
SEQ ID NO: 69
MTFKTSYLASALLLLTARASAQTANAEAAFATLQEWYDPVTGLWNTAGWWNGANAMTVIAELAAVDASI
VQDAISIFETTFSVAPSVNPSNGVEKSVGTNGLIQTTYPAGWPNNTISKRAIQDSTDPTVWLDGANDDA
EWWGLAWVAAYDVTGNETYLNLAEGIFNEIAAGWGTNCGNGGIYWETTNHYVNAIASELFISLAAHLAN
RVPANAATYTAWAEEAWNWFASTGMINANGTINDGLTTDCVNNGQPVWSYNQGVILGGLTELNKISPNE
SYIESANSIAQAAIAALADSNYVIHDYACEPSDCEPNGTQFKGIFMRNLLLLQRASPNDLYSKVIEACA
ASIWANDRDTTTGELGVNWAGPFVGGDATTQSSAMGALVAAISVE;
<AA; Fusarium solani>
SEQ ID NO: 70
MVAFSRIAVTTLALGGSTAQAKPATAARATGLADFKPGVQWEICIHHPIKHDSAADLIPTKAKVWDIDM
GHAQEFPNMIPMLKSAGKFVICYFNAGALQDWDDDKSKFPKEVIGHSLSYPYDSEEWYLDIRDSRVLEL
QTARLDIAAKIGCDAVDPDNVDAWQQDDEDPTGFKLKSSDYTNYLKNLAKYAHSIKTKDGQPLLVGQKN
APEIAEDLVSTLDFAVLESCRGNSDPNEESWPFCEDFQTYIDAGKPVLQIEYPPSVEKTGKVSASDNKY
YCTAEDEDKGFSKIIKWASAQLDGWGQYCGEEPFRTPAAKY;
<AA; Ostropa barbara>
SEQ ID NO: 71
MVLPSSILLPLYIYPSASTPSPWQPLYDSLGTHSNIHFDIIINPGSGPLLVPPTDIQLSDYMPAIAKLR
TYKNVDLLGYVHTSWGLASQSDLLANISRYATWETVNGQDVHLDGLFFDEVVTAYDETDYDLLSTATTL
ARTTPNFKKIVFNPGQPADERYYALANYLTVFEGTAAAFDSSTVAALDVATRANSSVVIHDFTGTEAEQ
AILVNELVGLGLGSVDVTTLADYNDWSALWADFTGEVGDAV;
<AA; Stenocarpella maydis>
SEQ ID NO: 72
MHSFYLFPAVLAATAASATKILLPLYVYPTTGAGWTSIYNAIETHPSIDFQIVLNPSSGPGGSTPGYNT
HWISAVSKLHSYDNVDTLGYVSAGYGSRDLDEITTDIKDWNQWNHYTGADITIDGIFFDETPNWNGTRG
ANDVSFMQQVTKLADRGGYTKVFNLGQACSHDEYFQIADTVVMFEGEAESYNSTVLDDVVESGVADRSA
ILIHHFEGSGLTSGFAVRWVIDLVNRGLGSFAIINTDWTQANSDVAPMGISILADMLESVLDHQY;
<AA; Urnula criterium>
SEQ ID NO: 73
MTSKILSLALATLNVAYAATTICSTKCPYTNLGSSDAVTKSDWWKPALGATWQVVLTPADDDAGPQLTD
DYEVYDLDVFDVDASVFKSLQAKDKKVICYFSAGSYEDWREDCGCFKSSDLGSDLDGWEGEAWLNTDSQ
NVRNIMAARLDVAVEKGCNGVDPDNVDGYDNDNGLGLSESTAKSYLQFLSDEAHSRGLAIGLKNAGSIA
ADVVDSMEWEVNEECIAQENCEDYKTFVDAGKPVFNIEYPPEDHIDDAWTEAEIEERCAQKADASNGAT
KFSTVLKNHENVDEWIRTCSE;
<AA; Bjerkandera fumosa>
SEQ ID NO: 74
MFTFAKIFTTACSLAGLFGSTFGTGIIVPLYVWPGDPNVCSGWTPLFNVISTTPSLTFYVVINPNSGPG
DPSTQPVDSYSTCIQQLKGAKSGSNLRVLGYVATGGGSSTTVVRDITTYSGWNAAYRPDGIFFDQGSTA
SSQVSTYAGWANQARQILGSSTYTIVNPGQPPQDNAYFNSFDQIVTREDFLAQFSPSQLSITPASPAAK
QAVILTDAFTFPSSVVSQLVSGNHIGSLWVTDDTQANQQNPYDSLPSYLTTFVNAVVADN;
<AA; Pseudoplectania vogesiaca>
SEQ ID NO: 75
MSLSLSPVATTGVLLPLYIYPAPSTAWDPLYSAITNNPSVNFYVIINPDSGPGGDEFPASDYISAIQKL
KTYDTVTPLGYVHTTFGDQTTSAVEANITKYKNWDTYSTTSPISVDGIFFDEAPSSAADVSYMTTLSSS
AKTTFGTGRDFVVFNPGSIVDPGYFNAADAIVIFENTEATYSESVFSSQSGGTSRQKAAIIHDFTGSES
EQTSVVEGMVNQQAGLVYITDQSSYNSFSGLWSSFVSALQAAIA;
<AA; Lysobacter gummosus>
SEQ ID NO: 76
PRADARQALNPRAIAFYYNWYGSPKLDGAPLHWAHDVLRENDRDRTTKRLPGNGDISANFYPQLGEYSS
ADPAVIERHMAMIASARIGVIAVTWLGVDDPSFKSLRPLFEAAQRHGVRICFQIEPVARKTAADARASI
RYLVETFGAHPAFYRDPVSKRPLFFVYDSYVIDAKDWAQVLGRDGADSIRGTAFDADVLGLWVGADEHA
FFEHSGFDGFYTYFASRGFSYGATPEHWPELQRWAKQHGKLFIPSVGPGYIDTRVRPWNAKNTKDRDGG
RYYDAMFQAAIDSGAPFIGITSFNEWHEGTQIEPAVAFKHEAFEYLDYAPRPPDYYLERTAHWLQRYKP
AAAQ;
<AA; Chryseobacterium viscerum>
SEQ ID NO: 77
PRADARQALNPRAIAFYYNWYGSPKLDGAPLHWAHDVLRENDRDRTTKRLPGNGDISANFYPQLGEYSS
ADPAVIERHMAMIASARIGVIAVTWLGVDDPSFKSLRPLFEAAQRHGVRICFQIEPVARKTAADARASI
RYLVETFGAHPAFYRDPVSKRPLFFVYDSYVIDAKDWAQVLGRDGADSIRGTAFDADVLGLWVGADEHA
FFEHSGFDGFYTYFASRGFSYGATPEHWPELQRWAKQHGKLFIPSVGPGYIDTRVRPWNAKNTKDRDGG
RYYDAMFQAAIDSGAPFIGITSFNEWHEGTQIEPAVAFKHEAFEYLDYAPRPPDYYLERTAHWLQRYKP
AKK;
<AA; Effusibacillus pohliae>
SEQ ID NO: 78
SSSASVKGDVIYQIIIDRFYDGDTTNNNPAKSYGLYDPTKSKWKMYWGGDLEGVRQKLPYLKQLGVTTI
WLSPVLDNLDTLAGTDNTGYHGYWTRDFKQIEEHFGNWTTFDTLVNDAHQNGIKVIVDFVPNHSTPFKA
NDSTFAEGGALYNNGTYMGNYFDDATKGYFHHNGDISNWDDRYEAQWKNFTDPAGFSLADLSQENGTIA
QYLTDAAVQLVAHGADGLRIDAVKHFNSGFSKSLADKLYQKKDIFLVGEWYGDDPGTANHLEKVRYANN
SGVNVLDFDLNTVIRNVFGTFTQTMYDLNNMVNQTGNEYKYKENLITFIDNHDMSRFLSVNSNKANLHQ
ALAFILTSRGTPSIYYGTEQYMAGGNDPYNRGMMPAFDTTTTAFKEVSTLAGLRRNNAAIQYGTTTQRW
INNDVYIYERKFFNDVVLVAINRNTQSSYSISGLQTALPNGSYADYLSGLLGGNGISVSNGSVASFTLA
PGAVSVWQYSTSASAPQIGSVAPNMGIPGNVVTIDGKGFGTTQGTVTFGGVTATVKSWTSNRIEVYVPN
MAAGLTDVKVTAGGVSSNLYSYNILSGTQTSVVFTVKSAPPTNLGDKIYLTGNIPELGNWSTDTSGAVN
NAQGPLLAPNYPDWFYVFSVPAGKTIQFKFFIKRADGTIQWENGSNHVATTPTGATGNITVTWQN;
<AA; Evansstolkia leycettana>
SEQ ID NO: 79
TSGSQDDIAVLRRACPDYTSYSTVPHAPYSGGPLNLPFQRPAEACRTFTSPAVEQVIQDVTSRMVDKDM
AQLFRNAFPNTLDTTIRWHTNGSTTTSTRRKSKKDAAQWQGAQTFVVTGDINAEWLRDSTNQLAGYQAL
AKKDKSLYTLILGAINTQVEYVIQSPYCNAFQPPPPSGIRPTSNGQGDTVHPAYEPSFVFECKYELDSL
AHFLTLGTQFYENTGSTEFLTSRWYTALNTLLDVLDAQSQPTFNANNQYVTNQYTFQRQTTAGTETLSL
RGIGNPLNSGTGLIRSAFRPSDDATILGFFIPPNAMMSVQLKKIAEVIKAAGGDSSLVKKLQQRGHDLE
QSVWEHGVVDHPKYGKVFAFEVDGYGSRILMDDANIPSLLSLPLLGFVDKNDETYQNTRKMILDKSGNP
YYLTGSDFHGIGGPHVGLENAWPMSLLVQAQTTDSDSEIAECINLVRNSSRLGLVHESINVNNIRDYTR
PWFAWANSLFAQTILKIAAEKPHLVFGSDASPYVVE;
<AA; Nocardiopsis sp.>
SEQ ID NO: 80
ADIIGGLAYTMGGRCSVGFAATNAAGQPGFVTAGHCGRVGTQVTIGNGRGVFEQSVFPGNDAAFVRGTS
NFTLTNLVSRYNTGGYATVAGHNQAPIGSSVCRSGSTTGWHCGTIQARGQSVSYPEGTVTNMTRTTVCA
EPGDSGGSYISGTQAQGVTSGGSGNCRTGGTTFYQEVTPMVNSWGVRLRT;
<AA; Trametes hirsuta>
SEQ ID NO: 81
MVATSLLVASLFTLALGTPTGRNLKLHEAREDLPAGFSLRGAASPDTTLKLRIALVQNNFAELEDKLYD
VSTPSSANYGNHLSKEEVEQYIAPAPESVKAVNAWLTENGLDAHTISPAGDWLAFEVPVSKANELFDAD
FSVFTHDESGLEAIRTLAYSIPAELQGHLDLVHPTVTFPNPNAHLPVVRSTQPIRNLTGRAIPASCAST
ITPACLQAIYGIPTTKATQSSNKLAVSGFIDQFANKADLKSFLAQFRKDISSSTTFSLQTLDGGENDQS
PSEAGIEANLDIQYTVGLATGVPTTFISVGDDFQDGNLEGFLDIINFLLGESNPPQVLTTSYGQNENTI
SAKLANQLCNAYAQLGARGTSILFASGDGGVSGSQSAHCSNFVPTFPSGCPFMTSVGATQGVSPETAAA
FSSGGFSNVFGIPSYQASAVSGYLSALGSTNSGKFNRSGRGFPDVSTQGVDFQIVSGGQTIGVDGTSCA
SPTFASVISLVNDRLIAAGKSPLGFLNPFLYSSAGKAALNDVTSGSNPGCSTNGFPAKAGWDPVTGLGT
PNFAKLLTAVGL;
<AA; Bacillus licheniformis>
SEQ ID NO: 82
LVSKKSVKRGLITGLIGISIYSLGMHPAQAAPSPHTPVSSDPSYKAETSVTYDPNIKSDQYGLYSKAFT
GTGKVNETKEKAEKKSPAKAPYSIKSVIGSDDRTRVTNTTAYPYRAIVHISSSIGSCTGWMIGPKTVAT
AGHCIYDTSSGSFAGTATVSPGRNGTSYPYGSVKSTRYFIPSGWRSGNTNYDYGAIELSEPIGNTVGYF
GYSYTTSSLVGTTVTISGYPGDKTAGTQWQHSGPIAISETYKLQYAMDTYGGQSGSPVFEQSSSRTNCS
GPCSLAVHTNGVYGGSSYNRGTRITKEVFDNLTNWKNSAQ;
<AA; Bacillus sp.>
SEQ ID NO: 83
AQTVPYGIPLIKADKVQAQGFKGANVKVAVLDTGIQASHPDLNVVGGASFVAGEAYNTDGNGHGTHVAG
TVAALDNTTGVLGVAPSVSLYAVKVLNSSGSGSYSGIVSGIEWATTNGMDVINMSLGGASGSTAMKQAV
DNAYARGVVVVAAAGNSGSSGNTNTIGYPAKYDSVIAVGAVDSNSNRASFSSVGAELEVMAPGAGVYST
YPTNTYATLNGTSMASPHVAGAAALILSKHPNLSASQVRNRLSSTATYLGSSFYYGKGLINVEAAAQ;
<AA; Lederbergia lenta>
SEQ ID NO: 84
AQSVPWGISRVQAPAAHNRGLTGSGVKVAVLDTGISTHPDLNIRGGASFVPGEPSTQDGNGHGTHVAGT
IAALNNSIGVLGVAPSAELYAVKVLGASGSGSVSSIAQGLEWAGNNGMHVANLSLGSPSPSATLEQAVN
SATSRGVLVVAASGNSGAGSISYPARYANAMAVGATDQNNNRASFSQYGAGLDIVAPGVNVQSTYPGST
YASLNGTSSATPHVAGAAALVKQKNPSWSNVQIRNHLKNTATSLGSTNLYGSGLVNAEAATR;
<AA; Alkalihalobacillus clausii>
SEQ ID NO: 85
MMRKKSFWLGMLTAFMLVFTMAFSDSASAAEEAKEKYLIGFNEQEAVSEFVEQVEANDEVAILSEEEEV
EIELLHEFETIPVLSVELSPEDVDALELDPAISYIEEDAEVTTMAQSVPWGISRVQAPAAHNRGLTGSG
VKVAVLDTGISTHPDLNIRGGASFVPGEPSTQDGNGHGTHVAGTIAALNNSIGVLGVAPSAELYAVKVL
GASGSGSVSSIAQGLEWAGNNGMHVANLSLGSPSPSATLEQAVNSATSRGVLVVAASGNSGAGSISYPA
RYANAMAVGATDQNNNRASFSQYGAGLDIVAPGVNVQSTYPGSTYASLNGTSSATPHVAGAAALVKQKN
PSWSNVQIRNHLKNTATSLGSTNLYGSGLVNAEAATR;
<AA; Alkalihalobacillus clausii>
SEQ ID NO: 86
AQSVPWGISRVQAPAAHNRGLTGSGVKVAVLDTGISTHPDLNIRGGASFVPGEPSTQDGNGHGTHAAGT
IAALNNSIGVLGVAPSAELYAVKVLGASGSGSVSAIAQGLEWAGNNGMHVANLSLGSPSPSATLEQAVN
SATSRGVLVVAASGNSGAGSISYPARYANAMAVGATDQNNNRASFSQYGAGLDIVAPGVNVQSTYPGST
YASLNGTSMATPHVAGAAALVKQKNPSWSNVQIRNHLKNTATSLGSTNLYGSGLVNAEAATR;
<AA; Bacillus sp.>
SEQ ID NO: 87
AVPSTQTPWGIKSIYNDQSITKTTGGKGIKVAVLDTGVYTSHLDLAGSAEQCKDFTQSNPLVDGSCTDR
QGHGTHVAGTVLAHGGSNGQGVYGVAPQAKLWAYKVLGDKGEGYSDDIAAAIRHVADEASRTGSKVVIN
MSLGSSAKDSLIASAVDYAYGKGVLIVAAAGNEGPKPNTIGYPAGFVNAVAVAALENVQEKGTYRVADF
SSRGNPATAGDYIIQERDIEVSAPGASVESTWYTGGYNTISGTSMATPHVAGLAAKIWSANTSLSHSQL
RTELQNRAKVYDIKGGIGAGPGDDYASGFGYPRVK;
<AA; Bacillus sp.>
SEQ ID NO: 88
AATTGTGTTLKGKTVSLNISSESGKYVLRDLSKPTGTQIITYDLQNREYNLPGTLVSSTINQFTTSSQR
AAVDAHYNLGKVYDYFYQKFNRNSYDNKGGKIVSSVHYGSRYNNAAWIGDQMIYGDGDGILFSPLSGSL
DVTAHEMTHGVTQETANLNYENQPGALNESFSDVFGYFNDTEDWDIGEDITISQPALRSLSNPTKYGQP
DNFKNYKNLPNTPAGDYGGVHTNSGIPNKAAYNTITKIGVNKAEQIYYRALTVYLTPSSTFKDAKAALI
QSARDLYGSQDAASVEAAWNAVGL;
<AA; Aspergillus oryzae>
SEQ ID NO: 89
MGVNFKVLALSALATISHASPLLYPRATDSNVTYVFTNPNGLNFTQMNTTLPNVTIFATGGTIAGSSAD
NTATTGYKAGAVGIQTLIDAVPEMLNVANVAGVQVTNVGSPDITSDILLRLSKQINEVVCNDPTMAGAV
VTHGTDTLEESAFFLDATVNCRKPVVIVGAMRPSTAISADGPLNLLQSVTVAASPKARDRGALIVMNDR
IVSAFYASKTNANTVDTFKAIEMGNLGEVVSNKPYFFYPPVKPTGKTEVDIRNITSIPRVDILYSYEDM
HNDTLYSAIDNGAKGIVIAGSGSGSVSTPFSAAMEDITTKHNIPIVASTRTGNGEVPSSAESSQIASGY
LNPAKSRVLLGLLLAQGKSIEEMRAVFERIGVA;
<AA; Aspergillus niger>
SEQ ID NO: 90
SPLLYSRTTNETFVFTNANGLNFTQMNTTLPNVTIFATGGTIAGSDSSSTATTGYTSGAVGVLSLIDAV
PSMLDVANVAGVQVANVGSEDITSDILISMSKKLNRVVCEDPTMAGAVITHGTDTLEETAFFLDATVNC
GKPIVIVGAMRPSTAISADGPFNLLEAVTVAASTSARDRGAMVVMNDRIASAYYVTKTNANTMDTFKAM
EMGYLGEMISNTPFFFYPPVKPTGKVAFDITNVTEIPRVDILFSYEDMHNDTLYNAISSGAQGIVIAGA
GAGGVTTSFNEAIEDVINRLEIPVVQSMRTVNGEVPLSDVSSDTATHIASGYLNPQKSRILLGLLLSQG
KNITEIADVFALGTDA;
<AA; Bacillus licheniformis>
SEQ ID NO: 91
MKLIKNASFIISFLAAAGIYFLLGTVAASAANEDYPEQMIRLESSSGLNITPAGNQDNAPLTAKQTSGE
KEERWRLDTSDGKQFKIRNMDSGKIIIPAHYALSDNNPAVVYYDNSRKEELWNIIGADKDGNGDFITYK
IVSAQNSSLALTLDGSGVKLAKYTGSSVQKWKLPSDGLEGFAGYARETNGKQKTGTTGGLLGKVVYVNN
LGELKANIEDSTPRTIVVSSNIGASAKTVLTVGANKTIIGSYEKHKLNNIYFKTKADSGNVIFKNLVIA
HDASINENNDIPVYITDSRNYWIDHVTFQGHSYTANGHDLDKLLYVGAKADYVTLSHSTFTDHRYGLIL
GWPQDDKQYHSIYNGYPRMTISHNRFENLYVRAPGLMRYGYYHVKSNYINNYHLGFTITTLAKIYSEAN
YFGTGNEKGILDDYGDGAFKDVGSYPAIKGQKSPETSWTPSSNYSYRTMKAGNAKAFAKRYAGAQRTAL
YYANYSQFKKD;
<AA; Aspergillus tubingensis>
SEQ ID NO: 55
MKYSTIFSAAAAVFAGSAAAVGVSGSAEGFAKGVTGGGSATPVYPDTIDELVSYLGDDEARVIVLTKTF
DFTDSEGTTTGTGCAPWGTASACQVAIDQDDWCENYEPDAPSVSVEYYNAGTLGITVTSNKSLIGEGSS
GAIKGKGLRIVSGAENIIIQNIAVTDINAKYVWGGDAITLDDCDLVWIDHVTTARIGRQHYVLGTSADN
RVSLTNNYIDGVSDYSATCDGYHYWAIYLDGDADLVTMKGNYIYHTSGRSPKVQDNTLLHAVNNYWYDI
SGHAFEIGEGGYVLAEGNVFQNVDTVLETYEGEAFTVPSTTAGEVCSTYLGRDCVINGFGSSGTFSEDS
TSFLSDFEGKNIASASAYTSVASSVVANAGQGNL;

The application's sequence listing, which the Patent Office published only in electronic form, follows.

SEQUENCE LISTING (72150 sequences)

SEQ ID NO: 1 - protein, 605 aa, Aspergillus niger
MQTLLVSSLVVSLAAALPHYIRSNGIEASLLTDPKDVSGRTVDYIIAGGGLTGLTTAARLTENPNISVLVIESGSYESDRGPIIEDLNAYGDIFGSSVDHAYETVELATNNQTALIRSGNGLGGSTLVNGGTWTRPHKAQVDSWETVFGNEGWNWDNVAAYSLQAERARAPNAKQIAAGHYFNASCHGTNGTVHAGPRDTGDDYSPIVKALMSAVEDRGVPTKKDFGCGDPHGVSMFPNTLHEDQVRSDAAREWLLPNYQRPNLQVLTGQYVGKVLLSQNGTTPRAVGVEFGTHKGNTHNVYAEHEVLLAAGSAVSPTILEYSGIGMKSILEPLGIDTVVDLPVGLNLQDQTTATVRSRITSAGAGQGQAAWFATFNETFGDYSEKAHELLNTKLEQWAEEAVARGGFHNTTALLIQYENYRDWIVNHNVAYSELFLDTAGVASFDVWDLLPFTRGYVHILDKDPYLHHFAYDPQYFLNELDLLGQAAATQLARNISNSGAMQTYFAGETIPGDNLAYDADLSAWTEYIPYHFRPNYHGVGTCSMMPKEMGGVVDNAARVYGVQGLRVIDGSIPPTQMSSHVMTVFYAMALKISDAILEDYASMQ

SEQ ID NO: 2 - protein, 607 aa, Aspergillus chevalieri
MKPLLWSLFLSVATALPKFPREHLGVEPQLLTDPTVLANTTVDYIIAGGGLTGLTIAARLTEDPNIKVLVIESGYFESNRGPIIEDLNRYGEIFGTEVDHAFETVQLAVNNRTEIIRSGNGLGGSTLINGGTWTRPHKVQVDSWETVFGNQGWNWDDLLPYMLKIEKARPPNQRQIEAGHYFNPQCHGFNGSVHAGPRDTGEPYSPIMRALMDTVSAEGVPVRKDLCCGDPHGVSMFLNTLYPSQIRADAAREYLVPNYYRPNFQVLTGQRVGKVLLDKTVPGSPKAIGVEFGTHRTRKYEAYARREVLLAAGSTISPTILEYSGIGMKSVLDSVGIEQVVELPVGVNLQDQTTVHVESRITPAGAGQGQAAYFATFNETFGDFAPQAHELLNTKLDQWAEEVVARGGFNNATALRIQYENYRNWLVNDNVAFSELFLDTAGKISFDVWDLIPFTRGYVHIADKDPYLRRLYNNPQYLLNELDVLGEAAASKLARELSSKGAMAQYYAGETVPGFDHLPADASLRDWAKYVKDRFRPNYHAVSTCAMMSKELGGVVDSAARVYDVERLRVVDGSIPPTQVSSHVMTVFYGMAEKIAEAILQDYHARK

SEQ ID NO: 3 - protein, 605 aa, Penicillium viridicatum
MKLLGVLSGLGLVVVATALPLQELDLQSTLLTDPRKVAGETFDYVIAGGGLTGLTVAARLTENPDINVLVIESGFYESNIGPIIENLNHYGDIFTTSVDQAFETVPLAIHNRTEIVRSGKGLGGSTLVNGGSWTRPHKAQINSWEKVFGMEGWNWDNLLPYMNKVEASRPPNAAQIAAGHYFDPACHGVNGTVQVGPRDTGESYSPMIKSLMETAKKSGVPVQKDFSCGVPHGISMFPNDVHEDQTRSDAAREWLLPNYKRKNLKVLTGQMVGRVLFDTTTSTPKAVGVNFGTHNKVNFDVHAKHEVLLAAGSTVSPQILEHSGVGLKTVLDKVGIKQVVELPVGLNLQDQTTTTVRSAINPIGAGQGQAAYFATFNETFGDQAPRAHQLLNTKLEEWAKDAVSRGGFHNETALLIQYQNYRDWLVNSDVSYAEIFIDTAGKLSLDLWDLIPFTRGYVHILDSDPYLRRFAYDPQYFLNELDLLGQAAASKLAREISNKGEMTKYFNSETVPGNNLAYNATLDQWVDYVKQNFRPNYHGVGTCSMMSKELGGVVDAAARVYDVEGLRVIDGSIPPTQVSSHVMTVFYGMAEKISEAVLSDYHASN

SEQ ID NO: 4 - protein, 607 aa, Aspergillus niveoglaucus
MRPLIWPLFLSVATALPKFPREHFDVQPQLLTDPTVLANTTVDYIIAGGGLTGLTIAARLTEDPKIKVLVIESGFFESNRGPIIEDLNSYGEIFGTEVDHAFETVSLAVNNRTENIRSGNGLGGSTLINGGTWTRPHKVQIDSWERVFGNEGWNWDDLLPYMLGIEKARHPNQRQIEAGHYFNPQCHGSNGTVHAGPRDTGESYSPIMKALMDTVSADGVPVRKDLGCGDPHGVSMFPNSLYESQIRADAAREWLVPNYYRPNLQVLTGQSVGKVLLDKTVPGAPKAIGVEFGTHRTRKYETFASREVLLAAGSTISPTILEYSGIGIKSVLDSVGIEQVVDLPVGLNLQDQTTVNLQSRITPDGAGQGQAAYFATFNETFGDFAPQAHELLNTKLDQWAEEVVARGGFHNATALRIQYENYRDWLVNDNVAYSELFLDTAGKISFDVWDLIPFTRGYVHIADKDPYLRRLSNDPQYFLNELDVLGQAAASKLARELSSRGAMAQYFASETVPGYDRLPADASLQDWAKYVKDRFRANYHAVSTCSMMPKEMGGVVDSTARVYGVERLRVVDGSIPPTQVSSHVMTVFYGMAVKIAEAILQDHHTRK

SEQ ID NO: 5 - protein, 605 aa, Talaromyces bacillisporus
MKSILIVSALASLAGAQGYTPAEQIDVQSSLISDPKNVSGRTFDYIIAGGGLTGLTVAAKLSEDPNISVLVIEKGFYESNDGPIIENPNDYGLIFGSSVDQNYLTVPMAINNRTLDIKSGKGLGGSTLINGDSWTGPDKVQIDSWETVLGNPGWNYHALKEYMNKAERARYPTTTQIAAGMYFNSTCHGFNGTVNSGPRDDGRPYSPLMKALMNTTSAMGVPTQADLLCGHPRGVSMIYNNLLPDQTRADAAREWLLPNYKRPNLSILTGQIVGKVLFDKTPTGPRAVGVNFGTNKAVNFNVSAKHEVLLAAGSNVSPLILEHSGIGLKSVLDQFNISQLVELPVGLNMQDQTTTTVRARAKASAAGQGQAVYFANFTEVFGNHTAQATNLLNTKLEQWANETVARGGFNNATALLIQYENYRKWLLDEDVAYVELFFDTNGKMNFDLWDLIPFTRGSVHIAHADPYLQSFSNNPMFLLNELDLLGQAAGSMLARELQNSGELSTYFDGEDIPGAELLPYDATLDGWVGYVKDNFRANWHAVSTCSMMPKELGGVVDSAARVYGTQGLRVIDGSIPPTQVSSHVMTVFYAMALKIADAILADYTA

SEQ ID NO: 6 - protein, 477 aa, Microdochium nivale
LVTRGAIEACLSAAGVPIDIPGTADYERDVEPFNIRLPYIPTAIAQTQTTAHIQSAVQCAKKLNLKVSAKSGGHSYASFGFGGENGHLMVQLDRMIDVISYNDKTGIAHVEPGARLGHLATVLNDKYGRAISHGTCPGVGISGHFAHGGFGFSSHMHGLAVDSVVGVTVVLADGRIVEASATENADLFWGIKGAGSNFGIVAVWKLATFPAPKVLTRFGVTLNWKNKTSALKGIEAVEDYARWVAPREVNFRIGDYGAGNPGIEGLYYGTPEQWRAAFQPLLDTLPAGYVVNPTTSLNWIESVLSYSNFDHVDFITPQPVENFYAKSLTLKSIKGDAVKNFVDYYFDVSNKVKDRFWFYQLDVHGGKNSQVTKVTNAETAYPHRDKLWLIQFYDRYDNNQTYPETSFKFLDGWVNSVTKALPKSDWGMYINYADPRMDRDYATKVYYGENLARLQKLKAKFDPTDRFYYPQAVRPVK

SEQ ID NO: 7 - protein, 504 aa, Chaetomium globosum
MQTLAPLLALLGLAATSHATSFARFTNETGTLTDCLTKAGVPIGESGTPEYKIDVASFNLRLNYTPAAVVAASTAQHVQDAVVCANKFGIKPTAKCGGHSYASFGLGGEDGHLVIEMSRMNKVVLDNVTGIATAEGGTRLGHLAMELYTQGKRAISHGTCPGVGVGGHLLHGGYGMSSHTHGLALDYVIGATVVLANGTVVECSETQHGELFWALRGAGASMGIVTEFRLKTFEAPGQLTYFVAPVQWPTEARALVGVTAVQEFAKTMPAELNMRLFIARRFVNLEGLFYGDKEDLKAALAPLVAKTNATLALATTGDWMEQIKHFGGGSNIDQGHGYEEHETFYSTSLYTKELNDEQLQNFVGYWFNQAKNNTRDWYVQIDLHGGENSAVSAPAADSTAYAHRDYLLMYLLYDRVDKGEYPAEGHTVMENFAGNITQGMERSDWGMYINYPNSRLDQKDAQLNYWGDNLPKLQAIKKDVDPEDVFHFPQGVMPAVRHQHQHQH

SEQ ID NO: 8 - protein, 509 aa, Neurospora crassa
MWLPLILLTATAAPILANPLSSPLNKRAAIDDCLKSAGVPADAQGSSEWRTDVNPFNQRLPYTPVAIAVPTTIEHIQGAVSCATKLGIKVTPKSGGHSYASFGLGGENGHLVVELDRMSKVTLDKTTNIADVQSGARLGHVATELPYFLAWPGLTKEGNRVGVGGHSLHGGFGFSSHTYGLAVDWIAAATVVLANSTVVTASPTENPDLFWALRGAGSNFGIVASFKFNTFAAPSQVTAFQINLPWNSASSIASGWEKLQDWLAAGNMPKEMNMRVFGSPSQTQLQGLYHGSSSALRTAVQPLLSTLGASLSNAQQYDWMGAFTYYTYGGTVDVTHPYNTVETFYSKSLVTTALPSAALNSVANYWINTAKRVSRDWFIIIDMHGGPKSAITSSTTNSANYTSSYAYRAPEYLFLYELYDRVMFGSYPSNGFSFLDGWVKSFTDNMKQEQWGMYINYADPTMKRAEAVGNYYRSSLSRLQKVKAQYDPNEVFYYPQSVEPARHQHQHQH

SEQ ID NO: 9 - protein, 620 aa, Thermothelomyces thermophilus
MKSFISAATLLVGILTPSVAAAPPSTPEQRDLLVPITEREEAAVKARQQSCNTPSNRACWTDGYDINTDYEVDSPDTGVVRPYTLTLTEVDNWTGPDGVVKEKVMLVNNSIIGPTIFADWGDTIQVTVINNLETNGTSIHWHGLHQKGTNLHDGANGITECPIPPKGGRKVYRFKAQQYGTSWYHSHFSAQYGNGVVGAIQINGPASLPYDTDLGVFPISDYYYSSADELVELTKNSGAPFSDNVLFNGTAKHPETGEGEYANVTLTPGRRHRLRLINTSVENHFQVSLVNHTMTIIAADMVPVNAMTVDSLFLGVGQRYDVVIEASRTPGNYWFNVTFGGGLLCGGSRNPYPAAIFHYAGAPGGPPTDEGKAPVDHNCLDLPNLKPVVARDVPLSGFAKRPDNTLDVTLDTTGTPLFVWKVNGSAINIDWGRPVVDYVLTQNTSFPPGYNIVEVNGADQWSYWLIENDPGAPFTLPHPMHLHGHDFYVLGRSPDESPASNERHVFDPARDAGLLSGANPVRRDVTMLPAFGWVVLAFRADNPGAWLFHCHIAWHVSGGLGVVYLERADDLRGAVSDADADDLDRLCADWRRYWPTNPYPKSDSGLKHRWVEEGEWLVKA

SEQ ID NO: 10 - protein, 714 aa, unidentified
QCPYLSGEMSFTQEQDNAGDTIEVTEQTIDNTLYVNDTGSYMTTDFGTPISDQYSLKAGRRGPTLLEDFIFRQKLQRFDHERVPERVVHARGAGAYGTFKSYADWSNVTAADFLSANEKETPMFCRFSTVVGFRGSVDTARDVHGHACRFYTDEGNYDIVGINFAPFFIQDAIQFPDLVHAIKPMPNNEIPQAATAHTSAWDFFSQQSTALHSALWLMSGNGIPRSFRHMNGYGVHSFRFVAANGTSKVVRYRWKSQQGVASLVWEEAQAAAGKNSDYHRQDLYNAIANGHYPKYELQAQIMDEADMLRFGFDLLDPTKLVPEEVVPYTPLGMMELNANPTNYFAEVEQAGFQPGHVVPGIDFTDDPLLQGRLFSYLDTQLTRHGGPNFEQIPVNRPRKPVHNNNRDGFGQQQIPTNNWAYTPNTMSNGYPMQANQTHGHGFFTSPYRYASGHLIREPSPTFHDHWSQPAMFWNSLIPAEQQMVVNAIVFENSKVNSPHVRKNVVNQLNMVNNNLAVRVARGLGLDEPSPNPTYYTSNKTSNVGTFGKPLLSIEGLQVGFLASNSHPESIKQGQAMAAQFSAAGVDLNIVTEAYADGVNTTYALSDAIDFDALIIADGVQSLFASPSLANQMNSTATSTLYPPARPYQILVDSFRYGKPVAAVGSGSAALKNAGIDTSRSGVYTGSSETTENIAKEVLKGLYTFRFVDRFALDE

SEQ ID NO: 11 - protein, 740 aa, Thermoascus aurantiacus
MRAIGLLPGIIGIAGAACPYMTGELPRSFAENPHAINRRAEGGGGAAAETEKFLSQFYLNDNDTFMTTDVGGPIEDQNSLSAGDRGPTLLEDFILRQKIQRFDHERVPERAVHARGAGAHGVFTSYADWSNITAASFLSAAGKETPVFVRFSTVAGSRGSADTARDVHGFATRFYTDEGNFDIVGNNIPVFFIQDAIQFPDLIHAVKPSPNNEIPQAATAHDSAWDFFSQQPSSLHTLFWAMAGHGIPRSYRNMDGFGIHTFRFVTDDGASKLVKFHWTSLQGKASLVWEEAQAVAGKNADYHRQDLWDAIEAGRYPEWELGVQIMDEEDQLRFGFDLLDPTKIVPEEYVPITKLGKMQLNRNPLNYFAETEQIMFQPGHVVRGIDFTEDPLLQGRLFSYLDTQLNRHGGPNFEQIPINRPRTPIHNNNRDGAAQMYIPLNKAAYTPNTLNNGSPKQANQTVGKGFFTTPGRTASGRLVRAVSSTFADVWSQPRLFYNSLVPAEQQFLINAIRFETAHITSDVVKNNVIIQLNRVSNNLAKRVARAIGVAEPEPDPTLYHNNKTANVGVFGKPLARLDGLQVGVLATVNKPDSIKQAASLKASFAADNVDVKVVAERLADGVDETYSAADAVNFDAILVANGAEGLFARDSFTARPANSTTATLYPAGRPLQILVDGFRYGKPVGALGSGAKALDAAEISTTRAGVYVANSTTDSFINGVRDGLRTFKFLDRFAIDEDAE

SEQ ID NO: 12 - protein, 724 aa, Thermoascus aurantiacus
ACPYMTGELPRSFAENPHAINRRAEGGGGAAAETEKFLSQFYLNDNDTFMTTDVGGPIEDQNSLSAGDRGPTLLEDFILRQKIQRFDHERVPERAVHARGAGAHGVFTSYADWSNITAASFLSAAGKETPVFVRFSTVAGSRGSADTARDVHGFATRFYTDEGNFDIVGNNIPVFFIQDAIQFPDLIHAVKPSPNNEIPQAATAHDSAWDFFSQQPSSLHTLFWAMAGHGIPRSYRNMDGFGIHTFRFVTDDGASKLVKFHWTSLQGKASLVWEEAQAVAGKNADYHRQDLWDAIEAGRYPEWELGVQIMDEEDQLRFGFDLLDPTKIVPEEYVPITKLGKMQLNRNPLNYFAETEQIMFQPGHVVRGIDFTEDPLLQGRLFSYLDTQLNRHGGPNFEQIPINRPRTPIHNNNRDGAAQMYIPLNKAAYTPNTLNNGSPKQANQTVGKGFFTTPGRTASGRLVRAVSSTFADVWSQPRLFYNSLVPAEQQFLINAIRFETAHITSDVVKNNVIIQLNRVSNNLAKRVARAIGVAEPEPDPTLYHNNKTANVGVFGKPLARLDGLQVGVLATVNKPDSIKQAASLKASFAADNVDVKVVAERLADGVDETYSAADAVNFDAILVANGAEGLFARDSFTARPANSTTATLYPAGRPLQILVDGFRYGKPVGALGSGAKALDAAEISTTRAGVYVANSTTDSFINGVRDGLRTFKFLDRFAIDEDAE

SEQ ID NO: 13 - protein, 363 aa, Coprinopsis cinerea
MKLSLLSTFAAVIIGALALPQGPGGGGSVTCPGGQSTSNSQCCVWFDVLDDLQTNFYQGSKCESPVRKILRIVFHDAIGFSPALTAAGQFGGGGADGSIIAHSNIELAFPANGGLTDTVEALRAVGINHGVSFGDLIQFATAVGMSNCPGSPRLEFLTGRSNSSQPSPPSLIPGPGNTVTAILDRMGDAGFSPDEVVDLLAAHSLASQEGLNSAIFRSPLDSTPQVFDTQFYIETLLKGTTQPGPSLGFAEELSPFPGEFRMRSDALLARDSRTACRWQSMTSSNEVMGQRYRAAMAKMSVLGFDRNALTDCSDVIPSAVSNNAAPVIPGGLTVDDIEVSCPSEPFPEIATASGPLPSLAPAP

SEQ ID NO: 14 - protein, 253 aa, Penicillium emersonii
MLSSTTRTLAFTGLAGLLSAPLVKAHGFVQGIVIGDQFYSGYIVNSFPYESNPPPVIGWATTATDLGFVDGTGYQGPDIICHRNATPAPLTAPVAAGGTVELQWTPWPDSHHGPVITYLAPCNGNCSTVDKTTLEFFKIDQQGLIDDTSPPGTWASDNLIANNNSWTVTIPNSVAPGNYVLRHEIIALHSANNKDGAQNYPQCINIEVTGGGSDAPEGTLGEDLYHDTDPGILVDIYEPIATYTIPGPPEPTF

SEQ ID NO: 15 - protein, 249 aa, Thermoascus aurantiacus
MSFSKIIATAGVLASASLVAGHGFVQNIVIDGKNYGGYLVNQYPYMSNPPEVIAWSTTATDLGFVDGTGYQTPDIICHRGAKPGALTAPVSPGGTVELQWTPWPDSHHGPVINYLAPCNGDCSTVDKTQLEFFKIAESGLINDDNPPGIWASDNLIAANNSWTVTIPTTIAPGNYVLRHEIIALHSAQNQDGAQNYPQCINLQVTGGGSDNPAGTLGTALYHDTDPGILINIYQKLSSYIIPGPPLYTG

SEQ ID NO: 16 - protein, 560 aa, Bacillus licheniformis
EGVMSGGGGDKVAVGKDGMVATAHPLASKIGAEVLKKGGNAIDAAIAIQYALNVTEPMMSGIGGGGFMMVYDGETKETSIINSRERAPEGAKPDMFLDGDGKVIPFSERSRHGNAVGVPGTLKGLEAAHKKWGTKKMEDLISPSIKLAEEGFPIDSVLADAIKDHQDKLSKTAAKDIFLPDGEPLKEGDILVQKDLAKTFKLIRKEGSKAFYDGEIGRAIADVVQDFGGSMTPDDLSRYEVTTDKPIWGEYHGYDIASMPPPSSGGVFMLQMLKLIDDFHLSQYDPKSFEKYHLLAETMHLSYADRAAYAGDPEFVDVPLRGLLDPDYIKERQKLISLDSMNRDVKEGDPWKYEEGEPNYEIVPQPEDKTIGETTHFTVTDQWGNVVSYTTTIEQLFGTGILVPGYGLFLNNELTDFDAVPGGANEVQPNKRPLSSMTPTIVFKDEKPVLTVGSPGGTTIIASVFQTILNYFEYGMSLQDAIEEPRIYTNSLTSYRYESGMPEDVRRKLNDFGHKFGANPVDIGNVQSIFIDRENKTFMGVADSSRNGTAVGVNIKTSAK

SEQ ID NO: 17 - protein, 291 aa, Thermomyces lanuginosus
MRSSLVLFFVSAWTALASPIRREVSQDLFNQFNLFAQYSAAAYCGKNNDAPAGTNITCTGNACPEVEKADATFLYSFEDSGVGDVTGFLALDNTNKLIVLSFRGSRSIENWIGNLNFDLKEINDICSGCRGHDGFTSSWRSVADTLRQKVEDAVREHPDYRVVFTGHSLGGALATVAGADLRGNGYDIDVFSYGAPRVGNRAFAEFLTVQTGGTLYRITHTNDIVPRLPPREFGYSHSSPEYWIKSGTLVPVTRNDIVKIEGIDATGGNNQPNIPDIPAHLWYFGLIGTCL

SEQ ID NO: 18 - protein, 269 aa, Thermomyces lanuginosus
EVSQDLFNQFNLFAQYSAAAYCGKNNRAPAGTNITCTGNACPEVEKADATFLYSFEDSGVGDVTGFLALDNTNKLIVLSFRGSRSIENWINNLRFDLKEINDICSGCRGHAGFTSSWRSVADTLRQKVEDAVREHPDYRVVFTGHSLGGALATVAGADLRGNGYDIDVFSYGAPRVGNRAFAEFLTVQTGGTLYRITHTNDIVPRLPPREFGYSHPSPEYWIKSGTGVPVTRNDIVKIEGIDATGGNNQPNIPDITAHLWYFGLIGTCL

SEQ ID NO: 19 - protein, 194 aa, Humicola insolens
QLGAIQNDLESGSPDACPDAILIFARGSTEPGNMGITVGPALANGLKEHIPNIWIQGVGGPYDAALATNFLPRGTSQANIDEGKRLFHLAHQKCPNTPVVAGGYSQGAALIAAAVSELSGAVKEQVKGVVLFGYTQNLQNRGGIPNYPRERTKVFCNVGDAVCTGTLIITPAHLSYTIQARGEAARFLVDRIRA

SEQ ID NO: 20 - protein, 274 aa, Thermomyces lanuginosus
SPIRREVSQDLFNQFNLFAQYSAAAYCGKNNDAPAGTNITCTGNACPEVEKADATFLYSFEDSGVGDVTGFLALDNTNKLIVLSFRGSRSIENWIGNLNFDLKEINDICSGCRGHDGFTSSWRSVADTLRQKVEDAVREHPDYRVVFTGHSLGGALATVAGADLRGNGYDIDVFSYGAPRVGNRAFAEFLTVQTGGTLYRITHTNDIVPRLPPREFGYSHSSPEYWIKSGTLVPVRRRDIVKIEGIDATGGNNQPNIPDIPAHLWYFGLIGTCL

SEQ ID NO: 21 - protein, 264 aa, Penicillium thomii
FPAIQERATADTAAWSFLQRAADLSSAAYTGCLGTAFDVTITKQIYDAATNAKGFVGYSTTNKKISVVMKGSTTETDIMNDVDTTLVTPSLSGVTFPSGAQIMHGISSPWSAVHDTIISEVKTLVEKYPDYTLESTGHSLGGSLTYISYVALSANFPDKEVTSNAMAAFPIGNQAWATFAESFNGTLNRGNNVDDGVPNMYIELPYDFVHYGTEYYSYGTEATVLKCSGERDTSCSAGNGQYGVTAGHFSSFGVEMGYAGCSSL

SEQ ID NO: 22 - protein, 315 aa, Cryphonectria parasitica
SPLQARDSAVLDETSYENMKYYVQYAASAYCDSEDAVGTLVSCGDSGCPNVTANGATIVGTMPTTTTFDLEGYVAVDPTREEIVVAFRGSSDLRNWIADFDFIEVAYSDCTGCYVHDGFYESWKEIQTYAVGYVEAAYETYPDYTLVITGHSLGAAVATLAGVQFRIDGYPCDIYTVGSPRIGNLAWAEFVTAQDGAEYRATHYDDPVPRLPPIVLGYYHTSPEFWLAAGPATNIDYTIDGIDVCVGNANTSCNAGTTGFDADAHEYYFQYMGCGDESNGIDMRKRNITDAELAQKLTNYTMQDIAFSEKLASSS

SEQ ID NO: 23 - protein, 274 aa, Thermomyces lanuginosus
EVSQDLFNQFNLFAQYSAAAYCGKNNDAPAGTNITCTGNACPEVEKADATFLYSFEDSGVGDVTGFLALDNTNKLIVLSFRGSRSIENWIANLNFWLKKINDICSGCRGHDGFTSSWRSVADTLRQKVEDAVREHPDYRVVFTGHSLGGALATVAGADLRGNGYDIDVFSYGAPRVGNRAFAEFLTVQTGGTLYRITHTNDIVPRLPPREFGYSHSSPEYWIKSGTLVPVTRNDIVKIEGIDATGGNNQPNIPDIPAHLWYFQATDACNAGGFS

SEQ ID NO: 24 - protein, 610 aa, Aspergillus niger
MKLPLFAAAAAGLANAASLPVERAEAEVASVAADLIVRALPNAPDGYTPSNVTCPSTRPSIRDASGISTNETEWLKVRRNATLTPMKNLLSRLNLTGFDTTSYINEHSSNISNIPNIAIAASGGGYRALTNGAGALKAFDSRSDNATNSGQLGGLLQAATYVSGLSGGSWLVGSMFVNNFSSIGELQASEKVWRFDKSLLEGPNFDHIQIVSTVEYWKDITEEVDGKANAGFNTSFTDYWGRALSYQLVNASDDKGGPDYTWSSIALMDDFKNGQYPMPIVVADGRNPGEIIVETNATVYEVNPWEFGSFDPSVYAFAPLQYLGSRFENGSIPDNGTCVSGFDNAGFIMGSSSTLFNQFLLQINSTSIPTILKDAFTDILEDLGERNDDIAVYSPNPFSGYRDSSEDYATAKDLDVVDGGEDGENIPLHPLIQPERAVDVIFAIDSSADTDYYWPNGTSLVATYERSLEPSIANGTAFPAVPDQNTFVNLGLNSRPTFFGCDPKNISGTAPLVIYLPNSPYTYDSNFSTFKLTYSDEERDSVITNGWNVVTRGNGTVDDNFPSCVACAILQRSTYRTNTSLPDICTTCFNDYCWNGTTNSTTPGAYEPSV

SEQ ID NO: 25 - protein, 331 aa, Aspergillus aculeatus
MVKSVLASALFAVSALAASRTTAPSGAIVVAKSGGDYTTIGDAIDALSTSTTDTQTIFIEEGTYDEQVYLPAMTGKVIIYGQTENTDSYADNLVTITHAISYEDAGESDDLTATFRNKAVGSQVYNLNIANTCGQACHQALALSAWADQQGYYGCNFTGYQDTLLAQTGNQLYINSYIEGAVDFIFGQHARAWFQNVDIRVVEGPTSASITANGRSSETDTSYYVINKSTVAAKEGDDVAEGTYYLGRPWSEYARVVFQQTSMTNVINSLGWTEWSTSTPNTEYVTFGEYANTGAGSEGTRASFAEKLDAKLTITDILGSDYTSWVDTSYF

SEQ ID NO: 26 - protein, 296 aa, Evansstolkia leycettana
MHRPLQLWALAALTSLVTAAPAPVLRRDVSSSVLSELDLFAQYSAAAYCSSNIGSPGTKLTCSVGNCPRVEAADTETLIEFNESSSFGDVTGYIAVDRTNSLLVLAFRGSSTVSNWEADLDFPLTDASSLCSGCEIHSGFWAAWQTVQASITSTLESAIASYPGYTLVFTGHSYGAALAAIAATTLRNAGYTIQLYDYGQPRLGNLALAQYITAQTQGANYRVTHTDDIVPKLPPELFGYHHFSPEYWITSGDNVTVTTSDVQVVTGIDSTAGNDGTLLDSTSAHDWYIVYIDGCD

SEQ ID NO: 27 - protein, 215 aa, Nemania serpens
IPMTLDLSEEMIDKLKAGKASGVSEATATGTTANEFLDGGCRPVIFLFARGSRQEGNVGGTPGPQTIDQLKARLGDGAVAAQGLEYPADLLDNLRSGGCDPADVDSFGALIARAAAECPGSRLVLSGYSQGAALVHAAARKLAADVVVRIAAAVTYGDTRKEQDGGVIPGIDPARTLILCHDGDLVCDGTLIVTDNHYDYDDLAPTAVDFIASKV

SEQ ID NO: 28 - protein, 240 aa, Trichophaea saccata
TPFTGLDTPIDHFKRDENGTVPTRTLDISTSIYEKWDALFSAAATPSASSAASVKIRTSSDVREDLNNGMCGNVVLIYARGTYSSGNIGIGVGVAFVDALAAALPNQVIVQGVEPYDNDIAGYLAGGDETGANSMVALTQKAASQCPSAKIVWGGYSQGAQVTHKAGERLPSALYPRIAGIMLFGDPDNGDPFPGSLNNHVKTYCHSDDPICDGIPLPIAGHLTYDENATEAAAVVATWV

SEQ ID NO: 29 - protein, 210 aa, Thermochaetoides thermophila
LPTAPVEETASHLEARQSTTRNDLENGNSNNCPGVIFIFARASTEPGNMGISAGPNVANGLAAHYGSNLWVQGVGGPYTAALADNFLPAGTSRAAIDEAKRLFNLASTKCPNAAIVAGGYSQGTAVMSNAISELSSSVRDKVKGVVLFGYTKNLQNGGQIPNYPSNRLEVYCNASDAVCWGTLFITPAHFLYTTESTIDAPRFLISKVGF

SEQ ID NO: 30 - protein, 230 aa, Pyrenophora tritici-repentis
APTPETGVSFPITDLLDSDLTINEYAAQLEAKNVEERDLTKRQYNSDTYNQLTDGTACRPITVIWARGTTQSGNVGEPNSEGPVFFNAIAARVGGISRLAIQGVTYPANVFGFLAGGDAAGATTMFNLINQAISQCPSTKIVVTGYSQGAQLVHTATQRLSAAAAARVTAVVTFGDADRDESFGSVAASKVLIICHEGDNICDNGIIITPQHRNYEIDAPTAAAFVAARV

SEQ ID NO: 31 - protein, 212 aa, Acrophialophora fusispora
FPTAPVELESTAEIEARQLSSTRTDLESGSSSNCPRVIFIFARASTETGNMGLSAGPNVANGLAARYGSNLWVQGVGGPYTAGLAENFLPAGTSRAAIDEAKRLFTMANQKCPNAAVVAGGYSQGTAVMSNAISELSTTIKNQIKGVVLFGYTKNLQNGGRIPNFDTAKTEVYCNVSDAVCWGTLFIAPAHFLYTTDSTINAPAFLISKIGA

SEQ ID NO: 32 - protein, 298 aa, Pseudomonas sp.
AQESPAFIDPASWNTPFNGIAQVACHNCYEKQYANTFSSVLDSVRTLELDFWDQRDAVSGGSPHHWFVRHNPGTLFQSGNDNNCTGDGTGKNDLEACLNDVKNWSDKHPGHFPITLILDKKQGWSKESSGRTPKDFDELVARVFQGKLFTPQDLATHIGSGAGALQGNLKGKSWPTANDLQGKVLLVLNHSENQKLSQYAEARTSKAKVFISPVTNGQNDISGKVSGMSSQSSGYVAMNNMGKGDKSWAKQAFAYSHIGRVWGDDEVSFAQHINQKINLSAYYRFAAQSAGGYRIRPF

SEQ ID NO: 33 - protein, 245 aa, Bacillus thuringiensis
WSAEDKHKEGVNSHLWIVNRAIDIMSRNTTLVKQDRVAQLNEWRTELENGIYAADYENPYYDNSTFASHFYDPDNGKTYIPFAKQAKETGAKYFKLAGESYKNKDMKQAFFYLGLSLHYLGDVNQPMHAANFTNLSYPQGFHSKYENFVDTIKDNYKVTDGNGYWNWKGTNPEDWIHGAAVVAKQDYSGIVNDNTKDWFVKAAVSQEYADKWRAEVTPMTGKRLMDAQRVTAGYIQLWFDTYGDR

SEQ ID NO: 34 - protein, 485 aa, Geobacillus stearothermophilus
APFNGTMMQYFEWYLPDDGTLWTKVANEANNLSSLGITALWLPPAYKGTSRSDVGYGVYDLYDLGEFNQKGTVRTKYGTKAQYLQAIQAAHAAGMQVYADVVFDHKGGADGTEWVDAVEVNPSDRNQEISGTYQIQAWTKFDFPGRGNTYSSFKWRWYHFDGVDWDESRKLSRIYKFRGKAWDWEVDTEFGNYDYLMYADLDMDHPEVVTELKNWGKWYVNTTNIDGFRLDAVKHIKFSFFPDWLSYVRSQTGKPLFTVGEYWSYDINKLHNYITKTDGTMSLFDAPLHNKFYTASKSGGAFDMRTLMTNTLMKDQPTLAVTFVDNHDTEPGQALQSWVDPWFKPLAYAFILTRQEGYPCVFYGDYYGIPQYNIPSLKSKIDPLLIARRDYAYGTQHDYLDHSDIIGWTREGGTEKPGSGLAALITDGPGGSKWMYVGKQHAGKVFYDLTGNRSDTVTINSDGWGEFKVNGGSVSVWVPRKTTVS

SEQ ID NO: 35 - protein, 540 aa, Geobacillus stearothermophilus
MKQQKRLYARLLTLLFALIFLLPHSAAAAPFNGTMMQYFEWYLPDDGTLWTKVANEANNLSSLGITALWLPPAYKGTSRSDVGYGVYDLYDLGEFNQKGTVRTKYGTKAQYLQAIQAAHAAGMQVYADVVFDHKGGADGTEWVDAVEVNPSDRNQEISGTYQIQAWTKFDFPGRGNTYSSFKWRWYHFDGVDWDESRKLSRIYKFRGKAWDWEVDTEFGNYDYLMYADLDMDHPEVVTELKNWGKWYVNTTNIDGFRLDAVKHIKFSFFPDWLSYVRSQTGKPLFTVGEYWSYDINKLHNYITKTDGTMSLFDAPLHNKFYTASKSGGAFDMRTLMTNTLMKDQPTLAVTFVDNHDTEPGQALQSWVDPWFKPLAYAFILTRQEGYPCVFYGDYYGIPQYNIPSLKSKIDPLLIARRDYAYGTQHDYLDHSDIIGWTREGGTEKPGSGLAALITDGPGGSKWMYVGKQHAGKVFYDLTGNRSDTVTINSDGWGEFKVNGGSVSVWVPRKTTVSTIARPITTRPWTGEFVRWTEPRLVAWP

SEQ ID NO: 36 - protein, 483 aa, Sutcliffiella halmapala
HHNGTNGTMMQYFEWHLPNDGNHWNRLRDDASNLRNRGITAIWIPPAWKGTSQNDVGYGAYDLYDLGEFNQKGTVRTKYGTRSQLESAIHALKNNGVQVYGDVVMNHKGGADATENVLAVEVNPNNRNQEISGDYTIEAWTKFDFPGRGNTYSDFKWRWYHFDGVDWDQSRQFQNRIYKFRGKAWDWEVDSENGNYDYLMYADVDMDHPEVVNELRRWGEWYTNTLNLDGFRIDAVKHIKYSFTRDWLTHVRNATGKEMFAVAEFWKNDLGALENYLNKTNWNHSVFDVPLHYNLYNASNSGGNYDMAKLLNGTVVQKHPMHAVTFVDNHDSQPGESLESFVQEWFKPLAYALILTREQGYPSVFYGDYYGIPTHSVPAMKAKIDPILEARQNFAYGTQHDYFDHHNIIGWTREGNTTHPNSGLATIMSDGPGGEKWMYVGQNKAGQVWHDITGNKPGTVTINADGWANFSVNGGSVSIWVKR

SEQ ID NO: 37 - protein, 483 aa, Bacillus amyloliquefaciens
VNGTLMQYFEWYTPNDGQHWKRLQNDAEHLSDIGITAVWIPPAYKGLSQSDNGYGPYDLYDLGEFQQKGTVRTKYGTKSELQDAIGSLHSRNVQVYGDVVLNHKAGADATEDVTAVEVNPANRNQETSEEYQIKAWTDFRFPGRGNTYSDFKWHWYHFDGADWDESRKISRIFKFRGEGKAWDWEVSSENGNYDYLMYADVDYDHPDVVAETKKWGIWYANELSLDGFRIDAAKHIKFSFLRDWVQAVRQATGKEMFTVAEYWQNNAGKLENYLNKTSFNQSVFDVPLHFNLQAASSQGGGYDMRRLLDGTVVSRHPEKAVTFVENHDTQPGQSLESTVQTWFKPLAYAFILTRESGYPQVFYGDMYGTKGTSPKEIPSLKDNIEPILKARKEYAYGPQHDYIDHPDVIGWTREGDSSAAKSGLAALITDGPGGSKRMYAGLKNAGETWYDITGNRSDTVKIGSDGWGEFHVNDGSVSIYVQK

SEQ ID NO: 38 - protein, 498 aa, Aspergillus oryzae
MVAWWSLFLYGLQVAAPALAATPADWRSQSIYFLLTDRFARTDGSTTATCNTADQKYCGGTWQGIIDKLDYIQGMGFTAIWITPVTAQLPQTTAYGDAYHGYWQQDIYSLNENYGTADDLKALSSALHERGMYLMVDVVANHMGYDGAGSSVDYSVFKPFSSQDYFHPFCFIQNYEDQTQVEDCWLGDNTVSLPDLDTTKDVVKNEWYDWVGSLVSNYSIDGLRIDTVKHVQKDFWPGYNKAAGVYCIGEVLDGDPAYTCPYQNVMDGVLNYPIYYPLLNAFKSTSGSMDDLYNMINTVKSDCPDSTLLGTFVENHDNPRFASYTNDIALAKNVAAFIILNDGIPIIYAGQEQHYAGGNDPANREATWLSGYPTDSELYKLIASANAIRNYAISKDTGFVTYKNWPIYKDDTTIAMRKGTDGSQIVTILSNKGASGDSYTLSLSGAGYTAGQQLTEVIGCTTVTVGSDGNVPVPMAGGLPRVLYPTEKLAGSKICSSS

SEQ ID NO: 39 - protein, 519 aa, Geobacillus stearothermophilus
MKQQKRLYARLLTLLFALIFLLPHSAAAAAPFNGTMMQYFEWYLPDDGTLWTKVANEANNLSSLGITALWLPPAYKGTSRSDVGYGAYDLYDLGEFNQKGTVRTKYGTKAQYLQAIQAAHAAGMQVYADVVFDHKGGADGTEWVDAVEVNPSDRNQVISGTYQIQAWTKFDFPGRGNTYSSFKWRWYHFDGVDWDESRKLSRIYLFSGKQWDWPVDNEFGNYDYLMYADLDMDHPEVTTELKNWGKWYVNTTNIDGFRLDAVKHIKFYFFPDWLSYVRSSTGKPLFTVGEYWSGDINKLHNYITITDGTVSLFDAPLHYKFYNASKSGGAFDMRTLMTNTLMKDQPTLAVTFVDNHDTEPGQALQSWVDPWFKPLAYAFILTRQEGYPCVFYGDYYGIPQYNIPSLKSKIDPLLIARRDYAYGTQHDYLDHSDIIGWTREGGTEKPGSGLAALITDGPGGSKWMYVGKQHAGKVFYDLTGNRSDTVTINSDGWGEFKVNGGSVSVWVPRKTTVSTIARP

SEQ ID NO: 40 - protein, 483 aa, Alkalihalobacillus akibai
HHNGTNGTMMQYFEWYLPNDGNHWNRLRSDASNLKDKGISAVWIPPAWKGASQNDVGYGAYDLYDLGEFNQKGTIRTKYGTRNQLQAAVNALKSNGIQVYGDVVMNHKGGADATEMVKAVEVNPNNRNQEVSGEYTIEAWTKFDFPGRGNTHSNFKWRWYHFDGVDWDQSRKLNNRIYKFRGKGWDWEVDTEFGNYDYLMYADIDMDHPEVVNELRNWGVWYTNTLGLDGFRIDAVKHIKYSFTRDWINHVRSATGKNMFAVAEFWKNDLGAIENYLNKTNWNHSVFDVPLHYNLYNASKSGGNYDMRQIFNGTVVQKHPMHAVTFVDNHDSQPEEALESFVEEWFKPLAYALTLTREQGYPSVFYGDYYGIPTHGVPAMKSKIDPILEARQKYAYGRQNDYLDHHNIIGWTREGNTAHPNSGLATIMSDGAGGNKWMFVGRNKAGQVWTDITGNKAGTVTINADGWGNFSVNGGSVSIWVNK

SEQ ID NO: 41 - protein, 640 aa, Aspergillus niger
MSFRSLLALSGLVCTGLANVISKRATLDSWLSNEATVARTAILNNIGADGAWVSGADSGIVVASPSTDNPDYFYTWTRDSGLVLKTLVDLFRNGDTSLLSTIENYISAQAIVQGISNPSGDLSSGAGLGEPKFNVDETAYTGSWGRPQRDGPALRATAMIGFGQWLLDNGYTSTATDIVWPLVRNDLSYVAQYWNQTGYDLWEEVNGSSFFTIAVQHRALVEGSAFATAVGSSCSWCDSQAPEILCYLQSFWTGSFILANFDSSRSGKDANTLLGSIHTFDPEAACDDSTFQPCSPRALANHKEVVDSFRSIYTLNDGLSDSEAVAVGRYPEDTYYNGNPWFLCTLAAAEQLYDALYQWDKQGSLEVTDVSLDFFKALYSDAATGTYSSSSSTYSSIVDAVKTFADGFVSIVETHAASNGSMSEQYDKSDGEQLSARDLTWSYAALLTANNRRNSVVPASWGETSASSVPGTCAATSAIGTYSSVTVTSWPSIVATGGTTTTATPTGSGSVTSTSKTTATASKTSTSTSSTSCTTPTAVAVTFDLTATTTYGENIYLVGSISQLGDWETSDGIALSADKYTSSDPLWYVTVTLPAGESFEYKFIRIESDDSVEWESDPNREYTVPQACGTSTATVTDTWR

SEQ ID NO: 42 - protein, 616 aa, Aspergillus niger
ATLDSWLSNEATVARTAILNNIGADGAWVSGADSGIVVASPSTDNPDYFYTWTRDSGLVLKTLVDLFRNGDTSLLSTIENYISAQAIVQGISNPSGDLSSGAGLGEPKFNVDETAYTGSWGRPQRDGPALRATAMIGFGQWLLDNGYTSTATDIVWPLVRNDLSYVAQYWNQTGYDLWEEVNGSSFFTIAVQHRALVEGSAFATAVGSSCSWCDSQAPEILCYLQSFWTGSFILANFDSSRSGKDANTLLGSIHTFDPEAACDDSTFQPCSPRALANHKEVVDSFRSIYTLNDGLSDSEAVAVGRYPEDTYYNGNPWFLCTLAAAEQLYDALYQWDKQGSLEVTDVSLDFFKALYSDAATGTYSSSSSTYSSIVDAVKTFADGFVSIVETHAASNGSMSEQYDKSDGEQLSARDLTWSYAALLTANNRRNSVVPASWGETSASSVPGTCAATSAIGTYSSVTVTSWPSIVATGGTTTTATPTGSGSVTSTSKTTATASKTSTSTSSTSCTTPTAVAVTFDLTATTTYGENIYLVGSISQLGDWETSDGIALSADKYTSSDPLWYVTVTLPAGESFEYKFIRIESDDSVEWESDPNREYTVPQACGTSTATVTDTWR

SEQ ID NO: 43 - protein, 435 aa, Humicola insolens
MARGTALLGLTALLLGLVNGQKPGETKEVHPQLTTFRCTKRGGCKPATNFIVLDSLSHPIHRAEGLGPGGCGDWGNPPPKDVCPDVESCAKNCIMEGIPDYSQYGVTTNGTSLRLQHILPDGRVPSPRVYLLDKTKRRYEMLHLTGFEFTFDVDATKLPCGMNSALYLSEMHPTGAKSKYNPGGAYYGTGYCDAQCFVTPFINGLGNIEGKGSCCNEMDIWEANSRASHVAPHTCNKKGLYLCEGEECAFEGVCDKNGCGWNNYRVNVTDYYGRGEEFKVNTLKPFTVVTQFLANRRGKLEKIHRFYVQDGKVIESFYTNKEGVPYTNMIDDEFCEATGSRKYMELGATQGMGEALTRGMVLAMSIWWDQGGNMEWLDHGEAGPCAKGEGAPSNIVQVEPFPEVTYTNLRWGEIGSTYQEVQKPKPKPGHGPRSD

SEQ ID NO: 44 - protein, 305 aa, Humicola insolens
MRSSPLLRSAVVAALPVLALAADGRSTRYWDCCKPSCGWAKKAPVNQPVFSCNANFQRITDFDAKSGCEPGGVAYSCADQTPWAVNDDFALGFAATSIAGSNEAGWCCACYELTFTSGPVAGKKMVVQSTSTGGDLGSNHFDLNIPGGGVGIFDGCTPQFGGLPGQRYGGISSRNECDRFPDALKPGCYWRFDWFKNADNPSFSFRQVQCPAELVARTGCRRNDDGNFPAVQIPSSSTSSPVNQPTSTSTTSTSTTSSPPVQPTTPSGCTAERWAQCGGNGWSGCTTCVAGSTCTKINDWYHQCL

SEQ ID NO: 45 - protein, 299 aa, Thermothielavioides terrestris
MRSTPVLRTTLAAALPLVASAASGSGQSTRYWDCCKPSCAWPGKAAVSQPVYACDANFQRLSDFNVQSGCNGGSAYSCADQTPWAVNDNLAYGFAATSIAGGSESSWCCACYALTFTSGPVAGKTMVVQSTSTGGDLGSNHFDIAMPGGGVGIFNGCSSQFGGLPGAQYGGISSRDQCDSFPAPLKPGCQWRFDWFQNADNPTFTFQQVQCPAEIVARSGCKRNDDSSFPVFTPPSGGNGGTGTPTSTAPGSGQTSPGGGSGCTSQKWAQCGGIGFSGCTTCVSGTTCQKLNDYYSQCL

SEQ ID NO: 46 - protein, 203 aa, Bacillus amyloliquefaciens
FNSYNSGLWQKADGYSNGDMFNCTWRANNVSMTSSGEMRLALTSPSYNKFDCGENRSVQTYGYGLYEVRMKPAKNTGIVSSFFTYTGPTEGTPWDEIDIEFLGKDTTKVQFNYYTNGAGNHEKLADLGFDAANAYHTYAFDWQPNSIKWYVDGQLKHTATTQIPAAPGKIMMNLWNGTGVDDWLGSYNGVNPLYAHYDWVRYT

SEQ ID NO: 47 - protein, 516 aa, Aspergillus niger
MLNPKVAYMVWMTCLGLTLPSQAQSNDYRPSYHFTPDQYWMNEPNGLIKIGSTWHLFFQHNPTANVWGNICWGHATSTDLMHWAHKPTAIADENGVEAFTGTAYYDPNNTSGLGDSANPPYLAWFTGYTTSSQTQDQRLAFSVDNGATWTKFQGNPIISTSQEAPHDITGGLESRDPKVFFHRQSGNWIMVLAHGGQDKLSFWTSADTINWTWQSDLKSTSINGLSSDITGWEVPDMFELPVEGTEETTWVVMMTPAEGSPAGGNGVLAITGSFDGKSFTADPVDASTMWLDNGRDFDGALSWVNVPASDGRRIIAAVMNSYGSNPPTTTWKGMLSFPRTLSLKKVGTQQHFVQQPITELDTISTSLQILANQTITPGQTLLSSIRGTALDVRVAFYPDAGSVLSLAVRKGASEQTVIKYTQSDATLSVDRTESGDISYDPAAGGVHTAKLEEDGTGLVSIRVLVDTCSVEVFGGQGEAVISDLIFPSDSSDGLALEVTGGNAVLQSVDVRSVSLE

SEQ ID NO: 48 - protein, 406 aa, Aspergillus niger
MVGLLSITAALAATVLPNIVSAVGLDQAAVAKGLQYFGTATDNPELTDIPYVTQLNNTADFGQITPGNSMKWDATEPSQGTFTFTKGDVIADLAEGNGQYLRCHTLVWYNQLPSWVTSGTWTNATLTAALKNHITNVVSHYKGKCLHWDVVNEALNDDGTYRTNIFYTTIGEAYIPIAFAAAAAADPDAKLFYNDYNLEYGGAKAASARAIVQLVKNAGAKIDGVGLQAHFSVGTVPSTSSLVSVLQSFTALGVEVAYTEADVRILLPTTATTLAQQSSDFQALVQSCVQTTGCVGFTIWDWTDKYSWVPSTFSGYGAALPWDENLVKKPAYNGLLAGMGVTVTTTTTTTTATATGKTTTTTTGATSTGTTAAHWGQCGGLNWSGPTACATGYTCTYVNDYYSQCL

SEQ ID NO: 49 - protein, 204 aa, Dictyoglomus thermophilum
MQTSITLTSNASGTFDGYYYELWKDTGNTTMTVYTQGRFSCQWSNINNALFRTGKKYNQNWQSLGTIRITYSATYNPNGNSYLCIYGWSTNPLVEFYIVESWGNWRPPGATSLGQVTIDGGTYDIYRTTRVNQPSIVGTATFDQYWSVRTSKRTSGTVTVTDHFRAWANRGLNLGTIDQITLCVEGYQSSGSANITQNTFSQGS

SEQ ID NO: 50 - protein, 225 aa, Thermomyces lanuginosus
MVGFTPVALAALAATGALAFPAGNATELEKRQTTPNSEGWHDGYYYSWWSDGGAQATYTNLEGGTYEISWGDGGNLVGGKGWNPGLNARAIHFEGVYQPNGNSYLAVYGWTRNPLVEYYIVENFGTYDPSSGATDLGTVECDGSIYRLGKTTRVNAPSIDGTQTFDQYWSVRQDKRTSGTVQTGCHFDAWARAGLNVNGDHYYQIVATEGYFSSGYARITVADVG

SEQ ID NO: 51 - protein, 206 aa, Bacillus agaradhaerens
QIVTDNSIGNHDGYDYEFWKDSGGSGTMILNHGGTFSAQWNNVNNILFRKGKKFNETQTHQQVGNMSINYGANFQPNGNAYLCVYGWTVDPLVEYYIVDSWGNWRPPGATPKGTITVDGGTYDIYETLRVNQPSIKGIATFKQYWSVRRSKRTSGTISVSNHFRAWENLGMNMGKMYEVALTVEGYQSSGSANVYSNTLRINGNPL

SEQ ID NO: 52 - protein, 397 aa, Aspergillus fumigatus
MVHLSSLAAALAALPLVYGAGLNTAAKAKGLKYFGSATDNPELTDSAYVAQLSNTDDFGQITPGNSMKWDATEPSQNSFSFANGDAVVNLANKNGQLMRCHTLVWHSQLPNWVSSGSWTNATLLAAMKNHITNVVTHYKGKCYAWDVVNEALNEDGTFRNSVFYQIIGPAYIPIAFATAAAADPDVKLYYNDYNIEYSGAKATAAQNIVKMIKAYGAKIDGVGLQAHFIVGSTPSQSDLTTVLKGYTALGVEVAYTELDIRMQLPSTAAKLAQQSTDFQGVAAACVSTTGCVGVTIWDWTDKYSWVPSVFQGYGAPLPWDENYVKKPAYDGLMAGLGASGSGTTTTTTTTSTTTGGTDPTGVAQKWGQCGGIGWTGPTTCVSGTTCQKLNDWYSQCL

SEQ ID NO: 53 - protein, 405 aa, Evansstolkia leycettana
MVHLSSLALALAAGSQLAQAAGLNTAAKAIGKLYFGTATDNPELSDSTYMQETDNTDDFGQLTPANSMKWDATEPSQNTFTFTNGDQIANLAKSNGQMLRCHNLVWYNQLPSWVTSGSWTNATLLAAMKNHITNVVTHYKGQCYAWDVVNEALNDDGTYRSNVFYQYIGEAYIPIAFATAAAADPNAKLYYNDYNIEYPGAKATAAQNIVKMVKAYGAKIDGVGLQSHFIVGSTPSQSSQQSNMAAFTALGVEVAITELDIRMTLPSTSALLAQQSTDYQSTVSACVNTPKCIGITLWDWTDKYSWVPNTFSGQGDACPWDSNYQKKPAYYGILTALGGSASTSTTTTLVTSTRTSTTTSTSATSTSTGVAQHWGQCGGIGWTGPTTCASPYTCQELNPYYYQCL

SEQ ID NO: 54 - protein, 576 aa, unidentified
IRQRAGNHTVCNSQLCTWWHDNGEINTASMVQLGNVRQSHKYLVQVSIAGVNDFYDSFAYESIPRNGRGRIYSPWDPPNSDTLGSDVDDGITIETSAGINMAWSQFEYSTGVDVKILTRDGSRLPDPSGVKIRPTAISYDIRSSSDGGIVIRVPHDPNGRRFSVEFDNDLYTYRSDGSRYVSSGGSIVGVEPRNALVIFASPFLPDNMVPRIDGPDTKVMTPGPINQGDWGSSGILYFPPGVYWMNSNQQGQTPKIGENHIRLHPNTYWAYLAPGAYVKGAIEYSTKSDFYATGHGVLSGEHYVYQANPATYYQALKSDATSLRMWWHNNLGGGQTWYCQGPTINAPPFNTMDFHGSSDITTRISDYKQVGAFFFQTDGPQMYPNSQVHDVFYHVNDDAIKTYYSGVTVTRATIWKAHNDPIIQMGWDTRDVTGVTLQDLYIIHTRYIKSETYVPSAIIGASPFYMPGRSVDPAKSISMTISNLVCEGLCPALMRITPLQNYRDFRIQNVAFPDGLQANSIGTGKSIVPASSGLKFGVAISNWTVGGEQVTMSNFQSDSLGQLDIDVSYWGQWVIR

SEQ ID NO: 55 - protein, 379 aa, Aspergillus tubingensis
MKYSTIFSAAAAVFAGSAAAVGVSGSAEGFAKGVTGGGSATPVYPDTIDELVSYLGDDEARVIVLTKTFDFTDSEGTTTGTGCAPWGTASACQVAIDQDDWCENYEPDAPSVSVEYYNAGTLGITVTSNKSLIGEGSSGAIKGKGLRIVSGAENIIIQNIAVTDINAKYVWGGDAITLDDCDLVWIDHVTTARIGRQHYVLGTSADNRVSLTNNYIDGVSDYSATCDGYHYWAIYLDGDADLVTMKGNYIYHTSGRSPKVQDNTLLHAVNNYWYDISGHAFEIGEGGYVLAEGNVFQNVDTVLETYEGEAFTVPSTTAGEVCSTYLGRDCVINGFGSSGTFSEDSTSFLSDFEGKNIASASAYTSVASSVVANAGQGNL

SEQ ID NO: 56 - protein, 208 aa, Sodiomyces alcalophilus
RIPGFDISGWQPTTDFARAYANGDRFVYIKATEGTTFKSSAFSRQYTGATQNGFIRGAYHFAQPAASSGAAQARYFASNGGGWSKDGITLPGALDIEYNPNGATCYGLSQSAMVNWIEDFVTTYHGITSRWPVIYTTTDWWTQCTGNSNRFANRCPLWIARYASSVGTLPNGWGFYTFWQYNDKYPQGGDSNWFNGDASRLRALANGD

SEQ ID NO: 57 - protein, 863 aa, Aspergillus fumigatus
MRFGWLEVAALTAASVANAQELAFSPPFYPSPWADGQGEWADAHRRAVEIVSQMTLAEKVNLTTGTGWEMDRCVGQTGSVPRLGINWGLCGQDSPLGIRDSDLNSAFPAGTNVAATWDKTLAYLRGKAMGEEFNDKGVDILLGPAAGPLGKYPDGGRIWEGFSPDPVLTGVLFAETIKGIQDAGVIATAKHYILNEQEHFRQVGEAQGYGYNITETISSNVDDKTMHELYLWPFADAVRAGVGAVMCSYNQINNSYGCQNSQTLNKLLKAELGFQGFVMSDWGAHHSGVGAALAGLDMSMPGDISFDDGLSFWGTNLTVSVLNGTVPAWRVDDMAVRIMTAYYKVGRDRLRIPPNFSSWTRDEYGWEHSAVSEGAWTKVNDFVNVQRSHSQIIREIGAASTVLLKNTGALPLTGKEVKVGVLGEDAGSNPWGANGCPDRGCDNGTLAMAWGSGTAEFPYLVTPEQAIQREVISNGGNVFAVTDNGALSQMADVASQSSVSLVFVNADSGEGYISVDGNEGDRKNLTLWKNGEAVIDTVVSHCNNTIVVIHSVGPVLIDRWYDNPNVTAIIWAGLPGQESGNSLVDVLYGRVNPSAKTPFTWGKTRESYGAPLLTEPNNGNGAPQDDFNEGVFIDYRHFDKRNETPIYEFGHGLSYTTFGYSHLRVQALNSSSSAYVPTSGETKPAPTYGEIGSAADYLYPEGLKRITKFIYPWLNSTDLEDSSDDPNYGWEDSEYIPEGARDGSPQPLLKAGGAPGGNPTLYQDLVRVSATITNTGNVAGYEVPQLYVSLGGPNEPRVVLRKFDRIFLAPGEQKVWTTTLNRRDLANWDVEAQDWVITKYPKKVHVGSSSRKLPLRAPLPRVY

SEQ ID NO: 58 - protein, 1378 aa, Neobacillus novalis
SSDSTSASKTDFFSSFEKSDLQLTWTNTVETDANGKKMSSGIDGNVKRDLILGDITDKVVQVTASANNPPNEIDSKLIDGDPTTKWLAFEPTANIVLKLAEPVAVVKYALTSANDAKGRDPKNWTLYGSLDGTNWTAVDTREGEDFKDRFQRNMYDLKNTTKYLYYKLDITKNAGDSITQLAEISLSDGIEVPAPPPGDMKSLIGKGPTSSYTAKTNVGWTGLGALNYSGTHLSDGRAYSYNKLYDVDILVTPATELSYFIAPEFTDKNHNDYSSTYVSVDLAFSDGTYLHDLKAVDQYGVGLNPKDQGDSKYLYVNQWNTIKSTIGSVAAGKTIKRILVAYDNPKGPGAFRGSIDDIKIDGKPVQKAFGSPIDYVNILRGTQSNGSFSRGNNFPAVAIPHGFNFWTPTTNAGSSWIYQYHESNSVNNLPQIQAFSVSHEPSPWMGDRQTFQVMPSASTAATPNANRDSRALEFNHANEIAQPHYYSVKFENGIRTEMTPTDHAAMFKFTFTGATSNLIFDNVNNNGGLTIDAKSGEITGYSDVKSGLSTGATRLFVYAAFDKPVIKSGKLTGESRNNVTGYVRFDTSKDEDKVVTMKIATSLISVEQAKKNLEQEIGLNDTFEGLKEKAKTEWNKKLGIIEVEGASEDQLVTLYSNLYRLFLYPNSAFENVGTTTDPVYKYASPYSAATGQDTATTTGAKIVDGKTYVNNGFWDTYRTAWPAYSLLTPTFAGELIDGFVQQYRDGGWIARWSSPGFANLMPGTSSDVAFADAYLKGVTNFDVQSFYQSAIRNAEAVSPNAGTGRKGLTTSIFDGYTNTSTGEGLAWAMDGYINDFGIANLAKALKEKGDKSDPYYANYAADYQYFLNRAQNYVHMFNPSIEFFNGRTANGAWRSTPDNFNPAVWGSDYTETNGWNMAFHVPQDGQGLANLYGGKEGLATKLDQFFSTSETGLFPGSYGGTIHEMREARDVRMGMYGHSNQPSHHIAYMYDYAGQPWKTQEKVREALNRLYIGSAIGQGYSGDEDNGEMSAWYILSAMGFYPLKMGTPEYAIGAPLFKKATIHLENGKSIVINAPNNSKENKYVQSMKVNGKAYAKTSILHADIANGAVIDFEMGSKPSKWGSGDQDILQSITPGSTDGTSLSPLPLRDVTDRLIAAEKGAVTVSDEGNGQLLFDNTSNTQLSMKSKTPSIVYQFKEGKQNVKMYTLTSSKASQNEDPKSWVLKGSNDGKSWSVLDQRKNETFQWRQYTRAFTIQHPGKYSQYKLEITENAGAEVTTLAELELLGYDDVTNSYQAVYELMEQFKQSKDLTGPMAVQLNNSLTTSLDHFKKDHKDQAIKHLEDFLKHLNNKGLQDRISSKAKGVLSADANQLIVLLARD

SEQ ID NO: 59 - protein, 756 aa, Trichoderma atroviride
MKSLTAVVALLGAVAASPAVVRHHGRSALQPRANSSFWYAAMDHTGQFKGSAPYVDASYNVFVAVSPGDAGSLQNAIDSAGSGNRQNEWLASQPRVVYIPSGTYELSSTLNMRTDTILFGDATNPPVIKAAAGFSDNYLVNGQDPSTGDAGELSFAVGLKNVVLDTTAVDGSSSISALYWGVAQACQLQNVKITLAPSVNGKGHTGVQLGRGSTLALADIRIENGQTGIWHNGHQQALYKSIYFYKNTVGMLISGGNTISLLNPTFDSVGTGVSNTGGSPFIGIVDATSINSGVTFTTSVYPSIVIDNLTKDTDSDVAVIRGTTTVGASKNVVNYSYGNTVGANPVYGGVNGNTTRPSGVAPGGRIPAVAVPNYANNPVTDFVNVKDPSQNGGQTVKGDGSTDDSAALNKVLQFAATNNKIAYFPFGDYRVESTLLVPVGSQLVGEAWATISGGGDFFKDASSPKPVVQVGNEGDVGVAQIQDFRFTVSDVLPGAIIVQFNAAGSKPGDVALFNSLVTVGGTHGADALTNACTDASNECQAAFLGLHFTEGSSAYVENTWNWVADHITEGFSGGSNIAAKGGALVESTKGTWLNGLGSEHWWLYQLNLKAASNVAVTLLQSETNYDQGDNTKQVPPAPWTADVQGWGDPDFSWCDSTARCHMGLANYVNGGSDIYYYGSASWAFFSGPGYQGCAGSYQCQDYMHFISATPTNLQMYGMCSKDTSVALRLGDGTKINAQPDFTGGWSPGADIGRYTS

SEQ ID NO: 60 - protein, 450 aa, Trichoderma harzianum
MKLLPSLIGLASLASLAVAAPSLIPRVSPFSIAKPGGVDDIVITANNTLNGTYHSSTTVSKNVIQTRAQAGHLPIQLVNNFSGSQVNAYISGLDTDNRVVFVRGDGSLVYPSSGGSSVPVAISTPINIALPAQGQSITVNVPIVISSARIYFSVGDLQFFMVKIPNGDGLVQPSQFNLQDPSAGLLWGFVELTYTTDLAVYANISYVDFVGMILSMSLSATDGSATQTTKGLGSSALTQICQGLVQQASVDGFPWSSMCIANSAGTLVRALSPGDYSVINAAAFQNYWSAYVDQVWSQYTNTPLTINTQTSAGSVNCQVSGDTLNCNGDNRGYAKPAAGDIWGCNSGPFAIQSGDNAVHSAVVPRLCAAFVRSTLLLAGGNVQPGLGQSSYYTVSPTNHYSRLVHQFEIDGRGYAFPYDDVNPDGNENASGTLASGAPNVLTVYVGAPPS

SEQ ID NO: 61 - protein, 957 aa, Bacillus deramificans
MAKKLIYVCLSVCLVLTWAFNVKGQSAHADGSTTTIIVHYFRPAGDYQPWSLWMWPEGGSGAEYDFNGTDSYGEVANVSIPGNPSQVGIIVRTQDWTKDVSADRYIDLSKGHEVWLVQGNSQIFYNEKDAEDAAKPAVSNAYLDASNQVLVKLSQPFTLGEGASGFTVHDDTVNKDIPVTSVTDASLGQNVTAVLAGTFQHIFGGSDWAPDNHSTLLKKVNNNLYQFSGDLPEGNYQYKVALNDSWNNPSYPSNNIDLTVPTGGAHVTFSYVPSTHAVYDSINNPGADLPVNGSGVKTDLVTVTLGEDPDVSHTLSIQTDGYQAKQVISRNVLDSSQYYYSGDDLGNTYTHKATTFKVWAPTSTQVNVLLYNSATGSVTKTVPMTASGHGVWEATVNQNLENWYYMYEVTGQGSTRTAVDPYATAIAPNGTRGMIVDLAKTDPAGWNSDKHITPKNIEDEVIYEMDVRDFSIDPNSGMKNKGKYLALTEKGTKGPDNVKTGIDSLKQLGITHVQLMPVFAFNSVDETDPTQDNWGYDPRNYDVPEGQYATNANGTARIKEFKEMVLSLHREHIGVNMDVVYNHTFATQISDFDKIVPEYYYRTDDAGNYTNGSGTGNEIAAERPMVQKFIIDSLKYWVNEYHIDGFRFDLMALLGKDTMSKAASELHAINPGIALYGEPWTGGTSALPEDQLLTKGAQKGMGVAVFNDNLRNALDGNVFDSSAQGFATGATGLTDAIKNGVEGSINDFTSSPGETINYVTSHDNYTLWDKIALSNPNDSEADRIKMDELAQAVVMTSQGVPFMQGGEEMLRTKGGNDNSYNAGDTVNEFDWSRKAQYPDVFNYYSGLIHLRLDHPAFRMTTANEINSHLQFLNSPENTVAYELTDHVNKDKWGNIIVVYNPNKTAATINLPSGKWAINATSGKVGESTLGQAEGSVQVPGISMMILHQEVSPDHGKK

SEQ ID NO: 62 - protein, 325 aa, Talaromyces pinophilus
MHFLAALLAVLPLVSGSPVPEKRSGCALPSTYKWTSTGPLASPKSGLVALRDYSHVIYNGQHLVYGSTANTAGSYGSMNFGLFSDWSEMSSASQNTMSTGAVAPTIFYFAPKSVWILAYQWGPYAFSYRTSTDPSNANGWSSPQPLFTGTISGSSTGVIDQTVIGDSENMYLFFAGDNGHIYRASMPIGDFPGSFGSASTIVLSDSTNNLFEAVEVYTVEGQNQYLMIVEAIGANGRYFRSFTASSLGGTWTAQASTESNPFAGKANSGATWTNDISSGDLVRTNPDQTQTIDACNLQFLYQGRSTSSGGDYNLLPYQPGLLTLA

SEQ ID NO: 63 - protein, 625 aa, Clonostachys rosea
MLFKTAFLGLIATVNFVHGAAIGHAAEQTSLEKRAEAADRLVFCHFMIGIVGNRNSASQYDDDMRRAKAAGIDAFALNIGVDGYTDAQLDLAYKSAADNDMKVFISFDFNWFKTGEAATVGQKIAKYANQAAQLKVDNRVFASSFAGDGLDVAAMKNAAGVDVFFVPNFHPEQTANPDSIDGGFNWMAWPNDGNNKAPKPGSSISVEDGDNKYLSWLGTKPYMAPISPWFFTHFGPEVSFSKNWVFPGGALIFDRWNQILDKGFPLVEMITWNDYGESHHFGPLSSPHYDDGNSKWTNDLPHNGWLELSKPFIAAYKAKEKAVDKYITGDQIVYWYRRTLKGLDCDATDTTAGRPANNDSGNYFMGRPDGWELMDDVVYVATLLKEAGTLTVNSGGQSVEKEVPAGANLIQVPAAVGSQTFSLSRNGKVVLEDKSLMDISNICPCGLYNFNPYVGTVPPGESDPLQPDGLASLTIGLHVSTCQATPSLGTNPPISTTGGSPPPSSTGSSPPPSTTAGPTSTGGSVPSQTSSVPAPTSTGSSQPCNGGTNADGESGNYSGLCSFACSYGYCPPGPCKCTSNGTPGNPPSGDGRNGCPADGLGDGYKGLCSFACSHGYCPDTACKYC

SEQ ID NO: 64 - protein, 634 aa, Trichoderma harazianum
MLGVVRRLGLGALAAAALSSLGSAAPANVAIRSLEERASSADRLVFCHFMIGIVGDRGSSADYDDDMQRAKAAGIDAFALNIGVDGYTDQQLGYAYDSADRNGMKVFISFDFNWWSPGNAVGVGQKIAQYASRPAQLYVDNRPFASSFAGDGLDVNALRSAAGSNVYFVPNFHPGQSSPSNIDGALNWMAWDNDGNNKAPKPGQTVTVADGDNAYKNWLGGKPYLAPVSPWFFTHFGPEVSYSKNWVFPGGPLIYNRWQQVLQQGFPMVEIVTWNDYGESHYVGPLKSKHFDDGNSKWVNDMPHDGFLDLSKPFIAAYKNRDTDISKYVQNEQLVYWYRRNLKALDCDATDTTSNRPANNGSGNYFMGRPDGWQTMDDTVYVAALLKTAGSVTVTSGGTTQTFQANAGANLFQIPASIGQQKFALTRNGQTVFSGTSLMDITNVCSCGIYNFNPYVGTIPAGFDDPLQADGLFSLTIGLHVTTCQAKPSLGTNPPVTSGPVSSLPASSTTRASSPPVSSTRVSSPPVSSPPVSRTSSPPPPPASSTPPSGQVCVAGTVADGESGNYIGLCQFSCNYGYCPPGPCKCTAFGAPISPPASNGRNGCPLPGEGDGYLGLCSFSCNHNYCPPTACQYC

SEQ ID NO: 65 - protein, 248 aa, Salipaludibacillus agaradhaerens
MIKINKTIKILMLTLLMMSFAGAAYAHNPVTDEEVYHSFNSHDWQNWNMSDGWKNDDYFFGCHWSQNRVNFYGGQMELSLRTNYSYAPPYNYECAEYTTNNFYGYGLYEVSMKPAKVSGVISSFFTYTGPSYNGAPWDEIDIEFLGNDTTKVQFNYYTDGVGGNEILYDLGFDAADSYNTYAFDWQENYINWYVNGQLVATATENIPSNPSKIMMNIWNTYGIDEWAGRYYGEDANASYNWVRYTPNR

SEQ ID NO: 66 - protein, 408 aa, Trichoderma atroviride
MLSAYAFSLLVASASAWTPQSNAKVFSRDTEGVMRWLPGNDKFRGVNLGSQFIIEPWMASDEFSGMGCGGLNDEWSCVQSLGQDAADAAFQKHWDSWITQDDITQIKNLGLNTVRIPVGFWIREDLVQQGEFFPRGGIQYLDRLVGWCNDAGIYVIMDLHGGPGAQFPNQQYTGHGVSQPGFYTEANYERAANFLEWMTERIHTNATYASVGMLEVINEPVHSGDFPSQAADMVNTYYPLAWNRIRDTESKLGVSDDKRLHIQFMASAWGSGDPTSALPSTDFAAFDDHRYLKWDTSVTATKDGYLNAACSDKRDDNVIVGEWSISVADNVQDNDELGIKNRSDQADWYQKFWAAQVLAFEKSAGWVFWTWKCNWITGYDDWRWCYQSAVAAGAIPKDAGSAASINPC

SEQ ID NO: 67 - protein, 727 aa, unidentified
ATSFYYPNMDHVNAPRGFAPDLDGDFNYPIYQTVNAGDGNALQNAITTDGKGGSRHPQWFASQPRVVYIPPGTYTISKTLRFNTDTILMGDPTNPPIIKAAAGFSGDQTLISAQDPSTNEKGELSFAVAIKNVVLDTTAIPGGNSFTALWWGVAQAAHLQNVRITMSSSSGGNGHTGIRMGRGSTLGLADVRVERGQNGIWIDGHQQASFHNIYFFQNTIGMLISGGNTFSIFSSTFDTCGTGISNTGGSPWIALIDAKSINSGVTFTTNQFPSFMIENLTKDNGTPVVVVRGSTLVGASSHVNTYSYGNTVGRNPTYGDVTSSNTRPGALAPGGRYPYVAPPTYGDLPISSFLNVKDPAQNGGRTVKGDNTIDEAATLNAILELAASQNKVAYFPFGKYRVDSTLFIPKGSRIVGEAWATITGNGNFFKNENSPQPVVSVGRAGDVGIAQIQDMRFTVNDVLSGAIVVQFNMAGNNPGDVALWNSLVTVGGTRGASALANACTNNSNECKGAFIGIHVAKGSSPYIQNVWNWVADHIAENFSGGTSIAGKGGILVQSTKATWLYAIGSEHWWLYQLNLHNAANVVVSLLQAETNYHQGANTQQIPPAPWVANIGTWGDPDFAWCNGGDKRCRMGPANFINGGSNIYTYASAAWAFFSGPGQGCAQFECQQTMHWIASTPSNLQAFGLCSKDSVNTLRLGDGTFINTQNGYTGGWTPGGGDVGRYTT

SEQ ID NO: 68 - protein, 361 aa, Alkalihalobacillus bogoriensis
MKNLLIAFLLILFVTGCAEPEQQQTEEATDNIEETQEELEVNEEPIVIADNLDIPWSIEKAGDTFYITERGGHIVKVENGAMERQTVHLEQELSSVPEAGLLGFVLNPNFPDTNLAYAYYTYEKNADPYNRIVTLRYENDQWQEENILLDNIPSGTYHHGGRLKIGPDGFLYATTGDASIPEIAQDIDSLGGKIIRVELDGAIPEDNPFANSSIYSFGHRNPQGLTWAIDGSFYSSEHGSSANDEINEIEPGLNYGWPIIQGDEEREGMVSPLFTSGNESTWAPSGMDYYNNRLYVAALRGAAIIEFNLETGEHQEIITDLGRIRDIKIEDDTLYFISNNTDGRGNPEEDDDKLYRLSLQE

SEQ ID NO: 69 - protein, 390 aa, Talaromyces pinophilus
MTFKTSYLASALLLLTARASAQTANAEAAFATLQEWYDPVTGLWNTAGWWNGANAMTVIAELAAVDASIVQDAISIFETTFSVAPSVNPSNGVEKSVGTNGLIQTTYPAGWPNNTISKRAIQDSTDPTVWLDGANDDAEWWGLAWVAAYDVTGNETYLNLAEGIFNEIAAGWGTNCGNGGIYWETTNHYVNAIASELFISLAAHLANRVPANAATYTAWAEEAWNWFASTGMINANGTINDGLTTDCVNNGQPVWSYNQGVILGGLTELNKISPNESYIESANSIAQAAIAALADSNYVIHDYACEPSDCEPNGTQFKGIFMRNLLLLQRASPNDLYSKVIEACAASIWANDRDTTTGELGVNWAGPFVGGDATTQSSAMGALVAAISVE

SEQ ID NO: 70 - protein, 317 aa, Fusarium solani
MVAFSRIAVTTLALGGSTAQAKPATAARATGLADFKPGVQWEICIHHPIKHDSAADLIPTKAKVWDIDMGHAQEFPNMIPMLKSAGKFVICYFNAGALQDWDDDKSKFPKEVIGHSLSYPYDSEEWYLDIRDSRVLELQTARLDIAAKIGCDAVDPDNVDAWQQDDEDPTGFKLKSSDYTNYLKNLAKYAHSIKTKDGQPLLVGQKNAPEIAEDLVSTLDFAVLESCRGNSDPNEESWPFCEDFQTYIDAGKPVLQIEYPPSVEKTGKVSASDNKYYCTAEDEDKGFSKIIKWASAQLDGWGQYCGEEPFRTPAAKY

SEQ ID NO: 71 - protein, 248 aa, Ostropa barbara
MVLPSSILLPLYIYPSASTPSPWQPLYDSLGTHSNIHFDIIINPGSGPLLVPPTDIQLSDYMPAIAKLRTYKNVDLLGYVHTSWGLASQSDLLANISRYATWETVNGQDVHLDGLFFDEVVTAYDETDYDLLSTATTLARTTPNFKKIVFNPGQPADERYYALANYLTVFEGTAAAFDSSTVAALDVATRANSSVVIHDFTGTEAEQAILVNELVGLGLGSVDVTTLADYNDWSALWADFTGEVGDAV

SEQ ID NO: 72 - protein, 272 aa, Stenocarpella maydis
MHSFYLFPAVLAATAASATKILLPLYVYPTTGAGWTSIYNAIETHPSIDFQIVLNPSSGPGGSTPGYNTHWISAVSKLHSYDNVDTLGYVSAGYGSRDLDEITTDIKDWNQWNHYTGADITIDGIFFDETPNWNGTRGANDVSFMQQVTKLADRGGYTKVFNLGQACSHDEYFQIADTVVMFEGEAESYNSTVLDDVVESGVADRSAILIHHFEGSGLTSGFAVRWVIDLVNRGLGSFAIINTDWTQANSDVAPMGISILADMLESVLDHQY

SEQ ID NO: 73 - protein, 297 aa, Urnula criterium
MTSKILSLALATLNVAYAATTICSTKCPYTNLGSSDAVTKSDWWKPALGATWQVVLTPADDDAGPQLTDDYEVYDLDVFDVDASVFKSLQAKDKKVICYFSAGSYEDWREDCGCFKSSDLGSDLDGWEGEAWLNTDSQNVRNIMAARLDVAVEKGCNGVDPDNVDGYDNDNGLGLSESTAKSYLQFLSDEAHSRGLAIGLKNAGSIAADVVDSMEWEVNEECIAQENCEDYKTFVDAGKPVFNIEYPPEDHIDDAWTEAEIEERCAQKADASNGATKFSTVLKNHENVDEWIRTCSE

SEQ ID NO: 74 - protein, 267 aa, Bjerkandera fumosa
MFTFAKIFTTACSLAGLFGSTFGTGIIVPLYVWPGDPNVCSGWTPLFNVISTTPSLTFYVVINPNSGPGDPSTQPVDSYSTCIQQLKGAKSGSNLRVLGYVATGGGSSTTVVRDITTYSGWNAAYRPDGIFFDQGSTASSQVSTYAGWANQARQILGSSTYTIVNPGQPPQDNAYFNSFDQIVTREDFLAQFSPSQLSITPASPAAKQAVILTDAFTFPSSVVSQLVSGNHIGSLWVTDDTQANQQNPYDSLPSYLTTFVNAVVADN

SEQ ID NO: 75 - protein, 251 aa, Pseudoplectania vogesiaca
MSLSLSPVATTGVLLPLYIYPAPSTAWDPLYSAITNNPSVNFYVIINPDSGPGGDEFPASDYISAIQKLKTYDTVTPLGYVHTTFGDQTTSAVEANITKYKNWDTYSTTSPISVDGIFFDEAPSSAADVSYMTTLSSSAKTTFGTGRDFVVFNPGSIVDPGYFNAADAIVIFENTEATYSESVFSSQSGGTSRQKAAIIHDFTGSESEQTSVVEGMVNQQAGLVYITDQSSYNSFSGLWSSFVSALQAAIA

SEQ ID NO: 76 - protein, 349 aa, Lysobacter gummosus
PRADARQALNPRAIAFYYNWYGSPKLDGAPLHWAHDVLRENDRDRTTKRLPGNGDISANFYPQLGEYSSADPAVIERHMAMIASARIGVIAVTWLGVDDPSFKSLRPLFEAAQRHGVRICFQIEPVARKTAADARASIRYLVETFGAHPAFYRDPVSKRPLFFVYDSYVIDAKDWAQVLGRDGADSIRGTAFDADVLGLWVGADEHAFFEHSGFDGFYTYFASRGFSYGATPEHWPELQRWAKQHGKLFIPSVGPGYIDTRVRPWNAKNTKDRDGGRYYDAMFQAAIDSGAPFIGITSFNEWHEGTQIEPAVAFKHEAFEYLDYAPRPPDYYLERTAHWLQRYKPAAAQ

SEQ ID NO: 77 - protein, 348 aa, Chryseobacterium viscerum
PRADARQALNPRAIAFYYNWYGSPKLDGAPLHWAHDVLRENDRDRTTKRLPGNGDISANFYPQLGEYSSADPAVIERHMAMIASARIGVIAVTWLGVDDPSFKSLRPLFEAAQRHGVRICFQIEPVARKTAADARASIRYLVETFGAHPAFYRDPVSKRPLFFVYDSYVIDAKDWAQVLGRDGADSIRGTAFDADVLGLWVGADEHAFFEHSGFDGFYTYFASRGFSYGATPEHWPELQRWAKQHGKLFIPSVGPGYIDTRVRPWNAKNTKDRDGGRYYDAMFQAAIDSGAPFIGITSFNEWHEGTQIEPAVAFKHEAFEYLDYAPRPPDYYLERTAHWLQRYKPAKK

SEQ ID NO: 78 - protein, 686 aa, Effusibacillus pohliae
SSSASVKGDVIYQIIIDRFYDGDTTNNNPAKSYGLYDPTKSKWKMYWGGDLEGVRQKLPYLKQLGVTTIWLSPVLDNLDTLAGTDNTGYHGYWTRDFKQIEEHFGNWTTFDTLVNDAHQNGIKVIVDFVPNHSTPFKANDSTFAEGGALYNNGTYMGNYFDDATKGYFHHNGDISNWDDRYEAQWKNFTDPAGFSLADLSQENGTIAQYLTDAAVQLVAHGADGLRIDAVKHFNSGFSKSLADKLYQKKDIFLVGEWYGDDPGTANHLEKVRYANNSGVNVLDFDLNTVIRNVFGTFTQTMYDLNNMVNQTGNEYKYKENLITFIDNHDMSRFLSVNSNKANLHQALAFILTSRGTPSIYYGTEQYMAGGNDPYNRGMMPAFDTTTTAFKEVSTLAGLRRNNAAIQYGTTTQRWINNDVYIYERKFFNDVVLVAINRNTQSSYSISGLQTALPNGSYADYLSGLLGGNGISVSNGSVASFTLAPGAVSVWQYSTSASAPQIGSVAPNMGIPGNVVTIDGKGFGTTQGTVTFGGVTATVKSWTSNRIEVYVPNMAAGLTDVKVTAGGVSSNLYSYNILSGTQTSVVFTVKSAPPTNLGDKIYLTGNIPELGNWSTDTSGAVNNAQGPLLAPNYPDWFYVFSVPAGKTIQFKFFIKRADGTIQWENGSNHVATTPTGATGNITVTWQN

SEQ ID NO: 79 - protein, 519 aa, Evansstolkia leycettana
TSGSQDDIAVLRRACPDYTSYSTVPHAPYSGGPLNLPFQRPAEACRTFTSPAVEQVIQDVTSRMVDKDMAQLFRNAFPNTLDTTIRWHTNGSTTTSTRRKSKKDAAQWQGAQTFVVTGDINAEWLRDSTNQLAGYQALAKKDKSLYTLILGAINTQVEYVIQSPYCNAFQPPPPSGIRPTSNGQGDTVHPAYEPSFVFECKYELDSLAHFLTLGTQFYENTGSTEFLTSRWYTALNTLLDVLDAQSQPTFNANNQYVTNQYTFQRQTTAGTETLSLRGIGNPLNSGTGLIRSAFRPSDDATILGFFIPPNAMMSVQLKKIAEVIKAAGGDSSLVKKLQQRGHDLEQSVWEHGVVDHPKYGKVFAFEVDGYGSRILMDDANIPSLLSLPLLGFVDKNDETYQNTRKMILDKSGNPYYLTGSDFHGIGGPHVGLENAWPMSLLVQAQTTDSDSEIAECINLVRNSSRLGLVHESINVNNIRDYTRPWFAWANSLFAQTILKIAAEKPHLVFGSDASPYVVE

SEQ ID NO: 80 - protein, 188 aa, Nocardiopsis sp.
ADIIGGLAYTMGGRCSVGFAATNAAGQPGFVTAGHCGRVGTQVTIGNGRGVFEQSVFPGNDAAFVRGTSNFTLTNLVSRYNTGGYATVAGHNQAPIGSSVCRSGSTTGWHCGTIQARGQSVSYPEGTVTNMTRTTVCAEPGDSGGSYISGTQAQGVTSGGSGNCRTGGTTFYQEVTPMVNSWGVRLRT

SEQ ID NO: 81 - protein, 564 aa, Trametes hirsuta
MVATSLLVASLFTLALGTPTGRNLKLHEAREDLPAGFSLRGAASPDTTLKLRIALVQNNFAELEDKLYDVSTPSSANYGNHLSKEEVEQYIAPAPESVKAVNAWLTENGLDAHTISPAGDWLAFEVPVSKANELFDADFSVFTHDESGLEAIRTLAYSIPAELQGHLDLVHPTVTFPNPNAHLPVVRSTQPIRNLTGRAIPASCASTITPACLQAIYGIPTTKATQSSNKLAVSGFIDQFANKADLKSFLAQFRKDISSSTTFSLQTLDGGENDQSPSEAGIEANLDIQYTVGLATGVPTTFISVGDDFQDGNLEGFLDIINFLLGESNPPQVLTTSYGQNENTISAKLANQLCNAYAQLGARGTSILFASGDGGVSGSQSAHCSNFVPTFPSGCPFMTSVGATQGVSPETAAAFSSGGFSNVFGIPSYQASAVSGYLSALGSTNSGKFNRSGRGFPDVSTQGVDFQIVSGGQTIGVDGTSCASPTFASVISLVNDRLIAAGKSPLGFLNPFLYSSAGKAALNDVTSGSNPGCSTNGFPAKAGWDPVTGLGTPNFAKLLTAVGL

SEQ ID NO: 82 - protein, 316 aa, Bacillus licheniformis
LVSKKSVKRGLITGLIGISIYSLGMHPAQAAPSPHTPVSSDPSYKAETSVTYDPNIKSDQYGLYSKAFTGTGKVNETKEKAEKKSPAKAPYSIKSVIGSDDRTRVTNTTAYPYRAIVHISSSIGSCTGWMIGPKTVATAGHCIYDTSSGSFAGTATVSPGRNGTSYPYGSVKSTRYFIPSGWRSGNTNYDYGAIELSEPIGNTVGYFGYSYTTSSLVGTTVTISGYPGDKTAGTQWQHSGPIAISETYKLQYAMDTYGGQSGSPVFEQSSSRTNCSGPCSLAVHTNGVYGGSSYNRGTRITKEVFDNLTNWKNSAQ

SEQ ID NO: 83 - protein, 274 aa, Bacillus sp.
AQTVPYGIPLIKADKVQAQGFKGANVKVAVLDTGIQASHPDLNVVGGASFVAGEAYNTDGNGHGTHVAGTVAALDNTTGVLGVAPSVSLYAVKVLNSSGSGSYSGIVSGIEWATTNGMDVINMSLGGASGSTAMKQAVDNAYARGVVVVAAAGNSGSSGNTNTIGYPAKYDSVIAVGAVDSNSNRASFSSVGAELEVMAPGAGVYSTYPTNTYATLNGTSMASPHVAGAAALILSKHPNLSASQVRNRLSSTATYLGSSFYYGKGLINVEAAAQ

SEQ ID NO: 84 - protein, 269 aa, Lederbergia lenta
AQSVPWGISRVQAPAAHNRGLTGSGVKVAVLDTGISTHPDLNIRGGASFVPGEPSTQDGNGHGTHVAGTIAALNNSIGVLGVAPSAELYAVKVLGASGSGSVSSIAQGLEWAGNNGMHVANLSLGSPSPSATLEQAVNSATSRGVLVVAASGNSGAGSISYPARYANAMAVGATDQNNNRASFSQYGAGLDIVAPGVNVQSTYPGSTYASLNGTSSATPHVAGAAALVKQKNPSWSNVQIRNHLKNTATSLGSTNLYGSGLVNAEAATR

SEQ ID NO: 85 - protein, 382 aa, Alkalihalobacillus clausii
MMRKKSFWLGMLTAFMLVFTMAFSDSASAAEEAKEKYLIGFNEQEAVSEFVEQVEANDEVAILSEEEEVEIELLHEFETIPVLSVELSPEDVDALELDPAISYIEEDAEVTTMAQSVPWGISRVQAPAAHNRGLTGSGVKVAVLDTGISTHPDLNIRGGASFVPGEPSTQDGNGHGTHVAGTIAALNNSIGVLGVAPSAELYAVKVLGASGSGSVSSIAQGLEWAGNNGMHVANLSLGSPSPSATLEQAVNSATSRGVLVVAASGNSGAGSISYPARYANAMAVGATDQNNNRASFSQYGAGLDIVAPGVNVQSTYPGSTYASLNGTSSATPHVAGAAALVKQKNPSWSNVQIRNHLKNTATSLGSTNLYGSGLVNAEAATR

SEQ ID NO: 86 - protein, 269 aa, Alkalihalobacillus clausii
AQSVPWGISRVQAPAAHNRGLTGSGVKVAVLDTGISTHPDLNIRGGASFVPGEPSTQDGNGHGTHAAGTIAALNNSIGVLGVAPSAELYAVKVLGASGSGSVSAIAQGLEWAGNNGMHVANLSLGSPSPSATLEQAVNSATSRGVLVVAASGNSGAGSISYPARYANAMAVGATDQNNNRASFSQYGAGLDIVAPGVNVQSTYPGSTYASLNGTSMATPHVAGAAALVKQKNPSWSNVQIRNHLKNTATSLGSTNLYGSGLVNAEAATR

SEQ ID NO: 87 - protein, 311 aa, Bacillus sp.
AVPSTQTPWGIKSIYNDQSITKTTGGKGIKVAVLDTGVYTSHLDLAGSAEQCKDFTQSNPLVDGSCTDRQGHGTHVAGTVLAHGGSNGQGVYGVAPQAKLWAYKVLGDKGEGYSDDIAAAIRHVADEASRTGSKVVINMSLGSSAKDSLIASAVDYAYGKGVLIVAAAGNEGPKPNTIGYPAGFVNAVAVAALENVQEKGTYRVADFSSRGNPATAGDYIIQERDIEVSAPGASVESTWYTGGYNTISGTSMATPHVAGLAAKIWSANTSLSHSQLRTELQNRAKVYDIKGGIGAGPGDDYASGFGYPRVK

SEQ ID NO: 88 - protein, 300 aa, Bacillus sp.
AATTGTGTTLKGKTVSLNISSESGKYVLRDLSKPTGTQIITYDLQNREYNLPGTLVSSTTNQFTTSSQRAAVDAHYNLGKVYDYFYQKFNRNSYDNKGGKIVSSVHYGSRYNNAAWIGDQMIYGDGDGILFSPLSGSLDVTAHEMTHGVTQETANLNYENQPGALNESFSDVFGYFNDTEDWDIGEDITISQPALRSLSNPTKYGQPDNFKNYKNLPNTPAGDYGGVHTNSGIPNKAAYNTITKIGVNKAEQIYYRALTVYLTPSSTFKDAKAALIQSARDLYGSQDAASVEAAWNAVGL

SEQ ID NO: 89 - protein, 378 aa, Aspergillus oryzae
MGVNFKVLALSALATISHASPLLYPRATDSNVTYVFTNPNGLNFTQMNTTLPNVTIFATGGTIAGSSADNTATTGYKAGAVGIQTLIDAVPEMLNVANVAGVQVTNVGSPDITSDILLRLSKQINEVVCNDPTMAGAVVTHGTDTLEESAFFLDATVNCRKPVVIVGAMRPSTAISADGPLNLLQSVTVAASPKARDRGALIVMNDRIVSAFYASKTNANTVDTFKAIEMGNLGEVVSNKPYFFYPPVKPTGKTEVDIRNITSIPRVDILYSYEDMHNDTLYSAIDNGAKGIVIAGSGSGSVSTPFSAAMEDITTKHNIPIVASTRTGNGEVPSSAESSQIASGYLNPAKSRVLLGLLLAQGKSIEEMRAVFERIGVA

SEQ ID NO: 90 - protein, 361 aa, Aspergillus niger
SPLLYSRTTNETFVFTNANGLNFTQMNTTLPNVTIFATGGTIAGSDSSSTATTGYTSGAVGVLSLIDAVPSMLDVANVAGVQVANVGSEDITSDILISMSKKLNRVVCEDPTMAGAVITHGTDTLEETAFFLDATVNCGKPIVIVGAMRPSTAISADGPFNLLEAVTVAASTSARDRGAMVVMNDRIASAYYVTKTNANTMDTFKAMEMGYLGEMISNTPFFFYPPVKPTGKVAFDITNVTEIPRVDILFSYEDMHNDTLYNAISSGAQGIVIAGAGAGGVTTSFNEAIEDVINRLEIPVVQSMRTVNGEVPLSDVSSDTATHIASGYLNPQKSRILLGLLLSQGKNITEIADVFALGTDA

SEQ ID NO: 91 - protein, 494 aa, Bacillus licheniformis
MKLIKNASFIISFLAAAGIYFLLGTVAASAANEDYPEQMIRLESSSGLNITPAGNQDNAPLTAKQTSGEKEERWRLDTSDGKQFKIRNMDSGKIIIPAHYALSDNNPAVVYYDNSRKEELWNIIGADKDGNGDFITYKIVSAQNSSLALTLDGSGVKLAKYTGSSVQKWKLPSDGLEGFAGYARETNGKQKTGTTGGLLGKVVYVNNLGELKANIEDSTPRTIVVSSNIGASAKTVLTVGANKTIIGSYEKHKLNNIYFKTKADSGNVIFKNLVIAHDASINENNDIPVYITDSRNYWIDHVTFQGHSYTANGHDLDKLLYVGAKADYVTLSHSTFTDHRYGLILGWPQDDKQYHSIYNGYPRMTISHNRFENLYVRAPGLMRYGYYHVKSNYINNYHLGFTITTLAKIYSEANYFGTGNEKGILDDYGDGAFKDVGSYPAIKGQKSPETSWTPSSNYSYRTMKAGNAKAFAKRYAGAQRTALYYANYSQFKKD

SEQ ID NO: 92 - DNA, 11137 bp, Aspergillus niger
  source 1..11137: mol_type = unassigned DNA
gctgagggtttaatcctcacacaggaaacagctatgaccatgattacgccaagcttccgttaaattgccgtcgtcagccgttaaattaccgattaatcccgataaatttccgagatctccgttaaattgccgtcgttcaccgttaaattaccgaaatttaccgataaatttccggatctccgttaaattgccgttcgcagccgttaaattaccggggacgaccgataaatttccgcgatgaattcatggtgttttgatcattttaaatttttatatggcgggtggtgggcaactcgcttgcgcgggcaactcgcttaccgattacgttagggctgatatttacgtaaaaatcgtcaagggatgcaagaccaaaccgttaaatttccggagtcaacagcatccaagcccaagtccttcacggagaaaccccagcgtccacatcacgagcgaaggaccacctctaggcatcggacgcaccatccaattagaagcagcaaagcgaaacagcccaagaaaaaggtcggcccgtcggccttttctgcaacgctgatcacgggcagcgatccaaccaacaccctccagagtgactaggggcggaaatttatcgggattaatttccactcaaccacaaatcacagtcgtccccggtaatttaacggctgcagacggcaatttaacggcttctgcgaatcgcttggattccccgcccctggccgtagagcttaaagtatgtcccttgtcgatgcgatgtatcacaacatataaatactggcaagggatgccatgcttggagtttccaactcaatttacctctatccacacttctcttccttcctcaatcctctatatacacaactgggggcagtgagagcgatcaatcctctatatacacaactggggatccaccatgatgcagactctccttgtgagctcgcttgtggtctccctcgctgcggccctgccacactacatcaggagcaatggcattgaagccagcctcctgactgatcccaaggatgtctccggccgcacggtcgactacatcatcgctggtggaggtctgactggactcaccaccgctgctcgtctgacggagaaccccaacatcagtgtgctcgtcatcgaaagtggctcctacgagtcggacagaggtcctatcattgaggacctgaacgcctacggcgacatctttggcagcagtgtagaccacgcctacgagaccgtggagctcgctaccaacaatcaaaccgcgctgatccgctccggaaatggtctcggtggctctactctagtgaatggtggcacctggactcgcccccacaaggcacaggttgactcttgggagactgtctttggaaatgagggctggaactgggacaatgtggccgcctactccctccaggctgagcgtgctcgcgcaccaaatgccaaacagatcgctgctggccactacttcaacgcatcctgccatggtaccaatggtactgtccatgccggaccccgcgacaccggcgatgactattctcccatcgtcaaggctctcatgagcgctgtcgaagaccggggcgttcccaccaagaaagacttcggatgcggtgacccccatggtgtgtccatgttccccaacaccttgcacgaagaccaagtgcgctccgatgccgctcgcgaatggctacttcccaactaccaacgtcccaacctgcaagtcctgaccggacagtatgttggtaaggtgctccttagccagaacggcaccacccctcgtgccgttggcgtggaattcggcacccacaagggcaacacccacaacgtttacgctgagcacgaggtcctcctggccgcgggctccgctgtctctcccacaatcctcgaatattccggtatcggaatgaagtccatcctggagccccttggtatcgacaccgtcgttgacctgcccgtcggcttgaacctgcaggaccagaccaccgctaccgtccgctcccgcatcacctctgctggtgcaggacagggacaggccgcttggttcgccaccttcaacgagacctttggtgactattccgaaaaggcacacgagctgctcaacaccaagctggagcagtgggccgaagaggccgtcgcccgtggcggattccacaacaccaccgccttgctcatccagtacgagaactaccgcgactggattgtcaaccacaacgtcgcgtactcggaactcttcctcgacactgccggagtagccagcttcgatgtgtgggaccttctgcccttcacccgaggatacgttcacatcctcgacaaggacccctaccttcaccacttcgcctacgaccctcagtacttcctcaacgagctggacctgctcggtcaggctgccgctactcaactggcccgcaacatctccaactccggtgccatgcagacctacttcgctggggagactatccccggtgataacctcgcgtatgatgccgatttgagcgcctggactgagtacatcccgtaccacttccgtcctaactaccatggcgtgggtacttgctccatgatgccgaaggagatgggcggtgttgttgataatgctgcccgtgtgtatggtgtgcagggactgcgtgtcattgatggttctattcctcctacgcaaatgtcgtcccatgtcatgacggtgttctatgccatggcgctaaaaatttcggatgctatcttggaagattatgcttccatgcagtgatgatgcgcggcgcggctgggtatcgcagacactgctggcggtagacaatcaatccatttcgctatagttaaaggatggggatgagggcaattggttatatgatcatgtatgtagtgggtgtgcataatagtagtgaaatggaagccaagtcatgtgattgtaatcgaccgacggaattgaggatatccggaaatacagacaccgtgaaagccatggtctttccttcgtgtagaagaccagacagacagtccctgatttacccttgcacaaagcactagaaaattagcattccatccttctctgcttgctctgctgatatcactgtcattcaatgcatagccatgagctcatcttagatcctaagtcctcagcgtgatttaaaacgccattgctatgatgcttgaagagtgccggatatatcggcatctaacttaggatttgtcttacgtacaatatttatgacctgtggtgaaacctgaggcaacaagggggcgcgatttaccagactggcgttcacataccaatacagtgcttaattgtaggtctcatgggtggaatgagatgaccttccctttcatctattcttaagaggaacagggatggtacccacaccataccccgaagagctcgtgatgtaatagaccctttcgtagtatgcgggtttttattgagatgccgatatgcaaacttgtagtaagactaataataacaggtgcaattaattgaatttggggcctgttaagcttttcgtccgaccaccagtgacgtccgtccgataagccgggaacgatcgataaggaggctatcccgtcgatcctgactaaccttttccagttgttccttaactttgcaccatctccgcggaggaatccctgacccaatcttatggtgaggtgctatcgtccttatcaatccctgtcacgattgccgataacccgtccacatccgatcatggagattaccattgggtgtgtcgctgcatctgctgcgaaaccgcttcgatgaccatcaaccatgaggtgattcgatagtcaaacatctcgccacgacctcatggtgtccacggagatgagaggcccgatcctggatcttggcaccagtagggtcttgccatatcggatgatagatcatgggggacatactccttgataaataaaaacgtccgccaacaccgtgcgttgggcgttgaatctcttccacagtgctatccatcccggacacaatgcctctcctagaagcgcccaggaatgggggcgcagtcaacaatggcgtccttagcggggtgtcgcattctcagagctttggcattgacacagagagtcacttggatgaccctaacagacgccaacagatagtggtggtgggactgggaatggtggctatttccttcctgtaggtgcaccgaagggggacgaggcgatggtcaataatacagttcgggtactgacgataccccccttctccgtatagtgagaaactggtcaagcaagattcagagaggagaaagtacgatatcgttgtgatcggcgaagaacctcacgttgcttacaaccgagtcggcctttcctcgtttttcgaacatcgcaatatcgaggacctctacctcaacccgaaagaatgggtgagtatatcacagctttccctgcgaacttagtgcagcattcgtgctgacgtcaatggattaatccattagtacggatcgttcaaagatcgatcgttcgactatcatctgaacaccagagtaaccgatatatttcctgaccgcaagacggtaaaaacctcaacgggtgacataatcgcctacgatcttcttgttctcgctaccggctctgatgcggtgcttcccactcacactcccggctatgacgccaacggggtttttgtctacagaacgatatcggacctcgagcgccttatcgaatttgcctctaatcacaagggcgagacggcaactactgtcggaggtggcctgctgggactcgaagctgccaaagcaatgacggatctagaagatttcggcaaggtcaagctcattgaccgcaacaagtgggtgctagcaagacaactagacggcgatgccggtaccctagtgacgcggaaaatcagagaactgggcttggatgtgatgcaccagaagcgagtagcgaaaattaagacggatgacaacaacaatgtcacgggtatcgtctttgaggatggggaagaaatagattgctgctgcgtctgttttgctgtacgccgtctaatctcatctcacgtactttcagtttgctaacattacgtatagatcggagtacgacctagagacgagttggggacgactgctggtattcagtgcgcttcacggggtgggtttgttatcaatgaaaggtaacaaccatcgttatgttaagtcttctatcatctaatctgatcttatagtctgcaaacttcgattcccgagatttacgctatcggagagtgtgcaagctgggaaaaccagacgtttggtattattgcacctggcattgaaatggcagatgtgctagcgttcaatttgaccaatcccgataaggaaccaaggagcttcagaagaccggatttaagcactaagctgaagctcttgggagtggatgtcgccagttttggtgacttttttgcggatcgcgatggccccaagttcttgccaggccgtcgaccatcagtcgcaaccattccgcgggtgaaagacacgacggaaaaggagtcaccagtgaaggctctcacgtacaaggatccttttggtggtgtctataagaagtatctattcactatggacggcaaatacctacttggaggaatgatgatcggtgatacaaaggactatatcaaactgaaccaaatggtgaagagccaaaaagagctcgaagttcctccgagccagttcattctgggagctcaaaatggtggggaagaaaacggtgacgacctgtgagctttctctcagatgtccgtgtataacgggtctgctaactatcattcgtacagagccgacgatacccaagtttgctcgtgtcacaacgttaccaaaggtgacatcgtcgaaagtgtcaagagtggcacatgcaagtcaattggagaggtaaagtcatgcacaaaggcaggcactggctgtggaggctgtatgccgttagtgcaatcaattttcaataagaccatgcttgatatgggccaggaggtttcgaataactgtaggtatccttgagctgtttcctgtgtgaaattgttatccgctcacaattccacacaacatacgagccggaagcataaagtgtaaagcctggggtgcctaatgagtgagctaactcacattaattgcgttgcgctcactgcccgctttccagtcgggaaacctgtcgtgccagctgcattaatgaatcggccaacgcgcggggagaggcggtttgcgtattgggcgctcttccgcttcctcgctcactgactcgctgcgctcggtcgttcggctgcggcgagcggtatcagctcactcaaaggcggtaatacggttatccacagaatcaggggataacgcaggaaagaacatgtgagcaaaaggccagcaaaaggccaggaaccgtaaaaaggccgcgttgctggcgtttttccataggctccgcccccctgacgagcatcacaaaaatcgacgctcaagtcagaggtggcgaaacccgacaggactataaagataccaggcgtttccccctggaagctccctcgtgcgctctcctgttccgaccctgccgcttaccggatacctgtccgcctttctcccttcgggaagcgtggcgctttctcatagctcacgctgtaggtatctcagttcggtgtaggtcgttcgctccaagctgggctgtgtgcacgaaccccccgttcagcccgaccgctgcgccttatccggtaactatcgtcttgagtccaacccggtaagacacgacttatcgccactggcagcagccactggtaacaggattagcagagcgaggtatgtaggcggtgctacagagttcttgaagtggtggcctaactacggctacactagaaggacagtatttggtatctgcgctctgctgaagccagttaccttcggaaaaagagttggtagctcttgatccggcaaacaaaccaccgctggtagcggtggtttttttgtttgcaagcagcagattacgcgcagaaaaaaaggatctcaagaagatcctttgatcttttctacggggtctgacgctcagtggaacgaaaactcacgttaagggattttggtcatgagattatcaaaaaggatcttcacctagatccttttaaattaaaaatgaagttttaaatcaatctaaagtatatatgagtaaacttggtctgacagttaccaatgcttaatcagtgaggcacctatctcagcgatctgtctatttcgttcatccatagttgcctgactccccgtcgtgtagataactacgatacgggagggcttaccatctggccccagtgctgcaatgataccgcgagacccacgctcaccggctccagatttatcagcaataaaccagccagccggaagggccgagcgcagaagtggtcctgcaactttatccgcctccatccagtctattaattgttgccgggaagctagagtaagtagttcgccagttaatagtttgcgcaacgttgttgccattgctacaggcatcgtggtgtcacgctcgtcgtttggtatggcttcattcagctccggttcccaacgatcaaggcgagttacatgatcccccatgttgtgcaaaaaagcggttagctccttcggtcctccgatcgttgtcagaagtaagttggccgcagtgttatcactcatggttatggcagcgctgcataattctcttactgtcatgccatccgtaagatgcttttctgtgactggtgagtactcaaccaagtcattctgagaatagtgtatgcggcgaccgagttgctcttgcccggcgtcaatacgggataataccgcgccacatagcagaactttaaaagtgctcatcattggaaaacgttcttcggggcgaaaactctcaaggatcttaccgctgttgagatccagttcgatgtaacccactcgtgcacccaactgatcttcagcatcttttactttcaccagcgtttctgggtgagcaaaaacaggaaggcaaaatgccgcaaaaaagggaataagggcgacacggaaatgttgaatactcatactcttcctttttcaatattattgaagcatttatcagggttattgtctcatgagcggatacatatttgaatgtatttagaaaaataaacaaataggggttccgcgcacatttccccgaaaagtgccacctgacgtctaagaaaccattattatcatgacattaacctataaaaataggcgtatcacgaggccctttcgtctcgcgcgtttcggtgatgacggtgaaaacctctgacacatgcagctcccggagacggtcacagcttgtctgtaagcggatgccgggagcagacaagcccgtcagggcgcgtcagcgggtgttggcgggtgtcggggctggcttaaccagaccagcagaggagataatactctgcgctccgccagggtggccttcaagaaatgcttgaccatcatacacttctccattcacgatgaaccatggcttctcatcgcaggaattctccttgaattcttcaaaaccaatcactcggcttagcccgtctttcttcatattaatgtcttgcacgggctccggctccgtcggctcctctccttcgtgtctttctccccagttaccattcgtcaggtcacccccagcctttttgacgcgttccatccatcctgtaggcatactagggtgggtagggtgctcgaatctcaagttcccgttttccttcgtaattgtaacccggaaccacgggttgttcatcattccgagaacggaccagtacatatcgcgaggctgcacgcccaatgcttcgtccatggctcttacaaggatggcatcactgttctcaagctctgggatggtgatgcttagagaccaaaaacaccagcagaagcaagtttcgcgccagtacatatctactttgcctccaaaaagctcgccttcaaaatcacgatacttgtcttcggcatattcgatttccgccaatctccaagctataagtccgttagctttgataagcattctcacacatcgagcgagcgagggtgcgtacatttgcctttgtctagggatatttctaccctggtaaccctgcggcccccaccggcgtatgcatatcctctgacagtatatgacggccctgccgacaggagatttaagacctcattgttttggggatatgcaacggcggagttggtgtttaggtcataaatcgcataccgctcatcgtgccaccaatttcggttatttgatgccatctcaggcgagaccattgttctgggttagggagttagacaaatgatggaaatataaaataagtgccctttagacatacggtaagacgcggttgtcattgatatggtaccagttgtcgcttggtgcatcggtcaagatcagcctcttcagccacttaacacttcgtcctcctatttgaccgggcacgacggccctcagcggacgaccatgatctgggcgaagagactccccgttcattttatgtgcaagcatgatccccctgttggggtccagggcccagttcaatttaatagatgtgccgtagtgaccattgggctgcggcgaacttagcaattatcatcataagatagaggtacagcataccagcttatccgctccttccatacagacgtatttcgctttacgcaggggtttcgcactgcggagaatatccgccagcaatgggccagtgaagagggcagtcgatagtcccgccgatccccaggaaaaacctttcgttttacgtacaatgttttgctctttgcgtcgattgccagcacatacgagggtgataggcgctgttatttggtcgtactgctgcaacacttgtcggaagtttagtaccaaaggcttctctaccagtctatactttggttaacggatgtttggcagagaacctagcactatactaacccttcgatgctaatttcccagtgagggatatcttcatccttgatatgagggactgggccatgatttcgaacatagaagagctccggcgatgttaaaaaccctttcagagtgtgagaatgtaacggctcaaggggacaagcatgacagccggtgcaagcaacctgataaggataggagtggagcagttataactcataccttctttatacagatctgtgagaggtggctcaacattaaacggatgaacacccgttaatctgataagccgagggtcacgaggaacatggctatctggagttcctttatctacgctcagcacttctgtcggccgttttgatggcggtggcagagggatatcagacaggtctctcgtcgagatctcttcgctttcgattttgatctgacctgtcttaagaacgaggtcagttgggacgagcgcatccgtccgcacctcggtgatggttgccatgttaccggcagggaaggccaatgaaagtaaaattacgagggagggagcatgaacaaggatgctgagtatgaataagtcgaatggtcagccagtgcattaactccaaataaggaggcaatccaccacactaaaatactcttgcctatcgtatgatggcacgcagtacgtgttacccatgcgcgggcagtggacattctattaggtcacggcagtaactccttgttaccatataacgcctcggagaaaggtcacaataagcaatgctcctaggaacccaccagcgatttccgcggagtcccaaaatcagctcattctgggaggtgggacgctcgaaattagggcaagccttcaggctggacggcgtcccaccgcttaaccaagcgttgaggcaaataaatcgcgttgacccacacaacactctcgaggctccagccatttgtccgctcaaccttgcaggatttctttttcgtcatattaattggttctttgaagaatgatggagacaatgccgtgaagccatgtgcaacttccaattagaagtgttgttgcttatcgtccgaatgagcctggttcgcgtggagaatgggccagatgggagctcacggctgttagagcggagctactactctgtacgtacccttcaaaggaattctcggtaagtttgttagagggatattgctcacgtttaattggcactccaggatcctttaaatccaggcaaaaatcgctcgatctggctttttttgccaatcttggaagtctaccgtatacttgtagttacacccttgaggatttaccacatgagaagaacaccaacctaactgc

SEQ ID NO: 93 - DNA, 2824 bp, Aspergillus chevalieri
  source 1..2824: mol_type = unassigned DNA
cccttttttacattccccacttcgttgtagagtgtatatcttgtatactatctcggtgccttttcggtgagattttgactctcaaggtttgtgggaaccatctattgtccacacgtgcgctatattcagcccgctcagcttctctcagggttgtaagcatcgatcttggcagagataggctcccgactctggacgagataggtcatcttggttcggagttgttggtaggatgggtgacacagcggtgcttatccgtactgtgattagctcgtcgtctcttgccgtaccaatttcatatggtcatagactcgttgtgaagaaagacccgaaagtctatataaggtgatatccgcctcgcatgagacctttcttctgccaggtctggttcgtctttccatcattagctttctctctctcctttgggcaacttgttgatttttcttttccccccttcttttgttctttttcattgttgttactccgtcgaccaatactttatcatgaagccactcctctggtctttgttcctctccgttgcgacagcactgcccaagttccctcgtgagcatcttggcgttgaacctcaactgctcaccgacccaaccgtgcttgccaacaccactgtcgattacatcattgctggtggtggcctgaccggcctgaccattgccgcacgcctgaccgaggaccctaacatcaaggtcttggtcatcgagagcggctacttcgaatcaaaccgcggtcccataatcgaagacctcaacagatacggtgaaatcttcgggactgaagtcgaccatgcattcgagactgtccaacttgccgtcaacaaccgtaccgagataattcgctccggtaatggcctcggaggttccacccttatcaacggtggtacctggactcgacctcacaaggtccaagtcgacagctgggagacggtctttggcaaccaaggctggaactgggatgatcttctcccgtatatgctcaagatcgagaaagcccgtcccccaaaccagaggcagattgaggctggtcattacttcaacccacagtgccacgggttcaacggtagcgttcatgctggaccccgtgataccggcgaaccttactctcctatcatgagggctctcatggatactgtcagcgcggagggcgtccctgttaggaaggacttgtgctgcggtgatcctcacggagtttccatgttcctcaatacgttgtacccaagccaaatccgtgccgatgctgcgcgcgagtatctggtccccaactactatcggcccaacttccaagttttgaccggccaaagggttggtaaagtgttgctggacaagaccgttcccggttctcccaaggcaattggtgttgagtttggaacgcacaggactcgcaagtatgaggcttatgctcgccgggaagttttgctggcggctggatcgaccatttcccccacaattctcgagtactcgggcattggtatgaagtctgttctcgactcggttggcattgagcaggtagtggagctgcctgttggtgttaaccttcaggaccaaaccaccgtccatgtagagtccagaatcaccccagctggtgccggtcagggtcaggctgcgtactttgccacgttcaacgagacattcggcgactttgctccccaggcacacgaactgctcaacacaaagctggaccaatgggccgaagaggtcgtggcccgaggcggcttcaacaatgcgacggcgctgaggatccagtacgaaaactaccgcaactggctggttaacgataacgtggccttttccgagctcttcctcgacacggctggcaaaattagctttgatgtgtgggacttgatccccttcactcgcggctatgttcacattgcggacaaggatccctacctccgccgcctgtacaacaaccctcagtacctcctaaacgagctcgacgtgctaggtgaggccgctgcttccaagctcgcccgtgagctctccagcaagggagccatggcgcagtactacgccggcgaaaccgtacccgggtttgaccatttgccagcggatgcgagcttgcgggactgggcgaagtacgtcaaggacagattccggcccaactaccacgccgtgagtacatgtgccatgatgtccaaggagcttggaggtgttgtagactcggcggcacgtgtgtatgatgttgagagattgcgagtggtagatggctctattcccccgacgcaggtgtcgtcgcacgtgatgactgtgttttatggtatggctgagaagatcgccgaggcgattttacaggattatcatgcgcgcaagtaaattgcaaagtgaacaagtattgtttactggtggttactgtatatagttagtgaattgattctcttaggggacttgatattcttttctgtcagcatcggaatcatcatccgacgccctacctgccatagaatcagagtttgagcaataatgtaggacccctgatggaccgccagtgagaatgagaagagagggaggaagaggagaagaagaagggagggaaaaagaaaacgtggaggtggggagatctgatacgcgtcccccgattaggcaaagccggatactaacccgaagaggagaatgagccgaatattccccggatgactgacgtgactgcatatggttactgtatagttatgactaggtaccggtacaggcacggtacatcaattcaatgtatataaacgttcaccacgaaagaggatatacagcccatccgagccaagacatacccgttaccgggaaggaacccgaaaactatccgaggctatcaatatccgggg

SEQ ID NO: 94 - DNA, 2818 bp, Penicillium viridicatum
  source 1..2818: mol_type = unassigned DNA
ggtaaactacatgtatcctggtgcctttctgggcgccaagaaccttatctcgcaactgtaagcttccaaagttgtatcaatcatgaccaatgggactagcatgttgtctgcacgaggtctccctcaggtgcatgtgggtcgatggaattggccatgtgtatactctgatgtacttgggaacaaggcttcattgctgttgtcgacaggtccttatctcgtgaatgtaaaccttcaaagttgtattagtaatggccaatgatactagcatgtcgtctccacgaggtcctcctgaggtacatgcgggtcgatggatttggccatatgtatactatactatacttaggaacaaggtttcattgttgttatagaccggatgaaaatataaatatgttccaatcccatgtcctataccttccattcataccatttgataattctcctatccatccttttcatttcttttcggctttgtctttcaatcgccaaagccgccttttgagatgaagttactcggcgtcctgtccggccttggccttgttgtcgtggctacggcccttccactgcaggaattggatctccagtcgaccctgctcaccgacccaagaaaggtggccggcgaaactttcgactatgtcattgccggtggaggtttaactggcctgaccgtcgcagcgcgtcttactgagaaccccgacatcaacgttctcgtaatcgaaagtggcttctacgaatcgaacatcggccctatcattgaaaatctcaaccactatggtgatatcttcaccacatccgtcgaccaagccttcgaaacggttccgcttgctattcacaaccgcactgagattgttcgctccggcaaagggctgggaggttcgacattggtgaatggaggttcctggacacgtccacacaaggcgcagattaattcctgggagaaggtgttcggaatggaagggtggaactgggataatctactcccgtacatgaacaaggtcgaggcctcccgtccaccgaacgcagctcagattgctgctggacattactttgaccctgcctgccatggcgtcaatggtaccgtccaagtcggcccccgagacaccggagagagctactcgcccatgatcaaaagtcttatggagactgctaagaaatccggtgttcccgttcagaaggatttcagctgtggtgttcctcacggtatatcgatgttccccaacgatgtgcatgaagatcagactcggtccgacgccgctcgcgagtggcttctgccaaactacaaacgcaagaacctaaaggttttgactggtcaaatggtcggacgggttttgttcgataccaccacctccactcctaaagccgttggagtcaacttcggcacacataacaaggtcaactttgacgtccacgctaaacatgaggtccttttggccgctggatcaaccgtgtctccccaaatccttgagcattctggcgttggcttgaagactgttctcgacaaggtcggcattaagcaggttgttgagctgcccgttggtctcaatctccaagatcaaactaccaccactgtccgctcggccatcaacccaattggtgcaggccagggccaggctgcgtattttgccaccttcaacgaaaccttcggggatcaggcacctcgtgctcaccagctcctaaacaccaagcttgaagagtgggcgaaggatgctgtctcccggggcggcttccacaacgaaaccgcactcctaatccaatatcaaaattaccgcgactggcttgtcaactccgacgtctcttacgctgagatcttcattgacactgctggaaaactgagccttgacctgtgggatctcattcctttcacccgtggctatgtccacatcctggacagtgacccatatcttcgtcgctttgcatacgaccctcaatacttcttgaatgagctcgacctccttggtcaggcagcagcctcgaagttggctcgtgagatttccaacaaaggtgaaatgacgaagtatttcaacagcgagaccgttcccggaaacaacctagcgtacaacgctactctcgaccaatgggtagactatgtcaagcagaatttccgtcccaactaccatggagtcggcacatgttccatgatgtcgaaggaacttggcggtgtcgtggacgctgctgctcgtgtctatgacgttgaaggtctgcgtgtgattgacggttcaattcccccaactcaagtttcgtctcatgttatgaccgtcttttacggtatggctgagaagatctcggaagctgtcctttccgactatcatgcttcgaactgatcctctctcgccacttgatgcctcttgtgcatcatggcgtacctactgagtacacatatacggcagaaccggtacggatctgattgtcatagtttctactttccttctgatctaccccagtggtgtatttttgttgggaaacctttcttgaaattgcaatagacttggtgatagacttggtgatagactgggagatagacggagtgatagacggggcttgtgattttcttatatattttctaccctgtgcatacataaatgtatatgttcatatttttattagacttggatattttgtttcaacaacaactattcaatgtcgaaatacaaacgttttagtgtttacctcattcaaagtctttaggccgatctcgcggacaagtaggtcaactgcctctggtgtctgtacgtgcgcgagttgggattccttttaatctagcactgtcacatgtttcacgtccggcacgccacgtaaatttgaaatttcgctgcgtagaaga

SEQ ID NO: 95 - DNA, 2824 bp, Aspergillus niveoglaucus
  source 1..2824: mol_type = unassigned DNA
ccatacacagtctgcttgtctttttttttttttttgattctccacttcgttgtagagtatactttgcatgccatttcggtgtcttttcggtgagatttcgactctcaaggtttgtcggaaccaattattgtccacatgtgcactatattcagcccgctcagcttctcccaggattgtcagcattgaacttggcagagataggccatcttggttcggaattgttggtaaaatgggtgacacacaggtgcttattcgtactgtgattagctcgttgcttcttgccgtacgaggttcatatgaccatagactcgataggaagaaagacccgaaagtctatataaggtgatatccgcctcgtatgagtccttccctctcccaggcctggcttgttctttcatcattagcttcattgctcttctttcggcaactctgaattcgatctttccttcttttcttttctttcttctccttgttgttgctccgtcgagcagtacgccatcatgaggccactcatctggcctttgtttctctccgttgcgacggcactgcccaagttccctcgtgagcattttgacgttcaacctcaactgctcaccgacccaaccgtgcttgccaacaccactgtcgactacatcattgccggtggtggcttgaccggcctgaccattgccgcacgcctaactgaggaccctaaaatcaaggtcttggtcattgagagcggcttcttcgaatcaaaccgcggtcccatcatcgaagatctcaatagttatggtgaaatttttgggaccgaggttgaccatgcatttgagactgtctcacttgctgtcaacaaccgtaccgagaatattcgttccggtaacggcctgggaggttccacccttatcaacggtggtacctggacccgacctcacaaggtccaaattgacagctgggagagagtctttggcaacgaaggctggaactgggatgaccttctcccatacatgctcggtatcgagaaagcccgtcaccccaaccagaggcaaatcgaggctggccattacttcaacccacagtgccacggatcgaacggcaccgtccatgctggaccccgtgatactggcgaatcttactctcctatcatgaaggcgcttatggacactgttagcgcagatggtgtccctgtcaggaaggacttgggctgcggtgaccctcacggagtgtccatgtttcccaactcgttatacgagagccaaatccgtgccgatgctgcgcgggagtggttggtccccaactactatcggcccaacctccaagttttgactggccaatcggttggtaaagtgttgcttgacaagaccgttcccggtgctcccaaggcaattggtgttgagtttggaacgcacagaactcgaaaatatgaaacctttgctagccgggaagtcctgctggcggctggatcgactatttcccccacgattctcgagtactcgggcatcggtatcaagtcggttctggactcggttggcatcgaacaggtggtggacctgccggttggtcttaaccttcaagaccagactaccgtcaatttgcagtcaaggatcaccccagatggtgctggccagggccaggctgcgtactttgccacgttcaacgagacattcggcgactttgctccccaggcacacgaactgctcaacaccaaactcgaccagtgggccgaagaggtcgtggcccgaggcggcttccacaacgcgacggcattgaggatccagtatgaaaactaccgtgactggctggtaaacgacaacgtggcttactccgagctcttcctcgacacggccggcaagattagcttcgacgtgtgggacttgattcccttcactcgcggctatgttcacattgcggacaaggatccatacctccgccgcctgagcaacgaccctcagtacttcctgaacgagcttgatgtgctaggccaggccgctgcttccaagcttgcccgcgagctctccagcaggggagctatggcgcagtacttcgccagcgaaacagtgcccgggtatgataggttgcctgcggatgcgagcttgcaggactgggcgaagtacgtgaaggacaggttccgggccaactaccacgccgtgagtacatgttccatgatgcccaaggagatggggggtgttgtagactcgacggcacgtgtgtatggcgttgagagattgcgcgtggtcgatggctctattcctccgacgcaggtgtcgtcgcatgtgatgactgtgttttatggcatggcggtgaagattgcagaggcgattctgcaggatcaccatacgcggaagtaaagtgcataacagtgttgttgttgttgttgttgttggtggcggttactgtacacttagtcaattgcgatatccgtaattattttgggtattctcaattttttttttcttttgatagaagttaatagactcatagacttggtgaattgattctctttggggactggatgttctttactgtcagcatcggaagcatcatccgacgctctatccgcgataaatcagattttgagcaataatgcaggatccctgattgaccaatgtgttgatgtccagtaaaactgagagtaaagtgaaggtgagagagggagagtgagagatgggaaggggaaggagggagagaaaacgtggaggtggaccggaaactaacccgaaaaggagaatgaaccgattattccccgtaatgactgacatgattgcatactatgtacagtgttggctatgtacaggtacagtacgtcactcaatgtatatcaacatccacaagaatatacattagagtc

SEQ ID NO: 96 - DNA, 2818 bp, Talaromyces bacillisporus
  source 1..2818: mol_type = unassigned DNA
gtcgatatttcccacgtgctttagacaatatcctctgcagagctatgatgcttccttcttggaaaagacatgatatacggagtaggggtaaaggctatgggagcatgaaggccagggctagatgccactcttcattgtgtttcttaccaatgataataaggatgctgatgatcatgatggacatggcgtttcgtcgccgatgaaggtataccatgacgtctgatactgactcccattagccagctgctgggccacccattgggtgactgtggacgctgtcccattcaactggcgtcgacacactgacctcaagtgctgtatcctatgatacacggtgcgaagacttctactagaagagatatgtagctttcgtgtgtcgaatctatatattaggctggtatctgccggtgattaacattaattcatgtatcgaagcacacaaccaactcattcattccttaaagcttttatactctctctttttgatagtatccttcaggatgaagtccatccttatcgtttctgccctcgcctccctggctggagcccagggctacactcctgccgagcagattgatgtccagtccagcctgatctccgacccaaaaaatgtctctggccggacgttcgactacattattgccggaggcggcctgactggtctcactgttgccgccaagttgtctgaggaccccaatatcagcgtgctcgttatcgagaagggcttctacgagtccaacgacggccccataatcgagaaccccaacgactatggcctgatcttcggtagctctgttgatcaaaattacctcactgtgcccatggccatcaacaaccgcaccctggatatcaagtctggcaagggtcttggtggttccacattgattaacggggactcctggactggtccggacaaggtccagattgattcgtgggagactgtcttgggcaaccccggctggaactaccacgccctcaaggaatacatgaacaaggccgaacgtgcccgttatccgactaccacccagattgccgccggtatgtactttaactctacctgccacggattcaatggcaccgtcaactccggaccccgtgacgacggcagaccttactctcccctgatgaaggccctcatgaacaccacctcggccatgggtgttcccactcaggccgacctcctctgcggccacccccgcggtgtctccatgatctacaacaacctgcttccggaccagacccgtgctgatgctgctcgtgagtggcttcttcctaactacaagcgccccaacttgagcatccttactggccagatcgtgggaaaggttctcttcgacaaaactcccactggtcccagggctgttggtgtcaacttcggcaccaacaaggccgtcaatttcaacgtctcggccaagcacgaggtcctactagccgccggctctaacgtctccccactgatcctcgagcactctggtattggtctgaagtctgtcctcgatcagttcaacatttcccagctcgtggaactgcccgtcggtctcaacatgcaggaccagaccaccaccactgtccgcgcgcgggccaaggcttctgctgctggccagggccaggccgtatactttgccaacttcaccgaggtctttgggaaccacaccgctcaggctaccaatttgctcaacaccaagctcgaacagtgggccaacgagactgttgcgcgcggaggattcaacaacgctactgctctcttaatccaatacgagaactaccgtaaatggctcctggacgaagatgttgcctatgtcgagcttttcttcgacaccaacggcaagatgaactttgacctgtgggatctcatccccttcactcgcggatccgtgcacatagcccacgccgacccctacctccagtccttttccaacaaccccatgttcttgctgaacgagcttgaccttctgggtcaggctgctggctccatgcttgcccgtgagctgcagaactctggagagctctcaacctactttgatggcgaggacatccccggcgccgagctcttgccctatgacgctacgctcgatggctgggttggctacgtcaaggacaacttccgtgccaactggcatgctgtcagtacctgctccatgatgcccaaggagctcggtggtgttgttgactctgccgccagagtctacggcactcagggcctccgtgtcatcgacggctctattccaccgacccaggtgtcgtcccacgtcatgaccgttttctacgccatggccttgaagattgccgatgccatcttggctgactatactgcgtaatttatatctttttacgtcgagacttctgtggtccgagtttttgattaagttctacttgatgtttagttatatgtcttaagacaatcttgaggtgtggtttaggggactttatttgttctttcaatgttgcttttgacgttgttgcttcagtgcaggacactttctcttcagttatttggaaaggagtacatgcaatacatgtcgactggtactagtaatagtccagcgcattatctatacccgattcttacatgcccttgtgtacgctcatataggtatttcttcttttattttaacttagaaaagcaccacactcatgtcatacatctaatcacaagcaagtcaaattttgagtttgtgtagatcaattttttttgcctgatgtaactggcatttttcatcttgaagtctttgaccagcgtaacaatagttgctgtgaaaacacattagttcaacgtattgctacgcaagttacaaaccccttcttcatctcatgaaac

SEQ ID NO: 97 - DNA, 1431 bp, Microdochium nivale
  source 1..1431: mol_type = unassigned DNA
ttagttactcgtggtgctattgaagcttgtttatctgctgctggtgttcctattgatattcctggtactgctgattatgaacgtgatgttgaaccttttaatattcgtttaccttatattcctactgctattgctcaaactcaaactactgctcatattcaatctgctgttcaatgtgctaaaaaattaaatttaaaagtttctgctaaatctggtggtcattcttatgcttcttttggttttggtggtgaaaatggtcatttaatggttcaattagatcgtatgattgatgttatttcttataatgataaaactggtattgctcatgttgaacctggtgctcgtttaggtcatttagctactgttttaaatgataaatatggtcgtgctatttctcatggtacttgtcctggtgttggtatttctggtcattttgctcatggtggttttggtttttcttctcatatgcatggtttagctgttgattctgttgttggtgttactgttgttttagctgatggtcgtattgttgaagcttctgctactgaaaatgctgatttattttggggtattaaaggtgctggttctaattttggtattgttgctgtttggaaattagctacttttcctgctcctaaagttttaactcgttttggtgttactttaaattggaaaaataaaacttctgctttaaaaggtattgaagctgttgaagattatgctcgttgggttgctcctcgtgaagttaattttcgtattggtgattatggtgctggtaatcctggtattgaaggtttatattatggtactcctgaacaatggcgtgctgcttttcaacctttattagatactttacctgctggttatgttgttaatcctactacttctttaaattggattgaatctgttttatcttattctaattttgatcatgttgattttattactcctcaacctgttgaaaatttttatgctaaatctttaactttaaaatctattaaaggtgatgctgttaaaaattttgttgattattattttgatgtttctaataaagttaaagatcgtttttggttttatcaattagatgttcatggtggtaaaaattctcaagttactaaagttactaatgctgaaactgcttatcctcatcgtgataaattatggttaattcaattttatgatcgttatgataataatcaaacttatcctgaaacttcttttaaatttttagatggttgggttaattctgttactaaagctttacctaaatctgattggggtatgtatattaattatgctgatcctcgtatggatcgtgattatgctactaaagtttattatggtgaaaatttagctcgtttacaaaaattaaaagctaaatttgatcctactgatcgtttttattatcctcaagctgttcgtcctgttaaa

SEQ ID NO: 98 - DNA, 1639 bp, Chaetomium globosum
  source 1..1639: mol_type = unassigned DNA
atgcagaccctcgcacccctcctggcccttctgggcctggcggcgacctcccacgccacctccttcgcccgcttcaccaacgagacaggcaccctcaccgactgcctcaccaaggccggcgtgcccatcggcgagtccgggacgcccgaatacaagatcgacgtcgcgagcttcaacctccggctcaactacacgccggcggccgtcgttgccgcctcgacggcccagcacgtgcaggatgccgtcgtgtgcgccaacaagttcggcatcaagccgacggccaagtgcggcgggcacagctacgcttcctttggtctgggcggtgaggacggccatctggtcatcgagatgagccgcatgaacaaggttgttctggacaacgtcacgggcatcgccacggccgagggcggtacccgtctgggccatctcgccatggaactctacacccaggggaagcgggccatcagccacgggacatgcccggggtaagtaacccaaccaactaccaaaccaaccccccgtaagagaaaccattgactaacactaccccagcgtcggcgtcggcggccacctcctccacggcgggtacgggatgagctcgcacacgcacggcctagccctcgactacgtgatcggcgccacggtggtgctggccaacggcacggtggtggagtgctcggagacgcagcacggcgagctgttctgggcgctgcgcggggcgggggcgtccatggggatcgtgaccgagttccggctcaagacgttcgaggcccccggccagctgacctacttcgtggcgcccgtgcagtggccgaccgaggcgagggcgctggtgggggttaccgccgtgcaggagtttgcgaagaccatgccggcggagctgaatatgcgcttgtttattgcgaggcggtttgttaatttggaggggctgttttatggggataaggaggacctgaaggctgcgctggcgccgttggtggccaagacgaatgctacgctggcgttggcaacgacgggggactggatggagcagattaagcattttggtgggggttcgaatattgatcaggggcatggttatgaggaggtgagtttcgggttgatggatacccctgacggaggctttactgacagacttgcccagcacgaaaccttttactcgaccagcttgtacaccaaggagctcaacgacgagcagctgcagaattttgttgggtactggttcaaccaggccaagaacaacacgagggactggtacgtgcagatcgacctgcacggcggtgagaactcggctgtgtcggcgcccgcggcggactcgaccgcgtatgcccaccgcgactacctcctgatgtacctcctgtacgaccgtgtcgacaagggcgagtacccggccgagggccacaccgtcatggagaactttgccggcaacatcacccaggggatggagcggagtgactggggcatgtacatcaactacccgaactcgaggctcgaccagaaggacgcgcagctcaactactggggtgacaacctgcccaagttgcaggccatcaagaaggacgttgatcccgaggacgtgttccacttcccgcagggtgtcatgcctgccgtgcgacatcagcaccagcatcagcactga

SEQ ID NO: 99 - DNA, 1644 bp, Neurospora crassa
  source 1..1644: mol_type = unassigned DNA
atgtggcttccactcatcctcctcactgccacggcggcccccatcctcgccaaccccctaagctctccactcaacaagcgtgccgccatcgacgactgcctcaaatctgccggcgttccagccgatgctcaaggctcctccgagtggcgtaccgacgtcaaccctttcaaccagcgcctgccctacacgccagtagccatcgcggtccctaccaccattgaacacatccaaggtgccgtctcctgtgccaccaagctgggaattaaagttacccccaagtcaggagggcacagttatgcttcgtttggtctgggcggagagaacgggcatctggtcgtggagttggatcgcatgtcgaaggtgacgctggataagacgacgaatatcgcagatgttcaatcgggagcgagactggggcatgtggcgacggagctgtataaacagggcaaaagagctttctcgcatgggacttgtcctgggtacgttttcgtcaagcccttacttcttggcttggccggggctaaccaaggagggaaacagagtcggggtaggaggccactccctccacggcggctttggcttttcctcgcacacctacggtcttgcagtagactggattgccgccgccacagtcgtccttgccaacagcactgtagtgaccgcatcgccaaccgagaacccggacctcttctgggctttgcgtggcgctgggtccaactttggcattgtggcttccttcaagttcaacaccttcgctgcgccctcgcaagtaacggctttccagattaacttgccctggaactcagcgtcgtcgattgcatccggctgggaaaaactccaggactggttggcggctggcaatatgccgaaggagatgaacatgagggtcttcggctcgccgagtcagacgcaactgcagggcttgtatcacgggagtagctcggcgctgcggacggctgtgcagcccctgttgagcactctaggagcgagcttgagcaatgcgcagcagtacgactggatgggagcgtttacttattatacctatggcggcacggtggacgttacgcatccttacaacaccgtaggttccctctcgtttctttctttcttctccagcaactaattttttgccaggtcgaaaccttctactccaaatccctcgttaccaccgccctcccttccgcggctctgaactccgtcgccaactactggatcaacaccgccaagcgcgtctcgcgcgactggttcatcatcatcgacatgcacggcggtcccaagtccgccatcacctcctccaccaccaattccgccaactacacgagctcttacgcctatcgcgccccggaatacctcttcctttatgagctctatgatcgtgtgatgtttggaagctatccgagcaacggtttcagcttcctcgatggttgggtgaagagcttcacggataacatgaaacaggagcagtggggaatgtacattaactacgcagatcccacgatgaagagggccgaggctgtggggaactattaccgtagtagccttagcaggctgcagaaggtgaaggcgcagtacgatccgaacgaggttttctactacccgcaaagtgttgagccggcccgacatcagcaccagcatcagcactga

SEQ ID NO: 100 - DNA, 3183 bp, Thermothelomyces thermophilus
  source 1..3183: mol_type = unassigned DNA
gctagcttctttggtcaccgtcgttttcgcccgccccctccctccttcaaccccctgagtagtcggctaagcgatcctcaatctggtcttgtgaggtcacgtcctccagcagatgacagttcatcgagcgagtgatctccaccacccagaagggaggggggatgcgcgcatgctccaacatccctggtgtcgctagagacgtcgcggcatcagccttttcatcacaccgagcacgtccacggaccggctcctttcacccccgcgtcctccggaggattgagtcacgatatttcgggatgtgggaagggggagagaaaggaggggggaggggcggaaacatgttggatacgagctgcgcccctttttcaacatcgagaacaggaagtcgttggtgtcggccgtaatgtctataaaacgaggctccttctcgtcgtcgacttgtctcaggttctctctctcgtccacaccaagccagtcttgcctgagccacctgagccaccttcaactcatcatcttcagtcaagtcgttcattgacattgtgtctctctttctatcgagtcggcttcccggcccttcaccacaacatgaagtccttcatcagcgccgcgacgcttttggtgggcattctcacccctagcgttgctgctgcccctccatccacccctgagcagcgcgacctgctcgtcccgatcacggagagggaggaggcagccgtgaaggctcgccagcagagctgcaacacccccagcaaccgggcgtgctggactgacggatacgacatcaacaccgactacgaagtggacagcccggacacgggtgttgttcggccggtgagtgctctcgttaattacgcttcggcgagttgcgcagatatattaaatactgcaaacctaagcaggagctgacatgcgacagtacactctgactctcaccgaagtcgacaactggaccggacctgatggcgtcgtcaaggagaaggtcatgctggttaacgtacggcaccccttttcttgtcctaggatctgggtgatgtgcgtcgttgcccctgagagagactgaccgagcctttggctgcagaatagtataatcgtaattaattataccgccctgcctccagcagccccagcagctcgagaagggtatctgaagttagtcaggcctgctgacctgaccggggccaacccaccatagggaccaacaatctttgcggactggggcgacacgatccaggtaacggtcatcaacaacctcgagaccaacggcgtatgtctgctgcttgctctcttgctctcctcgtccgcgactaataataatatcaactcgtgtggaaaacagacgtcgatccactggcacggactgcaccagaagggcaccaacctgcacgacggcgccaacggtatcaccgagtgcccgatcccgcccaagggagggaggaaggtgtaccggttcaaggctcagcagtacgggacgagctggtaccactcgcacttctcggcccagtacggcaacggcgtggtcggggccattcagatcaacgggccggcctcgctgccgtacgacaccgacctgggcgtgttccccatcagcgactactactacagctcggccgacgagctggtggaactcaccaagaactcgggcgcgcccttcagcgacaacgtcctgttcaacggcacggccaagcacccggagacgggcgagggcgagtacgccaacgtgacgctcaccccgggccggcggcaccgcctgcgcctgatcaacacgtcggtcgagaaccacttccaggtctcgctcgtcaaccacaccatgaccatcatcgccgccgacatggtgcccgtcaacgccatgacggtcgacagcctcttcctcggcgtcggccagcgctacgatgtcgtcatcgaagccagccgaacgcccgggaactactggtttaacgtcacatttggcggcggcctgctctgcggcggctccaggaatccctacccggccgccatcttccactacgccggcgcccccggcggcccgcccacggacgagggcaaggccccggtcgaccacaactgcctggacctccccaacctcaagcccgtcgtggcccgcgacgtgcccctgagcggcttcgccaagcggcccgacaacacgctcgacgtcaccctcgacaccacgggcacgcccctgttcgtctggaaggtcaacggcagcgccatcaacatcgactggggcaggcccgtcgtcgactacgtcctcacgcagaacaccagcttcccacccgggtacaacattgtcgaggtgaacggagctgatcaggtaagaaaaaggggaccgcaggggtgctgctgcaagtacaccttgctcgccctcctgttcttccttaataactacctcccaaccctcccccctaattaattcactttaaaggccgatcaagactgaccgagccccctctctttgcagtggtcgtactggttgatcgagaacgatcccggcgcacctttcaccctaccgcatccgatgcacctgcacgtaagttggatacatatatatatatatatatacattgctttcctggctcgctcccttaaataaaattaaataaccaaaaataacaaaaaaaagggccacgacttttacgtgctgggccgctcgcccgacgagtcgccggcatccaacgagcggcacgtgttcgatccggcgcgggacgcgggcctgctgagcggggccaaccctgtgcggcgggacgtgacgatgctgccggcgttcgggtgggtggtgctggccttccgggccgacaacccgggcgcctggctgttccactgccacatcgcctggcacgtctcgggcggcctgggcgtcgtctacctcgagcgcgccgacgacctgcgcggggccgtctcggacgccgacgccgacgacctcgaccgcctctgcgccgactggcgccgctactggcctaccaacccctaccccaagtccgactcgggcctcaagcaccgctgggtcgaggagggcgagtggctggtcaaggcgtgagcgaaggaggaaaaaggaaacaaagaggggggggggggctagttcctatttttgctttttttttttgttcttgtccttgtgctggcggttaccctggtaaaggagaagggggccccaagttcgagtgggtgtgtgatcgggtaaatattatc

SEQ ID NO: 101 - DNA, 2142 bp, unidentified
  source 1..2142: mol_type = unassigned DNA
caatgtccttatttatctggtgaaatgtcttttactcaagaacaagataatgctggtgatactattgaagttactgaacaaactattgataatactttatatgttaatgatactggttcttatatgactactgattttggtactcctatttctgatcaatattctttaaaagctggtcgtcgtggtcctactttattagaagattttatttttcgtcaaaaattacaacgttttgatcatgaacgtgttcctgaacgtgttgttcatgctcgtggtgctggtgcttatggtacttttaaatcttatgctgattggtctaatgttactgctgctgattttttatctgctaatgaaaaagaaactcctatgttttgtcgtttttctactgttgttggttttcgtggttctgttgatactgctcgtgatgttcatggtcatgcttgtcgtttttatactgatgaaggtaattatgatattgttggtattaattttgctcctttttttattcaagatgctattcaatttcctgatttagttcatgctattaaacctatgcctaataatgaaattcctcaagctgctactgctcatacttctgcttgggattttttttctcaacaatctactgctttacattctgctttatggttaatgtctggtaatggtattcctcgttcttttcgtcatatgaatggttatggtgttcattcttttcgttttgttgctgctaatggtacttctaaagttgttcgttatcgttggaaatctcaacaaggtgttgcttctttagtttgggaagaagctcaagctgctgctggtaaaaattctgattatcatcgtcaagatttatataatgctattgctaatggtcattatcctaaatatgaattacaagctcaaattatggatgaagctgatatgttacgttttggttttgatttattagatcctactaaattagttcctgaagaagttgttccttatactcctttaggtatgatggaattaaatgctaatcctactaattattttgctgaagttgaacaagctggttttcaacctggtcatgttgttcctggtattgattttactgatgatcctttattacaaggtcgtttattttcttatttagatactcaattaactcgtcatggtggtcctaattttgaacaaattcctgttaatcgtcctcgtaaacctgttcataataataatcgtgatggttttggtcaacaacaaattcctactaataattgggcttatactcctaatactatgtctaatggttatcctatgcaagctaatcaaactcatggtcatggtttttttacttctccttatcgttatgcttctggtcatttaattcgtgaaccttctcctacttttcatgatcattggtctcaacctgctatgttttggaattctttaattcctgctgaacaacaaatggttgttaatgctattgtttttgaaaattctaaagttaattctcctcatgttcgtaaaaatgttgttaatcaattaaatatggttaataataatttagctgttcgtgttgctcgtggtttaggtttagatgaaccttctcctaatcctacttattatacttctaataaaacttctaatgttggtacttttggtaaacctttattatctattgaaggtttacaagttggttttttagcttctaattctcatcctgaatctattaaacaaggtcaagctatggctgctcaattttctgctgctggtgttgatttaaatattgttactgaagcttatgctgatggtgttaatactacttatgctttatctgatgctattgattttgatgctttaattattgctgatggtgttcaatctttatttgcttctccttctttagctaatcaaatgaattctactgctacttctactttatatcctcctgctcgtccttatcaaattttagttgattcttttcgttatggtaaacctgttgctgctgttggttctggttctgctgctttaaaaaatgctggtattgatacttctcgttctggtgtttatactggttcttctgaaactactgaaaatattgctaaagaagttttaaaaggtttatatacttttcgttttgttgatcgttttgctttagatgaa

SEQ ID NO: 102 - DNA, 15420 bp, Thermoascus aurantiacus
  source 1..15420: mol_type = unassigned DNA
ttgaagttcctattccgagttcctattctctagaaagtataggaacttcgctagcccgttaaattgccgtcgtcagccgttaaattaccgattaatcccgataaatttccgagatctccgttaaattgccgttcgcagccgttaaattaccggggacgaccgataaatttccgcgatgaattcatggtgttttgatcattttaaatttttatatggcgggtggtgggcaactcgcttgcgcgggcaactcgcttaccgattacgttagggctgatatttacgtaaaaatcgtcaagggatgcaagaccaaaccgttaaatttccggagtcaacagcatccaagcccaagtccttcacggagaaaccccagcgtccacatcacgagcgaaggaccacctctaggcatcggacgcaccatccaattagaagcagcaaagcgaaacagcccaagaaaaaggtcggcccgtcggccttttctgcaacgctgatcacgggcagcgatccaaccaacaccctccagagtgactaggggcggaaatttatcgggattaatttccactcaaccacaaatcacagtcgtccccggtaatttaacggctgcagacggcaatttaacggcttctgcgaatcgcttggattccccgcccctggccgtagagcttaaagtatgtcccttgtcgatgcgatgtatcacaacatataaatactggcaagggatgccatgcttggagcaacaatctcagaacaccaatatcaattcatctcgagtctgaactcagacaacacaaattcttcaaaattgaggatttagtcttgatcggatccaccatgcgtcatttctggcttttgccagctgttgctggtatcgctggggctgcatgtccctacatgacaggcgagctccctcggtcgttcgccgaaaaccctcacgccattaacaggcgagcggagggaggaggaggcgcagcagccgaaacagaaaagttcttgtcccagttctatttgaacgataacgacacgttcatgactacggatgtcggtggaccgattgaggaccagaactccctctcggcaggagatcgaggacccaccctcttggaagatttcatcctccgtcagaaaattcagcggttcgaccacgaaagggtgccggaacgcgcagtccatgcccgaggcgcaggtgcccatggcgtgttcacttcctacgcagactggtcgaacatcactgcagcgtcgttcctctccgcagcaggcaaggagacacccgtgttcgtcaggttctcgactgtggcaggctccaggggatcggcagacactgcacgcgatgtccatggtttcgccacaaggttctataccgatgagggtaacttcgatatcgtgggcaacaacattcccgtcttcttcatccaggacgccatccagttccccgacttgatccatgcggtgaagccgtcgcccaacaacgaaattcctcaggcagccacagcacacgattcggcatgggacttcttctcgcagcagccgtcgtcgttgcataccctcttctgggccatggcaggacacggaattcctcggtcctatcgaaacatggacggattcggcatccacaccttcaggttcgtcacagacgatggagcgtcgaagttggtgaagttccactggacctccctccagggcaaggcgtcgttggtctgggaagaagcacaggccgtcgcaggcaaaaacgccgattaccacaggcaggatttgtgggatgcgatcgaagcaggacgctatcctgaatgggaattgggtgtgcagatcatggacgaagaagaccagttgcggttcggattcgatttgttggaccctaccaagatcgtccccgaagaatacgtccccatcaccaaattgggcaagatgcagttgaaccgtaacccgttgaactatttcgcggaaactgaacagattatgttccagcctggccacgtggtgaggggcatcgatttcaccgaggaccctttgctccagggccggttgttctcgtacctcgacacccagctcaaccggcatggcggacccaacttcgagcagattcccatcaaccgacctcgcactccgatccataacaacaacagggatggtgcagcacagatgtacatccccttgaacaaggcagcgtacactcccaacacgctcaacaacggttcgcccaagcaggcgaaccagactgtgggcaagggcttcttcaccactcctggacgcactgcctccggcaggctcgtccgagcggtctcgtcgactttcgcggacgtctggtcgcagcccaggctcttctacaactcgctcgtgcctgccgaacagcagttcctcattaacgcaatccgattcgagacggcccacattacgtcggatgtggtcaagaacaacgtgatcatccagctcaaccgagtctccaacaacttggcgaaacgggtggcaagggcgatcggcgtggccgagcccgaacccgaccccaccttgtaccacaacaacaagacagcaaacgtgggcgtgttcggaaagccgttggccaggctcgacggattgcaggtcggcgtcctcgcaaccgtcaacaagccggactccatcaagcaggcagcctccctcaaggcctcgttcgcagcagataacgtcgacgtcaaagtcgtcgcggagaggctcgcagatggcgtggacgaaacctactccgcagccgatgccgtcaacttcgacgcgatcctcgtggcaaacggagccgagggattgttcgcacgggactcgttcacagcacgccctgcaaactcgaccactgccacactctaccctgcaggccgaccgctccagattttggtggacggattcaggtacggcaagcctgtgggtgcactcggatcgggagcaaaggccctcgatgcagccgaaatctcgactacaagggcaggcgtctatgtcgcgaactcgacaaccgattccttcatcaacggtgtcagggacggcctccgtactttcaaattcctcgatcgcttcgccatcgacgaagacgccgagtgacacgtgacaatcaatccatttcgctatagttaaaggatggggatgagggcaattggttatatgatcatgtatgtagtgggtgtgcataatagtagtgaaatggaagccaagtcatgtgattgtaatcgaccgacggaattgaggatatccggaaatacagacaccgtgaaagccatggtctttccttcgtgtagaagaccagacagacagtccctgatttacccttgcacaaagcactagaaaattagcattccatccttctctgcttgctctgctgatatcactgtcattcaatgcatagccatgagctcatcttagatccaagcacgtaattccatagccgaggtccacagtggagcagcaacattccccatcattgctttccccaggggcctcccaacgactaaatcaagagtatatctctaccgtccaatagatcgtcttcgcttcaaaatctttgacaattccaagagggtccccatccatcaaacccagttcaataatagccgagatgcatggtggagtcaattaggcagtattgctggaatgtcggggccagttggcccggtggtcattggccgcctgtgatgccatctgccactaaatccgatcattgatccaccgcccacgaggcgcgtctttgctttttgcgcggcgtccaggttcaactctctcccctagcctagcggggttcaaatgcaaacaagtacaacacgcagcaaacgaagcagcccaccactgcgttgatgcccagtttgactgtccgaaatccaccggaaaggtggaaacatactatgtaacaatcagagggaagaaaaaatttttatcgacgaggcaggacagtgactgatggtggggtcatggtcgggtctccgagcgaaagagaaccaaggaaacaagatcaacgaggttggtgtacccaaaaggccgcagcaacaagagtcatcgcccaaaagtcaacagtctggaagagactccgccgtgcagattctgcgtcggtcccgcacatgcgtggtgggggcattacccctccatgtccaatgataagggcggcggtcgagggcttaagcccgcccactaattcgccttctcgcttgcccctccatataaggattccccctccttcccctcccacaacttttttccttctttctctcttcgtccgcatcagtacgtatatctttcccccatacctcctttcctactcttcttccattcattcaactcttctccttattgacatctgttttgctcagtacctctacgcgatcagccgtagtatctgagcaagcttctctacagaatctttctagtatcttacaaagaactacaaagttcgcaccaggatccaccatggagtcgcttctccagcagtcccgggccatgtccccgttcctcaagcgcacttccccgaccactttgcgctcactgtcgaccgcgacccgtcccagcaccagccctggcggaggcaccatgtccaacctccaggtcctggctcgtcgctccccagtgatgagcaaggctctggcggtgcagagtgctcgtctggctcacaccaagcggttcacctcttatactgccggtgtggcgggcctgaaccccaagcaattccggcccactgtcggcaagagagcgttgcattccaccgccggcaatggcgctgatgtgaccccgaatgtctacaaggagtcacagcgaggttagtgcttttccttattttctctcgcacagtcacaacgccaatgtaattgtactgacggaattccccccagttcaccccggtcttaccggtgttcccaagcagcagctcgaaccttctgccgctaccgtgcccggccctcgtccccatgcccccaacgccgcacccttcaactacaatgcattctaccagggcgagctcgagaagaaacacaaggacaaatcgtaccggtacttcaacaacatcaatcgcctggccaaggagtttcctcgtgcccacaccgcttctcctgaagagagggtgaccgtgtggtgctccaacgactacctcggcatgggtcgtaaccccgaggtgctgaaatctatgcacaagaccttggacaactacggagcgggtgccggaggtactcgcaacatttccggacacaaccagcacgccgttgctctcgagagcaccttggccaaacttcacaacaaggaggctgcgctagtcttcagttcctgcttcgtggccaacgatgcgactctggcgactctgggcagtaagatgccagactgtgtcattctgtctgacagtctcaaccacgcctccatgatccagggtatccgtcactctggagccaagaagatggttttcaagcacaatgacctggtcgatctggaaaccaaacttgcatctctccctctgaacgtccccaagattattgctttcgaatccgtctacagtatgtgcggatccattgcccccatcgaaaagatctgtgatctggccgacaagtacggtgccatcaccttcctcgatgaagtccatgccgtgggtatgtacggacctcacggtgcgggagtggctgagcacctcgactacgacatttacgcttctcaagatacggccaaccctcgtgacaccaagggaaccgtcatggaccgtatcgacattatcaccggtactctcggcaaggcgtatggttgcgttggtggctacattgccggatcggcggcaatggtggacaccatccgctctctcgcccccggtttcatcttcacaacttcgctgcccccagctaccatggctggagcggacaccgccatccagtaccaggcacagcaccagcgcgaccgcgtcctgcaacagttgcacactcgcgcggttaaggaatcactcaaggagctggatattccggtgattccaaacccgtctcacatcatccctcttctcgttggtgatgccgaggtggccaagcaggcctcggacaagctgctcgaggagcacggcatctatgtgcaggccatcaactaccccaccgtgcctcgcggtgaggagcgtctccgcatcacccccacccccggccacgtcaaggagcaccgggaccatttggtgcaggctctgcagaccgtctggaacgatctgggcatcaagcgcgccagtgactgggaggcccagggaggctttgttggcgtgggtgtcgagggtgccgaggccgccaaccagcccatctgggaggacgcgcagctgggcctgcagcctaacgaaaccgtcgaagctgccgtgacgcgggagttccagacggctgctgccgaagcgctctctcaggccgcttcccgcatgcagaccgccactccggtgcgtcccgccgctgctgctgctgcctcaatccccgtgggagtggctgctgcttaacacgtgacaatcaatccatttcgctatagttaaaggatggggatgagggcaattggttatatgatcatgtatgtagtgggtgtgcataatagtagtgaaatggaagccaagtcatgtgattgtaatcgaccgacggaattgaggatatccggaaatacagacaccgtgaaagccatggtctttccttcgtgtagaagaccagacagacagtccctgatttacccttgcacaaagcactagaaaattagcattccatccttctctgcttgctctgctgatatcactgtcattcaatgcatagccatgagctcatcttagatccaagcacgtaattccatagccgaggtccacagtggagcagcaacattccccatcattgctttccccaggggcctcccaacgactaaatcaagagtatatctctaccgtccaatagatcgtcttcgcttcaaaatctttgacaattccaagagggtccccatccatcaaacccagttcaataatagccgagatgcatggtggagtcaattaggcagtattgctggaatgtcggggccagttggcccggtggtcattggccgcctgtgatgccatctgccactaaatccgatcattgatccaccgcccacgaggcgcgtctttgctttttgcgcggcgtccaggttcaactctctcccctaggggaccagccaggcgccactcggccgggccacagctgcttgggtgttgaccgggagcggaccaattaaggactcgaacgaccgcggggttcaaatgcaaacaagtacaacacgcagcaaacgaagcagcccaccactgcgttgatgcccagtttgactgtccgaaatccaccggaaaggtggaaacatactatgtaacaatcagagggaagaaaaaatttttatcgacgaggcaggacagtgactgatggtggggtcatggtcgggtctccgagcgaaagagaaccaaggaaacaagatcaacgaggttggtgtacccaaaaggccgcagcaacaagagtcatcgcccaaaagtcaacagtctggaagagactccgccgtgcagattctgcgtcggtcccgcacatgcgtggtgggggcattacccctccatgtccaatgataagggcggcggtcgagggcttaagcccgcccactaattcgccttctcgcttgcccctccatataaggattccccctccttcccctcccacaacttttttccttctttctctcttcgtccgcatcagtacgtatatctttcccccatacctcctttcctactcttcttccattcattcaactcttctccttattgacatctgttttgctcagtacctctacgcgatcagccgtagtatctgagcaagcttctctacagaatctttctagtatcttacaaagaactacaaagttcgcaccaacgcgtaccatgcctcaatcctgggaagaactggccgctgataagcgcgcccgcctcgcaaaaaccatccctgatgaatggaaagtccagacgctgcctgcggaagacagcgttattgatttcccaaagaaatcgggtatcctttcagaggccgaactgaagatcacagaggcctccgctgcagatcttgtgtccaagctggcggccggagagttgacctcggtggaagttacgctagcattctgtaaacgggcagcaatcgcccagcagttagtagggtcccctctacctctcagggagatgtaacaacgccaccttatgggactatcaagctgacgctggcttctgtgcagacaaactgcgcccacgagttcttccctgacgccgctctcgcgcaggcaagggaactcgatgaatactacgcaaagcacaagagacccgttggtccactccatggcctccccatctctctcaaagaccagcttcgagtcaaggtacaccgttgcccctaagtcgttagatgtccctttttgtcagctaacatatgccaccagggctacgaaacatcaatgggctacatctcatggctaaacaagtacgacgaaggggactcggttctgacaaccatgctccgcaaagccggtgccgtcttctacgtcaagacctctgtcccgcagaccctgatggtctgcgagacagtcaacaacatcatcgggcgcaccgtcaacccacgcaacaagaactggtcgtgcggcggcagttctggtggtgagggtgcgatcgttgggattcgtggtggcgtcatcggtgtaggaacggatatcggtggctcgattcgagtgccggccgcgttcaacttcctgtacggtctaaggccgagtcatgggcggctgccgtatgcaaagatggcgaacagcatggagggtcaggagacggtgcacagcgttgtcgggccgattacgcactctgttgagggtgagtccttcgcctcttccttcttttcctgctctataccaggcctccactgtcctcctttcttgctttttatactatatacgagaccggcagtcactgatgaagtatgttagacctccgcctcttcaccaaatccgtcctcggtcaggagccatggaaatacgactccaaggtcatccccatgccctggcgccagtccgagtcggacattattgcctccaagatcaagaacggcgggctcaatatcggctactacaacttcgacggcaatgtccttccacaccctcctatcctgcgcggcgtggaaaccaccgtcgccgcactcgccaaagccggtcacaccgtgaccccgtggacgccatacaagcacgatttcggccacgatctcatctcccatatctacgcggctgacggcagcgccgacgtaatgcgcgatatcagtgcatccggcgagccggcgattccaaatatcaaagacctactgaacccgaacatcaaagctgttaacatgaacgagctctgggacacgcatctccagaagtggaattaccagatggagtaccttgagaaatggcgggaggctgaagaaaaggccgggaaggaactggacgccatcatcgcgccgattacgcctaccgctgcggtacggcatgaccagttccggtactatgggtatgcctctgtgatcaacctgctggatttcacgagcgtggttgttccggttacctttgcggataagaacatcgataagaagaatgagagtttcaaggcggttagtgagcttgatgccctcgtgcaggaagagtatgatccggaggcgtaccatggggcaccggttgcagtgcaggttatcggacggagactcagtgaagagaggacgttggcgattgcagaggaagtggggaagttgctgggaaatgtggtgactccatagctaataagtgtcagatagcaatttgcacaagaaatcaataccagcaactgtaaataagcgctgaagtgaccatgccatgctacgaaagagcagaaaaaaacctgccgtagaaccgaagagatatgacacgcttccatctctcaaaggaagaatcccttcagggttgcgtttccagtctagatcgcgattgaagttcctattccgagttcctattcttcaaatagtataggaacttcacctagcaaagtattttcggtacgattttgacatttgctccattgtcgaggatggatggaacgagcggcgtgcgccacgaaagtgaggctattgcctatcagctctttgctacattccggaaacaaacatccctttttgtgaattatctacgcaacttagatggcgtgaacgcatcttcaaagtctttcggcaggtccggcacgacttttgcatccagagaagcgcctacatgtgtattcgaccacctcctagcgcgcttggatatgaggaaatattactgagagtcgaaaacaagctccaccgcaccagctcttcttggagttttatattaaagaatattcccagctcgttgtattattctttttctaccgtgctaatgtatcaaggactttggtacctattaacgttattattcgtgtgctattcccaaacataaccctgtatatgtttcgaacgccgttatgacccatgtcttacatactcattaagtcattcccttggataatctcgactcagatgcggcggttgatgtaggaggagaggtaatcgaggacctcctgggagatgatgccgttccaggcggggtagcggatggagccctcggcggagcccttgagctgctcgatatgctgccactcctcgatggggttggtctcatccttgagggcgatcatctccttggagatgggatcgtaggcgtagtagcgggagactagtgcgaagtaatgatcggggatggcggtgatctgatgggtgtaggtggtgcgggcgacggcggaggcgcgcttatcggaccagttgccgacgacgttggtgagctcggtgaggcccttcatggagaggaaggaggtcatgagatggcggccgatatgggacttggggccgttcttgatggcgaagatggagtagggggcgttcttcttgagggccttgttgtaggagcggacgaggttatccttgaggagctggtactcctgcttgttggaggaggagttgccggtgcggttgacgcgcttgaggacgggctcggagttgcggaggaactcatcgaggtagacgaggggatcgatgcggccgcgggcggagaagaagtagatatggcgggagacggaggtcttggtctcggtgacgaggcactggatgatgacgccgaggtacttgttctggacgagcttgaaggacttgggatcgacgttcttgatatcggagaagcggccgcagttgatgaaggtggcgaggaagaggaactggtagagggtcttggtcttggtgaagcgggaggtgtactcgaaggagttgaggatcttctcggtgatctcccagatggactcgccctcggagaggagggccttgagcatcttcttggaatgggagttgcccttatcggcctcctcggaggactcgaactggagctggagggaggagacgatatcggtgatatcggactgatgcttctggccgtagtaggggatgatggtgaactcccaggcggggatgagcttcttgagggaggcctccaggatggtggccttctgggtcttgtacttgaactggagggacttgttgacgatatcgaaggagagggagttggagatgatggtgttgtaggacatgaaggtggcgcgcttgatggcggtgccgttatgggtgatcatccagcagaggtaggtgagctcggcggcgcagagggcgatcttctcgccggaggggcgctcgaagcgctcgacgaactggcggacgaggaccttggggggggtcttgcagaggatatcgaactggggcatggtggatcgatccttatgttttgacaaagcgacagaacagcgtcccaagcacagcttgactatccagagaacgctgtccctgacgacgattcttaaatatttgcgttcagcatgactccagagccttgagcaccttgcacggcagatcaacccacgaactacccttctaatcccgtatgatgcttgatggatgccaaatggagccggcaattaatccatctgccaggaacgggggtatacaacatctctcattggccgaaactccgatcagttcgggggccaggatttaaccctggtcccctttaattgttgcagaacaacaaatctccgacacgggactactgactgttaactgaatacgcctgatagtgggggtaagaaacaacgcccgaaccttgttatgactcgtggaggacgcgacggattgctcggggggtggtgagccggggttaacagggtaagctgcaggctgcccgttagggcgcctcgcttggcgaagcgagatgaaatcctgcagactacaccggttgacaccatacgaccctatgggtgtggagaggataaattaaacttatatctacgaaaagttaaagcccgtcccatgttgcacttcagctgcaaggtgatggagcgttcagcgggatatcctggctagtggcttgagcgcacccatagtctaatagggcttttaagccgagagggttctaaatagccgacaattctccctggaatgtgaatatcacatgcattcagctcaggacatcgtctgctgctccagtcatcattccgaccgaaggacgacccgcggacgggatcttggacgcattccacgctgctcgggaggccgccagagatgcccgccactcggctattaggctgatacatgcgtgctttcatttattaatcaaagagaattgtcatattgcaagttaattaatgcatgcaagcttggcctccgcggcctgcggccgcagcttggcgtaatcatggtcatagctgtttcctgtgtgaaattgttatccgctcacaattccacacaacatacgagccggaagcataaagtgtaaagcctggggtgcctaatgagtgagctaactcacattaattgcgttgcgctcactgcccgctttccagtcgggaaacctgtcgtgccagctgcattaatgaatcggccaacgcgcggggagaggcggtttgcgtattgggcgctcttccgcttcctcgctcactgactcgctgcgctcggtcgttcggctgcggcgagcggtatcagctcactcaaaggcggtaatacggttatccacagaatcaggggataacgcaggaaagaacatgtgagcaaaaggccagcaaaaggccaggaaccgtaaaaaggccgcgttgctggcgtttttccataggctccgcccccctgacgagcatcacaaaaatcgacgctcaagtcagaggtggcgaaacccgacaggactataaagataccaggcgtttccccctggaagctccctcgtgcgctctcctgttccgaccctgccgcttaccggatacctgtccgcctttctcccttcgggaagcgtggcgctttctcatagctcacgctgtaggtatctcagttcggtgtaggtcgttcgctccaagctgggctgtgtgcacgaaccccccgttcagcccgaccgctgcgccttatccggtaactatcgtcttgagtccaacccggtaagacacgacttatcgccactggcagcagccactggtaacaggattagcagagcgaggtatgtaggcggtgctacagagttcttgaagtggtggcctaactacggctacactagaaggacagtatttggtatctgcgctctgctgaagccagttaccttcggaaaaagagttggtagctcttgatccggcaaacaaaccaccgctggtagcggtggtttttttgtttgcaagcagcagattacgcgcagaaaaaaaggatctcaagaagatcctttgatcttttctacggggtctgacgctcagtggaacgaaaactcacgttaagggattttggtcatgagattatcaaaaaggatcttcacctagatccttttaaattaaaaatgaagttttaaatcaatctaaagtatatatgagtaaacttggtctgacagttaccaatgcttaatcagtgaggcacctatctcagcgatctgtctatttcgttcatccatagttgcctgactccccgtcgtgtagataactacgatacgggagggcttaccatctggccccagtgctgcaatgataccgcgagacccacgctcaccggctccagatttatcagcaataaaccagccagccggaagggccgagcgcagaagtggtcctgcaactttatccgcctccatccagtctattaattgttgccgggaagctagagtaagtagttcgccagttaatagtttgcgcaacgttgttgccattgctacaggcatcgtggtgtcacgctcgtcgtttggtatggcttcattcagctccggttcccaacgatcaaggcgagttacatgatcccccatgttgtgcaaaaaagcggttagctccttcggtcctccgatcgttgtcagaagtaagttggccgcagtgttatcactcatggttatggcagcactgcataattctcttactgtcatgccatccgtaagatgcttttctgtgactggtgagtactcaaccaagtcattctgagaatagtgtatgcggcgaccgagttgctcttgcccggcgtcaatacgggataataccgcgccacatagcagaactttaaaagtgctcatcattggaaaacgttcttcggggcgaaaactctcaaggatcttaccgctgttgagatccagttcgatgtaacccactcgtgcacccaactgatcttcagcatcttttactttcaccagcgtttctgggtgagcaaaaacaggaaggcaaaatgccgcaaaaaagggaataagggcgacacggaaatgttgaatactcatactcttcctttttcaatattattgaagcatttatcagggttattgtctcatgagcggatacatatttgaatgtatttagaaaaataaacaaataggggttccgcgcacatttccccgaaaagtgccacctgacgtctaagaaaccattattatcatgacattaacctataaaaataggcgtatcacgaggccctttcgtctcgcgcgtttcggtgatgacggtgaaaacctctgacacatgcagctcccggagacggtcacagcttgtctgtaagcggatgccgggagcagacaagcccgtcagggcgcgtcagcgggtgttggcgggtgtcggggctggcttaactatgcggcatcagagcagattgtactgagagtgcaccatatgcggtgtgaaataccgcacagatgcgtaaggagaaaataccgcatcaggcgccattcgccattcaggctgcgcaactgttgggaagggcgatcggtgcgggcctcttcgctattacgccagctggcgaaagggggatgtgctgcaaggcgattaagttgggtaacgccagggttttcccagtcacgacgttgtaaaacgacggccagtgaattggcctccatggccgcggccgcgaattcatc

SEQ ID NO: 103 - DNA, 8678 bp, Thermoascus aurantiacus
  source 1..8678: mol_type = unassigned DNA
tcgagcttaagacctggtacatgtgccggcgcgcccgggagatctagagggtgactgacacctggcggtagacaatcaatccatttcgctatagttaaaggatggggatgagggcaattggttatatgatcatgtatgtagtgggtgtgcataatagtagtgaaatggaagccaagtcatgtgattgtaatcgaccgacggaattgaggatatccggaaatacagacaccgtgaaagccatggtctttccttcgtgtagaagaccagacagacagtccctgatttacccttgcacaaagcactagaaaattagcattccatccttctctgcttgctctgctgatatcactgtcattcaatgcatagccatgagctcatcttagatccaagcacgtaattccatagccgaggtccacagtggagcagcaacattccccatcattgctttccccaggggcctcccaacgactaaatcaagagtatatctctaccgtccaatagatcgtcttcgcttcaaaatctttgacaattccaagagggtccccatccatcaaacccagttcaataatagccgagatgcatggtggagtcaattaggcagtattgctggaatgtcgggccagttggcccgggtggtcattggccgcctgtgatgccatctgccactaaatccgatcattgatccaccgcccacgaggcgcgtctttgctttttgcgcggcgtccaggttcaactctctcgctctagatatcgatgaattcactggccgtcgttttacaacgtcgtgactgggaaaaccctggcgttacccaacttaatcgccttgcagcacatccccctttcgccagctggcgtaatagcgaagaggcccgcaccgatcgcccttcccaacagttgcgcagcctgaatggcgaatggcgcctgatgcggtattttctccttacgcatctgtgcggtatttcacaccgcatatggtgcactctcagtacaatctgctctgatgccgcatagttaagccagccccgacacccgccaacacccgctgacgcgccctgacgggcttgtctgctcccggcatccgcttacagacaagctgtgaccgtctccgggagctgcatgtgtcagaggttttcaccgtcatcaccgaaacgcgcgagacgaaagggcctcgtgatacgcctatttttataggttaatgtcatgataataatggtttcttagacgtcaggtggcacttttcggggaaatgtgcgcggaacccctatttgtttatttttctaaatacattcaaatatgtatccgctcatgagacaataaccctgataaatgcttcaataatattgaaaaaggaagagtatgagtattcaacatttccgtgtcgcccttattcccttttttgcggcattttgccttcctgtttttgctcacccagaaacgctggtgaaagtaaaagatgctgaagatcagttgggtgcacgagtgggttacatcgaactggatctcaacagcggtaagatccttgagagttttcgccccgaagaacgttttccaatgatgagcacttttaaagttctgctatgtggcgcggtattatcccgtattgacgccgggcaagagcaactcggtcgccgcatacactattctcagaatgacttggttgacgcgtcaccagtcacagaaaagcatcttacggatggcatgacagtaagagaattatgcagtgctgccataaccatgagtgataacactgcggccaacttacttctgacaacgatcggaggaccgaaggagctaaccgcttttttgcacaacatgggggatcatgtaactcgccttgatcgttgggaaccggagctgaatgaagccataccaaacgacgagcgtgacaccacgatgcctgtagcaatggcaacaacgttgcgcaaactattaactggcgaactacttactctagcttcccggcaacaattaatagactggatggaggcggataaagttgcaggaccacttctgcgctcggcccttccggctggctggtttattgctgataaatctggagccggtgagcgtgggtctcgcggtatcattgcagcactggggccagatggtaagccctcccgtatcgtagttatctacacgacggggagtcaggcaactatggatgaacgaaatagacagatcgctgagataggtgcctcactgattaagcattggtaactgtcagaccaagtttactcatatatactttagattgatttaaaacttcatttttaatttaaaaggatctaggtgaagatcctttttgataatctcatgaccaaaatcccttaacgtgagttttcgttccactgagcgtcagaccccgtagaaaagatcaaaggatcttcttgagatcctttttttctgcgcgtaatctgctgcttgcaaacaaaaaaaccaccgctaccagcggtggtttgtttgccggatcaagagctaccaactctttttccgaaggtaactggcttcagcagagcgcagataccaaatactgtccttctagtgtagccgtagttaggccaccacttcaagaactctgtagcaccgcctacatacctcgctctgctaatcctgttaccagtggctgctgccagtggcgataagtcgtgtcttaccgggttggactcaagacgatagttaccggataaggcgcagcggtcgggctgaacggggggttcgtgcacacagcccagcttggagcgaacgacctacaccgaactgagatacctacagcgtgagctatgagaaagcgccacgcttcccgaagggagaaaggcggacaggtatccggtaagcggcagggtcggaacaggagagcgcacgagggagcttccagggggaaacgcctggtatctttatagtcctgtcgggtttcgccacctctgacttgagcgtcgatttttgtgatgctcgtcaggggggcggagcctatggaaaaacgccagcaacgcggcctttttacggttcctggccttttgctggccttttgctcacatgttctttcctgcgttatcccctgattctgtggataaccgtattaccgcctttgagtgagctgataccgctcgccgcagccgaacgaccgagcgcagcgagtcagtgagcgaggaagcggaagagaggcgcccaatacgcaaaccgcctctccccgcgcgttggccgattcattaatgcagctggcacgacaggtttcccgactggaaagcgggcagtgagcgcaacgcaattaatgtgagttagctcactcattaggcaccccaggctttacactttatgcttccggctcgtatgttgtgtggaattgtgagcggataacaatttcacacaggaaacagctatgaccatgattacgccaagcttgcatgcacaactgcacctcagaagaaaaggatgatcaataccgtacgggagattgtacgaacagatggcccgagaggactattccgagggtgtgctatcaacacgtttatggccgctgtcggatcaggattatactttggtctctacgagagcaccaaatggtggctaggctctgactcgatggataattgtgccgtgttagagtagggggtggtgggaaatcttgtatataattgtgattgtttgtacgatagtgaccgactgtacattagtgataccccactctaagaaaatagaccaatctccagctgcaccttcagacactccggtacaaattctcgtctatgttggagattgttgtgactttgaaacatgacccttgaccctgattttgaatttgtccatatatcgaggcaggtgtcttattcgtacggagagggtatctgtcgtagacacatagtagtagtcatttcgagtgctgaatttataaatcgcatcatacttgcgacatactgccataaaaggagtacgtatccaccactacttattgcgcaccaacacgcttcaggtatgcatcccatccctccttctggtactgcttcgccgcctccacgggatcaggagcagcataaattccacggccagcaataataaagtcggcaccgcgtccaacagccgactcaggagtttggtactgctgtcccagcttgtcacccttcgaggagaggttgacacctgtcgtgaagacgacaaaatcttcctcctccgaaggcgagctaacttcagactgaacctcgccaaggtgacgtgtcgagacgaatcccatcacaaacttcttatacttccgagcatagtcaacagaagaagtagtatattgaccggtagccaaagatcccttggaggtcatctccgcaaggatcaaaaggcccctctcggagccgtaggggaagtcctcggccgaagcagtctgggccagagcctcgacgataccctcaccgggcagaatactgcagttgatgatgtgggcccactcagagatacgcagagtgccgccatggtactgcttttggacgttgtttccgatatcgatgaacttgcgatcttcgaagatgaggaaattgtgcttctctgcaagggccttcagaccggtgatggtttcttcgctgaaatcggagaggatatcgatgtgagttttgatcacggcaatgtacggaccgagtcctgttatataatccaccattaaccattactagatcacatgtaagtggcatccccggtgcgcatacggtcagccaaatccagcagctctttggtggttgtcacgtcggcggaaacggtgacattggttttcttggcctcggcaacctcgaagagcttctttacgagcgcattggggtgcttgctagcgcgtgcgctgtaggtcaattgcgacttggaagacataaaaccgatggaggggtagcgcggggttctgcaaatattgtataaatgagcacttagtggttgaaactggcttattagtaggttagtacttcgagttttcagtaattagacaaaataatcaggatgtccaactactaactcttgatatatggaatgaaatgtagatacaaactgcacgacaattgccgcgaaaaattaaattgaatctatggaggggactgtcatgcactagccacacgtttctccgcctgtggggtgagccacatgcctcattttgaccaaacacatcgatgcagtcacatgtagataagattagggcctatccttagggtaccgtccacgcggggattatgcctggctttttgcctgcttttgatatcctttcagggacatagcaataagcccaaccctatcggccataataatgtcaattccagcagcggcttgggtctagaatatttaatcagctaccgagcaacttctacatcacagtttgaaagcactaaggatcaatatagaagcacttaccttcgcattttctggtatattgttctgagatccataggcctgattaatgattacatacgcctccgggtagtagaccgagcagccgagccagttcagcgcctaaaacgccttatacaattaagcagttaaagaagttagaatctacgcttaaaaagctacttaaaaatcgatctcgcagtcccgattcgcctatcaaaaccagtttaaatcaactgattaaaggtgccgaacgagctataaatgatataacaatattaaagcattaattagagcaatatcaggccgcgcacgaaaggcaacttaaaaagcgaaagcgctctactaaacagattacttttgaaaaaggcacatcagtatttaaagcccgaatccttattaagcgccgaaatcaggcagataaagccatacaggcagatagacctctacctattaaatcggcttctaggcgcgcaatacatggtgttttgatcattttaaatttttatatggcgggtggtgggcaactcgcttgcgcgggcaactcgcttaccgattacgttagggctgatatttacgtaaaaatcgtcaagggatgcaagaccaaaccgttaaatttccggagtcaacagcatccaagcccaagtccttcacggagaaaccccagcgtccacatcacgagcgaaggaccacctctaggcatcggacgcaccatccaattagaagcagcaaagcgaaacagcccaagaaaaaggtcggcccgtcggccttttctgcaacgctgatcacgggcagcgatccaaccaacaccctccagagtgactaggggcggaaatttatcgggattaatttccactcaaccacaaatcacagtcgtccccggtattgtcctgcagacggcaatttaacggcttctgcgaatcgcttggattccccgcccctggccgtagagcttaaagtatgtcccttgacaatgcgatgtatcacatgatataattactagcaagggaagccgtgcttggagtttccaactcaatttacctctatccacacttctcttccttcctcaatcctctatatacacaactggggatccagcggccgcaccatgcgagcaatcggcttgttgcctggcatcatcggtatcgcgggtgccgcatgtccctacatgacaggcgagctccctcggtcgttcgccgaaaaccctcacgccattaacaggcgagcggagggaggaggaggcgcagcagccgaaacagaaaagttcttgtcccagttctatttgaacgataacgacacgttcatgactacggatgtcggtggaccgattgaggaccagaactccctctcggcaggagatcgaggacccaccctcttggaagatttcatcctccgtcagaaaattcagcggttcgaccacgaaagggtgccggaacgcgcagtccatgcccgaggcgcaggtgcccatggcgtgttcacttcctacgcagactggtcgaacatcactgcagcgtcgttcctctccgcagcaggcaaggagacacccgtgttcgtcaggttctcgactgtggcaggctccaggggatcggcagacactgcacgcgatgtccatggtttcgccacaaggttctataccgatgagggtaacttcgatatcgtgggcaacaacattcccgtcttcttcatccaggacgccatccagttccccgacttgatccatgcggtgaagccgtcgcccaacaacgaaattcctcaggcagccacagcacacgattcggcatgggacttcttctcgcagcagccgtcgtcgttgcataccctcttctgggccatggcaggacacggaattcctcggtcctatcgaaacatggacggattcggcatccacaccttcaggttcgtcacagacgatggagcgtcgaagttggtgaagttccactggacctccctccagggcaaggcgtcgttggtctgggaagaagcacaggccgtcgcaggcaaaaacgccgattaccacaggcaggatttgtgggatgcgatcgaagcaggacgctatcctgaatgggaattgggtgtgcagatcatggacgaagaagaccagttgcggttcggattcgatttgttggaccctaccaagatcgtccccgaagaatacgtccccatcaccaaattgggcaagatgcagttgaaccgtaacccgttgaactatttcgcggaaactgaacagattatgttccagcctggccacgtggtgaggggcatcgatttcaccgaggaccctttgctccagggccggttgttctcgtacctcgacacccagctcaaccggcatggcggacccaacttcgagcagattcccatcaaccgacctcgcactccgatccataacaacaacagggatggtgcagcacagatgtacatccccttgaacaaggcagcgtacactcccaacacgctcaacaacggttcgcccaagcaggcgaaccagactgtgggcaagggcttcttcaccactcctggacgcactgcctccggcaggctcgtccgagcggtctcgtcgactttcgcggacgtctggtcgcagcccaggctcttctacaactcgctcgtgcctgccgaacagcagttcctcattaacgcaatccgattcgagacggcccacattacgtcggatgtggtcaagaacaacgtgatcatccagctcaaccgagtctccaacaacttggcgaaacgggtggcaagggcgatcggcgtggccgagcccgaacccgaccccaccttgtaccacaacaacaagacagcaaacgtgggcgtgttcggaaagccgttggccaggctcgacggattgcaggtcggcgtcctcgcaaccgtcaacaagccggactccatcaagcaggcagcctccctcaaggcctcgttcgcagcagataacgtcgacgtcaaagtcgtcgcggagaggctcgcagatggcgtggacgaaacctactccgcagccgatgccgtcaacttcgacgcgatcctcgtggcaaacggagccgagggattgttcgcacgggactcgttcacagcacgccctgcaaactcgaccactgccacactctaccctgcaggccgaccgctccagattttggtggacggattcaggtacggcaagcctgtgggtgcactcggatcgggagcaaaggccctcgatgcagccgaaatctcgactacaagggcaggcgtctatgtcgcgaactcgacaaccgattccttcatcaacggtgtcagggacggcctccgtactttcaaattcctcgatcgcttcgccatcgacgaagacgccgagtgac

SEQ ID NO: 104 - DNA, 1264 bp, Coprinopsis cinerea
  source 1..1264: mol_type = unassigned DNA
cccacctgttctactactagtcctcttccatttgatatttgaacgctgtttccgaggtcaagaacgacaactatgaagctctcgcttttgtccaccttcgctgctgtcatcatcggtgccctcgctctaccccagggtcctggaggaggcgggtcagtcacttgccccggtggacagtccacttcgaacagccagtgctgcgtctggttcgacgttctagacgatcttcagaccaacttctaccaagggtccaagtgtgagagccctgttcgcaagattcttagaattgttttccatgacgcgatcggattttcgccggcgttgactgctgctggtcaattcggtggtggaggagctgatggctccatcattgcgcattcgaacatcgaattggccttcccggctaatggcggcctcaccgacaccgtcgaagccctccgcgcggtcggtatcaaccacggtgtctctttcggcgatctcatccaattcgccactgccgtcggcatgtccaactgccctggctctccccgacttgagttcttgacgggcaggagcaacagttcccaaccctcccctccttcgttgatccccggtcccggaaacactgtcactgctatcttggatcgtatgggcgatgcaggcttcagccctgatgaagtagttgacttgcttgctgcgcatagtttggcttctcaggagggtttgaactcggccatcttcaggtctcctttggactcgacccctcaagttttcgatacccagttctacattgagaccttgctcaagggtaccactcagcctggcccttctctcggctttgcagaggagctctcccccttccctggcgaattccgcatgaggtccgatgctctcttggctcgcgactcccgaaccgcctgccgatggcaatccatgaccagcagcaatgaagttatgggccagcgataccgcgccgccatggccaagatgtctgttctcggcttcgacaggaacgccctcaccgattgctctgacgttattccttctgctgtgtccaacaacgctgctcctgttatccctggtggccttactgtcgatgatatcgaggtttcgtgcccgagcgagcctttccctgaaattgctaccgcctcaggccctctcccctccctcgctcctgctccttgatctggtgaagatggtacatcctgcttctctcatcatccctcttagctatttatccaatctatctacctatctatgcagtttctgtccaccctcagttgtg

SEQ ID NO: 105 - DNA, 926 bp, Penicillium emersonii
  source 1..926: mol_type = unassigned DNA
atcatggatatataaacgtcaagataagctgaggtgatccaagtcctgcattctgataatatgctgtcttcgacgactcgcaccctcgcctttacaggccttgcgggccttctgtccgctcccctggtcaaggcccatggctttgtccagggcattgtcatcggtgaccaattctacagcgggtacatcgtcaactcgttcccctacgaatccaacccaccccccgtcatcggctgggccacgaccgccaccgacctgggcttcgtcgacggcacaggataccaaggcccggacatcatctgccaccggaatgcgacgcccgcgccgctgacagcccccgtggccgccggcggcaccgtcgagctgcagtggacgccgtggccggacagccaccacggacccgtcatcacctacctggcgccgtgcaacggcaactgctcgaccgtcgacaagacgacgctggagttcttcaagatcgaccagcagggcctgatcgacgacacgagcccgccgggcacctgggcgtcggacaacctcatcgccaacaacaatagctggaccgtcaccattcccaacagcgtcgcccccggcaactacgtcctgcgccacgagatcatcgccctgcactcggccaacaacaaggacggcgcccagaactacccccagtgcatcaacatcgaggtcacgggcggcggctccgacgcgcctgagggtactctgggcgaggatctctaccatgacaccgacccgggcattctggtcgacatttacgagcccattgcgacgtataccattccggggccgcctgagccgacgttctagaagaagtcgggaggaggggcaggtatcagggcgcgaggctgtatgtcaacaatcagctaacgtgtgtcctctgccgcttgggtgtcgatcatctacctgtgttg

SEQ ID NO: 106 - DNA, 747 bp, Thermoascus aurantiacus
  source 1..747: mol_type = unassigned DNA
atgtctttttctaaaattattgctactgctggtgttttagcttctgcttctttagttgctggtcatggttttgttcaaaatattgttattgatggtaaaaattatggtggttatttagttaatcaatatccttatatgtctaatcctcctgaagttattgcttggtctactactgctactgatttaggttttgttgatggtactggttatcaaactcctgatattatttgtcatcgtggtgctaaacctggtgctttaactgctcctgtttctcctggtggtactgttgaattacaatggactccttggcctgattctcatcatggtcctgttattaattatttagctccttgtaatggtgattgttctactgttgataaaactcaattagaattttttaaaattgctgaatctggtttaattaatgatgataatcctcctggtatttgggcttctgataatttaattgctgctaataattcttggactgttactattcctactactattgctcctggtaattatgttttacgtcatgaaattattgctttacattctgctcaaaatcaagatggtgctcaaaattatcctcaatgtattaatttacaagttactggtggtggttctgataatcctgctggtactttaggtactgctttatatcatgatactgatcctggtattttaattaatatttatcaaaaattatcttcttatattattcctggtcctcctttatatactggt

SEQ ID NO: 107 - DNA, 1758 bp, Bacillus licheniformis
  source 1..1758: mol_type = unassigned DNA
atgagacggttagctttcttagttgttgcgttttgcttggcggttggttgctttttcagtccggtgtctaaagcagaaggagtcatgagcgggggaggtggtgataaagtcgccgtcgggaaagacggtatggtggctacggcccatccgcttgcatcaaaaatcggagccgaagttttgaaaaagggcgggaatgccattgatgcagctattgcgatccagtacgcactgaatgtaacagagccgatgatgtcgggaatcggcggcggcggcttcatgatggtctacgacggcgagacgaaggaaacgtcgatcatcaacagcagggagcgtgctccggagggagccaaacctgacatgtttttggatggagacggaaaggtgattcctttttcagaaaggtcgagacacggaaatgcggtcggtgtgccgggaacgctgaaagggcttgaagcagcgcataagaagtggggaacaaagaaaatggaagacttgatttcgccttctataaagcttgcagaggaagggttcccaatcgactcggttttggctgacgcgataaaggatcatcaggacaagctgagcaaaacggccgcaaaggatattttccttccggacggtgaacctttgaaagaaggcgatatcctcgtacaaaaggatttggccaagacgtttaaattgatacggaaagaagggtcaaaagccttttatgatggagaaatcggccgggcgattgcagatgtcgtgcaggatttcgggggttcgatgacacctgatgacctgtcccgctacgaggtcacaacagataagccgatctggggcgagtaccacggctatgatatcgcaagcatgcctcctccaagctcaggcggagtgttcatgctgcagatgctgaaattgattgatgattttcatttatcgcaatacgatccaaagtcgtttgaaaaatatcatctgctcgcggaaacgatgcatctctcctatgcggacagggctgcatatgcgggcgatccggaatttgtcgatgttccgctcagagggctgctcgatcccgattatattaaggagcggcaaaagctgatcagccttgattcgatgaaccgcgatgtgaaagagggcgatccgtggaaatatgaggaaggcgagccgaattatgagatcgtgcctcagcctgaagataaaacgatcggggagacgacgcattttaccgtcacggatcagtggggcaatgttgtctcttatacgacaacgattgaacagctttttggaacggggattttagtgcccgggtacggactgtttttaaacaatgaactgaccgattttgatgcggttccaggcggcgccaacgaggtgcagccgaataaaaggccgctttcaagcatgacgccgacgatcgtattcaaagatgaaaaaccggtgctgactgtcggttcccctggcggaacgacgatcattgcttccgttttccagacgatcttgaattattttgagtacggcatgagccttcaggatgcgattgaagagccgagaatctatacgaacagcctgacttcgtaccgctatgaatccggaatgccggaggatgtcagacgaaagctcaatgacttcggccacaaattcggcgcgaatccggttgatatcggcaatgtccaaagcattttcattgaccgggagaacaaaacgtttatgggggttgccgattcaagcagaaatggaacggcggtcggggtcaacattaagacatcggctaaatag

SEQ ID NO: 108 - DNA, 876 bp, Thermomyces lanuginosus
  source 1..876: mol_type = unassigned DNA
atgaggagctcccttgtgctgttctttgtctctgcgtggacggccttggccagtcctattcgtcgagaggtctcgcaggatctgtttaaccagttcaatctctttgcacagtattctgcagccgcatactgcggaaaaaacaatgatgccccagctggtacaaacattacgtgcacgggaaatgcctgccccgaggtagagaaggcggatgcaacgtttctctactcgtttgaagactctggagtgggcgatgtcaccggcttccttgctctcgacaacacgaacaaattgatcgtcctctctttccgtggctctcgttccatagagaactggatcgggaatcttaacttcgacttgaaagaaataaatgacatttgctccggctgcaggggacatgacggcttcacttcgtcctggaggtctgtagccgatacgttaaggcagaaggtggaggatgctgtgagggagcatcccgactatcgcgtggtgtttaccggacatagcttgggtggtgcattggcaactgttgccggagcagacctgcgtggaaatgggtatgatatcgacgtgttttcatatggcgccccccgagtcggaaacagggcttttgcagaattcctgaccgtacagaccggcggaacactctaccgcattacccacaccaatgatattgtccctagactcccgccgcgcgaattcggttacagccattctagcccagagtactggatcaaatctggaacccttgtccccgtcacccgaaacgatatcgtgaagatagaaggcatcgatgccaccggcggcaataaccagcctaacattccggatatccctgcgcacctatggtacttcgggttaattgggacatgtctttag

SEQ ID NO: 109 - DNA, 807 bp, Thermomyces lanuginosus
  source 1..807: mol_type = unassigned DNA
gaagtttctcaagatttatttaatcaatttaatttatttgctcaatattctgctgctgcttattgtggtaaaaataatcgtgctcctgctggtactaatattacttgtactggtaatgcttgtcctgaagttgaaaaagctgatgctacttttttatattcttttgaagattctggtgttggtgatgttactggttttttagctttagataatactaataaattaattgttttatcttttcgtggttctcgttctattgaaaattggattaataatttacgttttgatttaaaagaaattaatgatatttgttctggttgtcgtggtcatgctggttttacttcttcttggcgttctgttgctgatactttacgtcaaaaagttgaagatgctgttcgtgaacatcctgattatcgtgttgtttttactggtcattctttaggtggtgctttagctactgttgctggtgctgatttacgtggtaatggttatgatattgatgttttttcttatggtgctcctcgtgttggtaatcgtgcttttgctgaatttttaactgttcaaactggtggtactttatatcgtattactcatactaatgatattgttcctcgtttacctcctcgtgaatttggttattctcatccttctcctgaatattggattaaatctggtactggtgttcctgttactcgtaatgatattgttaaaattgaaggtattgatgctactggtggtaataatcaacctaatattcctgatattactgctcatttatggtattttggtttaattggtacttgttta

SEQ ID NO: 110 - DNA, 582 bp, Humicola insolens
  source 1..582: mol_type = unassigned DNA
caattaggtgctattcaaaatgatttagaatctggttctcctgatgcttgtcctgatgctattttaatttttgctcgtggttctactgaacctggtaatatgggtattactgttggtcctgctttagctaatggtttaaaagaacatattcctaatatttggattcaaggtgttggtggtccttatgatgctgctttagctactaattttttacctcgtggtacttctcaagctaatattgatgaaggtaaacgtttatttcatttagctcatcaaaaatgtcctaatactcctgttgttgctggtggttattctcaaggtgctgctttaattgctgctgctgtttctgaattatctggtgctgttaaagaacaagttaaaggtgttgttttatttggttatactcaaaatttacaaaatcgtggtggtattcctaattatcctcgtgaacgtactaaagttttttgtaatgttggtgatgctgtttgtactggtactttaattattactcctgctcatttatcttatactattcaagctcgtggtgaagctgctcgttttttagttgatcgtattcgtgct

SEQ ID NO: 111 - DNA, 822 bp, Thermomyces lanuginosus
  source 1..822: mol_type = unassigned DNA
tctcctattcgtcgtgaagtttctcaagatttatttaatcaatttaatttatttgctcaatattctgctgctgcttattgtggtaaaaataatgatgctcctgctggtactaatattacttgtactggtaatgcttgtcctgaagttgaaaaagctgatgctacttttttatattcttttgaagattctggtgttggtgatgttactggttttttagctttagataatactaataaattaattgttttatcttttcgtggttctcgttctattgaaaattggattggtaatttaaattttgatttaaaagaaattaatgatatttgttctggttgtcgtggtcatgatggttttacttcttcttggcgttctgttgctgatactttacgtcaaaaagttgaagatgctgttcgtgaacatcctgattatcgtgttgtttttactggtcattctttaggtggtgctttagctactgttgctggtgctgatttacgtggtaatggttatgatattgatgttttttcttatggtgctcctcgtgttggtaatcgtgcttttgctgaatttttaactgttcaaactggtggtactttatatcgtattactcatactaatgatattgttcctcgtttacctcctcgtgaatttggttattctcattcttctcctgaatattggattaaatctggtactttagttcctgttcgtcgtcgtgatattgttaaaattgaaggtattgatgctactggtggtaataatcaacctaatattcctgatattcctgctcatttatggtattttggtttaattggtacttgttta

SEQ ID NO: 112 - DNA, 1455 bp, Penicillium thomii
  source 1..1455: mol_type = unassigned DNA
atgtctctgtctaagatttctggattgatcctcggatctgctgccttggtggctggccacggttacgtgagcggaatcgtcgttgacgatacctactatggtggataccttgtcacccagtacccttatgagagtgacgccccagagctcattgcctggtcggagcaagagaccgatctgggttacatcgatggctctgagtatgccaactccaacatcatctgtcacaaggaggccaaacctggtgctttggaagcacccgttaaggctggtggctccgtcgagctccagtggaccacttggcctaccagccaccacggtcctgtcattacctacatggccaactgtaacggcgactgtgacgacgttgacaagactactttgcagttcttcaagattgaccagggtggtttgatcagcgataccaccgagcccggtacctgggcaactgacaacctcatcgccaacaacaatagccgtactgtcaccgtccccagcgacattgccgatggaaactacgtcctccgtcacgagatcattgccctccactccgccggggagaccaacggtgcccagaactacccccaatgtatcaacttgaaggtcactggcggcggtagcgctactccttctggtaccctgggtaccgccctgtacaagaacaccgaccccggtatcctgatcaacatctacacttccctcagcacctacgatatccccggcccaaccctgtacactgccggcgccgccgctgctaccgctgcctccacggctgcctcttccaccgccgctgccgttactactgccgacgccgtcactaccgccgctgccgtcaccagcagctctgcatccgtggaagttgtgcccacaactactcccagctcatcaatcgtcagtgccttcccaacctggagcccctcttctaccccacccttctccaactcttccaacggatggcgtccgtcattcagccgcggacctggtggcccccgcttcacatctgctcctgctcctcagttctccgctcctagcggcgctcagcagaagcagtctgccactgctacccccatcgtggctacccctgtcgtgatcaccatgaccgagaccagcacctcctgggtcaccgaaatggttactcttactgacaagtctgttgtgcagaccaccagcgctgtcccagtcgtcgtcgccgccaccactacccttaccgagggaagcgagcctgctcagacagcctcccccagcgttgtctccggctcctctagctccggctctagctcctcatctaccaccaccacctcaaagacctcaactggatccgactacgtctccagcgactggatgtcttacctcagctccttgagcgctgctgaggtcctccagatgctgcgccagaccttccgttggatggtcagcaacgacaaggtgcacgctcgtgatattaccatcaactag

SEQ ID NO: 113 - DNA, 1002 bp, Cryphonectria parasitica
  source 1..1002: mol_type = unassigned DNA
atgagactgtcggtcgcctcctcactttccctggcctctggcctggtggcagcctcgcctcttcaggctcgtgactccgccgtcctggacgagacgagttacgaaaacatgaagtactacgtgcagtatgctgcgtctgcgtactgcgacagcgaagatgctgtgggcacactcgtatcctgcggtgactctgggtgtcctaatgtcacggcgaatggtgccaccatcgtcggtaccatgcccaccaccaccaccttcgacctggaaggctatgtggccgtcgaccccacccgcgaagaaattgtggtcgcattccgtggctcatctgacctgcgcaactggattgcagacttcgacttcattgaggttgcgtactcggattgcactggctgctatgtccacgatggattctacgaatcctggaaggaaattcagacctatgccgtcgggtacgtcgaggcggcgtacgagacgtacccagactataccctcgtcatcacaggtcactccctgggcgccgccgtcgccaccctcgcgggtgtgcagttcagaatcgacggctacccttgtgatatctacactgtcggctccccccgcatcggcaacctggcatgggccgagtttgtgaccgcccaggatggcgctgaataccgggctacccattacgatgaccccgtgccgcgcctgccacccatcgtgcttggctactaccacacgagccccgagttctggctcgccgccggtcccgccaccaacatcgactacaccattgacggaattgatgtctgcgtaggcaacgcaaacaccagttgcaacgccggcacgactggctttgacgccgatgcgcacgaatactacttccagtacatgggctgtggcgatgagagcaacggcattgacatgcgcaagcgcaacatcaccgatgcggagctggcccagaagctcaccaactacacgatgcaagatatcgccttttcggagaagctcgcctccagcagctaa

SEQ ID NO: 114 - DNA, 2020 bp, Thermomyces lanuginosus
  source 1..2020: mol_type = unassigned DNA
accaaagtactaaaaccccggagtcaacagcatccaagcccaagtccttcacggagaaaccccagcgtccacatcacgagcgaaggaccacctctaggcatcggacgcaccatccaattagaagcagcaaagcgaaacagcccaagaaaaaggtcggcccgtcggccttttctgcaacgctgatcacgggcagcgatccaaccaacaccctccagagtgactaggggcggaaatttatcgggattaatttccactcaaccacaaatcacagtcgtccccggtattgtcctgcagaatgcaatttaaactcttctgcgaatcgcttggattccccgcccctggccgtagagcttaaagtatgtcccttgtcgatgcgatgtatcacaacatataaatactggcaagggatgccatgcttggagtttccaactcaatttacctctatccacacttctcttccttcctcaatcctctatatacacaactggggatccttcaccatgaggagctcccttgtgctgttctttgtctctgcgtggacggccttggccagtcctatacgtagagaggtctcgcaggatctgtttaaccagttcaatctctttgcacagtattcagctgccgcatactgcggaaaaaacaatgatgccccagcaggtacaaacattacgtgcacgggaaatgcctgccccgaggtagagaaggcggatgcaacgtttctctactcgtttgaagactctggagtgggcgatgtcaccggcttccttgctctcgacaacacgaacaaattgatcgtcctctctttccgtggctctcgttccatagagaactggatcgcgaatcttaacttctggttgaaaaaaataaatgacatttgctccggctgcaggggacatgacggcttcacttcgtcctggaggtctgtagccgatacgttaaggcagaaggtggaggatgctgtgagggagcatcccgactatcgcgtggtgtttaccggacatagcttgggtggtgcattggcaactgttgccggagcagacctgcgtggaaatgggtatgatatcgacgtgttttcatatggcgccccccgagtcggaaacagggcttttgcagaattcctgaccgtacagaccggcggaacactctaccgcattacccacaccaatgatattgtccctcgactcccgccgcgcgaattcggttacagccattctagcccagagtactggatcaaatctggaacccttgtccccgtcacccgaaacgatatcgtgaagatagaaggcatcgatgccaccggcggcaataaccagcctaacattccggatatccctgcgcacctgtggtacttccaggcgactgacgcctgtaacgctggtggcttctcttggcgacgatacagaagcgccgagagcgtcgacaagagggccaccatgactgatgccgagcttgagaagaagctgaactcttatgtccagatggataaggagtatgtgaagaataaccaggcccgctcttaacgagggtatgaggtttgatggtctagagggtgactgacacctggcggtagacaatcaatccatttcgctatagttaaaggatggggatgagggcaattggttatatgatcatgtatgtagtgggtgtgcataatagtagtgaaatggaagccaagtcatgtgattgtaatcgaccgacggaattgaggatatccggaaatacagacaccgtgaaagccatggtctttccttcgtgtagaagaccagacagacagtccctgatttacccttgcacaaagcactagaaaattagcattccatccttctctgcttgctctgctgatatcactgtcattcaatgcatagccatgagctcatcttagatccaagcacgtaattccatagccgaggtccacagtggagcagcaacattccccatcattgctttccccaggggcctcccaacgactaaatcaagagtatatctctaccgtccaatagatcgtcttcgcttcaaaatc

SEQ ID NO: 115 - DNA, 12205 bp, Aspergillus niger
  source 1..12205: mol_type = unassigned DNA
ggatccaccatgaagttgcctctctttgctgctgcagcagctggcctcgccaatgccgcttccctgcctgtcgaaagggccgaggctgaggttgcgtccgtcgccgccgatttaatcgtccgcgccctccccaatgcccccgatggctacactccctccaatgtcacctgtccctcgactcgtccgagcattcgtgatgcctcgggcatctccaccaacgagaccgagtggctcaaggtccgtcgcaatgcgaccctcaccccgatgaagaacctccttagccgtctcaacctcaccggctttgataccacctcctacatcaatgaacactccagcaacatctccaacatccccaacattgcaattgcggcttcgggtggtggataccgtgcgctcaccaacggagctggtgcgctgaaggctttcgacagccgctccgacaatgccaccaactccggtcaactgggtggtctgctgcaggcggcaacctacgtctctggtctgagtggtggtagctggctggtcggatccatgttcgtcaacaacttctcctccatcggtgaattgcaagccagcgagaaggtctggcgcttcgacaagtccctgctcgagggacccaacttcgaccacatccagatcgtcagcacggtggaatactggaaggacattaccgaggaagtcgacggcaaggctaacgctggttttaacacttccttcaccgactactggggccgtgcgctgtcctaccagctggtgaacgcctccgatgacaagggtggtcccgactacacctggtcctccattgcgctcatggacgacttcaagaacggccagtaccccatgcctattgtggtcgccgacggccgcaaccccggcgaaatcatcgttgagaccaatgccaccgtttatgaagtgaacccttgggaattcggctctttcgaccccagcgtctacgccttcgctcccctgcagtatctgggctcccggttcgagaacggctccatcccggacaacggcacctgcgtgagcggcttcgacaatgccggctttatcatgggatcatcctccaccctgttcaaccaattcctcctccaaatcaacagcaccagcatccccacgatcctgaaggatgccttcactgacatcctcgaggacctcggtgagcgcaacgacgatatcgccgtctactcccccaaccccttctccggctaccgcgacagcagcgaggattacgccacagccaaggacctcgacgttgtcgacggtggtgaagacggcgagaacatccctctgcacccgctgatccagcccgagcgtgccgtcgatgtcatcttcgccatcgactcctctgccgacacagactactactggcccaacggtacctcccttgtcgcgacctacgagcgcagtctcgagcccagcatcgccaacggcaccgccttccccgccgtgccggatcagaacaccttcgtcaacctgggtctcaactcccgcccgactttcttcggctgcgaccccaagaacatctccggcaccgcccccctggtcatttatctgcctaacagcccctacacctacgactccaacttctcgaccttcaagctgacctacagcgacgaggagcgtgattccgtcatcaccaacggctggaacgtggtcactcgcggtaacggtaccgttgatgataacttcccgtcttgcgtggcgtgcgctattctccagcgctccacctacaggacgaacacctctctgccagatatctgtaccacctgctttaacgattactgctggaacggcacgacaaacagcactacgcctggagcttatgaacccagtgtgtagcacggcccagatccgggtgactgacacctggcggtagacaatcaatccatttcgctatagttaaaggatggggatgagggcaattggttatatgatcatgtatgtagtgggtgtgcataatagtagtgaaatggaagccaagtcatgtgattgtaatcgaccgacggaattgaggatatccggaaatacagacaccgtgaaagccatggtctttccttcgtgtagaagaccagacagacagtccctgatttacccttgcacaaagcactagaaaattagcattccatccttctctgcttgctctgctgatatcactgtcattcaatgcatagccatgagctcatcttagatccaagcacgtaattccatagccgaggtccacagtggagcagcaacattccccatcattgctttccccaggggcctcccaacgactaaatcaagagtatatctctaccgtccaatagatcgtcttcgcttcaaaatctttgacaattccaagagggtccccatccatcaaacccagttcaataatagccgagatgcatggtggagtcaattaggcagtattgctggaatgtcggggccagttggcccggtggtcattggccgcctgtgatgccatctgccactaaatccgatcattgatccaccgcccacgaggcgcgtctttgctttttgcgcggcgtccaggttcaactctctccactagtggaccagacaggcgccactcggccgggccacagctgcttgggtgttgaccgggagcggaccaattaaggactcgaacgaccgcggggttcaaatgcaaacaagtacaacacgcagcaaacgaagcagcccaccactgcgttgatgcccagtttgactgtccgaaatccaccggaaaggtggaaacatactatgtaacaatcagagggaagaaaaaatttttatcgacgaggcaggatagtgactgatggtggggtcatggtcgggtctccgagcgaaagagaaccaaggaaacaagatcaacgaggttggtgtacccaaaaggccgcagcaacaagagtcatcgcccaaaagtcaacagtctggaagagactccgccgtgcagattctgcgtcggtcccgcacatgcgtggtgggggcattacccctccatgtccaatgataagggcggcggtcgagggcttaagcccgcccactaattcgccttctcgcttgcccctccatataaggattccccctccttcccctcccacaacttttttccttctttctctcttcgtccgcatcagtacgtatatctttcccccatacctcctttcctactcttcttccattcattcaactcttctccttactgacatctgttttgctcagtacctctacgcgatcagccgtagtatctgagcaagcttctctacagaatctttctagtatcttacaaagaactacaaagttcgcaccaggtaccacagaatgcctcaatcctgggaagaactggccgctgataagcgcgcccgcctcgcaaaaaccatccctgatgaatggaaagtccagacgctgcctgcggaagacagcgttattgatttcccaaagaaatcgggtatcctttcagaggccgaactgaagatcacagaggcctccgctgcagatcttgtgtccaagctggcggccggagagttgacctcggtggaagttacgctagcattctgtaaacgggcagcaatcgcccagcagttagtagggtcccctctacctctcagggagatgtaacaacgccaccttatgggactatcaagctgacgctggcttctgtgcagacaaactgcgcccacgagttcttccctgacgccgctctcgcgcaggcaagggaactcgatgaatactacgcaaagcacaagagacccgttggtccactccatggcctccccatctctctcaaagaccagcttcgagtcaaggtacaccgttgcccctaagtcgttagatgtccctttttgtcagctaacatatgccaccagggctacgaaacatcaatgggctacatctcatggctaaacaagtacgacgaaggggactcggttctgacaaccatgctccgcaaagccggtgccgtcttctacgtcaagacctctgtcccgcagaccctgatggtctgcgagacagtcaacaacatcatcgggcgcaccgtcaacccacgcaacaagaactggtcgtgcggcggcagttctggtggtgagggtgcgatcgttgggattcgtggtggcgtcatcggtgtaggaacggatatcggtggctcgattcgagtgccggccgcgttcaacttcctgtacggtctaaggccgagtcatgggcggctgccgtatgcaaagatggcgaacagcatggagggtcaggagacggtgcacagcgttgtcgggccgattacgcactctgttgagggtgagtccttcgcctcttccttcttttcctgctctataccaggcctccactgtcctcctttcttgctttttatactatatacgagaccggcagtcactgatgaagtatgttagacctccgcctcttcaccaaatccgtcctcggtcaggagccatggaaatacgactccaaggtcatccccatgccctggcgccagtccgagtcggacattattgcctccaagatcaagaacggcgggctcaatatcggctactacaacttcgacggcaatgtccttccacaccctcctatcctgcgcggcgtggaaaccaccgtcgccgcactcgccaaagccggtcacaccgtgaccccgtggacgccatacaagcacgatttcggccacgatctcatctcccatatctacgcggctgacggcagcgccgacgtaatgcgcgatatcagtgcatccggcgagccggcgattccaaatatcaaagacctactgaacccgaacatcaaagctgttaacatgaacgagctctgggacacgcatctccagaagtggaattaccagatggagtaccttgagaaatggcgggaggctgaagaaaaggccgggaaggaactggacgccatcatcgcgccgattacgcctaccgctgcggtacggcatgaccagttccggtactatgggtatgcctctgtgatcaacctgctggatttcacgagcgtggttgttccggttacctttgcggataagaacatcgataagaagaatgagagtttcaaggcggttagtgagcttgatgccctcgtgcaggaagagtatgatccggaggcgtaccatggggcaccggttgcagtgcaggttatcggacggagactcagtgaagagaggacgttggcgattgcagaggaagtggggaagttgctgggaaatgtggtgactccatagctcgagatctagagggtgactgacacctggcggtagacaatcaatccatttcgctatagttaaaggatggggatgagggcaattggttatatgatcatgtatgtagtgggtgtgcataatagtagtgaaatggaagccaagtcatgtgattgtaatcgaccgacggaattgaggatatccggaaatacagacaccgtgaaagccatggtctttccttcgtgtagaagaccagacagacagtccctgatttaccctgcacaaagcactagaaaattagcattccatccttctctgcttgctctgctgatatcactgtcattcaatgcatagccatgagctcatcttagatccaagcacgtaattccatagccgaggtccacagtggagcagcaacattccccatcattgctttccccaggggcctcccaacgactaaatcaagagtatatctctaccgtccaatagatcgtcttcgcttcaaaatctttgacaattccaagagggtccccatccatcaaacccagttcaataatagccgagatgcatggtggagtcaattaggcagtattgctggaatgtcggggccagttggccgggtggtcattggccgcctgtgatgccatctgccactaaatccgatcattgatccaccgcccacgaggcgcgtctttgctttttgcgcggcgtccaggttcaactctctccttgaagttcctattccgagttcctattcttcaaatagtataggaacttcacctagcaaagtattttcggtacgattttgacatttgctccattgtcgaggatggatggaacgagcggcgtgcgccacgaaagtgaggctattgcctatcagctctttgctacattccggaaacaaacatccctttttgtgaattatctacgcaacttagatggcgtgaacgcatcttcaaagtctttcggcaggtccggcacgacttttgcatccagagaagcgcctacatgtgtattcgaccacctcctagcgcgcttggatatgaggaaatattactgagagtcgaaaacaagctccaccgcaccagctcttcttggagttttatattaaagaatattcccagctcgttgtattattctttttctaccgtgctaatgtatcaaggactttggtacctattaacgttattattcgtgtgctattcccaaacataaccctgtatatgtttcgaacgccgttatgacccatgtcttacatactcattaagtcattcccttggataatctcgactcagatgcggcggttgatgtaggaggagaggtaatcgaggacctcctgggagatgatgccgttccaggcggggtagcggatggagccctcggcggagcccttgagctgctcgatatgctgccactcctcgatggggttggtctcatccttgagggcgatcatctccttggagatgggatcgtaggcgtagtagcgggagactagtgcgaagtaatgatcggggatggcggtgatctgatgggtgtaggtggtgcgggcgacggcggaggcgcgcttatcggaccagttgccgacgacgttggtgagctcggtgaggcccttcatggagaggaaggaggtcatgagatggcggccgatatgggacttggggccgttcttgatggcgaagatggagtagggggcgttcttcttgagggccttgttgtaggagcggacgaggttatccttgaggagctggtactcctgcttgttggaggaggagttgccggtgcggttgacgcgcttgaggacgggctcggagttgcggaggaactcatcgaggtagacgaggggatcgatgcggccgcgggcggagaagaagtagatatggcgggagacggaggtcttggtctcggtgacgaggcactggatgatgacgccgaggtacttgttctggacgagcttgaaggacttgggatcgacgttcttgatatcggagaagcggccgcagttgatgaaggtggcgaggaagaggaactggtagagggtcttggtcttggtgaagcgggaggtgtactcgaaggagttgaggatcttctcggtgatctcccagatggactcgccctcggagaggagggccttgagcatcttcttggaatgggagttgcccttatcggcctcctcggaggactcgaactggagctggagggaggagacgatatcggtgatatcggactgatgcttctggccgtagtaggggatgatggtgaactcccaggcggggatgagcttcttgagggaggcctccaggatggtggccttctgggtcttgtacttgaactggagggacttgttgacgatatcgaaggagagggagttggagatgatggtgttgtaggacatgaaggtggcgcgcttgatggcggtgccgttatgggtgatcatccagcagaggtaggtgagctcggcggcgcagagggcgatcttctcgccggaggggcgctcgaagcgctcgacgaactggcggacgaggaccttggggggggtcttgcagaggatatcgaactggggcatggtggatcgatccttatgttttgacaaagcgacagaacagcgtcccaagcacagcttgactatccagagaacgctgtccctgacgacgattcttaaatatttgcgttcagcatgactccagagccttgagcaccttgcacggcagatcaacccacgaactacccttctaatcccgtatgatgcttgatggatgccaaatggagccggcaattaatccatctgccaggaacgggggtatacaacatctctcattggccgaaactccgatcagttcgggggccaggatttaaccctggtcccctttaattgttgcagaacaacaaatctccgacacgggactactgactgttaactgaatacgcctgatagtgggggtaagaaacaacgcccgaaccttgttatgactcgtggaggacgcgacggattgctcggggggtggtgagccggggttaacagggtaagctgcaggctgcccgttagggcgcctcgcttggcgaagcgagatgaaatcctgcagactacaccggttgacaccatacgaccctatgggtgtggagaggataaattaaacttatatctacgaaaagttaaagcccgtcccatgttgcacttcagctgcaaggtgatggagcgttcagcgggatatcctggctagtggcttgagcgcacccatagtctaatagggcttttaagccgagagggttctaaatagccgacaattctccctggaatgtgaatatcacatgcattcagctcaggacatcgtctgctgctccagtcatcattccgaccgaaggacgacccgcggacgggatcttggacgcattccacgctgctcgggaggccgccagagatgcccgccactcggctattaggctgatacatgcgtgctttcatttattaatcaaagagaattgtcatattgcaagttaattaatgcatgcaagcttggcctccgcggcctgcggccgcagcttggcgtaatcatggtcatagctgtttcctgtgtgaaattgttatccgctcacaattccacacaacatacgagccggaagcataaagtgtaaagcctggggtgcctaatgagtgagctaactcacattaattgcgttgcgctcactgcccgctttccagtcgggaaacctgtcgtgccagctgcattaatgaatcggccaacgcgcggggagaggcggtttgcgtattgggcgctcttccgcttcctcgctcactgactcgctgcgctcggtcgttcggctgcggcgagcggtatcagctcactcaaaggcggtaatacggttatccacagaatcaggggataacgcaggaaagaacatgtgagcaaaaggccagcaaaaggccaggaaccgtaaaaaggccgcgttgctggcgtttttccataggctccgcccccctgacgagcatcacaaaaatcgacgctcaagtcagaggtggcgaaacccgacaggactataaagataccaggcgtttccccctggaagctccctcgtgcgctctcctgttccgaccctgccgcttaccggatacctgtccgcctttctcccttcgggaagcgtggcgctttctcatagctcacgctgtaggtatctcagttcggtgtaggtcgttcgctccaagctgggctgtgtgcacgaaccccccgttcagcccgaccgctgcgccttatccggtaactatcgtcttgagtccaacccggtaagacacgacttatcgccactggcagcagccactggtaacaggattagcagagcgaggtatgtaggcggtgctacagagttcttgaagtggtggcctaactacggctacactagaaggacagtatttggtatctgcgctctgctgaagccagttaccttcggaaaaagagttggtagctcttgatccggcaaacaaaccaccgctggtagcggtggtttttttgtttgcaagcagcagattacgcgcagaaaaaaaggatctcaagaagatcctttgatcttttctacggggtctgacgctcagtggaacgaaaactcacgttaagggattttggtcatgagattatcaaaaaggatcttcacctagatccttttaaattaaaaatgaagttttaaatcaatctaaagtatatatgagtaaacttggtctgacagttaccaatgcttaatcagtgaggcacctatctcagcgatctgtctatttcgttcatccatagttgcctgactccccgtcgtgtagataactacgatacgggagggcttaccatctggccccagtgctgcaatgataccgcgagacccacgctcaccggctccagatttatcagcaataaaccagccagccggaagggccgagcgcagaagtggtcctgcaactttatccgcctccatccagtctattaattgttgccgggaagctagagtaagtagttcgccagttaatagtttgcgcaacgttgttgccattgctacaggcatcgtggtgtcacgctcgtcgtttggtatggcttcattcagctccggttcccaacgatcaaggcgagttacatgatcccccatgttgtgcaaaaaagcggttagctccttcggtcctccgatcgttgtcagaagtaagttggccgcagtgttatcactcatggttatggcagcactgcataattctcttactgtcatgccatccgtaagatgcttttctgtgactggtgagtactcaaccaagtcattctgagaatagtgtatgcggcgaccgagttgctcttgcccggcgtcaatacgggataataccgcgccacatagcagaactttaaaagtgctcatcattggaaaacgttcttcggggcgaaaactctcaaggatcttaccgctgttgagatccagttcgatgtaacccactcgtgcacccaactgatcttcagcatcttttactttcaccagcgtttctgggtgagcaaaaacaggaaggcaaaatgccgcaaaaaagggaataagggcgacacggaaatgttgaatactcatactcttcctttttcaatattattgaagcatttatcagggttattgtctcatgagcggatacatatttgaatgtatttagaaaaataaacaaataggggttccgcgcacatttccccgaaaagtgccacctgacgtctaagaaaccattattatcatgacattaacctataaaaataggcgtatcacgaggccctttcgtctcgcgcgtttcggtgatgacggtgaaaacctctgacacatgcagctcccggagacggtcacagcttgtctgtaagcggatgccgggagcagacaagcccgtcagggcgcgtcagcgggtgttggcgggtgtcggggctggcttaactatgcggcatcagagcagattgtactgagagtgcaccatatgcggtgtgaaataccgcacagatgcgtaaggagaaaataccgcatcaggcgccattcgccattcaggctgcgcaactgttgggaagggcgatcggtgcgggcctcttcgctattacgccagctggcgaaagggggatgtgctgcaaggcgattaagttgggtaacgccagggttttcccagtcacgacgttgtaaaacgacggccagtgaattggcctccatggccgcggccgcgaattcatcttgaagttcctattccgagttcctattctctagaaagtataggaacttcgctagcccgttaaattgccgtcgtcagccgttaaattaccgattaatcccgataaatttccgagatctccgttaaattgccgttcgcagccgttaaattaccggggacgaccgataaatttccgcgatgaattcatggtgttttgatcattttaaatttttatatggcgggtggtgggcaactcgcttgcgcgggcaactcgcttaccgattacgttagggctgatatttacgtaaaaatcgtcaagggatgcaagaccaaaccgttaaatttccggagtcaacagcatccaagcccaagtccttcacggagaaaccccagcgtccacatcacgagcgaaggaccacctctaggcatcggacgcaccatccaattagaagcagcaaagcgaaacagcccaagaaaaaggtcggcccgtcggccttttctgcaacgctgatcacgggcagcgatccaaccaacaccctccagagtgactaggggcggaaatttatcgggattaatttccactcaaccacaaatcacagtcgtccccggtaatttaacggctgcagacggcaatttaacggcttctgcgaatcgcttggattccccgcccctggccgtagagcttaaagtatgtcccttgtcgatgcgatgtatcacaacatataaatactggcaagggatgccatgcttggagcaacaatctcagaacaccaatatcaattcatctcgagtctgaactcagacaacacaaattcttcaaaattgaggatttagtcttgatc

SEQ ID NO: 116 - DNA, 1195 bp, Aspergillus aculeatus
  source 1..1195: mol_type = unassigned DNA
agtcgatcatacactcatatcaatcgcaaaaatggttaaatcagtcttggcttccgctctcttcgccgtgtccgcactggctgccagccgtaccacggctccctccggcgcgatcgtcgtcgccaagtctggtggtgactataccactattggtgatgccattgatgctctgagcaccagcaccaccgacacccaaaccattttcatcgaggagggtacctacgatgagcaggtctacctgcctgctatgaccggcaaggtcatcatctacggtcaaaccgagaacaccgactcctacgccgacaacctggtcaccatcacccacgccatcagctacgaggatgctggtgagagcgatgatctgactgctaccttccgcaacaaggctgtcggctctcaggtctacaacctcaacattgccaacacctgtggtcaggcttgccaccaggctttggccttgtccgcctgggctgaccagcagggttactacggctgcaacttcactggttaccaggataccctcctcgctcagaccggtaaccagctctacatcaactcctacattgagggtgctgtcgacttcatctttggccagcacgctcgtgcttggttccagaacgtcgacatccgtgtcgttgagggtcctacctctgcctccatcaccgccaacggccgctcctccgagactgacacctcctactacgtgatcaacaagtcgaccgttgctgctaaggagggcgacgacgttgccgaaggcacctactaccttggccgcccctggtccgagtacgcccgtgtcgtcttccagcagaccagcatgaccaacgtcatcaactccctcggctggactgagtggtccacctccacccctaacaccgagtacgtcaccttcggcgagtacgccaacaccggcgccggctccgagggcacccgcgccagcttcgccgagaagctggatgccaagctcaccatcacggatatcctgggctctgactacaccagctgggtcgatacctcctacttctaagctggacgcatgagtagttgttaagaatgcgtgagatggctgtcaaccaacagcagagctgaccgtatgcggtgcatatacttttctcttcgtcaaataatttccctttgataaagcaatttaattggcatgcacagtccatgcttgacacaaaaaaaaaaaaaaaaa

SEQ ID NO: 117 - DNA, 1284 bp, Evansstolkia leycettana
  source 1..1284: mol_type = unassigned DNA
atcgatggaatgcagaggcaagcaaaatcccagaccgtccgcctgagctggtttgcaaaagttttcatcggccttttgctcgatcttcaagactgtcatcatgcaccgtcctctccagttgtgggctctcgcagccctgacatcgctggtcaccgcagctccggctccagtcctgcgtcgtggtaaggctcatggaccttgtgccgaactataaaacaggagcgctgttcatatgcaggtctgactgttacattcagatgtgtcctcgtctgtcctgagtgagctcgatctcttcgcgcagtacagtgcggccgcatattgctcttccaacattggctccccgggaaccaagttgacgtgcagtgtgggcaattgcccccgggtagaggctgcggataccgagacattaattgagttcaatgagtaagtgatagacgattccgatcctcgttccgctctgcactctctgaacaccacaatctaggtcttcatctttcggcgacgttactggctacattgccgtggaccgaaccaacagcctgctcgttctggcgttccgaggcagtagcactgtctccaactgggaggcagatttggacttcccgttgactgatgccagcagtctctgttcgggctgtgaaatccacagtggcttctgggctgcctggcagacggttcaggccagcatcacctcgacgctcgagtcggccatagccagctatcccggctacaccctggtcttcaccggccatagctatggagctgccttggctgcaatcgcggccacgacgttgcgaaatgccggatacaccatccagctggtaagcgtcccgccccaaccataactcttcccgagctcacaacagtccgcgccaaagtatgactacggccagcctcgcctgggcaatctggcattggcccagtacatcaccgcgcagacgcaaggcgccaactaccgcgtcacgcacaccgacgacattgtccccaagcttccgcctgagctatttggctaccatcatttcagtcccgagtactggatcaccagtggagacaatgtgacggtgaccacctccgatgtccaagttgtcactggcatcgactcgaccgctggaaatgatggtacgcttctcgatagtacatcggcgcatgactggtatattgtctacatcgacgggtgcgattaaagaagtcggcctgcggtatgaatatttggataacctacgtatatatatggctccgacgctctaggtatctagcaacaatataaccctgaggggatttgaa

SEQ ID NO: 118 - DNA, 699 bp, Nemania serpens
  source 1..699: mol_type = unassigned DNA
atgaaggcctcgatactgctgtccaccgctctcctcggcctgggcgccgccatacccatgacgctcgacctgtcggaggagatgatcgacaagctgaaagcgggcaaggcctcgggcgtatccgaggccacagcgacggggacgacggcaaacgaattcctcgacggcggctgccggcccgtcatcttcctcttcgcccgcgggagcaggcaggagggcaacgtgggcggcaccccgggcccgcagaccatcgaccagctgaaggcgcgcctcggcgacggcgccgtcgcggcccagggcctcgagtaccccgcggacctgctggacaacctgcgctccggcggctgcgaccccgcggacgtggacagcttcggcgcgctcatcgcgcgggcggcggcggagtgtccgggctcgaggctcgtgctgtcggggtacagccagggcgcggcgctggtgcacgccgccgcgaggaagctggcggcggacgtcgtggtcaggatcgccgccgccgtcacctacggggatacgcggaaggagcaggatggcggcgtcatccccggcatcgatcccgcgcggacgctgattctgtgccatgatggcgatctcgtctgcgatgggactctgatcgtgacggataaccactacgactatgatgatcttgcgccgacggctgtggatttcatcgctagcaaggtttag

SEQ ID NO: 119 - DNA, 771 bp, Trichophaea saccata
  source 1..771: mol_type = unassigned DNA
atgaaagcactctccctccttctgttggcagctgtccctgccctggccactccgttcactggcttggacacccctattgaccatttcaagcgggatgaaaatggtaccgtccccacgagaactctcgatatttcaacctccatctacgagaagtgggacgccttattctcggcggctgctactccttcggcctcctctgcggcctccgtgaagattcgcacgtccagcgacgtccgtgaagatctcaacaacgggatgtgtggcaatgtcgttctcatttacgcccggggaacatacagcagcggtaacatcggcatcggtgtcggtgtcgcctttgtggatgcgctcgcggccgctttaccgaaccaggttatcgttcagggagtggagccctacgacaacgatattgcgggttaccttgctggtggtgatgaaacgggagcaaacagcatggtcgccttgacccagaaggcggcttcgcagtgcccatcggcaaagatcgtctggggtggctacagccagggtgctcaagtaacgcacaaggccggtgagcgcctgccctcggctttatatccgaggattgctgggattatgttgttcggagacccagacaatggcgatccgttccctggtagcttgaacaatcacgtcaagacttactgccactctgatgatcccatctgcgatggcatcccgttgcctatcgctggacacttgacttacgacgagaatgctaccgaagcggctgcggtagttgcaacttgggtttag

SEQ ID NO: 120 - DNA, 678 bp, Thermochaetoides thermophila
  source 1..678: mol_type = unassigned DNA
atgaagttcctctccctccttgctgccgccggcctagtcgccgctcttcccactgctcccgtcgaggagactgcttctcatctcgaggctcgccagtccacgacgcgcaacgatctcgagaatggcaactccaacaactgcccgggtgtcatcttcatctttgctcgtgcctcgaccgagccgggcaacatgggcatcagcgccggcccgaacgtcgccaacggcctagccgcgcactacggctccaacctctgggtccaaggcgtcggcggtccctacacggccgctctagccgacaacttcctccccgcaggcacctcccgcgcggccatcgacgaagccaagcgcctgttcaacttggccagcaccaagtgcccgaatgcagcgatcgtcgctggcgggtacagccagggcacggcagtgatgagcaacgcgatcagcgaactgtcgtcgagcgtgcgcgacaaggtcaagggcgttgtgctgtttggttacaccaagaatctgcagaacggcgggcagatcccgaattatccgagcaatcggctcgaggtgtactgcaatgcgtcggatgcggtgtgctggggcacgttgttcattacgccagcgcatttcttgtatacgactgagtcgactattgatgcgccgcggtttttgattagcaaggttggattctga

SEQ ID NO: 121 - DNA, 753 bp, Pyrenophora tritici-repentis
  source 1..753: mol_type = unassigned DNA
atgaaggcctgcgctcgctccctgctcgcccttacggcccttgttgctaccactttcgctgcaccaacaccagagaccggtgtcagcttccccatcacagacctcctcgactctgatctcacaatcaatgaatacgcagcacagcttgaggccaagaatgtcgaggaacgtgatctcaccaaacgccaatacaacagcgacacctacaatcagctgaccgatggcactgcatgccgtccaatcaccgtcatctgggctcgtggtaccactcaatctggaaatgtcggtgaacccaactcggaaggccccgttttcttcaatgctatcgccgctcgtgtcggaggaattagccgcctggcgatccagggcgtgacctaccctgctaacgttttcggcttcctggcgggaggcgatgccgcgggtgctactacaatgttcaacctaattaaccaggccatctcccaatgcccctccacgaaaattgtcgtcactggctactcccagggcgctcaacttgtccacactgctacacagaggctttcagccgcagccgccgctcgtgtcaccgccgttgtaacattcggcgatgctgatcgtgatgagtcttttggctctgttgcagcctccaaggtcctcatcatttgccatgaaggtgacaacatctgcgacaacggcatcattatcaccccccagcacaggaactacgaaatcgacgccccgactgctgctgcgtttgttgcagcccgcgtttaa

SEQ ID NO: 122 - DNA, 684 bp, Acrophialophora fusispora
  source 1..684: mol_type = unassigned DNA
atgaagttcctccagctcctcgctgccgccggcctcgtcgccgccttccccaccgccccagttgagctcgagagcacagccgagatcgaggcccgccagctctcttcgacccgcacggacctcgagagtggcagttcgtccaactgcccgcgcgtcatcttcatcttcgcccgcgcctcgaccgagaccggcaacatgggtctctcggccggcccgaacgtcgccaacggcctcgcggcccgctacggcagcaacctctgggtgcagggcgtcggcggtccctacacagccggcctggccgagaacttcctccccgcgggaacctcccgcgcggccatcgacgaagccaagcggctctttaccatggccaaccagaaatgccccaacgccgccgtcgtggcgggcgggtacagccagggcaccgccgtcatgagcaacgccatcagcgagctctccaccaccatcaagaaccagatcaagggcgtcgttctctttggctacacgaagaacctccaaaatgggggcaggattccgaatttcgacacggccaagaccgaggtgtactgcaatgtgtcggatgccgtgtgctggggcacgctgttcatcgccccggcccactttttgtacacgaccgactcgacgatcaacgccccggctttcctgatcagcaagatcggtgcttga

SEQ ID NO: 123 - DNA, 6773 bp, Pseudomonas sp.
  source 1..6773: mol_type = unassigned DNA
tcgcgcgtttcggtgatgacggtgaaaacctctgacacatgcagctcccggagacggtcacagcttgtctgtaagcggatgccgggagcagacaagcccgtcagggcgcgtcagcgggtgttggcgggtgtcggggctggcttaactatgcggcatcagagcagattgtactgagagtgcaccatatgcggtgtgaaataccgcacagatgcgtaaggagaaaataccgcatcaggcgccattcgccattcaggctgcgcaactgttgggaagggcgatcggtgcgggcctcttcgctattacgccagctggcgaaagggggatgtgctgcaaggcgattaagttgggtaacgccagggttttcccagtcacgacgttgtaaaacgacggccagtgaattcagtactactacaaaaaaagaatacgttatatagaaatatgtttgaaccttcttcagattacaaatatattcggacggactctacctcaaatgcttatctaactatagaatgacatacaagcacaaccttgaaaatttgaaaatataactaccaatgaacttgttcatgtgaattatcgctgtatttaattttctcaattcaatatataatatgccaatacattgttacaagtagaaattaagacacccttgatagccttactatacctaacatgatgtagtattaaatgaatatgtaaatatatttatgataagaagcgacttatttataatcattacatatttttctattggaatgattaagattccaatagaatagtgtataaattatttatcttgaaaggagggatgcctaaaaacgaagaacattaaaaacatatatttgcaccgtctaatggatttatgaaaaatcattttatcagtttgaaaattatgtattatggagctctataaaaatgaggagggaaccgaatgaagaaaccgttggggaaaattgtcgcaagcaccgcactactcatttctgttgcttttagttcatcgatagcatcggctgcacaggaaagcccggcattcatcgatcctgcgtcgtggaacaccccgttcaatggcattgcccaggtggcttgtcataactgctacgagaagcaatacgcgaacaccttcagcagtgtgcttgacagtgtacggaccctggaactggacttctgggaccagcgcgatgcggtgagcggcggttcgccccatcactggttcgtgcggcacaaccccggcaccttgttccaatccggcaacgacaataactgcaccggcgatggcaccggcaagaacgacctcgaagcctgtctgaacgacgtcaagaactggagtgacaagcatccggggcacttccccatcacgctgatcctggacaagaaacagggctggtcgaaagaaagttcggggcgcacaccaaaggatttcgacgaactggtggcgcgggtgttccagggcaagctctttaccccccaggatctggcgacgcacattggcagtggcgcgggggccttgcagggcaacctcaagggtaagtcctggcccaccgccaacgatctgcagggcaaggtgctgttggtgctcaaccactcggaaaaccagaagctctcgcagtacgccgaggcccgcacctctaaggctaaggtgttcatttcgccagtaaccaacggccagaacgatatcagtggcaaggtcagcggcatgtccagccagtcatccggctatgtagccatgaacaacatgggcaagggcgacaaaagttgggcaaagcaggcctttgcctacagccatatcggccgcgtctggggtgatgacgaggtgtcgttcgcccagcacatcaaccagaagatcaatctgtcggcgtactacaggttcgccgcgcagagcgctggcggctaccgcatccggccgttctaaacgcgttaatcaataaaaaaacgctgtgcggttaaagggcacagcgtttttttgtgtatcggcaatagttacccttattatcaagataagaaagaaaaggatttttcgctacgctcaaatcctttaaaaaaacacaaaagaccacattttttaatgtggtctttattcttcaactaaagcacccattagttcaacaaacgaaaattggataaagtgggatatttttaaaatatatatttatgttacagtaatattgacttttaaaaaaggattgattctaatgaagaaagcagacaagtaagcctcctaaattcactttagataaaaatttaggaggcatatcaaatgaactttaataaaattgatttagacaattggaagagaaaagagatatttaatcattatttgaaccaacaaacgacttttagtataaccacagaaattgatattagtgttttataccgaaacataaaacaagaaggatataaattttaccctgcatttattttcttagtgacaagggtgataaactcaaatacagcttttagaactggttacaatagcgacggagagttaggttattgggataagttagagccactttatacaatttttgatggtgtatctaaaacattctctggtatttggactcctgtaaagaatgacttcaaagagttttatgatttatacctttctgatgtagagaaatataatggttcggggaaattgtttcccaaaacacctatacctgaaaatgctttttctctttctattattccatggacttcatttactgggtttaacttaaatatcaataataatagtaattaccttctacccattattacagcaggaaaattcattaataaaggtaattcaatatatttaccgctatctttacaggtacatcattctgtttgtgatggttatcatgcaggattgtttatgaactctattcaggaattgtcagataggcctaatgactggcttttataatatgagataatgccgactgtactttttacagtcggttttctaatgtcactaacctgccccgttagttgaagaaggtttttatattacagctccagatcttaattaatcaccgaaatattatggaagaaaatatcagcaccatgacggccaaacggatgcttccaacggtgctaactatatcacgatgtcctacaactattatcacgatcatgataaaagctccattttcggatcaagtgacagcaaaacctccgatgacggcaaattaaaaattacgctgcatcataaccgctataaaaatattgtccagcgcgcgccgagagtccgcttcgggcaagtgcacgtatacaacaactattatgaaggaagcacaagctcttcaagttatccttttagctatgcatggggaatcggaaagtcatctaaaatctatgcccaaaacaatgtcattgacgtaccgggactgtcagctgctaaaacgatcagcgtattcagcgggggaacggctttatatgactccggcacgttgctgaacggcacacagatcaacgcatcggctgcaaacgggctgagttcttctgtcggctggacgccgtctctgcatggattgattgatgcttctgctaatgtgaaatcaaatgttataaatcaagcgggtgcgggtaaattaaattaagaaagtgaaaaacacaaagggtgctaacctgcggccgcgatgcttaggaagacgagttattaatagctgaataagaacggtgctctccaaatattcttatttagaaaagcaaatctaaaattatctgaaaagggaatgagaatagtgaatggaccaataataatgactagagaagaaagaatgaagattgttcatgaaattaaggaacgaatattggataaatatggggatgatgttaaggctattggtgtttatggctctcttggtcgtcagactgatgggccctattcggatattgagatgatgtgtgtcatgtcaacagaggaagcagagttcagccatgaatggacaaccggtgagtggaaggtggaagtgaattttgatagcgaagagattctactagattatgcatctcaggtggaatcagattggccgcttacacatggtcaatttttctctattttgccgatttatgattcaggtggatacttagagaaagtgtatcaaactgctaaatcggtagaagcccaaacgttccacgatgcgatttgtgcccttatcgtagaagagctgtttgaatatgcaggcaaatggcgtaatattcgtgtgcaaggaccgacaacatttctaccatccttgactgtacaggtagcaatggcaggtgccatgttgattggtctgcatcatcgcatctgttatacgacgagcgcttcggtcttaactgaagcagttaagcaatcagatcttccttcaggttatgaccatctgtgccagttcgtaatgtctggtcaactttccgactctgagaaacttctggaatcgctagagaatttctggaatgggattcaggagtggacagaacgacacggatatatagtggatgtgtcaaaacgcataccattttgaacgatgacctctaataattgttaatcatgttggttacgtaagtactaagcttggcgtaatcatggtcatagctgtttcctgtgtgaaattgttatccgctcacaattccacacaacatacgagccggaagcataaagtgtaaagcctggggtgcctaatgagtgagctaactcacattaattgcgttgcgctcactgcccgctttccagtcgggaaacctgtcgtgccagctgcattaatgaatcggccaacgcgcggggagaggcggtttgcgtattgggcgctcttccgcttcctcgctcactgactcgctgcgctcggtcgttcggctgcggcgagcggtatcagctcactcaaaggcggtaatacggttatccacagaatcaggggataacgcaggaaagaacatgtgagcaaaaggccagcaaaaggccaggaaccgtaaaaaggccgcgttgctggcgtttttccataggctccgcccccctgacgagcatcacaaaaatcgacgctcaagtcagaggtggcgaaacccgacaggactataaagataccaggcgtttccccctggaagctccctcgtgcgctctcctgttccgaccctgccgcttaccggatacctgtccgcctttctcccttcgggaagcgtggcgctttctcaatgctcacgctgtaggtatctcagttcggtgtaggtcgttcgctccaagctgggctgtgtgcacgaaccccccgttcagcccgaccgctgcgccttatccggtaactatcgtcttgagtccaacccggtaagacacgacttatcgccactggcagcagccactggtaacaggattagcagagcgaggtatgtaggcggtgctacagagttcttgaagtggtggcctaactacggctacactagaaggacagtatttggtatctgcgctctgctgaagccagttaccttcggaaaaagagttggtagctcttgatccggcaaacaaaccaccgctggtagcggtggtttttttgtttgcaagcagcagattacgcgcagaaaaaaaggatctcaagaagatcctttgatcttttctacggggtctgacgctcagtggaacgaaaactcacgttaagggattttggtcatgagattatcaaaaaggatcttcacctagatccttttaaattaaaaatgaagttttaaatcaatctaaagtatatatgagtaaacttggtctgacagttaccaatgcttaatcagtgaggcacctatctcagcgatctgtctatttcgttcatccatagttgcctgactccccgtcgtgtagataactacgatacgggagggcttaccatctggccccagtgctgcaatgataccgcgagacccacgctcaccggctccagatttatcagcaataaaccagccagccggaagggccgagcgcagaagtggtcctgcaactttatccgcctccatccagtctattaattgttgccgggaagctagagtaagtagttcgccagttaatagtttgcgcaacgttgttgccattgctacaggcatcgtggtgtcacgctcgtcgtttggtatggcttcattcagctccggttcccaacgatcaaggcgagttacatgatcccccatgttgtgcaaaaaagcggttagctccttcggtcctccgatcgttgtcagaagtaagttggccgcagtgttatcactcatggttatggcagcactgcataattctcttactgtcatgccatccgtaagatgcttttctgtgactggtgagtactcaaccaagtcattctgagaatagtgtatgcggcgaccgagttgctcttgcccggcgtcaatacgggataataccgcgccacatagcagaactttaaaagtgctcatcattggaaaacgttcttcggggcgaaaactctcaaggatcttaccgctgttgagatccagttcgatgtaacccactcgtgcacccaactgatcttcagcatcttttactttcaccagcgtttctgggtgagcaaaaacaggaaggcaaaatgccgcaaaaaagggaataagggcgacacggaaatgttgaatactcatactcttcctttttcaatattattgaagcatttatcagggttattgtctcatgagcggatacatatttgaatgtatttagaaaaataaacaaataggggttccgcgcacatttccccgaaaagtgccacctgacgtctaagaaaccattattatcatgacattaacctataaaaataggcgtatcacgaggccctttcgtc

SEQ ID NO: 124 - DNA, 795 bp, Bacillus thuringiensis
  source 1..795: mol_type = unassigned DNA
catgaaaatgatgggggaagtaaaataaaaatagttcaccgcaaagttagagcgcaatggtctgctgaagataaacataaagaaggcgtaaattctcatttatggattgtaaaccgtgcgattgatattatgtctcgcaatacaacacttgtaaaacaagatcgagttgcacaattaaatgaatggcgtacagagttagagaacggtatttatgctgctgactatgaaaatccttattatgataatagcacatttgcttcacatttctatgatccagacaatggaaaaacatatattccatttgcaaagcaggcaaaagaaactggagctaaatattttaaattagcgggtgaatcatacaaaaataaagatatgaaacaagcattcttctatttaggattatctcttcattatttaggagatgtaaatcaaccgatgcatgcggcaaactttacaaatctttcgtatccacaaggattccattctaaatatgaaaactttgtagatacgataaaagataattataaagtaacggatggaaatggatattggaattggaaaggtacaaatccagaagattggatccatggagcggcagtagtggcgaaacaagattactctggaattgtaaatgataatacgaaagattggttcgtaaaagcagctgtgtcacaagaatatgcagataaatggcgtgctgaagttacaccgatgacaggtaagcgattaatggatgcacaacgtgttactgctggatacattcagctttggtttgatacgtacggagatcgttaa

SEQ ID NO: 125 - DNA, 1620 bp, Geobacillus stearothermophilus
  source 1..1620: mol_type = unassigned DNA
atgaaacaacaaaaacggctttacgcccgattgctgacgctgttatttgcgctcatcttcttgctgcctcattctgcagccgcggcaccgtttaacggcaccatgatgcagtattttgaatggtacttgccggatgatggcacgttatggaccaaagtggccaatgaagccaacaacttatccagccttggcatcaccgctctttggctgccgcccgcttacaaaggaacaagccgcagcgacgtagggtacggagtatacgacttgtatgacctcggcgaattcaatcaaaaagggaccgtccgcacaaaatacggaacaaaagctcaatatcttcaagccattcaagccgcccacgccgctggaatgcaagtgtacgccgatgtcgtgttcgaccataaaggcggcgctgacggcacggaatgggtggacgccgtcgaagtcaatccgtccgaccgcaaccaagaaatctcgggcacctatcaaatccaagcatggacgaaatttgattttcccgggcggggcaacacctactccagctttaagtggcgctggtaccattttgacggcgttgattgggacgaaagccgaaaattgagccgcatttacaaattccgtggcaaggcttgggattgggaagtagacacggaattcggaaactatgactacttaatgtatgccgaccttgatatggatcatcccgaagtcgtgaccgagctgaaaaactgggggaaatggtatgtcaacacaacgaacattgatgggttccggcttgatgccgtcaagcatattaagttcagtttttttcctgattggttgtcgtatgtgcgttctcagactggcaagccgctatttaccgtcggggaatattggagctatgacatcaacaagttgcacaattacattacgaaaacagacggaacgatgtctttgtttgatgccccgttacacaacaaattttataccgcttccaaatcagggggcgcatttgatatgcgcacgttaatgaccaatactctcatgaaagatcaaccgacattggccgtcaccttcgttgataatcatgacaccgaacccggccaagcgctgcaatcatgggtcgacccatggttcaaaccgttggcttacgcctttattctaactcggcaggaaggatacccgtgcgtcttttatggtgactattatggcattccacaatataacattccttcgctgaaaagcaaaatcgatccgctcctcatcgcgcgcagggattatgcttacggaacgcaacatgattatcttgatcactccgacatcatcgggtggacaagggaagggggcactgaaaaaccaggatccggactggccgcactgatcaccgatgggccgggaggaagcaaatggatgtacgttggcaaacaacacgctggaaaagtgttctatgaccttaccggcaaccggagtgacaccgtcaccatcaacagtgatggatggggggaattcaaagtcaatggcggttcggtttcggtttgggttcctagaaaaacgaccgtttctaccatcgctcggccgatcacaacccgaccgtggactggtgaattcgtccgttggaccgaaccacggttggtggcatggcct

SEQ ID NO: 126 - DNA, 1620 bp, Geobacillus stearothermophilus; identical to SEQ ID NO: 125
  source 1..1620: mol_type = unassigned DNA

SEQ ID NO: 127 - DNA, 9773 bp, Sutcliffiella halmapala
  source 1..9773: mol_type = unassigned DNA
tctggttgttttcttcatttcaggtttcgccctttccttgccaaatataagaaaaacggcgttccgataatcgcggtgacaatgccgaccggtgattcataaggaaatgcaatccatctggccagaacatctgcgtacaccagcaaaatggcaccgaacagtgccgaaaacggaagcacgtattgataatgttctccgatcagcttgcggacaatatgcgggacgagcagcccgacaaagccaatcggcccggcgacggctacggaagcgccggaaagaattaaaataatcaaactgatcagaatcctgatgccgttcatattttgtccaagcccttttgctgtttcgtctccgagaccgagaacagaaacagaaccggaaaatacgagggcaagcccgatgccaatgacagaaaaaggagcgatggttatgacgtcctgccagttgctgccgtcgattgcgcctgtcatccagtacagaacatcctcacctgactcatttaaaataatgatggcctgtgtcatagaggagaggaacaagtgcacggccattcctgacagcgccagcttgacaggcgtcattccgccggatgaggcaatcatatacacaatcgcgccgcctgctgccgcacccgcaaaagcgaatataacagatgaatagggcgatgccggcagaatgacgagagaagcaacaacaaaaagcgatgcacccgcattcacaccgaaaatttggggtgaagccagaggatttctggtcatagcctgcatcagcgcccctgctacagctaggctggcgccgacaaaaacgccgattaatgtgcggggaaggcgaagagtagagatgatgagctgttcctttgaaccgtcccatacaaaaagatatttcaatgaatctatgatgctgatgtctgaggctcctactgaaagattcagcccaagcccaaatataaaaataatcagtgcaatgataaacatcatcagtcttgatgatgagcgccgtttggctgaatgatacaacagtctcacttccttactgcgtctggttgcaaaaacgaagaagcaaggattcccctcgcttctcatttgtcctatttattatacacttttttaagcacatctttggcgcttgtttcactagacttgatgcctctgaatcttgtccaagtgtcacggtccgcatcatagacttgtccatttttcaccgctttgagatttttccagagcgggttcgttttccactcatctacaatggttttgccttcgttggctgagatgaacaaaatatcaggatcgattttgctcaattgctcaaggctgacctcttgataggcgttatctgacttcacagcgtgtgtaaagcctagcattttaaagatttctccgtcataggatgatgatgtatgaagctggaaggaatccgctcttgcaacgccgagaacgatgttgcggttttcatctttcggaagttcggcttttagatcgttgatgacttttttgtgctcggcaagcttttcttttccttcatcttctttatttaatgctttagcaatggtcgtaaagctgtcgatcgtttcgtcatatgtcgcttcacggctttttaattcaatcgtcggggcgatttttttcagctgtttataaatgtttttatggcgctcagcgtcagcgatgattaaatcaggcttcaaggaactgatgacctcaagattgggttcgctgcgtgtgcctacagatgtgtaatcaatggagctgccgacaagctttttaatcatatcttttttgttgtcatctgcgatgcccaccggcgtaatgccgagattgtgaacggcatccaagaatgaaagctcaagcacaaccacccgcttaggtgtgccgcttactgtcgtttttccttcttcgtcatggatcactctggaatccttagactcgcttttgccgcttccgttgttattctggcttgatgaacagccggatacaatgaggcaggcgagcaataaaacactcatgatggcaatcaacttgttagaataggtgcgcatgtcattcttccttttttcagatttagtaatgagaatcattatcacatgtaacactataatagcatggcttatcatgtcaatatttttttagtaaagaaagctgcgtttttactgctttctcatgaaagcatcatcagacacaaataagtggtatgcagcgttaccgtgtcttcgagacaaaaacgcatgggcgttggctttagaggtttcgaacatatcagcagtgacataaggaaggagagtgctgagataaccggacaatttcttttctatttcatctgttagtgcaaattcaatgtcgccgatattcatgataatcgagaaaacaaagtcgatatcgatatgaaaatgttcctcggcaaaaaccgcaagctcgtgaattcctggtgaacatccggcacgcttatggaaaatctgtttgactaaatcactcacaatccaagcattgtattgctgttctggtgaaaagtattgcattagacatacctcctgctcgtacggataaaggcagcgtttcatggtcgtgtgctccgtgcagcggcttctccttaattttgatttttctgaaaataggtcccgttcctatcactttaccatggacggaaaacaaatagctactaccattcctcctgtttttctcttcaatgttctggaatctgtttcaggtacagacgatcgggtatgaaagaaatatagaaaacatgaaggaggaatatcgacatgaaaccagttgtaaaagagtatacaaatgacgaacagctcatgaaagatgtagaggaattgcagaaaatgggtgttgcgaaagaggatgtatacgtcttagctcacgacgatgacagaacggaacgcctggctgacaacacgaacgccaacacgatcggagccaaagaaacaggtttcaagcacgcggtgggaaatatcttcaataaaaaaggagacgagctccgcaataaaattcacgaaatcggtttttctgaagatgaagccgctcaatttgaaaaacgcttagatgaaggaaaagtgcttctctttgtgacagataacgaaaaagtgaaagcttgggcataaagcaaggaaaaaaccaaaaggccaatgtcggccttttggtttttttgcggtctttgcggtgggattttgcagaatgccgcaataggatagcggaacattttcggttctgaatgtccctcaatttgctattatatttttgtgataaattggaataaaatctcacaaaatagaaaatgggggtacatagtggatgaaaaaagtgatgttagctacggctttgtttttaggattgactccagctggcgcgaacgcagctgatttaggccaccagacgttgggatccaatgatggctggggcgcgtactcgaccggcacgacaggcggatcaaaagcatcctcctcaaatgtgtataccgtcagcaacagaaaccagcttgtctcggcattagggaaggaaacgaacacaacgccaaaaatcatttatatcaagggaacgattgacatgaacgtggatgacaatctgaagccgcttggcctaaatgactataaagatccggagtatgatttggacaaatatttgaaagcctatgatcctagcacatggggcaaaaaagagccgtcggggacacaagaagaagcgagagcacgctctcagaaaaaccaaaaagcacgggtcatggtggatatccctgcaaacacgacgatcgtcggttcagggactaacgctaaagtcgtgggaggaaacttccaaatcaagagtgataacgtcattattcgcaacattgaattccaggatgcctatgactattttccgcaatggttgtaaaacgacggccagtgaattctgatcaaatggttcagtgagagcgaagcgaacacttgattttttaattttctatcttttataggtcattagagtatacttatttgtcctataaactatttagcagcataatagatttattgaataggtcatttaagttgagcatattaggggaggaaaatcttggagaaatatttgaagaacccgaggatctagatcaggtaccgcaacgttcgcagatgctgctgaagagattattaaaaagctgaaagcaaaaggctatcaattggtaactgtatctcagcttgaagaagtgaagaagcagagaggctattgaataaatgagtagaaagcgccatatcggcgcttttcttttggaagaaaatatagggaaaatggtacttgttaaaaattcggaatatttatacaatatcatatgtatcacattgaaagggaggagaatcatgaaacaacaaaaacggctttacgcccgattgctgacgctgttatttgcgctcatcttcttgctgcctcattctgcagccgcggcacatcataatgggacaaatgggacgatgatgcaatactttgaatggcacttgcctaatgatgggaatcactggaatagattaagagatgatgctagtaatctaagaaatagaggtataaccgctatttggattccgcctgcctggaaagggacttcgcaaaatgatgtggggtatggagcctatgatctttatgatttaggggaatttaatcaaaaggggacggttcgtactaagtatgggacacgtagtcaattggagtctgccatccatgctttaaagaataatggcgttcaagtttatggggatgtagtgatgaaccataaaggaggagctgatgctacagaaaacgttcttgctgtcgaggtgaatccaaataaccggaatcaagaaatatctggggactacacaattgaggcttggactaagtttgattttccagggaggggtaatacatactcagactttaaatggcgttggtatcatttcgatggtgtagattgggatcaatcacgacaattccaaaatcgtatctacaaattccgaggtaaagcttgggattgggaagtagattcggaaaatggaaattatgattatttaatgtatgcagatgtagatatggatcatccggaggtagtaaatgagcttagaagatggggagaatggtatacaaatacattaaatcttgatggatttaggatcgatgcggtgaagcatattaaatatagctttacacgtgattggttgacccatgtaagaaacgcaacgggaaaagaaatgtttgctgttgctgaattttggaaaaatgatttaggtgccttggagaactatttaaataaaacaaactggaatcattctgtctttgatgtcccccttcattataatctttataacgcgtcaaatagtggaggcaactatgacatggcaaaacttcttaatggaacggttgttcaaaagcatccaatgcatgccgtaacttttgtggataatcacgattctcaacctggggaatcattagaatcatttgtacaagaatggtttaagccacttgcttatgcgcttattttaacaagagaacaaggctatccctctgtcttctatggtgactactatggaattccaacacatagtgtcccagcaatgaaagccaagattgatccaatcttagaggcgcgtcaaaattttgcatatggaacacaacatgattattttgaccatcataatataatcggatggacacgtgaaggaaataccacgcatcccaattcaggacttgcgactatcatgtcggatgggccagggggagagaaatggatgtacgtagggcaaaataaagcaggtcaagtttggcatgacataactggaaataaaccaggaacagttacgatcaatgcagatggatgggctaatttttcagtaaatggaggatctgtttccatttgggtgaaacgataaatcaataaaaaaacgctgtgcggttaaagggcacagcgtttttttgtgtatcggcaatagttacccttattatcaagataagaaagaaaaggatttttcgctacgctcaaatcctttaaaaaaacacaaaagaccacattttttaatgtggtctttattcttcaactaaagcacccattagttcaacaaacgaaaattggataaagtgggatatttttaaaatatatatttatgttacagtaatattgacttttaaaaaaggattgattctaatgaagaaagcagacaagtaagcctcctaaattcactttagataaaaatttaggaggcatatcaaatgaactttaataaaattgatttagacaattggaagagaaaagagatatttaatcattatttgaaccaacaaacgacttttagtataaccacagaaattgatattagtgttttataccgaaacataaaacaagaaggatataaattttaccctgcatttattttcttagtgacaagggtgataaactcaaatacagcttttagaactggttacaatagcgacggagagttaggttattgggataagttagagccactttatacaatttttgatggtgtatctaaaacattctctggtatttggactcctgtaaagaatgacttcaaagagttttatgatttatacctttctgatgtagagaaatataatggttcggggaaattgtttcccaaaacacctatacctgaaaatgctttttctctttctattattccatggacttcatttactgggtttaacttaaatatcaataataatagtaattaccttctacccattattacagcaggaaaattcattaataaaggtaattcaatatatttaccgctatctttacaggtacatcattctgtttgtgatggttatcatgcaggattgtttatgaactctattcaggaattgtcagataggcctaatgactggcttttatatatgagataatgccgactgtactttttacagtcggttttctaacgatacattaataggtacgaaaaagcaactttttttgcgcttaaaaccagtcataccaataacttaagggtaactagcctcgccggaaagagcgaaaatgcctcacatttgtgccacctaaaaaggagcgatttacatatgagttatgcagtttgtagaatgcaaaaagtgaaatcagctggactaaaaggggccgcagagtagaatggaaaaggggatcggaaaacaagtatataggaggagacctatttatggcttcagaaaaagacgcaggaaaacagtcagcagtaaagcttgttccattgcttattactgtcgctgtgggactaatcatctggtttattcccgctccgtccggacttgaacctaaagcttggcatttgtttgcgatttttgtcgcaacaattatcggctttatctccaagcccttgccaatgggtgcaattgcaatttttgcattggcggttactgcactaactggaacactatcaattgaggatacattaagcggattcgggaataagaccatttggcttatcgttatcgcattctttatttcccggggatttatcaaaaccggtctcggtgcgagaatttcgtatgtattcgttcagaaattcggaaaaaaaacccttggactttcttattcactgctattcagtgatttaatactttcacctgctattccaagtaatacggcgcgtgcaggaggcattatatttcctattatcagatcattatccgaaacattcggatcaagcccggcaaatggaacagagagaaaaatcggtgcattcttattaaaaaccggttttcaggggaatctgatcacatctgctatgttcctgacagcgatggcggcgaacccgctgattgccaagctggcccatgatgtcgcaggggtggacttaacatggacaagctgggcaattgccgcgattgtaccgggacttgtaagcttaatcatcacgccgcttgtgatttacaaactgtatccgccggaaatcaaagaaacaccggatgcggcgaaaatcgcaacagaaaaactgaaagaaatgggaccgttcaaaaaatcggagctttccatggttatcgtgtttcttttggtgcttgtgctgtggatttttggcggcagcttcaacatcgacgctaccacaaccgcattgatcggtttggccgttctcttattatcacaagttctgacttgggatgatatcaagaaagaacagggcgcttgggatacgctcacttggtttgcggcgcttgtcatgctcgccaacttcttgaatgaattaggcatggtgtcttggttcagtaatgccatgaaatcatccgtatcagggttctcttggattgtggcattcatcattttaattgttgtgtattattactctcactatttctttgcaagtgcgacagcccacatcagtgcgatgtattcagcatttttggctgtcgtcgtggcagcgggcgcaccgccgcttttagcagcgctgagcctcgcgttcatcagcaacctgttcgggtcaacgactcactacggttctggagcggctccggtcttcttcggagcaggctacatcccgcaaggcaaatggtggtccatcggatttatcctgtcgattgttcatatcatcgtatggcttgtgatcggcggattatggtggaaagtactaggaatatggtagaaagaaaaaggcagacgcggtctgcctttttttattttcactccttcgtaagaaaatggattttgaaaaatgagaaaattccctgtgaaaaatggtatgatctaggtagaaaggacggctggtgctgtggtgaaaaagcggttccatttttccctgcaaacaaaaataatggggctgattgcggctctgctggtctttgtcattggtgtgctgaccattacgttagccgttcagcatacacagggagaacggagacaggcagagcagctggcggttcaaacggcgagaaccatttcctatatgccgccggttaaagagctcattgagagaaaagacggacatgcggctcagacgcaagaggtcattgaacaaatgaaagaacagactggtgcgtttgccatttatgttttgaacgaaaaaggagacattcgcagcgcctctggaaaaagcggattaaagaaactggagcgcagcagagaaattttgtttggcggttcgcatgtttctgaaacaaaagcggatggacgaagagtgatcagagggagcgcgccgattataaaagaacagaagggatacagccaagtgatcggcagcgtgtctgttgattttctgcaaacggagacagagcaaagcatcaaaaagcatttgagaaatttgagtgtgattgctgtgcttgtactgctgctcggatttattggcgccgccgtgctggcgaaaagcatcagaaaggatacgctcgggcttgaaccgcatgagatcgcggctctatatcgtgagaggaacgcaatgcttttcgcgattcgagaagggattattgccaccaatcgtgaaggcgtcgtcaccatgatgaacgtatcggcggccgagatgctgaagctgcccgagcctgtgatccatcttcctatagatgacgtcatgccgggagcagggctgatgtctgtgcttgaaaaaggagaaatgctgccgaaccaggaagtaagcgtcaacgatcaagtgtttattatcaatacgaaagtgatgaatcaaggcgggcaggcgtatgggattgtcgtcagcttcagggagaaaacagagctgaagaagctgatcgacacattgacagaggttcgcaaatattcagaggatctcagggcgcagactcatgaattttcaaataagctttatgcgattttagggctgcgtcgac

SEQ ID NO: 128 - DNA, 2604 bp, Bacillus amyloliquefaciens
  source 1..2604: mol_type = unassigned DNA
aagcttcaagcggtcaatcggaatgtgcatctcgcttcatacttaggttttcacccgcatattaagcaggcgtttttgaaccgtgtgacagaagctgttcgaaaccccggcgggcggtttgattttaaggggggacagtatgctgcctcttcacattaatctcagcggaaaaagaatcatcattgctggcgggggcaatgttgcattaagaaggctgaaacggtgtttccggaaggcgctgatattaccgtgatcagtctgagcctgcctgaaattaaaaagctggcggatgaaggacgcatccgctggattccccggagaattgaaatgaaagatctcaagcccgcttttttcattattgccgcgacaaatgaccgaggcgtgaatcaggagatagccgcaaacgcttctgaaacgcagctggtcaactgtgtaagcaaggctgaacaaggcagcgtatatatgccgaagatcatccgcaaagggcgcattcaagtatcagtatcaacaagcggggcaagccccgcacatacgaaaagactggctgaaaacattgagcctttgatgactgatgatttggctgaagaagtggatcgattgtttgagaaaagaagaagaccataaaaataccttgtctgtcatcagacagggtattttttatgctgtccagactgtccgctgtgtaaaaaataggaataaaggggggttgttattattttactgatatgtaaaatataatttgtataagaaaatgagagggagaggaaacatgattcaaaaacgaaagcggacagtttcgttcagacttgtgcttatgtgcacgctgttatttgtcagtttgccgattacaaaaacatcagccgtaaatggcacgctgatgcagtattttgaatggtatacgccgaacgacggccagcattggaaacgattgcagaatgatgcggaacatttatcggatatcggaatcactgccgtctggattcctcccgcatacaaaggattgagccaatccgataacggatacggaccttatgatttgtatgatttaggagaattccagcaaaaagggacggtcagaacgaaatacggcacaaaatcagagcttcaagatgcgatcggctcactgcattcccggaacgtccaagtatacggagatgtggttttgaatcataaggctggtgctgatgcaacagaagatgtaactgccgtcgaagtcaatccggccaatagaaatcaggaaacttcggaggaatatcaaatcaaagcgtggacggattttcgttttccgggccgtggaaacacgtacagtgattttaaatggcattggtatcatttcgacggagcggactgggatgaatcccggaagatcagccgcatctttaagtttcgtggggaaggaaaagcgtgggattgggaagtatcaagtgaaaacggcaactatgactatttaatgtatgctgatgttgactacgaccaccctgatgtcgtggcagagacaaaaaaatggggtatctggtatgcgaatgaactgtcattagacggcttccgtattgatgccgccaaacatattaaattttcatttctgcgtgattgggttcaggcggtcagacaggcgacgggaaaagaaatgtttacggttgcggagtattggcagaataatgccgggaaactcgaaaactacttgaataaaacaagctttaatcaatccgtgtttgatgttccgcttcatttcaatttacaggcggcttcctcacaaggaggcggatatgatatgaggcgtttgctggacggtaccgttgtgtccaggcatccggaaaaggcggttacatttgttgaaaatcatgacacacagccgggacagtcattggaatcgacagtccaaacttggtttaaaccgcttgcatacgcctttattttgacaagagaatccggttatcctcaggtgttctatggggatatgtacgggacaaaagggacatcgccaaaggaaattccctcactgaaagataatatagagccgattttaaaagcgcgtaaggagtacgcatacgggccccagcacgattatattgaccacccggatgtgatcggatggacgagggaaggtgacagctccgccgccaaatcaggtttggccgctttaatcacggacggacccggcggatcaaagcggatgtatgccggcctgaaaaatgccggcgagacatggtatgacataacgggcaaccgttcagatactgtaaaaatcggatctgacggctggggagagtttcatgtaaacgatgggtccgtctccatttatgttcagaaataaggtaataaaaaaacacctccaagctgagtgcgggtatcagcttggaggtgcgtttattttttcagccgtatgacaaggtcggcatcaggtgtgacaaatacggtatgctggctgtcataggtgacaaatccgggttttgcgccgtttggctttttcacatgtctgatttttgtataatcaacaggcacggagccggaatctttcgccttggaaaaataagcggcgatcgtagctgcttccaatatggattgttcatcgggatcgctgcttttaatcacaacgtgggatcc

SEQ ID NO: 129 - DNA, 1760 bp, Aspergillus oryzae
  source 1..1760: mol_type = unassigned DNA
catcaagctctcccttctctgaacaataaaccccacagaaggcatttatgatggtcgcgtggtggtctctatttctgtacggccttcaggtcgcggcacctgctttggctgcaacgcctgcggactggcgatcgcaatccatttatttccttctcacggatcgatttgcaaggacggatgggtcgacgactgcgacttgtaatactgcggatcagaaatactgtggtggaacatggcagggcatcatcgacaagttggactatatccagggaatgggcttcacagccatctggatcacccccgttacagcccagctgccccagaccaccgcatatggagatgcctaccatggctactggcagcaggatatatactctctgaacgaaaactacggcactgcagatgacttgaaggcgctctcttcggcccttcatgagagggggatgtatcttatggtcgatgtggttgctaaccatatgggctatgatggagcgggtagctcagtcgattacagtgtgtttaaaccgttcagttcccaagactacttccacccgttctgtttcattcaaaactatgaagatcagactcaggttgaggattgctggctaggagataacactgtctccttgcctgatctcgataccaccaaggatgtggtcaagaatgaatggtacgactgggtgggatcattggtatcgaactactccattgacggcctccgtatcgacacagtaaaacacgtccagaaggacttctggcccgggtacaacaaagccgcaggcgtgtactgtatcggcgaggtgctcgacggtgatccggcctacacttgtccctaccagaacgtcatggacggcgtactgaactatcccatttactatccactcctcaacgccttcaagtcaacctccggcagcatggacgacctctacaacatgatcaacaccgtcaaatccgactgtccagactcaacactcctgggcacattcgtcgagaaccacgacaacccacggttcgcttcttacaccaacgacatagccctcgccaagaacgtcgcagcattcatcatcctcaacgacggaatccccatcatctacgccggccaagaacagcactacgccggcggaaacgaccccgcgaaccgcgaagcaacctggctctcgggctacccgaccgacagcgagctgtacaagttaattgcctccgcgaacgcaatccggaactatgccattagcaaagatacaggattcgtgacctacaagaactggcccatctacaaagacgacacaacgatcgccatgcgcaagggcacagatgggtcgcagatcgtgactatcttgtccaacaagggtgcttcgggtgattcgtataccctctccttgagtggtgcgggttacacagccggccagcaattgacggaggtcattggctgcacgaccgtgacggttggttcggatggaaatgtgcctgttcctatggcaggtgggctacctagggtattgtatccgactgagaagttggcaggtagcaagatctgtagtagctcgtgaagggtggagagtatatgatggtactgctattcaatctggcattggacagtgagtttgagtttgatgtacagttggagtcgttactgctgtcatccccttatactcttcgattgtttttcgaaccctaatgccaagcacgctagtctattataggaaaaaaaaaaaaaaaaaaaaaaaaaaaaaaaaaaaaaaaaaaaaaaaaaaaaaaaaaaa

SEQ ID NO: 130 - DNA, 9449 bp, Geobacillus stearothermophilus
  source 1..9449: mol_type = unassigned DNA
attattaatctgttcagcaatcgggcgcgattgctgaataaaagatacgagagacctctcttgtatcttttttattttgagtggttttgtccgttacactagaaaaccgaaagacaataaaaattttattcttgctgagtctggctttcggtaagctagacaaaacggacaaaataaaaattggcaagggtttaaaggtggagattttttgagtgatcttctcaaaaaatactacctgtcccttgctgatttttaaacgagcacgagagcaaaacccccctttgctgaggtggcagagggcaggtttttttgtttcttttttctcgtaaaaaaaagaaaggtcttaaaggttttatggttttggtcggcactgccgacagcctcgcagagcacacactttatgaatataaagtatagtgtgttatactttacttggaagtggttgccggaaagagcgaaaatgcctcacattaaagataatatctttgaattgtaacgcccctcaaaagtaagaactacaaaaaaagaatacgttatatagaaatatgtttgaaccttcttcagattacaaatatattcggacggactctacctcaaatgcttatctaactatagaatgacatacaagcacaaccttgaaaatttgaaaatataactaccaatgaacttgttcatgtgaattatcgctgtatttaattttctcaattcaatatataatatgccaatacattgttacaagtagaaattaagacacccttgatagccttactatacctaacatgatgtagtattaaatgaatatgtaaatatatttatgataagaagcgacttatttataatcattacatatttttctattggaatgattaagattccaatagaatagtgtataaattatttatcttgaaaggagggatgcctaaaaacgaagaacattaaaaacatatatttgcaccgtctaatggatttatgaaaaatcattttatcagtttgaaaattatgtattatggagctctgaaaaaaaggagaggataaagaatgaaacaacaaaaacggctttacgcccgattgctgacgctgttatttgcgctcatcttcttgctgcctcattctgcagcagcggcggcaccgtttaatggcacgatgatgcaatattttgaatggtatctgccggatgatggcacgctgtggacgaaagtcgcgaacgaagcgaacaacctgagcagcctgggcatcacggcactgtggctgcctccggcatataaaggcacgagccgcagcgacgtcggctatggcgcatatgatctgtatgacctgggcgaatttaaccaaaaaggcacggtccgcacgaaatatggcacgaaagcgcaatatctgcaagcgatccaagcggcacatgcggcaggcatgcaagtctatgcggatgtcgtctttgatcataaaggcggagcggatggcacggaatgggtcgatgcggtcgaagtcaacccgagcgatcgcaaccaagtcatcagcggcacgtatcaaatccaagcctggacgaaatttgattttcctggcagaggcaacacgtacagcagctttaaatggcgctggtatcattttgatggcgtcgattgggatgaaagccgcaaactgagccgcatctatctttttagcggcaaacaatgggattggcctgtcgataacgaatttggcaactatgactatctgatgtatgcggatctggatatggatcatccggaagtcacgacggaactgaaaaactggggcaaatggtatgtcaacacgacgaacatcgatggctttcgcctggatgcggtcaaacatatcaaattttacttttttccggactggctgagctatgtccgcagcagcacgggcaaaccgctgtttacggtcggcgaatattggagcggagatatcaacaaactgcataactatatcacgataacggatggaacggtcagcctgtttgatgcaccgctgcattataagttttataacgcgagcaaaagcggaggcgcttttgatatgcgcacactgatgacgaacacgctgatgaaagatcaaccgacgctggcggtcacgtttgtcgataatcatgatacggaaccgggacaagcgctgcaaagctgggtcgatccgtggttcaaaccgcttgcgtatgcgtttatcctgacgagacaagaaggctatccttgcgtcttttatggcgattattatggcatcccgcaatataacatcccgagcctgaaaagcaaaatcgatccgctgctgatcgcgagaagagattatgcgtatggcacgcaacatgattatttggatcatagcgatatcatcggctggacgagagaaggcggtacggaaaaacctggcagcggactggcagcgctgatcacggatggacctggcggaagcaaatggatgtatgtcggcaaacagcatgcgggaaaagttttttatgatctgacgggcaaccgcagcgatacggtcacgatcaacagcgacggctggggagaattcaaagtcaatggcggatcagtcagcgtctgggtcccgagaaaaacgacggtcagcacgatcgcaagaccgtaacgcgtagggcccgcggctagcggccgcgtcgactagaagagcagagaggacggatttcctgaaggaaatccgtttttttattttgcccgtcttataaatttcgttgtccaactcgcttaattgcgagtttttatttcgtttatttcaattaaggtaactaaagatcctctagagtcgattatgtcttttgcgcagtcggcttaaaccagttttcgctggtgcgaaaaaagagtgtcttgtgacactcttaaattcaaaatctatcggtcagatttataccgatttgattttatatattcttgaataacatacgccgagttatcacataaaagcgggaaccaatcatcaaatttaaacttcattgcataatccattaaactcttaaattctacgattccttgttcatcaataaactcaatcatttctttaattaatttatatctatctgttgttgttttctttaataattcatcaacatctacaccgccataaactatcatatcttctttttgatatttaaatttattaggatcgtccatgtgaagcatatatctcacaagacctttcacacttcctgcaatctgcggaatagtcgcattcaattcttctgtaattatttttatctgttcataagatttattaccctcatacatcactagaatatgataatgctcttttttcatcctaccttctgtatcagtatccctatcatgtaatggagacactacaaattgaatgtgtaactcttttaaatactctaaccactcggcttttgctgattctggatataaaacaaatgtccaattacgtcctcttgaatttttcttgttttcagtttcttttattacattttcgctcatgatataataacggtgctaatacacttaacaaaatttagtcatagataggcagcatgccagtgctgtctatctttttttgtttaaaatgcaccgtattcctcctttgcatatttttttattagaataccggttgcatctgatttgctaatattatatttttctttgattctatttaatatctcattttcttctgttataagtcttaaagtaacagcaacttttttctcttcttttctatctacaaccatcactgtacctcccaacatctgtttttttcactttaacataaaaaacaaccttttaacattaaaaacccaatatttatttatttgtttggacaatggacaatggacacctaggggggaggtcgtagtacccccctatgttttctcccctaaataaccccaaaaatctaagaaaaaaagacctcaaaaaggtctttaattaacatctcaaatttcgcatttattccaatttcctttttgcgtgtgatgcgctgcgtccattaaaaatcctagagctttgcaaccgaaagttaatagctgtcgctactactttcgcttacgctctaagtatattttaaggactgtcacacgcaaaaagttttctcggcataaaagtacctctacatctctaaatcgtctgtacgctgtttctcacgctttctatcgaccttctggacattatcctgtacaacatccataaactgtcccacacgctcgaatttggaatcattaaagaatttctctttaagcctattaaaccctttctcaaacccagggaaattcgccctcgcagcacgatataaagtcactgtactatcttgaaatttctctgatacattcaactgctcattcaaactatcattctctcgctttaatttattaacctctttacttttttcgtgatacccctctttccatgtattcactacttctttcaaactctctctacgtttttttaattcttgattttctgtgtaatagtctgtgctcttaatattttcgtaatcatcaacaatccgttctgcagaagagattgtttcttgcaggcgttcaaattcatcagcagttaatatctttctaccagtctcttcacgtccagagaacaaacctgtacgctcattttcataatcaaagggtttcgtagacctcatatgctctattccactctgtaactgcttatttgccttctgtaactcatccttaacttcttgcagttcctgtttatgaaatacagtatctttcttgtactgatccatcgctttatgttctcgttctgtaacctctttggacgtgcctctttcaagttcataacctttctcattcacatactcattaaatctatcttgtaattgagtaaagtctttcttgttgcctaactgttcttttgcagacaatctcccgtcctctgttaaagggacaaaaccaaagtgcatatgtgggactctttcatccagatggacagtcgcatacagcatattttccttaccgtattcattttctagaaactccaagctatctttaaaaaatcgttctatttcttctccgcttaaatcatcaaagaaatctttatcacttgtaaccagtccgtccacatgtcgaattgcatctgaccgaattttacgtttccctgaataattctcatcaatcgtttcatcaattttatctttatactttatattttgtgcgttaatcaaatcataatttttatatgtttcctcatgatttatgtctttattattatagtttttattctctctttgattatgtctttgtatcccgtttgtattacttgatcctttaactctggcaaccctcaaaattgaatgagacatgctacacctccggataataaatatatataaacgtatatagatttcataaagtctaacacactagacttatttacttcgtaattaagtcgttaaaccgtgtgctctacgaccaaaactataaaacctttaagaactttctttttttacaagaaaaaagaaattagataaatctctcatatcttttattcaataatcgcatccgattgcagtataaatttaacgatcactcatcatgttcatatttatcagtgctcgtgctataattatactaattttataaggaggaaaaaatatgggcatttttagtatttttgtaatcagcacagttcattatcaaccaaacaaaaaataagtggttataatgaatcgttaataagcaaaattcatataaccaaattaaagagggttataatgaacgagaaaaatataaaacacagtcaaaactttattacttcaaaacataatatagataaaataatgacaaatataagattaaatgaacatgataatatctttgaaatcggctcaggaaaaggccattttacccttgaattagtaaagaggtgtaatttcgtaactgccattgaaatagaccataaattatgcaaaactacagaaaataaacttgttgatcacgataatttccaagttttaaacaaggatatattgcagtttaaatttcctaaaaaccaatcctataaaatatatggtaatataccttataacataagtacggatataatacgcaaaattgtttttgatagtatagctaatgagatttatttaatcgtggaatacgggtttgctaaaagattattaaatacaaaacgctcattggcattacttttaatggcagaagttgatatttctatattaagtatggttccaagagaatattttcatcctaaacctaaagtgaatagctcacttatcagattaagtagaaaaaaatcaagaatatcacacaaagataaacaaaagtataattatttcgttatgaaatgggttaacaaagaatacaagaaaatatttacaaaaaatcaatttaacaattccttaaaacatgcaggaattgacgatttaaacaatattagctttgaacaattcttatctcttttcaatagctataaattatttaataagtaagttaagggatgcataaactgcatcccttaacttgtttttcgtgtgcctattttttgtgaatcgacctgcaggcatgcaagcttaagcgagttggaatttaaatatgatatctacattatcagcagtaacatcaacctttgatacaaggttgttgacgattttctttttattatcatatgatagttcattaatcggaattgagcccaactgagttttaactaactcaaaaacatcagtagagtcattaaatttattttcgctaatcttagctttaagcagctttttctcagcctgaagggaatcagtacgatctttcaactcatccatagtgataaaatcatttaggtacaaatcagagttcttttgtatttttttatcgatctgtgaaatttgctttttaaatgacgaagtatcaagaataggttggttgttgccattgataattttcaataaggagtcattattttcttgaaatccaatcaggttgtcaataacagtattttctaaattacttaaatcataagttcctgaatcacactttttattgtcattatatactgtaattccttttgtttttcgaggaaatctatttgcacagtgatatttcatagtgcggcttccatcttttcttttgtggccaagaacaatttttaaaggtgctccacagtaaccgcaccttgccatccctgacagcatatatttagcttggaaaggtctagggttgttatttctttcataagtctgctgttgtctttcttctagctctttttgaacttttaaataagtctcataagggataattggtttgtgcataccttcaaataggctgtccttaaatttgatataaccacagtaaactggattatcaagtgtttgtcttagggtacgataagaccacggtatatctttaccgatgtgtccagattcattgagtttatctcttaattttgtaagtgatattcctgataaataatcagtgaatatttgttcaactattgtagcttgtaaaggaacaatttctaatatacctgtctttctgttgtggtaatacccaaaagctgtcttagtccacatcatagacttaccagatttcgctcgccctagtttacccatagtcatgcgttcttttatattctctctttcaaactcattaattgcagaaagaatagtgagaaacaagctacccatagcagaagaagtatcaatactttcattaagcgagataaagtctattttattttttgtgaacacatccttaacaagataaagagtatctcttacactacgtgaaaggcggtctagcttatatacaagaactgtatcaaaagctttattctcgatatcgttgattaatctttgcattgctgggcgttcaagtttggcccctgaaaaaccagcatcagtataagtatcagatacttgccaccccattgcttcagcatattttgttaaacggtcaatttgctcatcaattgagaacccttcctctgcttggttagtagtggatactcgtgtatagattgctactttcttagtcatgagatttcccccttaaaaataaattcattcaaatacagatgcattttatttcatatagtaagtacatcacctattagtttgttgtttaaacaaactaacttattttcatcttatatagcctcgtcagtattttcaatattttttttagttttttatgaacacattagatataataaagggaagattcgctatgtactatgttgatacttaatttaaagattaaacaaatggagtggatgaagtggatatcgctgatcaaacctttgtcaaaaaagtaaatcaaaagttattattaaaagaaatccttaaaaattcacctatttcaagagcaaaattatctgaaatgactggattaaataaatcaactgtctcatcacaggtaaacacgttaatgaaagaaagtatggtatttgaaataggtcaaggacaatcaagtggcggaagaagacctgtcatgcttgtttttaataaaaaggcaggatactccgttggaatagatgttggtgtggattatattaatggcattttaacagaccttgaaggaacaatcgttcttgatcaataccgccatttggaatccaattctccagaaataacgaaagacattttgattgatatgattcatcactttattacgcaaatgccccaatctccgtacgggcttattggtataggtatttgcgtgcctggactcattgataaagatcaaaaaattgttttcactccgaactccaactggagagatattgacttaaaatcttcgatacaagagaagtacaatgtgcctgtttttattgaaaatgaggcaaatgctggcgcatatggagaaaaagtatttggagctgcaaaaaatcacgataacattatttacgtaagtatcagcacaggaatagggatcggtgttattatcaacaatcatttatatagaggagtaagcggcttctctggagaaatgggacatatgacaatagactttaatggtcctaaatgcagttgcggaaaccgaggatgctgggaattgtatgcttcagagaaggctttattaaaatctcttcagaccaaagagaaaaaactgtcctatcaagatatcataaacctcgcccatctgaatgatatcggaaccttaaatgcattacaaaattttggattctatttaggaataggccttaccaatattctaaatactttcaacccacaagccgtaattttaagaaatagcataattgaatcgcatcctatggttttaaattcaatgagaagtgaagtatcatcaagggtttattcccaattaggcaatagctatgaattattgccatcttccttaggacagaatgcaccggcattaggaatgtcctccattgtgattgatcattttctggacatgattacaatgtaattttttatggaatggacagctcatctttaaagatgagtttttttattctaggagtatttctgaattcgtgctc

SEQ ID NO: 131 - DNA, 1449 bp, Alkalihalobacillus akibai
  source 1..1449: mol_type = unassigned DNA
caccataatggtacgaacggcacaatgatgcagtactttgaatggtatctaccaaatgacggaaaccattggaatagattaaggtctgatgcaagtaacctaaaagataaagggatctcagcggtttggattcctcctgcatggaagggtgcctctcaaaatgatgtggggtatggtgcttatgatctgtatgatttaggagaattcaatcaaaaaggaaccattcgtacaaaatatggaacgcgcaatcagttacaagctgcggttaacgccttgaaaagtaatggaattcaagtgtatggcgatgttgtaatgaatcataaagggggagcagacgctaccgaaatggttaaagcagtcgaagtaaacccgaataatagaaatcaagaagtgtccggtgaatatacaattgaggcttggacaaagtttgactttccaggacgaggtaatactcattcaaacttcaaatggagatggtatcactttgatggagtagattgggatcagtcacgtaagctgaacaatcgaatttataaattccgcggtaaagggtgggattgggaagtcgatacagaattcggtaactatgattacctaatgtatgcagatattgacatggatcacccagaggtagtgaatgagctaagaaattggggtgtttggtatacgaatacattaggccttgatggttttagaatagatgcagtaaaacatataaaatacagctttactcgtgattggattaatcatgttagaagtgcaactggcaaaaatatgtttgcggttgcggaattttggaaaaatgatttaggtgctattgaaaactatttaaacaaaacaaactggaaccattcagtctttgatgttccgctgcactataacctctataatgcttcaaaaagcggagggaattatgatatgaggcaaatatttaatggtacagtcgtgcaaaagcatccaatgcatgctgttacatttgttgataatcatgattcgcaacctgaagaagctttagagtcttttgttgaagaatggttcaaaccattagcgtatgctttgacattaacacgtgaacaaggctacccttctgtattttatggagattattatggcattccaacgcatggtgtaccagcgatgaaatcgaaaattgacccgattctagaagcgcgtcaaaagtatgcatatggaagacaaaatgactacttagaccatcataatatcatcggttggacacgtgaagggaatacagcacaccccaactccggtttagctactatcatgtccgatggggcaggaggaaataagtggatgtttgttgggcgtaataaagctggtcaagtttggaccgatatcactggaaataaagccggtactgttacgattaatgctgatggatggggtaatttttctgtaaatggaggatcagtttctatttgggtaaacaaa

SEQ ID NO: 132 - DNA, 1920 bp, Aspergillus niger
  source 1..1920: mol_type = unassigned DNA
atgtcttttcgttctttattagctttatctggtttagtttgtactggtttagctaatgttatttctaaacgtgctactttagattcttggttatctaatgaagctactgttgctcgtactgctattttaaataatattggtgctgatggtgcttgggtttctggtgctgattctggtattgttgttgcttctccttctactgataatcctgattatttttatacttggactcgtgattctggtttagttttaaaaactttagttgatttatttcgtaatggtgatacttctttattatctactattgaaaattatatttctgctcaagctattgttcaaggtatttctaatccttctggtgatttatcttctggtgctggtttaggtgaacctaaatttaatgttgatgaaactgcttatactggttcttggggtcgtcctcaacgtgatggtcctgctttacgtgctactgctatgattggttttggtcaatggttattagataatggttatacttctactgctactgatattgtttggcctttagttcgtaatgatttatcttatgttgctcaatattggaatcaaactggttatgatttatgggaagaagttaatggttcttctttttttactattgctgttcaacatcgtgctttagttgaaggttctgcttttgctactgctgttggttcttcttgttcttggtgtgattctcaagctcctgaaattttatgttatttacaatctttttggactggttcttttattttagctaattttgattcttctcgttctggtaaagatgctaatactttattaggttctattcatacttttgatcctgaagctgcttgtgatgattctacttttcaaccttgttctcctcgtgctttagctaatcataaagaagttgttgattcttttcgttctatttatactttaaatgatggtttatctgattctgaagctgttgctgttggtcgttatcctgaagatacttattataatggtaatccttggtttttatgtactttagctgctgctgaacaattatatgatgctttatatcaatgggataaacaaggttctttagaagttactgatgtttctttagatttttttaaagctttatattctgatgctgctactggtacttattcttcttcttcttctacttattcttctattgttgatgctgttaaaacttttgctgatggttttgtttctattgttgaaactcatgctgcttctaatggttctatgtctgaacaatatgataaatctgatggtgaacaattatctgctcgtgatttaacttggtcttatgctgctttattaactgctaataatcgtcgtaattctgttgttcctgcttcttggggtgaaacttctgcttcttctgttcctggtacttgtgctgctacttctgctattggtacttattcttctgttactgttacttcttggccttctattgttgctactggtggtactactactactgctactcctactggttctggttctgttacttctacttctaaaactactgctactgcttctaaaacttctacttctacttcttctacttcttgtactactcctactgctgttgctgttacttttgatttaactgctactactacttatggtgaaaatatttatttagttggttctatttctcaattaggtgattgggaaacttctgatggtattgctttatctgctgataaatatacttcttctgatcctttatggtatgttactgttactttacctgctggtgaatcttttgaatataaatttattcgtattgaatctgatgattctgttgaatgggaatctgatcctaatcgtgaatatactgttcctcaagcttgtggtacttctactgctactgttactgatacttggcgt

SEQ ID NO: 133 - DNA, 1845 bp, Aspergillus niger
  source 1..1845: mol_type = unassigned DNA
actttagattcttggttatctaatgaagctactgttgctcgtactgctattttaaataatattggtgctgatggtgcttgggtttctggtgctgattctggtattgttgttgcttctccttctactgataatcctgattatttttatacttggactcgtgattctggtttagttttaaaaactttagttgatttatttcgtaatggtgatacttctttattatctactattgaaaattatatttctgctcaagctattgttcaaggtatttctaatccttctggtgatttatcttctggtgctggtttaggtgaacctaaatttaatgttgatgaaactgcttatactggttcttggggtcgtcctcaacgtgatggtcctgctttacgtgctactgctatgattggttttggtcaatggttattagataatggttatacttctactgctactgatattgtttggcctttagttcgtaatgatttatcttatgttgctcaatattggaatcaaactggttatgatttatgggaagaagttaatggttcttctttttttactattgctgttcaacatcgtgctttagttgaaggttctgcttttgctactgctgttggttcttcttgttcttggtgtgattctcaagctcctgaaattttatgttatttacaatctttttggactggttcttttattttagctaattttgattcttctcgttctggtaaagatgctaatactttattaggttctattcatacttttgatcctgaagctgcttgtgatgattctacttttcaaccttgttctcctcgtgctttagctaatcataaagaagttgttgattcttttcgttctatttatactttaaatgatggtttatctgattctgaagctgttgctgttggtcgttatcctgaagatacttattataatggtaatccttggtttttatgtactttagctgctgctgaacaattatatgatgctttatatcaatgggataaacaaggttctttagaagttactgatgtttctttagatttttttaaagctttatattctgatgctgctactggtacttattcttcttcttcttctacttattcttctattgttgatgctgttaaaacttttgctgatggttttgtttctattgttgaaactcatgctgcttctaatggttctatgtctgaacaatatgataaatctgatggtgaacaattatctgctcgtgatttaacttggtcttatgctgctttattaactgctaataatcgtcgtaattctgttgttcctgcttcttggggtgaaacttctgcttcttctgttcctggtacttgtgctgctacttctgctattggtacttattcttctgttactgttacttcttggccttctattgttgctactggtggtactactactactgctactcctactggttctggttctgttacttctacttctaaaactactgctactgcttctaaaacttctacttctacttcttctacttcttgtactactcctactgctgttgctgttacttttgatttaactgctactactacttatggtgaaaatatttatttagttggttctatttctcaattaggtgattgggaaacttctgatggtattgctttatctgctgataaatatacttcttctgatcctttatggtatgttactgttactttacctgctggtgaatcttttgaatataaatttattcgtattgaatctgatgattctgttgaatgggaatctgatcctaatcgtgaatatactgttcctcaagcttgtggtacttctactgctactgttactgatacttggcgt

SEQ ID NO: 134 - DNA, 1311 bp, Humicola insolens
  source 1..1311: mol_type = unassigned DNA
atggctcgcggtaccgctctcctcggcctgaccgcgctcctcctggggctggtcaacggccagaagcctggtgagaccaaggaggttcacccccagctcacgaccttccgctgcacgaagaggggtggttgcaagccggcgaccaacttcatcgtgcttgactcgctgtcgcaccccatccaccgcgctgagggcctgggccctggcggctgcggcgactggggcaacccgccgcccaaggacgtctgcccggacgtcgagtcgtgcgccaagaactgcatcatggagggcatccccgactacagccagtacggcgtcaccaccaacggcaccagcctccgcctgcagcacatcctccccgacggccgcgtcccgtcgccgcgtgtctacctgctcgacaagacgaagcgccgctatgagatgctccacctgaccggcttcgagttcaccttcgacgtcgacgccaccaagctgccctgcggcatgaacagcgctctgtacctgtccgagatgcacccgaccggtgccaagagcaagtacaaccccggcggtgcctactacggcactggctactgcgatgctcagtgcttcgtgacgcccttcatcaacggcttgggcaacatcgagggcaagggctcgtgctgcaacgagatggatatctgggaggccaactcgcgcgcctcgcacgtggctccccacacctgcaacaagaagggcctgtacctttgcgagggtgaggagtgcgccttcgagggtgtttgcgacaagaacggctgcggctggaacaactaccgcgtcaacgtgactgactactacggccggggcgaggagttcaaggtcaacaccctcaagcccttcaccgtcgtcactcagttcttggccaaccgcaggggcaagctcgagaagatccaccgcttctacgtgcaggacggcaaggtcatcgagtccttctacaccaacaaggagggagtcccttacaccaacatgatcgatgacgagttctgcgaggccaccggctcccgcaagtacatggagctcggcgccacccagggcatgggcgaggccctcacccgcggcatggtcctggccatgagcatctggtgggaccagggcggcaacatggagtggctcgaccacggcgaggccggcccctgcgccaagggcgagggcgccccgtccaacattgtccaggttgagcccttccccgaggtcacctacaccaacctccgctggggcgagatcggctcgacctaccaggaggttcagaagcctaagcccaagcccgggcacggcccccgatcggactaatag

SEQ ID NO: 135 - DNA, 942 bp, Humicola insolens
  source 1..942: mol_type = unassigned DNA
atgcgttcctcccccctcctccgctccgccgttgtggccgccctgccggtgttggcccttgccgctgatggcaggtccacccgctactgggactgctgcaagccttcgtgcggctgggccaagaaggctcccgtgaaccagcctgtcttttcctgcaacgccaacttccagcgtatcacggacttcgacgccaagtccggctgcgagccgggcggtgtcgcctactcgtgcgccgaccagaccccatgggctgtgaacgacgacttcgcgctcggttttgctgccacctctattgccggcagcaatgaggcgggctggtgctgcgcctgctacgagctcaccttcacatccggtcctgttgctggcaagaagatggtcgtccagtccaccagcactggcggtgatcttggcagcaaccacttcgatctcaacatccccggcggcggcgtcggcatcttcgacggatgcactccccagttcggcggtctgcccggccagcgctacggcggcatctcgtcccgcaacgagtgcgatcgattccccgacgccctcaagcccggctgctactggcgcttcgactggttcaagaacgccgacaatccaagcttcagcttccgtcaggtccagtgcccagccgagctcgtcgctcgcaccggatgccgccgcaacgacgacggcaacttccctgccgtccagatcccctccagcagcaccagctctccggtcaaccagcctaccagcaccagcaccacgtccacctccaccacctcgagcccgccagtccagcctacgactcccagcggctgcactgctgagaggtgggctcagtgcggcggcaatggctggagcggctgcaccacctgcgtcgctggcagcacttgcacgaagattaatgactggtaccatcagtgcctgtagtcgacctgcaggcatgcaagcttg

SEQ ID NO: 136 - DNA, 8075 bp, Thermothielavioides terrestris
  source 1..8075: mol_type = unassigned DNA
ccagaccagcagaggagataatactctgcgctccgccagggtggccttcaagaaatgcttgaccatcatacacttctccattcacgatgaaccatggcttctcatcgcaggaattctccttgaattcttcaaaaccaatcactcggcttagcccgtctttcttcatattaatgtcttgcacgggctccggctccgtcggctcctctccttcgtgtctttctccccagttaccattcgtcaggtcacccccagcctttttgacgcgttccatccatcctgtaggcatactagggtgggtagggtgctcgaatctcaagttcccgttttccttcgtaattgtaacccggaaccacgggttgttcatcattccgagaacggaccagtacatatcgcgaggctgcacgcccaatgcttcgtccatggctcttacaaggatggcatcactgttctcaagctctgggatggtgatgcttagagaccaaaaacaccagcagaagcaagtttcgcgccagtacatatctactttgcctccaaaaagctcgccttcaaaatcacgatacttgtcttcggcatattcgatttccgccaatctccaagctataagtccgttagctttgataagcattctcacacatcgagcgagcgagggtgcgtacatttgcctttgtctagggatatttctaccctggtaaccctgcggcccccaccggcgtatgcatatcctctgacagtatatgacggccctgccgacaggagatttaagacctcattgttttggggatatgcaacggcggagttggtgtttaggtcataaatcgcataccgctcatcgtgccaccaatttcggttatttgatgccatctcaggcgagaccattgttctgggttagggagttagacaaatgatggaaatataaaataagtgccctttagacatacggtaagacgcggttgtcattgatatggtaccagttgtcgcttggtgcatcggtcaagatcagcctcttcagccacttaacacttcgtcctcctatttgaccgggcacgacggccctcagcggacgaccatgatctgggcgaagagactccccgttcattttatgtgcaagcatgatccccctgttggggtccagggcccagttcaatttaatagatgtgccgtagtgaccattgggctgcggcgaacttagcaattatcatcataagatagaggtacagcataccagcttatccgctccttccatacagacgtatttcgctttacgcaggggtttcgcactgcggagaatatccgccagcaatgggccagtgaagagggcagtcgatagtcccgccgatccccaggaaaaacctttcgttttacgtacaatgttttgctctttgcgtcgattgccagcacatacgagggtgataggcgctgttatttggtcgtactgctgcaacacttgtcggaagtttagtaccaaaggcttctctaccagtctatactttggttaacggatgtttggcagagaacctagcactatactaacccttcgatgctaatttcccagtgagggatatcttcatccttgatatgagggactgggccatgatttcgaacatagaagagctccggcgatgttaaaaaccctttcagagtgtgagaatgtaacggctcaaggggacaagcatgacagccggtgcaagcaacctgataaggataggagtggagcagttataactcataccttctttatacagatctgtgagaggtggctcaacattaaacggatgaacacccgttaatctgataagccgagggtcacgaggaacatggctatctggagttcctttatctacgctcagcacttctgtcggccgttttgatggcggtggcagagggatatcagacaggtctctcgtcgagatctcttcgctttcgattttgatctgacctgtcttaagaacgaggtcagttgggacgagcgcatccgtccgcacctcggtgatggttgccatgttaccggcagggaaggccaatgaaagtaaaattacgagggagggagcatgaacaaggatgctgagtatgaataagtcgaatggtcagccagtgcattaactccaaataaggaggcaatccaccacactaaaatactcttgcctatcgtatgatggcacgcagtacgtgttacccatgcgcgggcagtggacattctattaggtcacggcagtaactccttgttaccatataacgcctcggagaaaggtcacaataagcaatgctcctaggaacccaccagcgatttccgcggagtcccaaaatcagctcattctgggaggtgggacgctcgaaattagggcaagccttcaggctggacggcgtcccaccgcttaaccaagcgttgaggcaaataaatcgcgttgacccacacaacactctcgaggctccagccatttgtccgctcaaccttgcaggatttctttttcgtcatattaattggttctttgaagaatgatggagacaatgccgtgaagccatgtgcaacttccaattagaagtgttgttgcttatcgtccgaatgagcctggttcgcgtggagaatgggccagatgggagctcacggctgttagagcggagctactactctgtacgtacccttcaaaggaattctcggtaagtttgttagagggatattgctcacgtttaattggcactccaggatcctttaaatccaggcaaaaatcgctcgatctggctttttttgccaatcttggaagtctaccgtatacttgtagttacacccttgaggatttaccacatgagaagaacaccaacctaactgcgctgagggtttacgcgcctgaatgtataagctagcttccgttaaattgccgtcgtcagccgttaaattaccgattaatcccgataaatttccgagatctccgttaaattgccgttcgcagccgttaaattaccggggacgaccgataaatttccgcgatgaattcatggtgttttgatcattttaaatttttatatggcgggtggtgggcaactcgcttgcgcgggcaactcgcttaccgattacgttagggctgatatttacgtaaaaatcgtcaagggatgcaagaccaaaccgttaaatttccggagtcaacagcatccaagcccaagtccttcacggagaaaccccagcgtccacatcacgagcgaaggaccacctctaggcatcggacgcaccatccaattagaagcagcaaagcgaaacagcccaagaaaaaggtcggcccgtcggccttttctgcaacgctgatcacgggcagcgatccaaccaacaccctccagagtgactaggggcggaaatttatcgggattaatttccactcaaccacaaatcacagtcgtccccggtaatttaacggctgcagacggcaatttaacggcttctgcgaatcgcttggattccccgcccctggccgtagagcttaaagtatgtcccttgtcgatgcgatgtatcacaacatataaatactggcaagggatgccatgcttggagtttccaactcaatttacctctatccacacttctcttccttcctcaatcctctatatacacaactaccatgcgctctactcccgttcttcgcacaaccctggccgctgcacttcctctggtcgcctccgcggccagtggcagtggccagtccacgagatactgggactgctgcaagccgtcgtgcgcttggcccgggaaggccgccgtcagccaaccggtctacgcgtgcgatgccaacttccagcgcctgtccgacttcaatgtccagtcgggctgcaacggcggctcggcctactcctgcgccgaccagactccctgggcggtgaacgacaatctcgcctacggcttcgccgcgacgagcatcgccggcgggtccgaatcctcgtggtgctgcgcctgctacgcgctcaccttcacttccggtcccgtcgccggcaagacaatggtggtgcagtcaacgagcactggcggcgacctgggatctaaccacttcgatatcgccatgcccggcggcggcgtgggcatcttcaacggctgcagctcgcagttcggcggcctccccggcgctcaatacggcggcatttcgtcgcgcgaccagtgcgattccttccccgcgccgctcaagcccggctgccagtggcggtttgactggttccagaacgccgacaacccgacgttcacgttccagcaggtgcagtgccccgccgagatcgttgcccgctccggctgcaagcgcaacgacgactccagcttccccgtcttcacccccccaagcggtggcaacggtggcaccgggacgcccacgtcgactgcgcctgggtcgggccagacgtctcccggcggcggcagtggctgcacgtctcagaagtgggctcagtgcggtggcatcggcttcagcggatgcaccacctgtgtctctggcaccacctgccagaagttgaacgactactactcgcagtgcctctagctcgagatctagagggtgactgacacctggcggtagacaatcaatccatttcgctatagttaaaggatggggatgagggcaattggttatatgatcatgtatgtagtgggtgtgcataatagtagtgaaatggaagccaagtcatgtgattgtaatcgaccgacggaattgaggatatccggaaatacagacaccgtgaaagccatggtctttccttcgtgtagaagaccagacagacagtccctgatttacccttgcacaaagcactagaaaattagcattccatccttctctgcttgctctgctgatatcactgtcattcaatgcatagccatgagctcatcttagatccaagcacgtaattacatagccgaggtccacagtggagcagcaacattccccatcattgctttccccaggggcctcccaacgactaaatcaagagtatatctctaccgtccaatagatcgtcttcgcttcaaaatctttgacaattccaagagggtccccatccatcaaacccagttcaataatagccgagatgcatggtggagtcaattaggcagtattgctggaatgtcggggccagttggcccggtggtcattggccgcctgtgatgccatctgccactaaatccgatcattgatccaccgcccacgaggcgcgtctttgctttttgcgcggcgtccaggttcaactctctcttataagtcctcagcgtgatttaaaacgccattgctatgatgcttgaagagtgccggatatatcggcatctaacttaggatttgtcttacgtacaatatttatgacctgtggtgaaacctgaggcaacaagggggcgcgatttaccagactggcgttcacataccaatacagtgcttaattgtaggtctcatgggtggaatgagatgaccttccctttcatctattcttaagaggaacagggatggtacccacaccataccccgaagagctcgtgatgtaatagaccctttcgtagtatgcgggtttttattgagatgccgatatgcaaacttgtagtaagactaataataacaggtgcaattaattgaatttggggcctgttaagcttttcgtccgaccaccagtgacgtccgtccgataagccgggaacgatcgataaggaggctatcccgtcgatcctgactaaccttttccagttgttccttaactttgcaccatctccgcggaggaatccctgacccaatcttatggtgaggtgctatcgtccttatcaatccctgtcacgattgccgataacccgtccacatccgatcatggagattaccattgggtgtgtcgctgcatctgctgcgaaaccgcttcgatgaccatcaaccatgaggtgattcgatagtcaaacatctcgccacgacctcatggtgtccacggagatgagaggcccgatcctggatcttggcaccagtagggtcttgccatatcggatgatagatcatgggggacatactccttgataaataaaaacgtccgccaacaccgtgcgttgggcgttgaatctcttccacagtgctatccatcccggacacaatgcctctcctagaagcgcccaggaatgggggcgcagtcaacaatggcgtccttagcggggtgtcgcattctcagagctttggcattgacacagagagtcacttggatgaccctaacagacgccaacagatagtggtggtgggactgggaatggtggctatttccttcctgtaggtgcaccgaagggggacgaggcgatggtcaataatacagttcgggtactgacgataccccccttctccgtatagtgagaaactggtcaagcaagattcagagaggagaaagtacgatatcgttgtgatcggcgaagaacctcacgttgcttacaaccgagtcggcctttcctcgtttttcgaacatcgcaatatcgaggacctctacctcaacccgaaagaatgggtgagtatatcacagctttccctgcgaacttagtgcagcattcgtgctgacgtcaatggattaatccattagtacggatcgttcaaagatcgatcgttcgactatcatctgaacaccagagtaaccgatatatttcctgaccgcaagacggtaaaaacctcaacgggtgacataatcgcctacgatcttcttgttctcgctaccggctctgatgcggtgcttcccactcacactcccggctatgacgccaacggggtttttgtctacagaacgatatcggacctcgagcgccttatcgaatttgcctctaatcacaagggcgagacggcaactactgtcggaggtggcctgctgggactcgaagctgccaaagcaatgacggatctagaagatttcggcaaggtcaagctcattgaccgcaacaagtgggtgctagcaagacaactagacggcgatgccggtaccctagtgacgcggaaaatcagagaactgggcttggatgtgatgcaccagaagcgagtagcgaaaattaagacggatgacaacaacaatgtcacgggtatcgtctttgaggatggggaagaaatagattgctgctgcgtctgttttgctgtacgccgtctaatctcatctcacgtactttcagtttgctaacattacgtatagatcggagtacgacctagagacgagttggggacgactgctggtattcagtgcgcttcacggggtgggtttgttatcaatgaaaggtaacaaccatcgttatgttaagtcttctatcatctaatctgatcttatagtctgcaaacttcgattcccgagatttacgctatcggagagtgtgcaagctgggaaaaccagacgtttggtattattgcacctggcattgaaatggcagatgtgctagcgttcaatttgaccaatcccgataaggaaccaaggagcttcagaagaccggatttaagcactaagctgaagctcttgggagtggatgtcgccagttttggtgacttttttgcggatcgcgatggccccaagttcttgccaggccgtcgaccatcagtcgcaaccattccgcgggtgaaagacacgacggaaaaggagtcaccagtgaaggctctcacgtacaaggatccttttggtggtgtctataagaagtatctattcactatggacggcaaatacctacttggaggaatgatgatcggtgatacaaaggactatatcaaactgaaccaaatggtgaagagccaaaaagagctcgaagttcctccgagccagttcattctgggagctcaaaatggtggggaagaaaacggtgacgacctgtgagctttctctcagatgtccgtgtataacgggtctgctaactatcattcgtacagagccgacgatacccaagtttgctcgtgtcacaacgttaccaaaggtgacatcgtcgaaagtgtcaagagtggcacatgcaagtcaattggagaggtaaagtcatgcacaaaggcaggcactggctgtggaggctgtatgccgttagtgcaatcaattttcaataagaccatgcttgatatgggccaggaggtttcgaataactgtaggtatccttg

SEQ ID NO: 137 - DNA, 609 bp, Bacillus amyloliquefaciens
  source 1..609: mol_type = unassigned DNA
tttaattcttataattctggtttatggcaaaaagctgatggttattctaatggtgatatgtttaattgtacttggcgtgctaataatgtttctatgacttcttctggtgaaatgcgtttagctttaacttctccttcttataataaatttgattgtggtgaaaatcgttctgttcaaacttatggttatggtttatatgaagttcgtatgaaacctgctaaaaatactggtattgtttcttctttttttacttatactggtcctactgaaggtactccttgggatgaaattgatattgaatttttaggtaaagatactactaaagttcaatttaattattatactaatggtgctggtaatcatgaaaaattagctgatttaggttttgatgctgctaatgcttatcatacttatgcttttgattggcaacctaattctattaaatggtatgttgatggtcaattaaaacatactgctactactcaaattcctgctgctcctggtaaaattatgatgaatttatggaatggtactggtgttgatgattggttaggttcttataatggtgttaatcctttatatgctcattatgattgggttcgttatact

SEQ ID NO: 138 - DNA, 8453 bp, Aspergillus niger
  source 1..8453: mol_type = unassigned DNA
ccagaccagcagaggagataatactctgcgctccgccagggtggccttcaagaaatgcttgaccatcatacacttctccattcacgatgaaccatggcttctcatcgcaggaattctccttgaattcttcaaaaccaatcactcggcttagcccgtctttcttcatattaatgtcttgcacgggctccggctccgtcggctcctctccttcgtgtctttctccccagttaccattcgtcaggtcacccccagcctttttgacgcgttccatccatcctgtaggcatactagggtgggtagggtgctcgaatctcaagttcccgttttccttcgtaattgtaacccggaaccacgggttgttcatcattccgagaacggaccagtacatatcgcgaggctgcacgcccaatgcttcgtccatggctcttacaaggatggcatcactgttctcaagctctgggatggtgatgcttagagaccaaaaacaccagcagaagcaagtttcgcgccagtacatatctactttgcctccaaaaagctcgccttcaaaatcacgatacttgtcttcggcatattcgatttccgccaatctccaagctataagtccgttagctttgataagcattctcacacatcgagcgagcgagggtgcgtacatttgcctttgtctagggatatttctaccctggtaaccctgcggcccccaccggcgtatgcatatcctctgacagtatatgacggccctgccgacaggagatttaagacctcattgttttggggatatgcaacggcggagttggtgtttaggtcataaatcgcataccgctcatcgtgccaccaatttcggttatttgatgccatctcaggcgagaccattgttctgggttagggagttagacaaatgatggaaatataaaataagtgccctttagacatacggtaagacgcggttgtcattgatatggtaccagttgtcgcttggtgcatcggtcaagatcagcctcttcagccacttaacacttcgtcctcctatttgaccgggcacgacggccctcagcggacgaccatgatctgggcgaagagactccccgttcattttatgtgcaagcatgatccccctgttggggtccagggcccagttcaatttaatagatgtgccgtagtgaccattgggctgcggcgaacttagcaattatcatcataagatagaggtacagcataccagcttatccgctccttccatacagacgtatttcgctttacgcaggggtttcgcactgcggagaatatccgccagcaatgggccagtgaagagggcagtcgatagtcccgccgatccccaggaaaaacctttcgttttacgtacaatgttttgctctttgcgtcgattgccagcacatacgagggtgataggcgctgttatttggtcgtactgctgcaacacttgtcggaagtttagtaccaaaggcttctctaccagtctatactttggttaacggatgtttggcagagaacctagcactatactaacccttcgatgctaatttcccagtgagggatatcttcatccttgatatgagggactgggccatgatttcgaacatagaagagctccggcgatgttaaaaaccctttcagagtgtgagaatgtaacggctcaaggggacaagcatgacagccggtgcaagcaacctgataaggataggagtggagcagttataactcataccttctttatacagatctgtgagaggtggctcaacattaaacggatgaacacccgttaatctgataagccgagggtcacgaggaacatggctatctggagttcctttatctacgctcagcacttctgtcggccgttttgatggcggtggcagagggatatcagacaggtctctcgtcgagatctcttcgctttcgattttgatctgacctgtcttaagaacgaggtcagttgggacgagcgcatccgtccgcacctcggtgatggttgccatgttaccggcagggaaggccaatgaaagtaaaattacgagggagggagcatgaacaaggatgctgagtatgaataagtcgaatggtcagccagtgcattaactccaaataaggaggcaatccaccacactaaaatactcttgcctatcgtatgatggcacgcagtacgtgttacccatgcgcgggcagtggacattctattaggtcacggcagtaactccttgttaccatataacgcctcggagaaaggtcacaataagcaatgctcctaggaacccaccagcgatttccgcggagtcccaaaatcagctcattctgggaggtgggacgctcgaaattagggcaagccttcaggctggacggcgtcccaccgcttaaccaagcgttgaggcaaataaatcgcgttgacccacacaacactctcgaggctccagccatttgtccgctcaaccttgcaggatttctttttcgtcatattaattggttctttgaagaatgatggagacaatgccgtgaagccatgtgcaacttccaattagaagtgttgttgcttatcgtccgaatgagcctggttcgcgtggagaatgggccagatgggagctcacggctgttagagcggagctactactctgtacgtacccttcaaaggaattctcggtaagtttgttagagggatattgctcacgtttaattggcactccaggatcctttaaatccaggcaaaaatcgctcgatctggctttttttgccaatcttggaagtctaccgtatacttgtagttacacccttgaggatttaccacatgagaagaacaccaacctaactgcgctgagggtttaatcctcacacaggaaacagctatgaccatgattacgccaagcttccgttaaattgccgtcgtcagccgttaaattaccgattaatcccgataaatttccgagatctccgttaaattgccgtcgttcaccgttaaattaccgaaatttaccgataaatttccggatctccgttaaattgccgttcgcagccgttaaattaccggggacgaccgataaatttccgcgatgaattcatggtgttttgatcattttaaatttttatatggcgggtggtgggcaactcgcttgcgcgggcaactcgcttaccgattacgttagggctgatatttacgtaaaaatcgtcaagggatgcaagaccaaaccgttaaatttccggagtcaacagcatccaagcccaagtccttcacggagaaaccccagcgtccacatcacgagcgaaggaccacctctaggcatcggacgcaccatccaattagaagcagcaaagcgaaacagcccaagaaaaaggtcggcccgtcggccttttctgcaacgctgatcacgggcagcgatccaaccaacaccctccagagtgactaggggcggaaatttatcgggattaatttccactcaaccacaaatcacagtcgtccccggtaatttaacggctgcagacggcaatttaacggcttctgcgaatcgcttggattccccgcccctggccgtagagcttaaagtatgtcccttgtcgatgcgatgtatcacaacatataaatactggcaagggatgccatgcttggagtttccaactcaatttacctctatccacacttctcttccttcctcaatcctctatatacacaactgggggcagtgagagcgatatgttgaatccgaaggttgcctacatggtctggatgacgtgcctgggtttaacgttgcccagccaggcacagtctaatgattaccgtccttcataccacttcacaccggaccagtactggatgaacgagccaaacggcctgattaaaatcggatccacctggcacctgttctttcaacacaatccgacggccaatgtatggggcaacatatgctgggggcacgctacgagcaccgatctgatgcactgggcacacaaacccactgccattgcggatgagaacggagtcgaagcgtttaccggtacagcctattatgatccaaacaatacctctggccttggggattcggcaaacccaccctatctggcctggttcacaggttataccacttcaagccaaacacaggaccagcgcctggctttcagtgtggataacggggcgacgtggaccaaatttcaaggcaatcccatcatatcaactagccaggaagcaccacatgatataacgggcggcctcgagagtagggatccaaaggtattcttccatcgccaatcggggaactggatcatggttctcgcccatggcgggcaggacaagctgtctttctggacgtctgcagacaccataaactggacatggcagagtgacctgaagtccacctcgatcaatggcctatcgtccgatattacagggtgggaagtccccgacatgtttgaactcccggttgaaggcactgaggagaccacgtgggtggtgatgatgacgccggctgaaggatcccctgccggtggtaacggggtcttagctatcaccggttcttttgacgggaaaagttttacggcagatcccgtcgatgcttcgaccatgtggctggacaatgggcgtgatttcgatggcgctctgagctgggtgaacgtgcctgcgtccgatggacggcggattatcgccgccgtcatgaatagctacggttccaacccgcctacaaccacctggaaagggatgctctcctttccccggacgctgtcgctcaagaaagttggcacgcagcagcactttgttcaacagccgatcacagagttggatacaatcagtaccagtctgcaaatactagcaaaccagaccattacccctggccaaacattgctgtcatcgattcggggaactgctctcgatgttcgagttgctttttaccctgatgctggctcggttctgtccctcgccgtccgaaagggtgcttcggagcaaacagtcattaagtacacccagtcagatgccacattgtcggttgatcgaacagagagtggagatatctcgtatgacccggccgcaggtggcgtccataccgccaagttggaagaggacggcaccggactggtttccatccgggtgttggtggatacgtgttctgtagaggtttttggcggacaaggagaagccgtcatttccgacctcatcttcccgagtgacagttctgacggcctggccttggaggtaactggcggaaatgcagtgctgcagtcggtggacgtgcggagtgtttcacttgaataatcgcagacactgctggcggtagacaatcaatccatttcgctatagttaaaggatggggatgagggcaattggttatatgatcatgtatgtagtgggtgtgcataatagtagtgaaatggaagccaagtcatgtgattgtaatcgaccgacggaattgaggatatccggaaatacagacaccgtgaaagccatggtctttccttcgtgtagaagaccagacagacagtccctgatttacccttgcacaaagcactagaaaattagcattccatccttctctgcttgctctgctgatatcactgtcattcaatgcatagccatgagctcatcttagatccattaagtcctcagcgtgatttaaaacgccattgctatgatgcttgaagagtgccggatatatcggcatctaacttaggatttgtcttacgtacaatatttatgacctgtggtgaaacctgaggcaacaagggggcgcgatttaccagactggcgttcacataccaatacagtgcttaattgtaggtctcatgggtggaatgagatgaccttccctttcatctattcttaagaggaacagggatggtacccacaccataccccgaagagctcgtgatgtaatagaccctttcgtagtatgcgggtttttattgagatgccgatatgcaaacttgtagtaagactaataataacaggtgcaattaattgaatttggggcctgttaagcttttcgtccgaccaccagtgacgtccgtccgataagccgggaacgatcgataaggaggctatcccgtcgatcctgactaaccttttccagttgttccttaactttgcaccatctccgcggaggaatccctgacccaatcttatggtgaggtgctatcgtccttatcaatccctgtcacgattgccgataacccgtccacatccgatcatggagattaccattgggtgtgtcgctgcatctgctgcgaaaccgcttcgatgaccatcaaccatgaggtgattcgatagtcaaacatctcgccacgacctcatggtgtccacggagatgagaggcccgatcctggatcttggcaccagtagggtcttgccatatcggatgatagatcatgggggacatactccttgataaataaaaacgtccgccaacaccgtgcgttgggcgttgaatctcttccacagtgctatccatcccggacacaatgcctctcctagaagcgcccaggaatgggggcgcagtcaacaatggcgtccttagcggggtgtcgcattctcagagctttggcattgacacagagagtcacttggatgaccctaacagacgccaacagatagtggtggtgggactgggaatggtggctatttccttcctgtaggtgcaccgaagggggacgaggcgatggtcaataatacagttcgggtactgacgataccccccttctccgtatagtgagaaactggtcaagcaagattcagagaggagaaagtacgatatcgttgtgatcggcgaagaacctcacgttgcttacaaccgagtcggcctttcctcgtttttcgaacatcgcaatatcgaggacctctacctcaacccgaaagaatgggtgagtatatcacagctttccctgcgaacttagtgcagcattcgtgctgacgtcaatggattaatccattagtacggatcgttcaaagatcgatcgttcgactatcatctgaacaccagagtaaccgatatatttcctgaccgcaagacggtaaaaacctcaacgggtgacataatcgcctacgatcttcttgttctcgctaccggctctgatgcggtgcttcccactcacactcccggctatgacgccaacggggtttttgtctacagaacgatatcggacctcgagcgccttatcgaatttgcctctaatcacaagggcgagacggcaactactgtcggaggtggcctgctgggactcgaagctgccaaagcaatgacggatctagaagatttcggcaaggtcaagctcattgaccgcaacaagtgggtgctagcaagacaactagacggcgatgccggtaccctagtgacgcggaaaatcagagaactgggcttggatgtgatgcaccagaagcgagtagcgaaaattaagacggatgacaacaacaatgtcacgggtatcgtctttgaggatggggaagaaatagattgctgctgcgtctgttttgctgtacgccgtctaatctcatctcacgtactttcagtttgctaacattacgtatagatcggagtacgacctagagacgagttggggacgactgctggtattcagtgcgcttcacggggtgggtttgttatcaatgaaaggtaacaaccatcgttatgttaagtcttctatcatctaatctgatcttatagtctgcaaacttcgattcccgagatttacgctatcggagagtgtgcaagctgggaaaaccagacgtttggtattattgcacctggcattgaaatggcagatgtgctagcgttcaatttgaccaatcccgataaggaaccaaggagcttcagaagaccggatttaagcactaagctgaagctcttgggagtggatgtcgccagttttggtgacttttttgcggatcgcgatggccccaagttcttgccaggccgtcgaccatcagtcgcaaccattccgcgggtgaaagacacgacggaaaaggagtcaccagtgaaggctctcacgtacaaggatccttttggtggtgtctataagaagtatctattcactatggacggcaaatacctacttggaggaatgatgatcggtgatacaaaggactatatcaaactgaaccaaatggtgaagagccaaaaagagctcgaagttcctccgagccagttcattctgggagctcaaaatggtggggaagaaaacggtgacgacctgtgagctttctctcagatgtccgtgtataacgggtctgctaactatcattcgtacagagccgacgatacccaagtttgctcgtgtcacaacgttaccaaaggtgacatcgtcgaaagtgtcaagagtggcacatgcaagtcaattggagaggtaaagtcatgcacaaaggcaggcactggctgtggaggctgtatgccgttagtgcaatcaattttcaataagaccatgcttgatatgggccaggaggtttcgaataactgtaggtatccttg

SEQ ID NO: 139 - DNA, 1338 bp, Aspergillus niger
  source 1..1338: mol_type = unassigned DNA
gaacccccacaatcacgcaaaaatggtcggactgctttcaatcaccgcggcgcttgccgcgactgtgttgccaaacattgtctctgccgttggtctggatcaggctgcagttgccaaaggacttcaatactttggcacagctacggataatcccgagctcacggatattccatacgttactcagctgaacaacaccgcggactttggtcaaattacccctggaaactcgatgaagtgggatgccacagaaccatctcagggcaccttcacgttcacgaaaggcgatgtcattgcagatctggctgagggtaatggccaatatctccgatgtcatactctggtttggtataatcagctacctagctgggtgactagcggaacttggactaatgctactctcaccgccgcattgaagaaccacatcacgaatgtggtgtcgcactacaaagggaaatgtcttcattgggacgtggtcaatgaggcgttgaatgacgacggaacctaccgcaccaacatcttctacaccaccatcggcgaagcctacatccccattgcctttgccgcagcggctgcagccgacccggacgcgaagctgttctacaatgactacaacctcgaatacggcggcgccaaagccgccagcgcccgcgccattgtccagctggtcaagaatgcaggtgccaagatcgacggggtagggttgcaggcccatttcagcgtcggcaccgtgccgagtacgagctcgctcgtctcggtgctgcaatctttcactgcgctcggggtcgaggtcgcctacacggaggccgacgtgcgcattctcctgcccaccaccgccactaccctggcccaacagtcgagcgatttccaggccctggtgcaatcctgtgtgcagacaacgggctgcgtcggcttcactatctgggattggacagataagtacagctgggttcccagcacgttctcgggctatggggcggcgctaccctgggatgagaacctggttaagaagcccgcgtacaatggcttgttggccggcatgggggttacagttaccactacgactaccaccaccactgctactgccactggtaagactacgactaccacaacgggtgccacgagcacggggactacggctgcgcattgggggcagtgtggagggctcaactggagtggaccgacggcgtgtgccactgggtacacctgcacttatgtcaatgactattactcgcagtgtctgtgaagtatagcccaacctaaacctgccggcgtgcttgccattcagtcagtgagatttatatatcacaatactcaaaattcattgctcgacctctgaaa

SEQ ID NO: 140 - DNA, 8623 bp, Dictyoglomus thermophilum
  source 1..8623: mol_type = unassigned DNA
ggtaccagatctaatatctttgaattgtaacgcccctcaaaagtaagaactacaaaaaaagaatacgttatatagaaatatgtttgaaccttcttcagattacaaatatattcggacggactctacctcaaatgcttatctaactatagaatgacatacaagcacaaccttgaaaatttgaaaatataactaccaatgaacttgttcatgtgaattatcgctgtatttaattttctcaattcaatatataatatgccaatacattgttacaagtagaaattaagacacccttgatagccttactatacctaacatgatgtagtattaaatgaatatgtaaatatatttatgataagaagcgacttatttataatcattacatatttttctattggaatgattaagattccaatagaatagtgtataaattatttatcttgaaaggagggatgcctaaaaacgaagaacattaaaaacatatatttgcaccgtctaatggatagaaaggaggtgatccagccgcaccttatgaaaaatcattttatcagtttgaaaattatgtattatggagctctataaaaatgaggagggaaccgaatgcagacatcaatcacacttacatctaacgcatcaggcacattcgacggctattactacgagctttggaaggacacaggcaacacgactatgactgtatacactcaaggtcgcttctcatgccagtggtctaacatcaacaacgcgcttttccgcacgggcaagaagtacaaccagaactggcaatctcttggcactatccgcatcacttattctgcgacatacaacccgaacggcaactcttacctttgtatctacggctggtctacgaacccgcttgttgagttctacatcgtagagtcttggggcaactggcgtcctcctggcgcaacatctcttggccaggttacaatcgatggtggcacatatgacatctaccgcactactcgcgttaaccagcctagcatcgttggcacagctactttcgaccaatactggagcgttcgcactagcaagcgcacatctggcacagttacggttacggaccactttcgcgcatgggcaaatcgtggccttaaccttggcacaatcgaccaaatcacactttgtgttgagggctaccagtcttctggcagcgcaaacatcactcaaaacactttctctcagggcagctaacgcgtagggcccgcggctagcggccgcgtcgactagaagagcagagaggacggatttcctgaaggaaatccgtttttttattttgcccgtcttataaatttcgttgtccaactcgcttaattgcgagtttttatttcgtttatttcaattaaggtaactaaagatcctctagagtcgattatgtcttttgcgcagtcggcttaaaccagttttcgctggtgcgaaaaaagagtgtcttgtgacacctaaattcaaaatctatcggtcagatttataccgatttgattttatatattcttgaataacatacgccgagttatcacataaaagcgggaaccaatcatcaaatttaaacttcattgcataatccattaaactcttaaattctacgattccttgttcatcaataaactcaatcatttctttaattaatttatatctatctgttgttgttttctttaataattcatcaacatctacaccgccataaactatcatatcttctttttgatatttaaatttattaggatcgtccatgtgaagcatatatctcacaagacctttcacacttcctgcaatctgcggaatagtcgcattcaattcttctgtaattatttttatctgttcataagatttattaccctcatacatcactagaatatgataatgctcttttttcatcctaccttctgtatcagtatccctatcatgtaatggagacactacaaattgaatgtgtaactcttttaaatactctaaccactcggcttttgctgattctggatataaaacaaatgtccaattacgtcctcttgaatttttcttgttttcagtttcttttattacattttcgctcatgatataataacggtgctaatacacttaacaaaatttagtcatagataggcagcatgccagtgctgtctatctttttttgtttaaaatgcaccgtattcctcctttgcatatttttttattagaataccggttgcatctgatttgctaatattatatttttctttgattctatttaatatctcattttcttctgttgtaagtcttaaagtaacagcaacttttttctcttcttttctatctacaaccatcactgtacctcccaacatctgtttttttcactttaacataaaaaacaaccttttaacattaaaaacccaatatttatttatttgtttggacaatggacaatggacacctaggggggaggtcgtagtacccccctatgttttctcccctaaataaccccaaaaatctaagaaaaaaagacctcaaaaaggtctttaattaacatctcaaatttcgcatttattccaatttcctttttgcgtgtgatgcgctgcgtccattaaaaatcctagagctttgaaaccgaaagttaatagctgtcgctactactttcgcttacgctctaagtatattttaaggactgtcacacgcaaaaagttttctcggcataaaagtacctctacatctctaaatcgtctgtacgctgtttctcacgctttctatcgaccttctggacattatcctgtacaacatccataaactgtcccacacgctcaaatttggaatcattaaagaatttctctttaagcctattaaaccctttctcaaacccagggaaattcgccctcgcagcacgatataaagtcactgtactagcttgaaatttctctgatacattcaactgctcattcaaactatcattctctcgctttaatttattaacctctttacttttttcgtgatacccctctttccatgtattcactacttctttcaaactctctctacgtttttttaattcttgattttctgtgtaatagtctgtgctcttaatattttcgtaatcatcaacaatccgttctgcagaagagattgtttcttgcaggcgttcaaattcatcagcagttaatatctttctaccagtctcttcacgtccagagaacaaacctgtacgctcattttcataatcaaagggtttcgtagacctcatatgctctattccactctgtaactgcttatttgccttctgtaactcatccttaacttcttgcagttcctgtttatgaaatacagtatctttcttgtactgatccatcgctttatgttctcgttctgtaacctctttggacgtgcctctttcaagttcataacctttctcattcacatactcattaaatctatcttgtaattgagtaaagtctttcttgttgcctaactgttcttttgcagacaatctcccgtcctctgttaaagggacaaaaccaaagtgcatatgtgggactctttcatccagatggacagtcgcatacagcatattttccttaccgtattcattttctagaaactccaagctatctttaaaaaatcgttctatttcttctccgcttaaatcatcaaagaaatctttatcacttgtaaccagtccgtccacatgtcgaattgcatctgaccgaattttacgtttccctgaataattctcatcaatcgtttcatcaattttatctttatactttatattttgtgcgttaatcaaatcataatttttatatgtttcctcatgatttatgtctttattattatagtttttattctctctttgattatgtctttgtatcccgtttgtattacttgatcctttaactctggcaaccctcaaaattgaatgagacatgctacacctccggataataaatatatataaacgtatatagatttcataaagtctaacacactagacttatttacttcgtaattaagtcgttaaaccgtgtgctctacgaccaaaactataaaacctttaagaactttctttttttacaagaaaaaagaaattagataaatctctcatatcttttattcaataatcgcatccgattgcagtataaatttaacgatcactcatcatgttcatatttatcagagctcgtgctataattatactaattttataaggaggaaaaaatatgggcatttttagtatttttgtaatcagcacagttcattatcaaccaaacaaaaaataagtggttataatgaatcgttaataagcaaaattcatataaccaaattaaagagggttataatgaacgagaaaaatataaaacacagtcaaaactttattacttcaaaacataatatagataaaataatgacaaatataagattaaatgaacatgataatatctttgaaatcggctcaggaaaaggccattttacccttgaattagtaaagaggtgtaatttcgtaactgccattgaaatagaccataaattatgcaaaactacagaaaataaacttgttgatcacgataatttccaagttttaaacaaggatatattgcagtttaaatttcctaaaaaccaatcctataaaatatatggtaatataccttataacataagtacggatataatacgcaaaattgtttttgatagtatagctaatgagatttatttaatcgtggaatacgggtttgctaaaagattattaaatacaaaacgctcattggcattacttttaatggcagaagttgatatttctatattaagtatggttccaagagaatattttcatcctaaacctaaagtgaatagctcacttatcagattaagtagaaaaaaatcaagaatatcacacaaagataaacaaaagtataattatttcgttatgaaatgggttaacaaagaatacaagaaaatatttacaaaaaatcaatttaacaattccttaaaacatgcaggaattgacgatttaaacaatattagctttgaacaattcttatctcttttcaatagctataaattatttaataagtaagttaagggatgcataaactgcatcccttaacttgtttttcgtgtgcctattttttgtgaatcgacctgcaggcatgcaagcttaagcgagttggaatttaaatatgatatctacattatcagcagtaacatcaacctttgatacaaggttgttgacgattttctttttattatcatatgatagttcattaatcggaattgagcccaactgagttttaactaactcaaaaacatcagtagagtcattaaatttattttcgctaatcttagctttaagcagctttttctcagcctgaagggaatcagtacgatctttcaactcatccatagtgataaaatcatttaggtacaaatcagagttcttttgtatttttttatcgatctgtgaaatttgctttttaaatgacgaagtatcaagaataggttggttgttgccattgataattttcaataaggagtcattattttcttgaaatccaatcaggttgtcaataacagtattttctaaattacttaaatcataagttcctgaatcacactttttattgtcattatatactgtaattccttttgtttttcgaggaaatctatttgcacagtgatatttcatagtgcggcttccatcttttcttttgtggccaagaacaatttttaaaggtgctccacagtaaccgcaccttgccatccctgacagcatatatttagcttggaaaggtctagggttgttatttctttcataagtctgctgttgtctttcttctagctctttttgaacttttaaataagtctcataagggataattggtttgtgcataccttcaaataggctgtccttaaatttgatataaccacagtaaactggattatcaagtgtttgtcttagggtacgataagaccacggtatatctttaccgatgtgtccagattcattgagtttatctcttaattttgtaagtgatattcctgataaataatcagtgaatatttgttcaactattgtagcttgtaaaggaacaatttctaatatacctgtctttctgttgtggtaatacccaaaagctgtcttagtccacatcatagacttaccagatttcgctcgccctagtttacccatagtcatgcgttcttttatattctctctttcaaactcattaattgcagaaagaatagtgagaaacaagctacccatagcagaagaagtatcaatactttcattaagcgagataaagtctattttattttttgtgaacacatccttaacaagataaagagtatctcttacactacgtgaaaggcggtctagcttatatacaagaactgtatcaaaagctttattctcgatatcgttgattaatctttgcattgctgggcgttcaagtttggcccctgaaaaaccagcatcagtataagtatcagatacttgccaccccattgcttcagcatattttgttaaacggtcaatttgctcatcaattgagaacccttcctctgcttggttagtagtggatactcgtgtatagattgctactttcttagtcatgagatttcccccttaaaaataaattcattcaaatacagatgcattttatttcatatagtaagtacatcacctattagtttgttgtttaaacaaactaacttattttcatcttatatagcctcgtcagtattttcaatattttttttagttttttatgaacacattagatataataaagggaagattcgctatgtactatgttgatacttaatttaaagattaaacaaatggagtggatgaagtggatatcgctgatcaaacctttgtcaaaaaagtaaatcaaaagttattattaaaagaaatccttaaaaattcacctatttcaagagcaaaattatctgaaatgactggattaaataaatcaactgtctcatcacaggtaaacacgttaatgaaagaaagtatggtatttgaaataggtcaaggacaatcaagtggcggaagaagacctgtcatgcttgtttttaataaaaaggcaggatactccgttggaatagatgttggtgtggattatattaatggcattttaacagaccttgaaggaacaatcgttcttgatcaataccgccatttggaatccaattctccagaaataacgaaagacattttgattgatatgattcatcactttattacgcaaatgccccaatctccgtacgggcttattggtataggtatttgcgtgcctggactcattgataaagatcaaaaaattgttttcactccgaactccaactggagagatattgacttaaaatcttcgatacaagagaagtacaatgtgcctgtttttattgaaaatgaggcaaatgctggcgcatatggagaaaaagtatttggagctgcaaaaaatcacgataacattatttacgtaagtatcagcacaggaatagggatcggtgttattatcaacaatcatttatatagaggagtaagcggcttctctggagaaatgggacatatgacaatagactttaatggtcctaaatgcagttgcggaaaccgaggatgctgggaattgtatgcttcagagaaggctttattaaaatctcttcagaccaaagagaaaaaactgtcctatcaagatatcataaacctcgcccatctgaatgatatcggaaccttaaatgcattacaaaattttggattctatttaggaataggccttaccaatattctaaatactttcaacccacaagccgtaattttaagaaatagcataattgaatcgcatcctatggttttaaattcaatgagaagtgaagtatcatcaagggtttattcccaattaggcaatagctatgaattattgccatcttccttaggacagaatgcaccggcattaggaatgtcctccattgtgattgatcattttctggacatgattacaatgtaattttttatggaatggacagctcatctttaaagatgagtttttttattctaggagtatttctgaattcgagctcgttattaatctgttcagcaatcgggcgcgattgctgaataaaagatacgagagacctctcttgtatcttttttattttgagtggttttgtccgttacactagaaaaccgaaagacaataaaaattttattcttgctgagtctggctttcggtaagctagacaaaacggacaaaataaaaattggcaagggtttaaaggtggagattttttgagtgatcttctcaaaaaatactacctgtcccttgctgatttttaaacgagcacgagagcaaaacccccctttgctgaggtggcagagggcaggtttttttgtttcttttttctcgtaaaaaaaagaaaggtcttaaaggttttatggttttggtcggcactgccgacagcctcgcagagcacacactttatgaatataaagtatagtgtgttatactttacttggaagtggttgccggaaagagcgaaaatgcctcacatttgtgccacctaaaaaggagcgatttacatatgagttatgcagtttgtagaatgcaaaaagtgaaatcagctggactaaaaggcagagctc

SEQ ID NO: 141 - DNA, 960 bp, Thermomyces lanuginosus
  source 1..960: mol_type = unassigned DNA
tcggcccgacgtcttgcaatccttgcagtgatggtcggctttacccccgttgcccttgcggccttagccgcgactggggccctggccttcccggcagggaatgccacggagctcgaaaagcgacagacaacccccaactcggagggctggcacgatggttattactattcctggtggagtgacggtggagcgcaggccacgtacaccaacctggaaggcggcacctacgagatcagctggggagatggcggtaacctcgtcggtggaaagggctggaaccccggcctgaacgcaagagccatccactttgagggtgtttaccagccaaacggcaacagctaccttgcggtctacggttggacccgcaacccgctggtcgagtattacatcgtcgagaactttggcacctatgatccttcctccggtgctaccgatctaggaactgtcgagtgcgacggtagcatctatcgactcggcaagaccactcgcgtcaacgcacctagcatcgacggcacccaaaccttcgaccaatactggtcggtccgccaggacaagcgcaccagcggtaccgtccagacgggctgccacttcgacgcctgggctcgcgctggtttgaatgtcaacggtgaccactactaccagatcgttgcaacggagggctacttcagcagcggctatgctcgcatcaccgttgctgacgtgggctaagacgtaacctggtggtgatctcgcgaggcaacagccaagaatgtcgtcagatgtgccggttgaaggtattcaatcagcatatctgtctgcccttgcgagtgatactttggaggactgtggagaactttgtgcgagcctggccaggatcagtagttgctttgcggtgttttgctccctattctcgtgaaaaaattgttattgcttcgttgtctagtgtacatagccgagcaattgaggcctcacgcttgggaa

SEQ ID NO: 142 - DNA, 618 bp, Bacillus agaradhaerens
  source 1..618: mol_type = unassigned DNA
caaattgttactgataattctattggtaatcatgatggttatgattatgaattttggaaagattctggtggttctggtactatgattttaaatcatggtggtactttttctgctcaatggaataatgttaataatattttatttcgtaaaggtaaaaaatttaatgaaactcaaactcatcaacaagttggtaatatgtctattaattatggtgctaattttcaacctaatggtaatgcttatttatgtgtttatggttggactgttgatcctttagttgaatattatattgttgattcttggggtaattggcgtcctcctggtgctactcctaaaggtactattactgttgatggtggtacttatgatatttatgaaactttacgtgttaatcaaccttctattaaaggtattgctacttttaaacaatattggtctgttcgtcgttctaaacgtacttctggtactatttctgtttctaatcattttcgtgcttgggaaaatttaggtatgaatatgggtaaaatgtatgaagttgctttaactgttgaaggttatcaatcttctggttctgctaatgtttattctaatactttacgtattaatggtaatccttta

SEQ ID NO: 143 - DNA, 1415 bp, Aspergillus fumigatus
  source 1..1415: mol_type = unassigned DNA
atggtccatctatcttcattggcagcagccctggctgctctgcctctgtatgtttacccactcacgagaggaggaacagctttgacattgctatagtgtatatggagctggcctgaacacagcagccaaagccaaaggactaaagtactttggttccgccacggacaatccagagctcacggactctgcgtatgtcgcgcaactgagcaacaccgatgattttggtcaaatcacacccggaaactccatgaaggtttgcttacgtctgcctccctggagcattgcctcaaaagctaattggttgttttgtttggatagtgggatgccaccgagccttctcagaattctttttcgttcgcaaatggagacgccgtggtcaatctggcgaacaagaatggccagctgatgcgatgccatactctggtctggcacagtcagctaccgaactggggtatgtaaacgtcttgtctattctcaaatactctctaacagttgacagtctctagcgggtcatggaccaatgcgacccttttggcggccatgaagaatcatatcaccaatgtggttactcactacaaggggaagtgctacgcctgggatgttgtcaatgaaggtttgttgctccatctatcctcaatagttcttttgaaactgacaagcctgtcaatctagccctgaacgaggacggtactttccgtaactctgtcttctaccagatcatcggcccagcatacattcctattgcgttcgccacggctgctgccgcagatcccgacgtgaaactctactacaacgactacaacattgaatactcaggcgccaaagcgactgctgcgcagaatatcgtcaagatgatcaaggcctacggcgcgaagatcgacggcgtcggcctccaggcacactttatcgtcggcagcactccgagtcaatcggatctgacgaccgtcttgaagggctacactgctctcggcgttgaggtggcctataccgaacttgacatccgcatgcagctgccctcgaccgccgcaaagctggcccagcagtccactgacttccaaggcgtggccgcagcatgcgttagcaccactggctgcgtgggtgtcactatctgggactggaccgacaagtactcctgggtccccagcgtgttccaaggctacggcgccccattgccttgggatgagaactatgtgaagaagccagcgtacgatggcctgatggcgggtcttggagcaagcggctccggcaccacaacgaccactactactacttctactacgacaggaggtacggaccctactggagtcgctcagaaatggggacagtgtggcggtattggctggaccgggccaacaacttgtgtcagtggtaccacttgccaaaagctgaatgactggtactcacagtgcctgtaa

SEQ ID NO: 144 - DNA, 1720 bp, Evansstolkia leycettana
  source 1..1720: mol_type = unassigned DNA
cctggggttcctcgaagctttgtttccaacaactcatcttcctctgagattattgaacttgattcagttctcacgtccttgaacagacacttcctccaagatggtccatctttcttccctggccctggctttggccgccggctcgcagctgtatgtgatccatgccatgactcgagaagtgctcccaaaactgactccaagtctcaatcttagtgcccaagctgcaggtcttaacactgctgccaaagcgattggaaagctctatttcggtaccgcaaccgacaacccggagctgtccgacagcacatacatgcaggagacggataacaccgatgatttcggccaactcaccccagctaactccatgaaggttcgctgacatcttagttcccccccccttttgggaatctgcgcggagatatgctgagccttcaaaactagtgggatgccaccgagccctctcagaacaccttcaccttcaccaacggtgatcagatcgcaaaccttgctaagagcaacggtcagatgctgagatgccacaacctggtgtggtacaaccagttgcccagctggggtaagcaaccggttctgttaatatcatcagcgtgaccgcatcgatcgtattgcgcggagattggaaagatttgcaagctaatgtcactacagtcaccagcggatcttggaccaatgccacgcttcttgcggccatgaagaaccacatcaccaacgttgtgacccactacaagggacagtgctacgcttgggatgttgtcaacgaaggtacgtttcgattcggcttccctcggaccgtatctgcaggcaaaaaggtcaatcaattgacaatcgtgatccccagctctcaacgatgatggcacctaccgatccaatgtcttctatcagtacatcggcgaggcatacattcccattgcctttgcgaccgctgccgccgccgatccaaacgcgaagctctactacaacgactacaacattgagtaccccggcgccaaggccaccgccgcccagaacatcgtcaagatggtcaaggcttacggcgcgaaaatcgacggtgtcggtctgcaatctcacttcatcgttggcagcacccctagccagagctcccagcagagcaacatggctgctttcaccgcgctcggcgtcgaggtcgccatcaccgaactggatatccgcatgacgttgccttccaccagtgctctcttggcccagcaatccaccgattaccagagcactgtgtcggcttgcgtgaacactccgaagtgcattggtatcaccctctgggactggaccgacaagtactcctgggttcccaacaccttctccggccaaggtgacgcctgcccctgggattctaactaccagaagaagcctgcctactacggtatcttgactgcgctcggaggcagcgcttccacctccaccaccaccactctggtgacctccaccaggacttcgactacgaccagcacttcggccacctccacgtctactggcgttgctcagcactggggccagtgcggtggtatcggctggacagggccgactacctgcgctagcccctacacctgccaggaactgaatccctactactaccagtgcctgtaaatgacgtcttgacgctgaattggggagctttggccccatagaatccgtatcgggaaaaagtatgagcgcgtcaagcggtcgtgtatcaaagcatcatgtg

SEQ ID NO: 145 - DNA, 1728 bp, unidentified
  source 1..1728: mol_type = unassigned DNA
attcgtcaacgtgctggtaatcatactgtttgtaattctcaattatgtacttggtggcatgataatggtgaaattaatactgcttctatggttcaattaggtaatgttcgtcaatctcataaatatttagttcaagtttctattgctggtgttaatgatttttatgattcttttgcttatgaatctattcctcgtaatggtcgtggtcgtatttattctccttgggatcctcctaattctgatactttaggttctgatgttgatgatggtattactattgaaacttctgctggtattaatatggcttggtctcaatttgaatattctactggtgttgatgttaaaattttaactcgtgatggttctcgtttacctgatccttctggtgttaaaattcgtcctactgctatttcttatgatattcgttcttcttctgatggtggtattgttattcgtgttcctcatgatcctaatggtcgtcgtttttctgttgaatttgataatgatttatatacttatcgttctgatggttctcgttatgtttcttctggtggttctattgttggtgttgaacctcgtaatgctttagttatttttgcttctccttttttacctgataatatggttcctcgtattgatggtcctgatactaaagttatgactcctggtcctattaatcaaggtgattggggttcttctggtattttatattttcctcctggtgtttattggatgaattctaatcaacaaggtcaaactcctaaaattggtgaaaatcatattcgtttacatcctaatacttattgggcttatttagctcctggtgcttatgttaaaggtgctattgaatattctactaaatctgatttttatgctactggtcatggtgttttatctggtgaacattatgtttatcaagctaatcctgctacttattatcaagctttaaaatctgatgctacttctttacgtatgtggtggcataataatttaggtggtggtcaaacttggtattgtcaaggtcctactattaatgctcctccttttaatactatggattttcatggttcttctgatattactactcgtatttctgattataaacaagttggtgcttttttttttcaaactgatggtcctcaaatgtatcctaattctcaagttcatgatgttttttatcatgttaatgatgatgctattaaaacttattattctggtgttactgttactcgtgctactatttggaaagctcataatgatcctattattcaaatgggttgggatactcgtgatgttactggtgttactttacaagatttatatattattcatactcgttatattaaatctgaaacttatgttccttctgctattattggtgcttctcctttttatatgcctggtcgttctgttgatcctgctaaatctatttctatgactatttctaatttagtttgtgaaggtttatgtcctgctttaatgcgtattactcctttacaaaattatcgtgattttcgtattcaaaatgttgcttttcctgatggtttacaagctaattctattggtactggtaaatctattgttcctgcttcttctggtttaaaatttggtgttgctatttctaattggactgttggtggtgaacaagttactatgtctaattttcaatctgattctttaggtcaattagatattgatgtttcttattggggtcaatgggttattcgt

SEQ ID NO: 146 - DNA, 11704 bp, Aspergillus tubingensis
  source 1..11704: mol_type = unassigned DNA
atgaagtactctactatcttcagcgctgctgccgctgttttcgctggttccgccgctgccgtcggcgtgtccggctctgctgaaggtttcgccaagggcgtcaccggtggtggcagtgccacccccgtctaccccgacactatcgatgagctggtctcctaccttggtgatgatgaggcccgcgtcattgtcctgaccaagaccttcgacttcaccgacagcgaaggtaccaccactggcactggttgcgctccctggggtaccgcttccgcttgccaggttgctattgaccaggacgactggtgcgagaactacgagcccgatgctccctctgtcagcgttgaatactacaatgctggtaccctcggtatcactgtcacctccaacaagtccctcatcggtgagggctcctctggtgccattaagggcaagggtctccgcattgtcagcggtgccgagaacatcatcatccagaacatcgccgttaccgacatcaacgccaagtacgtctggggtggtgatgctattactcttgatgactgcgacctggtctggatcgaccacgttactaccgcccgcattggtcgccagcactacgtcctcggaaccagcgccgacaaccgcgtctctctcaccaacaactacattgacggtgtctccgactactccgccacctgcgatggctaccactactgggccatctacctcgacggtgatgccgacttggtcaccatgaagggcaactacatctaccacacctccggccgttcccccaaggtccaggacaacactctcctccacgctgtcaacaactactggtacgacatctccggccacgccttcgagatcggtgagggtggctacgtcttggctgagggcaacgttttccagaacgttgacactgttcttgagacctatgagggcgaggccttcaccgtcccctccaccaccgccggtgaagtctgctccacctaccttggccgtgactgtgtcatcaacggcttcggctcctccggcactttctccgaggacagcacctctttcctctccgacttcgagggcaagaacattgcctctgcttcggcttacacctctgttgcctctagcgttgttgccaacgccggtcagggcaacctgtaagcgatcgcataataaataacggattgtgtccgtaatcacacgtggtgcgtacgataacgcatagtgtttttccctccacttaaatcgaagggttgtgtcttggatcgcgcgggtcaaatgtatatggttcatatacatccgcaggcacgtaataaagcgaggggttcgaatccccccgttacccccggtaggggcccagatccgggtgactgacacctggcggtagacaatcaatccatttcgctatagttaaaggatggggatgagggcaattggttatatgatcatgtatgtagtgggtgtgcataatagtagtgaaatggaagccaagtcatgtgattgtaatcgaccgacggaattgaggatatccggaaatacagacaccgtgaaagccatggtctttccttcgtgtagaagaccagacagacagtccctgatttacccttgcacaaagcactagaaaattagcattccatccttctctgcttgctctgctgatatcactgtcattcaatgcatagccatgagctcatcttagatccaagcacgtaattccatagccgaggtccacagtggagcagcaacattccccatcattgctttccccaggggcctcccaacgactaaatcaagagtatatctctaccgtccaatagatcgtcttcgcttcaaaatctttgacaattccaagagggtccccatccatcaaacccagttcaataatagccgagatgcatggtggagtcaattaggcagtattgctggaatgtcggggccagttggcccggtggtcattggccgcctgtgatgccatctgccactaaatccgatcattgatccaccgcccacgaggcgcgtctttgctttttgcgcggcgtccaggttcaactctctccactagtggaccagacaggcgccactcggccgggccacagctgcttgggtgttgaccgggagcggaccaattaaggactcgaacgaccgcggggttcaaatgcaaacaagtacaacacgcagcaaacgaagcagcccaccactgcgttgatgcccagtttgactgtccgaaatccaccggaaaggtggaaacatactatgtaacaatcagagggaagaaaaaatttttatcgacgaggcaggatagtgactgatggtggggtcatggtcgggtctccgagcgaaagagaaccaaggaaacaagatcaacgaggttggtgtacccaaaaggccgcagcaacaagagtcatcgcccaaaagtcaacagtctggaagagactccgccgtgcagattctgcgtcggtcccgcacatgcgtggtgggggcattacccctccatgtccaatgataagggcggcggtcgagggcttaagcccgcccactaattcgccttctcgcttgcccctccatataaggattccccctccttcccctcccacaacttttttccttctttctctcttcgtccgcatcagtacgtatatctttcccccatacctcctttcctactcttcttccattcattcaactcttctccttactgacatctgttttgctcagtacctctacgcgatcagccgtagtatctgagcaagcttctctacagaatctttctagtatcttacaaagaactacaaagttcgcaccaggtaccacagaatgcctcaatcctgggaagaactggccgctgataagcgcgcccgcctcgcaaaaaccatccctgatgaatggaaagtccagacgctgcctgcggaagacagcgttattgatttcccaaagaaatcgggtatcctttcagaggccgaactgaagatcacagaggcctccgctgcagatcttgtgtccaagctggcggccggagagttgacctcggtggaagttacgctagcattctgtaaacgggcagcaatcgcccagcagttagtagggtcccctctacctctcagggagatgtaacaacgccaccttatgggactatcaagctgacgctggcttctgtgcagacaaactgcgcccacgagttcttccctgacgccgctctcgcgcaggcaagggaactcgatgaatactacgcaaagcacaagagacccgttggtccactccatggcctccccatctctctcaaagaccagcttcgagtcaaggtacaccgttgcccctaagtcgttagatgtccctttttgtcagctaacatatgccaccagggctacgaaacatcaatgggctacatctcatggctaaacaagtacgacgaaggggactcggttctgacaaccatgctccgcaaagccggtgccgtcttctacgtcaagacctctgtcccgcagaccctgatggtctgcgagacagtcaacaacatcatcgggcgcaccgtcaacccacgcaacaagaactggtcgtgcggcggcagttctggtggtgagggtgcgatcgttgggattcgtggtggcgtcatcggtgtaggaacggatatcggtggctcgattcgagtgccggccgcgttcaacttcctgtacggtctaaggccgagtcatgggcggctgccgtatgcaaagatggcgaacagcatggagggtcaggagacggtgcacagcgttgtcgggccgattacgcactctgttgagggtgagtccttcgcctcttccttcttttcctgctctataccaggcctccactgtcctcctttcttgctttttatactatatacgagaccggcagtcactgatgaagtatgttagacctccgcctcttcaccaaatccgtcctcggtcaggagccatggaaatacgactccaaggtcatccccatgccctggcgccagtccgagtcggacattattgcctccaagatcaagaacggcgggctcaatatcggctactacaacttcgacggcaatgtccttccacaccctcctatcctgcgcggcgtggaaaccaccgtcgccgcactcgccaaagccggtcacaccgtgaccccgtggacgccatacaagcacgatttcggccacgatctcatctcccatatctacgcggctgacggcagcgccgacgtaatgcgcgatatcagtgcatccggcgagccggcgattccaaatatcaaagacctactgaacccgaacatcaaagctgttaacatgaacgagctctgggacacgcatctccagaagtggaattaccagatggagtaccttgagaaatggcgggaggctgaagaaaaggccgggaaggaactggacgccatcatcgcgccgattacgcctaccgctgcggtacggcatgaccagttccggtactatgggtatgcctctgtgatcaacctgctggatttcacgagcgtggttgttccggttacctttgcggataagaacatcgataagaagaatgagagtttcaaggcggttagtgagcttgatgccctcgtgcaggaagagtatgatccggaggcgtaccatggggcaccggttgcagtgcaggttatcggacggagactcagtgaagagaggacgttggcgattgcagaggaagtggggaagttgctgggaaatgtggtgactccatagctcgagatctagagggtgactgacacctggcggtagacaatcaatccatttcgctatagttaaaggatggggatgagggcaattggttatatgatcatgtatgtagtgggtgtgcataatagtagtgaaatggaagccaagtcatgtgattgtaatcgaccgacggaattgaggatatccggaaatacagacaccgtgaaagccatggtctttccttcgtgtagaagaccagacagacagtccctgatttaccctgcacaaagcactagaaaattagcattccatccttctctgcttgctctgctgatatcactgtcattcaatgcatagccatgagctcatcttagatccaagcacgtaattccatagccgaggtccacagtggagcagcaacattccccatcattgctttccccaggggcctcccaacgactaaatcaagagtatatctctaccgtccaatagatcgtcttcgcttcaaaatctttgacaattccaagagggtccccatccatcaaacccagttcaataatagccgagatgcatggtggagtcaattaggcagtattgctggaatgtcggggccagttggccgggtggtcattggccgcctgtgatgccatctgccactaaatccgatcattgatccaccgcccacgaggcgcgtctttgctttttgcgcggcgtccaggttcaactctctccttgaagttcctattccgagttcctattcttcaaatagtataggaacttcacctagcaaagtattttcggtacgattttgacatttgctccattgtcgaggatggatggaacgagcggcgtgcgccacgaaagtgaggctattgcctatcagctctttgctacattccggaaacaaacatccctttttgtgaattatctacgcaacttagatggcgtgaacgcatcttcaaagtctttcggcaggtccggcacgacttttgcatccagagaagcgcctacatgtgtattcgaccacctcctagcgcgcttggatatgaggaaatattactgagagtcgaaaacaagctccaccgcaccagctcttcttggagttttatattaaagaatattcccagctcgttgtattattctttttctaccgtgctaatgtatcaaggactttggtacctattaacgttattattcgtgtgctattcccaaacataaccctgtatatgtttcgaacgccgttatgacccatgtcttacatactcattaagtcattcccttggataatctcgactcagatgcggcggttgatgtaggaggagaggtaatcgaggacctcctgggagatgatgccgttccaggcggggtagcggatggagccctcggcggagcccttgagctgctcgatatgctgccactcctcgatggggttggtctcatccttgagggcgatcatctccttggagatgggatcgtaggcgtagtagcgggagactagtgcgaagtaatgatcggggatggcggtgatctgatgggtgtaggtggtgcgggcgacggcggaggcgcgcttatcggaccagttgccgacgacgttggtgagctcggtgaggcccttcatggagaggaaggaggtcatgagatggcggccgatatgggacttggggccgttcttgatggcgaagatggagtagggggcgttcttcttgagggccttgttgtaggagcggacgaggttatccttgaggagctggtactcctgcttgttggaggaggagttgccggtgcggttgacgcgcttgaggacgggctcggagttgcggaggaactcatcgaggtagacgaggggatcgatgcggccgcgggcggagaagaagtagatatggcgggagacggaggtcttggtctcggtgacgaggcactggatgatgacgccgaggtacttgttctggacgagcttgaaggacttgggatcgacgttcttgatatcggagaagcggccgcagttgatgaaggtggcgaggaagaggaactggtagagggtcttggtcttggtgaagcgggaggtgtactcgaaggagttgaggatcttctcggtgatctcccagatggactcgccctcggagaggagggccttgagcatcttcttggaatgggagttgcccttatcggcctcctcggaggactcgaactggagctggagggaggagacgatatcggtgatatcggactgatgcttctggccgtagtaggggatgatggtgaactcccaggcggggatgagcttcttgagggaggcctccaggatggtggccttctgggtcttgtacttgaactggagggacttgttgacgatatcgaaggagagggagttggagatgatggtgttgtaggacatgaaggtggcgcgcttgatggcggtgccgttatgggtgatcatccagcagaggtaggtgagctcggcggcgcagagggcgatcttctcgccggaggggcgctcgaagcgctcgacgaactggcggacgaggaccttggggggggtcttgcagaggatatcgaactggggcatggtggatcgatccttatgttttgacaaagcgacagaacagcgtcccaagcacagcttgactatccagagaacgctgtccctgacgacgattcttaaatatttgcgttcagcatgactccagagccttgagcaccttgcacggcagatcaacccacgaactacccttctaatcccgtatgatgcttgatggatgccaaatggagccggcaattaatccatctgccaggaacgggggtatacaacatctctcattggccgaaactccgatcagttcgggggccaggatttaaccctggtcccctttaattgttgcagaacaacaaatctccgacacgggactactgactgttaactgaatacgcctgatagtgggggtaagaaacaacgcccgaaccttgttatgactcgtggaggacgcgacggattgctcggggggtggtgagccggggttaacagggtaagctgcaggctgcccgttagggcgcctcgcttggcgaagcgagatgaaatcctgcagactacaccggttgacaccatacgaccctatgggtgtggagaggataaattaaacttatatctacgaaaagttaaagcccgtcccatgttgcacttcagctgcaaggtgatggagcgttcagcgggatatcctggctagtggcttgagcgcacccatagtctaatagggcttttaagccgagagggttctaaatagccgacaattctccctggaatgtgaatatcacatgcattcagctcaggacatcgtctgctgctccagtcatcattccgaccgaaggacgacccgcggacgggatcttggacgcattccacgctgctcgggaggccgccagagatgcccgccactcggctattaggctgatacatgcgtgctttcatttattaatcaaagagaattgtcatattgcaagttaattaatgcatgcaagcttggcctccgcggcctgcggccgcagcttggcgtaatcatggtcatagctgtttcctgtgtgaaattgttatccgctcacaattccacacaacatacgagccggaagcataaagtgtaaagcctggggtgcctaatgagtgagctaactcacattaattgcgttgcgctcactgcccgctttccagtcgggaaacctgtcgtgccagctgcattaatgaatcggccaacgcgcggggagaggcggtttgcgtattgggcgctcttccgcttcctcgctcactgactcgctgcgctcggtcgttcggctgcggcgagcggtatcagctcactcaaaggcggtaatacggttatccacagaatcaggggataacgcaggaaagaacatgtgagcaaaaggccagcaaaaggccaggaaccgtaaaaaggccgcgttgctggcgtttttccataggctccgcccccctgacgagcatcacaaaaatcgacgctcaagtcagaggtggcgaaacccgacaggactataaagataccaggcgtttccccctggaagctccctcgtgcgctctcctgttccgaccctgccgcttaccggatacctgtccgcctttctcccttcgggaagcgtggcgctttctcatagctcacgctgtaggtatctcagttcggtgtaggtcgttcgctccaagctgggctgtgtgcacgaaccccccgttcagcccgaccgctgcgccttatccggtaactatcgtcttgagtccaacccggtaagacacgacttatcgccactggcagcagccactggtaacaggattagcagagcgaggtatgtaggcggtgctacagagttcttgaagtggtggcctaactacggctacactagaaggacagtatttggtatctgcgctctgctgaagccagttaccttcggaaaaagagttggtagctcttgatccggcaaacaaaccaccgctggtagcggtggtttttttgtttgcaagcagcagattacgcgcagaaaaaaaggatctcaagaagatcctttgatcttttctacggggtctgacgctcagtggaacgaaaactcacgttaagggattttggtcatgagattatcaaaaaggatcttcacctagatccttttaaattaaaaatgaagttttaaatcaatctaaagtatatatgagtaaacttggtctgacagttaccaatgcttaatcagtgaggcacctatctcagcgatctgtctatttcgttcatccatagttgcctgactccccgtcgtgtagataactacgatacgggagggcttaccatctggccccagtgctgcaatgataccgcgagacccacgctcaccggctccagatttatcagcaataaaccagccagccggaagggccgagcgcagaagtggtcctgcaactttatccgcctccatccagtctattaattgttgccgggaagctagagtaagtagttcgccagttaatagtttgcgcaacgttgttgccattgctacaggcatcgtggtgtcacgctcgtcgtttggtatggcttcattcagctccggttcccaacgatcaaggcgagttacatgatcccccatgttgtgcaaaaaagcggttagctccttcggtcctccgatcgttgtcagaagtaagttggccgcagtgttatcactcatggttatggcagcactgcataattctcttactgtcatgccatccgtaagatgcttttctgtgactggtgagtactcaaccaagtcattctgagaatagtgtatgcggcgaccgagttgctcttgcccggcgtcaatacgggataataccgcgccacatagcagaactttaaaagtgctcatcattggaaaacgttcttcggggcgaaaactctcaaggatcttaccgctgttgagatccagttcgatgtaacccactcgtgcacccaactgatcttcagcatcttttactttcaccagcgtttctgggtgagcaaaaacaggaaggcaaaatgccgcaaaaaagggaataagggcgacacggaaatgttgaatactcatactcttcctttttcaatattattgaagcatttatcagggttattgtctcatgagcggatacatatttgaatgtatttagaaaaataaacaaataggggttccgcgcacatttccccgaaaagtgccacctgacgtctaagaaaccattattatcatgacattaacctataaaaataggcgtatcacgaggccctttcgtctcgcgcgtttcggtgatgacggtgaaaacctctgacacatgcagctcccggagacggtcacagcttgtctgtaagcggatgccgggagcagacaagcccgtcagggcgcgtcagcgggtgttggcgggtgtcggggctggcttaactatgcggcatcagagcagattgtactgagagtgcaccatatgcggtgtgaaataccgcacagatgcgtaaggagaaaataccgcatcaggcgccattcgccattcaggctgcgcaactgttgggaagggcgatcggtgcgggcctcttcgctattacgccagctggcgaaagggggatgtgctgcaaggcgattaagttgggtaacgccagggttttcccagtcacgacgttgtaaaacgacggccagtgaattggcctccatggccgcggccgcgaattcatcttgaagttcctattccgagttcctattctctagaaagtataggaacttcgctagcccgttaaattgccgtcgtcagccgttaaattaccgattaatcccgataaatttccgagatctccgttaaattgccgttcgcagccgttaaattaccggggacgaccgataaatttccgcgatgaattcatggtgttttgatcattttaaatttttatatggcgggtggtgggcaactcgcttgcgcgggcaactcgcttaccgattacgttagggctgatatttacgtaaaaatcgtcaagggatgcaagaccaaaccgttaaatttccggagtcaacagcatccaagcccaagtccttcacggagaaaccccagcgtccacatcacgagcgaaggaccacctctaggcatcggacgcaccatccaattagaagcagcaaagcgaaacagcccaagaaaaaggtcggcccgtcggccttttctgcaacgctgatcacgggcagcgatccaaccaacaccctccagagtgactaggggcggaaatttatcgggattaatttccactcaaccacaaatcacagtcgtccccggtaatttaacggctgcagacggcaatttaacggcttctgcgaatcgcttggattccccgcccctggccgtagagcttaaagtatgtcccttgtcgatgcgatgtatcacaacatataaatactggcaagggatgccatgcttggagcaacaatctcagaacaccaatatcaattcatctcgagtctgaactcagacaacacaaattcttcaaaattgaggatttagtcttgatcggatccttcacc

SEQ ID NO: 147 - DNA, 1035 bp, Sodiomyces alcalophilus
  source 1..1035: mol_type = unassigned DNA
gtgagacccggacgttcgaatttagaagaaacgacaaggcagtcatcgagacgacttctacccaaggcagaaagagaaagtccacgcactgaaaccaagcatgaagcttcttccctccttgattggcctggccagtctggcgtccctcgccgtcgcccggatccccggctttgacatttcgggctggcaaccgaccaccgactttgcaagggcgtatgctaatggagatcgtttcgtctacatcaaggtacgttcaaccttgccaccaagttgcgaacccgagacaagactgtgaccgcctcctttgccctggggcagctcacgcacccagcagcatcccatcccccggccccccacgtaccaccggaaagctaacatcaaccccctaccactgctaccaggccaccgagggcaccacattcaagagctccgcattcagccgccagtacaccggcgcaacgcaaaacggcttcatccgcggcgcctaccacttcgcccagcccgccgcgtcctcgggcgccgcgcaggcgagatacttcgccagcaacggcggcggctggtccaaggacggcatcaccctgcccggggcgctggacatcgagtacaaccccaacggcgccacctgctacggcctctcgcaatcggccatggtgaactggatcgaggactttgtcaccacctaccacggcatcacctcccgctggcccgtcatctacaccaccaccgactggtggacccagtgcaccggcaactccaaccgcttcgcgaaccgctgcccgctgtggatcgcccgctacgccagctccgtcggcactctgcccaatggctggggcttttacaccttctggcagtacaacgacaagtatcctcagggcggtgattcgaactggttcaacggcgatgcgtcgcgtctcagggctctcgctaacggagactaaacgcactcgcaatgactgggctggacttttctggacttacaagtaaggggacttcagggagaaccgcctcaagacactgtccagattccacacacgc

SEQ ID NO: 148 - DNA, 8831 bp, Aspergillus fumigatus
  source 1..8831: mol_type = unassigned DNA
atgagattcggttggctcgaggtggccgctctgacggccgcttctgtagccaatgcccaggtttgtgatgctttcccgtcattgtttcggatatagttgacaatagtcatggaaataatcaggaattggctttctctccaccattctacccttcgccttgggctgatggccagggagagtgggcagatgcccatcgacgcgccgtcgagatcgtttctcagatgacactggcggagaaggttaaccttacaacgggtactgggtgggttgcgacttttttgttgacagtgagctttcttcactgaccatctacacagatgggaaatggaccgatgcgtcggtcaaaccggcagcgttcccaggtaagcttgcaattctgcaacaacgtgcaagtgtagttgctaaaacgcggtggtgcagacttggtatcaactggggtctttgtggccaggattcccctttgggtatccgtgactgtgagctatacccgcggagtctttcagtccttgtattatgtgctgatgattgtctctgtatagctgacctcaactccgccttccctgctggtactaatgtcgccgcgacatgggacaagacactcgcctaccttcgtggcaaggccatgggtgaggaattcaacgacaagggcgtggacattttgctggggcctgctgctggtcctctcggcaaatacccggacggcggcagaatctgggaaggcttctctcctgatccggttctcactggtgtacttttcgccgaaactatcaagggtatccaagacgcgggtgtgattgctactgccaagcattacattctgaatgaacaggagcatttccgacaggttggcgaggcccagggatatggttacaacatcacggagacgatcagctccaacgtggatgacaagaccatgcacgagttgtacctttggtgagtagttgacactgcaaatgaggaccttgattgatttgactgacctggaatgcaggccctttgcagatgctgtgcgcggtaagattttccgtagacttgacctcgcgacgaagaaatcgctgacgaaccatcgtagctggcgttggcgctgtcatgtgttcctacaatcaaatcaacaacagctacggttgtcaaaacagtcaaactctcaacaagctcctcaaggctgagctgggcttccaaggcttcgtcatgagtgactggggcgctcaccacagcggtgtcggcgctgccctcgctgggttggatatgtcgatgcctggagacatttccttcgacgacggactctccttctggggcacgaacctaactgtcagtgttcttaacggcaccgttccagcctggcgtgtcgatgacatggctgttcgtatcatgaccgcgtactacaaggttggtcgtgaccgtcttcgtattccccctaacttcagctcctggacccgggatgagtacggctgggagcattctgctgtctccgagggagcctggaccaaggtgaacgacttcgtcaatgtgcagcgcagtcactctcagatcatccgtgagattggtgccgctagtacagtgctcttgaagaacacgggtgctcttcctttgaccggcaaggaggttaaagtgggtgttctcggtgaagacgctggttccaacccgtggggtgctaacggctgccccgaccgcggctgtgataacggcactcttgctatggcctggggtagtggtactgccgagttcccttaccttgtcacccccgagcaggctatccagcgagaggtcatcagcaacggcggcaatgtctttgctgtgactgataacggggctctcagccagatggcagatgttgcatctcaatccaggtgagtgcgggctcttagaaaaagaacgttctctgaatgaagttttttaaccattgcgaacagcgtgtctttggtgtttgtcaacgccgactctggagagggttacatcagtgtcgacggcaacgagggtgaccgcaaaaatctcactctgtggaagaacggcgaggccgtcattgacactgttgtcagccactgcaacaacacgattgtggttattcacagtgttgggcccgtcttgatcgaccggtggtatgataaccccaacgtcactgccatcatctgggccggcttgcccggtcaggagagtggcaactccctggtcgacgtgctctatggccgcgtcaaccccagcgccaagaccccgttcacctggggcaagactcgggagtcttacggggctcccttgctcaccgagcctaacaatggcaatggtgctccccaggatgatttcaacgagggcgtcttcattgactaccgtcactttgacaagcgcaatgagacccccatttatgagtttggccatggcttgagctacaccacctttggttactctcaccttcgggttcaggccctcaatagttcgagttcggcatatgtcccgactagcggagagaccaagcctgcgccaacctatggtgagatcggtagtgccgccgactacctgtatcccgagggtctcaaaagaattaccaagtttatttacccttggctcaactcgaccgacctcgaggattcttctgacgacccgaactacggctgggaggactcggagtacattcccgaaggcgctagggatgggtctcctcaacccctcctgaaggctggcggcgctcctggtggtaaccctaccctttatcaggatcttgttagggtgtcggccaccataaccaacactggtaacgtcgccggttatgaagtccctcaattggtgagtgacccgcatgttccttgcgttgcaatttggctaactcgcttctagtatgtttcactgggcggaccgaacgagcctcgggtcgttctgcgcaagttcgaccgaatcttcctggctcctggggagcaaaaggtttggaccacgactcttaaccgtcgtgatctcgccaattgggatgtggaggctcaggactgggtcatcacaaagtaccccaagaaagtgcacgtcggcagctcctcgcgtaagctgcctctgagagcgcctctgccccgtgtctactagtaactagaggtgactgacacctggcggtagacaatcaatccatttcgctatagttaaaggatggggatgagggcaattggttatatgatcatgtatgtagtgggtgtgcataatagtagtgaaatggaagccaagtcatgtgattgtaatcgaccgacggaattgaggatatccggaaatacagacaccgtgaaagccatgctctttccttcgtgtagaagaccagacagacagtccctgatttacccttgcacaaagcactagaaaattagcattccatccttctctgcttgctctgctgatatcactgtcattcaatgcatctagattaccgttacacatttccactcacactcaaagtccaactcttttctcgtaagctttccagccttcctcccggtaccgggaggaaggctggaaagcttacgagaaaagagttggactttgagtgtgagtggaaatgtgtaacggtattgactaaaagggatcccttttagtcaataccgttacacatttccactcacactcaaagtccaactcttttctcgtaagctttccagccttcctcccggtacctctgaaccgcctcgactggatcgtccgccttatagatgcccctacccgcaatgataaagtccgcacctcgcccaaccgccgacccaggtgtctgatactgctgccccagcttatcccccttatccgacagattcaccccagtcgtaaagacgacaaaatcctcgctctcctctttctgttcgggcagcacctcactcaacgcccttgtactcacgaatcccatcacaaaccccttatacttccgcgcgtactcaaccgagcgtgcctgtgactcccctgtcgcaagagatcccttactcgtcatctcggcaagaatcaggagacctcgttgattcgcgtctttaaagtcaggagacttggttgtctgtgcgagggcctcgacgatcccttcgcccggcaggatggcgcagttgatgatgtgtgcccattcggagatgcggagagcgccaccgtggtactgcttttgcacggtgttgccgatgtcgatgaacttgcggtcctcaaagatgaggaagttgtgctttgtcgcgagggattggagcgaggaaagggtcgacggggtgagatcggtgaggatgtcgatgtgggttttcagaactgcgatataggggcctaggcctgtactcactacgcatcagctatttgttatcctggaggggcattggtgcaggatgtacggtcagcaagatcgaggagctcggcggaagtagtaacgtctgcggagacggtgacgttggttttcttctcctcggcgatggagaagagtttagatgttaaagggttgggatggttggttgcgcgaattgcgtaggggaggtgggacttcgaagacatgatggcggttctccaatgattgaattgggctggattaaactgacaatttgaagctggaagtgggatggctgtataacgaaaactcaccccgctgcggtggaatttttgctccggcccgataagataggcgcagacctatctccactatcacgaatataggtcacgaacccgactatcattcaaacagaccacattttatcaactctcccctctgtgctaagatgtcgactacatttacatcaaatcctttgcaacaccaaatgcgctcaatccccaaagacccgcttgcgcaagcaagtacagcgaaccattgtacctgccggtgccgttcggcttgtcgctataaatatagcccagcatgtagagggtgcggagaacaacccaggccgctcctaagcccgctgctgcctctgggtacttgacgcctgccaccaggatagagagcattgtctgcggcgcgttctcgaggaagttgccgtgggcgcgttgtgcgcagttgaatttgtaggctttgggctgttcacaaacgtcatttagtatctaggatgcatcctagagtttaaacagcttggcactggccgtcgttttacaacgtcgtgactgggaaaaccctggcgttacccaacttaatcgccttgcagcacatccccctttcgccagctggcgtaatagcgaagaggcccgcaccgatcgcccttcccaacagttgcgcagcctgaacggcgaatggcgcctgatgcggtattttctccttacgcatctgtgcggtatttcacaccgcatatggtgcactctcagtacaatctgctctgatgccgcatagttaagccagccccgacacccgccaacacccgctgacgcgccctgacgggcttgtctgctcccggcatccgcttacagacaagctgtgaccgtctccgggagctgcatgtgtcagaggttttcaccgtcatcaccgaaacgcgcgagacgaaagggcctcgtgatacgcctatttttataggttaatgtcatgataataatggtttcttagacgtcaggtggcacttttcggggaaatgtgcgcggaacccctatttgtttatttttctaaatacattcaaatatgtatccgctcatgagacaataaccctgataaatgcttcaataatattgaaaaaggaagagtatgagtattcaacatttccgtgtcgcccttattcccttttttgcggcattttgccttcctgtttttgctcacccagaaacgctggtgaaagtaaaagatgctgaagatcagttgggtgcacgagtgggttacatcgaactggatctcaacagcggtaagatccttgagagttttcgccccgaagaacgttttccaatgatgagcacttttaaagttctgctatgtggcgcggtattatcccgtattgacgccgggcaagagcaactcggtcgccgcatacactattctcagaatgacttggttgagtactcaccagtcacagaaaagcatcttacggatggcatgacagtaagagaattatgcagtgctgccataaccatgagtgataacactgcggccaacttacttctgacaacgatcggaggaccgaaggagctaaccgcttttttgcacaacatgggggatcatgtaactcgccttgatcgttgggaaccggagctgaatgaagccataccaaacgacgagcgtgacaccacgatgcctgtagcaatggcaacaacgttgcgcaaactattaactggcgaactacttactctagcttcccggcaacaattaatagactggatggaggcggataaagttgcaggaccacttctgcgctcggcccttccggctggctggtttattgctgataaatctggagccggtgagcgtgggtctcgcggtatcattgcagcactggggccagatggtaagccctcccgtatcgtagttatctacacgacggggagtcaggcaactatggatgaacgaaatagacagatcgctgagataggtgcctcactgattaagcattggtaactgtcagaccaagtttactcatatatactttagattgatttaaaacttcatttttaatttaaaaggatctaggtgaagatcctttttgataatctcatgaccaaaatcccttaacgtgagttttcgttccactgagcgtcagaccccgtagaaaagatcaaaggatcttcttgagatcctttttttctgcgcgtaatctgctgcttgcaaacaaaaaaaccaccgctaccagcggtggtttgtttgccggatcaagagctaccaactctttttccgaaggtaactggcttcagcagagcgcagataccaaatactgttcttctagtgtagccgtagttaggccaccacttcaagaactctgtagcaccgcctacatacctcgctctgctaatcctgttaccagtggctgctgccagtggcgataagtcgtgtcttaccgggttggactcaagacgatagttaccggataaggcgcagcggtcgggctgaacggggggttcgtgcacacagcccagcttggagcgaacgacctacaccgaactgagatacctacagcgtgagctatgagaaagcgccacgcttcccgaagggagaaaggcggacaggtatccggtaagcggcagggtcggaacaggagagcgcacgagggagcttccagggggaaacgcctggtatctttatagtcctgtcgggtttcgccacctctgacttgagcgtcgatttttgtgatgctcgtcaggggggcggagcctatggaaaaacgccagcaacgcggcctttttacggttcctggccttttgctggccttttgctcacatgttctttcctgcgttatcccctgattctgtggataaccgtattaccgcctttgagtgagctgataccgctcgccgcagccgaacgaccgagcgcagcgagtcagtgagcgaggaagcggaagagcgcccaatacgcaaaccgcctctccccgcgcgttggccgattcattaatgcagctggcacgacaggtttcccgactggaaagcgggcagtgagcgcaacgcaattaatgtgagttagctcactcattaggcaccccaggctttacactttatgcttccggctcgtatgttgtgtggaattgtgagcggataacaatttcacacaggaaacagctatgaccatgattacgaattgtttaaacgtcgacgcattccgaatacgaggcctgattaatgattacatacgcctccgggtagtagaccgagcagccgagccagctcagcgcctaaaacgccttatacaattaagcagttaaagaagttagaatctacgcttaaaaagctacttaaaaatcgatctcgcagtcccgattcgcctatcaaaaccagtttaaatcaactgattaaaggtgccgaacgagctataaatgatataacaatattaaagcattaattagagcaatatcaggccgcgcacgaaaggcaacttaaaaagcgaaagcgctctactaaacagattacttttgaaaaaggcacatcagtatttaaagcccgaatccttattaagcgccgaaatcaggcagataaagccatacaggcagatagacctctacctattaaatcggcttctaggcgcgctccatctaaatgttctggctgtggtgtacaggggcataaaattacgcactacccgaatcgatagaactactcatttttatatagaagtcagaattcatggtgttttgatcattttaaatttttatatggcgggtggtgggcaactcgcttgcgcgggcaactcgcttaccgattacgttagggctgatatttacgtaaaaatcgtcaagggatgcaagaccaaagtactaaaaccccggagtcaacagcatccaagcccaagtccttcacggagaaaccccagcgtccacatcacgagcgaaggaccacctctaggcatcggacgcaccatccaattagaagcagcaaagcgaaacagcccaagaaaaaggtcggcccgtcggccttttctgcaacgctgatcacgggcagcgatccaaccaacaccctccagagtgactaggggcggaaatttatcgggattaatttccactcaaccacaaatcacagtcgtccccggtattgtcctgcagaatgcaatttaaactcttctgcgaatcgcttggattccccgcccctggccgtagagcttaaagtatgtcccttgtcgatgcgatgtatcacaacatataaatactggcaagggatgccatgcttggagtttccaactcaatttacctctatccacacttctcttccttcctcaatcctctatatacacaactggatttacc

SEQ ID NO: 149 - DNA, 4236 bp, Neobacillus novalis
  source 1..4236: mol_type = unassigned DNA
atgaaaaaaagagcgatccaaaagatcatttcgagtattgtatccctcgcagttctgaccagtgtccctgttatgcaaaaaccatctgtattggcagcatcgtctgattccacttcagcatcgaaaacggatttctttagctcgtttgaaaaatccgatctgcaactcacttggactaatacagtggagacagatgctaacggaaagaaaatgtcctcaggaattgatgggaatgttaagcgggatttaatccttggcgatattaccgataaagttgttcaagtaacagcgagtgcaaacaatcccccgaatgaaatcgattctaagttgatcgatggggacccgacaacaaaatggttagcatttgaaccgactgctaacatcgtccttaagctggctgaaccagtggccgttgtcaaatatgccttaacatctgctaatgacgctaaaggaagggatccaaaaaactggacattatacggttccttagatggaacgaattggacagccgtcgatacacgagaaggggaagattttaaagatcgcttccaacgaaatatgtatgatttaaaaaatactacaaagtacttgtattacaaattggacattacgaaaaatgctggtgacagtattacccagttagcggaaatttctttatcagacggaattgaagttccagcaccaccgccgggagatatgaagtcgctaataggaaaaggcccaactagttcttataccgctaaaacaaatgtgggctggaccggattaggtgcccttaattattcaggtacacatctttcagacggaagggcttattcttacaacaagctttatgatgtcgacatccttgttaccccagcaacagagctttcgtattttattgccccagaatttacagataaaaatcataatgactattcaagcacatatgtctctgtggaccttgccttttcagatggaacctaccttcatgatcttaaagcagtagaccagtatggtgtaggacttaatccgaaagaccaaggtgattcaaaatacttatacgtaaaccaatggaacacaattaaatctactattggttctgttgcggcaggtaaaaccataaaaaggattctagtagcctacgataatccaaaaggccctggagcctttagaggaagcatcgatgatattaaaattgatggaaaacctgttcagaaagcatttggttctccaattgactatgtaaatatccttcgcgggacacaatcgaacggatcattttctcgtggaaataacttcccagccgtggcgattccgcatggatttaacttttggacaccaactactaatgcaggatctagttggatttatcaatatcatgaaagcaacagtgtcaataatctcccacaaatccaagctttttctgtcagccatgaaccaagcccttggatgggggatcgtcagacattccaagtgatgccatccgcttcgacggcagctacaccaaatgcaaatcgtgattcacgtgcattagaatttaaccatgcgaatgaaattgcccagccacactattacagcgtgaaatttgaaaatgggattcgtacggaaatgactccaacagaccatgcagctatgtttaagtttacttttacaggtgccacatctaacctcatttttgataatgttaacaataatggaggccttacaatcgatgctaaatcaggagagatcaccggctattctgatgtgaaaagcggcctctctacaggagcaacgcgcttgttcgtctacgcagcatttgataagcctgttattaaaagtggcaaattaacaggtgaaagtagaaacaatgtcacaggatatgtccgattcgatacttctaaagatgaagacaaagttgtcactatgaaaattgcaacatccttaattagtgtcgagcaagcaaagaaaaatctcgaacaggaaatcggattgaatgatacgtttgagggactaaaagaaaaagcgaaaacagagtggaataaaaagttgggcatcatcgaagtagaaggagcatcggaggatcagctcgttacgctttattctaatttataccgcttgttcttgtatccgaattctgcctttgaaaatgtcggaacgacaactgacccagtctataaatatgcaagtccgtattcagcggcaactggccaagatacagcgacaacaactggtgcaaaaatcgtcgacggaaaaacgtatgtcaataacggcttctgggacacttacagaacagcatggcccgcctattctttattaacaccaacatttgctggtgaactgattgatggatttgtccagcaatacagagatggcggctggatagcacggtggtcttcaccaggatttgcaaacttaatgccgggtacgagttcggatgtcgcctttgcggatgcttatcttaaaggggtaacgaattttgatgtccagagcttttaccaatcggcgattcgaaatgcagaggctgtcagtcctaatgccggcacaggccgaaaagggctaacaacttcgatatttgatggatataccaatacttcaacgggtgaaggattagcatgggcaatggatggctatattaacgacttcggtatcgctaatttggcaaaggctctaaaagaaaagggcgacaagagtgatccctactatgctaactatgctgcagattatcagtacttcctgaatcgtgcgcaaaactatgtgcatatgttcaatccatccattgaattttttaatggcagaacagcaaatggggcatggagatcaacaccggataacttcaatcctgccgtttgggggtccgattatacagaaacaaatggctggaatatggcgttccatgtaccacaagacggtcaggggctagccaatctctacggtggaaaagaggggctggcgactaagcttgatcaattctttagcacatcagaaacaggattgtttcctggctcatatggcgggacaatccatgaaatgagagaggcaagagatgtcagaatggggatgtatggccatagcaatcagccgtcccatcatatcgcctacatgtatgattacgctggacagccatggaagacacaggaaaaagtccgtgaagcccttaatcgactttacattggcagtgcaatcggccaaggatattccggggatgaggataacggtgaaatgtccgcctggtatatcttaagcgcaatgggattctatccgcttaaaatgggtacacctgaatatgcgattggtgcaccgttatttaagaaggcaaccatccatttggaaaatggaaaatcaattgttataaacgctcctaacaatagcaaggaaaacaaatatgtgcaaagtatgaaagtaaatggaaaagcctatgctaaaacctccatattacatgcggatatcgccaatggtgccgtaattgattttgaaatgggatccaagccatccaaatggggcagcggagatcaggatattttacaatcgattactccggggtctacagatgggacatcattgtctccactgccattacgtgatgtaacagatcgtttaattgcagcggaaaaaggagctgtaactgtaagtgatgagggaaatggacaattattgtttgataacacatcaaacactcaattatctatgaagagtaaaaccccatcgattgtgtatcaatttaaggaaggcaaacaaaacgtaaaaatgtatacgttgacttcttcaaaagcttcacagaatgaggatccaaaatcttgggtattaaaaggttcaaatgatgggaagagttggagcgtccttgatcaaagaaaaaatgaaacgttccaatggcgtcaatatacgagggcctttacgattcaacatccagggaagtattcacagtataagctcgaaataacagaaaatgctggagcggaggttactactttagcagagcttgagctcctaggctatgatgatgtaaccaatagctatcaggctgtgtatgagctaatggaacaatttaaacagtccaaagacttaacaggaccaatggctgtacaattgaacaacagtttaaccacatcgctagatcatttcaaaaaggatcataaggatcaggcaatcaagcatctggaagatttcttaaagcaccttaataataaaggtttacaggaccggatttcttctaaggcaaaaggggtcctctctgccgatgcgaatcaactgattgtattactagcaagagattaa

SEQ ID NO: 150 - DNA, 3324 bp, Trichoderma atroviride
  source 1..3324: mol_type = unassigned DNA
gaaccaatgaatctgaaccgtctttgatgaacaggaccacttgggaaaaaggccacagtaagacggcagtgccccccgttccatcacggacgtggctattttccaccattgtgagcatagctggtctcgggcgagccttgcctagttgttagagatcagcggagaggtcctgaaatgatctgcgtcgacgtgcttttcgacgggctggtataggcaggacacaatggacagcccgcaagaaccatgaggccccggaccgatgatgggcatggagacccggtcagaggagtaatcgcagcagcgagacaagcgagattctttatatagctttcgatgacttccggggcacgtcgctcacggttttgatcacgcggtaacttgtgggtgagccagccaccaggatactgcttctcttattacgagcctcgtctcgttgttcattccttttgctctgccttctggttctagcactctcgctttagtctctcctttgatacgccatgaagtctctcaccgctgtggtggccttgctaggcgccgtggcagcctcgccagcagtcgtccgccatcatggccgctctgctctccagcctcgagcaaacagctccttttggtatgctgccatggaccacaccggccagttcaagggctctgctccttatgtagatgcttcctacaacgtctttgttgccgtcagccctggtgacgccggctctcttcagaatgccatcgactcagctggtagcggcaaccgacagaatgagtggctggcatcgcagcctcgtgtcgtgtacatcccgtcgggaacatacgagctctcaagcaccctcaacatgcgtaccgacactatcctgttcggtgacgccaccaaccctcccgttatcaaggccgcggcaggattcagcgacaattacctcgtcaacggccaggatccctctacgggcgatgccggtgaactttcctttgctgttggactgaagaatgttgttctggacaccactgctgttgatggaagctccagcatctctgctctctactggggtgttgctcaggcttgtcagctacaaaacgtcaagatcacgcttgcgccctcggtcaacggcaagggccacactggtgtccagctgggccgtggatctactcttgcactcgccgacatccgcattgagaatggccagacgggtatctggcacaacggccaccagcaggccctctacaagagcatctacttttacaagaacactgtcggcatgctcatcagcggcggcaacaccatcagcttgttgaaccctacctttgacagcgttggcactggtgtttccaacaccggcggcagcccctttatcggaatcgtcgatgccacgtccatcaactcgggcgtcaccttcacaaccagcgtctatccttccattgtcattgacaacttgaccaaggacaccgactctgacgttgccgtgatccgcggcacaacgactgtcggcgcctcaaagaacgtcgtcaactacagctacggaaacacggttggagcgaaccccgtctacggcggtgtcaacggcaacacgactcgccccagcggcgttgcccccggtggccgtatcccagccgtcgccgtgcccaactatgcaaacaatcctgttaccgactttgtcaacgtcaaggaccccagccagaacggcggccagaccgtcaagggcgatggcagcaccgacgactctgccgccctcaacaaagtcctccaattcgccgccaccaacaacaagattgcctacttcccctttggcgactaccgtgttgagtctacgctcctggtccccgttggctcccagctggttggcgaggcctgggcaactatttccggcggcggcgacttcttcaaggacgcatccagccccaagcccgtagtccaggtcggcaacgagggcgacgtcggcgtggcccagatccaggacttccgcttcaccgtctccgacgtcctgcccggcgccatcatcgtgcagttcaacgctgccggctccaagcccggcgacgtggcgctcttcaactccctcgtcaccgtcggcggaacccacggggccgatgcgctgaccaacgcctgcaccgacgccagcaacgagtgccaggctgcctttctcggccttcacttcaccgagggctcgtccgcctacgtggagaacacctggaactgggttgccgaccacatcaccgagggcttcagcggcggatccaacattgccgcaaagggcggcgcgctggtcgagtccaccaagggcacctggctcaacggcctgggcagcgagcactggtggctgtaccagctcaacctcaaggctgccagcaacgtcgccgtgacgctgctgcagagcgagaccaactacgaccagggcgacaacaccaagcaggtcccccctgcgccgtggaccgccgatgtccagggctggggcgatcccgacttctcctggtgcgacagcactgcccgctgccacatgggcctcgccaactatgtcaacggcggctctgacatttactactacggctctgcctcgtgggcctttttcagcggtcccggataccagggctgcgctggttcctatcagtgccaaggtacgttgatgacgaaaacagtttccaagctacaattcactgacattaagcagactacatgcacttcatctcggcgactcctacgaacctccagatgtacggaatgtgctccaaggacacctccgttgctctccgcctgggcgacggcaccaagatcaatgcccagcctgactttaccggaggttggagccctggcgcagacattggtcgctatacctcttagatgtttggagtgagagcatttgcttctgaatagtaaatgtaatgtgcatatatattgcgtggtctttgcatataatttgtgattctttgtctatatagaacgtttccctgattgaagagaatagatgtctttttagatttgtaattctgttaaaactaaaaagaaatttgaggatttcaggtgcaagttctgtcgcttattgtatcttgtcaagttttggtacaagtcagatcgtagatgcaaacgtataatgcgcatttgttcggaaaacaacaaaggcgaaatctttcattatgatacaacgtctcttccggtaccacatccttattagctgttgaatttggctaagctactctttttgaaggctggttgagattctcccattcatgctgttgccaatcccgaagagacacgaatgacgtagacagattggagatgtatacaaactgcaagtacactgaaataatcgctgtagatatgaatgaatcaatgactaaatc

SEQ ID NO: 151 - DNA, 1353 bp, Trichoderma harzianum
  source 1..1353: mol_type = unassigned DNA
atgaagcttcttccctccttgattggcctggccagtctggcgtccctcgccgtcgccgccccttctctcattccaagagtatcacccttttccattgccaagcctggaggtgttgacgacatcgttatcacggcaaacaacactctcaacggaacctatcatagttcaacaacagtctccaaaaatgtcatccagactcgagctcaggctggacacctgcccatccaactcgtcaacaacttctccggtagtcaggtcaatgcatacatttccggcctggacactgacaacagggtcgtttttgtcaggggtgacggcagtcttgtgtatcccagctctggaggctccagtgtccctgttgcgatcagcacccccatcaacattgcgttgcctgctcaaggccagtccatcacggtgaatgtgcctattgtcatcagctctgcgcgtatctacttttcagtgggcgatctccagttcttcatggtcaagattcccaacggcgatggcttggtgcaaccgtcccagttcaaccttcaagacccgagtgcaggcctcctctggggctttgttgagctcacctatactacggacctggctgtctacgcaaacatcagctacgtcgactttgtcggtatgattctcagtatgagcttgagtgccacggatggaagcgccactcagaccacgaaaggccttggatcttccgcactcacccagatttgccagggcttggtccaacaagctagcgtcgacggcttcccctggtcttcgatgtgtatcgccaattctgctggaactctcgttcgtgcgctgtctccaggcgactacagtgtgatcaatgcagcggccttccagaactactggagtgcctatgtcgaccaagtctggagccagtatactaacactcctctcaccatcaacacacaaacctctgctggcagcgtcaactgccaggtctccggcgacacgctgaactgcaacggcgacaaccgcggctacgctaagccggctgcaggagacatctggggctgcaacagtggaccatttgccattcagagcggtgacaatgccgtccattcggctgttgttccccgtctgtgtgctgcctttgtgcgatctaccttgttgcttgctggtggcaacgttcagccaggcctgggccagtcttcatactacacagtcagccctaccaaccactacagccgtcttgttcaccaatttgaaattgatggtcgaggctacgctttcccatatgatgatgtcaacccagatggtaatgagaatgcctcgggcactttggcttcaggggctcccaatgttctgactgtctacgtcggcgctcctccttcataa

SEQ ID NO: 152 - DNA, 7449 bp, Bacillus deramificans
  source 1..7449: mol_type = unassigned DNA
cggaacgcctggctgacaacacgaacgccaacacgatcggagccaaagaaacaggtttcaagcacgcggtgggaaatatcttcaataaaaaaggagacgagctccgcaataaaattcacgaaatcggtttttctgaagatgaagccgctcaatttgaaaaacgcttagatgaaggaaaagtgcttctctttgtgacagataacgaaaaagtgaaagcttgggcataaagcaaggaaaaaaccaaaaggccaatgtcggccttttggtttttttgcggtctttgcggtgggattttgcagaatgccgcaataggatagcggaacattttcggttctgaatgtccctcaatttgctattatatttttgtgataaattggaataaaatctcacaaaatagaaaatgggggtacatagtggatgaaaaaagtgatgttagctacggctttgtttttaggattgactccagctggcgcgaacgcagctgatttaggccaccagacgttgggatccaatgatggctggggcgcgtactcgaccggcacgacaggcggatcaaaagcatcctcctcaaatgtgtataccgtcagcaacagaaaccagcttgtctcggcattagggaaggaaacgaacacaacgccaaaaatcatttatatcaagggaacgattgacatgaacgtggatgacaatctgaagccgcttggcctaaatgactataaagatccggagtatgatttggacaaatatttgaaagcctatgatcctagcacatggggcaaaaaagagccgtcgggaacacaagaagaagcgagagcacgctctcagaaaaaccaaaaagcacgggtcatggtggatatccctgcaaacacgacgatcgtcggttcagggactaacgctaaagtcgtgggaggaaacttccaaatcaagagtgataacgtcattattcgcaacattgaattccaggatgcctatgactattttccgcaatggttgtaaaacgacggccagtgaattctgatcaaatggttcagtgagagcgaagcgaacacttgattttttaattttctatcttttataggtcattagagtatacttatttgtcctataaactatttagcagcataatagatttattgaataggtcatttaagttgagcatattagaggaggaaaatcttggagaaatatttgaagaacccgaggatctagatcaggtaccgcaacgttcgcagatgctgctgaagagattattaaaaagctgaaagcaaaaggctatcaattggtaactgtatctcagcttgaagaagtgaagaagcagagaggctattgaataaatgagtagaaagcgccatatcggcgcttttcttttggaagaaaatatagggaaaatggtacttgttaaaaattcggaatatttatacaatatcatatgtatcacattgaaaggaggggcctgctgtccagactgtccgctgtgtaaaaaaaaggaataaaggggggttgacattattttactgatatgtataatataatttgtataagaaaatggaggggccctcgaaacgtaagatgaaaccttagataaaagtgctttttttgttgcaattgaagaattattaatgttaagcttaattaaagataatatctttgaattgtaacgcccctcaaaagtaagaactacaaaaaaagaatacgttatatagaaatatgtttgaaccttcttcagattacaaatatattcggacggactctacctcaaatgcttatctaactatagaatgacatacaagcacaaccttgaaaatttgaaaatataactaccaatgaacttgttcatgtgaattatcgctgtatttaattttctcaattcaatatataatatgccaatacattgttacaagtagaaattaagacacccttgatagccttactatacctaacatgatgtagtattaaatgaatatgtaaatatatttatgataagaagcgacttatttataatcattacatatttttctattggaatgattaagattccaatagaatagtgtataaattatttatcttgaaaggagggatgcctaaaaacgaagaacattaaaaacatatatttgcaccgtctaatggatttatgaaaaatcattttatcagtttgaattatgtattatggagctctgaaaaaaaggagaggataaagaatggctaaaaaactaatttatgtgtgtttaagtgtttgcttagtgttgacctgggcttttaatgtaaaagggcaatctgctcatgctgatgggagcacgacaacgatcattgtccactattttcgccctgctggtgattatcaaccttggagtctatggatgtggcctgaaggagggagtggagctgaatatgattttaacgggacagattcatatggggaagtcgccaatgtttccatcccaggaaacccaagtcaggtaggaattatcgttcgcactcaagattggaccaaggatgtgagcgctgaccgctacatagatttaagcaaaggacatgaggtatggctggtccaaggaaacagccaaattttctataatgaaaaggatgctgaagatgccgctaaacccgctgtaagcaacgcttatttagatgcttcaaaccaagttttagttaagcttagccaaccgtttacactcggtgaaggagcaagcggcttcacggttcatgatgacaccgtaaataaggatatcccagtgacatctgtgacggatgcaagtcttggtcaaaatgtaaccgctgttttggcaggtaccttccaacatatttttggaggttccgattgggcacctgataatcacagtactttattaaaaaaggtgaataacaatctctatcaattctcaggagatcttcctgaaggaaactaccaatataaagtggctttaaatgatagctggaataatccgagttacccttcaaacaatatcgatttaaccgtaccaacaggcggtgcccatgtcaccttttcctatgtcccctcaacgcatgccgtctacgacagtattaacaaccctggcgccgatttacctgtaaatggcagcggggttaaaacggatctcgtgacggttactctaggggaagatccagatgtgagccatactctgtccattcaaacagatggctatcaagcaaagcaggtgatatctcgtaatgtgcttgattcatcacagtattactattcaggagatgatcttggaaatacctatacacataaagcaactacctttaaggtctgggcacctacttctactcaagtaaatgttcttctttataatagtgcaacgggttctgtaacaaaaaccgtacctatgacggcatcgggccatggtgtgtgggaagcaacggttaatcaaaaccttgaaaattggtattacatgtatgaggtaacaggccaaggctctacccgaacggctgttgatccttatgcaactgcgattgcaccaaatggaacgagaggcatgattgtggacctggctaaaacagatcctgctggctggaacagtgataaacatattacgccaaagaatatagaagatgaggtcatctatgaaatggatgtccgtgacttttccattgaccctaattcgggtatgaaaaataaagggaagtatttggctcttacagaaaaaggaacaaagggccctgacaacgtaaagacggggatagattccttaaaacaacttgggattactcatgttcagcttatgcctgttttcgcatttaacagtgtcgatgaaactgatccaacccaagataattggggttatgaccctcgcaactatgatgttcctgaagggcagtatgctacaaatgcgaatggtacggctcgtataaaagagtttaaggaaatggttctttcactccatcgtgaacacattggggttaacatggatgttgtctataatcatacctttgccacgcaaatctctgacttcgataaaattgtaccagaatattattaccgtacggatgatgcaggtaattataccaacggatcaggtactggaaatgaaatcgcagccgaaaggccaatggttcaaaaatttattattgattcccttaagtattgggtcaatgagtatcatattgacggcttccgttttgacttaatggcgctgcttggaaaagacacgatgtcgaaagctgcctcggagcttcatgctattaatccaggaattgcactttacggtgagccatggacgggtggaacctctgcactgccagaagatcagcttctgacaaaaggagctcaaaaaggcatgggagtagcggtgtttaatgacaatttacgaaacgcgttggacggcaatgtctttgattcttccgctcaaggttttgcgacaggtgcaacaggcttaactgatgcaattaagaatggcgttgaggggagtattaatgactttacctcttcaccaggtgagacaattaactatgtcacaagtcatgataactacaccctttgggacaaaatagccctaagcaaccctaatgattccgaagcggatcggattaaaatggatgaactcgcacaagcagttgttatgacctcacaaggtgttccattcatgcaaggcggggaagaaatgcttcgtacaaaaggcggcaacgacaatagttataatgcaggcgatacggtcaatgagtttgattggagcaggaaagctcaatatccagatgttttcaactattatagcgggctaatccaccttcgtcttgatcacccagccttccgcatgacgacagctaatgaaatcaatagccacctccaattcctaaatagtccagagaacacagtggcctatgaattaactgatcatgttaataaagacaaatggggaaatatcattgttgtttataacccaaataaaactgcagcaaccattaatttgccgagcgggaaatgggcaatcaatgctacgagcggtaaggtaggagaatccacccttggtcaagcagagggaagtgtccaagtaccaggtatatctatgatgatccttcatcaagaggtaagcccagaccacggtaaaaagtaatcgcatgttcaatccgctccataatcggtcgacgcggcggttcgcgtccggacagcacatcaccgaaatatttcgacggcccagccggctagcgcgttaatccgcggatatatagcggccgcagatctgggaccaataataatgactagagaagaaagaatgaagattgttcatgaaattaaggaacgaatattggataaagtgggatatttttaaaatatatatttatgttacagtaatattgacttttaaaaaaggattgattctaatgaagaaagcagacaagtaagcctcctaaattcactttagataaaaatttaggaggcatatcaaatgaactttaataaaattgatttagacaattggaagagaaaagagatatttaatcattatttgaaccaacaaacgacttttagtataaccacagaaattgatattagtgttttataccgaaacataaaacaagaaggatataaattttaccctgcatttattttcttagtgacaagggtgataaactcaaatacagcttttagaactggttacaatagcgacggagagttaggttattgggataagttagagccactttatacaatttttgatggtgtatctaaaacattctctggtatttggactcctgtaaagaatgacttcaaagagttttatgatttatacctttctgatgtagagaaatataatggttcggggaaattgtttcccaaaacacctatacctgaaaatgctttttctctttctattattccatggacttcatttactgggtttaacttaaatatcaataataatagtaattaccttctacccattattacagcaggaaaattcattaataaaggtaattcaatatatttaccgctatctttacaggtacatcattctgtttgtgatggttatcatgcaggattgtttatgaactctattcaggaattgtcagataggcctaatgactggcttttatatgagataatgccgactgtactttttacagtcggttttctaacgatacattaataggtacgaaaaagcaactttttttgcgcttaaaaccagtcataccaataacttaagggtaactagcctcgccggaaagagcgaaaatgcctcacatttgtgccacctaaaaaggagcgatttacatatgagttatgcagtttgtagaatgcaaaaagtgaaatcagctggactaaaaggggccgcagagtagaatggaaaaggggatcggaaaacaagtatataggaggagacctatttatggcttcagaaaaagacgcaggaaaacagtcagcagtaaagcttgttccattgcttattactgtcgctgtgggactaatcatctggtttattcccgctccgtccggacttgaacctaaagcttggcatttgtttgcgatttttgtcgcaacaattatcggctttatctccaagcccttgccaatgggtgcaattgcaatttttgcattggcggttactgcactaactggaacactatcaattgaggatacattaagcggattcgggaataagaccatttggcttatcgttatcgcattctttatttcccggggatttatcaaaaccggtctcggtgcgagaatttcgtatgtattcgttcagaaattcggaaaaaaaacccttggactttcttattcactgctattcagtgatttaatactttcacctgctattccaagtaatacggcgcgtgcaggaggcattatatttcctattatcagatcattatccgaaacattcggatcaagcccggcaaatggaacagagagaaaaatcggtgcattcttattaaaaaccggttttcaggggaatctgatcacatctgctatgttcctgacagcgatggcggcgaacccgctgattgccaagctggcccatgatgtcgcaggggtggacttaacatggacaagctgggcaattgccgcgattgtaccgggacttgtaagcttaatcatcacgccgcttgtgatttacaaactgtatccgccggaaatcaaagaaacaccggatgcggcgaaaatcgcaacagaaaaactgaaagaaatgggaccgttcaaaaaatcggagctttccatggttatcgtgtttcttttggtgcttgtgctgtggatttttggcggcagcttcaacatcgacgctaccacaaccgcattgatcggtttggccgttctcttattatcacaagttctgacttgggatgatatcaagaaagaacagggcgcttgggatacgctcacttggtttgcggcgcttgtcatgctcgccaacttcttgaatgaattaggcatggtgtcttggttcagtaatgccatgaaatcatccgtatcagggttctcttggattg

SEQ ID NO: 153 - DNA, 2030 bp, Talaromyces pinophilus
  source 1..2030: mol_type = unassigned DNA
tctgtttcagacactggtcacccattgcattatgacggtgttaagtggtggtggggccgactccgagacatgaaactgacaatacgacaagttgttttatgtctgacattcctcaagctagaatcatatgacttacaggggtctaaaatatgcggttttggaaagtttcatcgaatatattaacatcaactattgagtcaactgccatgaactgccgaataccctcaatatacgatattaggctaattcaatggtgtttggattggtggacattttgcactcagctccatttactttccccgatgtgagaattgaaattaaatgatcatcagatatattatatcttgtttcactaattttaaaagaattgaccgtcggttaatagcttgcaccaaccctacccaagggtggtataagaagaggactgagagactgtgcatttaggagctcaccagtattcaaaattccagaagctttcttcctacaaccttttggacacaatgcatttcctcgccgcgttgctcgcggttctgccacttgtatctgggtctccagtacccgagaaacgatgtaagttgtatccacctgaacagtgaaagctggacggtattgacaatcacagccggatgcgcacttccctctacgtacaagtggacatccactggcccgctggcaagccccaagtcgggtttggttgctctgagagactatagccatgtcatctacaacggccaacatctcgtatacggatcgaccgccaacacagctggcagctatggttccatgaactttggcctgttttcggactggtctgagatgtcatctgccagccaaaacacgatgagcactggcgccgtcgctcccacgatcttctactttgcaccaaagagtgtctggatccttgcctatcaatggggtccatatgcgttttcctacaggacttctaccgatccttccaatgccaatggctggtcatcgccacagcctcttttcacgggaactatttccggctccagtaccggtgtcatcgatcagacagttattggcgatagcgaaaacatgtatctcttctttgctggagataatggccatatttaccgtgctagcatgcccattggagactttcctggaagtttcggctcagcatcgacgattgtcctcagcgactcgactaacaacttgttcgaggcggtagaggtctacaccgtcgagggtcaaaatcaatacctcatgattgtcgaggcaattggtgccaatggacgttatttccgctccttcacagctagtagtctgggaggcacatggacggcgcaggcttcaaccgagtccaacccattcgctggcaaggctaacagtggcgccacctggaccaacgacatcagcagcggcgatttggtccgtactaatcccgatcagacacagacgatcgatgcctgcaatctacaattcctctatcaaggacgatccaccagctccggcggcgactacaaccttcttccttaccagcctggtctgttgacacttgcttaggcgacttccgttattggtccgggtaatttcagttcgaaaatgagacattaagatcaattgaaatagtaggatagaatgtgaaataagcactatgaagctctccttgaatattcccataatacaattgtacattaggcagacatgtatggaggataagactatccacatcatggaatcctctttttaatcatctttgtggctgctctccatagacaatctgagcggtgcgggttggaataggggggttggagagcctgaatatccaaggatgcggagtgcaggcaaggacggatgtcgtgcacggtattttttactatcttcctactcatgtttccatgtggagggttgttcttgaagagattgaattgaatcatttgtcctatttggcgactaagctaatgagaagagctacacagtatagtttgcacgaagcatagacaattccatggttacggcagatctggccgtgaaagcaatacagccactttctactgagtgac

SEQ ID NO: 154 - DNA, 2819 bp, Clonostachys rosea
  source 1..2819: mol_type = unassigned DNA
tttcatcgatcctagctagattgactggccagggacaaccccaacaaaagtcaaatcacataccagcgatactggaaaactcttggctgtatttgtcacaatgttgttcaagactgcgttcctggggcttattgccacagtgaatttcgttcatggtgctgccattgggcatgctgcagagcagacttcccttgagaagcgtgccgaagctgcagatcggctagttttttgccattttatggttggatcctccatcagcattccctttaaaagacttacaaatcaccggctaactcctccatgctatagattggtatcgttgggaaccgcaacagcgcttcgcaatatgacgatgatatgcgccgtgcaaaggctgcaggtattgatgcgtttgccctcaatattggagtggacggatatacagacgctcagttagacctggcctacaagtcagcagctgacaatgacatgaaggtcttcatctcctttgatttcaactggttcaaaactggagaagctgctactgtcggccagaagattgccaaatacgcaaatcaggcagctcagctaaaagtagacaatcgcgtctttgcatcctcctttgctggagatggacttgatgtcgctgctatgaagaatgctgccggcgtcgacgtgtttttcgttcccaatttccaccccgaacaaacagccaatcctgatagtattgatggaggcttcaactggatggtatgtctccctctatccacataagccaacagcattaaactaatacaaaatcccaggcatggcctaatgatgggaacaacaaagccccaaagcctggaagctcaattagcgttgaagatggtgacaataagtatctcagctggcttggcaccaagccatacatggctcgtaagtactattttcgatcaatttagacaacgcaagtaacaagtagtagctatttctccctggttcttcactcattttggaccggtaagtctcaccatcatacaagtccagtcaatcgctaaaatcgaaaaataggaagtctccttcagcaaaaattgggtctttccaggaggtgccttgatttttgatcgctggaatcaaattttagacaaaggctttcctctagtcgagatgatcacctggaacgactacggcgagtctcatcacttcggtcctctcagctcgccacattatgatgatggcaactccaagtggaccaacgatctgtaagctggagtgttcccagataaagtccgccacctaactaattcttaacctaggccacacaatggatggctcgagctttccaagccctttatcgccgcctataaagcaaaggagaaggccgtggataagtatatcaccggtgatcaaatcgtctactggtatcgtcgaaccttaaaaggtctagattgcgatgctaccgataccactgccggtaggccagccaacaatgatagtggtaactacttcatgggtcgccctgacgggtgggagttaatggatgacgtggtatatgttgccacattgctcaaagaggccggcacgcttaccgtcaactctggtggtcaatcagtcgagaaagaggtccccgccggggccaacttgattcaagttcccgctgctgtcggttcacaaacgttcagtctgtcccgcaatggcaaagtggttcttgaggacaagtccctgatggacatctctaacatctgcccgtgtggcttgtacaacttcaacccctatgtaggaactgttcctcctggtgagagcgatcctctgcagcctgacggtctagcttctctcactatcggcctccacgtctctacctgccaagccacaccgtctcttggcacaaaccccccaatttcgaccacaggaggctccccgcccccttcgagtacgggaagctctccaccgccatctaccacggccggccctacatccacgggcggctcagttccatctcagacctcatcagtacccgcacctacaagcacaggctccagccgtaagtctatgtctcacaacctaccttttcaaaggcggatcagaaagttaatacgtattatagaaccctgcaatggcggcacaaatgctgatggtgagtcgggcaactattctggtctgtgtagctttgcctgcagctacggatattgccctcctggtccgtgcaagtgcacttcaaatggaacacctggaaatcctccttcgggagacggaaggaacggatgtcctgcggatggcctaggcgatggatacaaagggctgtgcagcttcgcttgtagtcatggctactgccctgatactgcatgcaaatactgttgataatgccctaggcggcctcaaccatatgcggcaagaaaacattcttgctggacaattcgaaattgaacaccgctttttcaaacctttgcctcccacattgcagatgactactccatatttcttgtgatcacttgtccgtgcatcatcattccattatccggcactccattgatttcaactaatttaccagttccaggtcgagtgcgaatgagaatatgcctttgttctctaggagcactggacggggctattctgacagctgtagaccttggtgcctccagtaatcacaacattagaccaagtccagccagagcaagagccactaccacagaccacgacgacattgtatcctccagaagcgacacctcccccaccagtgatattctccaccgtcaggccagtgatgggcacgccagttgtgggatcacctttgagatctcctccgttgtaattctgctcgataagaacaccatacctaagatccacatgaacgaaattct

SEQ ID NO: 155 - DNA, 11442 bp, Trichoderma harazianum
  source 1..11442: mol_type = unassigned DNA
taatcgaccgacggaattgaggatatccggaaatacagacaccgtgaaagccatggtctttccttcgtgtagaagaccagacagacagtccctgatttacccttgcacaaagcactagaaaattagcattccatccttctctgcttgctctgctgatatcactgtcattcaatgcatagccatgagctcatcttagatccaagcacgtaattccatagccgaggtccacagtggagcagcaacattccccatcattgctttccccaggggcctcccaacgactaaatcaagagtatatctctaccgtccaatagatcgtcttcgcttcaaaatctttgacaattccaagagggtccccatccatcaaacccagttcaataatagccgagatgcatggtggagtcaattaggcagtattgctggaatgtcggggccagttggccgggtggtcattggccgcctgtgatgccatctgccactaaatccgatcattgatccaccgcccacgaggcgcgtctttgctttttgcgcggcgtccaggttcaactctctcttaattaattggcggtgatattgatggcacgatagaagcagcacattctgtccctagacttagagattatcatgaagatattctcgatcaaatgctttttgcgctctttctcagcaaaagacatgctgatgcagcgaagctgctggaaagtattttcggtacgattttgacatttgctccattgtcgaggatggatggaacgagcggcgtgcgccacgaaagtgaggctattgcctatcagctctttgctacattccggaaacaaacatccctttttgtgaattatctacgcaacttagatggcgtgaacgcatcttcaaagtctttcggcaggtccggcacgacttttgcatccagagaagcgcctacatgtgtattcgaccacctcctagcgcgcttggatatgaggaaatattactgagagtcgaaaacaagctccaccgcaccagctcttcttggagttttatattaaagaatattcccagctcgttgtattattctttttctaccgtgctaatgtatcaaggactttggtacctattaacgttattattcgtgtgctattcccaaacataaccctgtatatgtttcgaacgccgttatgacccatgtcttacatactcattaagtcattcccttggataatcccaatttagaagaagtgaaggtctgattctttccatccttccgccaacagtatcctccgagccgattcttccatggctggcggaccacaaatcaggaccatactctcatcttctggagccgcgtactcctttaggagctcttcggatatgcgtcctcggcggccagtccatgagtccggcgctttggatagggtgtgtattatattacaccttctgctgtcggttgccatgaagccgtcgagctcagcccggcaaaggatatcttcctcctgtctgtttccattgaggactgtacaagaggtgggatcttgccggtcctgaaccacggcgcgcaagacctggaagatcggtgtgataccggttcctccacaaatcatcttaaacgaccgaacatggcgttccttcccacttatgacaactcgtccatttccaaggtattcgaatctgcctgtcggacccttgcattccaccacggagcccaatggcagcctatccagggccatcgtcatcttgccgcctgccgaggtggctgttgcaaagtatactttaaccagcaagtccacggtccctttctggctggtttcagaaattggggtgtatgagcggatgatggcttcgttgttggatgatgtgtcgaggactttgatcataagatgctggccgactggtaaacccaatgtttgatcttcgtgttccaatttgaaactaaatattcgtgtatcccaggatatgtctttcctttctttcaatgttgcctttgtccaagaccgtgattggaggaacactgggcgaatttcatcggtggaggatgatgcatcatccttgagtgcttttaaaccttccgggtccatcgttccaatatggtactcaggcatcatcgcctttgccgtctcgctatctatggataggtgtcaatagatggtacaattgcagtgtgatatttttgggactcacgaatagcaaggaattcctcagagacatccagaccagcagaggagataatactctgcgctccgccagggtggccttcaagaaatgcttgaccatcatacacttctccattcacgatgaaccatggcttctcatcgcaggaattctccttgaattcttcaaaaccaatcactcggcttagcccgtctttcttcatattaatgtcttgcacgggctccggctccgtcggctcctctccttcgtgtctttctccccagttaccattcgtcaggtcacccccagcctttttgacgcgttccatccatcctgtaggcatactagggtgggtagggtgctcgaatctcaagttcccgttttccttcgtaattgtaacccggaaccacgggttgttcatcattccgagaacggaccagtacatatcgcgaggctgcacgcccaatgcttcgtccatggctcttacaaggatggcatcactgttctcaagctctgggatggtgatgcttagagaccaaaaacaccagcagaagcaagtttcgcgccagtacatatctactttgcctccaaaaagctcgccttcaaaatcacgatacttgtcttcggcatattcgatttccgccaatctccaagctataagtccgttagctttgataagcattctcacacatcgagcgagcgagggtgcgtacatttgcctttgtctagggatatttctaccctggtaaccctgcggcccccaccggcgtatgcatatcctctgacagtatatgacggccctgccgacaggagatttaagacctcattgttttggggatatgcaacggcggagttggtgtttaggtcataaatcgcataccgctcatcgtgccaccaatttcggttatttgatgccatctcaggcgagaccattgttctgggttagggagttagacaaatgatggaaatataaaataagtgccctttagacatacggtaagacgcggttgtcattgatatggtaccagttgtcgcttggtgcatcggtcaagatcagcctcttcagccacttaacacttcgtcctcctatttgaccgggcacgacggccctcagcggacgaccatgatctgggcgaagagactccccgttcattttatgtgcaagcatgatccccctgttggggtccagggcccagttcaatttaatagatgtgccgtagtgaccattgggctgcggcgaacttagcaattatcatcataagatagaggtacagcataccagcttatccgctccttccatacagacgtatttcgctttacgcaggggtttcgcactgcggagaatatccgccagcaatgggccagtgaagagggcagtcgatagtcccgccgatccccaggaaaaacctttcgttttacgtacaatgttttgctctttgcgtcgattgccagcacatacgagggtgataggcgctgttatttggtcgtactgctgcaacacttgtcggaagtttagtaccaaaggcttctctaccagtctatactttggttaacggatgtttggcagagaacctagcactatactaacccttcgatgctaatttcccagtgagggatatcttcatccttgatatgagggactgggccatgatttcgaacatagaagagctccggcgatgttaaaaaccctttcagagtgtgagaatgtaacggctcaaggggacaagcatgacagccggtgcaagcaacctgataaggataggagtggagcagttataactcataccttctttatacagatctcgagctcgcgaaagcttactagtgcatgcgtttctgcattaatgaatcggccaacgcgcggggagaggcggtttgcgtattgggcgctcttccgcttcctcgctcactgactcgctgcgctcggtcgttcggctgcggcgagcggtatcagctcactcaaaggcggtaatacggttatccacagaatcaggggataacgcaggaaagaacatgtgagcaaaaggccagcaaaaggccaggaaccgtaaaaaggccgcgttgctggcgtttttccataggctccgcccccctgacgagcatcacaaaaatcgacgctcaagtcagaggtggcgaaacccgacaggactataaagataccaggcgtttccccctggaagctccctcgtgcgctctcctgttccgaccctgccgcttaccggatacctgtccgcctttctcccttcgggaagcgtggcgctttctcatagctcacgctgtaggtatctcagttcggtgtaggtcgttcgctccaagctgggctgtgtgcacgaaccccccgttcagcccgaccgctgcgccttatccggtaactatcgtcttgagtccaacccggtaagacacgacttatcgccactggcagcagccactggtaacaggattagcagagcgaggtatgtaggcggtgctacagagttcttgaagtggtggcctaactacggctacactagaagaacagtatttggtatctgcgctctgctgaagccagttaccttcggaaaaagagttggtagctcttgatccgacaaacaaaccaccgctggtagcggtggtttttttgtttgcaagcagcagattacgcgcagaaaaaaaggatctcaagaagatcctttgatcttttctacggggtctgacgctcagtggaacgaaaactcacgttaagggattttggtcatgagattatcaaaaaggatcttcacctagatccttttaaattaaaaatgaagttttaaatcaatctaaagtatatatgagtaaacttggtctgacagactagtgcatgccctagggtcgacttaagcaaggattttcttaacttcttcggcgacagcatcaccgacttcggtggtactgttggaaccacctaaatcaccagttctgatacctgcatccaaaacctttttaactgcatcttcaatggccttaccttcttcaggcaagttcaatgacaatttcaacatcattgcagcagacaagatagtggcgatagggttgaccttattctttggcaaatctggagcagaaccgtggcatggttcgtacaaaccaaatgcggtgttcttgtctggcaaagaggccaaggacgcagatggcaacaaacccaaggaacctgggataacggaggcttcatcggagatgatatcaccaaacatgttgctggtgattataataccatttaggtgggttgggttcttaactaggatcatggcggcagaatcaatcaattgatgttgaaccttcaatgtagggaattcgttcttgatggtttcctccacagtttttctccataatcttgaagaggccaaaacattagctttatccaaggaccaaataggcaatggtggctcatgttgtagggccatgaaagcggccattcttgtgattctttgcacttctggaacggtgtattgttcactatcccaagcgacaccatcaccatcgtcttcctttctcttaccaaagtaaatacctcccactaattctctgacaacaacgaagtcagtacctttagcaaattgtggcttgattggagataagtctaaaagagagtcggatgcaaagttacatggtcttaagttggcgtacaattgaagttctttacggatttttagtaaaccttgttcaggtctaacactgccggtaccccatttaggaccacccacagcacctaacaaaacggcatcagccttcttggaggcttccagcgcctcatctggaagtggaacacctgtagcatcgatagcagcaccaccaattaaatgattttcgaaatcgaacttgacattggaacgaacatcagaaatagctttaagaaccttaatggcttcggctgtgatttcttgaccaacgtggtcacctggcaaaacgacgatcttcttaggggcagacatactcttcctttttcaatattattgaagcatttatcagggttattgtctcatgagcggatacatatttgaatgtataaactagtgcatgcaagcttattagtgataccccactctaagaaaatagaccaatctccagctgcaccttcagacactccggtacaaattctcgtctatgttggagattgttgtgactttgaaacatgacccttgaccctgattttgaatttgtccatatatcgaggcaggtgtcttattcgtacggagagggtatctgtcgtagacacatagtagtagtcatttcgagtgctgaatttataaatcgcatcatacttgcgacatactgccataaaaggagtacgtatccaccactacttattgcgcaccaacacgcttcaggtatgcatcccatccctccttctggtactgcttcgccgcctccacgggatcaggagcagcataaattccacggccagcaataataaagtcggcaccgcgtccaacagccgactcaggagtttggtactgctgtcccagcttgtcacccttcgaggagaggttgacacctgtcgtgaagacgacaaaatcttcctcctccgaaggcgagctaacttcagactgaacctcgccaaggtgacgtgtcgagacgaatcccatcacaaacttcttatacttccgagcatagtcaacagaagaagtagtatattgaccggtagccaaagatcccttggaggtcatctccgcaaggatcaaaaggcccctctcggagccgtaggggaagtcctcggccgaagcagtctgggccagagcctcgacgataccctcaccgggcagaatactgcagttgatgatgtgggcccactcagagatacgcagagtgccgccatggtactgcttttggactgtgtttccgatatcgatgaacttgcgatcttcgaagatgaggaaattgtgcttctctgcaagggccttcagaccggtgatggtttcttcgctgaaatcggagaggatatcgatgtgagttttgatcacggcaatgtacggaccgagtcctgttatataatccaccattaaccattactagatcacatgtaagtggcatccccggtgcgcatacggtcagccaaatccagcagctctttggtggttgtcacgtcggcggaaacggtgacattggttttcttggcctcggcaacctcgaagagcttctttacgagcgcattggggtgcttgctagcgcgtgcgctgtaggtcaattgcgacttggaagacatggtgccgcggcaatgaggatcatctgttagccattccatcaacaggaagaacgagagaaggcatgatccttttcgctggtattatccagatcaagttttagccgtataatctcagaacgaacccagtccatcgatgccatgtccttctagactaggatcctagagtctagggcccagcttagggagggcatgtgaatgcatcgatgactgggaacgaacaccggcccacgccaaagacgttacctaagataccttgatcattgtgagagtccagccaaaagtattccatgacttccatcgtatgccctctagagggctaatcgaggagtgtatttacattgtcggttggtttgggaactatagaagatggtcagttattccaatcaccaaaggtttatcgaagggaggaagacttgttcagtttcgtccgaggacttttggaattcaaatctgagatagagaattgtgtgggatgagaggaaaaggaagaagatggtggggttcagaaggaggggttgagttaaatagcatgggttgagtcaacgtgataagggcactataccgtatagatcagcggcacccgattctatccgttccttttgctcctctttagctttgaccggtgagccggacaagaaacaagtgaaatcatcctgacatcggcggacgatctcctagcttttacatttcgttaccaatgggatcccgtaatcaattgcccgtctgtcagatcgaggaatggtggatcatctgatccactatataacatagtactctgtccacggttagttaacatttatccaaaaacagaaaatctccacgactggaaccttttcaatagtgaaacctaagtattagcaaataatcgttacccccactcgcactccataatccttgatccagttctttttctttccgactttctcgactttctccgccctttcctgtaagctgtcaagagagaacgcggcgacagccacatcgttgttgcatttcactttgagacgcagcatatcgcactcgtctttcttcttcacaatggattcccattcagtttccaatcggatcctccaatgcatgtccgacacgcggccggatggatgcacgtctccaattagggtcgctacccgacccaagtactgacaccaccatgcctcctgcttagagacacaccggctcaattgccggtgaaattcttcatcggtgggtgcaaggtcccctgcccagcgctcacagagtatcaaggcaatcagggcacgttcggtgtgtgatagtgtatttaccgaaggcgcgccttccgttaaattgccgtcgtcagccgttaaattaccgattaatcccgataaatttccgagatctccgttaaattgccgttcgcagccgttaaattaccggggacgaccgataaatttccgcgatgaattcatggtgttttgatcattttaaatttttatatggcgggtggtgggcaactcgcttgcgcgggcaactcgcttaccgattacgttagggctgatatttacgtaaaaatcgtcaagggatgcaagaccaaaccgttaaatttccggagtcaacagcatccaagcccaagtccttcacggagaaaccccagcgtccacatcacgagcgaaggaccacctctaggcatcggacgcaccatccaattagaagcagcaaagcgaaacagcccaagaaaaaggtcggcccgtcggccttttctgcaacgctgatcacgggcagcgatccaaccaacaccctccagagtgactaggggcggaaatttatcgggattaatttccactcaaccacaaatcacagtcgtccccggtaatttaacggctgcagacggcaatttaacggcttctgcgaatcgcttggattccccgcccctggccgtagagcttaaagtatgtcccttgtcgatgcgatgtatcacaacatataaatactagcaagggataccatacttggaggatagcaaccgacaacatcacatcaagctctcccttctctgaacaataaaccccacagaaggcatttcaccatgatgttgggcgttgtccgccgcctcgggctcggcgcccttgctgccgcagctctgtcttctctcggcagtgccgctcccgccaatgttgctattcggtctctcgaggaacgtgcttcttctgctgaccgtctcgtattctgtcacttcatgattggtattgttggtgaccgtggcagctcagcagactatgatgatgacatgcaacgtgccaaagccgctggcattgacgcattcgctctgaacatcggcgttgacggctataccgaccagcaactcgggtatgcctatgactctgccgaccgtaatggcatgaaagtcttcatttcattcgatttcaactggtggagccccggtaatgcagttggtgttggccagaagattgcgcagtatgccagccgtcccgcccagctgtatgttgacaaccggccattcgcctcttccttcgctggtgacggtttggatgtaaatgcgttgcgctctgctgcaggctccaacgtttactttgtgcccaacttccaccctggtcaatcttccccctccaacattgatggcgccctcaactggatggcctgggataatgatggaaacaacaaggcacccaagccgggccagactgtcacggtggcagacggtgacaacgcttacaagaattggttgggtggcaagccttacctagcgcctgtctccccttggtttttcacccattttggccctgaagtttcatattccaagaactgggtcttcccaggtggtcctctgatctataaccggtggcaacaggtcttgcagcagggcttccccatggttgagattgttacctggaatgactacggcgagtctcactacgtcggtcctctgaagtctaagcatttcgatgatggcaactccaaatgggtcaatgatatgccccatgatggattcttggatctttcaaagccgtttattgctgcatataagaacagggatactgatatatctaagtatgttcaaaatgagcagcttgtttactggtaccgccgcaacttgaaggcattggactgcgacgccaccgacaccacctctaaccgcccggctaataacggaagtggcaattactttatgggacgccctgatggttggcaaactatggatgataccgtttatgttgccgcacttctcaagaccgccggtagcgtcacggtcacgtctggcggcaccactcaaacgttccaggccaacgccggagccaacctcttccaaatccctgccagcatcggccagcaaaagtttgctctaactcgcaacggtcagaccgtctttagcggaacctcattgatggatatcaccaacgtttgctcttgcggtatctacaatttcaacccatatgttggcaccattcctgccggctttgacgaccctcttcaggctgacggtcttttctctttgaccatcggattgcatgtcacgacttgtcaggccaagccatctcttggaaccaaccctcctgtcacttctggccctgtgtcctcgctgccagcttcctccaccacccgcgcatcctcgcctcctgtttcttcaactcgtgtctcttctccccctgtctcttcccctccagtttctcgcacctcttctccccctccccctccggccagcagcacgccgccatcgggtcaggtttgcgttgccggcaccgttgctgacggcgagtccggcaactacatcggcctgtgccaattcagctgcaactacggttactgtccaccgggaccgtgtaagtgcaccgcctttggtgctcccatctcgccaccggcaagcaatgggcgcaacggctgccctctaccgggagaaggcgatggttatctgggcctgtgcagtttcagttgtaaccataattactgcccgccaacggcatgccaatactgttagtgaaaatggtgatcgacacctggcggtagacaatcaatccatttcgctatagttaaaggatggggatgagggcaattggttatatgatcatgtatgtagtgggtgtgcataatagtagtgaaatggaagccaagtcatgtgattg

SEQ ID NO: 156 - DNA, 11893 bp, Salipaludibacillus agaradhaerens
  source 1..11893: mol_type = unassigned DNA
ctagagcggccgccaccgcggtggagctccagcttttgttccctttagtgagggttaattgcgcgcttggcgtaatcatggtcatagctgtttcctgtgtgaaattgttatccgctcacaattccacacaacatacgagccggaagcataaagtgtaaagcctggggtgcctaatgagtgagctaactcacattaattgcgttgcgctcactgcccgctttccagtcgggaaacctgtcgtgccagctgcattaatgaatcggccaacgcgcggggagaggcggtttgcgtattgggcgctcttccgcttcctcgctcactgactcgctgcgctcggtcgttcggctgcggcgagcggtatcagctcactcaaaggcggtaatacggttatccacagaatcaggggataacgcaggaaagaacatgtgagcaaaaggccagcaaaaggccaggaaccgtaaaaaggccgcgttgctggcgtttttccataggctccgcccccctgacgagcatcacaaaaatcgacgctcaagtcagaggtggcgaaacccgacaggactataaagataccaggcgtttccccctggaagctccctcgtgcgctctcctgttccgaccctgccgcttaccggatacctgtccgcctttctcccttcgggaagcgtggcgctttctcatagctcacgctgtaggtatctcagttcggtgtaggtcgttcgctccaagctgggctgtgtgcacgaaccccccgttcagcccgaccgctgcgccttatccggtaactatcgtcttgagtccaacccggtaagacacgacttatcgccactggcagcagccactggtaacaggattagcagagcgaggtatgtaggcggtgctacagagttcttgaagtggtggcctaactacggctacactagaaggacagtatttggtatctgcgctctgctgaagccagttaccttcggaaaaagagttggtagctcttgatccggcaaacaaaccaccgctggtagcggtggtttttttgtttgcaagcagcagattacgcgcagaaaaaaaggatctcaagaagatcctttgatcttttctacggggtctgacgctcagtggaacgaaaactcacgttaagggattttggtcatgagattatcaaaaaggatcttcacctagatccttttaaattaaaaatgaagttttaaatcaatctaaagtatatatgagtaaacttggtctgacagttaccaatgcttaatcagtgaggcacctatctcagcgatctgtctatttcgttcatccatagttgcctgactccccgtcgtgtagataactacgatacgggagggcttaccatctggccccagtgctgcaatgataccgcgagacccacgctcaccggctccagatttatcagcaataaaccagccagccggaagggccgagcgcagaagtggtcctgcaactttatccgcctccatccagtctattaattgttgccgggaagctagagtaagtagttcgccagttaatagtttgcgcaacgttgttgccattgctacaggcatcgtggtgtcacgctcgtcgtttggtatggcttcattcagctccggttcccaacgatcaaggcgagttacatgatcccccatgttgtgcaaaaaagcggttagctccttcggtcctccgatcgttgtcagaagtaagttggccgcagtgttatcactcatggttatggcagcactgcataattctcttactgtcatgccatccgtaagatgcttttctgtgactggtgagtactcaaccaagtcattctgagaatagtgtatgcggcgaccgagttgctcttgcccggcgtcaatacgggataataccgcgccacatagcagaactttaaaagtgctcatcattggaaaacgttcttcggggcgaaaactctcaaggatcttaccgctgttgagatccagttcgatgtaacccactcgtgcacccaactgatcttcagcatcttttactttcaccagcgtttctgggtgagcaaaaacaggaaggcaaaatgccgcaaaaaagggaataagggcgacacggaaatgttgaatactcatactcttcctttttcaatattattgaagcatttatcagggttattgtctcatgagcggatacatatttgaatgtatttagaaaaataaacaaataggggttccgcgcacatttccccgaaaagtgccacctaaattgtaagcgttaatattttgttaaaattcgcgttaaatttttgttaaatcagctcattttttaaccaataggccgaaatcggcaaaatcccttataaatcaaaagaatagaccgagatagggttgagtgttgttccagtttggaacaagagtccactattaaagaacgtggactccaacgtcaaagggcgaaaaaccgtctatcagggcgatggcccactacgtgaaccatcaccctaatcaagttttttggggtcgaggtgccgtaaagcactaaatcggaaccctaaagggagcccccgatttagagcttgacggggaaagccggcgaacgtggcgagaaaggaagggaagaaagcgaaaggagcgggcgctagggcgctggcaagtgtagcggtcacgctgcgcgtaaccaccacacccgccgcgcttaatgcgccgctacagggcgcgtcccattcgccattcaggctgcgcaactgttgggaagggcgatcggtgcgggcctcttcgctattacgccagctggcgaaagggggatgtgctgcaaggcgattaagttgggtaacgccagggttttcccagtcacgacgttgtaaaacgacggccagtgagcgcgcgtaatacgactcactatagggcgaattgggtaccgggccccccctcgaggtcgacggtatcgataagcttgatatcgaattcctgcagcccaacaaagaatacaagaaaatatttacaaaaaatcaatttaacaattccttaaaacatgcaggaattgacgatttaaacaatattagctttgaacaattcttatctcttttcaatagctataaattatttaataagtaagttaagggatgcataaactgcatcccttaacttgtttttcgtgtgcctattttttgtgaatcgacctgcaggcatgcaagcttaagcgagttggaatttaaatatgatatctacattatcagcagtaacatcaacctttgatacaaggttgttgacgattttctttttattatcatatgatagttcattaatcggaattgagcccaactgagttttaactaactcaaaaacatcagtagagtcattaaatttattttcgctaatcttagctttaagcagctttttctcagcctgaagggaatcagtacgatctttcaactcatccatagtgataaaatcatttaggtacaaatcagagttcttttgtatttttttatcgatctgtgaaatttgctttttaaatgacgaagtatcaagaataggttggttgttgccattgataattttcaataaggagtcattattttcttgaaatccaatcaggttgtcaataacagtattttctaaattacttaaatcataagttcctgaatcacactttttattgtcattatatactgtaattccttttgtttttcgaggaaatctatttgcacagtgatatttcatagtgcggcttccatcttttcttttgtggccaagaacaatttttaaaggtgctccacagtaaccgcaccttgccatccctgacagcatatatttagcttggaaaggtctagggttgttatttctttcataagtctgctgttgtctttcttctagctctttttgaacttttaaataagtctcataagggataattggtttgtgcataccttcaaataggctgtccttaaatttgatataaccacagtaaactggattatcaagtgtttgtcttagggtacgataagaccacggtatatctttaccgatgtgtccagattcattgagtttatctcttaattttgtaagtgatattcctgataaataatcagtgaatatttgttcaactattgtagcttgtaaaggaacaatttctaatatacctgtctttctgttgtggtaatacccaaaagctgtcttagtccacatcatagacttaccagatttcgctcgccctagtttacccatagtcatgcgttcttttatattctctctttcaaactcattaattgcagaaagaatagtgagaaacaagctacccatagcagaagaagtatcaatactttcattaagcgagataaagtctattttattttttgtgaacacatccttaacaagataaagagtatctcttacactacgtgaaaggcggtctagcttatatacaagaactgtatcaaaagctttattctcgatatcgttgattaatctttgcattgctgggcgttcaagtttggcccctgaaaaaccagcatcagtataagtatcagatacttgccaccccattgcttcagcatattttgttaaacggtcaatttgctcatcaattgagaacccttcctctgcttggttagtagtggatactcgtgtatagattgctactttcttagtcatgagatttcccccttaaaaataaattcattcaaatacagatgcattttatttcatatagtaagtacatcacctattagtttgttgtttaaacaaactaacttattttcatcttatataacctcgtcagtattttcaatattttttttagttttttatgaacacattagatttaataaagggaagattcgctatgtactatgttgatacttaatttaaagattaaacaaatggagtggatgaagtggatatcgctgatcaaacctttgtcaaaaaagtaaatcaaaagttattattaaaagaaatccttaaaaattcacctatttcaagagcaaaattatctgaaatgactggattaaataaatcaactgtctcatcacaggtaaacacgttaatgaaagaaagtatggtatttgaaataggtcaaggacaatcaagtggcggaagaagacctgtcatgcttgtttttaataaaaaggcaggatactccgttggaatagatgttggtgtggattatattaatggcattttaacagaccttgaaggaacaatcgttcttgatcaataccgccatttggaatccaattctccagaaataacgaaagacattttgattgatatgattcatcactttattacgcaaatgccccaatctccgtacgggtttattggtataggtatttgcgtgcctggactcattgataaagatcaaaaaattgttttcactccgaactccaactggagagatattgacttaaaatcttcgatacaagagaagtacaatgtgtctgtttttattgaaaatgaggcaaatgctggcgcatatggagaaaaactatttggagctgcaaaaaatcacgataacattatttacgtaagtatcagcacaggaatagggatcggtgttattatcaacaatcatttatatagaggagtaagcggcttctctggagaaatgggacatatgacaatagactttaatggtcctaaatgcagttgcggaaaccgaggatgctgggaattgtatgcttcagagaaggctttattaaaatctcttcagaccaaagagaaaaaactgtcctatcaagatatcataaacctcgcccatctgaatgatatcggaaccttaaatgcattacaaaattttggattctatttaggaataggccttaccaatattctaaatactttcaacccacaagccgtaattttaagaaatagcataattgaatcgcatcctatggttttaaattcaatgagaagtgaagtatcatcaagggtttattcccaattaggcaatagctatgaattattgccatcttccttaggacagaatgcaccggcattaggaatgtcctccattgtgattgatcattttctggacatgattacaatgtaattttttatggaatggacagctcatctttaaagatgagtttttttattctaggagtatttctgaattcgagctcgttattaatctgttcagcaatcgggcgcgattgctgaataaaagatacgagagacctctcttgtatcttttttattttgagtggttttgtccgttacactagaaaaccgaaagacaataaaaattttattcttgctgagtctggctttcggtaagctagacaaaacggacaaaataaaaattggcaagggtttaaaggtggagattttttgagtgatcttctcaaaaaatactacctgtcccttgctgatttttaaacgagcacgagagcaaaacccccctttgctgaggtggcagagggcaggtttttttgtttcttttttctcgtaaaaaaaagaaaggtcttaaaggttttatggttttggtcggcactgccgacagcctcgcagagcacacactttatgaatataaagtatagtgtgttatactttacttggaagtggttgccggaaagagcgaaaatgcctcacatttgtgccacctaaaaaggagcgatttacatatgagttatgcagtttgtagaatgcaaaaagtgaaatcagctggactaaaaggcagagctcggtaccagatctaaagataatatctttgaattgtaacccccctcaaaagtaagaactacaaaaaaagaatacgttatatagaaatatgtttgaaccttcttcagattacaaatatattcggacggactctacctcaaatgcttatctaactatagaatgacatacaagcacaaccttgaaaatttgaaaatataactaccaatgaacttgttcatgtgaattatcgctgtatttaattttctcaattcaatatataatatgccaatacattgttacaagtagaaattaagacacccttgatagccttactatacctaacatgatgtagtattaaatgaatatgtaaatatatttatgataagaagcgacttatttataatcattacatatttttctattggaatgattaagattccaatagaatagtgtataaattatttatcttgaaaggagggatgcctaaaaacgaagaacattaaaaacatatatttgcaccgtctaatggatagaaaggaggtgatccagccgcaccttatgaaaaatcattttatcagtttgaaaattatgtattatggccacattgaaaggggaggagaatcatgattaaaattaacaagactattaaaatccttatgttgacgttactaatgatgtctttcgcgggtgcggcatatgcacataatccagtaacagatgaagaagtctatcattcgtttaacagtcatgattggcaaaactggaatatgtctgacggttggaaaaatgatgattactttttcgggtgtcattggagtcagaacagagttaacttttatggtgggcaaatggagttgtcactgcgtacaaactattcatacgcacctccttacaactatgagtgtgcggagtatacgaccaataatttttatggatatggattatacgaggtatctatgaaaccagcaaaggtatcaggggtcatttcttctttcttcacgtatacagggccttcctataatggagccccttgggatgaaattgacattgaatttttaggaaacgacacgactaaggttcaattcaattattacacagatggcgtaggagggaatgaaatactttatgacttaggattcgatgcagcggatagttataatacgtatgcattcgattggcaagaaaattatattaattggtatgttaatggccaacttgttgcaacagcaacggaaaacatacctagtaatcctagtaaaattatgatgaacatttggaatacgtatggtattgacgagtgggcaggaaggtattatggagaggatgccaatgcttcatataattgggttcgctatacacctaaccgttaaacgcgtaagctagcggccgcgtcgactagaagagcagagaggacggatttcctgaaggaaatccgtttttttattttgcccgtcttataaatttcgttgtccaactcgcttaattgcgagtttttatttcgtttatttcaattaaggtaactaaagatcctctagttctagaaaatgaatacggtaaggaaaatatgctgtatgcgactgtccatctggatgaaagagtcccacatatgcactttggttttgtccctttaacagaggacgggagattgtctgcaaaagaacagttaggcaacaagaaagactttactcaattacaagatagatttaatgagtatgtgaatgagaaaggttatgaacttgaaagaggcacgtccaaagaggttacagaacgagaacataaagcgatggatcagtacaagaaagatactgtatttcataaacaggaactgcaagaagttaaggatgagttacagaaggcaaataagcagttacagagtggaatagagcatatgaggtctacgaaaccctttgattatgaaaatgagcgtacaggtttgttctctggacgtgaagagactggtagaaagatattaactgctgatgaatttgaacgcctgcaagaaacaatctcttctgcagaacggattgttgatgattacgaaaatattaagagcacagactattacacagaaaatcaagaattaaaaaaacgtagagagagtttgaaagaagtagtgaatacatggaaagaggggtatcacgaaaaaagtaaagaggttaataaattaaagcgagagaatgatagtttgaatgagcagttgaatgtatcagagaaatttcaagctagtacagtgactttatatcgtgctgcgagggcgaatttccctgggtttgagaaagggtttaataggcttaaagagaaattctttaatgattccaaatttgagcgtgtgggacagtttatggatgttgtacaggataatgtccagaaggtcgatagaaagcgtgagaaacagcgtacagacgatttagagatgtagaggtacttttatgccgagaaaactttttgcgtgtgacagtccttaaaatatacttagagcgtaagcgaaagtagtagcgacagctattaactttcggttgcaaagctctaggatttttaatggacgcagcgcatcacacgcaaaaaggaaattggaataaatgcgaaatttgagatgttaattaaagacctttttgaggtctttttttcttagatttttggggttatttaggggagaaaacataggggggtactacgacctcccccctaggtgtccattgtccattgtccaaacaaataaataaatattgggtttttaatgttaaaaggttgttttttatgttaaagtgaaaaaaacagatgttgggaggtacagtgatagttgtagatagaaaagaagagaaaaaagttgctgttactttaagacttacaacagaagaaaatgagatattaaatagaatcaaagaaaaatataatattagcaaatcagatgcaaccggtattctaataaaaaaatatgcaaaggaggaatacggtgcattttaaacaaaaaaagatagacagcactggcatgctgcctatctatgactaaattttgttaagtgtattagcaccgttattatatcatgagcgaaaatgtaataaaagaaactgaaaacaagaaaaattcaagaggacgtaattggacatttgttttatatccagaatcagcaaaagccgagtggttagagtatttaaaagagttacacattcaatttgtagtgtctccattacatgatagggatactgatacagaaggtaggatgaaaaaagagcattatcatattctagtgatgtatgagggtaataaatcttatgaacagataaaaataattacagaagaattgaatgcgactattccgcagattgcaggaagtgtgaaaggtcttgtgagatatatgcttcacatggacgatcctaataaatttaaatatcaaaaagaagatatgatagtttatggcggtgtagatgttgatgaattattaaagaaaacaacaacagatagatataaattaattaaagaaatgattgagtttattgatgaacaaggaatcgtagaatttaagagtttaatggattatgcaatgaagtttaaatttgatgattggttcccgcttttatgtgataactcggcgtatgttattcaagaatatataaaatcaaatcggtataaatctgaccgatagattttgaatttaggtgtcacaagacactcttttttcgcaccagcgaaaactggtttaagccgactgcgcaaaagacataatcgattcacaaaaaataggcacacgaaaaacaagttaagggatgcagtttatgcatcccttaacttacttattaaataatttatagctattgaaaagagataagaattgttcaaagctaatattgtttaaatcgtcaattcctgcatgttttaaggaattgttaaattgattttttgtaaatattttcttgtattctttgttaacccatttcataacgaaataattatacttttgtttatctttgtgtgatattcttgatttttttctacttaatctgataagtgagctattcactttaggtttaggatgaaaatattctcttggaaccatacttaatatagaaatatcaacttctgccattaaaagtaatgccaatgagcgttttgtatttaataatcttttagcaaacccgtattccacgattaaataaatctcattagctatactatcaaaaacaattttgcgtattatatccgtacttatgttataaggtatattaccatatattttataggattggtttttaggaaatttaaactgcaatatatccttgtttaaaacttggaaattatcgtgatcaacaagtttattttctgtagttttgcataatttatggtctatttcaatggcagttacgaaattacacctctttactaattcaagggtaaaatggccttttcctgagccgatttcaaagatattatcatgttcatttaatcttatatttgtcattattttatctatattatgttttgaagtaataaagttttgactgtgttttatatttttctcgttcattataaccctctttaatttggttatatgaattttgcttattaacgattcattataaccacttattttttgtttggttgataatgaactgtgctgattacaaaaatactaaaaatgcccatattttttcctccttataaaattagtataattatagcacgagctctgataaatatgaacatgatgagtgatcgttaaatttatactgcaatcggatgcgattattgaataaaagatatgagagatttatctaatttcttttttcttgtaaaaaaagaaagttcttaaaggttttatagttttggtcgtagagcacacggtttaacgacttaattacgaagtaaataagtctagtgtgttagactttatgaaatctatatacgtttatatatatttattatccggaggtgtagcatgtctcattcaattttgagggttgccagagttaaaggatcaagtaatacaaacgggatacaaagacataatcaaagagagaataaaaactataataataaagacataaatcatgaggaaacatataaaaattatgatttgattaacgcacaaaatataaagtataaagataaaattgatgaaacgattgatgagaattattcagggaaacgtaaaattcggtcagatgcaattcgacatgtggacggactggttacaagtgataaagatttctttgatgatttaagcggagaagaaatagaacgattttttaaagatagcttggagttt

SEQ ID NO: 157 - DNA, 2429 bp, Trichoderma atroviride
  source 1..2429: mol_type = unassigned DNA
ttggacgttaccataaagagaagcttcttttcaagatcggcattcggtccgaatgacatgcttgctgctgtaaagtaccaaacgggcaagtgttgtgatactataactttacgatatcgacgacgtcttcatatcaccacacatagctttcattcacaattgatgctagactgtttgatgtagagtatgtatgtcacgaagactctcaaaggctctgaaggaccatacttgaagatgaaaatttggcaattaatgtattagatatcaagatatttccagcggttatgcatgcgaaagccgacggatatttcatattgactgacacgtctttaagaagatgtttgacaaatgatcgacacgcccagaaatgtcgatcccgagaattgttcattacctattcagcccactactatatagagcatagaaatctccccagataaccacagctcttcaggccatctgccactcattccaagtaattcttcaagggctctatcaagatgttgtctgcatatgccttttcgctgctagtagcttcagccagcgcctggactcctcagtccaacgcaaagggtcagtaaaggctcaaatcacagatggtctattggacaacagcttacgaatgacacagtcttcagccgagataccgaaggcgtcatgagatggctacccggcaacgacaagttccgcggtgtcaacctcggctcgcagttcatcattgaaccatggatggcttctgatgagttctcaggcatgggctgtggcggactcaacgacgaatggtcttgcgtccaaagcctcggccaggatgctgctgacgccgccttccagaagcactgggacagctggatcactcaagacgacatcacccagatcaagaatctgggactcaacacagtccgtatcccagttggcttctggatccgcgaagaccttgttcaacaaggcgaattcttccctcgaggaggtattcagtacctggaccgtctagtcggatggtgcaatgacgcaggcatctatgtcattatggatcttcacggcggccctggagcgcagttccctaaccagcaatacactggccatgtaagagaagcagtccgatgccttgaattcttcaagttctcgactaatagtatatcaatagggagtctcacagcctgggttctacaccgaggcaaactacgaacgagcagccaacttcctagagtggatgactgagcgcattcacaccaacgccacctatgcatccgtcggcatgctagaagtcatcaatgagcccgtccactctggtgatttccccagccaagctgctgacatggtcaacacttactatcctctcgcctggaaccgcatccgtgatactgaaagcaaactgggcgtctctgacgataagcgccttcatatccaattcatggttcgtcctcctccctagctatcaaatgcctttgatcaacagcctttgatcaacaagacaagctaacaaactcgcaataacaggcctcggcctggggctccggagacccaaccagcgccctccccagcaccgacttcgccgccttcgacgaccaccgctacctcaaatgggacaccagcgtcaccgccactaaagacggctatctcaacgccgcctgcagcgacaagcgcgacgacaacgtcatcgtcggcgagtggtccatctccgtcgccgacaacgtccaggacaacgacgagctcggcatcaagaaccgctccgaccaggccgactggtaccagaagttctgggccgcccaggtgctcgcctttgagaagtcggccggctgggtcttttggacgtggaagtgcaactggatcacgggatatgatgactggaggtggtgctatcagtctgctgttgcggcgggtgcgattcccaaggacgcaggcagcgcggctagcattaacccgtgttaagaagcagccgttgggttcattttgatgtatgaaatggaagcttttgtgggcgattatggctatactattatataatttgcttcttgcatgtagacgtacctgtgatgtaagcacaactatgaaaagtatcacgaaactttgccttctaagagcacatatgaagtgaaaaaatatttatatcaattgaacagagttaatctgtcctaaaaatctcaaaaacccccatggggtgcctcatcagccacccagtgtttaaatcatcgtgtccaagtaacgtttcaaatctccatttcatcgagtaacttcttctagctgttcaaccacccaagcccagaaatatgacattcctcatattcaacctctctgcgtagtggaataggctggatcgcctggcccttgatcggtcaagggtggttcggtaggtagaacaatgataacgtagtgctcttcatcgcagtatgcgcacttgtcggcattgcctttctcgaccactatgacgc

SEQ ID NO: 158 - DNA, 3391 bp, unidentified
  source 1..3391: mol_type = unassigned DNA
agtagagtatgaggacaacacgattttgactgagagtactatcagctttagacttgccttttattgctcttttgtctatgctcaatgttatatcggtggggtgaatgcaatccaccccgcagcctgcccagtcacaattggacatggctgcctcgacctttgatgtccccgacattccaccatcccctccggagtaattcacgccacaccaagtgatgcctctttggataatgaagctgacaattgggctagatccgggccgaatggtagtcgaatctgatgcggagttgtgggctgaccggcagactcttaacgggactacgatggatgcatgcatgaacagtatgtgaggggtgtcgaagacaacaagactcgaattcagcaggggtcttatactcggaggcggtgattgaagtataaagaggcggatattcctccgtcgtgggtgctgtcctgtcgatcgtccttcatccagcatctgttgatcattgaccggcatcatgttgaagctcacggcgctcgttgcgctcttgctgggcgcggcgtctgctacgccgactcctagccctcctgccagcgatgagggcatcacaaagcgtgccaccagcttctattaccccaacatggaccatgtcaatgcgcccaggggtttcgctcctgacctggatggcgacttcaactacccaatctatcagactgtcaacgcaggagatggaaatgctctccagaatgctatcaccactgatggaaagggtggctctcgtcacccacagtggtttgcttcacagccacgagtatgactttgatgtaaattcttgtacaaacgggtatctaacgttagtgtccaggttgtttacattcccccgggaacatatactatctccaagactctgagattcaacactgataccattttaatgggtgacccaactaatcctcccattattaaggctgctgccggtttctcgggcgatcagactcttatcagtgctcaagacccctccaccaacgagaagggagagctttctttcgccgtagctattaagaacgtggtattggacactacggctataccaggtggaaattcatttactgccctatggtggggtgttgctcaagctgcgcatctgcagaatgtacgcattactatgagttcctcttcgggtggaaacggccataccggcatccggatgggtcgcggctcaacactcggcctcgccgacgttcgcgttgaacgcggccagaacggtatttggattgatggccatcaacaagccagcttccacaacatttacttttttcaaaatacgatcggcatgctcatcagcggcggcaataccttcagcattttctcgtcgaccttcgacacctgtggaaccggcatttccaacactggcggttcaccctggattgccctgattgatgcaaagtcaatcaactctggtgttacctttacaactaatcagtttccttcatttatgattgagaatctgactaaagataatggcacacctgttgttgttgtccgaggctcaactttggttggcgcttctagccatgtcaacacttactcttacggcaacaccgtgggcagaaaccctacttacggcgatgttacatctagtaacactagacctggtgctcttgctcctggtggtcgttacccttatgtggctccccctacttatggagatctgcccatctcgagcttcctcaacgtcaaggatccagcgcagaacggcgggaggacggtcaaaggagataacacgatcgatgaggcagccacgctcaatgccatcctggaacttgcagcaagccagaataaggttgcttattttccttttggcaagtaccgggtggattccactctttttatccctaagggttcccgcatcgtgggtgaggcttgggccaccatcaccggcaacggcaactttttcaagaacgaaaacagcccacaacccgttgtctcagttggtcgtgcaggcgatgttggaattgcacagattcaagacatgcgttttaccgttaatgacgttctttcaggagccatcgtcgttcagttcaatatggctggcaacaaccctggtgatgttgctctttggaactctttggtcaccgttggtggcacacgaggtgcttcagctttggctaatgcttgtaccaacaatagcaatgaatgtaagggtgctttcattggtatccacgtggcgaagggatcatctccttacatccaaaacgtttggaactgggttgcggatcacatcgctgagaacttcagtggcggcacttcaattgctggtaaaggcggaattttggtgcagtctacgaaggcaacctggctttatgcgataggaagtgagcattggtggttgtatcaactcaatcttcacaatgccgccaacgttgttgtgtctctgctccaggcggagaccaactaccaccaaggcgccaacacgcagcagattcctcccgccccctgggttgcaaatattggtacttggggcgatcctgatttcgcttggtgcaacggtggtgataaaagatgccgtatgggccctgcaaacttcatcaacggaggttccaacatctacacatatgcctccgcggcatgggcgttcttcagcggccctggccagggctgcgctcaattcgaatgtcaacgtaagctctgatatctctttcatttcttagaatatgactaacattgaataacagaaaccatgcactggattgccagcacccccagcaaccttcaggcttttggactctgctccaaggattccgtcaacacactgcgtctgggtgatggcacattcatcaacacccagaatggatacactggcggctggactcctggcggtggtgatgttggccgttatactacttaattgacgcttcgaatgagctcaacatcttgagctagaacgtagtgtatgaagagccacatataacgcgctatggagatggctgcgcaaaaaagtcatccatttgtacatatctatttagttgtcaatatgaatatatgcacatacaacttctcaagttgtcaaagagacaagacatagaatctcttcataactcaaccaaacggcggcatcacttctcacctggaactataacaagctacctaatcacaggactgctgtaacttgatctttcgacagttttcaatttctattagcttgaggtgaaattggtctcttccaaatcgtctattatgtgtcctctttcgaagcgcggacttaccactacaagcctaagcaagaatgatcattttgttgttaattttgagtctctgcatgatgagagtatagtggtcggagcgataaacaaggccgcaagtaatgttttggaattattattctgtatagaatgatggattcatatg

SEQ ID NO: 159 - DNA, 1400 bp, Alkalihalobacillus bogoriensis
  source 1..1400: mol_type = unassigned DNA
gccctaataatggaataaatgtccgataaaaaaactcttatctcccccatctgggtaaagaaacgatgaaaccgactaatcttacttattaattgcatctaaagcaaaccaactgttaacctgtaagtaagaaaccatacaggaggaaggaaatgaaaaatctactgatcgcatttttgcttatcctttttgttacaggatgcgctgaacccgaacaacagcaaacagaagaagccacagacaatatagaagaaacacaagaagaattagaagtcaacgaagaaccgattgtcatagccgacaaccttgatatcccatggtctattgaaaaagcaggagacacattttatataacagaaagaggcggacatattgttaaagtagaaaatggggcaatggaacgacaaaccgttcacctagaacaagagctttcctctgtcccagaagcagggttactagggtttgtgttaaaccccaacttccctgacactaaccttgcttatgcatactacacttacgaaaaaaatgccgacccttataatcggattgttacgcttcgctatgaaaatgaccaatggcaagaggaaaatattcttcttgataacatcccaagtggtacatatcatcatggaggacggttaaagattggtccagacggattcctttatgctacaacgggtgatgcatcgattcccgagattgcacaagacattgactcattaggagggaaaataattagagttgaattagatggagcaattcctgaggataacccttttgcaaattcttctatttatagtttcggccatcgaaatccccaagggttaacatgggcaatagacggctctttttattcaagtgaacatggaagtagcgctaatgatgaaatcaatgaaattgaacccggactcaattacggttggcccattatccaaggagacgaagaaagagaaggtatggttagcccgttattcacatccggaaatgagtcaacatgggcaccatccgggatggattactataataatcggctttatgttgctgcattaagaggagccgctattattgaatttaatcttgaaacaggcgagcatcaagaaatcatcactgacctaggtagaatacgggatataaagatagaggatgatacattatattttatttcaaacaacacagatggtagagggaacccagaagaggatgatgataagctttatcgactttcgctacaagagtgagtttggagaaatcagtccgaatgttttcggactgtacttccctaatgagtaggcgtatatttattgcttccaggaagctttttgattttattccacatatcaatggcttccttcctactttttcctttgtttttcgggtcagcaaaaaaatcacgaataaat

SEQ ID NO: 160 - DNA, 2310 bp, Talaromyces pinophilus
  source 1..2310: mol_type = unassigned DNA
atctttccgatagatctggattacaaccattgcatagggttattgtttcggctacacaagggcgccaccaaccgcaactccaatggctgaacgttagtacctgacgctaatgcacatgagtgtcatccttgtctcccgtgcagcctgtgctagaagacaatactatcatactctgctcctactcgttctcacatgattttttggtcaaacgaaaggggttgtaataatgttggaatgtaacacacacccttacggtccgtccgaagcaatgcatggaatgcgccacggtcatcctatatgctacgtgacgcggaacatgccatgttatgcaatcgattttccgacataatcgagcctgggaaggctgtattcgataaccatgatgttcccacgaacaactgattacgaaacctatataaaaggtttcaatagcccctacacccggtctcgcaaacctgtaggtgatcggagaatcagaagcaaaagaaacaacggctaccatgactttcaagactagctatctagcttctgccttgctcttgctcacagcaagggcctctgcacaaactgcaaatgcggaagcagcattcgcaacacttcaagagtggtacgatcctgtgactgggttgtggaatactgccggatggtggaatggcgccaacgcgatgacagtcattgcggaacttgcagcagttgacgccagcattgtgcaggacgcaatctcaattttcgagacaacctttagtgttgcaccgtcggttaaccctagcaacggagttgaaaagagtgtaggcaccaatgggctcattcaaacaacatacccagctggatggccaaacaatacaatcagtaagcgcgccatacaggattctacagaccctacagtttggctggacggtgcaaatgatgacgccgaatggtggggtttggcctgggtcgctgcgtatgatgttacgggaaacgaaacgtacttgaacttggcagagggcattttcaatgagattgtaagctaaatgctgtcacgccggcgactttctgttagggtaacataaatactgactggcttgtctctgctataggctgccggctggggaaccaattgcggaaacggtggaatttattgggagaccaccaaccactatgtcaacgccattgctagtgaacttttcatttcactggccgcacatcttgcgaaccgcgtgcccgccaatgcggcaacgtataccgcttgggcagaagaggcatggaactggttcgcaagcaccggaatgatcaatgcaaatggcaccatcaatgatggcttaacgactgactgtgtcaacaatggacagccagtgtaggtcttctaagtcccgaattaattgccatcaaggggaaaaaacttacacttattcatagatggtcttataatcaaggtgtcatcctcggaggcttgactgaactcaacaaaatttcacccaatgagtcttacatcgaatcggccaacagtattgctcaagcagccatcgccgcgctcgcagactccaactatgttatccatgattacgcgtgtgaaccttctgactgtgagcccaatggaactcaatttaaaggaatctttatgcggaacctgctactgctgcagcgagcgtcaccaaacgacctctatagcaaggttattgaagcctgcgcagccagtatttgggccaatgatcgtgataccacgaccggcgagcttggtgtgaactgggcaggaccttttgtgggcggcgatgcgacaacacaaagctcagcgatgggtgcattggttgcagctatttctgtcgaataagtggtgactgttgaccaaaataggacttatgacaattggcaaggatcccaatttcgggccggcagcttcgttcagcttcagcctgtataagtatcgcgctaagctgttgtgggaaggccgaaaacgcggggattgcttttccacatttttgcctgtacatattcaattcatgaaatggaacgattcggggggataattgatcctcggagtctggaaacaaacattgacaatagctatgagcctcagatgttgcagtagcaacccaaacaggtagtagtgggtggtaatgaggctgtttggtgatctattcaggggccgtggcgcttttagattgtgtcaacttttcaagtgaagccaaggcccaaaagaaaaacagagaggctagagctaaacgtgacctagcacgctaaccccgttcggcgagtggagtagtcagcaagtcacgtgccagccacagcgtttgccaagaaaaagaaaagacagcctgaccctaaccctgg

SEQ ID NO: 161 - DNA, 1264 bp, Fusarium solani
  source 1..1264: mol_type = unassigned DNA
ttacaagactcaactactatctcgtcgttgttcacataacagctactacctctatactgtccacctccttgacgccctttctcaccccttattcacaatcatggtggccttcagccgtattgctgtcaccactctcgcccttggcggttctgtaagcgctcgtcgtagaggagaatgtcctgctgctgacgctggcaagaccgcacaagccaagcctgccacggcggcgagggctactgggctcgccgacttcaagccaggtgtgcagtgggagatttgtattcatcatcccatcaagcatgatagtgccgcagacttgatcccgaccaaggccaaggtctgggatatcgacatgggccacgctcaggagttccctaacatgatccccatgctcaaggtaagcagacttacttcaacattttggtatggataagccatactaaccagattgcctaacagagcgctggcaaattcgttatttgttacttcaacgccggagcccttcaggactgggatgacgacaagagcaagttccccaaggaggtcatcggtcactccctgtcctacccctacgatagcgaagaatggtacctcgacatccgggactcgcgtgtcctcgagttgcaaacggcacgactagacattgctgccaagatcggctgcgatgccgtcgatcctgacaacgttgacgcctggcaacaagatgacgaagaccccacgggcttcaagctcaagtcttccgactacaccaactacctcaagaacctcgccaagtatgcccactcgatcaagaccaaggacggtcagcccctcctcgtcgggcagaagaacgcccccgagatcgccgaggacctcgtctcgaccctcgactttgccgtgctcgagtcctgccgcggcaacagcgaccccaacgaagagagctggcccttttgcgaggacttccagacctacatcgacgccggcaagcccgtcctccagatcgagtaccccccctcggtggagaagacgggcaaggtcagcgcctcggataacaagtactactgcactgccgaggatgaggacaagggcttcagcaagatcatcaagtgggcttctgctcagcttgatggctggggtcagtactgtggcgaggagcccttccgtactcctgcggccaagtattaaatacatacaaaggctcaagaccttctccctcaggggacttgaaaagtactgttggatctttgacgtgttggacgctccttttgggcattgtatataaatc

SEQ ID NO: 162 - DNA, 1115 bp, Ostropa barbara
  source 1..1115: mol_type = unassigned DNA
ttccataatccataatccattcgtctattcatccctcatctccacctaccatccaaacctcaaaccccaaacctccccaacttttcatccacccgccaaaatggttctcccatcctcaatcctcctccccctctacagtaagcgatttcctctaaacccccctttccaacaccatctaacaaccccccacagtctacccctccgccagcaccccctccccctggcaacccctctacgactccctcggcacccacagcaatatccacttcgacatcatcatcaaccccggctccggcccgctcctcgtgcccccgaccgatatccagctctcggactacatgcccgcgatcgcgaaactgagaacgtataagaatgtggatttgttggggtatgtgcatacatcctggggcctcgcttctcaaagtgatttactggcgaatatctcccgctacgcgaccgtacgtccctcccaccatcctattcctcgaatgacattcactgacgcgaaacttgtagtgggagacggtgaatggacaggatgtgcatcttgatggcctgtttttcgatgaggttgttacggcgtatgatgagacggattacgacctcctttccaccgccacaacattagcacgcacgaccccgaacttcaagaaaatcgtctttaaccccggccaaccggctgatgagcgctattacgcgctcgcgaactacctcaccgttttcgagggcacggctgcggcgttcgacagcagcacagtcgcggcgctggatgttgctacaagggccaatagttcggttgttattcatgatttcacgggcacggaggcggagcaggcggtatgtatttcccctgtggtgtgaagggatgagggttaaggctgatgagaaatagatcctggtgaatgagcttgtgggattgggactgggcagtgtagatgtgacgacgttggcggattataatgattggagtgcgctgtgggcggattttacgggggaggttggggatgcggtatgaagaagggacttttgaggaagcgcttcttcgggcggggttggcattttgggattggggttttggttcggtattaggtgattggagtttcgggttcttggag

SEQ ID NO: 163 - DNA, 1019 bp, Stenocarpella maydis
  source 1..1019: mol_type = unassigned DNA
tgtcttctccctcgcatcacttctcccacggcttacccacaagcacccgtcggtccctaccatacctacttaagtaggtatacttaacacgtgactcaagatgcacagtttctatctcttccctgccgtattagcagcaaccgctgcttccgcaaccaaaatcctgctccctttgtatgtttatccgactacaggagcgggatggactagcatctacaatgccattgagacccacccatccatcgacttccagatcgtcctcaatcccagctccggcccgggcgggtcaactcccggatacaacactcactggatcagtgccgtctcaaagctccattcctatgacaacgtcgacaccttgggttatgtgtctgccggctacggctccagggacctagatgagatcaccaccgacatcaaagactggaaccaatggaaccactacacgggggcagacatcaccatagacgggatattcttcgatgagacgcccaactggaatggcacaaggggcgcaaacgacgtcagcttcatgcagcaggtcacaaagctggcggaccgtggggggtataccaaggtgttcaacctcgggcaggcgtgcagccacgatgagtactttcagatcgccgacacggtcgtcatgttcgagggcgaggccgagtcttacaacagcaccgtgctggacgacgtcgtggagagtggagtggcagacaggtccgccatcctgatccatcattttgaggggagcggtctgacgtcggggttcgccgtgagatgggtcattgaccttgtaaacagggggctcggcagcttcgccatcatcaacacggactggacccaggcaaactcggatgttgcgccgatgggaatcagcatactcgctgatatgctggagtctgtactagaccaccaatactaggttttcctctctataaaaaaaatggcgtttatgcttatggtttttatatcttcgattataaattcagatatgactaacgataaatatttttgtctcatct

SEQ ID NO: 164 - DNA, 1256 bp, Urnula craterium
  source 1..1256: mol_type = unassigned DNA
tcccagtaagtcgtcctacacgtcggacacccattatattcactctttgaaataaaccaaaccaaaccgaagcactctttcactacatactactacaaaaatgacatcgaaaatactctcgttagcattagcaacgctaaacgtcgcatatgcagcaacaacaatctgtagcaccaaatgcccttacacgaatctcggttcttccgatgcagtaacgaaatccgactggtggaaacctgcgcttggtgctacttggcaggttgtgttgacgcctgctgatgatgatgccgggccgcagttgacggacgattatgaaggtctcctcccctcttctctagatttaatctaatctctctcgaattcccttcagctagctaatatgcccctgaaataaatagtctacgaccttgacgtctttgacgtcgacgctagcgtcttcaaatctctacaagcaaaagacaagaaagtgatatgctacttttcggcagggtcctatgaagactggcgcgaggactgtggatgtttcaagtccagtgacttaggttccgaccttgacgggtgggaaggtgaagcttggttgaatactgatagtcagaatgtgaggaatattatggctgcgagacttgatgtggcggtggaaaaaggatgcaatggcgttgatccagataatgttgatgggtatgataatgataacggtatgccttttccctcattcttctgttcaattttattcgacgctgatagaatctctttttcttttttcttttcgggaataggtctgggtttatccgagtccacggcgaaatcgtatctgcagttcttatcagacgaagcacattcaaggggtttagctattggtctaaaaaacgctggaagtattgcggcggatgtagtggatagtatggaatgggaggtcaacgaagagtgtattgcgcaggagaactgtgaagattataagacctttgttgatgccgggaagccggttttcaacattgagtatccgccggaggatcatatcgatgatgcgtggacggaggcggagattgaggagaggtgtgcgcagaaggcggatgctagcaatggtgctaccaagttctcgacggttttgaagaaccatgagaatgtggatgaatggatcagaacttgcagtgagtaggatggctaggtaggggtgggttggttggttgatgttgagggagattgagaagaaaaataaaagggaacaaaactgatgggatttcattacagtcggctct

SEQ ID NO: 165 - DNA, 1166 bp, Bjerkandera fumosa
  source 1..1166: mol_type = unassigned DNA
atgtcgtagacactgcagacggtcgagaacgctctcatttgtcatataaaatggggagggaattggaggggttggtcagtggcattcgcatctgtctgccatgttcaccttcgctaaaatcttcacgacagcttgctccctagcgggactctttgggtccacctttggcacgggaatcatcgtacctttgtacgtttggcctggggatccgaacgtctgttcaggttggacacccctgttcaacgtgtacgcctgccatgtctttacctcaacgccagagcactgacgtagtcgctcagcatctccaccacaccctcgctcacgttctacgtggtcatcaacccgaacagtggtcccggagatccgagcacccagcccgtcgacagctactcgacgtgtattcagcagctcaagggcgccaagtcagggtcaaacctgagggtcttgggctacgtcgccacgggtggtggctcgtcgactacggttgtgagagacatcacgacgtactcggggtggaatgctgcgtacaggccggatggcatattcttcgaccaaggctctacagcgtcctcccaggtatcgacttatgccgggtgggcgaaccaggcgaggcagatcttgggtagctctacctacgtgagtacccgtttcctgattccttagctagcttgtgccaatatttgcgttgtagacaattgtgaatcccggccagcctcctcaggataacgcatatttcaactcctttgaccaaatcgtcacccgagaggacttcttggcccagttcaggtaagaagggatgtgtgcatcacatgtacccgtatctaatctgtttcattccagtccgtcccaactctcgattacgccggccagtccagctgcgaaacaagctgtcatccttaccgacgccttcacgttcccttccagcgtcgtctcgcagctcgtttctggtaatcatatcggctctctttgggtcacggatgacacccaggcgaaccagcagaacccctatgactcactcccgagttacctcactacgtttgtcaacgctgtcgtcgccgacaattaggtgtccctctgtcgagacaaatccaaagtgtagtaattcaatgatcgtggttccatgtacattattagtagttcttgcgtactttgaaacacgtagtagc

SEQ ID NO: 166 - DNA, 956 bp, Pseudoplectania vogesiaca
  source 1..956: mol_type = unassigned DNA
tcattattattactagcttttgaagtaaacccacctcctagcctccacgcttcatatgcatatgaacaacaactgactaaagttagagaacctcactaccatgtccctctctttaagtccagtcgcaactaccggtgttctcctccctctctacatatacccagcccccagtaccgcctgggatcctctctactccgcaatcacaaataacccatccgtaaacttctacgtgataataaaccccgactccggcccaggaggggacgagtttccagccagcgactacatctcagccatccaaaagctaaaaacctacgataccgtcacaccgttaggttatgttcataccacttttggcgaccaaacaacttcggccgtcgaagccaatatcaccaagtacaaaaactgggacacctactcgaccacctccccgatttccgtggatggtatatttttcgacgaagcgccttcttccgctgcagacgttagttacatgacgactttatcaagctcagcaaagacaacgtttggtacgggtcgagattttgttgtgttcaatcctggctcgatagtcgatccgggttatttcaacgctgccgacgctatagttatttttgaaaatacggaagcaacctatagtgagagcgtgtttagttctcagagtggtgggacctcaagacagaaagctgctattatacatgattttactggaagcgagagtgagcagacgagtgttgttgaaggaatggttaaccagcaggcgggattggtttatatcaccgatcagagctcttataattccttctctggattgtggagtagctttgtttcggctcttcaagcggcaatcgcttgagcttgtgttaatttatgagggcatgtgttagcattttggatacatatagcttcagggatgtcatctttggtccgaaccgagactagcgtatgttcttttt

SEQ ID NO: 167 - DNA, 1149 bp, Lysobacter gummosus
  source 1..1149: mol_type = unassigned DNA
atgaagaaaccgttggggaaaattgtcgcaagcaccgcactactcatttctgttgcttttagttcatcgatagcatcagcacatcatcatcaccatcatcctagggctgacgctcgccaagctcttaaccctcgtgctatcgctttctattacaattggtacggatctccaaagcttgacggtgcacctttacactgggctcacgatgttcttcgtgagaacgaccgcgatcgtactactaaacgccttcctggaaatggtgacatctcagccaacttctacccacaacttggtgagtattcatcagcggacccagctgttattgaacgtcacatggctatgattgcttcagctcgtatcggtgtaattgctgttacttggcttggcgttgatgacccttcattcaaatcacttcgtcctcttttcgaagcggctcagcgtcacggcgttcgcatctgtttccaaattgaacctgttgctcgcaaaactgcagcagatgctcgtgcgtcaatccgttatcttgtagaaacttttggtgcgcacccagcattctatcgcgatccggtttctaaacgtcctttgtttttcgtttacgattcatacgttatcgacgctaaagactgggcacaagtattaggccgtgatggcgctgattctattcgcggaacagctttcgatgctgatgttcttggcctttgggttggcgctgacgagcatgcgtttttcgaacattctggtttcgacggcttctacacatactttgcttctcgcggtttctcttatggagctacgcctgagcattggccagagcttcaacgttgggcaaaacaacacggcaaattgttcattccgtctgttggcccaggatacatcgatactcgcgttcgtccatggaacgcgaaaaacacaaaagatcgtgatggaggacgttactatgatgcaatgtttcaagctgcgatcgattctggtgctccgttcattggaatcacgtctttcaacgaatggcatgaaggtactcaaatcgaaccagctgttgcattcaaacacgaagcctttgaatacttagactatgccccacgtccacctgattactaccttgagcgcacagcacattggttacaacgctacaaacctgcagctgctcaataa

SEQ ID NO: 168 - DNA, 1128 bp, Chryseobacterium viscerum
  source 1..1128: mol_type = unassigned DNA
atgaagaaaccgttggggaaaattgtcgcaagcaccgcactactcatttctgttgcttttagttcatcgatagcatcagcacatcatcatcaccatcatcctaggcagcaggaaaacccaagagataaagttcagatattctattatggctggtatggaaatcctgcaaccgacggaagctatcagcattggaatcatgaaattcttcctcactggagtaatccgaaatggaacaacctgggacatcacagcggaggagatgatattggggctaatttttatccggcgctgggaaattacagttccaatgatccaaagatcattgaaaaacatatgaagatgatcaaagaatccggagtaggagtagttgtagtaagctggctgggaaaagattctttcacggataaaagtctcatcaaatacctggatattgccgatcattttgacttgaaaattgcatttcatattgagccgttctataaaaatacttcagaattaaaagaacagctttcctatcttataaaaacatattcccatcatcatgcattttataaaaaagaaggaaaacctttgttttatgtctacgacagttataagattcctaaagaagaatgggtgcaaatattatccaaagacggtgagaaaacagtgaggaatacagatttggatgccttttacatagggctatgggttgaaaaggatgatgcgaaattttttgattcgtcaggtttcgatggcttctatacctactttgccagtgaaggttttgtatatggaagtacagtggctcattgggatttcttgtccaaatatgccaaagaccatcatatgatctttattccttgtgtaggaccaggttattcagataccagaatccggccatggaatgaagccaacttcaaaagcagaaataacggtaggtattacgaaaatatgtttgacgctgctataaaagtgaatccagacatcattggaatcacatcattcaatgaatggcatgaaggaacacagatagaacctgctattcctaaaaaagtgggggatttcaaatatgaggattatgggaaagatcccttgttttatatcaaagaaacaaagcgtttaacggataaatttttgaaaaaataa

SEQ ID NO: 169 - DNA, 15425 bp, Effusibacillus pohliae
  source 1..15425: mol_type = unassigned DNA
gggaagtctttataatgaacccattacttctttaaagtcctggagagaaaatttattaaaagctcatgctgataaagaattaaatcatttaacaagtgatatttttgaacaaaatggtgaaagtccctatggagtatgcggtatgatcggcggaacatgggagtggactagaagtgagcttaaaacaaagagagctttccaccctatttttgagaatgtaccatttaatagtgttaactcatttgccgttcttaaaggaggatcattcttctctcatccaggcttaatgttcccttcttttagagcaaaagatattcctttctgtcgacacaatgaaatggggattagatgcgtaaagaatattccagtatataaaattagagaatcaattaatgggccaattactaataaagcaatttattaatcattctaggttagagacttgataaaagtatactaacattgtgtagtaatgttcagcttgtagaaaaaacaatgttttttctacaagattttattttaaatgcttttcaaaattatcagggattgagaatcagaaaaagagccattaagctcgatcttagctaggtattacgatcttctgtatattattgtgagaaatatagaagattcagttagttagcatttcgattttaagctgagcctgcaatagcaaagcatctgttttgattattctttttctgatacataagctaattttgtcgcttttcttttttgtcttttcacgcatttcgaggatgacttactataattctttcagcttttctatgtgttaagattcgaatagatgaaataactttaacaagttggtcaataagaacagatttaactttatgttaaaagagtatctcgtatagaacataagaagaatgacgagttttttaagattatcatcaattatgtgagaataaaatattataagggaaaatgaaggctgtcacgtttctcgacagccctagggaattcctctccttttcatttcgcccgtaatttcgggcacagtcccgtcggcaggcacattggcttctggtcgatcgggcttctcatgatgcagcattccaagccgaagacttcacggaaaaatggctgggtgaacacatcttccggtgttccggcgttgtatatttttccgtccagcacactgatcagatagtcagcatattgagcggcttggtttaaatcatggagcaccatgacaacggtgcggccatggtcgcggttcagctttttcagcagttcaagcacttcaatctgatgtgagatgtctaaatacgtggtcggctcatcaagcaaaagcaaatcagtgccttgcgcaagtgccatggaaatccaggctctttgtctttggccgcctgagagggcatcaagtgtccgatccttcagttcaatcatgcccgttgcttccagcgcccactctaccatgtcatgatcctcttgggtatgcttggataacagctttttgtgaggatgtctgccaaaatagcataattcctctaccgtcaatccttcaggagcctgaggagattgtggaagaatggccagtttttttgcgacttcttttgatggctggcggtggatgtcttttccttctagtagcactgtaccgctttttggggccatcagcctggcgagcgatttgaggattgttgatttaccgcagccattagcgccgatgagcgcagtgatttttccttcttctatctttaagtcgactccgtcaataatcactgtactgtcatatgaaagagtgagctggtctgcagccagttttcccatggtatcctctccctactgtttcctcgcttcgaatttcaataaatataagaaataaggcgcgccgatcacggctgtcagtattccggcaggtatttcaaccggaggcatgatgccgcgccctaacgtatctgcaattaataatataatagcaccaatcaatgccgatgcaggcagtaaatatttagctttttctccggtaagccgtctggcgatatgcggagcaagcaagccgataaaaccgattgagccgacgacggctacacagcttcccgccagcgccaccgcggtgaaaatcaggatgaatctcagccggtttgcgttttctccgagaccctgtgcaagctcatccccgagtgacataagatccagcttcggtatgagtatgcagacgatcggaaaaagaatcaaaagccatggcgcaagcagcttgacttcttcccagtttcttccccagaggcttcctgtcagccaaatgagtgcagcattcacgtcgcctggaaacttgaccatcatatattgcattccggcgtggcagaccgcgcctaaagcaatgcctgataaagccagtgaagagggctgaatgctcttttttcgggctatcattaataatagtacagcaataatggcggctccggcaaatgcggagaacggaagcacgtataccggcgactcaggaaagatgagaatcacagccatcgccgcaagtccggagccttttgaaatgccgacaacgtccggggaagcgagcggatttcggatcacaccctgtaaaatcgctccggcagcggcaagtccagcacctgccaaaatcgctaatataatgcggggaaggcgatattgctggatgataaattcaaaggaatgatccagtcccagcagattcgtcactaccgcatcaggtgaaatgtataatgcaccgattccaatgctgatgacggacagaacgattaaaatcacggccaatatgagtatcgccagtaaggggcgtttttgttttctggttgttttcttcatttcaggtttcgccctttccttgccaaatataagaaaaacggcgttccgataatcgcggtgacaatgccgaccggtgattcataaggaaatgcaatccatctggccagaacatctgcgtacaccagcaaaatggcaccgaacagtgccgaaaacggaagcacgtattgataatgttctccgatcagcttgcggacaatatgcgggacgagcagcccgacaaagccaatcggcccggcgacggctacggaagcgccggaaagaattaaaataatcaaactgatcagaatcctgatgccgttcatattttgtccaagcccttttgctgtttcgtctccgagaccgagaacagaaacagaaccggaaaatacgagggcaagcccgatgccaatgacagaaaaaggagcgatggttatgacgtcctgccagttgctgccgtcgattgcgcctgtcatccagtacagaacatcctcacctgactcatttaaaataatgatggcctgtgtcatagaggagaggaacaagtgcacggccattcctgacagcgccagcttgacaggcgtcattccgccggatgaggcaatcatatacacaatcgcgccgcctgctgccgcacccgcaaaagcgaatataacagatgaatagggcgatgccggcagaatgacgagagaagcaacaacaaaaagcgatgcacccgcattcacaccgaaaatttggggtgaagccagaggatttctggtcatagcctgcatcagcgcccctgctacagctaggctggcgccgacaaaaacgccgattaatgtgcggggaaggcgaagagtagagatgatgagctgttcctttgaaccgtcccatacaaaaagatatttcaatgaatctatgatgctgatgtctgaggctcctactgaaagattcagcccaagcccaaatataaaaataatcagtgcaatgataaacatcatcagtcttgatgatgagcgccgtttggctgaatgatacaacagtctcacttccttactgcgtctggttgcaaaaacgaagaagcaaggattcccctcgcttctcatttgtcctatttattatacacttttttaagcacatctttggcgcttgtttcactagacttgatgcctctgaatcttgtccaagtgtcacggtccgcatcatagacttgtccatttttcaccgctttgagatttttccagagcgggttcgttttccactcatctacaatggttttgccttcgttggctgagatgaacaaaatatcaggatcgattttgctcaattgctcaaggctgacctcttgataggcgttatctgacttcacagcgtgtgtaaagcctagcattttaaagatttctccgtcataggatgatgatgtatgaagctggaaggaatccgctcttgcaacgccgagaacgatgttgcggttttcatctttcggaagttcggcttttagatcgttgatgacttttttgtgctcggcaagcttttcttttccttcatcttctttatttaatgctttagcaatggtcgtaaagctgtcgatcgtttcgtcatatgtcgcttcacggctttttaattcaatcgtcggggcgatttttttcagctgtttataaatgtttttatggcgctcagcgtcagcgatgattaaatcaggcttcaaggaactgatgacctcaagattgggttcgctgcgtgtgcctacagatgtgtaatcaatggagctgccgacaagctttttaatcatatcttttttgttgtcatctgcgatgcccaccggcgtaatgccgagattgtgaacggcatccaagaatgaaagctcaagcacaaccacccgcttaggtgtgccgcttactgtcgtttttccttcttcgtcatggatcactctggaatccttagactcgcttttgccgcttccgttgttattctggcttgatgaacagccggatacaatgaggcaggcgagcaataaaacactcatgatggcaatcaacttgttagaataggtgcgcatgtcattcttccttttttcagatttagtaatgagaatcattatcacatgtaacactataatagcatggcttatcatgtcaatatttttttagtaaagaaagctgcgtttttactgctttctcatgaaagcatcatcagacacaaataagtggtatgcagcgttaccgtgtcttcgagacaaaaacgcatgggcgttggctttagaggtttcgaacatatcagcagtgacataaggaaggagagtgctgagataaccggacaatttcttttctatttcatctgttagtgcaaattcaatgtcgccgatattcatgataatcgagaaaacaaagtcgatatcgatatgaaaatgttcctcggcaaaaaccgcaagctcgtgaattcctggtgaacatccggcacgcttatggaaaatctgtttgactaaatcactcacaatccaagcattgtattgctgttctggtgaaaagtattgcattagacatacctcctgctcgtacggataaaggcagcgtttcatggtcgtgtgctccgtgcagcggcttctccttaattttgatttttctgaaaataggtcccgttcctatcactttaccatggacggaaaacaaatagctactaccattcctcctgtttttctcttcaatgttctggaatctgtttcaggtacagacgatcgggtatgaaagaaatatagaaaacatgaaggaggaatatcgacatgaaaccagttgtaaaagagtatacaaatgacgaacagctcatgaaagatgtagaggaattgcagaaaatgggtgttgcgaaagaggatgtatacgtcttagctcacgacgatgacagaacggaacgcctggctgacaacacgaacgccaacacgatcggagccaaagaaacaggtttcaagcacgcggtgggaaatatcttcaataaaaaaggagacgagctccgcaataaaattcacgaaatcggtttttctgaagatgaagccgctcaatttgaaaaacgcttagatgaaggaaaagtgcttctctttgtgacagataacgaaaaagtgaaagcttgggcataaagcaaggaaaaaaccaaaaggccaatgtcggccttttggtttttttgcggtctttgcggtgggattttgcagaatgccgcaataggatagcggaacattttcggttctgaatgtccctcaatttgctattatatttttgtgataaattggaataaaatctcacaaaatagaaaatgggggtacatagtggatgaaaaaagtgatgttagctacggctttgtttttaggattgactccagctggcgcgaacgcagctgatttaggccaccagacgttgggatccaatgatggctggggcgcgtactcgaccggcacgacaggcggatcaaaagcatcctcctcaaatgtgtataccgtcagcaacagaaaccagcttgtctcggcattagggaaggaaacgaacacaacgccaaaaatcatttatatcaagggaacgattgacatgaacgtggatgacaatctgaagccgcttggcctaaatgactataaagatccggagtatgatttggacaaatatttgaaagcctatgatcctagcacatggggcaaaaaagagccgtcgggaacacaagaagaagcgagagcacgctctcagaaaaaccaaaaagcacgggtcatggtggatatccctgcaaacacgacgatcgtcggttcagggactaacgctaaagtcgtgggaggaaacttccaaatcaagagtgataacgtcattattcgcaacattgaattccaggatgcctatgactattttccgcaatggttgtaaaacgacggccagtgaattctgatcaaatggttcagtgagagcgaagcgaacacttgattttttaattttctatcttttataggtcattagagtatacttatttgtcctataaactatttagcagcataatagatttattgaataggtcatttaagttgagcatattagaggaggaaaatcttggagaaatatttgaagaacccgaggatctagatcaggtaccgcaacgttcgcagatgctgctgaagagattattaaaaagctgaaagcaaaaggctatcaattggtaactgtatctcagcttgaagaagtgaagaagcagagaggctattgaataaatgagtagaaagcgccatatcggcgcttttcttttggaagaaaatatagggaaaatggtacttgttaaaaattcggaatatttatacaatatcatatgtatcacattgaaaggaggggcctgctgtccagactgtccgctgtgtaaaaaaaaggaataaaggggggttgacattattttactgatatgtataatataatttgtataagaaaatggaggggccctcgaaacgtaagatgaaaccttagataaaagtgctttttttgttgcaattgaagaattattaatgttaagcttaattaaagataatatctttgaattgtaacgcccctcaaaagtaagaactacaaaaaaagaatacgttatatagaaatatgtttgaaccttcttcagattacaaatatattcggacggactctacctcaaatgcttatctaactatagaatgacatacaagcacaaccttgaaaatttgaaaatataactaccaatgaacttgttcatgtgaattatcgctgtatttaattttctcaattcaatatataatatgccaatacattgttacaagtagaaattaagacacccttgatagccttactatacctaacatgatgtagtattaaatgaatatgtaaatatatttatgataagaagcgacttatttataatcattacatatttttctattggaatgattaagattccaatagaatagtgtataaattatttatcttgaaaggagggatgcctaaaaacgaagaacattaaaaacatatatttgcaccgtctaatggatagaaaggaggtgatccagccgcaccttatgaaaaatcattttatcagtttgaaaattatgtattatggagctcagaggaggagagtgagtaatgaaacaacaaaaacggctttacgcccgattgctgacgctgttatttgcgctcatcttcttgctgcctcattctgcagcagcggcgagcagttccgcaagcgtcaaaggggacgtgatttaccagattatcattgaccggttttacgatggggacacgacgaacaacaatcctgccaaaagttatggactttacgatccgaccaaatcgaagtggaaaatgtattggggcggggatctggagggggttcgtcaaaaacttccttatcttaaacagctgggcgtaacgacaatctggttgtccccggttttggacaatctggatacactggcgggcaccgataacacgggctatcacggatactggacgcgcgattttaaacagattgaggaacatttcgggaattggaccacatttgacacgttggtcaatgatgctcaccaaaacggaatcaaggtgattgtcgactttgtgcccaatcattcgactccttttaaggcaaacgattccacctttgcggaaggcggcgccctctacaacaatggaacctatatgggcaattattttgatgacgcaacaaaagggtacttccaccataatggggacatcagcaactgggacgaccggtacgaggcgcaatggaaaaacttcacggatccagccggtttctcgcttgccgatttgtcgcaggaaaatggcacgattgctcaatacctgaccgatgcggcggttcaattggtagcacatggagcggatggtttgcggattgatgcggtgaagcattttaattcggggttctccaaaagcttggccgataaactgtaccaaaagaaagacattttcctggtgggggaatggtacggagatgaccccggaacagccaatcatctggaaaaggtccggtacgccaacaacagcggtgtcaatgtgctggattttgatctcaacacggtgattcgaaatgtgttcggcacatttacgcaaacgatgtacgatcttaacaatatggtgaaccaaacggggaacgagtacaaatacaaagaaaatctaatcacatttatcgataaccatgatatgtcaagatttctttcggtaaattcgaacaaggcgaatttgcaccaggcgcttgctttcattctcacttcgcggggtacgccctccatctattatggaaccgaacaatacatggcaggcggcaatgacccgtacaaccgggggatgatgccggcgtttgatacgacaaccaccgcctttaaagaggtgtcaactctggcggggttgcgcaggaacaatgcggcgatccagtacggcaccaccacccagcgttggatcaacaatgatgtttacatttatgaacggaaatttttcaacgatgtcgtgttggtggccatcaatcgaaacacgcaatcctcctattcgatttccggtttgcagacggccttgccaaatggcagctatgcggattatctgtcagggctgttgggggggaacgggatttccgtttccaatggaagtgtcgcttcgttcacgcttgcgcctggagccgtgtctgtttggcagtacagcacatccgcttcagcgccgcaaatcggatcggttgctccaaatatggggattccgggtaatgtggtcacgatcgacgggaaaggttttgggacgacgcagggaaccgtgacatttggcggagtgacagcgactgtgaaatcctggacatccaatcggattgaagtgtacgttcccaacatggccgccgggctgaccgatgtgaaagtcaccgcgggtggagtttccagcaatctgtattcttacaatattttgagtggaacgcagacatcggttgtgtttactgtgaaaagtgcgcctccgaccaacctgggggataagatttacctgacgggcaacataccggaattggggaattggagcacggatacgagcggagccgttaacaatgcgcaagggcccctgctcgcgcccaattatccggattggttttatgtattcagcgttccagcaggaaagacgattcaattcaagttcttcatcaagcgtgcggatggaacgattcaatgggagaatggttcgaaccacgtggccacaactcccacgggtgcaaccggtaacattactgttacgtggcaaaactagtcgcatgttcaatccgctccataatcggtcgacgcggcggttcgcgtccggacagcacatcaccgaaatatttcgacggcccagccggctagcgcgttaatccgcggatatatagcggccgcagatctggtgggatatttttaaaatatatatttatgttacagtaatattgacttttaaaaaaggattgattctaatgaagaaagcagacaagtaagcctcctaaattcactttagataaaaatttaggaggcatatcaaatgaactttaataaaattgatttagacaattggaagagaaaagagatatttaatcattatttgaaccaacaaacgacttttagtataaccacagaaattgatattagtgttttataccgaaacataaaacaagaaggatataaattttaccctgcatttattttcttagtgacaagggtgataaactcaaatacagcttttagaactggttacaatagcgacggagagttaggttattgggataagttagagccactttatacaatttttgatggtgtatctaaaacattctctggtatttggactcctgtaaagaatgacttcaaagagttttatgatttatacctttctgatgtagagaaatataatggttcggggaaattgtttcccaaaacacctatacctgaaaatgctttttctctttctattattccatggacttcatttactgggtttaacttaaatatcaataataatagtaattaccttctacccattattacagcaggaaaattcattaataaaggtaattcaatatatttaccgctatctttacaggtacatcattctgtttgtgatggttatcatgcaggattgtttatgaactctattcaggaattgtcagataggcctaatgactggcttttatatgagataatgccgactgtactttttacagtcggttttctaacgatacattaataggtacgaaaaagcaactttttttgcgcttaaaaccagtcataccaataacttaagggtaactagcctcgccggaaagagcgaaaatgcctcacatttgtgccacctaaaaaggagcgatttacatatgagttatgcagtttgtagaatgcaaaaagtgaaatcagctggactaaaaggggccgcagagtagaatggaaaaggggatcggaaaacaagtatataggaggagacctatttatggcttcagaaaaagacgcaggaaaacagtcagcagtaaagcttgttccattgcttattactgtcgctgtgggactaatcatctggtttattcccgctccgtccggacttgaacctaaagcttggcatttgtttgcgatttttgtcgcaacaattatcggctttatctccaagcccttgccaatgggtgcaattgcaatttttgcattggcggttactgcactaactggaacactatcaattgaggatacattaagcggattcgggaataagaccatttggcttatcgttatcgcattctttatttcccggggatttatcaaaaccggtctcggtgcgagaatttcgtatgtattcgttcagaaattcggaaaaaaaacccttggactttcttattcactgctattcagtgatttaatactttcacctgctattccaagtaatacggcgcgtgcaggaggcattatatttcctattatcagatcattatccgaaacattcggatcaagcccggcaaatggaacagagagaaaaatcggtgcattcttattaaaaaccggttttcaggggaatctgatcacatctgctatgttcctgacagcgatggcggcgaacccgctgattgccaagctggcccatgatgtcgcaggggtggacttaacatggacaagctgggcaattgccgcgattgtaccgggacttgtaagcttaatcatcacgccgcttgtgatttacaaactgtatccgccggaaatcaaagaaacaccggatgcggcgaaaatcgcaacagaaaaactgaaagaaatgggaccgttcaaaaaatcggagctttccatggttatcgtgtttcttttggtgcttgtgctgtggatttttggcggcagcttcaacatcgacgctaccacaaccgcattgatcggtttggccgttctcttattatcacaagttctgacttgggatgatatcaagaaagaacagggcgcttgggatacgctcacttggtttgcggcgcttgtcatgctcgccaacttcttgaatgaattaggcatggtgtcttggttcagtaatgccatgaaatcatccgtatcagggttctcttggattgtggcattcatcattttaattgttgtgtattattactctcactatttctttgcaagtgcgacagcccacatcagtgcgatgtattcagcatttttggctgtcgtcgtggcagcgggcgcaccgccgcttttagcagcgctgagcctcgcgttcatcagcaacctgttcgggtcaacgactcactacggttctggagcggctccggtcttcttcggagcaggctacatcccgcaaggcaaatggtggtccatcggatttatcctgtcgattgttcatatcatcgtatggcttgtgatcggcggattatggtggaaagtactaggaatatggtagaaagaaaaaggcagacgcggtctgcctttttttattttcactccttcgtaagaaaatggattttgaaaaatgagaaaattccctgtgaaaaatggtatgatctaggtagaaaggacggctggtgctgtggtgaaaaagcggttccatttttccctgcaaacaaaaataatggggctgattgcggctctgctggtctttgtcattggtgtgctgaccattacgttagccgttcagcatacacagggagaacggagacaggcagagcagctggcggttcaaacggcgagaaccatttcctatatgccgccggttaaagagctcattgagagaaaagacggacatgcggctcagacgcaagaggtcattgaacaaatgaaagaacagactggtgcgtttgccatttatgttttgaacgaaaaaggagacattcgcagcgcctctggaaaaagcggattaaagaaactggagcgcagcagagaaattttgtttggcggttcgcatgtttctgaaacaaaagcggatggacgaagagtgatcagagggagcgcgccgattataaaagaacagaagggatacagccaagtgatcggcagcgtgtctgttgattttctgcaaacggagacagagcaaagcatcaaaaagcatttgagaaatttgagtgtgattgctgtgcttgtactgctgctcggatttattggcgccgccgtgctggcgaaaagcatcagaaaggatacgctcgggcttgaaccgcatgagatcgcggctctatatcgtgagaggaacgcaatgcttttcgcgattcgagaagggattattgccaccaatcgtgaaggcgtcgtcaccatgatgaacgtatcggcggccgagatgctgaagctgcccgagcctgtgatccatcttcctatagatgacgtcatgccgggagcagggctgatgtctgtgcttgaaaaaggagaaatgctgccgaaccaggaagtaagcgtcaacgatcaagtgtttattatcaatacgaaagtgatgaatcaaggcgggcaggcgtatgggattgtcgtcagcttcagggagaaaacagagctgaagaagctgatcgacacattgacagaggttcgcaaatattcagaggatctcagggcgcagactcatgaattttcaaataagctttatgcgattttagggctgcttgagcttggggagtatgatgaagccattgatctgattaaagaggaatatgcgatacaaaatgaacagcatgatcttttattccataacatccattcgcagcaggtgcaggccattttgttagggaaaataagcaaggcatcggaaaagaaggtcaagctggtgattgatgagaacagctcactcgcgcctcttcctgcgcatatcggcttgtcccatcttattacgattattggcaatttaattgataacgctttcgaagctgtagcggagcaaagcgtgaaggaagttttgttttttatcacggatatgggccatgacattgtcattgaagtatcagacacagggcccggtgtgccgccagagaaaatagaagctgtgtttgagagaggctattcttcaaaggggatgaggagaggctacggtctggccaatgtgaaagactcagtgcgtgaactgggcggctggatcgaactggcgaatcaaaaaactggcggggcggtattcactgtatttataccgaaggagaaacaaagggggaatccatttgattcacatcgcgattgcggaggatgattttcgagttgcgcaaatccatgagagattgattaaacagcttgatggattcaagattatcggcaaggcggctaacgcaaaagagacattggcgcttttgaaggaacacaaggctgatttgcttctgctggatatttatatgccggacgagcttgggaccgcgttgattcctgatatacgaagccgatttcctgaagtggacattatgattatcacagcggcaacagaaacccgtcatttgcaggaagcgctaagggcgggaattgcccactatttgatcaaacccgtaacagctgacaagttcaggcaggtgctgcttcagtataaagaaaaaaggaagctgctcatgtctcagccggaggtcagccaatccatgatcgaccatatttttgggaacggtgtgaagacagctttgccggcagaggatttgccgactggcattaattcgattacactgcgaaaaattaaggaagcgcttcagactgcgtcagaaggattgacagcggaggaacttggggaaaaaatgggggcgtcacgaacaactgcccgccgttatgccgagtaccttgtgtcaaaggaagaagcaagagccgagcttgaatacgggattatcggcaggccggagagaaaatattatttggcggcggattagatatgaaaaaatctataatcctattgaatattctattgatctttatgcagggtgatatcaggcaggcggctgcgccgcgcctgccggacgggccgatagaaattgtcgtccctgccgaaccttctggcggctgggatgtcacagcgcaggcgatccaatcagttttgaggcagaagcagatcgtgaaggatgatgttcatatcgtctataaatccggcggcgggggagagaaaggctggaaatatgtcaacaaaagcagcaaacaaaccatcagcatgacgtccagcctaatattgagcaatgatcttctcgggcaaagcaaattaaaaatgtccgattttacg

SEQ ID NO: 170 - DNA, 1631 bp, Evansstolkia leycettana
  source 1..1631: mol_type = unassigned DNA
atgacgccgttcacagcgctggcgtcagcgatcgcgctggcagtctgcattggaaccaatggtgtcagtagcacttcggggtctcaagatgacattgcagtcttgcgcagagcctgtcccgattacacgtcatattccactgtgcctcatgctccatacagcggcgggcctttgaacctccccttccaacgtccggccgaagcatgtaggacattcacctcaccagcagtcgaacaggtgattcaagatgtcacttcccgcatggttgacaaagacatggctcagttgtttcgaaacgcattcccgaacacgctggatacaacgatccgctggcacacgaacggctcgaccaccacctcaacaaggagaaaaagcaagaaggatgctgctcagtggcagggcgcgcagacattcgtcgtgaccggagacatcaacgcggaatggctccgtgattcgacaaaccagctggcagggtatcaggctctagcgaagaaggataagagtctctacacgcttatactgggcgcgatcaacactcaggttgagtatgtgattcagtctccctactgcaacgctttccaaccgcctccgcctagcgggatcagaccaacttcgaacggacagggcgacctgtacatccggcgtacgagccctcgtttgtctttgagtgcaagtacgagctcgactcgctggctcattttctaacactcggaacccaattctacgaaaacacgggctcgacagagttcttgacgagcagatggtacacagctttgaacacactgctagatgtcttggacgcacaatcccaacctactttcaacgctaacaatcagtacgtcaccaaccagtataccttccagcgccagacgacggccggtacggaaacgctcagcttgagaggtatcggaaatccgttgaatagtggcactggtctcattcgtagcgccttccggcccagtgatgatgctacgatcctgggtttctttattccgcctaatgcgatgatgtctgttcagctgaagaaaatagcagaagtcatcaaggcagcaggaggagactcgagccttgtcaagaagcttcagcagcgaggtcacgacctagaacagtcggtatgggaacatggtgtagtcgatcatcccaagtacggcaaggtctttgctttcgaggtcgacgggtatggctcgcggattctcatggacgatgcgaatattccctccttgctttcattgccgctattgggcttcgtggacaagaacgacgagacctaccagaacacgaggaagatgattcttgacaagtcgggaaatccatactacctgactggatctgattttcacggaatcggtgggccgcatgtcggcctcgaaaacgcctggccaatgtctcttctcgtccaagcgcagacgacagactccgactccgaaatcgcagaatgcatcaacctcgttcgcaactcgagccgtctcggtctcgttcatgagtcgatcaatgtcaacaatatcagggactatacccggccgtggtttgcatgggctaattccctctttgcacaaaccattctgaagatcgcagcggagaagccgcatttggtctttggttcagatgcatctccttatgttgtcgagtaa

SEQ ID NO: 171 - DNA, 14472 bp, Nocardiopsis sp.
  source 1..14472: mol_type = unassigned DNA
tggaagtctttataatgaacccattacttctttaaagtcctggagagaaaatttattaaaagctcatgctgataaagaattaaatcatttaacaagtgatatttttgaacaaaatggtgaaagtccctatggagtatgcggtatgatcggcggaacatgggagtggactagaagtgagcttaaaacaaagagagctttccaccctatttttgagaatgtaccatttaatagtgttaactcatttgccgttcttaaaggaggatcattcttctctcatccaggcttaatgttcccttcttttagagcaaaagatattcctttctgtcgacacaatgaaatggggattagatgcgtaaagaatattccagtatataaaattagagaatcaattaatgggccaattactaataaagcaatttattaatcattctaggttagagacttgataaaagtatactaacattgtgtagtaatgttcagcttgtagaaaaaacaatgttttttctacaagattttattttaaatgcttttcaaaattatcagggattgagaatcagaaaaagagccattaagctcgatcttagctaggtattacgatcttctgtatattattgtgagaaatatagaagattcagttagttagcatttcgattttaagctgagcctgcaatagcaaagcatctgttttgattattctttttctgatacataagctaattttgtcgcttttcttttttgtcttttcacgcatttcgaggatgacttactataattctttcagcttttctatgtgttaagattcgaatagatgaaataactttaacaagttggtcaataagaacagatttaactttatgttaaaagagtatctcgtatagaacataagaagaatgacgagttttttaagattatcatcaattatgtgagaataaaatattataagggaaaatgaaggctgtcacgtttctcgacagccctagggaattcctctccttttcatttcgcccgtaatttcgggcacagtcccgtcggcaggcacattggcttctggtcgatcgggcttctcatgatgcagcattccaagccgaagacttcacggaaaaatggctgggtgaacacatcttccggtgttccggcgttgtatatttttccgtccagcacactgatcagatagtcagcatattgagcggcttggtttaaatcatggagcaccatgacaacggtgcggccatggtcgcggttcagctttttcagcagttcaagcacttcaatctgatgtgagatgtctaaatacgtggtcggctcatcaagcaaaagcaaatcagtgccttgcgcaagtgccatggaaatccaggctctttgtctttggccgcctgagagggcatcaagtgtccgatccttcagttcaatcatgcccgttgcttccagcgcccactctaccatgtcatgatcctcttgggtatgcttggataacagctttttgtgaggatgtctgccaaaatagcataattcctctaccgtcaatccttcaggagcctgaggagattgtggaagaatggccagtttttttgcgacttcttttgatggctggcggtggatgtcttttccttctagtagcactgtaccgctttttggggccatcagcctggcgagcgatttgaggattgttgatttaccgcagccattagcgccgatgagcgcagtgatttttccttcttctatctttaagtcgactccgtcaataatcactgtactgtcatatgaaagagtgagctggtctgcagccagttttcccatggtatcctctccctactgtttcctcgcttcgaatttcaataaatataagaaataaggcgcgccgatcacggctgtcagtattccggcaggtatttcaaccggaggcatgatgccgcgccctaacgtatctgcaattaataatataatagcaccaatcaatgccgatgcaggcagtaaatatttagctttttctccggtaagccgtctggcgatatgcggagcaagcaagccgataaaaccgattgagccgacgacggctacacagcttcccgccagcgccaccgcggtgaaaatcaggatgaatctcagccggtttgcgttttctccgagaccctgtgcaagctcatccccgagtgacataagatccagcttcggtatgagtatgcagacgatcggaaaaagaatcaaaagccatggcgcaagcagcttgacttcttcccagtttcttccccagaggcttcctgtcagccaaatgagtgcagcattcacgtcgcctggaaacttgaccatcatatattgcattccggcgtggcagaccgcgcctaaagcaatgcctgataaagccagtgaagagggctgaatgctcttttttcgggctatcattaataatagtacagcaataatggcggctccggcaaatgcggagaacggaagcacgtataccggcgactcaggaaagatgagaatcacagccatcgccgcaagtccggagccttttgaaatgccgacaacgtccggggaagcgagcggatttcggatcacaccctgtaaaatcgctccggcagcggcaagtccagcacctgccaaaatcgctaatataatgcggggaaggcgatattgctggatgataaattcaaaggaatgatccagtcccagcagattcgtcactaccgcatcaggtgaaatgtataatgcaccgattccaatgctgatgacggacagaacgattaaaatcacggccaatatgagtatcgccagtaaggggcgtttttgttttctggttgttttcttcatttcaggtttcgccctttccttgccaaatataagaaaaacggcgttccgataatcgcggtgacaatgccgaccggtgattcataaggaaatgcaatccatctggccagaacatctgcgtacaccagcaaaatggcaccgaacagtgccgaaaacggaagcacgtattgataatgttctccgatcagcttgcggacaatatgcgggacgagcagcccgacaaagccaatcggcccggcgacggctacggaagcgccggaaagaattaaaataatcaaactgatcagaatcctgatgccgttcatattttgtccaagcccttttgctgtttcgtctccgagaccgagaacagaaacagaaccggaaaatacgagggcaagcccgatgccaatgacagaaaaaggagcgatggttatgacgtcctgccagttgctgccgtcgattgcgcctgtcatccagtacagaacatcctcacctgactcatttaaaataatgatggcctgtgtcatagaggagaggaacaagtgcacggccattcctgacagcgccagcttgacaggcgtcattccgccggatgaggcaatcatatacacaatcgcgccgcctgctgccgcacccgcaaaagcgaatataacagatgaatagggcgatgccggcagaatgacgagagaagcaacaacaaaaagcgatgcacccgcattcacaccgaaaatttggggtgaagccagaggatttctggtcatagcctgcatcagcgcccctgctacagctaggctggcgccgacaaaaacgccgattaatgtgcggggaaggcgaagagtagagatgatgagctgttcctttgaaccgtcccatacaaaaagatatttcaatgaatctatgatgctgatgtctgaggctcctactgaaagattcagcccaagcccaaatataaaaataatcagtgcaatgataaacatcatcagtcttgatgatgagcgccgtttggctgaatgatacaacagtctcacttccttactgcgtctggttgcaaaaacgaagaagcaaggattcccctcgcttctcatttgtcctatttattatacacttttttaagcacatctttggcgcttgtttcactagacttgatgcctctgaatcttgtccaagtgtcacggtccgcatcatagacttgtccatttttcaccgctttgagatttttccagagcgggttcgttttccactcatctacaatggttttgccttcgttggctgagatgaacaaaatatcaggatcgattttgctcaattgctcaaggctgacctcttgataggcgttatctgacttcacagcgtgtgtaaagcctagcattttaaagatttctccgtcataggatgatgatgtatgaagctggaaggaatccgctcttgcaacgccgagaacgatgttgcggttttcatctttcggaagttcggcttttagatcgttgatgacttttttgtgctcggcaagcttttcttttccttcatcttctttatttaatgctttagcaatggtcgtaaagctgtcgatcgtttcgtcatatgtcgcttcacggctttttaattcaatcgtcggggcgatttttttcagctgtttataaatgtttttatggcgctcagcgtcagcgatgattaaatcaggcttcaaggaactgatgacctcaagattgggttcgctgcgtgtgcctacagatgtgtaatcaatggagctgccgacaagctttttaatcatatcttttttgttgtcatctgcgatgcccaccggcgtaatgccgagattgtgaacggcatccaagaatgaaagctcaagcacaaccacccgcttaggtgtgccgcttactgtcgtttttccttcttcgtcatggatcactctggaatccttagactcgcttttgccgcttccgttgttattctggcttgatgaacagccggatacaatgaggcaggcgagcaataaaacactcatgatggcaatcaacttgttagaataggtgcgcatgtcattcttccttttttcagatttagtaatgagaatcattatcacatgtaacactataatagcatggcttatcatgtcaatatttttttagtaaagaaagctgcgtttttactgctttctcatgaaagcatcatcagacacaaataagtggtatgcagcgttaccgtgtcttcgagacaaaaacgcatgggcgttggctttagaggtttcgaacatatcagcagtgacataaggaaggagagtgctgagataaccggacaatttcttttctatttcatctgttagtgcaaattcaatgtcgccgatattcatgataatcgagaaaacaaagtcgatatcgatatgaaaatgttcctcggcaaaaaccgcaagctcgtgaattcctggtgaacatccggcacgcttatggaaaatctgtttgactaaatcactcacaatccaagcattgtattgctgttctggtgaaaagtattgcattagacatacctcctgctcgtacggataaaggcagcgtttcatggtcgtgtgctccgtgcagcggcttctccttaattttgatttttctgaaaataggtcccgttcctatcactttaccatggacggaaaacaaatagctactaccattcctcctgtttttctcttcaatgttctggaatctgtttcaggtacagacgatcgggtatgaaagaaatatagaaaacatgaaggaggaatatcgacatgaaaccagttgtaaaagagtatacaaatgacgaacagctcatgaaagatgtagaggaattgcagaaaatgggtgttgcgaaagaggatgtatacgtcttagctcacgacgatgacagaacggaacgcctggctgacaacacgaacgccaacacgatcggagccaaagaaacaggtttcaagcacgcggtgggaaatatcttcaataaaaaaggagacgagctccgcaataaaattcacgaaatcggtttttctgaagatgaagccgctcaatttgaaaaacgcttagatgaaggaaaagtgcttctctttgtgacagataacgaaaaagtgaaagcttgggcataaagcaaggaaaaaaccaaaaggccaatgtcggccttttggtttttttgcggtctttgcggtgggattttgcagaatgccgcaataggatagcggaacattttcggttctgaatgtccctcaatttgctattatatttttgtgataaattggaataaaatctcacaaaatagaaaatgggggtacatagtggatgaaaaaagtgatgttagctacggctttgtttttaggattgactccagctggcgcgaacgcagctgatttaggccaccagacgttgggatccaatgatggctggggcgcgtactcgaccggcacgacaggcggatcaaaagcatcctcctcaaatgtgtataccgtcagcaacagaaaccagcttgtctcggcattagggaaggaaacgaacacaacgccaaaaatcatttatatcaagggaacgattgacatgaacgtggatgacaatctgaagccgcttggcctaaatgactataaagatccggagtatgatttggacaaatatttgaaagcctatgatcctagcacatggggcaaaaaagagccgtcgggaacacaagaagaagcgagagcacgctctcagaaaaaccaaaaagcacgggtcatggtggatatccctgcaaacacgacgatcgtcggttcagggactaacgctaaagtcgtgggaggaaacttccaaatcaagagtgataacgtcattattcgcaacattgaattccaggatgcctatgactattttccgcaatggttgtaaaacgacggccagtgaattctgatcaaatggttcagtgagagcgaagcgaacacttgattttttaattttctatcttttataggtcattagagtatacttatttgtcctataaactatttagcagcataatagatttattgaataggtcatttaagttgagcatattagaggaggaaaatcttggagaaatatttgaagaacccgaggatctagatcaggtaccgcaacgttcgcagatgctgctgaagagattattaaaaagctgaaagcaaaaggctatcaattggtaactgtatctcagcttgaagaagtgaagaagcagagaggctattgaataaatgagtagaaagcgccatatcggcgcttttcttttggaagaaaatatagggaaaatggtacttgttaaaaattcggaatatttatacaatatcatatgtatcacattgaaaggaggggcctgctgtccagactgtccgctgtgtaaaaaaaaggaataaaggggggttgacattattttactgatatgtataatataatttgtataagaaaatggaggggccctcgaaacgtaagatgaaaccttagataaaagtgctttttttgttgcaattgaagaattattaatgttaagcttaattaaagataatatctttgaattgtaacgcccctcaaaagtaagaactacaaaaaaagaatacgttatatagaaatatgtttgaaccttcttcagattacaaatatattcggacggactctacctcaaatgcttatctaactatagaatgacatacaagcacaaccttgaaaatttgaaaatataactaccaatgaacttgttcatgtgaattatcgctgtatttaattttctcaattcaatatataatatgccaatacattgttacaagtagaaattaagacacccttgatagccttactatacctaacatgatgtagtattaaatgaatatgtaaatatatttatgataagaagcgacttatttataatcattacatatttttctattggaatgattaagattccaatagaatagtgtataaattatttatcttgaaaggagggatgcctaaaaacgaagaacattaaaaacatatatttgcaccgtctaatggatttatgaaaaatcattttatcagtttgaaaattatgtattatggagctctgaaaaaaaggagaggataaagaatgaaaaaaccgctgggaaaaattgtcgcaagcacagcacttcttatttcagtggcatttagctcatctattgcatcagcagctacaggagcattaccgcagtctccgacaccggaagcagatgcagtctcaatgcaagaagcactgcaaagagatcttgatcttacatcagcagaagcagaagaacttcttgctgcacaagatacagcatttgaagtggatgaagcagcggcagaagcagcaggagatgcatatggcggctcagtttttgatacagaatcacttgaacttacggttcttgttacagatgcagcagcagttgaagcagttgaagcaacaggagcaggaacagaacttgtttcatatggaattgatggccttgatgaaattgttcaagaactgaatgcagctgatgctgttccgggcgttgttggctggtatccggatgttgctggagatacagttgtccttgaagttcttgaaggatcaggcgcagatgtttcaggcctgctggcagatgcaggagtcgatgcatcagcagttgaagttacaacatcagatcaaccggaactttatgcagatattattggcggcctggcatatacaatgggcggcagatgcagcgttggctttgcagcaacaaatgcagcaggccaaccgggctttgttacagcaggccattgcggcagagttggcacacaggttacaattggcaatggcagaggcgtttttgaacaaagcgtttttccgggcaatgatgcagcatttgttagaggcacatcaaattttacacttacaaatctggtttcaagatataatacaggcggctatgcaacagttgcaggccataatcaagcaccgattggctcatcagtttgcagatcaggctcaacaacaggctggcattgcggcacaattcaagcaagaggccaaagcgttagctatccggaaggcacagttacaaatatgacaagaacaacagtttgtgcagaaccgggcgattcaggcggctcatatattagcggcacacaagcacaaggcgttacatcaggcggctcaggcaattgcagaacaggcggcacaacattttaccaagaagttacaccgatggttaattcatggggcgttagacttagaacataatcgcatgttcaatccgctccataaccgatcgacgcggcggttcgcgtccggacagcacatcaccgaaatatttcgacggcccagccggctagcgcgttaatccgcggatatatagcggccgcagatctgggaccaataataatgactagagaagaaagaatgaagattgttcatgaaattaaggaacgaatattggataaagtgggatatttttaaaatatatatttatgttacagtaatattgacttttaaaaaaggattgattctaatgaagaaagcagacaagtaagcctcctaaattcactttagataaaaatttaggaggcatatcaaatgaactttaataaaattgatttagacaattggaagagaaaagagatatttaatcattatttgaaccaacaaacgacttttagtataaccacagaaattgatattagtgttttataccgaaacataaaacaagaaggatataaattttaccctgcatttattttcttagtgacaagggtgataaactcaaatacagcttttagaactggttacaatagcgacggagagttaggttattgggataagttagagccactttatacaatttttgatggtgtatctaaaacattctctggtatttggactcctgtaaagaatgacttcaaagagttttatgatttatacctttctgatgtagagaaatataatggttcggggaaattgtttcccaaaacacctatacctgaaaatgctttttctctttctattattccatggacttcatttactgggtttaacttaaatatcaataataatagtaattaccttctacccattattacagcaggaaaattcattaataaaggtaattcaatatatttaccgctatctttacaggtacatcattctgtttgtgatggttatcatgcaggattgtttatgaactctattcaggaattgtcagataggcctaatgactggcttttatatgagataatgccgactgtactttttacagtcggttttctaacgatacattaataggtacgaaaaagcaactttttttgcgcttaaaaccagtcataccaataacttaagggtaactagcctcgccggaaagagcgaaaatgcctcacatttgtgccacctaaaaaggagcgatttacatatgagttatgcagtttgtagaatgcaaaaagtgaaatcagctggactaaaaggggccgcagagtagaatggaaaaggggatcggaaaacaagtatataggaggagacctatttatggcttcagaaaaagacgcaggaaaacagtcagcagtaaagcttgttccattgcttattactgtcgctgtgggactaatcatctggtttattcccgctccgtccggacttgaacctaaagcttggcatttgtttgcgatttttgtcgcaacaattatcggctttatctccaagcccttgccaatgggtgcaattgcaatttttgcattggcggttactgcactaactggaacactatcaattgaggatacattaagcggattcgggaataagaccatttggcttatcgttatcgcattctttatttcccggggatttatcaaaaccggtctcggtgcgagaatttcgtatgtattcgttcagaaattcggaaaaaaaacccttggactttcttattcactgctattcagtgatttaatactttcacctgctattccaagtaatacggcgcgtgcaggaggcattatatttcctattatcagatcattatccgaaacattcggatcaagcccggcaaatggaacagagagaaaaatcggtgcattcttattaaaaaccggttttcaggggaatctgatcacatctgctatgttcctgacagcgatggcggcgaacccgctgattgccaagctggcccatgatgtcgcaggggtggacttaacatggacaagctgggcaattgccgcgattgtaccgggacttgtaagcttaatcatcacgccgcttgtgatttacaaactgtatccgccggaaatcaaagaaacaccggatgcggcgaaaatcgcaacagaaaaactgaaagaaatgggaccgttcaaaaaatcggagctttccatggttatcgtgtttcttttggtgcttgtgctgtggatttttggcggcagcttcaacatcgacgctaccacaaccgcattgatcggtttggccgttctcttattatcacaagttctgacttgggatgatatcaagaaagaacagggcgcttgggatacgctcacttggtttgcggcgcttgtcatgctcgccaacttcttgaatgaattaggcatggtgtcttggttcagtaatgccatgaaatcatccgtatcagggttctcttggattgtggcattcatcattttaattgttgtgtattattactctcactatttctttgcaagtgcgacagcccacatcagtgcgatgtattcagcatttttggctgtcgtcgtggcagcgggcgcaccgccgcttttagcagcgctgagcctcgcgttcatcagcaacctgttcgggtcaacgactcactacggttctggagcggctccggtcttcttcggagcaggctacatcccgcaaggcaaatggtggtccatcggatttatcctgtcgattgttcatatcatcgtatggcttgtgatcggcggattatggtggaaagtactaggaatatggtagaaagaaaaaggcagacgcggtctgcctttttttattttcactccttcgtaagaaaatggattttgaaaaatgagaaaattccctgtgaaaaatggtatgatctaggtagaaaggacggctggtgctgtggtgaaaaagcggttccatttttccctgcaaacaaaaataatggggctgattgcggctctgctggtctttgtcattggtgtgctgaccattacgttagccgttcagcatacacagggagaacggagacaggcagagcagctggcggttcaaacggcgagaaccatttcctatatgccgccggttaaagagctcattgagagaaaagacggacatgcggctcagacgcaagaggtcattgaacaaatgaaagaacagactggtgcgtttgccatttatgttttgaacgaaaaaggagacattcgcagcgcctctggaaaaagcggattaaagaaactggagcgcagcagagaaattttgtttggcggttcgcatgtttctgaaacaaaagcggatggacgaagagtgatcagagggagcgcgccgattataaaagaacagaagggatacagccaagtgatcggcagcgtgtctgttgattttctgcaaacggagacagagcaaagcatcaaaaagcatttgagaaatttgagtgtgattgctgtgcttgtactgctgctcggatttattggcgccgccgtgctggcgaaaagcatcagaaaggatacgctcgggcttgaaccgcatgagatcgcggctctatatcgtgagaggaacgcaatgcttttcgcgattcgagaagggattattgccaccaatcgtgaaggcgtcgtcaccatgatgaacgtatcggcggccgagatgctgaagctgcccgagcctgtgatccatcttcctatagatgacgtcatgccgggagcagggctgatgtctgtgcttgaaaaaggagaaatgctgccgaaccaggaagtaagcgtcaacgatcaagtgtttattatcaatacgaaagtgatgaatcaaggcgggcaggcgtatgggattgtcgtcagcttcagggagaaaacagagctgaagaagctgatcgacacattgacagaggttcgcaaatattcagaggatctcagggcgcagactcatgaattttcaaataagctttatgcgattttagggctgcttgagcttggggagtatgatgaagccattgatctgattaaagaggaatatgcgatacaaaatgaacagcatgatcttttattccataacatccattcgcagcaggtgcaggccattttgttagggaaaataagcaaggcatcggaaaagaaggtcaagctggtgattgatgagaacagctcactcgcgcctcttcctgcgcatatcggcttgtcccatcttattacgattattggcaatttaattgataacgctttcgaagctgtagcggagcaaagcgtgaaggaagttttgttttttatcacggatatgggccatgacattgtcattgaagtatcagacacagggcccggtgtgccgccagagaaaatagaagctgtgtttgagagaggctattcttcaaaggggatgaggagaggctacggtctggccaatgtgaaagactcagtgcgtgaactgggcggctggatcgaactggcgaatcaaaaaactggcggggcggtattcactgtatttataccgaaggagaaacaaagggggaatccatttgattcacatcgcgattgcggaggatgattttcgagttgcgcaaatccatgagagattgattaaacagcttgatggattcaagattatcggcaaggcggctaacgcaaaagagacattggcgcttttgaaggaacacaaggctgatttgcttctgctggatatttatatgccggacgagcttgggaccgcgttgattcctgatatacgaagccgatttcctgaagtggacattatgattatcacagcggcaacagaaacccgtcatttgcaggaagcgctaagggcgggaattgcccactatttgatcaaacccgtaacagctgacaagttcaggcaggtgctgcttcagtataaagaaaaaaggaagctgctcatgtctcagccggaggtcagccaatccatgatcgaccatatttttgggaacggtgtgaagacagctttgccggcagaggatttgccgactggcattaattcgattacactgcgaaaaattaaggaagcgcttcagactgcgtcagaaggattgacagcggaggaacttggggaaaaaatgggggcgtcacgaacaactgcccgccgttatgccgagtaccttgtgtcaaaggaagaagcaagagccgagcttgaatacgggattatcggcaggccggagagaaaatattatttggcggcggattagatatgaaaaaatctataatcctattgaatattctattgatctttatgcagggtgatatcaggcaggcggctgcgccgcgcctgccggacgggccgatagaaattgtcgtccctgccgaaccttctggcggctgggatgtcacagcgcaggcgatccaatcagttttgaggcagaagcagatcgtgaaggatgatgttcatatcgtctataaatccggcggcgggggagagaaaggctggaaatatgtcaacaaaagcagcaaacaaaccatcagcatgacgtccagcctaatattgagcaatgatcttctcgggcaaagcaaattaaaaatgtccgattttacg

SEQ ID NO: 172 - DNA, 1847 bp, Trametes hirsuta
  source 1..1847: mol_type = unassigned DNA
ctcgaacacgatggtcgccaccagcttgctcgttgcctccctattcacgctcgccctcggcacgccgacgggtcgcaacctcaagctgcacgaggcgcgcgaagaccttcctgccggtttctcgctgcgcggcgccgcctcgcccgacacgacgctgaagctccgcatcgcgctcgtgcagaacaacttcgccgagctcgaagacaagctctacgacgtcagcacaccgtccagcgccaactacggcaaccacctctcgaaggaagaggttgagcagtacattgctccggctcccgagagcgtgaaagccgtgaatgcctggctcaccgagaacggactcgacgcgcacaccatttcgcccgccggcgactggctcgcattcgaggtccccgtcagcaaggcgaatgagctcttcgacgccgacttctccgtgtttacccacgatgagtccggcctcgaggctatccggacgctggcctactccatccctgctgagcttcagggacacctcgaccttgttcaccccaccgtcacgttcccgaaccccaatgcgcacctgcccgtcgtgcgctccacccagcccatccggaacctgaccggacgtgctataccggcctcttgcgcgagcaccatcacccctgcgtgcttgcaggccatctacggtatccccaccaccaaggctactcagtcctcgaacaagctcgctgtcagcggcttcatcgaccagtttgcgaacaaggctgacctgaagtcattcctggcccagttccgcaaagacatctcatcctccacgactttctcgcttcagactctcgatggtggagagaacgaccagagccctagcgaggcgggtatcgaggctaacttggatatccagtacaccgtcggcctcgccacgggcgtccctaccacgttcatctccgtcggcgacgacttccaggatggcaacttggagggcttcctggacatcatcaacttcttgctcggcgagagcaacccgccgcaggtcctcaccaccagttacggccagaacgagaacacgatctcggccaagcttgctaaccaactttgcaatgcgtacgctcagctcggcgcgcgcggcacctctatcctcttcgcgtcgggtgatggcggtgtgtccggctcgcagtccgcgcactgcagcaattttgtcccgacattcccctccggctgccccttcatgacttccgtcggcgcgacgcagggcgtcagccccgagactgccgccgccttctcatccggcggcttctcgaacgtgttcggcatcccgtcgtaccaggcttccgcggtcagcggctacctgtccgcgctcggaagcacgaactcgggcaagttcaaccgcagcggacgcggattccccgacgtctccacgcaaggcgtggacttccagatcgtcagcggcggccagacgatcggcgtcgacggcacgagctgcgccagcccgacgttcgcgagcgtcatctcgctggtaaacgaccgcctcatcgcggccggcaagagcccgctcggcttcctgaaccccttcctgtactcgtcggcgggcaaggccgcgctcaacgacgtcacgagtggctcgaaccctggctgcagcacgaacggcttccccgctaaggccggctgggacccggtcactggtcttggcacgcccaactttgccaagctcctcaccgcggtcggcctgtgaatgtggacgaaatacaagaacgtggaacgatgtgcacagtcagaaggaatgatcgcgcagtggcggtgtactattgtagatgtacgggcaaagatgtacacctttttagcagtcaaaatgtaaacgtgtttgcgtctggctt

SEQ ID NO: 173 - DNA, 1448 bp, Bacillus licheniformis
  source 1..1448: mol_type = unassigned DNA
tcgacggcttcccgtgcgcctccgggatcgctgtgataattgacaaccacattcatcttttcttttccaaaccgttctgcaaccgccttgcctataccttttgaagagccggtcacaattgctgtttttccttttaaatcactatacaacctaaacacccctcaatttcttttctccatgtacattacccggtatcaatatatgatcaaacaaaatgttaatacacacctttagtatgatcttttttaaacatatggaaaattcagaattattttgttaatatctaacttgtacttacaacaaaataaggaagtgatatgatttggttagtaaaaagagtgttaaacgaggtttgatcacaggtctcattggtatttctatttattctttaggtatgcacccggcccaagccgcgccatcgcctcatactcctgtttcaagcgatccttcatacaaagcggaaacatcggttacttatgacccaaacattaagagcgatcaatacggcttgtattcaaaagcgtttacaggcaccggcaaagtgaatgaaacaaaggaaaaagcggaaaaaaagtcacccgccaaagctccttacagcattaaatcggtgattggttctgatgatcggacaagggtcaccaacacaaccgcatatccgtacagagcgatcgttcatatttcaagcagcatcggttcatgcaccggatggatgatcggtccgaaaaccgtcgcaacagccggacactgcatctatgacacatcaagcggttcatttgccggtacagccactgtttcgccgggacggaacgggacaagctatccttacggctcagttaaatcgacgcgctactttattccgtcaggatggagaagcggaaacaccaattacgattacggcgcaatcgaactaagcgaaccgatcggcaatactgtcggatacttcggatactcgtacactacttcatcacttgttgggacaactgttaccatcagcggctacccaggcgataaaacagcaggcacacaatggcagcattcaggaccgattgccatctccgaaacgtataaattgcagtacgcaatggacacgtacggaggacaaagcggttcaccggtattcgaacaaagcagctccagaacgaactgcagcggtccgtgctcgcttgccgtacacacaaatggagtatacggcggctcctcgtacaacagaggcacccggattacaaaagaggtgttcgacaatttgaccaactggaaaaacagcgcacaataatacacgaagacagcccgcttccttttggaacgggctgtcacatctaacggccgtatacttaatttcctttaagcctgtactttttgccatctattgatatcgtgaaatttgaaggaccgctgatcggcaaataatagacaagctgaaactccgcttcctcaccaggtttgaatgg

SEQ ID NO: 174 - DNA, 14463 bp, Bacillus sp.
  source 1..14463: mol_type = unassigned DNA
tggaagtctttataatgaacccattacttctttaaagtcctggagagaaaatttattaaaagctcatgctgataaagaattaaatcatttaacaagtgatatttttgaacaaaatggtgaaagtccctatggagtatgcggtatgatcggcggaacatgggagtggactagaagtgagcttaaaacaaagagagctttccaccctatttttgagaatgtaccatttaatagtgttaactcatttgccgttcttaaaggaggatcattcttctctcatccaggcttaatgttcccttcttttagagcaaaagatattcctttctgtcgacacaatgaaatggggattagatgcgtaaagaatattccagtatataaaattagagaatcaattaatgggccaattactaataaagcaatttattaatcattctaggttagagacttgataaaagtatactaacattgtgtagtaatgttcagcttgtagaaaaaacaatgttttttctacaagattttattttaaatgcttttcaaaattatcagggattgagaatcagaaaaagagccattaagctcgatcttagctaggtattacgatcttctgtatattattgtgagaaatatagaagattcagttagttagcatttcgattttaagctgagcctgcaatagcaaagcatctgttttgattattctttttctgatacataagctaattttgtcgcttttcttttttgtcttttcacgcatttcgaggatgacttactataattctttcagcttttctatgtgttaagattcgaatagatgaaataactttaacaagttggtcaataagaacagatttaactttatgttaaaagagtatctcgtatagaacataagaagaatgacgagttttttaagattatcatcaattatgtgagaataaaatattataagggaaaatgaaggctgtcacgtttctcgacagccctagggaattcctctccttttcatttcgcccgtaatttcgggcacagtcccgtcggcaggcacattggcttctggtcgatcgggcttctcatgatgcagcattccaagccgaagacttcacggaaaaatggctgggtgaacacatcttccggtgttccggcgttgtatatttttccgtccagcacactgatcagatagtcagcatattgagcggcttggtttaaatcatggagcaccatgacaacggtgcggccatggtcgcggttcagctttttcagcagttcaagcacttcaatctgatgtgagatgtctaaatacgtggtcggctcatcaagcaaaagcaaatcagtgccttgcgcaagtgccatggaaatccaggctctttgtctttggccgcctgagagggcatcaagtgtccgatccttcagttcaatcatgcccgttgcttccagcgcccactctaccatgtcatgatcctcttgggtatgcttggataacagctttttgtgaggatgtctgccaaaatagcataattcctctaccgtcaatccttcaggagcctgaggagattgtggaagaatggccagtttttttgcgacttcttttgatggctggcggtggatgtcttttccttctagtagcactgtaccgctttttggggccatcagcctggcgagcgatttgaggattgttgatttaccgcagccattagcgccgatgagcgcagtgatttttccttcttctatctttaagtcgactccgtcaataatcactgtactgtcatatgaaagagtgagctggtctgcagccagttttcccatggtatcctctccctactgtttcctcgcttcgaatttcaataaatataagaaataaggcgcgccgatcacggctgtcagtattccggcaggtatttcaaccggaggcatgatgccgcgccctaacgtatctgcaattaataatataatagcaccaatcaatgccgatgcaggcagtaaatatttagctttttctccggtaagccgtctggcgatatgcggagcaagcaagccgataaaaccgattgagccgacgacggctacacagcttcccgccagcgccaccgcggtgaaaatcaggatgaatctcagccggtttgcgttttctccgagaccctgtgcaagctcatccccgagtgacataagatccagcttcggtatgagtatgcagacgatcggaaaaagaatcaaaagccatggcgcaagcagcttgacttcttcccagtttcttccccagaggcttcctgtcagccaaatgagtgcagcattcacgtcgcctggaaacttgaccatcatatattgcattccggcgtggcagaccgcgcctaaagcaatgcctgataaagccagtgaagagggctgaatgctcttttttcgggctatcattaataatagtacagcaataatggcggctccggcaaatgcggagaacggaagcacgtataccggcgactcaggaaagatgagaatcacagccatcgccgcaagtccggagccttttgaaatgccgacaacgtccggggaagcgagcggatttcggatcacaccctgtaaaatcgctccggcagcggcaagtccagcacctgccaaaatcgctaatataatgcggggaaggcgatattgctggatgataaattcaaaggaatgatccagtcccagcagattcgtcactaccgcatcaggtgaaatgtataatgcaccgattccaatgctgatgacggacagaacgattaaaatcacggccaatatgagtatcgccagtaaggggcgtttttgttttctggttgttttcttcatttcaggtttcgccctttccttgccaaatataagaaaaacggcgttccgataatcgcggtgacaatgccgaccggtgattcataaggaaatgcaatccatctggccagaacatctgcgtacaccagcaaaatggcaccgaacagtgccgaaaacggaagcacgtattgataatgttctccgatcagcttgcggacaatatgcgggacgagcagcccgacaaagccaatcggcccggcgacggctacggaagcgccggaaagaattaaaataatcaaactgatcagaatcctgatgccgttcatattttgtccaagcccttttgctgtttcgtctccgagaccgagaacagaaacagaaccggaaaatacgagggcaagcccgatgccaatgacagaaaaaggagcgatggttatgacgtcctgccagttgctgccgtcgattgcgcctgtcatccagtacagaacatcctcacctgactcatttaaaataatgatggcctgtgtcatagaggagaggaacaagtgcacggccattcctgacagcgccagcttgacaggcgtcattccgccggatgaggcaatcatatacacaatcgcgccgcctgctgccgcacccgcaaaagcgaatataacagatgaatagggcgatgccggcagaatgacgagagaagcaacaacaaaaagcgatgcacccgcattcacaccgaaaatttggggtgaagccagaggatttctggtcatagcctgcatcagcgcccctgctacagctaggctggcgccgacaaaaacgccgattaatgtgcggggaaggcgaagagtagagatgatgagctgttcctttgaaccgtcccatacaaaaagatatttcaatgaatctatgatgctgatgtctgaggctcctactgaaagattcagcccaagcccaaatataaaaataatcagtgcaatgataaacatcatcagtcttgatgatgagcgccgtttggctgaatgatacaacagtctcacttccttactgcgtctggttgcaaaaacgaagaagcaaggattcccctcgcttctcatttgtcctatttattatacacttttttaagcacatctttggcgcttgtttcactagacttgatgcctctgaatcttgtccaagtgtcacggtccgcatcatagacttgtccatttttcaccgctttgagatttttccagagcgggttcgttttccactcatctacaatggttttgccttcgttggctgagatgaacaaaatatcaggatcgattttgctcaattgctcaaggctgacctcttgataggcgttatctgacttcacagcgtgtgtaaagcctagcattttaaagatttctccgtcataggatgatgatgtatgaagctggaaggaatccgctcttgcaacgccgagaacgatgttgcggttttcatctttcggaagttcggcttttagatcgttgatgacttttttgtgctcggcaagcttttcttttccttcatcttctttatttaatgctttagcaatggtcgtaaagctgtcgatcgtttcgtcatatgtcgcttcacggctttttaattcaatcgtcggggcgatttttttcagctgtttataaatgtttttatggcgctcagcgtcagcgatgattaaatcaggcttcaaggaactgatgacctcaagattgggttcgctgcgtgtgcctacagatgtgtaatcaatggagctgccgacaagctttttaatcatatcttttttgttgtcatctgcgatgcccaccggcgtaatgccgagattgtgaacggcatccaagaatgaaagctcaagcacaaccacccgcttaggtgtgccgcttactgtcgtttttccttcttcgtcatggatcactctggaatccttagactcgcttttgccgcttccgttgttattctggcttgatgaacagccggatacaatgaggcaggcgagcaataaaacactcatgatggcaatcaacttgttagaataggtgcgcatgtcattcttccttttttcagatttagtaatgagaatcattatcacatgtaacactataatagcatggcttatcatgtcaatatttttttagtaaagaaagctgcgtttttactgctttctcatgaaagcatcatcagacacaaataagtggtatgcagcgttaccgtgtcttcgagacaaaaacgcatgggcgttggctttagaggtttcgaacatatcagcagtgacataaggaaggagagtgctgagataaccggacaatttcttttctatttcatctgttagtgcaaattcaatgtcgccgatattcatgataatcgagaaaacaaagtcgatatcgatatgaaaatgttcctcggcaaaaaccgcaagctcgtgaattcctggtgaacatccggcacgcttatggaaaatctgtttgactaaatcactcacaatccaagcattgtattgctgttctggtgaaaagtattgcattagacatacctcctgctcgtacggataaaggcagcgtttcatggtcgtgtgctccgtgcagcggcttctccttaattttgatttttctgaaaataggtcccgttcctatcactttaccatggacggaaaacaaatagctactaccattcctcctgtttttctcttcaatgttctggaatctgtttcaggtacagacgatcgggtatgaaagaaatatagaaaacatgaaggaggaatatcgacatgaaaccagttgtaaaagagtatacaaatgacgaacagctcatgaaagatgtagaggaattgcagaaaatgggtgttgcgaaagaggatgtatacgtcttagctcacgacgatgacagaacggaacgcctggctgacaacacgaacgccaacacgatcggagccaaagaaacaggtttcaagcacgcggtgggaaatatcttcaataaaaaaggagacgagctccgcaataaaattcacgaaatcggtttttctgaagatgaagccgctcaatttgaaaaacgcttagatgaaggaaaagtgcttctctttgtgacagataacgaaaaagtgaaagcttgggcataaagcaaggaaaaaaccaaaaggccaatgtcggccttttggtttttttgcggtctttgcggtgggattttgcagaatgccgcaataggatagcggaacattttcggttctgaatgtccctcaatttgctattatatttttgtgataaattggaataaaatctcacaaaatagaaaatgggggtacatagtggatgaaaaaagtgatgttagctacggctttgtttttaggattgactccagctggcgcgaacgcagctgatttaggccaccagacgttgggatccaatgatggctggggcgcgtactcgaccggcacgacaggcggatcaaaagcatcctcctcaaatgtgtataccgtcagcaacagaaaccagcttgtctcggcattagggaaggaaacgaacacaacgccaaaaatcatttatatcaagggaacgattgacatgaacgtggatgacaatctgaagccgcttggcctaaatgactataaagatccggagtatgatttggacaaatatttgaaagcctatgatcctagcacatggggcaaaaaagagccgtcgggaacacaagaagaagcgagagcacgctctcagaaaaaccaaaaagcacgggtcatggtggatatccctgcaaacacgacgatcgtcggttcagggactaacgctaaagtcgtgggaggaaacttccaaatcaagagtgataacgtcattattcgcaacattgaattccaggatgcctatgactattttccgcaatggttgtaaaacgacggccagtgaattctgatcaaatggttcagtgagagcgaagcgaacacttgattttttaattttctatcttttataggtcattagagtatacttatttgtcctataaactatttagcagcataatagatttattgaataggtcatttaagttgagcatattagaggaggaaaatcttggagaaatatttgaagaacccgaggatctagatcaggtaccgcaacgttcgcagatgctgctgaagagattattaaaaagctgaaagcaaaaggctatcaattggtaactgtatctcagcttgaagaagtgaagaagcagagaggctattgaataaatgagtagaaagcgccatatcggcgcttttcttttggaagaaaatatagggaaaatggtacttgttaaaaattcggaatatttatacaatatcatatgtatcacattgaaaggaggggcctgctgtccagactgtccgctgtgtaaaaaaaaggaataaaggggggttgacattattttactgatatgtataatataatttgtataagaaaatggaggggccctcgaaacgtaagatgaaaccttagataaaagtgctttttttgttgcaattgaagaattattaatgttaagcttaattaaagataatatctttgaattgtaacgcccctcaaaagtaagaactacaaaaaaagaatacgttatatagaaatatgtttgaaccttcttcagattacaaatatattcggacggactctacctcaaatgcttatctaactatagaatgacatacaagcacaaccttgaaaatttgaaaatataactaccaatgaacttgttcatgtgaattatcgctgtatttaattttctcaattcaatatataatatgccaatacattgttacaagtagaaattaagacacccttgatagccttactatacctaacatgatgtagtattaaatgaatatgtaaatatatttatgataagaagcgacttatttataatcattacatatttttctattggaatgattaagattccaatagaatagtgtataaattatttatcttgaaaggagggatgcctaaaaacgaagaacattaaaaacatatatttgcaccgtctaatggatttatgaaaaatcattttatcagtttgaaaattatgtattatggagctctgaaaaaaaggagaggataaagaatgaaaaaaccgctgggaaaaattgtcgcaagcacagcacttcttatttcagtggcatttagctcatctattgcatcagcagctcaaccggcgaaaaatgttgaaaaggattatattgtcggatttaagtcaggagtgaaaaccgcatctgtcaaaaaggacatcatcaaagagagcggcggaaaagtggacaagcagtttagaatcatcaacgcggcaaaagcgaagctagacaaagaagcgcttaaggaagtcaaaaatgatccggatgtcgcttatgtggaagaggatcatgtggcccatgccttggcgcaaaccgttccttacggcattcctctcattaaagcggacaaagtgcaggctcaaggctttaagggagcgaatgtaaaagtagccgtcctggatacaggaatccaagcttctcatccggacttgaacgtagtcggcggagcaagctttgtggctggcgaagcttataacaccgacggcaacggacacggcacacatgttgccggtacagtagctgcgcttgacaatacaacgggtgtattaggcgttgcgccaagcgtatccttgtacgcggttaaagtactgaattcaagcggaagcggatcatacagcggcattgtaagcggaatcgagtgggcgacaacaaacggcatggatgttatcaatatgagccttgggggagcatcaggctcgacagcgatgaaacaggcagtcgacaatgcatatgcaagaggggttgtcgttgtagctgcagcagggaacagcggatcttcaggaaacacgaatacaattggctatcctgcgaaatacgattctgtcatcgctgttggtgcggtagactctaacagcaacagagcttcattttccagcgtcggagcagagcttgaagtcatggctcctggcgcaggcgtatacagcacttacccaacgaacacttatgcaacattgaacggaacgtcaatggcttctcctcatgtagcgggagcagcagctttgatcttgtcaaaacatccgaacctttcagcttcacaagtccgcaaccgtctctccagcacggcgacttatttgggaagctccttctactatgggaaaggtctgatcaatgtcgaagctgccgctcaataatcgcatgttcaatccgctccataatcggtcgacgcggcggttcgcgtccggacagcacatcaccgaaatatttcgacggcccagccggctagcgcgttaatccgcggatatatagcggccgcagatctgggaccaataataatgactagagaagaaagaatgaagattgttcatgaaattaaggaacgaatattggataaagtgggatatttttaaaatatatatttatgttacagtaatattgacttttaaaaaaggattgattctaatgaagaaagcagacaagtaagcctcctaaattcactttagataaaaatttaggaggcatatcaaatgaactttaataaaattgatttagacaattggaagagaaaagagatatttaatcattatttgaaccaacaaacgacttttagtataaccacagaaattgatattagtgttttataccgaaacataaaacaagaaggatataaattttaccctgcatttattttcttagtgacaagggtgataaactcaaatacagcttttagaactggttacaatagcgacggagagttaggttattgggataagttagagccactttatacaatttttgatggtgtatctaaaacattctctggtatttggactcctgtaaagaatgacttcaaagagttttatgatttatacctttctgatgtagagaaatataatggttcggggaaattgtttcccaaaacacctatacctgaaaatgctttttctctttctattattccatggacttcatttactgggtttaacttaaatatcaataataatagtaattaccttctacccattattacagcaggaaaattcattaataaaggtaattcaatatatttaccgctatctttacaggtacatcattctgtttgtgatggttatcatgcaggattgtttatgaactctattcaggaattgtcagataggcctaatgactggcttttatatgagataatgccgactgtactttttacagtcggttttctaacgatacattaataggtacgaaaaagcaactttttttgcgcttaaaaccagtcataccaataacttaagggtaactagcctcgccggaaagagcgaaaatgcctcacatttgtgccacctaaaaaggagcgatttacatatgagttatgcagtttgtagaatgcaaaaagtgaaatcagctggactaaaaggggccgcagagtagaatggaaaaggggatcggaaaacaagtatataggaggagacctatttatggcttcagaaaaagacgcaggaaaacagtcagcagtaaagcttgttccattgcttattactgtcgctgtgggactaatcatctggtttattcccgctccgtccggacttgaacctaaagcttggcatttgtttgcgatttttgtcgcaacaattatcggctttatctccaagcccttgccaatgggtgcaattgcaatttttgcattggcggttactgcactaactggaacactatcaattgaggatacattaagcggattcgggaataagaccatttggcttatcgttatcgcattctttatttcccggggatttatcaaaaccggtctcggtgcgagaatttcgtatgtattcgttcagaaattcggaaaaaaaacccttggactttcttattcactgctattcagtgatttaatactttcacctgctattccaagtaatacggcgcgtgcaggaggcattatatttcctattatcagatcattatccgaaacattcggatcaagcccggcaaatggaacagagagaaaaatcggtgcattcttattaaaaaccggttttcaggggaatctgatcacatctgctatgttcctgacagcgatggcggcgaacccgctgattgccaagctggcccatgatgtcgcaggggtggacttaacatggacaagctgggcaattgccgcgattgtaccgggacttgtaagcttaatcatcacgccgcttgtgatttacaaactgtatccgccggaaatcaaagaaacaccggatgcggcgaaaatcgcaacagaaaaactgaaagaaatgggaccgttcaaaaaatcggagctttccatggttatcgtgtttcttttggtgcttgtgctgtggatttttggcggcagcttcaacatcgacgctaccacaaccgcattgatcggtttggccgttctcttattatcacaagttctgacttgggatgatatcaagaaagaacagggcgcttgggatacgctcacttggtttgcggcgcttgtcatgctcgccaacttcttgaatgaattaggcatggtgtcttggttcagtaatgccatgaaatcatccgtatcagggttctcttggattgtggcattcatcattttaattgttgtgtattattactctcactatttctttgcaagtgcgacagcccacatcagtgcgatgtattcagcatttttggctgtcgtcgtggcagcgggcgcaccgccgcttttagcagcgctgagcctcgcgttcatcagcaacctgttcgggtcaacgactcactacggttctggagcggctccggtcttcttcggagcaggctacatcccgcaaggcaaatggtggtccatcggatttatcctgtcgattgttcatatcatcgtatggcttgtgatcggcggattatggtggaaagtactaggaatatggtagaaagaaaaaggcagacgcggtctgcctttttttattttcactccttcgtaagaaaatggattttgaaaaatgagaaaattccctgtgaaaaatggtatgatctaggtagaaaggacggctggtgctgtggtgaaaaagcggttccatttttccctgcaaacaaaaataatggggctgattgcggctctgctggtctttgtcattggtgtgctgaccattacgttagccgttcagcatacacagggagaacggagacaggcagagcagctggcggttcaaacggcgagaaccatttcctatatgccgccggttaaagagctcattgagagaaaagacggacatgcggctcagacgcaagaggtcattgaacaaatgaaagaacagactggtgcgtttgccatttatgttttgaacgaaaaaggagacattcgcagcgcctctggaaaaagcggattaaagaaactggagcgcagcagagaaattttgtttggcggttcgcatgtttctgaaacaaaagcggatggacgaagagtgatcagagggagcgcgccgattataaaagaacagaagggatacagccaagtgatcggcagcgtgtctgttgattttctgcaaacggagacagagcaaagcatcaaaaagcatttgagaaatttgagtgtgattgctgtgcttgtactgctgctcggatttattggcgccgccgtgctggcgaaaagcatcagaaaggatacgctcgggcttgaaccgcatgagatcgcggctctatatcgtgagaggaacgcaatgcttttcgcgattcgagaagggattattgccaccaatcgtgaaggcgtcgtcaccatgatgaacgtatcggcggccgagatgctgaagctgcccgagcctgtgatccatcttcctatagatgacgtcatgccgggagcagggctgatgtctgtgcttgaaaaaggagaaatgctgccgaaccaggaagtaagcgtcaacgatcaagtgtttattatcaatacgaaagtgatgaatcaaggcgggcaggcgtatgggattgtcgtcagcttcagggagaaaacagagctgaagaagctgatcgacacattgacagaggttcgcaaatattcagaggatctcagggcgcagactcatgaattttcaaataagctttatgcgattttagggctgcttgagcttggggagtatgatgaagccattgatctgattaaagaggaatatgcgatacaaaatgaacagcatgatcttttattccataacatccattcgcagcaggtgcaggccattttgttagggaaaataagcaaggcatcggaaaagaaggtcaagctggtgattgatgagaacagctcactcgcgcctcttcctgcgcatatcggcttgtcccatcttattacgattattggcaatttaattgataacgctttcgaagctgtagcggagcaaagcgtgaaggaagttttgttttttatcacggatatgggccatgacattgtcattgaagtatcagacacagggcccggtgtgccgccagagaaaatagaagctgtgtttgagagaggctattcttcaaaggggatgaggagaggctacggtctggccaatgtgaaagactcagtgcgtgaactgggcggctggatcgaactggcgaatcaaaaaactggcggggcggtattcactgtatttataccgaaggagaaacaaagggggaatccatttgattcacatcgcgattgcggaggatgattttcgagttgcgcaaatccatgagagattgattaaacagcttgatggattcaagattatcggcaaggcggctaacgcaaaagagacattggcgcttttgaaggaacacaaggctgatttgcttctgctggatatttatatgccggacgagcttgggaccgcgttgattcctgatatacgaagccgatttcctgaagtggacattatgattatcacagcggcaacagaaacccgtcatttgcaggaagcgctaagggcgggaattgcccactatttgatcaaacccgtaacagctgacaagttcaggcaggtgctgcttcagtataaagaaaaaaggaagctgctcatgtctcagccggaggtcagccaatccatgatcgaccatatttttgggaacggtgtgaagacagctttgccggcagaggatttgccgactggcattaattcgattacactgcgaaaaattaaggaagcgcttcagactgcgtcagaaggattgacagcggaggaacttggggaaaaaatgggggcgtcacgaacaactgcccgccgttatgccgagtaccttgtgtcaaaggaagaagcaagagccgagcttgaatacgggattatcggcaggccggagagaaaatattatttggcggcggattagatatgaaaaaatctataatcctattgaatattctattgatctttatgcagggtgatatcaggcaggcggctgcgccgcgcctgccggacgggccgatagaaattgtcgtccctgccgaaccttctggcggctgggatgtcacagcgcaggcgatccaatcagttttgaggcagaagcagatcgtgaaggatgatgttcatatcgtctataaatccggcggcgggggagagaaaggctggaaatatgtcaacaaaagcagcaaacaaaccatcagcatgacgtccagcctaatattgagcaatgatcttctcgggcaaagcaaattaaaaatgtccgattttacg

SEQ ID NO: 175 - DNA, 5025 bp, Lederbergia lenta
  source 1..5025: mol_type = unassigned DNA
aagggcgaattcgcggccgctaaattcaattcgccctatagtgagtcgtattacaattcactggccgtcgttttacaacgtcgtgactgggaaaaccctggcgttacccaacttaatcgccttgcagcacatccccctttcgccagctggcgtaatagcgaagaggcccgcaccgatcgcccttcccaacagttgcgcagcctatacgtacggcagtttaaggtttacacctataaaagagagagccgttatcgtctgtttgtggatgtacagagtgatattattgacacgccggggcgacggatggtgatccccctggccagtgcacgtctgctgtcagataaagtctcccgtgaactttacccggtggtgcatatcggggatgaaagctggcgcatgatgaccaccgatatggccagtgtgccggtctccgttatcggggaagaagtggctgatctcagccaccgcgaaaatgacatcaaaaacgccattaacctgatgttctggggaatataaatgtcaggcatgagattatcaaaaaggatcttcacctagatccttttcacgtagaaagccagtccgcagaaacggtgctgaccccggatgaatgtcagctactgggctatctggacaagggaaaacgcaagcgcaaagagaaagcaggtagcttgcagtgggcttacatggcgatagctagactgggcggttttatggacagcaagcgaaccggaattgccagctggggcgccctctggtaaggttgggaagccctgcaaagtaaactggatggctttctcgccgccaaggatctgatggcgcaggggatcaagctctgatcaagagacaggatgaggatcgtttcgcatgattgaacaagatggattgcacgcaggttctccggccgcttgggtggagaggctattcggctatgactgggcacaacagacaatcggctgctctgatgccgccgtgttccggctgtcagcgcaggggcgcccggttctttttgtcaagaccgacctgtccggtgccctgaatgaactgcaagacgaggcagcgcggctatcgtggctggccacgacgggcgttccttgcgcagctgtgctcgacgttgtcactgaagcgggaagggactggctgctattgggcgaagtgccggggcaggatctcctgtcatctcaccttgctcctgccgagaaagtatccatcatggctgatgcaatgcggcggctgcatacgcttgatccggctacctgcccattcgaccaccaagcgaaacatcgcatcgagcgagcacgtactcggatggaagccggtcttgtcgatcaggatgatctggacgaagagcatcaggggctcgcgccagccgaactgttcgccaggctcaaggcgagcatgcccgacggcgaggatctcgtcgtgacccatggcgatgcctgcttgccgaatatcatggtggaaaatggccgcttttctggattcatcgactgtggccggctgggtgtggcggaccgctatcaggacatagcgttggctacccgtgatattgctgaagagcttggcggcgaatgggctgaccgcttcctcgtgctttacggtatcgccgctcccgattcgcagcgcatcgccttctatcgccttcttgacgagttcttctgaattattaacgcttacaatttcctgatgcggtattttctccttacgcatctgtgcggtatttcacaccgcatacaggtggcacttttcggggaaatgtgcgcggaacccctatttgtttatttttctaaatacattcaaatatgtatccgctcatgagacaataaccctgataaatgcttcaataatattgaaaaaggaagagtatgagtattcaacatttccgtgtcgcccttattcccttttttgcggcattttgccttcctgtttttgctcacccagaaacgctggtgaaagtaaaagatgctgaagatcagttgggtgcacgagtgggttacatcgaactggatctcaacagcggtaagatccttgagagttttcgccccgaagaacgttttccaatgatgagcacttttaaagttctgctatgtggcgcggtattatcccgtattgacgccgggcaagagcaactcggtcgccgcatacactattctcagaatgacttggttgagtactcaccagtcacagaaaagcatcttacggatggcatgacagtaagagaattatgcagtgctgccataaccatgagtgataacactgcggccaacttacttctgacaacgatcggaggaccgaaggagctaaccgcttttttgcacaacatgggggatcatgtaactcgccttgatcgttgggaaccggagctgaatgaagccataccaaacgacgagcgtgacaccacgatgcctgtagcaatggcaacaacgttgcgcaaactattaactggcgaactacttactctagcttcccggcaacaattaatagactggatggaggcggataaagttgcaggaccacttctgcgctcggcccttccggctggctggtttattgctgataaatctggagccggtgagcgtgggtctcgcggtatcattgcagcactggggccagatggtaagccctcccgtatcgtagttatctacacgacggggagtcaggcaactatggatgaacgaaatagacagatcgctgagataggtgcctcactgattaagcattggtaactgtcagaccaagtttactcatatatactttagattgatttaaaacttcatttttaatttaaaaggatctaggtgaagatcctttttgataatctcatgaccaaaatcccttaacgtgagttttcgttccactgagcgtcagaccccgtagaaaagatcaaaggatcttcttgagatcctttttttctgcgcgtaatctgctgcttgcaaacaaaaaaaccaccgctaccagcggtggtttgtttgccggatcaagagctaccaactctttttccgaaggtaactggcttcagcagagcgcagataccaaatactgtccttctagtgtagccgtagttaggccaccacttcaagaactctgtagcaccgcctacatacctcgctctgctaatcctgttaccagtggctgctgccagtggcgataagtcgtgtcttaccgggttggactcaagacgatagttaccggataaggcgcagcggtcgggctgaacggggggttcgtgcacacagcccagcttggagcgaacgacctacaccgaactgagatacctacagcgtgagctatgagaaagcgccacgcttcccgaagggagaaaggcggacaggtatccggtaagcggcagggtcggaacaggagagcgcacgagggagcttccagggggaaacgcctggtatctttatagtcctgtcgggtttcgccacctctgacttgagcgtcgatttttgtgatgctcgtcaggggggcggagcctatggaaaaacgccagcaacgcggcctttttacggttcctgggcttttgctggccttttgctcacatgttctttcctgcgttatcccctgattctgtggataaccgtattaccgcctttgagtgagctgataccgctcgccgcagccgaacgaccgagcgcagcgagtcagtgagcgaggaagcggaagagcgcccaatacgcaaaccgcctctccccgcgcgttggccgattcattaatgcagctggcacgacaggtttcccgactggaaagcgggcagtgagcgcaacgcaattaatgtgagttagctcactcattaggcaccccaggctttacactttatgcttccggctcgtatgttgtgtggaattgtgagcggataacaatttcacacaggaaacagctatgaccatgattacgccaagctcagaattaaccctcactaaagggactagtcctgcaggtttaaacgaattcgcccttgctgctgaagaagcaaaagaaaaatatttaattggctttaatgagcaggaagctgtcagtgagtttgtagaacaagtagaggcaaatttacaggtcgccattctctctgaggaagaggaagtcgaaattgaattgcttcatgaatttgaaacgattcctgttttatccgttgagttaagcccagaagatgtggacgcgcttgaactcgatccagcgatttcttatattgaagaggatgcagaagtaacgacaatggcgcaatcggtaccatggggaattagccgtgtgcaagccccagctgcccataaccgtggattgacaggttctggtgtaaaagttgctgtcctcgatacagggatatccactcatccagatctaaatattcgtggtggcgcaagctttgtaccaggggaaccgtcgactcaagatgggaatgggcatggcacgcatgtggccgggacgatcgctgctttaaacaattcgattggcgttcttggcgtagctcctagcgctgagctatacgctgttaaagtcctaggggcgagcggttcaggttcggtcagctcgattgcccaaggattggaatgggcagggaacaatggcatgcacgttgctaatttgagtttaggaagcccttcgccaagtgccacactcgagcaagctgttaatagcgcgacttctagaggcgttcttgttgtagcggcatctgggaattcaggtgcaggctcaatcagctatccggcgcgctatgcgaacgcaatggcagtcggagctactgatcaaaacaacaaccgcgctagcttttcacagtatggcgcaggccttgacattgtcgcacccggggtaaacgtgcagagcacatacccaggttcaacatatgccagcttaaacggtacatcgagcgctactcctcatgttgcaggtgcggccgcccttgttaaacaaaagaacccatcttggtctaatgtacaaattcgaaatcatctaaagaatacggcaactagtttaggaagcacgaacttgtatggaagcggacttgttaacgcagaagcggcaacgcgttaatcg

SEQ ID NO: 176 - DNA, 9152 bp, Alkalihalobacillus clausii
  source 1..9152: mol_type = unassigned DNA
gagctcgttattaatctgttcagcaatcgggcgcgattgctgaataaaagatacgagagacctctcttgtatcttttttattttgagtggttttgtccgttacactagaaaaccgaaagacaataaaaattttattcttgctgagtctggctttcggtaagctagacaaaacggacaaaataaaaattggcaagggtttaaaggtggagattttttgagtgatcttctcaaaaaatactacctgtcccttgctgatttttaaacgagcacgagagcaaaacccccctttgctgaggtggcagagggcaggtttttttgtttcttttttctcgtaaaaaaaagaaaggtcttaaaggttttatggttttggtcggcactgccgacagcctcgcagagcacacactttatgaatataaagtatagtgtgttatactttacttggaagtggttgccggaaagagcgaaaatgcctcacatttgtgccacctaaaaaggagcgatttacatatgagttatgcagtttgtagaatgcaaaaagtgaaatcagctggactaaaaggcagagctcggtaccagatccaatatctttgaattgtaacgcccctcaaaagtaagaactacaaaaaaagaatacgttatatagaaatatgtttgaaccttcttcagattacaaatatattcggacggactctacctcaaatgcttatctaactatagaatgacatacaagcacaaccttgaaaatttgaaaatataactaccaatgaacttgttcatgtgaattatcgctgtatttaattttctcaattcaatatataatatgccaatacattgttacaagtagaaattaagacacccttgatagccttactatacctaacatgatgtagtattaaatgaatatgtaaatatatttatgataagaagcgacttatttataatcattacatatttttctattggaatgattaagattccaatagaatagtgtataaattatttatcttgaaaggagggatgcctaaaaacgaagaacattaaaaacatatatttgcaccgtctaatggatagaaaggaggtgatccagccgcaccttatgaaaaatcattttatcagtttgaaaattatgtattatggagctcagaggaggagagtgagtaatgatgaggaaaaagagtttttggcttgggatgctgacggccttcatgctcgtgttcacgatggcattcagcgattccgcttctgctgctgaagaagcaaaagaaaaatatttaattggctttaatgagcaggaagctgtcagtgagtttgtagaacaagtagaggcaaatgacgaggtcgccattctctctgaggaagaggaagtcgaaattgaattgcttcatgaatttgaaacgattcctgttttatccgttgagttaagcccagaagatgtggacgcgcttgaactcgatccagcgatttcttatattgaagaggatgcagaagtaacgacaatggcgcaatcggtaccatggggaattagccgtgtgcaagccccagctgcccataaccgtggattgacaggttctggtgtaaaagttgctgtcctcgatacaggtatttccactcatccagacttaaatattcgtggtggcgctagctttgtaccaggggaaccatccactcaagatgggaatgggcatggcacgcatgtggccgggacgattgctgctttaaacaattcgattggcgttcttggcgtagcgccgagcgcggaactatacgctgttaaagtattaggggcgagcggttcaggttcggtcagctcgattgcccaaggattggaatgggcagggaacaatggcatgcacgttgctaatttgagtttaggaagcccttcgccaagtgccacacttgagcaagctgttaatagcgcgacttctagaggcgttcttgttgtagcggcatctgggaattcaggtgcaggctcaatcagctatccggcccgttatgcgaacgcaatggcagtcggagctactgaccaaaacaacaaccgcgccagcttttcacagtatggcgcagggcttgacattgtcgcaccaggtgtaaacgtgcagagcacatacccaggttcaacgtatgccagcttaaacggtacatcgagcgctactcctcatgttgcaggtgcagcagcccttgttaaacaaaagaacccatcttggtccaatgtacaaatccgcaatcatctaaagaatacggcaacgagcttaggaagcacgaacttgtatggaagcggacttgtcaatgcagaagcggcaacgcgataacgcgtagggcccgcggctagcggccgcgtcgactagaagagcagagaggacggatttcctgaaggaaatccgtttttttattttgcccgtcttataaatttcgttgtccaactcgcttaattgcgagtttttatttcgtttatttcaattaaggtaactaaagatcctctagagtcgattatgtcttttgcgcagtcggcttaaaccagttttcgctggtgcgaaaaaagagtgtcttgtgacacctaaattcaaaatctatcggtcagatttataccgatttgattttatatattcttgaataacatacgccgagttatcacataaaagcgggaaccaatcatcaaatttaaacttcattgcataatccattaaactcttaaattctacgattccttgttcatcaataaactcaatcatttctttaattaatttatatctatctgttgttgttttctttaataattcatcaacatctacaccgccataaactatcatatcttctttttgatatttaaatttattaggatcgtccatgtgaagcatatatctcacaagacctttcacacttcctgcaatctgcggaatagtcgcattcaattcttctgtaattatttttatctgttcataagatttattaccctcatacatcactagaatatgataatgctcttttttcatcctaccttctgtatcagtatccctatcatgtaatggagacactacaaattgaatgtgtaactcttttaaatactctaaccactcggcttttgctgattctggatataaaacaaatgtccaattacgtcctcttgaatttttcttgttttcagtttcttttattacattttcgctcatgatataataacggtgctaatacacttaacaaaatttagtcatagataggcagcatgccagtgctgtctatctttttttgtttaaaatgcaccgtattcctcctttgcatatttttttattagaataccggttgcatctgatttgctaatattatatttttctttgattctatttaatatctcattttcttctgttgtaagtcttaaagtaacagcaacttttttctcttcttttctatctacaaccatcactgtacctcccaacatctgtttttttcactttaacataaaaaacaaccttttaacattaaaaacccaatatttatttatttgtttggacaatggacaatggacacctaggggggaggtcgtagtacccccctatgttttctcccctaaataaccccaaaaatctaagaaaaaaagacctcaaaaaggtctttaattaacatctcaaatttcgcatttattccaatttcctttttgcgtgtgatgcgctgcgtccattaaaaatcctagagctttgaaaccgaaagttaatagctgtcgctactactttcgcttacgctctaagtatattttaaggactgtcacacgcaaaaagttttctcggcataaaagtacctctacatctctaaatcgtctgtacgctgtttctcacgctttctatcgaccttctggacattatcctgtacaacatccataaactgtcccacacgctcaaatttggaatcattaaagaatttctctttaagcctattaaaccctttctcaaacccagggaaattcgccctcgcagcacgatataaagtcactgtactagcttgaaatttctctgatacattcaactgctcattcaaactatcattctctcgctttaatttattaacctctttacttttttcgtgatacccctctttccatgtattcactacttctttcaaactctctctacgtttttttaattcttgattttctgtgtaatagtctgtgctcttaatattttcgtaatcatcaacaatccgttctgcagaagagattgtttcttgcaggcgttcaaattcatcagcagttaatatctttctaccagtctcttcacgtccagagaacaaacctgtacgctcattttcataatcaaagggtttcgtagacctcatatgctctattccactctgtaactgcttatttgccttctgtaactcatccttaacttcttgcagttcctgtttatgaaatacagtatctttcttgtactgatccatcgctttatgttctcgttctgtaacctctttggacgtgcctctttcaagttcataacctttctcattcacatactcattaaatctatcttgtaattgagtaaagtctttcttgttgcctaactgttcttttgcagacaatctcccgtcctctgttaaagggacaaaaccaaagtgcatatgtgggactctttcatccagatggacagtcgcatacagcatattttccttaccgtattcattttctagaaactccaagctatctttaaaaaatcgttctatttcttctccgcttaaatcatcaaagaaatctttatcacttgtaaccagtccgtccacatgtcgaattgcatctgaccgaattttacgtttccctgaataattctcatcaatcgtttcatcaattttatctttatactttatattttgtgcgttaatcaaatcataatttttatatgtttcctcatgatttatgtctttattattatagtttttattctctctttgattatgtctttgtatcccgtttgtattacttgatcctttaactctggcaaccctcaaaattgaatgagacatgctacacctccggataataaatatatataaacgtatatagatttcataaagtctaacacactagacttatttacttcgtaattaagtcgttaaaccgtgtgctctacgaccaaaactataaaacctttaagaactttctttttttacaagaaaaaagaaattagataaatctctcatatcttttattcaataatcgcatccgattgcagtataaatttaacgatcactcatcatgttcatatttatcagagctcgtgctataattatactaattttataaggaggaaaaaatatgggcatttttagtatttttgtaatcagcacagttcattatcaaccaaacaaaaaataagtggttataatgaatcgttaataagcaaaattcatataaccaaattaaagagggttataatgaacgagaaaaatataaaacacagtcaaaactttattacttcaaaacataatatagataaaataatgacaaatataagattaaatgaacatgataatatctttgaaatcggctcaggaaaaggccattttacccttgaattagtaaagaggtgtaatttcgtaactgccattgaaatagaccataaattatgcaaaactacagaaaataaacttgttgatcacgataatttccaagttttaaacaaggatatattgcagtttaaatttcctaaaaaccaatcctataaaatatatggtaatataccttataacataagtacggatataatacgcaaaattgtttttgatagtatagctaatgagatttatttaatcgtggaatacgggtttgctaaaagattattaaatacaaaacgctcattggcattacttttaatggcagaagttgatatttctatattaagtatggttccaagagaatattttcatcctaaacctaaagtgaatagctcacttatcagattaagtagaaaaaaatcaagaatatcacacaaagataaacaaaagtataattatttcgttatgaaatgggttaacaaagaatacaagaaaatatttacaaaaaatcaatttaacaattccttaaaacatgcaggaattgacgatttaaacaatattagctttgaacaattcttatctcttttcaatagctataaattatttaataagtaagttaagggatgcataaactgcatcccttaacttgtttttcgtgtgcctattttttgtgaatcgacctgcaggcatgcaagcttaagcgagttggaatttaaatatgatatctacattatcagcagtaacatcaacctttgatacaaggttgttgacgattttctttttattatcatatgatagttcattaatcggaattgagcccaactgagttttaactaactcaaaaacatcagtagagtcattaaatttattttcgctaatcttagctttaagcagctttttctcagcctgaagggaatcagtacgatctttcaactcatccatagtgataaaatcatttaggtacaaatcagagttcttttgtatttttttatcgatctgtgaaatttgctttttaaatgacgaagtatcaagaataggttggttgttgccattgataattttcaataaggagtcattattttcttgaaatccaatcaggttgtcaataacagtattttctaaattacttaaatcataagttcctgaatcacactttttattgtcattatatactgtaattccttttgtttttcgaggaaatctatttgcacagtgatatttcatagtgcggcttccatcttttcttttgtggccaagaacaatttttaaaggtgctccacagtaaccgcaccttgccatccctgacagcatatatttagcttggaaaggtctagggttgttatttctttcataagtctgctgttgtctttcttctagctctttttgaacttttaaataagtctcataagggataattggtttgtgcataccttcaaataggctgtccttaaatttgatataaccacagtaaactggattatcaagtgtttgtcttagggtacgataagaccacggtatatctttaccgatgtgtccagattcattgagtttatctcttaattttgtaagtgatattcctgataaataatcagtgaatatttgttcaactattgtagcttgtaaaggaacaatttctaatatacctgtctttctgttgtggtaatacccaaaagctgtcttagtccacatcatagacttaccagatttcgctcgccctagtttacccatagtcatgcgttcttttatattctctctttcaaactcattaattgcagaaagaatagtgagaaacaagctacccatagcagaagaagtatcaatactttcattaagcgagataaagtctattttattttttgtgaacacatccttaacaagataaagagtatctcttacactacgtgaaaggcggtctagcttatatacaagaactgtatcaaaagctttattctcgatatcgttgattaatctttgcattgctgggcgttcaagtttggcccctgaaaaaccagcatcagtataagtatcagatacttgccaccccattgcttcagcatattttgttaaacggtcaatttgctcatcaattgagaacccttcctctgcttggttagtagtggatactcgtgtatagattgctactttcttagtcatgagatttcccccttaaaaataaattcattcaaatacagatgcattttatttcatatagtaagtacatcacctattagtttgttgtttaaacaaactaacttattttcatcttatataacctcgtcagtattttcaatattttttttagttttttatgaacacattagatttaataaagggaagattcgctatgtactatgttgatacttaatttaaagattaaacaaatggagtggatgaagtggatatcgctgatcaaacctttgtcaaaaaagtaaatcaaaagttattattaaaagaaatccttaaaaattcacctatttcaagagcaaaattatctgaaatgactggattaaataaatcaactgtctcatcacaggtaaacacgttaatgaaagaaagtatggtatttgaaataggtcaaggacaatcaagtggcggaagaagacctgtcatgcttgtttttaataaaaaggcaggatactccgttggaatagatgttggtgtggattatattaatggcattttaacagaccttgaaggaacaatcgttcttgatcaataccgccatttggaatccaattctccagaaataacgaaagacattttgattgatatgattcatcactttattacgcaaatgccccaatctccgtacgggtttattggtataggtatttgcgtgcctggactcattgataaagatcaaaaaattgttttcactccgaactccaactggagagatattgacttaaaatcttcgatacaagagaagtacaatgtgtctgtttttattgaaaatgaggcaaatgctggcgcatatggagaaaaactatttggagctgcaaaaaatcacgataacattatttacgtaagtatcagcacaggaatagggatcggtgttattatcaacaatcatttatatagaggagtaagcggcttctctggagaaatgggacatatgacaatagactttaatggtcctaaatgcagttgcggaaaccgaggatgctgggaattgtatgcttcagagaaggctttattaaaatctcttcagaccaaagagaaaaaactgtcctatcaagatatcataaacctcgcccatctgaatgatatcggaaccttaaatgcattacaaaattttggattctatttaggaataggccttaccaatattctaaatactttcaacccacaagccgtaattttaagaaatagcataattgaatcgcatcctatggttttaaattcaatgagaagtgaagtatcatcaagggtttattcccaattaggcaatagctatgaattattgccatcttccttaggacagaatgcaccggcattaggaatgtcctccattgtgattgatcattttctggacatgattacaatgtaattttttatggaatggacagctcatctttaaagatgagtttttttattctaggagtatttctgaattc

SEQ ID NO: 177 - DNA, 807 bp, Alkalihalobacillus clausii
  source 1..807: mol_type = unassigned DNA
gctcaatctgttccttggggtatttctcgtgttcaagctcctgctgctcataatcgtggtttaactggttctggtgttaaagttgctgttttagatactggtatttctactcatcctgatttaaatattcgtggtggtgcttcttttgttcctggtgaaccttctactcaagatggtaatggtcatggtactcatgctgctggtactattgctgctttaaataattctattggtgttttaggtgttgctccttctgctgaattatatgctgttaaagttttaggtgcttctggttctggttctgtttctgctattgctcaaggtttagaatgggctggtaataatggtatgcatgttgctaatttatctttaggttctccttctccttctgctactttagaacaagctgttaattctgctacttctcgtggtgttttagttgttgctgcttctggtaattctggtgctggttctatttcttatcctgctcgttatgctaatgctatggctgttggtgctactgatcaaaataataatcgtgcttctttttctcaatatggtgctggtttagatattgttgctcctggtgttaatgttcaatctacttatcctggttctacttatgcttctttaaatggtacttctatggctactcctcatgttgctggtgctgctgctttagttaaacaaaaaaatccttcttggtctaatgttcaaattcgtaatcatttaaaaaatactgctacttctttaggttctactaatttatatggttctggtttagttaatgctgaagctgctactcgt

SEQ ID NO: 178 - DNA, 14593 bp, Bacillus sp.
  source 1..14593: mol_type = unassigned DNA
tggaagtctttataatgaacccattacttctttaaagtcctggagagaaaatttattaaaagctcatgctgataaagaattaaatcatttaacaagtgatatttttgaacaaaatggtgaaagtccctatggagtatgcggtatgatcggcggaacatgggagtggactagaagtgagcttaaaacaaagagagctttccaccctatttttgagaatgtaccatttaatagtgttaactcatttgccgttcttaaaggaggatcattcttctctcatccaggcttaatgttcccttcttttagagcaaaagatattcctttctgtcgacacaatgaaatggggattagatgcgtaaagaatattccagtatataaaattagagaatcaattaatgggccaattactaataaagcaatttattaatcattctaggttagagacttgataaaagtatactaacattgtgtagtaatgttcagcttgtagaaaaaacaatgttttttctacaagattttattttaaatgcttttcaaaattatcagggattgagaatcagaaaaagagccattaagctcgatcttagctaggtattacgatcttctgtatattattgtgagaaatatagaagattcagttagttagcatttcgattttaagctgagcctgcaatagcaaagcatctgttttgattattctttttctgatacataagctaattttgtcgcttttcttttttgtcttttcacgcatttcgaggatgacttactataattctttcagcttttctatgtgttaagattcgaatagatgaaataactttaacaagttggtcaataagaacagatttaactttatgttaaaagagtatctcgtatagaacataagaagaatgacgagttttttaagattatcatcaattatgtgagaataaaatattataagggaaaatgaaggctgtcacgtttctcgacagccctagggaattcctctccttttcatttcgcccgtaatttcgggcacagtcccgtcggcaggcacattggcttctggtcgatcgggcttctcatgatgcagcattccaagccgaagacttcacggaaaaatggctgggtgaacacatcttccggtgttccggcgttgtatatttttccgtccagcacactgatcagatagtcagcatattgagcggcttggtttaaatcatggagcaccatgacaacggtgcggccatggtcgcggttcagctttttcagcagttcaagcacttcaatctgatgtgagatgtctaaatacgtggtcggctcatcaagcaaaagcaaatcagtgccttgcgcaagtgccatggaaatccaggctctttgtctttggccgcctgagagggcatcaagtgtccgatccttcagttcaatcatgcccgttgcttccagcgcccactctaccatgtcatgatcctcttgggtatgcttggataacagctttttgtgaggatgtctgccaaaatagcataattcctctaccgtcaatccttcaggagcctgaggagattgtggaagaatggccagtttttttgcgacttcttttgatggctggcggtggatgtcttttccttctagtagcactgtaccgctttttggggccatcagcctggcgagcgatttgaggattgttgatttaccgcagccattagcgccgatgagcgcagtgatttttccttcttctatctttaagtcgactccgtcaataatcactgtactgtcatatgaaagagtgagctggtctgcagccagttttcccatggtatcctctccctactgtttcctcgcttcgaatttcaataaatataagaaataaggcgcgccgatcacggctgtcagtattccggcaggtatttcaaccggaggcatgatgccgcgccctaacgtatctgcaattaataatataatagcaccaatcaatgccgatgcaggcagtaaatatttagctttttctccggtaagccgtctggcgatatgcggagcaagcaagccgataaaaccgattgagccgacgacggctacacagcttcccgccagcgccaccgcggtgaaaatcaggatgaatctcagccggtttgcgttttctccgagaccctgtgcaagctcatccccgagtgacataagatccagcttcggtatgagtatgcagacgatcggaaaaagaatcaaaagccatggcgcaagcagcttgacttcttcccagtttcttccccagaggcttcctgtcagccaaatgagtgcagcattcacgtcgcctggaaacttgaccatcatatattgcattccggcgtggcagaccgcgcctaaagcaatgcctgataaagccagtgaagagggctgaatgctcttttttcgggctatcattaataatagtacagcaataatggcggctccggcaaatgcggagaacggaagcacgtataccggcgactcaggaaagatgagaatcacagccatcgccgcaagtccggagccttttgaaatgccgacaacgtccggggaagcgagcggatttcggatcacaccctgtaaaatcgctccggcagcggcaagtccagcacctgccaaaatcgctaatataatgcggggaaggcgatattgctggatgataaattcaaaggaatgatccagtcccagcagattcgtcactaccgcatcaggtgaaatgtataatgcaccgattccaatgctgatgacggacagaacgattaaaatcacggccaatatgagtatcgccagtaaggggcgtttttgttttctggttgttttcttcatttcaggtttcgccctttccttgccaaatataagaaaaacggcgttccgataatcgcggtgacaatgccgaccggtgattcataaggaaatgcaatccatctggccagaacatctgcgtacaccagcaaaatggcaccgaacagtgccgaaaacggaagcacgtattgataatgttctccgatcagcttgcggacaatatgcgggacgagcagcccgacaaagccaatcggcccggcgacggctacggaagcgccggaaagaattaaaataatcaaactgatcagaatcctgatgccgttcatattttgtccaagcccttttgctgtttcgtctccgagaccgagaacagaaacagaaccggaaaatacgagggcaagcccgatgccaatgacagaaaaaggagcgatggttatgacgtcctgccagttgctgccgtcgattgcgcctgtcatccagtacagaacatcctcacctgactcatttaaaataatgatggcctgtgtcatagaggagaggaacaagtgcacggccattcctgacagcgccagcttgacaggcgtcattccgccggatgaggcaatcatatacacaatcgcgccgcctgctgccgcacccgcaaaagcgaatataacagatgaatagggcgatgccggcagaatgacgagagaagcaacaacaaaaagcgatgcacccgcattcacaccgaaaatttggggtgaagccagaggatttctggtcatagcctgcatcagcgcccctgctacagctaggctggcgccgacaaaaacgccgattaatgtgcggggaaggcgaagagtagagatgatgagctgttcctttgaaccgtcccatacaaaaagatatttcaatgaatctatgatgctgatgtctgaggctcctactgaaagattcagcccaagcccaaatataaaaataatcagtgcaatgataaacatcatcagtcttgatgatgagcgccgtttggctgaatgatacaacagtctcacttccttactgcgtctggttgcaaaaacgaagaagcaaggattcccctcgcttctcatttgtcctatttattatacacttttttaagcacatctttggcgcttgtttcactagacttgatgcctctgaatcttgtccaagtgtcacggtccgcatcatagacttgtccatttttcaccgctttgagatttttccagagcgggttcgttttccactcatctacaatggttttgccttcgttggctgagatgaacaaaatatcaggatcgattttgctcaattgctcaaggctgacctcttgataggcgttatctgacttcacagcgtgtgtaaagcctagcattttaaagatttctccgtcataggatgatgatgtatgaagctggaaggaatccgctcttgcaacgccgagaacgatgttgcggttttcatctttcggaagttcggcttttagatcgttgatgacttttttgtgctcggcaagcttttcttttccttcatcttctttatttaatgctttagcaatggtcgtaaagctgtcgatcgtttcgtcatatgtcgcttcacggctttttaattcaatcgtcggggcgatttttttcagctgtttataaatgtttttatggcgctcagcgtcagcgatgattaaatcaggcttcaaggaactgatgacctcaagattgggttcgctgcgtgtgcctacagatgtgtaatcaatggagctgccgacaagctttttaatcatatcttttttgttgtcatctgcgatgcccaccggcgtaatgccgagattgtgaacggcatccaagaatgaaagctcaagcacaaccacccgcttaggtgtgccgcttactgtcgtttttccttcttcgtcatggatcactctggaatccttagactcgcttttgccgcttccgttgttattctggcttgatgaacagccggatacaatgaggcaggcgagcaataaaacactcatgatggcaatcaacttgttagaataggtgcgcatgtcattcttccttttttcagatttagtaatgagaatcattatcacatgtaacactataatagcatggcttatcatgtcaatatttttttagtaaagaaagctgcgtttttactgctttctcatgaaagcatcatcagacacaaataagtggtatgcagcgttaccgtgtcttcgagacaaaaacgcatgggcgttggctttagaggtttcgaacatatcagcagtgacataaggaaggagagtgctgagataaccggacaatttcttttctatttcatctgttagtgcaaattcaatgtcgccgatattcatgataatcgagaaaacaaagtcgatatcgatatgaaaatgttcctcggcaaaaaccgcaagctcgtgaattcctggtgaacatccggcacgcttatggaaaatctgtttgactaaatcactcacaatccaagcattgtattgctgttctggtgaaaagtattgcattagacatacctcctgctcgtacggataaaggcagcgtttcatggtcgtgtgctccgtgcagcggcttctccttaattttgatttttctgaaaataggtcccgttcctatcactttaccatggacggaaaacaaatagctactaccattcctcctgtttttctcttcaatgttctggaatctgtttcaggtacagacgatcgggtatgaaagaaatatagaaaacatgaaggaggaatatcgacatgaaaccagttgtaaaagagtatacaaatgacgaacagctcatgaaagatgtagaggaattgcagaaaatgggtgttgcgaaagaggatgtatacgtcttagctcacgacgatgacagaacggaacgcctggctgacaacacgaacgccaacacgatcggagccaaagaaacaggtttcaagcacgcggtgggaaatatcttcaataaaaaaggagacgagctccgcaataaaattcacgaaatcggtttttctgaagatgaagccgctcaatttgaaaaacgcttagatgaaggaaaagtgcttctctttgtgacagataacgaaaaagtgaaagcttgggcataaagcaaggaaaaaaccaaaaggccaatgtcggccttttggtttttttgcggtctttgcggtgggattttgcagaatgccgcaataggatagcggaacattttcggttctgaatgtccctcaatttgctattatatttttgtgataaattggaataaaatctcacaaaatagaaaatgggggtacatagtggatgaaaaaagtgatgttagctacggctttgtttttaggattgactccagctggcgcgaacgcagctgatttaggccaccagacgttgggatccaatgatggctggggcgcgtactcgaccggcacgacaggcggatcaaaagcatcctcctcaaatgtgtataccgtcagcaacagaaaccagcttgtctcggcattagggaaggaaacgaacacaacgccaaaaatcatttatatcaagggaacgattgacatgaacgtggatgacaatctgaagccgcttggcctaaatgactataaagatccggagtatgatttggacaaatatttgaaagcctatgatcctagcacatggggcaaaaaagagccgtcgggaacacaagaagaagcgagagcacgctctcagaaaaaccaaaaagcacgggtcatggtggatatccctgcaaacacgacgatcgtcggttcagggactaacgctaaagtcgtgggaggaaacttccaaatcaagagtgataacgtcattattcgcaacattgaattccaggatgcctatgactattttccgcaatggttgtaaaacgacggccagtgaattctgatcaaatggttcagtgagagcgaagcgaacacttgattttttaattttctatcttttataggtcattagagtatacttatttgtcctataaactatttagcagcataatagatttattgaataggtcatttaagttgagcatattagaggaggaaaatcttggagaaatatttgaagaacccgaggatctagatcaggtaccgcaacgttcgcagatgctgctgaagagattattaaaaagctgaaagcaaaaggctatcaattggtaactgtatctcagcttgaagaagtgaagaagcagagaggctattgaataaatgagtagaaagcgccatatcggcgcttttcttttggaagaaaatatagggaaaatggtacttgttaaaaattcggaatatttatacaatatcatatgtatcacattgaaaggaggggcctgctgtccagactgtccgctgtgtaaaaaaaaggaataaaggggggttgacattattttactgatatgtataatataatttgtataagaaaatggaggggccctcgaaacgtaagatgaaaccttagataaaagtgctttttttgttgcaattgaagaattattaatgttaagcttaattaaagataatatctttgaattgtaacgcccctcaaaagtaagaactacaaaaaaagaatacgttatatagaaatatgtttgaaccttcttcagattacaaatatattcggacggactctacctcaaatgcttatctaactatagaatgacatacaagcacaaccttgaaaatttgaaaatataactaccaatgaacttgttcatgtgaattatcgctgtatttaattttctcaattcaatatataatatgccaatacattgttacaagtagaaattaagacacccttgatagccttactatacctaacatgatgtagtattaaatgaatatgtaaatatatttatgataagaagcgacttatttataatcattacatatttttctattggaatgattaagattccaatagaatagtgtataaattatttatcttgaaaggagggatgcctaaaaacgaagaacattaaaaacatatatttgcaccgtctaatggatttatgaaaaatcattttatcagtttgaattatgtattatggagctctgaaaaaaaggagaggataaagaatgaagaaaccgttggggaaaattgtcgcaagcaccgcactactcatttctgttgcttttagttcatcgatcgcatcggctgcacttgcaaaagacaaagttgaggtaaaggaacaagattcatatcgtgtgctaatcaaagcaccaactacatcaatcagtacttttcaatcacaatacgatgtccgttgggattttggcaaagagggatttacaacagatgttgatgccaaacagctccaaacgcttcaaagcaacaaagacattcaaattcagaaggtaaatgaaatgacagtagaaactgttacaacagaaaaggcggaagtgacggcggtaccaagtacacaaaccccttggggcataaagtcaatttataatgatcaatcaattacaaaaacaactggaggcaaaggaattaaggtagctgttttagatacaggggtttatacaagccatttagatttagctggttctgccgagcaatgcaaggattttacccaatctaatcctttagtagatggttcatgcaccgatcgccaagggcatggtacacatgttgccggaactgtattggcgcatggaggcagtaatggacaaggcgtttacggggtggctccgcaagcgaaactatgggcatataaagtattaggagataaaggcgagggatactctgatgatattgcagcagctatcagacatgtagctgatgaagcttcacgtacaggttccaaagtagtaattaatatgtcgctagggtcatctgccaaggattcattgattgctagtgcagtagattatgcatatggaaaaggtgtattaatcgttgctgcggctggtaatgaggggccaaaacctaatacaatcggctatcctgctgggttcgtaaatgcagtggcagtagcggcattggagaatgttcaggagaaaggaacttatcgagtagctgatttctcatctagagggaatccggcaactgctggagattatatcattcaagagcgtgatattgaagtttcagctccgggagcaagtgtagagtctacatggtacactggcggttataatacgatcagcggtacatcaatggctacacctcatgtagctgggttagctgctaaaatctggtcagcgaatacttcattaagtcatagccaactgcgcacagaattgcaaaatcgcgctaaagtatatgatattaaaggtggtatcggagccggacctggtgacgattatgcatcagggttcggatatccaagagtaaaataatcgcatgttcaatccgctccataatcggtcgacgcggcggttcgcgtccggacagcacatcaccgaaatatttcgacggcccagccggctagcgcgttaatccgcggatatatagcggccgcagatctgggaccaataataatgactagagaagaaagaatgaagattgttcatgaaattaaggaacgaatattggataaagtgggatatttttaaaatatatatttatgttacagtaatattgacttttaaaaaaggattgattctaatgaagaaagcagacaagtaagcctcctaaattcactttagataaaaatttaggaggcatatcaaatgaactttaataaaattgatttagacaattggaagagaaaagagatatttaatcattatttgaaccaacaaacgacttttagtataaccacagaaattgatattagtgttttataccgaaacataaaacaagaaggatataaattttaccctgcatttattttcttagtgacaagggtgataaactcaaatacagcttttagaactggttacaatagcgacggagagttaggttattgggataagttagagccactttatacaatttttgatggtgtatctaaaacattctctggtatttggactcctgtaaagaatgacttcaaagagttttatgatttatacctttctgatgtagagaaatataatggttcggggaaattgtttcccaaaacacctatacctgaaaatgctttttctctttctattattccatggacttcatttactgggtttaacttaaatatcaataataatagtaattaccttctacccattattacagcaggaaaattcattaataaaggtaattcaatatatttaccgctatctttacaggtacatcattctgtttgtgatggttatcatgcaggattgtttatgaactctattcaggaattgtcagataggcctaatgactggcttttatatgagataatgccgactgtactttttacagtcggttttctaacgatacattaataggtacgaaaaagcaactttttttgcgcttaaaaccagtcataccaataacttaagggtaactagcctcgccggaaagagcgaaaatgcctcacatttgtgccacctaaaaaggagcgatttacatatgagttatgcagtttgtagaatgcaaaaagtgaaatcagctggactaaaaggggccgcagagtagaatggaaaaggggatcggaaaacaagtatataggaggagacctatttatggcttcagaaaaagacgcaggaaaacagtcagcagtaaagcttgttccattgcttattactgtcgctgtgggactaatcatctggtttattcccgctccgtccggacttgaacctaaagcttggcatttgtttgcgatttttgtcgcaacaattatcggctttatctccaagcccttgccaatgggtgcaattgcaatttttgcattggcggttactgcactaactggaacactatcaattgaggatacattaagcggattcgggaataagaccatttggcttatcgttatcgcattctttatttcccggggatttatcaaaaccggtctcggtgcgagaatttcgtatgtattcgttcagaaattcggaaaaaaaacccttggactttcttattcactgctattcagtgatttaatactttcacctgctattccaagtaatacggcgcgtgcaggaggcattatatttcctattatcagatcattatccgaaacattcggatcaagcccggcaaatggaacagagagaaaaatcggtgcattcttattaaaaaccggttttcaggggaatctgatcacatctgctatgttcctgacagcgatggcggcgaacccgctgattgccaagctggcccatgatgtcgcaggggtggacttaacatggacaagctgggcaattgccgcgattgtaccgggacttgtaagcttaatcatcacgccgcttgtgatttacaaactgtatccgccggaaatcaaagaaacaccggatgcggcgaaaatcgcaacagaaaaactgaaagaaatgggaccgttcaaaaaatcggagctttccatggttatcgtgtttcttttggtgcttgtgctgtggatttttggcggcagcttcaacatcgacgctaccacaaccgcattgatcggtttggccgttctcttattatcacaagttctgacttgggatgatatcaagaaagaacagggcgcttgggatacgctcacttggtttgcggcgcttgtcatgctcgccaacttcttgaatgaattaggcatggtgtcttggttcagtaatgccatgaaatcatccgtatcagggttctcttggattgtggcattcatcattttaattgttgtgtattattactctcactatttctttgcaagtgcgacagcccacatcagtgcgatgtattcagcatttttggctgtcgtcgtggcagcgggcgcaccgccgcttttagcagcgctgagcctcgcgttcatcagcaacctgttcgggtcaacgactcactacggttctggagcggctccggtcttcttcggagcaggctacatcccgcaaggcaaatggtggtccatcggatttatcctgtcgattgttcatatcatcgtatggcttgtgatcggcggattatggtggaaagtactaggaatatggtagaaagaaaaaggcagacgcggtctgcctttttttattttcactccttcgtaagaaaatggattttgaaaaatgagaaaattccctgtgaaaaatggtatgatctaggtagaaaggacggctggtgctgtggtgaaaaagcggttccatttttccctgcaaacaaaaataatggggctgattgcggctctgctggtctttgtcattggtgtgctgaccattacgttagccgttcagcatacacagggagaacggagacaggcagagcagctggcggttcaaacggcgagaaccatttcctatatgccgccggttaaagagctcattgagagaaaagacggacatgcggctcagacgcaagaggtcattgaacaaatgaaagaacagactggtgcgtttgccatttatgttttgaacgaaaaaggagacattcgcagcgcctctggaaaaagcggattaaagaaactggagcgcagcagagaaattttgtttggcggttcgcatgtttctgaaacaaaagcggatggacgaagagtgatcagagggagcgcgccgattataaaagaacagaagggatacagccaagtgatcggcagcgtgtctgttgattttctgcaaacggagacagagcaaagcatcaaaaagcatttgagaaatttgagtgtgattgctgtgcttgtactgctgctcggatttattggcgccgccgtgctggcgaaaagcatcagaaaggatacgctcgggcttgaaccgcatgagatcgcggctctatatcgtgagaggaacgcaatgcttttcgcgattcgagaagggattattgccaccaatcgtgaaggcgtcgtcaccatgatgaacgtatcggcggccgagatgctgaagctgcccgagcctgtgatccatcttcctatagatgacgtcatgccgggagcagggctgatgtctgtgcttgaaaaaggagaaatgctgccgaaccaggaagtaagcgtcaacgatcaagtgtttattatcaatacgaaagtgatgaatcaaggcgggcaggcgtatgggattgtcgtcagcttcagggagaaaacagagctgaagaagctgatcgacacattgacagaggttcgcaaatattcagaggatctcagggcgcagactcatgaattttcaaataagctttatgcgattttagggctgcttgagcttggggagtatgatgaagccattgatctgattaaagaggaatatgcgatacaaaatgaacagcatgatcttttattccataacatccattcgcagcaggtgcaggccattttgttagggaaaataagcaaggcatcggaaaagaaggtcaagctggtgattgatgagaacagctcactcgcgcctcttcctgcgcatatcggcttgtcccatcttattacgattattggcaatttaattgataacgctttcgaagctgtagcggagcaaagcgtgaaggaagttttgttttttatcacggatatgggccatgacattgtcattgaagtatcagacacagggcccggtgtgccgccagagaaaatagaagctgtgtttgagagaggctattcttcaaaggggatgaggagaggctacggtctggccaatgtgaaagactcagtgcgtgaactgggcggctggatcgaactggcgaatcaaaaaactggcggggcggtattcactgtatttataccgaaggagaaacaaagggggaatccatttgattcacatcgcgattgcggaggatgattttcgagttgcgcaaatccatgagagattgattaaacagcttgatggattcaagattatcggcaaggcggctaacgcaaaagagacattggcgcttttgaaggaacacaaggctgatttgcttctgctggatatttatatgccggacgagcttgggaccgcgttgattcctgatatacgaagccgatttcctgaagtggacattatgattatcacagcggcaacagaaacccgtcatttgcaggaagcgctaagggcgggaattgcccactatttgatcaaacccgtaacagctgacaagttcaggcaggtgctgcttcagtataaagaaaaaaggaagctgctcatgtctcagccggaggtcagccaatccatgatcgaccatatttttgggaacggtgtgaagacagctttgccggcagaggatttgccgactggcattaattcgattacactgcgaaaaattaaggaagcgcttcagactgcgtcagaaggattgacagcggaggaacttggggaaaaaatgggggcgtcacgaacaactgcccgccgttatgccgagtaccttgtgtcaaaggaagaagcaagagccgagcttgaatacgggattatcggcaggccggagagaaaatattatttggcggcggattagatatgaaaaaatctataatcctattgaatattctattgatctttatgcagggtgatatcaggcaggcggctgcgccgcgcctgccggacgggccgatagaaattgtcgtccctgccgaaccttctggcggctgggatgtcacagcgcaggcgatccaatcagttttgaggcagaagcagatcgtgaaggatgatgttcatatcgtctataaatccggcggcgggggagagaaaggctggaaatatgtcaacaaaagcagcaaacaaaccatcagcatgacgtccagcctaatattgagcaatgatcttctcgggcaaagcaaattaaaaatgtccgattttacg

SEQ ID NO: 179 - DNA, 14895 bp, Bacillus sp.
  source 1..14895: mol_type = unassigned DNA
tggaagtctttataatgaacccattacttctttaaagtcctggagagaaaatttattaaaagctcatgctgataaagaattaaatcatttaacaagtgatatttttgaacaaaatggtgaaagtccctatggagtatgcggtatgatcggcggaacatgggagtggactagaagtgagcttaaaacaaagagagctttccaccctatttttgagaatgtaccatttaatagtgttaactcatttgccgttcttaaaggaggatcattcttctctcatccaggcttaatgttcccttcttttagagcaaaagatattcctttctgtcgacacaatgaaatggggattagatgcgtaaagaatattccagtatataaaattagagaatcaattaatgggccaattactaataaagcaatttattaatcattctaggttagagacttgataaaagtatactaacattgtgtagtaatgttcagcttgtagaaaaaacaatgttttttctacaagattttattttaaatgcttttcaaaattatcagggattgagaatcagaaaaagagccattaagctcgatcttagctaggtattacgatcttctgtatattattgtgagaaatatagaagattcagttagttagcatttcgattttaagctgagcctgcaatagcaaagcatctgttttgattattctttttctgatacataagctaattttgtcgcttttcttttttgtcttttcacgcatttcgaggatgacttactataattctttcagcttttctatgtgttaagattcgaatagatgaaataactttaacaagttggtcaataagaacagatttaactttatgttaaaagagtatctcgtatagaacataagaagaatgacgagttttttaagattatcatcaattatgtgagaataaaatattataagggaaaatgaaggctgtcacgtttctcgacagccctagggaattcctctccttttcatttcgcccgtaatttcgggcacagtcccgtcggcaggcacattggcttctggtcgatcgggcttctcatgatgcagcattccaagccgaagacttcacggaaaaatggctgggtgaacacatcttccggtgttccggcgttgtatatttttccgtccagcacactgatcagatagtcagcatattgagcggcttggtttaaatcatggagcaccatgacaacggtgcggccatggtcgcggttcagctttttcagcagttcaagcacttcaatctgatgtgagatgtctaaatacgtggtcggctcatcaagcaaaagcaaatcagtgccttgcgcaagtgccatggaaatccaggctctttgtctttggccgcctgagagggcatcaagtgtccgatccttcagttcaatcatgcccgttgcttccagcgcccactctaccatgtcatgatcctcttgggtatgcttggataacagctttttgtgaggatgtctgccaaaatagcataattcctctaccgtcaatccttcaggagcctgaggagattgtggaagaatggccagtttttttgcgacttcttttgatggctggcggtggatgtcttttccttctagtagcactgtaccgctttttggggccatcagcctggcgagcgatttgaggattgttgatttaccgcagccattagcgccgatgagcgcagtgatttttccttcttctatctttaagtcgactccgtcaataatcactgtactgtcatatgaaagagtgagctggtctgcagccagttttcccatggtatcctctccctactgtttcctcgcttcgaatttcaataaatataagaaataaggcgcgccgatcacggctgtcagtattccggcaggtatttcaaccggaggcatgatgccgcgccctaacgtatctgcaattaataatataatagcaccaatcaatgccgatgcaggcagtaaatatttagctttttctccggtaagccgtctggcgatatgcggagcaagcaagccgataaaaccgattgagccgacgacggctacacagcttcccgccagcgccaccgcggtgaaaatcaggatgaatctcagccggtttgcgttttctccgagaccctgtgcaagctcatccccgagtgacataagatccagcttcggtatgagtatgcagacgatcggaaaaagaatcaaaagccatggcgcaagcagcttgacttcttcccagtttcttccccagaggcttcctgtcagccaaatgagtgcagcattcacgtcgcctggaaacttgaccatcatatattgcattccggcgtggcagaccgcgcctaaagcaatgcctgataaagccagtgaagagggctgaatgctcttttttcgggctatcattaataatagtacagcaataatggcggctccggcaaatgcggagaacggaagcacgtataccggcgactcaggaaagatgagaatcacagccatcgccgcaagtccggagccttttgaaatgccgacaacgtccggggaagcgagcggatttcggatcacaccctgtaaaatcgctccggcagcggcaagtccagcacctgccaaaatcgctaatataatgcggggaaggcgatattgctggatgataaattcaaaggaatgatccagtcccagcagattcgtcactaccgcatcaggtgaaatgtataatgcaccgattccaatgctgatgacggacagaacgattaaaatcacggccaatatgagtatcgccagtaaggggcgtttttgttttctggttgttttcttcatttcaggtttcgccctttccttgccaaatataagaaaaacggcgttccgataatcgcggtgacaatgccgaccggtgattcataaggaaatgcaatccatctggccagaacatctgcgtacaccagcaaaatggcaccgaacagtgccgaaaacggaagcacgtattgataatgttctccgatcagcttgcggacaatatgcgggacgagcagcccgacaaagccaatcggcccggcgacggctacggaagcgccggaaagaattaaaataatcaaactgatcagaatcctgatgccgttcatattttgtccaagcccttttgctgtttcgtctccgagaccgagaacagaaacagaaccggaaaatacgagggcaagcccgatgccaatgacagaaaaaggagcgatggttatgacgtcctgccagttgctgccgtcgattgcgcctgtcatccagtacagaacatcctcacctgactcatttaaaataatgatggcctgtgtcatagaggagaggaacaagtgcacggccattcctgacagcgccagcttgacaggcgtcattccgccggatgaggcaatcatatacacaatcgcgccgcctgctgccgcacccgcaaaagcgaatataacagatgaatagggcgatgccggcagaatgacgagagaagcaacaacaaaaagcgatgcacccgcattcacaccgaaaatttggggtgaagccagaggatttctggtcatagcctgcatcagcgcccctgctacagctaggctggcgccgacaaaaacgccgattaatgtgcggggaaggcgaagagtagagatgatgagctgttcctttgaaccgtcccatacaaaaagatatttcaatgaatctatgatgctgatgtctgaggctcctactgaaagattcagcccaagcccaaatataaaaataatcagtgcaatgataaacatcatcagtcttgatgatgagcgccgtttggctgaatgatacaacagtctcacttccttactgcgtctggttgcaaaaacgaagaagcaaggattcccctcgcttctcatttgtcctatttattatacacttttttaagcacatctttggcgcttgtttcactagacttgatgcctctgaatcttgtccaagtgtcacggtccgcatcatagacttgtccatttttcaccgctttgagatttttccagagcgggttcgttttccactcatctacaatggttttgccttcgttggctgagatgaacaaaatatcaggatcgattttgctcaattgctcaaggctgacctcttgataggcgttatctgacttcacagcgtgtgtaaagcctagcattttaaagatttctccgtcataggatgatgatgtatgaagctggaaggaatccgctcttgcaacgccgagaacgatgttgcggttttcatctttcggaagttcggcttttagatcgttgatgacttttttgtgctcggcaagcttttcttttccttcatcttctttatttaatgctttagcaatggtcgtaaagctgtcgatcgtttcgtcatatgtcgcttcacggctttttaattcaatcgtcggggcgatttttttcagctgtttataaatgtttttatggcgctcagcgtcagcgatgattaaatcaggcttcaaggaactgatgacctcaagattgggttcgctgcgtgtgcctacagatgtgtaatcaatggagctgccgacaagctttttaatcatatcttttttgttgtcatctgcgatgcccaccggcgtaatgccgagattgtgaacggcatccaagaatgaaagctcaagcacaaccacccgcttaggtgtgccgcttactgtcgtttttccttcttcgtcatggatcactctggaatccttagactcgcttttgccgcttccgttgttattctggcttgatgaacagccggatacaatgaggcaggcgagcaataaaacactcatgatggcaatcaacttgttagaataggtgcgcatgtcattcttccttttttcagatttagtaatgagaatcattatcacatgtaacactataatagcatggcttatcatgtcaatatttttttagtaaagaaagctgcgtttttactgctttctcatgaaagcatcatcagacacaaataagtggtatgcagcgttaccgtgtcttcgagacaaaaacgcatgggcgttggctttagaggtttcgaacatatcagcagtgacataaggaaggagagtgctgagataaccggacaatttcttttctatttcatctgttagtgcaaattcaatgtcgccgatattcatgataatcgagaaaacaaagtcgatatcgatatgaaaatgttcctcggcaaaaaccgcaagctcgtgaattcctggtgaacatccggcacgcttatggaaaatctgtttgactaaatcactcacaatccaagcattgtattgctgttctggtgaaaagtattgcattagacatacctcctgctcgtacggataaaggcagcgtttcatggtcgtgtgctccgtgcagcggcttctccttaattttgatttttctgaaaataggtcccgttcctatcactttaccatggacggaaaacaaatagctactaccattcctcctgtttttctcttcaatgttctggaatctgtttcaggtacagacgatcgggtatgaaagaaatatagaaaacatgaaggaggaatatcgacatgaaaccagttgtaaaagagtatacaaatgacgaacagctcatgaaagatgtagaggaattgcagaaaatgggtgttgcgaaagaggatgtatacgtcttagctcacgacgatgacagaacggaacgcctggctgacaacacgaacgccaacacgatcggagccaaagaaacaggtttcaagcacgcggtgggaaatatcttcaataaaaaaggagacgagctccgcaataaaattcacgaaatcggtttttctgaagatgaagccgctcaatttgaaaaacgcttagatgaaggaaaagtgcttctctttgtgacagataacgaaaaagtgaaagcttgggcataaagcaaggaaaaaaccaaaaggccaatgtcggccttttggtttttttgcggtctttgcggtgggattttgcagaatgccgcaataggatagcggaacattttcggttctgaatgtccctcaatttgctattatatttttgtgataaattggaataaaatctcacaaaatagaaaatgggggtacatagtggatgaaaaaagtgatgttagctacggctttgtttttaggattgactccagctggcgcgaacgcagctgatttaggccaccagacgttgggatccaatgatggctggggcgcgtactcgaccggcacgacaggcggatcaaaagcatcctcctcaaatgtgtataccgtcagcaacagaaaccagcttgtctcggcattagggaaggaaacgaacacaacgccaaaaatcatttatatcaagggaacgattgacatgaacgtggatgacaatctgaagccgcttggcctaaatgactataaagatccggagtatgatttggacaaatatttgaaagcctatgatcctagcacatggggcaaaaaagagccgtcgggaacacaagaagaagcgagagcacgctctcagaaaaaccaaaaagcacgggtcatggtggatatccctgcaaacacgacgatcgtcggttcagggactaacgctaaagtcgtgggaggaaacttccaaatcaagagtgataacgtcattattcgcaacattgaattccaggatgcctatgactattttccgcaatggttgtaaaacgacggccagtgaattctgatcaaatggttcagtgagagcgaagcgaacacttgattttttaattttctatcttttataggtcattagagtatacttatttgtcctataaactatttagcagcataatagatttattgaataggtcatttaagttgagcatattagaggaggaaaatcttggagaaatatttgaagaacccgaggatctagatcaggtaccgcaacgttcgcagatgctgctgaagagattattaaaaagctgaaagcaaaaggctatcaattggtaactgtatctcagcttgaagaagtgaagaagcagagaggctattgaataaatgagtagaaagcgccatatcggcgcttttcttttggaagaaaatatagggaaaatggtacttgttaaaaattcggaatatttatacaatatcatatgtatcacattgaaaggaggggcctgctgtccagactgtccgctgtgtaaaaaaaaggaataaaggggggttgacattattttactgatatgtataatataatttgtataagaaaatggaggggccctcgaaacgtaagatgaaaccttagataaaagtgctttttttgttgcaattgaagaattattaatgttaagcttaattaaagataatatctttgaattgtaacgcccctcaaaagtaagaactacaaaaaaagaatacgttatatagaaatatgtttgaaccttcttcagattacaaatatattcggacggactctacctcaaatgcttatctaactatagaatgacatacaagcacaaccttgaaaatttgaaaatataactaccaatgaacttgttcatgtgaattatcgctgtatttaattttctcaattcaatatataatatgccaatacattgttacaagtagaaattaagacacccttgatagccttactatacctaacatgatgtagtattaaatgaatatgtaaatatatttatgataagaagcgacttatttataatcattacatatttttctattggaatgattaagattccaatagaatagtgtataaattatttatcttgaaaggagggatgcctaaaaacgaagaacattaaaaacatatatttgcaccgtctaatggatttatgaaaaatcattttatcagtttgaaaattatgtattatggagctctgaaaaaaaggagaggataaagaatgaaaaaaccgctgggaaaaattgtcgcaagcacagcacttcttatttcagtggcatttagctcatctattgcatcagcagctgagaatcctcagcttaaagaagacctgacgaattttgtaccgaagcattctttggtgcaatcagaattgccttctgtcagtgacaaagctatcaagcaatacttgaaacaaaacggcaaagtctttaaaggcaatccttctgaaagattgaagctgattgaccaaacgaccgatgatctcggctacaagcacttccgttatgtgcctgtcgtaaacggtgtgcctgtgaaagactctcaagtcattattcacgtcgataaatccaacaacgtctatgcgattaacggtgaattaaacaacgatgtttccgccaaaacggcaaacagcaaaaaattatctgcaaatcaggcgctggatcatgcttataaagcgatcggcaaatcacctgaagccgtttctaacggaaccgttgcaaacaaaaacaaagccgagctgaaagcagcagccacaaaagacggcaaataccgcctcgcctatgatgtaaccatccgctacatcgaaccggaacctgcaaactgggaagtaaccgttgatgcggaaacaggaaaaatcctgaaaaagcaaaacaaagtggagcatgccgccacaaccggaacaggtacgactcttaaaggaaaaacggtctcattaaatatttcttctgaaagcggcaaatatgtgctgcgcgatctttctaaacctaccggaacacaaattattacgtacgatctgcaaaaccgcgagtataacctgccgggcacactcgtatccagcaccacaaaccagtttacaacttcttctcagcgcgctgccgttgatgcgcattacaacctcggcaaagtgtatgattatttctatcagaagtttaatcgcaacagctacgacaataaaggcggcaagatcgtatcctccgttcattacggcagcagatacaataacgcagcctggatcggcgaccaaatgatttacggtgacggcgacggtatcctgttctcacctctttccggttcactggacgtaaccgctcatgaaatgacacatggcgttacacaggaaacagccaacctgaactacgaaaatcagccgggcgctttaaacgaatccttctctgatgtattcgggtacttcaacgatactgaggactgggatatcggtgaagatattacgatcagccagccggctctccgcagcttatccaatccgacaaaatacggacagcctgataatttcaaaaattacaaaaaccttccgaacactcctgccggcgactacggcggcgtgcatacaaacagcggaatcccgaacaaagccgcttacaatacgattacaaaaatcggcgtgaacaaagcggagcagatttactatcgtgctctgacggtatacctcactccgtcatcaacttttaaagatgcaaaagccgctttgattcaatctgcgcgggacctttacggctctcaagatgctgcaagcgtagaagctgcctggaatgcagtcggattgtaatcgcatgttcaatccgctccataaccgatcgacgcggcggttcgcgtccggacagcacatcaccgaaatatttcgacggcccagccggctagcgcgttaatccgcggatatatagcggccgcagatctgggaccaataataatgactagagaagaaagaatgaagattgttcatgaaattaaggaacgaatattggataaagtgggatatttttaaaatatatatttatgttacagtaatattgacttttaaaaaaggattgattctaatgaagaaagcagacaagtaagcctcctaaattcactttagataaaaatttaggaggcatatcaaatgaactttaataaaattgatttagacaattggaagagaaaagagatatttaatcattatttgaaccaacaaacgacttttagtataaccacagaaattgatattagtgttttataccgaaacataaaacaagaaggatataaattttaccctgcatttattttcttagtgacaagggtgataaactcaaatacagcttttagaactggttacaatagcgacggagagttaggttattgggataagttagagccactttatacaatttttgatggtgtatctaaaacattctctggtatttggactcctgtaaagaatgacttcaaagagttttatgatttatacctttctgatgtagagaaatataatggttcggggaaattgtttcccaaaacacctatacctgaaaatgctttttctctttctattattccatggacttcatttactgggtttaacttaaatatcaataataatagtaattaccttctacccattattacagcaggaaaattcattaataaaggtaattcaatatatttaccgctatctttacaggtacatcattctgtttgtgatggttatcatgcaggattgtttatgaactctattcaggaattgtcagataggcctaatgactggcttttatatgagataatgccgactgtactttttacagtcggttttctaacgatacattaataggtacgaaaaagcaactttttttgcgcttaaaaccagtcataccaataacttaagggtaactagcctcgccggaaagagcgaaaatgcctcacatttgtgccacctaaaaaggagcgatttacatatgagttatgcagtttgtagaatgcaaaaagtgaaatcagctggactaaaaggggccgcagagtagaatggaaaaggggatcggaaaacaagtatataggaggagacctatttatggcttcagaaaaagacgcaggaaaacagtcagcagtaaagcttgttccattgcttattactgtcgctgtgggactaatcatctggtttattcccgctccgtccggacttgaacctaaagcttggcatttgtttgcgatttttgtcgcaacaattatcggctttatctccaagcccttgccaatgggtgcaattgcaatttttgcattggcggttactgcactaactggaacactatcaattgaggatacattaagcggattcgggaataagaccatttggcttatcgttatcgcattctttatttcccggggatttatcaaaaccggtctcggtgcgagaatttcgtatgtattcgttcagaaattcggaaaaaaaacccttggactttcttattcactgctattcagtgatttaatactttcacctgctattccaagtaatacggcgcgtgcaggaggcattatatttcctattatcagatcattatccgaaacattcggatcaagcccggcaaatggaacagagagaaaaatcggtgcattcttattaaaaaccggttttcaggggaatctgatcacatctgctatgttcctgacagcgatggcggcgaacccgctgattgccaagctggcccatgatgtcgcaggggtggacttaacatggacaagctgggcaattgccgcgattgtaccgggacttgtaagcttaatcatcacgccgcttgtgatttacaaactgtatccgccggaaatcaaagaaacaccggatgcggcgaaaatcgcaacagaaaaactgaaagaaatgggaccgttcaaaaaatcggagctttccatggttatcgtgtttcttttggtgcttgtgctgtggatttttggcggcagcttcaacatcgacgctaccacaaccgcattgatcggtttggccgttctcttattatcacaagttctgacttgggatgatatcaagaaagaacagggcgcttgggatacgctcacttggtttgcggcgcttgtcatgctcgccaacttcttgaatgaattaggcatggtgtcttggttcagtaatgccatgaaatcatccgtatcagggttctcttggattgtggcattcatcattttaattgttgtgtattattactctcactatttctttgcaagtgcgacagcccacatcagtgcgatgtattcagcatttttggctgtcgtcgtggcagcgggcgcaccgccgcttttagcagcgctgagcctcgcgttcatcagcaacctgttcgggtcaacgactcactacggttctggagcggctccggtcttcttcggagcaggctacatcccgcaaggcaaatggtggtccatcggatttatcctgtcgattgttcatatcatcgtatggcttgtgatcggcggattatggtggaaagtactaggaatatggtagaaagaaaaaggcagacgcggtctgcctttttttattttcactccttcgtaagaaaatggattttgaaaaatgagaaaattccctgtgaaaaatggtatgatctaggtagaaaggacggctggtgctgtggtgaaaaagcggttccatttttccctgcaaacaaaaataatggggctgattgcggctctgctggtctttgtcattggtgtgctgaccattacgttagccgttcagcatacacagggagaacggagacaggcagagcagctggcggttcaaacggcgagaaccatttcctatatgccgccggttaaagagctcattgagagaaaagacggacatgcggctcagacgcaagaggtcattgaacaaatgaaagaacagactggtgcgtttgccatttatgttttgaacgaaaaaggagacattcgcagcgcctctggaaaaagcggattaaagaaactggagcgcagcagagaaattttgtttggcggttcgcatgtttctgaaacaaaagcggatggacgaagagtgatcagagggagcgcgccgattataaaagaacagaagggatacagccaagtgatcggcagcgtgtctgttgattttctgcaaacggagacagagcaaagcatcaaaaagcatttgagaaatttgagtgtgattgctgtgcttgtactgctgctcggatttattggcgccgccgtgctggcgaaaagcatcagaaaggatacgctcgggcttgaaccgcatgagatcgcggctctatatcgtgagaggaacgcaatgcttttcgcgattcgagaagggattattgccaccaatcgtgaaggcgtcgtcaccatgatgaacgtatcggcggccgagatgctgaagctgcccgagcctgtgatccatcttcctatagatgacgtcatgccgggagcagggctgatgtctgtgcttgaaaaaggagaaatgctgccgaaccaggaagtaagcgtcaacgatcaagtgtttattatcaatacgaaagtgatgaatcaaggcgggcaggcgtatgggattgtcgtcagcttcagggagaaaacagagctgaagaagctgatcgacacattgacagaggttcgcaaatattcagaggatctcagggcgcagactcatgaattttcaaataagctttatgcgattttagggctgcttgagcttggggagtatgatgaagccattgatctgattaaagaggaatatgcgatacaaaatgaacagcatgatcttttattccataacatccattcgcagcaggtgcaggccattttgttagggaaaataagcaaggcatcggaaaagaaggtcaagctggtgattgatgagaacagctcactcgcgcctcttcctgcgcatatcggcttgtcccatcttattacgattattggcaatttaattgataacgctttcgaagctgtagcggagcaaagcgtgaaggaagttttgttttttatcacggatatgggccatgacattgtcattgaagtatcagacacagggcccggtgtgccgccagagaaaatagaagctgtgtttgagagaggctattcttcaaaggggatgaggagaggctacggtctggccaatgtgaaagactcagtgcgtgaactgggcggctggatcgaactggcgaatcaaaaaactggcggggcggtattcactgtatttataccgaaggagaaacaaagggggaatccatttgattcacatcgcgattgcggaggatgattttcgagttgcgcaaatccatgagagattgattaaacagcttgatggattcaagattatcggcaaggcggctaacgcaaaagagacattggcgcttttgaaggaacacaaggctgatttgcttctgctggatatttatatgccggacgagcttgggaccgcgttgattcctgatatacgaagccgatttcctgaagtggacattatgattatcacagcggcaacagaaacccgtcatttgcaggaagcgctaagggcgggaattgcccactatttgatcaaacccgtaacagctgacaagttcaggcaggtgctgcttcagtataaagaaaaaaggaagctgctcatgtctcagccggaggtcagccaatccatgatcgaccatatttttgggaacggtgtgaagacagctttgccggcagaggatttgccgactggcattaattcgattacactgcgaaaaattaaggaagcgcttcagactgcgtcagaaggattgacagcggaggaacttggggaaaaaatgggggcgtcacgaacaactgcccgccgttatgccgagtaccttgtgtcaaaggaagaagcaagagccgagcttgaatacgggattatcggcaggccggagagaaaatattatttggcggcggattagatatgaaaaaatctataatcctattgaatattctattgatctttatgcagggtgatatcaggcaggcggctgcgccgcgcctgccggacgggccgatagaaattgtcgtccctgccgaaccttctggcggctgggatgtcacagcgcaggcgatccaatcagttttgaggcagaagcagatcgtgaaggatgatgttcatatcgtctataaatccggcggcgggggagagaaaggctggaaatatgtcaacaaaagcagcaaacaaaccatcagcatgacgtccagcctaatattgagcaatgatcttctcgggcaaagcaaattaaaaatgtccgattttacg

SEQ ID NO: 180 - DNA, 1303 bp, Aspergillus oryzae
  source 1..1303: mol_type = unassigned DNA
ccacgcgtccgattccctactcagagccccgagcaaccaagcagcagtatgggtgtcaatttcaaagttcttgccctgtcggccttagctactattagccatgcttcgcctctcctatatcctcgagccacagactcgaacgtcacctatgtgttcaccaaccccaatggcctgaactttactcagatgaacaccaccctgccaaacgtcactatcttcgcgacaggcggcacaatcgcgggctccagcgccgacaacaccgcaacaacaggttacaaagccggtgcagtcggcatccagacactgatcgacgcggtcccggaaatgctaaacgttgccaacgtcgctggcgtgcaagtaaccaatgtcggcagcccagacatcacctccgacattctcctgcgtctctccaaacagatcaacgaggtggtctgcaacgaccccaccatggccggtgcagtggtcacccacggcaccgacacgctcgaagaatccgccttcttcctcgacgccacggtcaactgtcgcaagcccgtggtcatcgtcggcgccatgcgcccttcaaccgccatctcggctgacggccccctcaacctcctgcaatccgtcaccgtcgccgcgagccccaaggcccgagaccgcggcgccctgattgtcatgaacgaccgcatcgtatccgccttctacgcctccaagacgaacgccaacaccgtcgatacattcaaggccatcgaaatgggtaacctgggcgaggtcgtctccaacaaaccctacttcttctaccccccagtcaagccaacaggcaagacggaagtagatatccggaacatcacctccatccccagagtcgacatcctctactcatacgaagacatgcacaatgacaccctttactccgccatcgacaacggcgcaaagggcatcgttatcgccggctccggctccggctccgtctccacccccttcagcgccgccatggaagacatcacaaccaaacacaacatccccatcgtagccagcacgcgcaccggaaacggggaggtgccgtcctccgccgagtcgagccagatcgcaagcgggtatttgaaccccgcaaagtcacgcgttttgcttggcttgttgcttgcccaggggaagagtattgaggaaatgagggcggtttttgagcggattggggttgcttgatttttttttcttttctgcttggtctttgtttagggttggggtttgtgtattatagattaaggatttatggatgggatggataatagattatagattatagattaagtatcgattatgg

SEQ ID NO: 181 - DNA, 1632 bp, Aspergillus niger
  source 1..1632: mol_type = unassigned DNA
atgacgccgttcacagcgctggcgtcagcgatcgcgctggcagtctgcattggaaccaatggtgtcagtagcacttcggggtctcaagatgacattgcagtcttgcgcagagcctgtcccgattacacgtcatattccactgtgcctcatgctccatacagcggcgggcctttgaacctccccttccaacgtccggccgaagcatgtaggacattcacctcaccagcagtcgaacaggtgattcaagatgtcacttcccgcatggttgacaaagacatggctcagttgtttcgaaacgcattcccgaacacgctggatacaacgatccgctggcacacgaacggctcgaccaccacctcaacaaggagaaaaagcaagaaggatgctgctcagtggcagggcgcgcagacattcgtcgtgaccggagacatcaacgcggaatggctccgtgattcgacaaaccagctggcagggtatcaggctctagcgaagaaggataagagtctctacacgcttatactgggcgcgatcaacactcaggttgagtatgtgattcagtctccctactgcaacgctttccaaccgcctccgcctagcgggatcagaccaacttcgaacggacagggcgacactgtacatccggcgtacgagccctcgtttgtctttgagtgcaagtacgagctcgactcgctggctcattttctaacactcggaacccaattctacgaaaacacgggctcgacagagttcttgacgagcagatggtacacagctttgaacacactgctagatgtcttggacgcacaatcccaacctactttcaacgctaacaatcagtacgtcaccaaccagtataccttccagcgccagacgacggccggtacggaaacgctcagcttgagaggtatcggaaatccgttgaatagtggcactggtctcattcgtagcgccttccggcccagtgatgatgctacgatcctgggtttctttattccgcctaatgcgatgatgtctgttcagctgaagaaaatagcagaagtcatcaaggcagcaggaggagactcgagccttgtcaagaagcttcagcagcgaggtcacgacctagaacagtcggtatgggaacatggtgtagtcgatcatcccaagtacggcaaggtctttgctttcgaggtcgacgggtatggctcgcggattctcatggacgatgcgaatattccctccttgctttcattgccgctattgggcttcgtggacaagaacgacgagacctaccagaacacgaggaagatgattcttgacaagtcgggaaatccatactacctgactggatctgattttcacggaatcggtgggccgcatgtcggcctcgaaaacgcctggccaatgtctcttctcgtccaagcgcagacgacagactccgactccgaaatcgcagaatgcatcaacctcgttcgcaactcgagccgtctcggtctcgttcatgagtcgatcaatgtcaacaatatcagggactatacccggccgtggtttgcatgggctaattccctctttgcacaaaccattctgaagatcgcagcggagaagccgcatttggtctttggttcagatgcatctccttatgttgtcgagtaa

SEQ ID NO: 182 - DNA, 1482 bp, Bacillus licheniformis
  source 1..1482: mol_type = unassigned DNA
atgaaattaattaaaaatgcttcttttattatttcttttttagctgctgctggtatttattttttattaggtactgttgctgcttctgctgctaatgaagattatcctgaacaaatgattcgtttagaatcttcttctggtttaaatattactcctgctggtaatcaagataatgctcctttaactgctaaacaaacttctggtgaaaaagaagaacgttggcgtttagatacttctgatggtaaacaatttaaaattcgtaatatggattctggtaaaattattattcctgctcattatgctttatctgataataatcctgctgttgtttattatgataattctcgtaaagaagaattatggaatattattggtgctgataaagatggtaatggtgattttattacttataaaattgtttctgctcaaaattcttctttagctttaactttagatggttctggtgttaaattagctaaatatactggttcttctgttcaaaaatggaaattaccttctgatggtttagaaggttttgctggttatgctcgtgaaactaatggtaaacaaaaaactggtactactggtggtttattaggtaaagttgtttatgttaataatttaggtgaattaaaagctaatattgaagattctactcctcgtactattgttgtttcttctaatattggtgcttctgctaaaactgttttaactgttggtgctaataaaactattattggttcttatgaaaaacataaattaaataatatttattttaaaactaaagctgattctggtaatgttatttttaaaaatttagttattgctcatgatgcttctattaatgaaaataatgatattcctgtttatattactgattctcgtaattattggattgatcatgttacttttcaaggtcattcttatactgctaatggtcatgatttagataaattattatatgttggtgctaaagctgattatgttactttatctcattctacttttactgatcatcgttatggtttaattttaggttggcctcaagatgataaacaatatcattctatttataatggttatcctcgtatgactatttctcataatcgttttgaaaatttatatgttcgtgctcctggtttaatgcgttatggttattatcatgttaaatctaattatattaataattatcatttaggttttactattactactttagctaaaatttattctgaagctaattattttggtactggtaatgaaaaaggtattttagatgattatggtgatggtgcttttaaagatgttggttcttatcctgctattaaaggtcaaaaatctcctgaaacttcttggactccttcttctaattattcttatcgtactatgaaagctggtaatgctaaagcttttgctaaacgttatgctggtgctcaacgtactgctttatattatgctaattattctcaatttaaaaaagat

SEQ ID NO: 183 - protein, 589 aa, Aspergillus niger
LPHYIRSNGIEASLLTDPKDVSGRTVDYIIAGGGLTGLTTAARLTENPNISVLVIESGSYESDRGPIIEDLNAYGDIFGSSVDHAYETVELATNNQTALIRSGNGLGGSTLVNGGTWTRPHKAQVDSWETVFGNEGWNWDNVAAYSLQAERARAPNAKQIAAGHYFNASCHGTNGTVHAGPRDTGDDYSPIVKALMSAVEDRGVPTKKDFGCGDPHGVSMFPNTLHEDQVRSDAAREWLLPNYQRPNLQVLTGQYVGKVLLSQNGTTPRAVGVEFGTHKGNTHNVYAEHEVLLAAGSAVSPTILEYSGIGMKSILEPLGIDTVVDLPVGLNLQDQTTATVRSRITSAGAGQGQAAWFATFNETFGDYSEKAHELLNTKLEQWAEEAVARGGFHNTTALLIQYENYRDWIVNHNVAYSELFLDTAGVASFDVWDLLPFTRGYVHILDKDPYLHHFAYDPQYFLNELDLLGQAAATQLARNISNSGAMQTYFAGETIPGDNLAYDADLSAWTEYIPYHFRPNYHGVGTCSMMPKEMGGVVDNAARVYGVQGLRVIDGSIPPTQMSSHVMTVFYAMALKISDAILEDYASMQ

SEQ ID NO: 184 - protein, 589 aa, Aspergillus niger
MQTLLVSSLVVSLAAALPHYIRSNGIEASLLTDPKDVSGRTVDYIIAGGGLTGLTTAARLTENPNISVLVIESGSYESDRGPIIEDLNAYGDIFGSSVDHAYETVELATNNQTALIRSGNGLGGSTLVNGGTWTRPHKAQVDSWETVFGNEGWNWDNVAAYSLQAERARAPNAKQIAAGHYFNASCHGTNGTVHAGPRDTGDDYSPIVKALMSAVEDRGVPTKKDFGCGDPHGVSMFPNTLHEDQVRSDAAREWLLPNYQRPNLQVLTGQYVGKVLLSQNGTTPRAVGVEFGTHKGNTHNVYAEHEVLLAAGSAVSPTILEYSGIGMKSILEPLGIDTVVDLPVGLNLQDQTTATVRSRITSAGAGQGQAAWFATFNETFGDYSEKAHELLNTKLEQWAEEAVARGGFHNTTALLIQYENYRDWIVNHNVAYSELFLDTAGVASFDVWDLLPFTRGYVHILDKDPYLHHFAYDPQYFLNELDLLGQAAATQLARNISNSGAMQTYFAGETIPGDNLAYDADLSAWTEYIPYHFRPNYHGVGTCSMMPKEMGGVVDNAARVQMSSHVMTVFYAMALKISDAILEDYASMQ

SEQ ID NO: 185 - protein, 605 aa, Aspergillus niger; identical to SEQ ID NO: 1

SEQ ID NO: 186 - protein, 605 aa, Penicillium viridicatum; identical to SEQ ID NO: 3

SEQ ID NO: 187 - protein, 607 aa, Aspergillus niveoglaucus; identical to SEQ ID NO: 4

SEQ ID NO: 188 - protein, 605 aa, Talaromyces bacillisporus; identical to SEQ ID NO: 5

SEQ ID NO: 189 - protein, 589 aa, Aspergillus niger
LPHYIRSNGIEASLLTDPKDVSGRTVDYIIAGGGLTGLTTAARLTENPNISVLVIESGSYESDRGPIIEDLNAYGDIFGSSVDHAYETVELATNNQTALIRSGNGLGGSTLVNGGTWTRPHKAQVDSWETVFGNEGWNWDNVAAYSLQAERARAPNAKQIAAGHYFNASCHGVNGTVHAGPRDTGDDYSPIVKALMSAVEDRGVPTKKDFGCGDPHGVSMFPNTLHEDQVRSDAAREWLLPNYQRPNLQVLTGQYVGKVLLSQNGTTPRAVGVEFGTHKGNTHNVYAEHEVLLAAGSAVSPTILEYSGIGMKSILEPLGIDTVVDLPVGLNLQDQTTATVRSRITSAGAGQGQAAWFATFNETFGDYSEKAHELLNTKLEQWAEEAVARGGFHNTTALLIQYENYRDWIVNHNVAYSELFLDTAGVASFDVWDLLPFTRGYVHILDKDPYLHHFAYDPQYFLNELDLLGQAAATQLARNISNSGAMQTYFAGETIPGDNLAYDADLSAWTEYIPYHFRPNYHGVGTCSMMPKEMGGVVDNAARVYGVQGLRVIDGSIPPTQMSSHVMTVFYAMALKISDAILEDYASMQ

SEQ ID NO: 190 - protein, 589 aa, Aspergillus niger
LPHYIRSNGIEASLLTDPKDVSGRTVDYIIAGGGLTGLTTAARLTENPNISVLVIESGSYESDRGPIIEDLNAYGDIFGSSVDHAYETVELATNNQTALIRSGNGLGGSTLVNGGTWTRPHKAQVDSWETVFGNEGWNWDNVAAYSLQAERARAPNAKQIAAGHYFNASCHGTNGTVHAGPRDTGDDYSPIVKALMSAVEDRGVPTKKDFGCGDPHGVSMFPNTLHEDQVRSDAAREWLLPNYQRPNLQVLTGQYVGKVLLSQNGTTPRAVGVEFGTHKGNTHNVYAKHEVLLAAGSAVSPTILEYSGIGMKSILEPLGIDTVVDLPVGLNLQDQTTATVRSRITSAGAGQGQAAWFATFNETFGDYSEKAHELLNTKLEQWAEEAVARGGFHNTTALLIQYENYRDWIVNHNVAYSELFLDTAGVASFDVWDLLPFTRGYVHILDKDPYLHHFAYDPQYFLNELDLLGQAAATQLARNISNSGAMQTYFAGETIPGDNLAYDADLSAWTEYIPYHFRPNYHGVGTCSMMPKEMGGVVDNAARVYGVQGLRVIDGSIPPTQMSSHVMTVFYAMALKISDAILEDYASMQ

SEQ ID NO: 191 - protein, 605 aa, Aspergillus niger
MQTLLVSSLVVSLAAALPHYIRSNGIEASLLTDPKDVSGRTVDYIIAGGGLTGLTTAARLTENPNISVLVIESGSYESDRGPIIEDLNAYGDIFGSSVDHAYETVELATNNQTALIRSGNGLGGSTLVNGGTWTRPHKAQVDSWETVFGNEGWNWDNVAAYSLQAERARAPNAKQIAAGHYFNASCHGVNGTVHAGPRDTGDDYSPIVKALMSAVEDRGVPTKKDFGCGDPHGVSMFPNTLHEDQVRSDAAREWLLPNYQRPNLQVLTGQYVGKVLLSQNGTTPRAVGVEFGTHKGNTHNVYAKHEVLLAAGSAVSPTILEYSGIGMKSILEPLGIDTVVDLPVGLNLQDQTTATVRSRITSAGAGQGQAAWFATFNETFGDYSEKAHELLNTKLEQWAEEAVARGGFHNTTALLIQYENYRDWIVNHNVAYSELFLDTAGVASFDVWDLLPFTRGYVHILDKDPYLHHFAYDPQYFLNELDLLGQAAATQLARNISNSGAMQTYFAGETIPGDNLAYDADLSAWTEYIPYHFRPNYHGVGTCSMMPKEMGGVVDNAARVYGVQGLRVIDGSIPPTQMSSHVMTVFYAMALKISDAILEDYASMQ

SEQ ID NO: 192 - protein, 589 aa, Aspergillus niger
LPHYIRSNGIEASLLTDPKDVSGRTVDYIIAGGGLTGLTTAARLTENPNISVLVIESGSYESDRGPIIEDLNAYGDIFGSSVDHAYETVELATNNQTALIRSGNGLGGSTLVNGGTWTRPHKAQVDSWETVFGNEGWNWDNVPAYSLQAERARAPNAKQIAAGHYFNASCHGTNGTVHAGPRDTGDDYSPIVKALMSAVEDRGVPTKKDFGCGDPHGVSMFPNTLHEDQVRSDAAREWLLPNYQRPNLQVLTGQYVGKVLLSQNGTTPRAVGVEFGTHKGNTHNVYAEHEVLLAAGSAVSPTILEYSGIGMKSILEPLGIDTVVDLPVGLNLQDQTTATVRSRITSAGAGQGQAAWFATFNETFGDYSEKAHELLNTKLEQWAEEAVARGGFHNTTALLIQYENYRDWIVNHNVAYSELFLDTAGVASFDVWDLLPFTRGYVHILDKDPYLHHFAYDPQYILNELDLLGQAAATQLARNISNSGAMQTYFAGETIPGDNLAYDADLSAWTEYIPYHFRPNYHGVGTCSMMPKEMGGVVDNAARVYGVQGLRVIDGSIPPTQMSSHVMTVFYAMALKISDAILEDYASMQ

SEQ ID NO: 193 - protein, 589 aa, Aspergillus niger
LPHYIRSNGIEASLLTDPKDVSGRTVDYIIAGGGLTGLTTAARLTENPNISVLVIESGSYESDRGPIIEDLNAYGDIFGSSVDHAYETVELATNNQTALIRSGNGLGGSTLVNGGTWTRPHNAQVDSWETVFGNEGWNWDNVAAYSLQAERARAPNAKQIAAGHYFNASCHGTNGTVHAGPRDTGDDYSPIVKALMSAVEDRGVPTKKDFGCGDPHGVSMFPNTLHEDQVRSDAAREWLLPNYQRPNLQVLTGQYVGKVLLSQNGTTPRAVGVEFGTHKGNTHNVYAEHEVLLAAGSAVSPTILEYSGIGMKSILEPLGIDTVVDLPVGLNLQDQTTATVRSRITSAGAGQGQAAWFATFNETFGDYSEKAHELLNTKLEQWAEEAVARGGFHNTTALLIQYENYRDWIVNHNVAYSELFLDTAGVASFDVWDLLPFTRGYVHILDKDPYLHHFAYDPQYFLNELDLLGQAAATQLARNISNSGAMQTYFAEETIPGDNLAYDADLSAWTEYIPYHFRPNYHGVGTCSMMPKEMGGVVDNAARVYGVQGLRVIDGSIPPTQMSSHVMTVFYAMALKISDAILEDYASMQ

SEQ ID NO: 194 - protein, 589 aa, Aspergillus niger
LPHYIRSNGIEASLLTDPKDVSGRTVDYIIAGGGLTGLTTAARLTENPNISVLVIESGSYESDRGPIIEDLNAYGDIFGSSVDHAYETVELATNNQTALIRSGNGLGGSTLVNGGTWTRPHKAQVDSWETVFGNEGWNWDNVAAYSLQAERARAPNAKQIAAGHYFNASCHGTNGTVHAGPRDTGDDYSPIVKALMSAVEDRGVPTQKDFGCGDPHGVSMFPNTLHEDQVRSDAAREWLLPNYQRPNLQVLTGQYVGKVLLSQNGTTPRAVGVEFGTHKGNTHNVYAKHEVLLAAGSAVSPTILEYSGIGMKSILEPLGIDTVVDLPVGLNLQDQTTATVRSRITSAGAGQGQAAWFATFNETFGDYSEKAHELLNTKLEQWAEEAVARGGFHNTTALLIQYENYRDWIVNHNVAYSELFLDTAGVASFDVWDLLPFTRGYVHILDKDPYLHHFAYDPQYFLNELDLLGQAAATQLARNISNSGAMQTYFAGETIPGDNLAYDADLSAWTEYIPYHFRPNYHGVGTCSMMPKEMGGVVDNAARVYGVQGLRVIDGSIPPTQMSSHVMTVFYAMALKISDAILEDYASMQ

SEQ ID NO: 195 - protein, 589 aa, Aspergillus niger
LPHYIRSNGIEASLLTDPKDVSGRTVDYIIAGGGLTGLTTAARLTENPNISVLVIESGSYESDRGPIIEDLNAYGDIFGSSVDHAYETVELATNNQTALIRSGNGLGGSTLVNGGTWTRPHKAQVDSWETVFGNEGWNWDNVAAYSLQAERARAPNAKQIAAGHYFNASCHGVNGTVHAGPRDTGDDYSPIVKALMSAVEDRGVPTKKDFGCGDPHGVSMFPNTLHEDQVRSDAAREWLLPNYQRPNLQVLTGQYVGKVLLSQNGTTPRAVGVEFGTHKGNTHNVYAKHEVLLAAGSAVSPTILEYSGIGMKSILEPLGIDTVVDLPVGLNLQDQTTATVRSRITSAGAGQGQAAWFATFNETFGDYSEKAHELLNTKLEQWAEEAVARGGFHNTTALLIQYENYRDWIVNHNVAYSELFLDTAGVASFDVWDLLPFTRGYVHILDKDPYLHHFAYDPQYFLNELDLLGQAAATQLARNISNSGAMQTYFAGETIPGDNLAYDADLSAWTEYIPYHFRPNYHGVGTCSMMPKEMGGVVDNAARVYGVQGLRVIDGSIPPTQMSSHVMTVFYAMALKISDAILEDYASMQ

SEQ ID NO: 196 - protein, 583 aa, Aspergillus niger
SNGIEASLLTDPKDVSGRTVDYIIAGGGLTGLTTAARLTENPNISVLVIESGSYESDRGPIIEDLNAYGDIFGSSVDHAYETVELATNNQTALIRSGNGLGGSTLVNGGTWTRPHKAQVDSWETVFGNEGWNWDNVAAYSLQAERARAPNAKQIAAGHYFNASCHGVNGTVHAGPRDTGDDYSPIVKALMSAVEDRGVPTKKDFGCGDPHGVSMFPNTLHEDQVRSDAAREWLLPNYQRPNLQVLTGQYVGKVLLSQNGTTPRAVGVEFGTHKGNTHNVYAKHEVLLAAGSAVSPTILEYSGIGMKSILEPLGIDTVVDLPVGLNLQDQTTATVRSRITSAGAGQGQAAWFATFNETFGDYSEKAHELLNTKLEQWAEEAVARGGFHNTTALLIQYENYRDWIVNHNVAYSELFLDTAGVASFDVWDLLPFTRGYVHILDKDPYLHHFAYDPQYFLNELDLLGQAAATQLARNISNSGAMQTYFAGETIPGDNLAYDADLSAWTEYIPYHFRPNYHGVGTCSMMPKEMGGVVDNAARVYGVQGLRVIDGSIPPTQMSSHVMTVFYAMALKISDAILEDYASMQ

SEQ ID NO: 197 - protein, 582 aa, Aspergillus niger
NGIEASLLTDPKDVSGRTVDYIIAGGGLTGLTTAARLTENPNISVLVIESGSYESDRGPIIEDLNAYGDIFGSSVDHAYETVELATNNQTALIRSGNGLGGSTLVNGGTWTRPHKAQVDSWETVFGNEGWNWDNVAAYSLQAERARAPNAKQIAAGHYFNASCHGVNGTVHAGPRDTGDDYSPIVKALMSAVEDRGVPTKKDFGCGDPHGVSMFPNTLHEDQVRSDAAREWLLPNYQRPNLQVLTGQYVGKVLLSQNGTTPRAVGVEFGTHKGNTHNVYAKHEVLLAAGSAVSPTILEYSGIGMKSILEPLGIDTVVDLPVGLNLQDQTTATVRSRITSAGAGQGQAAWFATFNETFGDYSEKAHELLNTKLEQWAEEAVARGGFHNTTALLIQYENYRDWIVNHNVAYSELFLDTAGVASFDVWDLLPFTRGYVHILDKDPYLHHFAYDPQYFLNELDLLGQAAATQLARNISNSGAMQTYFAGETIPGDNLAYDADLSAWTEYIPYHFRPNYHGVGTCSMMPKEMGGVVDNAARVYGVQGLRVIDGSIPPTQMSSHVMTVFYAMALKISDAILEDYASMQ

SEQ ID NO: 198 - protein, 581 aa, Aspergillus niger
GIEASLLTDPKDVSGRTVDYIIAGGGLTGLTTAARLTENPNISVLVIESGSYESDRGPIIEDLNAYGDIFGSSVDHAYETVELATNNQTALIRSGNGLGGSTLVNGGTWTRPHKAQVDSWETVFGNEGWNWDNVAAYSLQAERARAPNAKQIAAGHYFNASCHGKNGTVHAGPRDTGDDYSPIVKALMSAVEDRGVPTKKDFGCGDPHGVSMFPNTLHEDQVRSDAAREWLLPNYQRPNLQVLTGQYVGKVLLSQNGTTPRAVGVEFGTHKGNTHNVYAKHEVLLAAGSAVSPTILEYSGIGMKSILEPLGIDTVVDLPVGLNLQDQTTATVRSRITSAGAGQGQAAWFATFNETFGDYSEKAHELLNTKLEQWAEEAVARGGFHNTTALLIQYENYRDWIVNHNVAYSELFLDTAGVASFDVWDLLPFTRGYVHILDKDPYLHHFAYDPQYFLNELDLLGQAAATQLARNISNSGAMQTYFAGETIPGDNLAYDADLSAWTEYIPYHFRPNYHGVGTCSMMPKEMGGVVDNAARVYGVQGLRVIDGSIPPTQMSSHVMTVFYAMALKISDAILEDYASMQ

SEQ ID NO: 199 - protein, 581 aa, Aspergillus niger
GIEASLLTDPKDVSGRTVDYIIAGGGLTGLTTAARLTENPNISVLVIESGSYESDRGPIIEDLNAYGDIFGSSVDHAYETVELATNNQTALIRSGNGLGGSTLVNGGTWTRPHKAQVDSWETVFGNEGWNWDNVAAYSLQAERARAPNAKQIAAGHYFNASCHGRNGTVHAGPRDTGDDYSPIVKALMSAVEDRGVPTKKDFGCGDPHGVSMFPNTLHEDQVRSDAAREWLLPNYQRPNLQVLTGQYVGKVLLSQNGTTPRAVGVEFGTHKGNTHNVYAKHEVLLAAGSAVSPTILEYSGIGMKSILEPLGIDTVVDLPVGLNLQDQTTATVRSRITSAGAGQGQAAWFATFNETFGDYSEKAHELLNTKLEQWAEEAVARGGFHNTTALLIQYENYRDWIVNHNVAYSELFLDTAGVASFDVWDLLPFTRGYVHILDKDPYLHHFAYDPQYFLNELDLLGQAAATQLARNISNSGAMQTYFAGETIPGDNLAYDADLSAWTEYIPYHFRPNYHGVGTCSMMPKEMGGVVDNAARVYGVQGLRVIDGSIPPTQMSSHVMTVFYAMALKISDAILEDYASMQ

SEQ ID NO: 200 - protein, 581 aa, Aspergillus niger
GIEASLLTDPKDVSGRTVDYIIAGGGLTGLTTAARLTENPNISVLVIESGSYESDRGPIIEDLNAYGDIFGSSVDHAYETVELATNNQTALIRSGNGLGGSTLVNGGTWTRPHKAQVDSWETVFGNEGWNWDNVAAYSLQAERARAPNAKQIAAGHYFNASCHGVNGTVHAGPRDTGDDYSPIVKALMSAVEDRGVPTKKDFGCGDPHGVSMFPNTLHEDQVRSDAAREWLLPNYQRPNLQVLTGQYVGKVLLSQNGTTPRAVGVEFGTHKGNTHNVYAKHEVLLAAGSAVSPTILEYSGIGMKSILEPLGIDTVVDLPVGLNLQDQTTATVRSRITSAGAGQGQAAWFATFNETFGDYSEKAHELLNTKLEQWAEEAVARGGFHNTTALLIQYENYRDWIVNHNVAYSELFLDTAGVASFDVWDLLPFTRGYVHILDKDPYLHHFAYDPQYFLNELDLLGQAAATQLARNISNSGAMQTYFAGETIPGDNLAYDADLSAWTEYIPYHFRPNYHGVGTCSMMPKEMGGVVDNAARVYGVQGLRVIDGSIPPTQMSSHVMTVFYAMALKISDAILEDYASMQ

SEQ ID NO: 201 - protein, 580 aa, Aspergillus niger
GIEASLLTDPKDVSGRTVDYIIAGGGLTGLTTAARLTENPNISVLVIESGSYESDRGPIIEDLNAYGDIFGSSVDHAYETVELATNNQTALIRSGNGLGGSTLVNGGTWTRPHKAQVDSWETVFGNEGWNWDNVAAYSLQAERARAPNAKQIAAGHYFNASCHGVNGTVHAGPRDTGDDYSPIVKALMSAVEDRGVPTKKDFGCGDPHGVSMFPNTLHEDQVRSDAAREWLLPNYQRPNLQVLTGQYVGKVLLSQNGTTPRAVGVEFGTHKGNTHNVYAKHEVLLAAGSAVSPTILEYSGIGMKSILEPLGIDTVVDLPVGLNLQDQTTATVRSRITSAGAGQGQAAWFATFNETFGDYSEKAHELLNTKLEQWAEEAVARGGFHNTTALLIQYENYRDWIVNHNVAYSELFLDTAGVASFDVWDLLPFTRGYVHILDKDPYLHHFAYDPQYFLNELDLLGQAAATQLARNISNSGAMQTYFAGETIPGDNLAYDADLSAWTEYIPYHFRPNYHGVGTCSMMPKEMGGVVDNAARVYGVQGLRVIDGSIPPTQMSSHVMTVFYAMALKISDAILEDYASM

SEQ ID NO: 202 - protein, 579 aa, Aspergillus niger
GIEASLLTDPKDVSGRTVDYIIAGGGLTGLTTAARLTENPNISVLVIESGSYESDRGPIIEDLNAYGDIFGSSVDHAYETVELATNNQTALIRSGNGLGGSTLVNGGTWTRPHKAQVDSWETVFGNEGWNWDNVAAYSLQAERARAPNAKQIAAGHYFNASCHGVNGTVHAGPRDTGDDYSPIVKALMSAVEDRGVPTKKDFGCGDPHGVSMFPNTLHEDQVRSDAAREWLLPNYQRPNLQVLTGQYVGKVLLSQNGTTPRAVGVEFGTHKGNTHNVYAKHEVLLAAGSAVSPTILEYSGIGMKSILEPLGIDTVVDLPVGLNLQDQTTATVRSRITSAGAGQGQAAWFATFNETFGDYSEKAHELLNTKLEQWAEEAVARGGFHNTTALLIQYENYRDWIVNHNVAYSELFLDTAGVASFDVWDLLPFTRGYVHILDKDPYLHHFAYDPQYFLNELDLLGQAAATQLARNISNSGAMQTYFAGETIPGDNLAYDADLSAWTEYIPYHFRPNYHGVGTCSMMPKEMGGVVDNAARVYGVQGLRVIDGSIPPTQMSSHVMTVFYAMALKISDAILEDYAS

SEQ ID NO: 203 - protein, 605 aa, unidentified
MQTLLVSSLVVSLAAALPHYIRSNGIEASLLTDPKDVSGRTVDYIIAGGGLTGLTTAARLTENPNISVLVIESGSYESDRGPIIEDLNAYGDIFGSSVDHAYETVELATNNQTALIRSGNGLGGSTLVNGGTWTRPHKAQVDSWETVFGNEGWNWNNVAAYSLQAERARAPNAKQIAAGHYFNASCHGVNGTVHAGPRDTGDDYSPIVKALMSAVEDRGVPTKKDFGCGDPHGVSMFPNTLHEDQVRSDAAREWLLPNYQRPNLQVLTGQYVGKVLLSQNGTTPRAVGVEFGTHKGNTHNVYAKHEVLLAAGSAVSPTILEYSGIGMKSILEPLGIDTVVDLPVGLNLQDQTTATVRSRITSAGAGQGQAAWFATFNETFGDYSEKAHELLNTKLEQWAEEAVARGGFHNTTALLIQYENYRDWIVNHNVAYSELFLDTAGVASFDVWDLLPFTRGYVHILDKDPYLHHFAYDPQYFLNELDLLGQAAATQLARNISNSGAMQTYFAGETIPGDNLAYDADLSAWTEYIPYHFRPNYHGVGTCSMMPKEMGGVVDNAARVYGVQGLRVIDGSIPPTQMSSHVMTVFYAMALKISDAILEDYASMQ

SEQ ID NO: 204 - protein, 605 aa, Aspergillus niger
MQTLLVSSLVVSLAAALPHYIRSNGIEASLLTDPKDVSGRTVDYIIAGGGLTGLTTAARLTENPNISVLVIESGSYESDRGPIIEDLNTYGDIFGSSVDHAYETVELATNNQTALIRSGNGLGGSTLVNGGTWTRPHKAQVDSWETVFGNEGWNWDNVAAYSLQAERARAPNAKQIAAGHYFNASCHGVNGTVHAGPRDTGDDYSPIVKALMSAVEDRGVPTKKDFGCGDPHGVSMFPNTLHEDQVRSDAAREWLLPNYQRPNLQVLTGQYVGKVLLSQNGTTPRAVGVEFGTHKGNTHNVYAKHEVLLAAGSAVSPTILEYSGIGMKSILEPLGIDTVVDLPVGLNLQDQTTATVRSRITSAGAGQGQAAWFATFNETFGDYSEKAHELLNTKLEQWAEEAVARGGFHNTTALLIQYENYRDWIVNHNVAYSELFLDTAGVASFDVWDLLPFTRGYVHILDKDPYLHHFAYDPQYFLNELDLLGQAAATQLARNISNSGAMQTYFAGETIPGDNLAYDADLSAWTEYIPYHFRPNYHGVGTCSMMPKEMGGVVDNAARVYGVQGLRVIDGSIPPTQMSSHVMTVFYAMALKISDAILEDYASMQ

SEQ ID NO: 205 - protein, 589 aa, Aspergillus niger
LPHYIRSNGIEASLLTDPKDVSGRTVDYIIAGGGLTGLTTAARLTENPNISVLVIESGSYESDRGPIIEDLNAYGDIFGSSVDHAYETVELATNNQTALIRSGNGLGGSTLINGGTWTRPHKAQVDSWETVFGNEGWNWDNVAAYSLQAERARAPNAKQIAAGHYFNASCHGVNGTVHAGPRDTGDDYSPIVKALMSAVEDRGVPTKKDFGCGDPHGVSMFPNTLHEDQVRSDAAREWLLPNYQRPNLQVLTGQYVGKVLLSQNGTTPRAVGVEFGTHKGNTHNVYAKHEVLLAAGSAVSPTILEYSGIGMKSILEPLGIDTVVDLPVGLNLQDQTTATVRSRITSAGAGQGQAAWFATFNETFGDYSEKAHELLNTKLEQWAEEAVARGGFHNTTALLIQYENYRDWIVNHNVAYSELFLDTAGVASFDVWDLLPFTRGYVHILDKDPYLHHFAYDPQYFLNELDLLGQAAATQLARNISNSGAMQTYFAGETIPGDNLAYDADLSAWTEYIPYHFRPNYHGVGTCSMMPKEMGGVVDNAARVYGVQGLRVIDGSIPPTQMSSHVMTVFYAMALKISDAILEDYASMQ

SEQ ID NO: 206 - protein, 589 aa, Aspergillus niger
LPHYIRSNGIEASLLTDPKDVSGRTVDYIIAGGGLTGLTTAARLTENPNISVLVIESGSYESDRGPIIEDLNAYGDIFGSSVDHAYETVELATNNQTALIRSGNGLGGSTLVNGGTWTRPHKAQVDSWETVFGNEGWNWDNVAAYSLQAERARAPNAKQIAAGHYFNASCHGVNGTVHAGPRDTGDDYSPIVKALMSAVEDRGVPTQKDFGCGDPHGVSMFPNTLHEDQVRSDAAREWLLPNYQRPNLQVLTGQYVGKVLLSQNGTTPRAVGVEFGTHKGNTHNVYAKHEVLLAAGSAVSPTILEYSGIGMKSILEPLGIDTVVDLPVGLNLQDQTTATVRSRITSAGAGQGQAAWFATFNETFGDYSEKAHELLNTKLEQWAEEAVARGGFHNTTALLIQYENYRDWIVNHNVAYSELFLDTAGVASFDVWDLLPFTRGYVHILDKDPYLHHFAYDPQYFLNELDLLGQAAATQLARNISNSGAMQTYFAGETIPGDNLAYDADLSAWTEYIPYHFRPNYHGVGTCSMMPKEMGGVVDNAARVYGVQGLRVIDGSIPPTQMSSHVMTVFYAMALKISDAILEDYASMQ

SEQ ID NO: 207 - protein, 589 aa, Aspergillus niger
LPHYIRSNGIEASLLTDPKDVSGRTVDYIIAGGGLTGLTTAARLTENPNISVLVIESGSYESDRGPIIEQLNAYGDIFGSSVDHAYETVELATNNQTALIRSGNGLGGSTLVNGGTWTRPHNAQVDSWETVFGNEGWNWDNVAAYSLQAERARAPNAKQIAAGHYFNASCHGTNGTVHAGPRDTGDDYSPIVKALMSAVEDRGVPTKKDFGCGDPHGVSMFPNTLHEDQVRSDAAREWLLPNYQRPNLQVLTGQYVGKVLLSQNGTTPRAVGVEFGTHKGNTHNVYAEHEVLLAAGSAVSPTILEYSGIGMKSILEPLGIDTVVDLPVGLNLQDQTTATVRSRITSAGAGQGQAAWFATFNETFGDYSEKAHELLNTKLEQWAEEAVARGGFHNTTALLIQYENYRDWIVNHNVAYSELFLDTAGVASFDVWDLLPFTRGYVHILDKDPYLHHFAYDPQYFLNELDLLGQAAATQLARNISNSGAMQTYFAEETIPGDNLAYDADLSAWTEYIPYHFRPNYHGVGTCSMMPKEMGGVVDNAARVYGVQGLRVIDGSIPPTQMSSHVMTVFYAMALKISDAILEDYASMQ

SEQ ID NO: 208 - protein, 583 aa, Aspergillus niger
SNGIEASLLTDPKDVSGRTVDYIIAGGGLTGLTTAARLTENPNISVLVIESGSYESDRGPIIEDLNAYGDIFGSSVDHAYETVELATNNQTALIRSGNGLGGSTLVNGGTWTRPHKAQVDSWETVFGNEGWNWDNVAAYSLQAERARAPNAKQIAAGHYFNASCHGVNGTVHAGPRDTGDDYSPIVKALMSAVEDRGVPTKKDFGCGDPHGVSMFPNTLHEDQVRSDAAREWLLPNYQRPNLQVLTGQYVGKVLLSQNGTTPRAVGVEFGTHKGNTHNVYAKHEVLLAAGSAVSPTILEYSGIGMKSILEPLGIDTVVDLPVGLNLQDQTTATVRSRITSAGAGQGQAAWFATFNETFGDYSEKAHELLNTKLEQWAEEAVARGGFHNTTALLIQYENYRDWIVNHNVAYSELFLDTAGVASFDVWDLLPFTRGYVHILDKDPYLHHFAYDPQYFLNELDLLGQAAATQLARNISNSGAMQTYFAGETIPGDNLAYDADLSAWTEYIPYHFRPNYHGVGTCSMMPKEMGGVVDNAARVYGVQGLRVIDGSIPPTQLSSHVMTVFYAMALKISDAILEDYASMQ

SEQ ID NO: 209 - protein, 583 aa, Aspergillus niger
SNGIEASLLTDPKDVSGRTVDYIIAGGGLTGLTTAARLTENPNISVLVIESGSYESDRGPIIEDLNAYGDIFGSSVDHAYETVELATNNQTALIRSGNGLGGSTLVNGGTWTRPHKAQVDSWETVFGNEGWNWDNVAAYSLQAERARAPNAKQIAAGHYFNASCHGVNGTVHAGPRDTGDDYSPIVKALMSAVEDRGVPTKKDFGCGDPHGVSMFPNTLHEDQVRSDAAREWLLPNYQRPNLQVLTGQYVGKVLLSQNGTTPRAVGVEFGTHKGNTHNVYAKHEVLLAAGSAVSPTILEYSGIGMKSILDPLGIDTVVDLPVGLNLQDQTTATVRSRITSAGAGQGQAAWFATFNETFGDYSEKAHELLNTKLEQWAEEAVARGGFHNTTALLIQYENYRDWIVNHNVAYSELFLDTAGVASFDVWDLLPFTRGYVHILDKDPYLHHFAYDPQYFLNELDLLGQAAATQLARNISNSGAMQTYFAGETIPGDNLAYDADLSAWTEYIPYHFRPNYHGVGTCSMMPKEMGGVVDNAARVYGVQGLRVIDGSIPPTQMSSHVMTVFYAMALKISDAILEDYASMQ

SEQ ID NO: 210 - protein, 583 aa, Synthetic construct
SNGIEASLLTDPKDVSGRTVDYIIAGGGLTGLTTAARLTENPNISVLVIESGSYESDRGPIIEDLNAYGDIFGSSVDHAYETVELATNNQTALIRSGNGLGGSTLVNGGTWTRPHKAQVDSWETVFGNEGWNWDNVAAYSLQAERARAPNAKQIAAGHYFNASCHGVNGTVHAGPRDTGDDYSPIVKALMSAVEDRGVPTKKDFGCGDPHGVSMFPNTLHEDQVRSDAAREWLLPNYQRPNLQVLTGQYVGKVLLSQNGTTPRAVGVEFGTHKGNTHNVYAKHEVLLAAGSAVSPTILEYSGIGMKSILEPLGIDTVVDLPVGLNLQDQTTATVRSRITSAGAGQGQAAWFATFNETFGDYSEKAHELLNTKLEQWAEEAVARGGFHNTTALLIQYENYRDWIVNHNVAYSELFLDTAGVASFDVWDLLPFTRGYVHILDKDPYLHHFAYDPQYFLNELDLLGQAAATQLARNISNSGAMQTYFAGETIPGDNLAYDADLSAWTEYIPYHFRPNYHGVGTCSMLPKEMGGVVDNAARVYGVQGLRVIDGSIPPTQMSSHVMTVFYAMALKISDAILEDYASMQ

SEQ ID NO: 211 - protein, 583 aa, Aspergillus niger
SNGIEASLLTDPKDVSGRTVDYIIVGGGLTGLTTAARLTENPNISVLVIESGSYESDRGPIIEDLNAYGDIFGSSVDHAYETVELATNNQTALIRSGNGLGGSTLVNGGTWTRPHKAQVDSWETVFGNEGWNWDNVAAYSLQAERARAPNAKQIAAGHYFNASCHGVNGTVHAGPRDTGDDYSPIVKALMSAVEDRGVPTKKDFGCGDPHGVSMFPNTLHEDQVRSDAAREWLLPNYQRPNLQVLTGQYVGKVLLSQNGTTPRAVGVEFGTHKGNTHNVYAKHEVLLAAGSAVSPTILEYSGIGMKSILEPLGIDTVVDLPVGLNLQDQTTATVRSRITSAGAGQGQAAWFATFNETFGDYSEKAHELLNTKLEQWAEEAVARGGFHNTTALLIQYENYRDWIVNHNVAYSELFLDTAGVASFDVWDLLPFTRGYVHILDKDPYLHHFAYDPQYFLNELDLLGQAAATQLARNISNSGAMQTYFAGETIPGDNLAYDADLSAWTEYIPYHFRPNYHGVGTCSMMPKEMGGVVDNAARVYGVQGLRVIDGSIPPTQMSSHVMTVFYAMALKISDAILEDYASMQ

SEQ ID NO: 212 - protein, 583 aa, Aspergillus niger
SNGIEASLLTDPKDVSGRTVDYIIAGGGLTGLTTAARLTENPNISVLVIESGSYESDRGPIIEDLNAYGDIFGSSVDHAYETVELATNNQTALIRSGNGLGGSTLVNGGTWTRPHKAQVDSWETVFGNEGWNWDNVAAYSLQAERARAPNAKQIAAGHYFNASCHGVNGTVHAGPRDTGDDYSPIVKALMSAVEDRGVPTKKDFGCGDPHGVSMFPNTLHEDQVRSDAAREWLLPNYQRPNLQVLTGQYVGKVLLSQNGTTPRAVGVEFGTHKGNTHNVYAKHEVLLAAGSAVSPTILEYSGIGMKSILEPLGIDTVVDLPVGLNLQDQTTATVRSRITSAGAGQGQAAWFATFNETFGDYSEKAHELLNTKLEQWAEEAVARGGFHNTTALLIQYENYRDWIVNHNVAYSELFLDTAGVASFDVWDLLPFTRGYVHILDKDPYLHHFAYDPQYFLNELDLLGQAAATQLARNISNSGAMQTYFAGETIPGDNLAYDADLSAWTEYIPYHFRPNYHGVGTCSMMPREMGGVVDNAARVYGVQGLRVIDGSIPPTQMSSHVMTVFYAMALKISDAILEDYASMQ

SEQ ID NO: 213 - protein, 583 aa, Aspergillus niger
SNGIEASLLTDPKDVSGRTVDYIIAGGGLTGLTTAARLTENPNISVLVIESGSYESDRGPIIEDLNAYGDIFGSSVDHAYETVELATNNQTALIRSGNGLGGSTLVNGGTWTRPHKAQVDSWETVFGNEGWNWDNVAAYSLQAERARAPNAKQIAAGHYFNASCHGVNGTVHAGPRDTGDDYSPIVKALMSAVEDRGVPTKKDFGCGDPHGVSMFPNTLHEDQVRSDAAREWLLPNYQRPNLQVLTGQYVGKVLLSQNGTTPRAVGVEFGTHKGNTHNVYAKHEVLLAAGSAVSPTILEYSGIGPKSILEPLGIDTVVDLPVGLNLQDQTTATVRSRITSAGAGQGQAAWFATFNETFGDYSEKAHELLNTKLEQWAEEAVARGGFHNTTALLIQYENYRDWIVNHNVAYSELFLDTAGVASFDVWDLLPFTRGYVHILDKDPYLHHFAYDPQYFLNELDLLGQAAATQLARNISNSGAMQTYFAGETIPGDNLAYDADLSAWTEYIPYHFRPNYHGVGTCSMMPKEMGGVVDNAARVYGVQGLRVIDGSIPPTQMSSHVMTVFYAMALKISDAILEDYASMQ

SEQ ID NO: 214 - protein, 583 aa, Aspergillus niger
SNGIEASLLTDPKDVSGRTVDYIIAGGGLTGLTTAARLTENPNISVLVIESGSYESDRGPIIEDLNAYGDIFGSSVDHAYETVELATNNQTALIRSGNGLGGSTLVNGGTWTRPHKAQVDSWETVFGNEGWNWDNVAAYSLQAERARAPNAKQIAAGHYFNASCHGVNGTVHAGPRDTGDDYSPIVKALMSAVEDRGVPTKKDFGCGDPHGVSMFPNTLHEDQVRSDAAREWLLPNYQRPNLQVLTGQYVGKVLLSQNGTTPRAVGVEFGTHKGNTHNVYAKHEVLLAAGSAVSPTILEYSGIGMKSILEPLGIDTVVDLPVGLNLQDQTTATVRSRITSAGAGQGQAAWFATFNETFGDYSEKAHELLNTKLEQWAEEAVARGGFHNTTALLIQYENYRDWIVNHNVAYSELFLDTAGVASFDVWDLLPFTRGYVHILDKDPYLHHFAYDPQYFLNELDLLGQAAATQLARNISNSGAMQTYFAGETIPGDNLAYDADLSAWTEYIPYHFRPNYHGVGTCSMMPKEMGGVVDNAARVYGVQGLRVIDGSIPPTQMSSHVMTVFYAMALKIADAILEDYASMQ

SEQ ID NO: 215 - protein, 583 aa, Synthetic construct
SNGIEASLLTDPKDVSGRTVDYIIAGGGLTGLTTAARLTENPNISVLVIESGSYESDRGPIIEDLNAYGDIFGSSVDHAYETVELATNNQTALIRSGNGLGGSTLVNGGTWTRPHKAQVDSWETVFGNEGWNWDNVAAYSLQAERARAPNAKQIAAGHYFNASCHGVNGTVHAGPRDTGDDYSPIVKALMSAVEDRGVPTKKDFGCGDPHGVSMFPNTLHEDQVRSDAAREWLLPNYQRPNLQVLTGQYVGKVLLSQNGTTPRAVGVEFGTHKGNTHNVYAKHEVLLAAGSAVSPTILEYSGIGLKSILEPLGIDTVVDLPVGLNLQDQTTATVRSRITSAGAGQGQAAWFATFNETFGDYSEKAHELLNTKLEQWAEEAVARGGFHNTTALLIQYENYRDWIVNHNVAYSELFLDTAGVASFDVWDLLPFTRGYVHILDKDPYLHHFAYDPQYFLNELDLLGQAAATQLARNISNSGAMQTYFAGETIPGDNLAYDADLSAWTEYIPYHFRPNYHGVGTCSMMPKEMGGVVDNAARVYGVQGLRVIDGSIPPTQMSSHVMTVFYAMALKISDAILEDYASMQ

SEQ ID NO: 216 - protein, 583 aa, Aspergillus niger
SNGIEASLLTDPKDVSGRTVDYIIAGGGLTGLTTAARLTENPNISVLVIESGSYESDRGPIIEDLNAYGDIFGSSVDHAYETVELATNNQTALIRSGNGLGGSTLVNGGTWTRPHKAQVDSWETVFGNPGWNWDNVAAYSLQAERARAPNAKQIAAGHYFNASCHGVNGTVHAGPRDTGDDYSPIVKALMSAVEDRGVPTKKDFGCGDPHGVSMFPNTLHEDQVRSDAAREWLLPNYQRPNLQVLTGQYVGKVLLSQNGTTPRAVGVEFGTHKGNTHNVYAKHEVLLAAGSAVSPTILEYSGIGMKSILEPLGIDTVVDLPVGLNLQDQTTATVRSRITSAGAGQGQAAWFATFNETFGDYSEKAHELLNTKLEQWAEEAVARGGFHNTTALLIQYENYRDWIVNHNVAYSELFLDTAGVASFDVWDLLPFTRGYVHILDKDPYLHHFAYDPQYFLNELDLLGQAAATQLARNISNSGAMQTYFAGETIPGDNLAYDADLSAWTEYIPYHFRPNYHGVGTCSMMPKEMGGVVDNAARVYGVQGLRVIDGSIPPTQMSSHVMTVFYAMALKISDAILEDYASMQ

SEQ ID NO: 217 - protein, 583 aa, Aspergillus niger
SNGIEASLLTDPKDVSGRTVDYIIAGGGLTGLTTAARLTENPNISVLVIESGSYESDRGPIIEDLNAYGDIFGSSVDHAYETVELATNNQTALIRSGNGLGGSTLVNGGTWTRPHKAQVDSWETVFGNEGWNWDNVAAYSLQAERARAPNAKQIAAGHYFNASCHGVNGTVHAGPRDTGDDYSPIVKALMSAVEDRGVPTKKDFGCGDPHGVSMFPNTLHEDQVRSDAAREWLLPNYQRPNLVVLTGQYVGKVLLSQNGTTPRAVGVEFGTHKGNTHNVYAKHEVLLAAGSAVSPTILEYSGIGMKSILEPLGIDTVVDLPVGLNLQDQTTATVRSRITSAGAGQGQAAWFATFNETFGDYSEKAHELLNTKLEQWAEEAVARGGFHNTTALLIQYENYRDWIVNHNVAYSELFLDTAGVASFDVWDLLPFTRGYVHILDKDPYLHHFAYDPQYFLNELDLLGQAAATQLARNISNSGAMQTYFAGETIPGDNLAYDADLSAWTEYIPYHFRPNYHGVGTCSMMPKEMGGVVDNAARVYGVQGLRVIDGSIPPTQMSSHVMTVFYAMALKISDAILEDYASMQ

SEQ ID NO: 218 - protein, 583 aa, Aspergillus niger
SNGIEASLLTDPKDVSGRTVDYIIAGGGLTGLTTAARLTENPNISVLVIESGSYESDRGPIIEDLNAYGDIFGSSVDHAYETVELATNNQTALIRSGNGLGGSTLVNGGTWTRPHKAQVDSWETVFGNEGWNWDNVAAYSLQAERARAPNAKQIAAGHYFNASCHGVNGTVHAGPRDTGDDYSPIVKALMSAVEDRGVPTKKDFGCGDPHGVSMFPNTLHEDQVRSDAAREWLLPNYQRPNLQVLTGQYVGKVLLSQNGTTPRAVGVEFGTHKGNTHNVYAKHEVLLAAGSAVSPTILEYSGIGMKSILEPLGIDTVVDLPVGLNLQDQTTATVRSRITSAGAGQGQAAWFATFNETFGDYSEKAHELLNTKLEQWAEEAVARGGFHNTTALLIQYENYRDWIVNHNVAYSELFLDTAGVASFDVWDLLPFTRGYVHILDKDPYLHHFAYDPQYFLNELDLLGQAAATQLARNISNSGAMQTYFAGETIPGDNLAYDADLSAWTEYIPYHFRPNYHGVGTCSMMPKEMGGVVDNALRVYGVQGLRVIDGSIPPTQMSSHVMTVFYAMALKISDAILEDYASMQ

SEQ ID NO: 219 - protein, 583 aa, Aspergillus niger
SNGIEASLLTDPKDVSGRTVDYIIAGGGLTGLTTAARLTENPNISVLVIESGSYESDRGPIIEDLNAYGDIFGSSVDHAYETVELATNNQTALIRSGNGLGGSTLVNGGTWTRPHKAQVDSWETVFGNEGWNWDNVAAYSLQAERARAPNAKQIAAGHYFNASCHGVNGTVHAGPRDTGDDYSPIVKALMSAVEDRGVPTKKDFGCGDPHGVSMFPNTLHEDQVRSDAAREWLLPNYQRPNLQVLTGQYVGKVLLSQNGTTPRAVGVEFGTHKGNTHNVYAKHEVLLAAGSAVSPTILEYSGIGMKSILEPLGIDTVVDLPVGLNLQDQTTATVRSRITSAGAGQGQAAWFATFNETFGDYSEKAHELLNTKLEQWAEEAVARGGFHNTTALLIQYENYRDWIVNHNVAYSELFLDTAGVASFDVWDLLPFTRGYVHILDKDPYLHHFMYDPQYFLNELDLLGQAAATQLARNISNSGAMQTYFAGETIPGDNLAYDADLSAWTEYIPYHFRPNYHGVGTCSMMPKEMGGVVDNAARVYGVQGLRVIDGSIPPTQMSSHVMTVFYAMALKISDAILEDYASMQ

SEQ ID NO: 220 - protein, 583 aa, Aspergillus niger
SNGIEASLLTDPKDVSGRTVDYIIAGGGLTGLTTAARLTENPNISVLVIESGSYESDRGPIIEDLNAYGDIFGSSVDHAYETVELATNNQTALIRSGNGLGGSTLVNGGTWTRPHKAQVDSWETVFGNEGWNWDNVAAYSLQAERARAPNAKQIAAGHYFNASCHGVNGTVHAGPRDTGDDYSPIVKALMSAVEDRGVPTKKDFGCGDPHGVSMFPNTLHEDQVRSDAAREWLLPNYQRPNLQVLTGQYVGKVLLSQNGTTPRAVGVEFGTHKGNTHNVYAKHEVLLAAGSAVSPTILEYSGIGMKSILEPLGIDTVVDLPVGLNLQDQTTATVRSRITSAGAGQGQAAWFATFNETFGDYSEKAHELLNTKLEQWAEEAVARGGFHNTTALLIQYENYRDWIVNHNVAYSELFLDTAGVASFDVWDLLPFTRGYVHILDKDPYLHHFAYDPQYFLNELDLLGQAAATQLARNISNSGAMQTYFAGETIPGDNLAYDADLSAWTEYIPYHFRPNYHGVGTCSMMPKEMGGVVDNAARVYGVQGLRVIDGSIPPTQMSSHLMTVFYAMALKISDAILEDYASMQ

SEQ ID NO: 221 - protein, 583 aa, Aspergillus niger
SNGIEASLLTDPKDVSGRTVDYIIAGGGLTGLTTAAKLTENPNISVLVIESGSYESDRGPIIEDLNAYGDIFGSSVDHAYETVELATNNQTALIRSGNGLGGSTLVNGGTWTRPHKAQVDSWETVFGNEGWNWDNVAAYSLQAERARAPNAKQIAAGHYFNASCHGVNGTVHAGPRDTGDDYSPIVKALMSAVEDRGVPTKKDFGCGDPHGVSMFPNTLHEDQVRSDAAREWLLPNYQRPNLQVLTGQYVGKVLLSQNGTTPRAVGVEFGTHKGNTHNVYAKHEVLLAAGSAVSPTILEYSGIGMKSILEPLGIDTVVDLPVGLNLQDQTTATVRSRITSAGAGQGQAAWFATFNETFGDYSEKAHELLNTKLEQWAEEAVARGGFHNTTALLIQYENYRDWIVNHNVAYSELFLDTAGVASFDVWDLLPFTRGYVHILDKDPYLHHFAYDPQYFLNELDLLGQAAATQLARNISNSGAMQTYFAGETIPGDNLAYDADLSAWTEYIPYHFRPNYHGVGTCSMMPKEMGGVVDNAARVYGVQGLRVIDGSIPPTQMSSHVMTVFYAMALKISDAILEDYASMQ

SEQ ID NO: 222 - protein, 583 aa, Aspergillus niger
SNGIEASLLTDPKDVSGRYVDYIIAGGGLTGLTTAARLTENPNISVLVIESGSYESDRGPIIEDLNAYGDIFGSSVDHAYETVELATNNQTALIRSGNGLGGSTLVNGGTWTRPHKAQVDSWETVFGNEGWNWDNVAAYSLQAERARAPNAKQIAAGHYFNASCHGVNGTVHAGPRDTGDDYSPIVKALMSAVEDRGVPTKKDFGCGDPHGVSMFPNTLHEDQVRSDAAREWLLPNYQRPNLQVLTGQYVGKVLLSQNGTTPRAVGVEFGTHKGNTHNVYAKHEVLLAAGSAVSPTILEYSGIGMKSILEPLGIDTVVDLPVGLNLQDQTTATVRSRITSAGAGQGQAAWFATFNETFGDYSEKAHELLNTKLEQWAEEAVARGGFHNTTALLIQYENYRDWIVNHNVAYSELFLDTAGVASFDVWDLLPFTRGYVHILDKDPYLHHFAYDPQYFLNELDLLGQAAATQLARNISNSGAMQTYFAGETIPGDNLAYDADLSAWTEYIPYHFRPNYHGVGTCSMMPKEMGGVVDNAARVYGVQGLRVIDGSIPPTQMSSHVMTVFYAMALKISDAILEDYASMQ

SEQ ID NO: 223 - protein, 583 aa, Aspergillus niger
SNGIEASLLTDPKDVSGRTVDYIIAGGGLTGLTTAARLTENPNISVLVIESGSYESDRGPIIEDLNAYGDIFGSSVDHAYETVELATNNQTALIRSGNGLGGSTLVNGGTWTRPHKAQVDSWETVFGNEGWNWDNVAAYSLQAERARAPNAKQIAAGHYFNASCHGVNGTVHAGPRDTGDDYSPIVKALMSAVEDRGVPTKKDFGCGDPHGVSMFPNTLHEDQVRSDAAREWLLPNYQRPNLQVLTGQYVGKVLLSQNGTTPRAVGVEFGTHKGNTHNVYAKHEVLLAAGSAVSPTILEYSGIGMKSILEPLGIDTVVDLPVGLNLQDQTTATVRSRITSAGAGQGQAAWFATFNETFGDYSEKAHELLNTKLEQWAEEAVARGGFHNTTALLIQYENYRDWIVNHNVAYSELFLDTAGVASFDVWDLLPFTRGYVHILDKDPYLHHFAYDPQYFLNELDLLGQAAATQLARNISNSGAMQTYFAGETIPGDNLAYDADLSAWTEYIPYHFRPNYHGVGTCSMMPKEMGGVVDNAARVYGVQGLRVIDGSIPPTQVSSHVMTVFYAMALKISDAILEDYASMQ

SEQ ID NO: 224 - protein, 583 aa, Aspergillus niger
SNGIEASLLTDPKDVSGRTVDYIIAGGGLTGLTTAARLTENPNISVLVIESGSYESDRGPIIEDLNAYGDIFGSSVDHAYETVELATNNQTALIRSGNGLGGSTLVNGGTWTRPHKAQVDSWETVFGNEGWNWDNVAAYSLQAERARAPNAKQIAAGHYFNASCHGVNGTVHAGPRDTGDDYSPIVKALMSAVEDRGVPTKKDFGCGDPHGVSMFPNTLHEDQVRSDAAREWLLPNYQRPNLQVLTGQYVGKVLLSQNGTTPRAVGVEFGTHKGNTHNVYAKHEVLLAAGSAVSPTILEYSGIGMKSILEPLGIDTVVDLPVGLNLQDQTTATVRSRITSAGAGQGQAAWFATFNETFGDYSEKAHELLNTKLEQWAEEAVARGGFHNTTALLIQYENYRDWIVNHNVAYSELFLDTAGVASFDVWDLLPFTRGYVHILDKDPYLHHFAYDPQYFLNELDLLGQAAATQLARNISNSGAMQTYFAGETIPGDNLAYDADLSAWTEYIPYHFRPNYHGVGTASMMPKEMGGVVDNAARVYGVQGLRVIDGSIPPTQMSSHVMTVFYAMALKISDAILEDYASMQ

SEQ ID NO: 225 - protein, 583 aa, Aspergillus niger
SNGIEASLLTDPKDVSGRTVDYIIAGGGLTGLTTAARLTENPNISVLVIESGSYESDRGPIIEDLNAYGDIFGSSVDHAYETVELATNNQTALIRSGNGLGGSTLVNGGTWTRPHKAQVDSWETVFGNEGWNWDNVAAYSLQAERARAPNAKQIAAGHYFNASCHGVNGTVHAGPRDTGDDYSPIVKALMSAVEDRGVPTKKDFGCGDPHGVSMFPNTLHEDQVRSDAAREWLLPNYQRPNLQVLTGQYVGKVLLSQNGTTPRAVGVEFGTHKGNTHNVYAKHEVLLAAGSAVSPTILEYSGIGMKSILEPLGIDTVVDLPVGLNLQDQTTATVRSRITSAGAGQGQAAWFATFNETFGDYSEKAHELLNTKLEQWAEEAVARGGFHNTTALLIQYENYRDWIVNHNVAYSELFLDTAGVASFDVWDLLPFTRGYVHILDKDPYLHHFAYDPQYFLNELDLLGQAAATQLARNISNSGAMQTYFAGETIPGDNLAYDADLSAWTEYIPYHFRPNYHGVGTCSMMPKELGGVVDNAARVYGVQGLRVIDGSIPPTQMSSHVMTVFYAMALKISDAILEDYASMQ

SEQ ID NO: 226 - protein, 583 aa, Aspergillus niger
SNGIEASLLTDPKDVSGRTVDYIIAGGGLTGLTTAARLTENPNISVLVIESGSYESDRGPIIEDLNAYGDIFGSSVDHAYETVELATNNQTALIRSGNGLGGSTLVNGGTWTRPHKAQVDSWETVFGNEGWNWDNVAAYSKQAERARAPNAKQIAAGHYFNASCHGVNGTVHAGPRDTGDDYSPIVKALMSAVEDRGVPTKKDFGCGDPHGVSMFPNTLHEDQVRSDAAREWLLPNYQRPNLQVLTGQYVGKVLLSQNGTTPRAVGVEFGTHKGNTHNVYAKHEVLLAAGSAVSPTILEYSGIGMKSILEPLGIDTVVDLPVGLNLQDQTTATVRSRITSAGAGQGQAAWFATFNETFGDYSEKAHELLNTKLEQWAEEAVARGGFHNTTALLIQYENYRDWIVNHNVAYSELFLDTAGVASFDVWDLLPFTRGYVHILDKDPYLHHFAYDPQYFLNELDLLGQAAATQLARNISNSGAMQTYFAGETIPGDNLAYDADLSAWTEYIPYHFRPNYHGVGTCSMMPKEMGGVVDNAARVYGVQGLRVIDGSIPPTQMSSHVMTVFYAMALKISDAILEDYASMQ

SEQ ID NO: 227 - protein, 583 aa, Aspergillus niger
SNGIEASLLTDPKDVSGRTVDYIIAGGGLTGLTTAARLTENPNISVLVIESGSYESDRGPIIEDLNAYGXIFGSSVDHAYETVELATNNQTALIRSGNGLGGSTLVNGGTWTRPHKAQVDSWETVFGNEGWNWDNVAAYSLQAERARAPNAKQIAAGHYFNASCHGVNGTVHAGPRDTGDDYSPIVKALMSAVEDRGVPTKKDFGCGDPHGVSMFPNTLHEDQVRSDAAREWLLPNYQRPNLQVLTGQYVGKVLLSQNGTTPRAVGVEFGTHKGNTHNVYAKHEVLLAAGSAVSPTILEYSGIGMKSILEPLGIDTVVDLPVGLNLQDQTTATVRSRITSAGAGQGQAAWFATFNETFGDYSEKAHELLNTKLEQWAEEAVARGGFHNTTALLIQYENYRDWIVNHNVAYSELFLDTAGVASFDVWDLLPFTRGYVHILDKDPYLHHFAYDPQYFLNELDLLGQAAATQLARNISNSGAMQTYFAGETIPGDNLAYDADLSAWTEYIPYHFRPNYHGVGTCSMMPKEMGGVVDNAARVYGVQGLRVIDGSIPPTQMSSHVMTVFYAMALKISDAILEDYASMQ

SEQ ID NO: 228 - protein, 583 aa, Aspergillus niger
SNGIEASLLTDPKDVSGRTVDYIIAGGGLTGLTTAARLTENPNISVLVIESGSYESDRGPIIEDLNAYGDIFGSSVDHAYETVELATNNQTALIRSGNGLGGSTLINGGTWTRPHKAQVDSWETVFGNEGWNWDNVAAYSLQAERARAPNAKQIAAGHYFNASCHGVNGTVHAGPRDTGDDYSPIVKALMSAVEDRGVPTKKDFGCGDPHGVSMFPNTLHEDQVRSDAAREWLLPNYQRPNLQVLTGQYVGKVLLSQNGTTPRAVGVEFGTHKGNTHNVYAKHEVLLAAGSAVSPTILEYSGIGMKSILEPLGIDTVVDLPVGLNLQDQTTATVRSRITSAGAGQGQAAWFATFNETFGDYSEKAHELLNTKLEQWAEEAVARGGFHNTTALLIQYENYRDWIVNHNVAYSELFLDTAGVASFDVWDLLPFTRGYVHILDKDPYLHHFAYDPQYFLNELDLLGQAAATQLARNISNSGAMQTYFAGETIPGDNLAYDADLSAWTEYIPYHFRPNYHGVGTCSMMPKEMGGVVDNAARVYGVQGLRVIDGSIPPTQMSSHVMTVFYAMALKISDAILEDYASMQ

SEQ ID NO: 229 - protein, 583 aa, Aspergillus niger
SNGIEASLLTDPKDVSGRTVDYIIAGGGLTGLTTAARLTENPNISVLVIESGSYESDRGPIIEDLNAYGDIFGSSVDHAYETVELATNNQTALIRSGNGLGGSTLVNGGTWTRPHKAQVDSWETVFGNEGWNWDNVAAYSLQAERARAPNAKQIAAGHYFNASCHGVNGTVHAGPRDTGDDYSPIVKALMSAVEDRGVPTKKDFGCGDPHGVSMFPNTLHEDQVRSDAAREWLLPNYQRPNLQVLTGQYVGKVLLSQNGTTPRAVGVEFGTHKGNTHNVYAKHEVLLAAGSAISPTILEYSGIGMKSILEPLGIDTVVDLPVGLNLQDQTTATVRSRITSAGAGQGQAAWFATFNETFGDYSEKAHELLNTKLEQWAEEAVARGGFHNTTALLIQYENYRDWIVNHNVAYSELFLDTAGVASFDVWDLLPFTRGYVHILDKDPYLHHFAYDPQYFLNELDLLGQAAATQLARNISNSGAMQTYFAGETIPGDNLAYDADLSAWTEYIPYHFRPNYHGVGTCSMMPKEMGGVVDNAARVYGVQGLRVIDGSIPPTQMSSHVMTVFYAMALKISDAILEDYASMQ

SEQ ID NO: 230 - protein, 583 aa, Aspergillus niger
SNGIEASLLTDPKDVSGRTVDYIIAGGGLTGLTTAARLTENPNISVLVIESGSYESDRGPIIEDLNAYGDIFGSSVDHAYETVELATNNQTALIRSGNGLGGSTLVNGGTWTRPHKAQVDSWETVFGNEGWNWDNVAAYSLQAERARAPNAKQIAAGHYFNASCHGVNGTVHAGPRDTGDDYSPIVKALMSAVEDRGVPTKKDFGCGDPHGVSMFPNTLHEDQVRSDAAREWLLPNYQRPNLQVLTGQYVGKVLLSQNGTTPRAVGVEFGTHKGNTHNVYAKHEVLLAAGSAVSPTILEYSGIGMKSILEPLGIDTVVDLPVGLNLQDQTTATVRSRITSAGAGQGQAAWFATFNETFGDYSEKAHELLNTKLEQWAEEAVARGGFHNTTALLIQYENYRDWIVNHNVAYSELFLDTAGVASFDVWDLLPFTRGYVHILDKDPYLHHFAYDPQYFLNELDLLGQAAATQLARNISNSGAMQTYFAGETIPGDNLAYDADLSAWTEYIPYHFRPNYHGVGTCSMMPKEMGGVVDNAAKVYGVQGLRVIDGSIPPTQMSSHVMTVFYAMALKISDAILEDYASMQ

SEQ ID NO: 231 - protein, 583 aa, Aspergillus niger
SNGIEASLLTDPKDVSGRTVDYIIAGGGLTGLTTAARLTENPNISVLVIESGSYESDRGPIIEDLNAYGDIFGSSVDHAYETVELATNNQTALVRSGNGLGGSTLVNGGTWTRPHKAQVDSWETVFGNEGWNWDNVAAYSLQAERARAPNAKQIAAGHYFNASCHGVNGTVHAGPRDTGDDYSPIVKALMSAVEDRGVPTKKDFGCGDPHGVSMFPNTLHEDQVRSDAAREWLLPNYQRPNLQVLTGQYVGKVLLSQNGTTPRAVGVEFGTHKGNTHNVYAKHEVLLAAGSAVSPTILEYSGIGMKSILEPLGIDTVVDLPVGLNLQDQTTATVRSRITSAGAGQGQAAWFATFNETFGDYSEKAHELLNTKLEQWAEEAVARGGFHNTTALLIQYENYRDWIVNHNVAYSELFLDTAGVASFDVWDLLPFTRGYVHILDKDPYLHHFAYDPQYFLNELDLLGQAAATQLARNISNSGAMQTYFAGETIPGDNLAYDADLSAWTEYIPYHFRPNYHGVGTCSMMPKEMGGVVDNAARVYGVQGLRVIDGSIPPTQMSSHVMTVFYAMALKISDAILEDYASMQ

SEQ ID NO: 232 - protein, 583 aa, Aspergillus niger
SNGIEASLLTDPKDVSGRTVDYIIAGGGLTGLTTAARLTENPNISVLVIESGSYESDRGPIIEDLNAYGDIFGSSVDHAYETVELATNNQTALIRSGNGLGGSTLVNGGTWTRPHKAQVDSWETVFGNEGWNWDNVAAYSLQAERARAPNAKQIAAGHYFNASCHGVNGTVHAGPRDTGDDYSPIVKALMSAVEDRGVPTKKDFGCGDPHGVSMFPNTLHEDQVRSDAAREWLLPNYQRPNLQVLTGQYVGKVLLSQNGTTPRAVGVEFGTHKGNTHNVYAKHEVLLAAGSAVSPTILEYSGIGMKSILEPLGIDTVVDLPVGLNLQDQTTATVRSRITSAGAGQGQAAWFATFNETFGDYSEKAHELLNTKLEQWAEEAVARGGFHNTTALLIQYENYRDWIVNHNVAYSELFLDTAGVASFDVWDLLPFTRGYVHILDKDPYLHHFAYDPQYFLNELDLLGQAAATQLARNISNYGAMQTYFAGETIPGDNLAYDADLSAWTEYIPYHFRPNYHGVGTCSMMPKEMGGVVDNAARVYGVQGLRVIDGSIPPTQMSSHVMTVFYAMALKISDAILEDYASMQ

SEQ ID NO: 233 - protein, 583 aa, Aspergillus niger
SNGIEASLLTDPKDVSGRTVDYIIAGGGLTGLTTAARLTENPNISVLVIESGSYESDRGPIIEDLNAYGDIFGSSVDHAYETVELATNNQTALIRSGNGLGGSTLVNGGTWTRPHKAQVDSWETVFGNEGWNWDNVAAYSLQAERARAPNAKQIAAGHYFNASCHGVNGTVHAGPRDTGDDYSPIVKALMSAVEDRGVPTKKDFGCGDPHGVSMFPNTLHEDQVRSDAAREWLLPNYQRPNLQVLTGQYVGKVLLSQNGTTPRAVGVEFGTHKGNTHNVYAKHEVLLAAGSAVSPTILEYSGIGMKSILEPLGIDTVVDLPVGLNLQDQTTATVKSRITSAGAGQGQAAWFATFNETFGDYSEKAHELLNTKLEQWAEEAVARGGFHNTTALLIQYENYRDWIVNHNVAYSELFLDTAGVASFDVWDLLPFTRGYVHILDKDPYLHHFAYDPQYFLNELDLLGQAAATQLARNISNSGAMQTYFAGETIPGDNLAYDADLSAWTEYIPYHFRPNYHGVGTCSMMPKEMGGVVDNAARVYGVQGLRVIDGSIPPTQMSSHVMTVFYAMALKISDAILEDYASMQ

SEQ ID NO: 234 - protein, 583 aa, Aspergillus niger
SNGIEASLLTDPKDVSGRTVDYIIAGGGLTGLTTAARLTENPNISVLVIESGSYESDRGPIIEDLNAYGDIFGSSVDHAYETVELATNNQTQLIRSGNGLGGSTLVNGGTWTRPHKAQVDSWETVFGNEGWNWDNVAAYSLQAERARAPNAKQIAAGHYFNASCHGVNGTVHAGPRDTGDDYSPIVKALMSAVEDRGVPTKKDFGCGDPHGVSMFPNTLHEDQVRSDAAREWLLPNYQRPNLQVLTGQYVGKVLLSQNGTTPRAVGVEFGTHKGNTHNVYAKHEVLLAAGSAVSPTILEYSGIGMKSILEPLGIDTVVDLPVGLNLQDQTTATVRSRITSAGAGQGQAAWFATFNETFGDYSEKAHELLNTKLEQWAEEAVARGGFHNTTALLIQYENYRDWIVNHNVAYSELFLDTAGVASFDVWDLLPFTRGYVHILDKDPYLHHFAYDPQYFLNELDLLGQAAATQLARNISNSGAMQTYFAGETIPGDNLAYDADLSAWTEYIPYHFRPNYHGVGTCSMMPKEMGGVVDNAARVYGVQGLRVIDGSIPPTQMSSHVMTVFYAMALKISDAILEDYASMQ

SEQ ID NO: 235 - protein, 583 aa, Aspergillus niger
SNGIEASLLTDPKDVSGRTVDYIIAGGGLTGLTTAARLTENPNISVLVIESGSYESDRGPIIEDLNAYGDIFGSSVDHAYETVELATNNQTALIRSGNGLGGSTLVNGGTWTRPHKAQVDSWETVFGNEGWNWDNVAAYSLQAERARAPNAKQIAAGHYFNTSCHGVNGTVHAGPRDTGDDYSPIVKALMSAVEDRGVPTKKDFGCGDPHGVSMFPNTLHEDQVRSDAAREWLLPNYQRPNLQVLTGQYVGKVLLSQNGTTPRAVGVEFGTHKGNTHNVYAKHEVLLAAGSAVSPTILEYSGIGMKSILEPLGIDTVVDLPVGLNLQDQTTATVRSRITSAGAGQGQAAWFATFNETFGDYSEKAHELLNTKLEQWAEEAVARGGFHNTTALLIQYENYRDWIVNHNVAYSELFLDTAGVASFDVWDLLPFTRGYVHILDKDPYLHHFAYDPQYFLNELDLLGQAAATQLARNISNSGAMQTYFAGETIPGDNLAYDADLSAWTEYIPYHFRPNYHGVGTCSMMPKEMGGVVDNAARVYGVQGLRVIDGSIPPTQMSSHVMTVFYAMALKISDAILEDYASMQ

SEQ ID NO: 236 - protein, 583 aa, Aspergillus niger
SNGIEASLLTDPKDVSGRTVDYIIAGGGLTGLTTAARLTENPNISVLVIESGSYESDRGPIIEDLNAYGDIFGSSVDHAYETVELATNNQTALIRSGNGLGGSTLVNGGTWTRPHKAQVDAWETVFGNEGWNWDNVAAYSLQAERARAPNAKQIAAGHYFNASCHGVNGTVHAGPRDTGDDYSPIVKALMSAVEDRGVPTKKDFGCGDPHGVSMFPNTLHEDQVRSDAAREWLLPNYQRPNLQVLTGQYVGKVLLSQNGTTPRAVGVEFGTHKGNTHNVYAKHEVLLAAGSAVSPTILEYSGIGMKSILEPLGIDTVVDLPVGLNLQDQTTATVRSRITSAGAGQGQAAWFATFNETFGDYSEKAHELLNTKLEQWAEEAVARGGFHNTTALLIQYENYRDWIVNHNVAYSELFLDTAGVASFDVWDLLPFTRGYVHILDKDPYLHHFAYDPQYFLNELDLLGQAAATQLARNISNSGAMQTYFAGETIPGDNLAYDADLSAWTEYIPYHFRPNYHGVGTCSMMPKEMGGVVDNAARVYGVQGLRVIDGSIPPTQMSSHVMTVFYAMALKISDAILEDYASMQ

SEQ ID NO: 237 - protein, 583 aa, Aspergillus niger
SNGIEASLLTDPXDVSGRTVDYIIAGGGLTGLTTAARLTENPNISVLVIESGSYESDRGPIIEDLNAYGDIFGSSVDHAYETVELATNNQTALIRSGNGLGGSTLVNGGTWTRPHKAQVDSWETVFGNEGWNWDNVAAYSLQAERARAPNAKQIAAGHYFNASCHGVNGTVHAGPRDTGDDYSPIVKALMSAVEDRGVPTKKDFGCGDPHGVSMFPNTLHEDQVRSDAAREWLLPNYQRPNLQVLTGQYVGKVLLSQNGTTPRAVGVEFGTHKGNTHNVYAKHEVLLAAGSAVSPTILEYSGIGMKSILEPLGIDTVVDLPVGLNLQDQTTATVRSRITSAGAGQGQAAWFATFNETFGDYSEKAHELLNTKLEQWAEEAVARGGFHNTTALLIQYENYRDWIVNHNVAYSELFLDTAGVASFDVWDLLPFTRGYVHILDKDPYLHHFAYDPQYFLNELDLLGQAAATQLARNISNSGAMQTYFAGETIPGDNLAYDADLSAWTEYIPYHFRPNYHGVGTCSMMPKEMGGVVDNAARVYGVQGLRVIDGSIPPTQMSSHVMTVFYAMALKISDAILEDYASMQ

SEQ ID NO: 238 - protein, 583 aa, Aspergillus niger
SNGIEASLLTDPKDVSGRTVDYIIAGGGLTGLTTAARLTENPNISVLVIESGSYESDRGPIIEDLNYYGDIFGSSVDHAYETVELATNNQTALIRSGNGLGGSTLVNGGTWTRPHKAQVDSWETVFGNEGWNWDNVAAYSLQAERARAPNAKQIAAGHYFNASCHGVNGTVHAGPRDTGDDYSPIVKALMSAVEDRGVPTKKDFGCGDPHGVSMFPNTLHEDQVRSDAAREWLLPNYQRPNLQVLTGQYVGKVLLSQNGTTPRAVGVEFGTHKGNTHNVYAKHEVLLAAGSAVSPTILEYSGIGMKSILEPLGIDTVVDLPVGLNLQDQTTATVRSRITSAGAGQGQAAWFATFNETFGDYSEKAHELLNTKLEQWAEEAVARGGFHNTTALLIQYENYRDWIVNHNVAYSELFLDTAGVASFDVWDLLPFTRGYVHILDKDPYLHHFAYDPQYFLNELDLLGQAAATQLARNISNSGAMQTYFAGETIPGDNLAYDADLSAWTEYIPYHFRPNYHGVGTCSMMPKEMGGVVDNAARVYGVQGLRVIDGSIPPTQMSSHVMTVFYAMALKISDAILEDYASMQ

SEQ ID NO: 239 - protein, 583 aa, Aspergillus niger
SNGIEASLLTDPKDVSGRTVDYIIAGGGLTGLTTAARLTENPNISVLVIESGSYESDRGPIIEDLNAYGDIFGSSVDHAYETVELATNNQTALIRSGNGLGGSTLVNGGTWTRPHKAQVDSWETVFGNEGWNWDNVAAYSLQAERARAPNAKQIAAGHYFNASCHGVNGTVHAGPRDTGDDYSPIVKALMSAVEDRGVPTKKDFGCGDPHGVSMFPNTLHEDQVRSDAAREWLLPNYQRPNLQVLTGQYVGKVLLSQNGTTPRAVGVEFGTHKGNTHYVYAKHEVLLAAGSAVSPTILEYSGIGMKSILEPLGIDTVVDLPVGLNLQDQTTATVRSRITSAGAGQGQAAWFATFNETFGDYSEKAHELLNTKLEQWAEEAVARGGFHNTTALLIQYENYRDWIVNHNVAYSELFLDTAGVASFDVWDLLPFTRGYVHILDKDPYLHHFAYDPQYFLNELDLLGQAAATQLARNISNSGAMQTYFAGETIPGDNLAYDADLSAWTEYIPYHFRPNYHGVGTCSMMPKEMGGVVDNAARVYGVQGLRVIDGSIPPTQMSSHVMTVFYAMALKISDAILEDYASMQ

SEQ ID NO: 240 - protein, 583 aa, Aspergillus niger
SNGIEASLLTDPKDVSGRTVDYIIAGGGLTGLTTAARLTENPNISVLVIESGSYESDRGPIIEDLNAYGDIFGSSVDHAYETVELATNNQTALIRSGNGLGGSTLVNGGTWTRPHKAQVDSWETVFGNEGWNWDNVSAYSLQAERARAPNAKQIAAGHYFNASCHGVNGTVHAGPRDTGDDYSPIVKALMSAVEDRGVPTKKDFGCGDPHGVSMFPNTLHEDQVRSDAAREWLLPNYQRPNLQVLTGQYVGKVLLSQNGTTPRAVGVEFGTHKGNTHNVYAKHEVLLAAGSAVSPTILEYSGIGMKSILEPLGIDTVVDLPVGLNLQDQTTATVRSRITSAGAGQGQAAWFATFNETFGDYSEKAHELLNTKLEQWAEEAVARGGFHNTTALLIQYENYRDWIVNHNVAYSELFLDTAGVASFDVWDLLPFTRGYVHILDKDPYLHHFAYDPQYFLNELDLLGQAAATQLARNISNSGAMQTYFAGETIPGDNLAYDADLSAWTEYIPYHFRPNYHGVGTCSMMPKEMGGVVDNAARVYGVQGLRVIDGSIPPTQMSSHVMTVFYAMALKISDAILEDYASMQ

SEQ ID NO: 241 - protein, 583 aa, Aspergillus niger
SNGIEASLLTDPKDVSGRTVDYIIAGGGLVGLTTAARLTENPNISVLVIESGSYESDRGPIIEDLNAYGDIFGSSVDHAYETVELATNNQTALIRSGNGLGGSTLVNGGTWTRPHKAQVDSWETVFGNEGWNWDNVAAYSLQAERARAPNAKQIAAGHYFNASCHGVNGTVHAGPRDTGDDYSPIVKALMSAVEDRGVPTKKDFGCGDPHGVSMFPNTLHEDQVRSDAAREWLLPNYQRPNLQVLTGQYVGKVLLSQNGTTPRAVGVEFGTHKGNTHNVYAKHEVLLAAGSAVSPTILEYSGIGMKSILEPLGIDTVVDLPVGLNLQDQTTATVRSRITSAGAGQGQAAWFATFNETFGDYSEKAHELLNTKLEQWAEEAVARGGFHNTTALLIQYENYRDWIVNHNVAYSELFLDTAGVASFDVWDLLPFTRGYVHILDKDPYLHHFAYDPQYFLNELDLLGQAAATQLARNISNSGAMQTYFAGETIPGDNLAYDADLSAWTEYIPYHFRPNYHGVGTCSMMPKEMGGVVDNAARVYGVQGLRVIDGSIPPTQMSSHVMTVFYAMALKISDAILEDYASMQ

SEQ ID NO: 242 - protein, 583 aa, Aspergillus niger
SNGIEASLLTDPNDVSGRTVDYIIAGGGLTGLTTAARLTENPNISVLVIESGSYESDRGPIIEDLNAYGDIFGSSVDHAYETVELATNNQTALIRSGNGLGGSTLVNGGTWTRPHKAQVDSWETVFGNEGWNWDNVAAYSLQAERARAPNAKQIAAGHYFNASCHGTNGTVHAGPRDTGDDYSPIVKALMSAVEDRGVPTQKDFGCGDPHGVSMFPNTLHEDQVRSDAAREWLLPNYQRPNLQVLTGQYVGKVLLSQNGTTPRAVGVEFGTHKGNTHNVYAKHEVLLAAGSAVSPTILEYSGIGMKSILEPLGIDTVVDLPVGLNLQDQTTATVRSRITSAGAGQGQAAWFATFNETFGDYSEKAHELLNTKLEQWAEEAVARGGFHNTTALLIQYENYRDWIVNHNVAYSELFLDTAGVASFDVWDLLPFTRGYVHILDKDPYLHHFAYDPQYFLNELDLLGQAAATQLARNISNSGAMQTYFAGETIPGDNLAYDADLSAWTEYIPYHFRPNYHGVGTCSMMPKEMGGVVDNAARVYGVQGLRVIDGSIPPTQMSSHVMTVFYAMALKISDAILEDYASMQ

SEQ ID NO: 243 - protein, 583 aa, Aspergillus niger
SNGIEASLLTDPKDVSGRTVDYIIAGGGLTGLTTAARLTENPNISVLVIESGSYESDRGPIIEDLNAYGDIFGSSVDHAYETVELATNNQTALIRSGNGLGGSTLVNGGTWTRPHKAQVDSWETVFGNEGWNWDNVAAYSLQAERARAPNAKQIAAGHYFNASCHGVNGTVHAGPRDTGDDYSPIVKALMSAVEDRGVPTKKDFGCGDPHGVSMFPNTLHEDQVRSDAAREWLLPNYQRPNLQVLTGQYVGKVLLSQNGTTPRAVGVEFGTHKGNTHNVYAKHEVLLAAGSAVSPTILEYSGIGMKSILEPLGIDTVVDLPVGLNLQDQTTATVRSRITSAGAGQGQAAWFATFNETFGDYSEKAHELLNTKLEQWAEEAVARGGFHNTTALLIQYENYRDWIVNHNVAYSELFLDTAGVASFDVWDLLPFTRGYVHILDKDPYLXHFAYDPQYFLNELDLLGQAAATQLARNISNSGAMQTYFAGETIPGDNLAYDADLSAWTEYIPYHFRPNYHGVGTCSMMPKEMGGVVDNAARVYGVQGLRVIDGSIPPTQMSSHVMTVFYAMALKISDAILEDYASMQ

SEQ ID NO: 244 - protein, 583 aa, Aspergillus niger
SNGIEASLLTDPKDVSGRTVDYIIAGGGLTGLTTAARLTENPNISVLVIESGSYESDRGPIIEDLNAYGDIFGSSVDHAYETVELATNNQTALIRSGNGLGGSTLVNGGTWTRPHKAQVDSWETVFGNEGWNWDNVAAYSLQAERARAPNAKQIAAGHYFNASCHGVNGTVHAGPRDTGDDYSPIVKALMSAVEDRGVPTKKDFGCGDPHGVSMFPNTLHEDQVRSDAAREWLLPNYQRPNLQVLTGQYVGKVLLSQNGTTPRAVGVEFGTHKGNTHNVYAKHEVLLAAGSAVSPTILEYSGIGMKSILEPLGIDTVVDLPVGLNLQDQTTATVRSRITSAGAGQGQAAWFATFNETFGDYFEKAHELLNTKLEQWAEEAVARGGFHNTTALLIQYENYRDWIVNHNVAYSELFLDTAGVASFDVWDLLPFTRGYVHILDKDPYLHHFAYDPQYFLNELDLLGQAAATQLARNISNSGAMQTYFAGETIPGDNLAYDADLSAWTEYIPYHFRPNYHGVGTCSMMPKEMGGVVDNAARVYGVQGLRVIDGSIPPTQMSSHVMTVFYAMALKISDAILEDYASMQ

SEQ ID NO: 245 - protein, 583 aa, Aspergillus niger
SNGIEASLLTDPKDVSGRTVDYIIAGGGLTGLTTAARLTENPNISVLVIESGSYESDRGPIIEDLNAYGDIFGSSVDHAYETVELATNNQTALIRSGNGLGGSTLVNGGTWTRPHKAQVDSWETVFGNEGWNWDNVAAYSLQAERARAPNAKQIAAGHYFNASCHGVNGTVHAGPRDTGDDYSPIVKALMSAVEDRGVPTKKDFGCGDPHGVSMFPNTLHEDQVRSDAAREWLLPNYQRPNLQVLTGQYVGKVLLSQNGTTPRAVGVEFGTHKGNTHNVYAKHEVLLAAGSAVSPTILEYSGIGMKSILEPLGIDTVVDLPVGLNLQDQTTATVRSRITSAGAGQGQAAWFATFNETFGDYSEKAHELLNTKLEQWAEEAVARGGFHNTTALLIQYENYRDWIVNHNVAYSELFLDTAGVASFDVWDLLPFTRGYVHILDKDPYLHHFAYDPNYFLNELDLLGQAAATQLARNISNSGAMQTYFAGETIPGDNLAYDADLSAWTEYIPYHFRPNYHGVGTCSMMPKEMGGVVDNAARVYGVQGLRVIDGSIPPTQMSSHVMTVFYAMALKISDAILEDYASMQ

SEQ ID NO: 246 - protein, 583 aa, Aspergillus niger
SNGIEASLLTDPKDVSGRTVDYIIAGGGLTGLTTAARLTENPNISVLVIESGSYESDRGPIIEDLNAYGDIFGSSVDHAYETVELATNNQTALIRFGNGLGGSTLVNGGTWTRPHKAQVDSWETVFGNEGWNWDNVAAYSLQAERARAPNAKQIAAGHYFNASCHGVNGTVHAGPRDTGDDYSPIVKALMSAVEDRGVPTKKDFGCGDPHGVSMFPNTLHEDQVRSDAAREWLLPNYQRPNLQVLTGQYVGKVLLSQNGTTPRAVGVEFGTHKGNTHNVYAKHEVLLAAGSAVSPTILEYSGIGMKSILEPLGIDTVVDLPVGLNLQDQTTATVRSRITSAGAGQGQAAWFATFNETFGDYSEKAHELLNTKLEQWAEEAVARGGFHNTTALLIQYENYRDWIVNHNVAYSELFLDTAGVASFDVWDLLPFTRGYVHILDKDPYLHHFAYDPQYFLNELDLLGQAAATQLARNISNSGAMQTYFAGETIPGDNLAYDADLSAWTEYIPYHFRPNYHGVGTCSMMPKEMGGVVDNAARVYGVQGLRVIDGSIPPTQMSSHVMTVFYAMALKISDAILEDYASMQ

SEQ ID NO: 247 - protein, 583 aa, Aspergillus niger
SNGIEASLLTDPKDVSGRTVDYIIAGGGLTGLTTAARLTENPNISVLVIESGSYESDRGPIIEDLNAYGDIFGSSVDHAYETVELATNNQTALIRSGNGLGGSTLVNGGTWTRPHKAQVDSWETVFGNEGWNWDNVAAYSLQAERARAPNAKQIAAGHYFNASCHGVNGTVHAGPRDTGDDYSPIVKALMSAVEDRGVPTKKDFGCGDPHGVSMFPNTLHEDQVRSDAAREWLLPNYQRPNLQVLTGQYVGKVLLSQNGTTPRAVGVEFGTHKGNTHNVYAKHEVLLAAGSAVSPTILEYSGIGMKSILEPLGIDTVVDLPVGLNLQDQTTATVRSRITSAGAGQGQAAWFATFNETFGDYSEKAHELLNTKLEQWAEEAVARGGFHNTTALLIQYENYRDWIVNHNVAYSELFLDTAGVASFDVWDLLPFTRGYVHILDKDPYLHHFAYDPQYFLNELDLLGQAAATQLARNISNSGAMQTYFAGETIPGDNLAYDADLSAWTEWIPYHFRPNYHGVGTCSMMPKEMGGVVDNAARVYGVQGLRVIDGSIPPTQMSSHVMTVFYAMALKISDAILEDYASMQ

SEQ ID NO: 248 - protein, 583 aa, Aspergillus niger
SNGIEASLLTDPKDVSGRTVDYIIAGGGLTGLTTAARLTENPNISVLVIESGSYESDRGPIIEDLNAYGDIFGSSVDHAYETVELATNNQTALIRSGNGLGGSTLVNGGTWTRPHKAQVDSWETVFGNEGWNWDNVAAYSLQAERARAPNAKQIAAGHYFNASCHGVNGTVHAGPRDTGDDYSPIVKALMSAVEDRGVPTKKDFGCGDPHGVSMFPNTLHEDQVRSDAAREWLLPNYQRPNLQVLTGQYVGKVLLSQNGTTPRAVGVEFGTHKGNTHNVYAKHEVLLAAGSAVSPTILEYSGIGMKSILEPLGIDTVVDLPVGLNLQDQTTATVRSRITSAGAGQGQAAWFATFNETFGDYSEKAHELLNTKLEQWAEEAVARGGFHNTTALLIQYENYRDWIVNHNVAYSELFLDTXGVASFDVWDLLPFTRGYVHILDKDPYLHHFAYDPQYFLNELDLLGQAAATQLARNISNSGAMQTYFAGETIPGDNLAYDADLSAWTEYIPYHFRPNYHGVGTCSMMPKEMGGVVDNAARVYGVQGLRVIDGSIPPTQMSSHVMTVFYAMALKISDAILEDYASMQ

SEQ ID NO: 249 - protein, 583 aa, Aspergillus niger
SNGIEASLLTDPKDVSGRTVDYIIAGGGLTGLTTAARLTENPNISVLVIESGSYESDRGPIIEDLNAYGDIFGSSVDHAYETVELATNNQTALIRSGNGLGGSTLVNGGTWTRPHKAQVDSWETVFGNEGWNWDNVAAYSLKAERARAPNAKQIAAGHYFNASCHGVNGTVHAGPRDTGDDYSPIVKALMSAVEDRGVPTKKDFGCGDPHGVSMFPNTLHEDQVRSDAAREWLLPNYQRPNLQVLTGQYVGKVLLSQNGTTPRAVGVEFGTHKGNTHNVYAKHEVLLAAGSAVSPTILEYSGIGMKSILEPLGIDTVVDLPVGLNLQDQTTATVRSRITSAGAGQGQAAWFATFNETFGDYSEKAHELLNTKLEQWAEEAVARGGFHNTTALLIQYENYRDWIVNHNVAYSELFLDTAGVASFDVWDLLPFTRGYVHILDKDPYLHHFAYDPQYFLNELDLLGQAAATQLARNISNSGAMQTYFAGETIPGDNLAYDADLSAWTEYIPYHFRPNYHGVGTCSMMPKEMGGVVDNAARVYGVQGLRVIDGSIPPTQMSSHVMTVFYAMALKISDAILEDYASMQ

SEQ ID NO: 250 - protein, 583 aa, Aspergillus niger
SNGIEASLLTDPKDVSGRTVDYIIAGGGLTGLTTAARLTENPNISVLVIESGSYESDRGPIIEDLNAYGDIFGSSVDHAYETVELATNNQTALIRSGNGLGGSTLVNGGTWTRPHKAQVDSWETVFGNEGWNWDNVAAYSLQAERARAPNAKQIAAGHYFNASCHGVNGTVHAGPRDTGDDYSPIVKALMSAVEDRGVPTKKDFGCGDPHGVSMFPNTLHEDQVRSDAAREWLLPNYQRPNLQVLTGQYVGKVLLSQNGTTPRAVGVEFGTHKGNTHNVYAKHEVLLAAGSAVSPTILEYSGIGMKSILEPLGIDTVVDLPVGLNLQDQTTATVRSRITSAGAGQGQAAWFATFNETFGDYSEKAHELLNTKLEQWAEEAVARGGFHNTTALLIQYENYRDWIVNHNVAYSELFLDTAGVASFDVWDLLPFTRGYVHILDKDPYLHHFAYDPQYFLNELDLLGQAAATQLARNISNSGAMQTYFAGETKPGDNLAYDADLSAWTEYIPYHFRPNYHGVGTCSMMPKEMGGVVDNAARVYGVQGLRVIDGSIPPTQMSSHVMTVFYAMALKISDAILEDYASMQ

SEQ ID NO: 251 - protein, 581 aa, Aspergillus niger
GIEASLLTDPKDVSGRTVDYIIAGGGLTGLTTAARLTENPNISVLVIESGSYESDRGPIIEDLNAYGDIFGSSVDHAYETVELATNNQTALIRSGNGLGGSTLVNGGTWTRPHKAQVDSWETVFGNEGWNWDNVAAYSLQAERARAPNAKQIAAGHYFNASCHGVNGTVHAGPRDTGDDYSPIVKALMSAVEDRGVPTKADFGCGDPHGVSMFPNTLHEDQVRSDAAREWLLPNYQRPNLQVLTGQYVGKVLLSQNGTTPRAVGVEFGTHKGNTHNVYAKHEVLLAAGSAVSPTILEYSGIGMKSILEPLGIDTVVDLPVGLNLQDQTTATVRSRITSAGAGQGQAAWFATFNETFGDYSEKAHELLNTKLEQWAEEAVARGGFHNTTALLIQYENYRDWIVNHNVAYSELFLDTAGVASFDVWDLLPFTRGYVHILDKDPYLHHFAYDPQYFLNELDLLGQAAATQLARNISNSGAMQTYFAGETIPGDNLAYDADLSAWTEYIPYHFRPNYHGVGTCSMMPKEMGGVVDNAARVYGVQGLRVIDGSIPPTQMSSHVMTVFYAMALKISDAILEDYASMQ

SEQ ID NO: 252 - protein, 581 aa, Aspergillus niger
GIEASLLTDPKDVSGRTVDYIIAGGGLTGLTTAARLTENPNISVLVIESGSYESDRGPIIEDLNAYGDIFGSSVDHAYETVELATNNQTALIRSGNGLGGSTLVNGGTWTRPHKAQVDSWETVFGNEGWNWDNVAAYSLQAERARAPNAKQIAAGHYFNASCHGVNGTVHAGPRDTGDDYSPIVKALMSAVEDRGVPTKKDFGCGDPHGVSMFPNTLHEDQVRSDAAREWLLPNYQRPNLQVLTGQYVGKVLLSQNGTTPRAVGVEFGTHKGNTFNVYAKHEVLLAAGSAVSPTILEYSGIGMKSILEPLGIDTVVDLPVGLNLQDQTTATVRSRITSAGAGQGQAAWFATFNETFGDYSEKAHELLNTKLEQWAEEAVARGGFHNTTALLIQYENYRDWIVNHNVAYSELFLDTAGVASFDVWDLLPFTRGYVHILDKDPYLHHFAYDPQYFLNELDLLGQAAATQLARNISNSGAMQTYFAGETIPGDNLAYDADLSAWTEYIPYHFRPNYHGVGTCSMMPKEMGGVVDNAARVYGVQGLRVIDGSIPPTQMSSHVMTVFYAMALKISDAILEDYASMQ

SEQ ID NO: 253 - protein, 581 aa, Aspergillus niger
GIEASLLTDPKDVSGRTVDYIIAGGGLTGLTTAARLTENPNISVLVIESGSYESDRGPIIEDLNAYGDIFGSSVDHAYETVELATNNQTALIRSGNGLGGSTLVNGGTWTRPHKAQVDSWETVFGNEGWNWDNVAAYSLQAERARAPNAKQIAAGHYFNASCHGVNGTVHAGPRDTGDDYSPIVKALMSAVEDRGVPTKKDFGCGDPHGVSMFPNTLHEDQVRSDAAREWLLPNYQRPNLQVLTGQYVGKVLLSQNGTTPRAVGVEFGTHKGNTHNVYAKHEVLLAAGSAVSPTILEYSGIGMKSILEPLGIDTVVDLPVGLNLQDQTTATVRSRITSAGAGQGQAAWFATFNETFGDYSEKAHELLNTKLEQWAEEAVARGGFHNTTALLIQYENYRDWIVNHNVAYSELFLDTAGVASFDVWDLLPFTRGYVHILDKDPYLHHFAYDPQYFLNELDLLGQAAATQLARNISNSGAMQTYFAGETIPGDNLAYDADLSAWTEYIPYHFRPNYHGVGTCSMMPKEMGGVVDNAARVYGVQGLRVIDGSIPPTQMSSHVMTVFYAMALKISDAILEDYAFMQ

SEQ ID NO: 254 - protein, 581 aa, Aspergillus niger
GIEASLLTDPKDVSGRTVDYIIAGGGLTGLTTAARLTENPNISVLVIESGSYESDRGPIIEDLNAYGDIFGSSVDHAYETVELATNNQTALIRSGNGLGGSTLVNGGTWTRPHKAQVDSWETVFGNEGWNWDNVAAYSLQAERARAPNAKQIAAGHYFNASCHGVNGTIHAGPRDTGDDYSPIVKALMSAVEDRGVPTKKDFGCGDPHGVSMFPNTLHEDQVRSDAAREWLLPNYQRPNLQVLTGQYVGKVLLSQNGTTPRAVGVEFGTHKGNTHNVYAKHEVLLAAGSAVSPTILEYSGIGMKSILEPLGIDTVVDLPVGLNLQDQTTATVRSRITSAGAGQGQAAWFATFNETFGDYSEKAHELLNTKLEQWAEEAVARGGFHNTTALLIQYENYRDWIVNHNVAYSELFLDTAGVASFDVWDLLPFTRGYVHILDKDPYLHHFAYDPQYFLNELDLLGQAAATQLARNISNSGAMQTYFAGETIPGDNLAYDADLSAWTEYIPYHFRPNYHGVGTCSMMPKEMGGVVDNAARVYGVQGLRVIDGSIPPTQMSSHVMTVFYAMALKISDAILEDYASMQ

SEQ ID NO: 255 - protein, 581 aa, Aspergillus niger
GIEASLLTDPKDVSGRTVDYIIAGGGLTGLTTAARLTENPNISVLVIESGSYESDRGPIIEDLNAYGDIFGSSVDHAYETVELATNNQTALIRSGNGLGGSTLVNGGTWTRPHKAQVDSWETVFGNEGWNWDNVAAYSLQAERARAPNAKQIAAGHYFNASCHGVNGTVHAGPRDTGDDYSPIVKALMSAVEDRGVPTKKDFGCGDPHGVSMFPNTLHEDQVRSDAAREWLLPNYQRPNLQVLTGQYVGKVLLSQNGTTPRAVGVEFGTHKGNTHNVYAKHEVLLAAGSAVSPTILEYSGIGMKSILEPLGIDTVVDLPVGLNLQDQTTATVRSRITSAGAGQGQAAWFATFNETFGDYSEKAHELLNTKLEQWAEEAVARGGFHNTTALLIQYENYRDWIVNHNVAYSELFLDTAGVASFDVWDLLPFTRGYVHILDKDPYLHHFAYDPQYFLNDLDLLGQAAATQLARNISNSGAMQTYFAGETIPGDNLAYDADLSAWTEYIPYHFRPNYHGVGTCSMMPKEMGGVVDNAARVYGVQGLRVIDGSIPPTQMSSHVMTVFYAMALKISDAILEDYASMQ

SEQ ID NO: 256 - protein, 581 aa, Aspergillus niger
GIEASLLTDPKDVSGRTVDYIIAGGGLTGLTTAARLTENPNISVLVIESGSYESDRGPIIEDLNAYGDIFGSSVDHAYETVELATNNQTALIRSGNGLGGSTLVNGGTWTRPHKAQVDSWETVFGNEGWNWDNVAAYSLQAERARAPNAKQIAAGHYFNASCHGVNGTVHAGPRDTGDDYSPIVKALMSAVEDRGVPTKKDFGCGDPHGVSMFPNTLHEDQVRSDAAREWLLPNYQRPNLQVLTGQYVGKVLLYQNGTTPRAVGVEFGTHKGNTHNVYAKHEVLLAAGSAVSPTILEYSGIGMKSILEPLGIDTVVDLPVGLNLQDQTTATVRSRITSAGAGQGQAAWFATFNETFGDYSEKAHELLNTKLEQWAEEAVARGGFHNTTALLIQYENYRDWIVNHNVAYSELFLDTAGVASFDVWDLLPFTRGYVHILDKDPYLHHFAYDPQYFLNELDLLGQAAATQLARNISNSGAMQTYFAGETIPGDNLAYDADLSAWTEYIPYHFRPNYHGVGTCSMMPKEMGGVVDNAARVYGVQGLRVIDGSIPPTQMSSHVMTVFYAMALKISDAILEDYASMQ

SEQ ID NO: 257 - protein, 581 aa, Aspergillus niger
GIEASLLTDPKDVSGRTYDYIIAGGGLTGLTTAARLTENPNISVLVIESGSYESDRGPIIEDLNAYGDIFGSSVDHAYETVELATNNQTALIRSGNGLGGSTLVNGGTWTRPHKAQVDSWETVFGNEGWNWDNVAAYSLQAERARAPNAKQIAAGHYFNASCHGVNGTVHAGPRDTGDDYSPIVKALMSAVEDRGVPTKKDFGCGDPHGVSMFPNTLHEDQVRSDAAREWLLPNYQRPNLQVLTGQYVGKVLLSQNGTTPRAVGVEFGTHKGNTHNVYAKHEVLLAAGSAVSPTILEYSGIGMKSILEPLGIDTVVDLPVGLNLQDQTTATVRSRITSAGAGQGQAAWFATFNETFGDYSEKAHELLNTKLEQWAEEAVARGGFHNTTALLIQYENYRDWIVNHNVAYSELFLDTAGVASFDVWDLLPFTRGYVHILDKDPYLHHFAYDPQYFLNELDLLGQAAATQLARNISNSGAMQTYFAGETIPGDNLAYDADLSAWTEYIPYHFRPNYHGVGTCSMMPKEMGGVVDNAARVYGVQGLRVIDGSIPPTQMSSHVMTVFYAMALKISDAILEDYASMQ

SEQ ID NO: 258 - protein, 581 aa, Aspergillus niger
GIEASLLTDPKDVSGRTVDYIIAGGGLTGLTTAARLTENPNISVLVIESGSYESDRGPIIEDLNAYGDIFGSSVDHAYETVELATNNQTALIRSGNGLGGSTLVNGGTWTRPHKAQVDSWETVFGNEGWNWDNVAAYSLQAERARAPNAKQIAAGHYFNASCHGVNGTVHAGPRDTGDDYSPIVKALMSAVEDRGVPTKKDFGCGDPHGVSMFPNTLHEDQVRSDAAREWLLPNYQRPNLQVLTGQYVGKVLLSQNGTTPRAVGVEFGTHKGNTHNVYAKHEVLLAAGSAVSPTILEYSGIGMKSILEPLGIDTVVDLPVGLNLQDQTTATVRSRITSAGAGQGQAAWFATFNETFGDYSEKAHELLNTKLEQWAEEAVARGGFHNTTALLIQYENYRDWIVNHNVAYSELFLDTAGVASFDVWDLLPFTRGYVHILDKDPYLHHFAYDPQYFLNELDLLGQAAATQLARNISNSGAMKTYFAGETIPGDNLAYDADLSAWTEYIPYHFRPNYHGVGTCSMMPKEMGGVVDNAARVYGVQGLRVIDGSIPPTQMSSHVMTVFYAMALKISDAILEDYASMQ

SEQ ID NO: 259 - protein, 581 aa, Aspergillus niger
GIEASLLTDPKDVSGRTVDYIIAGGGLTGLTTAARLTENPNISVLVIESGSYESDRGPIIEDLNAYGDIFGSSVDHAYETVELATNNQTALIRSGNGLGGSTLVNGGTWTRPHKAQVDSWETVFGNEGWNWDNVAAYSLQAERARAPNAKQIAAGHYFNASCHGVNGTVHAGPRDTGDDYSPIVKALMSAVEDRGVPTKKDFGCGDPHGVSMFPNTLHEDQVRSDAAREWLLPNYQRPNLQVLTGQYVGKVLLSQNGTTPRAVGVEFGTHKGNTHNVYAKHEVLLAAGSAVSPTILEYSGIGMKPILEPLGIDTVVDLPVGLNLQDQTTATVRSRITSAGAGQGQAAWFATFNETFGDYSEKAHELLNTKLEQWAEEAVARGGFHNTTALLIQYENYRDWIVNHNVAYSELFLDTAGVASFDVWDLLPFTRGYVHILDKDPYLHHFAYDPQYFLNELDLLGQAAATQLARNISNSGAMQTYFAGETIPGDNLAYDADLSAWTEYIPYHFRPNYHGVGTCSMMPKEMGGVVDNAARVYGVQGLRVIDGSIPPTQMSSHVMTVFYAMALKISDAILEDYASMQ

SEQ ID NO: 260 - protein, 581 aa, Aspergillus niger
GIEASLLTDPKDVSGRTVDYIIAGGGLTGLTTAARLTENPNISVLVIESGSYESDRGPIIEDLNAYGDIFGSSVDHAYETVELATNNQTALIRSGNGLGGSTLVNGGTWTRPHKAQVDSWETVFGNEGWNWDNVAAYSLQAERARAPNAKQIAAGHYFNASCHGVNGTVHAGPRDTGDDYSPIVKALMSAVEDRGVPTKKDFGCGDPHGVSMFPNTLHEDQVRSDAAREWLLPNYQRPNLQVLTGQYVGKVLLSQNGTTPRAVGVEFGTHKGNTHNVYAKHEVLLAAGSAVSPTILEYSGIGMKSILEPLGIPTVVDLPVGLNLQDQTTATVRSRITSAGAGQGQAAWFATFNETFGDYSEKAHELLNTKLEQWAEEAVARGGFHNTTALLIQYENYRDWIVNHNVAYSELFLDTAGVASFDVWDLLPFTRGYVHILDKDPYLHHFAYDPQYFLNELDLLGQAAATQLARNISNSGAMQTYFAGETIPGDNLAYDADLSAWTEYIPYHFRPNYHGVGTCSMMPKEMGGVVDNAARVYGVQGLRVIDGSIPPTQMSSHVMTVFYAMALKISDAILEDYASMQ

SEQ ID NO: 261 - protein, 581 aa, Aspergillus niger
GIEASLLTDPKDVSGRTVDYIIAGGGLTGLTTAARLTENPNISVLVIESGSYESDRGPIIEDLNAYGDIFGSSVDHAYETVELATNNQTALIRSGNGLGGSTLVNGGTWTRPHKAQVDSWETVFGNEGWNWDNVAAYSLQAERARAPNAKQIAAGHYFNASCHGVNGTVHAGPRDTGDDYSPIVKALMSAVEDRGVPTKKDFGCGDPHGVSMFPNTLHEDQVRSDAAREWLLPNYQRPNLQVLTGQYVGKVLLSQNGTTPRAVGVEFGTHKGNTHNVYAKHEVLLAAGSAVSPTILEYSGIGMKSILEPLGIDTVVDLPVGLNLQDQTTATVRSRITSAGAGQGQAAWFATFNETFGDYSEKAHELLNTKLEQWAEEAVARGGFHNTTALLIQYENYRDWIVNHNVAYSELFLDTAGVLSFDVWDLLPFTRGYVHILDKDPYLHHFAYDPQYFLNELDLLGQAAATQLARNISNSGAMQTYFAGETIPGDNLAYDADLSAWTEYIPYHFRPNYHGVGTCSMMPKEMGGVVDNAARVYGVQGLRVIDGSIPPTQMSSHVMTVFYAMALKISDAILEDYASMQ

SEQ ID NO: 262 - protein, 581 aa, Aspergillus niger
GIEASLLTDPKDVSGRTVDYIIAGGGLTGLTTAARLTENPNISVLVIESGSYESDRGPIIEDLNAYGDIFGSSVDHAYETVELATNNQTALIRSGNGLGGSTLVNGGTWTRPHKAQVDSWETVFGNEGWNWDNVAAYSLQAERARAPNAKQIAAGHYFNASCHGVNGTVHAGPRDTGDDYSPIVKALMSAVEDRGVPTKKDFGCGDPHGVSMFPNTLHEDQVRSDAAREWLLPNYQRPNLQVLTGQYVGKVLLSQNGDTPRAVGVEFGTHKGNTHNVYAKHEVLLAAGSAVSPTILEYSGIGMKSILEPLGIDTVVDLPVGLNLQDQTTATVRSRITSAGAGQGQAAWFATFNETFGDYSEKAHELLNTKLEQWAEEAVARGGFHNTTALLIQYENYRDWIVNHNVAYSELFLDTAGVASFDVWDLLPFTRGYVHILDKDPYLHHFAYDPQYFLNELDLLGQAAATQLARNISNSGAMQTYFAGETIPGDNLAYDADLSAWTEYIPYHFRPNYHGVGTCSMMPKEMGGVVDNAARVYGVQGLRVIDGSIPPTQMSSHVMTVFYAMALKISDAILEDYASMQ

SEQ ID NO: 263 - protein, 581 aa, Aspergillus niger
GIEASLLTDPKDVSGRTVDYIIAGGGLTGLTTAARLTENPNISVLVIESGSYESDRGPIIEDLNAYGDIFGSSVDHAYETVELATNNQTALIRSGNGLGGSTLVNGGTWTRPHKAQVDSWETVFGNEGWNWDNVAAYSLQAERARAPNAKQIAAGHYFNASCHGVNGTVHAGPRDTGDDYSPIVKALMSAVEDRGVPTKKDFGCGDPHGVSMFPNTLHEDQVRSDAAREWLLPNYQRPNLQVLTGQYVGKVLLSQNGTTPRAVGVEFGTHKGNTHNVYAKHEVLLAAGSAVSPTILEYSGIGMKSILEPLGIDTVVDLPVGLNLQDQTTATVRSRITSAGAGQGQAAWFATFNETFGDYSEKAHELLNTKLEQWAEEAVARGGFDNTTALLIQYENYRDWIVNHNVAYSELFLDTAGVASFDVWDLLPFTRGYVHILDKDPYLHHFAYDPQYFLNELDLLGQAAATQLARNISNSGAMQTYFAGETIPGDNLAYDADLSAWTEYIPYHFRPNYHGVGTCSMMPKEMGGVVDNAARVYGVQGLRVIDGSIPPTQMSSHVMTVFYAMALKISDAILEDYASMQ

SEQ ID NO: 264 - protein, 581 aa, Aspergillus niger
GIEASLLTDPKDVSGRTVDYIIAGGGLTGLTTAARLTENPNISVLVIESGSYESDRGPIIEDLNAYGDIFGSSVDHAYETVELATNNQTALIRSGNGLGGSTLVNGGTWTRPHKAQVDSWERVFGNEGWNWDNVAAYSLQAERARAPNAKQIAAGHYFNASCHGVNGTVHAGPRDTGDDYSPIVKALMSAVEDRGVPTKKDFGCGDPHGVSMFPNTLHEDQVRSDAAREWLLPNYQRPNLQVLTGQYVGKVLLSQNGTTPRAVGVEFGTHKGNTHNVYAKHEVLLAAGSAVSPTILEYSGIGMKSILEPLGIDTVVDLPVGLNLQDQTTATVRSRITSAGAGQGQAAWFATFNETFGDYSEKAHELLNTKLEQWAEEAVARGGFHNTTALLIQYENYRDWIVNHNVAYSELFLDTAGVASFDVWDLLPFTRGYVHILDKDPYLHHFAYDPQYFLNELDLLGQAAATQLARNISNSGAMQTYFAGETIPGDNLAYDADLSAWTEYIPYHFRPNYHGVGTCSMMPKEMGGVVDNAARVYGVQGLRVIDGSIPPTQMSSHVMTVFYAMALKISDAILEDYASMQ

SEQ ID NO: 265 - protein, 581 aa, Aspergillus niger
GIEASLLTDPKDVSGRTVDYIIAGGGLTGLTTAARLTENPNISVLVIESGSYESDRGPIIEDLNAYGDIFGSSVDHAYETVELATNNQTALIRSGNGLGGSTLVNGGTWTRPHKAQVDSWETVFGNEGWNWDNVAAYSLQAERARAPNAKQIAAGHYFNASCHGVNGTVHAGPRDTGDDYSPIVKALMSAVEDRGVPTKKDFGCGDPHGVSMFPNTLHEDQVRSDAAREWLLPNYQRPNLQVLTGQYVGKVLLSQNGTTPRAVGVEFGTHKGNTHNVYAKHEVLLAAGSAVSPTILEYSGIGMKSILEPLGIDTVVDLPVGLNLQDQTTATVRSRITSAGAGQGQAAWFATFNETFGDYSEKAHELLNTKLEQWAEEAVARGGFHNETALLIQYENYRDWIVNHNVAYSELFLDTAGVASFDVWDLLPFTRGYVHILDKDPYLHHFAYDPQYFLNELDLLGQAAATQLARNISNSGAMQTYFAGETIPGDNLAYDADLSAWTEYIPYHFRPNYHGVGTCSMMPKEMGGVVDNAARVYGVQGLRVIDGSIPPTQMSSHVMTVFYAMALKISDAILEDYASMQ

SEQ ID NO: 266 - protein, 581 aa, Aspergillus niger
GIEASLLTDPKDVSGRTVDYIIAGGGLTGLTTAARLTENPNISVLVIESGSYESDRGPIIEDLNAYGDIFGSSVDHAYETVELPTNNQTALIRSGNGLGGSTLVNGGTWTRPHKAQVDSWETVFGNEGWNWDNVAAYSLQAERARAPNAKQIAAGHYFNASCHGVNGTVHAGPRDTGDDYSPIVKALMSAVEDRGVPTKKDFGCGDPHGVSMFPNTLHEDQVRSDAAREWLLPNYQRPNLQVLTGQYVGKVLLSQNGTTPRAVGVEFGTHKGNTHNVYAKHEVLLAAGSAVSPTILEYSGIGMKSILEPLGIDTVVDLPVGLNLQDQTTATVRSRITSAGAGQGQAAWFATFNETFGDYSEKAHELLNTKLEQWAEEAVARGGFHNTTALLIQYENYRDWIVNHNVAYSELFLDTAGVASFDVWDLLPFTRGYVHILDKDPYLHHFAYDPQYFLNELDLLGQAAATQLARNISNSGAMQTYFAGETIPGDNLAYDADLSAWTEYIPYHFRPNYHGVGTCSMMPKEMGGVVDNAARVYGVQGLRVIDGSIPPTQMSSHVMTVFYAMALKISDAILEDYASMQ

SEQ ID NO: 267 - protein, 581 aa, Aspergillus niger
GIEASLLTDPKDVSGRTVDYIIAGGGLTGLTTAARLTENPNISVLVIESGSYESDRGPIIEDLNAYGDIFGSSVDHAYETVELATNNQTALIRSGNGLGGSTLVNGGTWTRPHKAQVDSWETVFGNEGWNWDNVAAYSLQAERARAPNAKQIAAGHYFNASCHGVNGPVHAGPRDTGDDYSPIVKALMSAVEDRGVPTKKDFGCGDPHGVSMFPNTLHEDQVRSDAAREWLLPNYQRPNLQVLTGQYVGKVLLSQNGTTPRAVGVEFGTHKGNTHNVYAKHEVLLAAGSAVSPTILEYSGIGMKSILEPLGIDTVVDLPVGLNLQDQTTATVRSRITSAGAGQGQAAWFATFNETFGDYSEKAHELLNTKLEQWAEEAVARGGFHNTTALLIQYENYRDWIVNHNVAYSELFLDTAGVASFDVWDLLPFTRGYVHILDKDPYLHHFAYDPQYFLNELDLLGQAAATQLARNISNSGAMQTYFAGETIPGDNLAYDADLSAWTEYIPYHFRPNYHGVGTCSMMPKEMGGVVDNAARVYGVQGLRVIDGSIPPTQMSSHVMTVFYAMALKISDAILEDYASMQ

SEQ ID NO: 268 - protein, 581 aa, Aspergillus niger
GIEASLLTDPKDVSGRTVDYIIAGGGLTGLTTAARLTENPNISVLVIESGSYESDRGPIIEDLNAYGDIFGSSVDHAYETVELATNNQTALIRSGNGLGGSTLVNGGTWTRPHKAQVDSWETVFGNEGWNWDNVAAYSLQAERARAPNAKQIAAGHYFNASCHGVNGTVHAGPRDTGDDYSPIVKALMSAVEDRGVPTKKDFGCGDPHGVSMFPNTLHEDQVRSDAAREWLLPNYQRPNLQVLTGQYVGKVLLSQNGTTPRAVGVEFGTHKGNTHNVYAKHEVLLAAGSAVSPTILEYSGIGMKSILEPLGIDTVVDLPVGLNLQDQTTATVRSRITSAGAGQGQAAWFATFNETFGDYSEKAHELLNTKLEQWAEEAVARGGFLNTTALLIQYENYRDWIVNHNVAYSELFLDTAGVASFDVWDLLPFTRGYVHILDKDPYLHHFAYDPQYFLNELDLLGQAAATQLARNISNSGAMQTYFAGETIPGDNLAYDADLSAWTEYIPYHFRPNYHGVGTCSMMPKEMGGVVDNAARVYGVQGLRVIDGSIPPTQMSSHVMTVFYAMALKISDAILEDYASMQ

SEQ ID NO: 269 - protein, 581 aa, Aspergillus niger
GIEASLLTDPKDVSGRTVDYIIAGGGLTGLTTAARLTENPNISVLVIESGSYESDRGPIIEDLNAYGDIFGSSVDHAYETVELATNNQTALIRSGNGLGGSTLVNGGTWTRPHKAQVDSWETVFGNEGWNWDNVAAYSLQAERAREPNAKQIAAGHYFNASCHGVNGTVHAGPRDTGDDYSPIVKALMSAVEDRGVPTKKDFGCGDPHGVSMFPNTLHEDQVRSDAAREWLLPNYQRPNLQVLTGQYVGKVLLSQNGTTPRAVGVEFGTHKGNTHNVYAKHEVLLAAGSAVSPTILEYSGIGMKSILEPLGIDTVVDLPVGLNLQDQTTATVRSRITSAGAGQGQAAWFATFNETFGDYSEKAHELLNTKLEQWAEEAVARGGFHNTTALLIQYENYRDWIVNHNVAYSELFLDTAGVASFDVWDLLPFTRGYVHILDKDPYLHHFAYDPQYFLNELDLLGQAAATQLARNISNSGAMQTYFAGETIPGDNLAYDADLSAWTEYIPYHFRPNYHGVGTCSMMPKEMGGVVDNAARVYGVQGLRVIDGSIPPTQMSSHVMTVFYAMALKISDAILEDYASMQ

SEQ ID NO: 270 - protein, 581 aa, Aspergillus niger
GIEASLLTDPKDVSGRTVDYIIAGGGLTGLTTAARLTENPNISVLVIESGSYESDRGPIIEDLNAYGDIFGSSVDHAYETVELATNNQTALIRSGNGLGGSTLVNGGTWTRPHKAQVDSWETVFGNEGWNWDNVAAYSLQAERARAPNAKQIAAGHYFNASCHGVNGTVHAGPRDTGDDYSPIVKALMSAVEDRGVPTKDDFGCGDPHGVSMFPNTLHEDQVRSDAAREWLLPNYQRPNLQVLTGQYVGKVLLSQNGTTPRAVGVEFGTHKGNTHNVYAKHEVLLAAGSAVSPTILEYSGIGMKSILEPLGIDTVVDLPVGLNLQDQTTATVRSRITSAGAGQGQAAWFATFNETFGDYSEKAHELLNTKLEQWAEEAVARGGFHNTTALLIQYENYRDWIVNHNVAYSELFLDTAGVASFDVWDLLPFTRGYVHILDKDPYLHHFAYDPQYFLNELDLLGQAAATQLARNISNSGAMQTYFAGETIPGDNLAYDADLSAWTEYIPYHFRPNYHGVGTCSMMPKEMGGVVDNAARVYGVQGLRVIDGSIPPTQMSSHVMTVFYAMALKISDAILEDYASMQ

SEQ ID NO: 271 - protein, 581 aa, Aspergillus niger
GIEASLLTDPKDVSGRTVDYIIAGGGLTGLTTAARLTENPNISVLVIESGSYESDRGPIIEDLNAYGDIFGSSVDHAYETVELATNNQTALIRSGNGLGGSTLVNGGTWTRPHKAQVDSWETVFGNEGWNWDNVAAYSLQAERARAPNAKQIAAGHYFNASCHGVNGTVHAGPRDTGDDYSPIVKALMSAVEDRGVPTKKDFGCGDPHGVSMFPNTLHEDQVRSDAAREWLLPNYQRPNLQVLTGQYVGKVLLSQNGTTPRAVGVEFGTHKGNTHNVYAKHEVLLAAGSAVSPTILEYSGIGMKSILEPLGIDTVVDLPVGLNLQDQTTATVRSRITSAGAGQGQAAWFATFNETFGDYSEKAHELLNTKLEQWAEEAVARGGFHNTTALLIQYENYRDWIVNHNVAYSELFLDTAGVASFDVWDLLPFTRGYVHILDKDPYLHHFAYDPQYFLNELDLLGQAAATQLARNISNSGAMQTYFAGETIPGDNLAYDADLSAWTEYIPYHFRPNYHGVGTCSMMPKEMGGVVDFAARVYGVQGLRVIDGSIPPTQMSSHVMTVFYAMALKISDAILEDYASMQ

SEQ ID NO: 272 - protein, 581 aa, Aspergillus niger
GIEASLLTDPKDVSGRTVDYIIAGGGLTGLTTAARLTENPNISVLVIESGSYESDRGPIIEDLNAYGDIFGSSVDHAYETVELATNNQTALIRSGNGLGGSTLVNGGTWTRPHKAQVDSWETVFGNEGWNWDNVAAYSLQAERARAPNAKQIAAGHYFNASCHGVNGTVHAGPRDTGDDYSPIVKALMYAVEDRGVPTKKDFGCGDPHGVSMFPNTLHEDQVRSDAAREWLLPNYQRPNLQVLTGQYVGKVLLSQNGTTPRAVGVEFGTHKGNTHNVYAKHEVLLAAGSAVSPTILEYSGIGMKSILEPLGIDTVVDLPVGLNLQDQTTATVRSRITSAGAGQGQAAWFATFNETFGDYSEKAHELLNTKLEQWAEEAVARGGFHNTTALLIQYENYRDWIVNHNVAYSELFLDTAGVASFDVWDLLPFTRGYVHILDKDPYLHHFAYDPQYFLNELDLLGQAAATQLARNISNSGAMQTYFAGETIPGDNLAYDADLSAWTEYIPYHFRPNYHGVGTCSMMPKEMGGVVDNAARVYGVQGLRVIDGSIPPTQMSSHVMTVFYAMALKISDAILEDYASMQ

SEQ ID NO: 273 - protein, 581 aa, Aspergillus niger
GIEASLLTDPKDVSGRTVDYIIAGGGLTGLTTAARLTENPNISVLVIESGSYESDRGPIIEDLNAYGDIFGSSVDHAYETVELATNNQTALIRSGNGLGGSTLVNGGTWTRPHKAQVDSWETVFGNEGWNWDNVAAYSLQAERARAPNAKQIAAGHYFNPSCHGVNGTVHAGPRDTGDDYSPIVKALMSAVEDRGVPTKKDFGCGDPHGVSMFPNTLHEDQVRSDAAREWLLPNYQRPNLQVLTGQYVGKVLLSQNGTTPRAVGVEFGTHKGNTHNVYAKHEVLLAAGSAVSPTILEYSGIGMKSILEPLGIDTVVDLPVGLNLQDQTTATVRSRITSAGAGQGQAAWFATFNETFGDYSEKAHELLNTKLEQWAEEAVARGGFHNTTALLIQYENYRDWIVNHNVAYSELFLDTAGVASFDVWDLLPFTRGYVHILDKDPYLHHFAYDPQYFLNELDLLGQAAATQLARNISNSGAMQTYFAGETIPGDNLAYDADLSAWTEYIPYHFRPNYHGVGTCSMMPKEMGGVVDNAARVYGVQGLRVIDGSIPPTQMSSHVMTVFYAMALKISDAILEDYASMQ

SEQ ID NO: 274 - protein, 581 aa, Aspergillus niger
GIEASLLTDPKDVSGRTVDYIIAGGGLTGLTTAARLTENPNISVLVIESGSYESDRGPIIEDLNAYGDIFGSSVDHAYETVELATNNQTALIRSGNGLGGSTLVNGGTWTRPHKAQVDSWETVFGNEGWNWDNVAAYSLQAERARAPNAKQIAAGHYFNASCHGVNGTVHAGPRDTGDDYSPIVKALMSAVEDRGVPTKKDFGCGDPHGVSMFPNTLHEDQVRSDAAREWLLPNYQRPNLQVLTGQYVGKVLLSQNGTTPRAVGVEFGTHKGNTHNVYAKKEVLLAAGSAVSPTILEYSGIGMKSILEPLGIDTVVDLPVGLNLQDQTTATVRSRITSAGAGQGQAAWFATFNETFGDYSEKAHELLNTKLEQWAEEAVARGGFHNTTALLIQYENYRDWIVNHNVAYSELFLDTAGVASFDVWDLLPFTRGYVHILDKDPYLHHFAYDPQYFLNELDLLGQAAATQLARNISNSGAMQTYFAGETIPGDNLAYDADLSAWTEYIPYHFRPNYHGVGTCSMMPKEMGGVVDNAARVYGVQGLRVIDGSIPPTQMSSHVMTVFYAMALKISDAILEDYASMQ

SEQ ID NO: 275 - protein, 581 aa, Aspergillus niger
GIEASLLTDPKDVSGRTVDYIIAGGGLTGLTTAARLTENPNISVLVIESGSYESDRGPIIEDLNAYGDIFGSSVDHAYETVELATNNQTALIRSGNGLGGSTLVNGGTWTRPHKAQVDSWETVFGNEGWNWDNVAAYSLQAERARAPNAKQIAAGHYFNASCHGVNGTVHAGPRDTGDDYSPIVKALMSAVEDRGVPTKKDPGCGDPHGVSMFPNTLHEDQVRSDAAREWLLPNYQRPNLQVLTGQYVGKVLLSQNGTTPRAVGVEFGTHKGNTHNVYAKHEVLLAAGSAVSPTILEYSGIGMKSILEPLGIDTVVDLPVGLNLQDQTTATVRSRITSAGAGQGQAAWFATFNETFGDYSEKAHELLNTKLEQWAEEAVARGGFHNTTALLIQYENYRDWIVNHNVAYSELFLDTAGVASFDVWDLLPFTRGYVHILDKDPYLHHFAYDPQYFLNELDLLGQAAATQLARNISNSGAMQTYFAGETIPGDNLAYDADLSAWTEYIPYHFRPNYHGVGTCSMMPKEMGGVVDNAARVYGVQGLRVIDGSIPPTQMSSHVMTVFYAMALKISDAILEDYASMQ

SEQ ID NO: 276 - protein, 581 aa, Aspergillus niger
GIEASLLTDPKDVSGRTVDYIIAGGGLTGLTTAARLTENPNISVLVIESGSYESDRGPIIEDLNAYGDIFGSSVDHAYETVELATNNQTALIRSGNGLGGSTLVNGGTWTRPHKAQVDSWETVFGNEGWNWDNVAAYSLQAERARAPNAKQIAAGHYFNASCHGVNGTVHAGPRDTGDDYSPIVKALMSAVEDRGVPTKKDFGCGDPHGVSMFPNTLHEDQVRSDAAREWLLPNYQRPNLQVLTGQYVGKVLLSQNGTTPRAVGVEFGTHKGNTHNVYAKHEVLLAAGSAVSPTILEYSGIGMKSILEPLGIDTVVDLPVGLNLQDQTTATVRSRITSAGAGQGQAAWFATFNETFGDYSEKAHELLNTKLEQWAEEAVARGGFHNTTALLIQYENYRDWIVNHNVAYSELFLDTAGVASFDVWDLLPFTRGYVHILDKDPYLHHFAYDPQYFLNELDLLGQAAATQLARNISNSGAMQTYFAGETIPGDNLAYDADLSAWLEYIPYHFRPNYHGVGTCSMMPKEMGGVVDNAARVYGVQGLRVIDGSIPPTQMSSHVMTVFYAMALKISDAILEDYASMQ

SEQ ID NO: 277 - protein, 581 aa, Aspergillus niger
GIEASLLTDPKDVSGRTVDYIIAGGGLTGLTTAARLTENPNISVLVIESGSYESDRGPIIEDLNAYGDIFGSSVDHAYETVELATNNQTALIRSGNGLGGSTLVNGGTWTRPHKAQVDSWETVFGNEGWNWDNVAAYSLQAERARAPNAKQIAAGHYFNASCHGVNGTVHAGPRDTGDDYSPIVKALMRAVEDRGVPTKKDFGCGDPHGVSMFPNTLHEDQVRSDAAREWLLPNYQRPNLQVLTGQYVGKVLLSQNGTTPRAVGVEFGTHKGNTHNVYAKHEVLLAAGSAVSPTILEYSGIGMKSILEPLGIDTVVDLPVGLNLQDQTTATVRSRITSAGAGQGQAAWFATFNETFGDYSEKAHELLNTKLEQWAEEAVARGGFHNTTALLIQYENYRDWIVNHNVAYSELFLDTAGVASFDVWDLLPFTRGYVHILDKDPYLHHFAYDPQYFLNELDLLGQAAATQLARNISNSGAMQTYFAGETIPGDNLAYDADLSAWTEYIPYHFRPNYHGVGTCSMMPKEMGGVVDNAARVYGVQGLRVIDGSIPPTQMSSHVMTVFYAMALKISDAILEDYASMQ

SEQ ID NO: 278 - protein, 581 aa, Aspergillus niger
GIEASLLTDPKDVSGRTVDYIIAGGGLTGLTTAARLTENPNISVLVIESGSFESDRGPIIEDLNAYGDIFGSSVDHAYETVELATNNQTALIRSGNGLGGSTLVNGGTWTRPHKAQVDSWETVFGNEGWNWDNVAAYSLQAERARAPNAKQIAAGHYFNASCHGVNGTVHAGPRDTGDDYSPIVKALMSAVEDRGVPTKKDFGCGDPHGVSMFPNTLHEDQVRSDAAREWLLPNYQRPNLQVLTGQYVGKVLLSQNGTTPRAVGVEFGTHKGNTHNVYAKHEVLLAAGSAVSPTILEYSGIGMKSILEPLGIDTVVDLPVGLNLQDQTTATVRSRITSAGAGQGQAAWFATFNETFGDYSEKAHELLNTKLEQWAEEAVARGGFHNTTALLIQYENYRDWIVNHNVAYSELFLDTAGVASFDVWDLLPFTRGYVHILDKDPYLHHFAYDPQYFLNELDLLGQAAATQLARNISNSGAMQTYFAGETIPGDNLAYDADLSAWTEYIPYHFRPNYHGVGTCSMMPKEMGGVVDNAARVYGVQGLRVIDGSIPPTQMSSHVMTVFYAMALKISDAILEDYASMQ

SEQ ID NO: 279 - protein, 581 aa, Aspergillus niger
GIEASLLTDPKDVSGRTVDYIIAGGGLTGLTTAARLTENPNISVLVIESGSYESDRGPIIEDLNFYGDIFGSSVDHAYETVELATNNQTALIRSGNGLGGSTLVNGGTWTRPHKAQVDSWETVFGNEGWNWDNVAAYSLQAERARAPNAKQIAAGHYFNASCHGVNGTVHAGPRDTGDDYSPIVKALMSAVEDRGVPTKKDFGCGDPHGVSMFPNTLHEDQVRSDAAREWLLPNYQRPNLQVLTGQYVGKVLLSQNGTTPRAVGVEFGTHKGNTHNVYAKHEVLLAAGSAVSPTILEYSGIGMKSILEPLGIDTVVDLPVGLNLQDQTTATVRSRITSAGAGQGQAAWFATFNETFGDYSEKAHELLNTKLEQWAEEAVARGGFHNTTALLIQYENYRDWIVNHNVAYSELFLDTAGVASFDVWDLLPFTRGYVHILDKDPYLHHFAYDPQYFLNELDLLGQAAATQLARNISNSGAMQTYFAGETIPGDNLAYDADLSAWTEYIPYHFRPNYHGVGTCSMMPKEMGGVVDNAARVYGVQGLRVIDGSIPPTQMSSHVMTVFYAMALKISDAILEDYASMQ

SEQ ID NO: 280 - protein, 581 aa, Aspergillus niger
GIEASLLTDPKDVSGRTVDYIIAGGGLTGLTTAARLTENPNISVLVIESGSYESDRGPIIEDLNQYGDIFGSSVDHAYETVELATNNQTALIRSGNGLGGSTLVNGGTWTRPHKAQVDSWETVFGNEGWNWDNVAAYSLQAERARAPNAKQIAAGHYFNASCHGVNGTVHAGPRDTGDDYSPIVKALMSAVEDRGVPTKKDFGCGDPHGVSMFPNTLHEDQVRSDAAREWLLPNYQRPNLQVLTGQYVGKVLLSQNGTTPRAVGVEFGTHKGNTHNVYAKHEVLLAAGSAVSPTILEYSGIGMKSILEPLGIDTVVDLPVGLNLQDQTTATVRSRITSAGAGQGQAAWFATFNETFGDYSEKAHELLNTKLEQWAEEAVARGGFHNTTALLIQYENYRDWIVNHNVAYSELFLDTAGVASFDVWDLLPFTRGYVHILDKDPYLHHFAYDPQYFLNELDLLGQAAATQLARNISNSGAMQTYFAGETIPGDNLAYDADLSAWTEYIPYHFRPNYHGVGTCSMMPKEMGGVVDNAARVYGVQGLRVIDGSIPPTQMSSHVMTVFYAMALKISDAILEDYASMQ

SEQ ID NO: 281 - protein, 581 aa, Aspergillus niger
GIEASLLTDPKDVSGRTVDYIIAGGGLTGLTTAARLTENPNISVLVIESGSYESDRGPIIEDLNMYGDIFGSSVDHAYETVELATNNQTALIRSGNGLGGSTLVNGGTWTRPHKAQVDSWETVFGNEGWNWDNVAAYSLQAERARAPNAKQIAAGHYFNASCHGVNGTVHAGPRDTGDDYSPIVKALMSAVEDRGVPTKKDFGCGDPHGVSMFPNTLHEDQVRSDAAREWLLPNYQRPNLQVLTGQYVGKVLLSQNGTTPRAVGVEFGTHKGNTHNVYAKHEVLLAAGSAVSPTILEYSGIGMKSILEPLGIDTVVDLPVGLNLQDQTTATVRSRITSAGAGQGQAAWFATFNETFGDYSEKAHELLNTKLEQWAEEAVARGGFHNTTALLIQYENYRDWIVNHNVAYSELFLDTAGVASFDVWDLLPFTRGYVHILDKDPYLHHFAYDPQYFLNELDLLGQAAATQLARNISNSGAMQTYFAGETIPGDNLAYDADLSAWTEYIPYHFRPNYHGVGTCSMMPKEMGGVVDNAARVYGVQGLRVIDGSIPPTQMSSHVMTVFYAMALKISDAILEDYASMQ

SEQ ID NO: 282 - protein, 581 aa, Aspergillus niger
GIEASLLTDPKDVSGRTVDYIIAGGGLTGLTTAARLTENPNISVLVIESGSYESDRGPIIEDLNKYGDIFGSSVDHAYETVELATNNQTALIRSGNGLGGSTLVNGGTWTRPHKAQVDSWETVFGNEGWNWDNVAAYSLQAERARAPNAKQIAAGHYFNASCHGVNGTVHAGPRDTGDDYSPIVKALMSAVEDRGVPTKKDFGCGDPHGVSMFPNTLHEDQVRSDAAREWLLPNYQRPNLQVLTGQYVGKVLLSQNGTTPRAVGVEFGTHKGNTHNVYAKHEVLLAAGSAVSPTILEYSGIGMKSILEPLGIDTVVDLPVGLNLQDQTTATVRSRITSAGAGQGQAAWFATFNETFGDYSEKAHELLNTKLEQWAEEAVARGGFHNTTALLIQYENYRDWIVNHNVAYSELFLDTAGVASFDVWDLLPFTRGYVHILDKDPYLHHFAYDPQYFLNELDLLGQAAATQLARNISNSGAMQTYFAGETIPGDNLAYDADLSAWTEYIPYHFRPNYHGVGTCSMMPKEMGGVVDNAARVYGVQGLRVIDGSIPPTQMSSHVMTVFYAMALKISDAILEDYASMQ

SEQ ID NO: 283 - protein, 581 aa, Aspergillus niger
GIEASLLTDPKDVSGRTVDYIIAGGGLTGLTTAARLTENPNISVLVIESGSYESDRGPIIEDLNAYGDIFGSSVDHAYETVELATNNQTALIRSGNGLGGSTLVNGGTWTRPHKAQVDSWETVFGNEGWNWDNVAAYSLQAERARAPNAKQIAAGHYFNASCHGVNGTVHAGPRDTGDDYSPIVKALMSAVEDRGVPTKKDFGCGDPHGVSMFPNTLHEDQVRSDAAREWLLPNYQRPNLQVLTGQYVGKVLLSQNGTTPRAVGVEFGTHKGNTHNVYAKHEVLLAAGSAVSPTILEYSGIGMKSILEPLGIDTVVDLPVGLNLQDQTTATVRSRITSAGAGQGQAAWFATFNETFGDYSEKAHELLNTKLEQWAEEAVARGGFHNTTALLIQYENYRDWIVNHNVAYSELFLDTAGVASFDVWDLLPFTRGYVHILDKDPYLHHFAYDPQYFLNELDLLGQAAATQLARNISNSGAMQTYFAGETIPGDNLAYDADLSAWTEYIPYHFRPNYHGVGTCSMMPKEMGGVVDPAARVYGVQGLRVIDGSIPPTQMSSHVMTVFYAMALKISDAILEDYASMQ

SEQ ID NO: 284 - protein, 581 aa, Aspergillus niger
GIEASLLTDPKDVSGRTVDYIIAGGGLTGLTTAARLTENPNISVLVIESGSYESDRGPIIEDLNAYGDIFGSSVDHAYETVELATNNQTALIRSGNGLGGSTLVNGGTWTRPHKAQVDSWETVFGNEGWNWKNVAAYSLQAERARAPNAKQIAAGHYFNASCHGVNGTVHAGPRDTGDDYSPIVKALMSAVEDRGVPTKKDFGCGDPHGVSMFPNTLHEDQVRSDAAREWLLPNYQRPNLQVLTGQYVGKVLLSQNGTTPRAVGVEFGTHKGNTHNVYAKHEVLLAAGSAVSPTILEYSGIGMKSILEPLGIDTVVDLPVGLNLQDQTTATVRSRITSAGAGQGQAAWFATFNETFGDYSEKAHELLNTKLEQWAEEAVARGGFHNTTALLIQYENYRDWIVNHNVAYSELFLDTAGVASFDVWDLLPFTRGYVHILDKDPYLHHFAYDPQYFLNELDLLGQAAATQLARNISNSGAMQTYFAGETIPGDNLAYDADLSAWTEYIPYHFRPNYHGVGTCSMMPKEMGGVVDNAARVYGVQGLRVIDGSIPPTQMSSHVMTVFYAMALKISDAILEDYASMQ

SEQ ID NO: 285 - protein, 581 aa, Aspergillus niger
GIEASLLTDPKDVSGRTVDYIIAGGGLTGLTTAARLTENPNISVLVIESGSYESDRGPIIEDLNAYGDIFGSSVDHAYETVELATNNQTALIRSGNGLGGSTLVNGGTWTRPHKAQVDSWETVFGNEGWNWDNVAAYSLQAERARAPNAKQIAAGHYFNASCHGVNGTVHVGPRDTGDDYSPIVKALMSAVEDRGVPTKKDFGCGDPHGVSMFPNTLHEDQVRSDAAREWLLPNYQRPNLQVLTGQYVGKVLLSQNGTTPRAVGVEFGTHKGNTHNVYAKHEVLLAAGSAVSPTILEYSGIGMKSILEPLGIDTVVDLPVGLNLQDQTTATVRSRITSAGAGQGQAAWFATFNETFGDYSEKAHELLNTKLEQWAEEAVARGGFHNTTALLIQYENYRDWIVNHNVAYSELFLDTAGVASFDVWDLLPFTRGYVHILDKDPYLHHFAYDPQYFLNELDLLGQAAATQLARNISNSGAMQTYFAGETIPGDNLAYDADLSAWTEYIPYHFRPNYHGVGTCSMMPKEMGGVVDNAARVYGVQGLRVIDGSIPPTQMSSHVMTVFYAMALKISDAILEDYASMQ

SEQ ID NO: 286 - protein, 581 aa, Aspergillus niger
GIEASLLTDPKDVSGRTVDYIIAGGGLTGLTTAARLTENPNISVLVIESGSYESDRGPIIEDLNAYGDIFGSSVDHAYETVELATNNQTALIRSGNGLGGSTLVNGGTWTRPHKAQVDSWETVFGNEGWNWDNVAAYSLQAERARAPNAKQIAAGHYFNASCHGVNGTVHAGPRDTGDDYSPIVKALMSAVEDRGVPTKKDFGCGDPHGVSMFPNTLHEDQVRSDAAREWLLPNYQRPNLQVLTGQYVGKVLLSQNGTTPRAVGVEFGTHKGNTHNVYAKHEVLLAAGSAVSPTILEYSGIGMKSILEPLGIDTVVDLPVGLNLQDQTTATVRSRITSAGAGQGQAAWFATFNETFGDYSEKAHELLNTKLEQWAEEAVARGGFHNATALLIQYENYRDWIVNHNVAYSELFLDTAGVASFDVWDLLPFTRGYVHILDKDPYLHHFAYDPQYFLNELDLLGQAAATQLARNISNSGAMQTYFAGETIPGDNLAYDADLSAWTEYIPYHFRPNYHGVGTCSMMPKEMGGVVDNAARVYGVQGLRVIDGSIPPTQMSSHVMTVFYAMALKISDAILEDYASMQ

SEQ ID NO: 287 - protein, 581 aa, Aspergillus niger
GIEASLLTDPKDVSGRTVDYIIAGGGLTGLTTAARLTENPNISVLVIESGSYESDRGPIIEDLNAYGDIFGSSVDHAYETVELATNNQTALIRSGNGLGGSTLVNGGTWTRPHKAQVDSWETVFGNEGWNWDNVAAYSLQAERARAPNAKQIAAGHYFNASCHGVNGTVHAGPRDTGDDYSPIVKALMSAVEDRGVPTKKDFGCGDPHGVSMFPNTLHEDQVRSDAAREWLLPNYQRPNLQVLTGQYVGKVLLSQNGTTPRAVGVEFGTHKGNTHNVYAKHEVLLAAGSAVSPTILEYSGIGMKSILEPLGIDTVVDLPVGLNLQDQTTATVRSRITSAGAGQGQAAWFATFNETFGDYSEKAHELLNTKLEQWAEEAVARGGFHNTTALLIQYENYRDWIVNHNVAYSELFLDTAGVASFDVWDLLPFTRGYVHILDKDPYLHHFAYDPQYFLNELDLLGQAAATQLARKISNSGAMQTYFAGETIPGDNLAYDADLSAWTEYIPYHFRPNYHGVGTCSMMPKEMGGVVDNAARVYGVQGLRVIDGSIPPTQMSSHVMTVFYAMALKISDAILEDYASMQ

SEQ ID NO: 288 - protein, 581 aa, Aspergillus niger
GIEASLLTDPKDVSGRTVDYIIAGGGLTGLTMAARLTENPNISVLVIESGSYESDRGPIIEDLNAYGDIFGSSVDHAYETVELATNNQTALIRSGNGLGGSTLVNGGTWTRPHKAQVDSWETVFGNEGWNWDNVAAYSLQAERARAPNAKQIAAGHYFNASCHGVNGTVHAGPRDTGDDYSPIVKALMSAVEDRGVPTKKDFGCGDPHGVSMFPNTLHEDQVRSDAAREWLLPNYQRPNLQVLTGQYVGKVLLSQNGTTPRAVGVEFGTHKGNTHNVYAKHEVLLAAGSAVSPTILEYSGIGMKSILEPLGIDTVVDLPVGLNLQDQTTATVRSRITSAGAGQGQAAWFATFNETFGDYSEKAHELLNTKLEQWAEEAVARGGFHNTTALLIQYENYRDWIVNHNVAYSELFLDTAGVASFDVWDLLPFTRGYVHILDKDPYLHHFAYDPQYFLNELDLLGQAAATQLARNISNSGAMQTYFAGETIPGDNLAYDADLSAWTEYIPYHFRPNYHGVGTCSMMPKEMGGVVDNAARVYGVQGLRVIDGSIPPTQMSSHVMTVFYAMALKISDAILEDYASMQ

SEQ ID NO: 289 - protein, 581 aa, Aspergillus niger
GIEASLLTDPKDVSGRTVDYIIAGGGLTGLTTAARLTENPNISVLVIESGSYESDRGPIIEDLNAYGDIFGSSVDHAYETVELATNNQTALIRSGNGLGGSTLVNGGTWTRPHKAQVDSWETVFGNEGWNWDNVAAYSLQAERARAPNAKQIAAGHYFNASCHGVNGTVHAGPRDTGDDYSPIVKALMSAVEDRGVPTKKDFGCGDPHGVSMFPNTLHEDQVRSDAAREWLLPNYQRPNLQVLTGQYVGKVLLSQNGTTPRAVGVEFGTHKGNTHNVYAKHEVLLAAGSAVSPTILEYSGIGMKSILEPLGIDTVVDLPVGLNLQDQTTATVRSRITSAGAGQGQAAWFATFNETFGDYSEKAHELLNTKLEQWAEEAVARGGFHNTTALLIQYENYRDWIVNHNVAYSELFLDTKGVASFDVWDLLPFTRGYVHILDKDPYLHHFAYDPQYFLNELDLLGQAAATQLARNISNSGAMQTYFAGETIPGDNLAYDADLSAWTEYIPYHFRPNYHGVGTCSMMPKEMGGVVDNAARVYGVQGLRVIDGSIPPTQMSSHVMTVFYAMALKISDAILEDYASMQ

SEQ ID NO: 290 - protein, 581 aa, Aspergillus niger
GIEASLLTDPKDVSGRTVDYIIAGGGLTGLTTAARLTENPNISVLVIESGSYESDRGPIIEDLNLYGDIFGSSVDHAYETVELATNNQTALIRSGNGLGGSTLVNGGTWTRPHKAQVDSWETVFGNEGWNWDNVAAYSLQAERARAPNAKQIAAGHYFNASCHGVNGTVHAGPRDTGDDYSPIVKALMSAVEDRGVPTKKDFGCGDPHGVSMFPNTLHEDQVRSDAAREWLLPNYQRPNLQVLTGQYVGKVLLSQNGTTPRAVGVEFGTHKGNTHNVYAKHEVLLAAGSAVSPTILEYSGIGMKSILEPLGIDTVVDLPVGLNLQDQTTATVRSRITSAGAGQGQAAWFATFNETFGDYSEKAHELLNTKLEQWAEEAVARGGFHNTTALLIQYENYRDWIVNHNVAYSELFLDTAGVASFDVWDLLPFTRGYVHILDKDPYLHHFAYDPQYFLNELDLLGQAAATQLARNISNSGAMQTYFAGETIPGDNLAYDADLSAWTEYIPYHFRPNYHGVGTCSMMPKEMGGVVDNAARVYGVQGLRVIDGSIPPTQMSSHVMTVFYAMALKISDAILEDYASMQ

SEQ ID NO: 291 - protein, 581 aa, Aspergillus niger
GIEASLLTDPKDVSGRTVDYIIAGGGLTGLTTAARLTENPNISVLVIESGSYESDRGPIIEDLNAYGDIFGSSVDHAYETVELATNNQTALIRSGNGLGGSTLVNGGTWTRPHKAQVDSWETVFGNEGWNWDNVAAYSLQAERARAPNAKQIAAGHYFNASCHGVNGTVHAGPRDTGDDYSPIVAALMSAVEDRGVPTKKDFGCGDPHGVSMFPNTLHEDQVRSDAAREWLLPNYQRPNLQVLTGQYVGKVLLSQNGTTPRAVGVEFGTHKGNTHNVYAKHEVLLAAGSAVSPTILEYSGIGMKSILEPLGIDTVVDLPVGLNLQDQTTATVRSRITSAGAGQGQAAWFATFNETFGDYSEKAHELLNTKLEQWAEEAVARGGFHNTTALLIQYENYRDWIVNHNVAYSELFLDTAGVASFDVWDLLPFTRGYVHILDKDPYLHHFAYDPQYFLNELDLLGQAAATQLARNISNSGAMQTYFAGETIPGDNLAYDADLSAWTEYIPYHFRPNYHGVGTCSMMPKEMGGVVDNAARVYGVQGLRVIDGSIPPTQMSSHVMTVFYAMALKISDAILEDYASMQ

SEQ ID NO: 292 - protein, 581 aa, Aspergillus niger
GIEASLLTDPKDVSGRTVDYIIAGGGLTGLTTAARLTENPNISVLVIESGSYESDRGPIIEDLNAYGDIFGSSVDHAYETVELATNNQTALIRSGNGLGGSTLVNGGTWTRPHKAQVDSWETVFGNEGWNWDNVAAYSLQAERARAPNAKQIAAGHYFNASCHGVNGTVHAGPRDTGDDYSPIVKALMSAVEDRGVPTKKDFGCGDPHGVSMFPNTLHEDQVRSDAAREWLLPNYQRPNLQVLTGQYVGKVLLSQNGTTPRAVGVEFGTHKGNTHNVYAKHEVLLAAGSAVSPTILEYSGIGMKSILEPLGIDTVVDLPVGLNLQDQTTATVRSRITSAGAGQGQAAWFATFNETFGDYAEKAHELLNTKLEQWAEEAVARGGFHNTTALLIQYENYRDWIVNHNVAYSELFLDTAGVASFDVWDLLPFTRGYVHILDKDPYLHHFAYDPQYFLNELDLLGQAAATQLARNISNSGAMQTYFAGETIPGDNLAYDADLSAWTEYIPYHFRPNYHGVGTCSMMPKEMGGVVDNAARVYGVQGLRVIDGSIPPTQMSSHVMTVFYAMALKISDAILEDYASMQ

SEQ ID NO: 293 - protein, 581 aa, Aspergillus niger
GIEASLLTDPKDVSGRTVDYIIAGGGLTGLTTAARLTENPNISVLVIESGSYESDRGPIIEDLNAYGDIFGSSVDHAYETVELATNNQTALIRSGNGLGGSTLVNGGTWTRPHKAQVDSWETVFGNEGWNWDNVAAYSLQAERARAPNAKQIAAGHYFNASCHGVNGTVHAGPRDTGDDYSPIVKALMSAVEDRGVPTKKDFGCGDPHGVSMFPNTLHEDQVRSDAAREWLLPNYQRPNLQVLTGQYVGKVLLSQNGTTPRAVGVEFGTHKGNTHNVYAKHEVLLAAGSAVSPTILEYSGIGMKRILEPLGIDTVVDLPVGLNLQDQTTATVRSRITSAGAGQGQAAWFATFNETFGDYSEKAHELLNTKLEQWAEEAVARGGFHNTTALLIQYENYRDWIVNHNVAYSELFLDTAGVASFDVWDLLPFTRGYVHILDKDPYLHHFAYDPQYFLNELDLLGQAAATQLARNISNSGAMQTYFAGETIPGDNLAYDADLSAWTEYIPYHFRPNYHGVGTCSMMPKEMGGVVDNAARVYGVQGLRVIDGSIPPTQMSSHVMTVFYAMALKISDAILEDYASMQ

SEQ ID NO: 294 - protein, 581 aa, Aspergillus niger
GIEASLLTDPKDVSGRTVDYIIAGGGLTGLTTAARLTENPNISVLVIESGSYESDRGPIIEDLNAYGDIFGSSVDHAYETVELATNNQTALIRSGNGLGGSTLVNGGTWTRPHKAQVDSWETVFGNEGWNWDNVAAYSLQAERARAPNAKQIAAGHYFNASCHGVNGTVHAGPRDTGDDYSPIVKALMSAVEDRGVPTKKDFGCGDPHGVSMFPNTLHEDQVRSDAAREWLLPNYQRPNLQVLTGQYVGKVLLKQNGTTPRAVGVEFGTHKGNTHNVYAKHEVLLAAGSAVSPTILEYSGIGMKSILEPLGIDTVVDLPVGLNLQDQTTATVRSRITSAGAGQGQAAWFATFNETFGDYSEKAHELLNTKLEQWAEEAVARGGFHNTTALLIQYENYRDWIVNHNVAYSELFLDTAGVASFDVWDLLPFTRGYVHILDKDPYLHHFAYDPQYFLNELDLLGQAAATQLARNISNSGAMQTYFAGETIPGDNLAYDADLSAWTEYIPYHFRPNYHGVGTCSMMPKEMGGVVDNAARVYGVQGLRVIDGSIPPTQMSSHVMTVFYAMALKISDAILEDYASMQ

SEQ ID NO: 295 - protein, 581 aa, Aspergillus niger
GIEASLLTDPKDVSGRTVDYIIAGGGLTGLTTAARLTENPNISVLVIESGSYESDRGPIIEDLNAYGDIFGSSVDHAYETVELATNNQTALIRSGNGLGGSTLVNGGTWTRPHKAQVDSWETVFGNEGWNWDNVAAYSLQAERARAPNAKQIAAGHYFNASCHGVNGTVHAGPRDTGDDYSPIVKALMSAVEDRGVPTKKDFGCGDPHGVSMFPNTLHEDQVRSDAAREWLLPNYQRPNLQVLTGQYVGKVLLSQNGTTPRAVGVEFGTHKGNTHNVYAKHEVLLAAGSAVSPTILEYSGIGMKSILEPLGIDTVVDLPVGLNLQDQTTATVRSRITSAGAGQGQAAWFATFNETFGDYSEKAHELLNTKLEQWAEEAVARGGFHNTTALLIQYENYRDWIFNHNVAYSELFLDTAGVASFDVWDLLPFTRGYVHILDKDPYLHHFAYDPQYFLNELDLLGQAAATQLARNISNSGAMQTYFAGETIPGDNLAYDADLSAWTEYIPYHFRPNYHGVGTCSMMPKEMGGVVDNAARVYGVQGLRVIDGSIPPTQMSSHVMTVFYAMALKISDAILEDYASMQ

SEQ ID NO: 296 - protein, 581 aa, Aspergillus niger
GIEASLLTDPKDVSGRTVDYIIAGGGLTGLTTAARLTENPNISVLVIESGSYESDRGPIIEDLNAYGDIFGSSVDHAYETVELATNNQTALIRSGNGLGGSTLVNGGTWTRPHKAQVDSWETVFGNEGWNWDNVAAYSLQAERARAPNAKQIAAGHYFNASCHGVNGTVHAGPRDTGDDYSPIVKALMSAVEDRGVPTKKDFGCGDPHGVSMFPNTLHEDQVRSDAAREWLLPNYQRPNLQVLTGQYVGKVLLSQNGTTPRAVGVEFGTHKGNTHNVYAKHEVLLAAGSAVSPTILEYSGIGMKSILEPLGIDTVVDLPVGLNLQDQTTATVRSRITSAGAGQGQAAWFATFNETFGDYSEKAHELLNTKLEQWAEEAVARGGFHNTTALLIQYENYRDWIVNHNVAYSELFLDTAGVASFDVWDLLPFTRGYVHILDKDPYLHHFAYDPQYFLNELDLLGQAAATQLARFISNSGAMQTYFAGETIPGDNLAYDADLSAWTEYIPYHFRPNYHGVGTCSMMPKEMGGVVDNAARVYGVQGLRVIDGSIPPTQMSSHVMTVFYAMALKISDAILEDYASMQ

SEQ ID NO: 297 - protein, 581 aa, Aspergillus niger
GIEASLLTDPKDVSGRTVDYIIAGGGLTGLTTAARLTENPNISVLVIESGSYESDRGPIIEDLNAYGDIFGSSVDHAYETVELATNNQTALIRSGNGLGGSTLVNGGTWTRPHKAQVDSWETVFGNEGWNWDNVAAYSLQAERARAPNAKQIAAGHYFNASCHGVNGTVHAGPRDTGDDYSPIVKALMSAVEDRGVPTKKDFGCGDPHGVSMFPNTLHEDQVRSDAAREWLLPNYQRPNLQVLTGQYVGKVLLSQNGTTPRAVGVEFGTHKGNTHNVYAKHEVLLAAGSAVSPTILEYSGIGMKSILEPLGIDTVVDLPVGLNLQDQTTATVRSRITPAGAGQGQAAWFATFNETFGDYSEKAHELLNTKLEQWAEEAVARGGFHNTTALLIQYENYRDWIVNHNVAYSELFLDTAGVASFDVWDLLPFTRGYVHILDKDPYLHHFAYDPQYFLNELDLLGQAAATQLARNISNSGAMQTYFAGETIPGDNLAYDADLSAWTEYIPYHFRPNYHGVGTCSMMPKEMGGVVDNAARVYGVQGLRVIDGSIPPTQMSSHVMTVFYAMALKISDAILEDYASMQ

SEQ ID NO: 298 - protein, 581 aa, Aspergillus niger
GIEASLLTDPKDVSGRTVDYIIAGGGLTGLTTAARLTENPNISVLVIESGSYESDRGPIIEDLNAYGDIFGSSVDHAYETVELATNNQTALIRSGNGLGGSTLVNGGTWTRPHKAQVDSWETVFGNEGWNWDNVAAYSLQAERARAPNAKQIAAGHYFNASCHGVNGTVHAGPRDTGDDYSPIVKALMSAVEDRGVPTKKDFGCGDPHGVSMFPNTLHEDQVRSDAAREWLLPNYQRPNLQVLTGQYVGKVLLSQNGTTPRAVGVEFGTHKGNTHNVYAKHEVLLAAGSAVSPTILEYSGIGMKSILEPLGIDTVVDLPVGLNLQDQTTATVRSRITSAGAGQGQAAWFATFNETFGDYSEKAHELLNTKLEQWAEEAVARGGFHNTTALLIQYENYRDWIVNHNVAYSELFLDTNGVASFDVWDLLPFTRGYVHILDKDPYLHHFAYDPQYFLNELDLLGQAAATQLARNISNSGAMQTYFAGETIPGDNLAYDADLSAWTEYIPYHFRPNYHGVGTCSMMPKEMGGVVDNAARVYGVQGLRVIDGSIPPTQMSSHVMTVFYAMALKISDAILEDYASMQ

SEQ ID NO: 299 - protein, 581 aa, Aspergillus niger
GIEASLLTDPKDVSGRTVDYIIAGGGLTGLTTAARLTENPNISVLVIESGSYESDRGPIIEDLNAYGDIFGSSVDHAYETVELATNNQTALIRSGNGLGGSTLVNGGTWTRPHKAQVDSWETVFGNEGWNWDNVAAYSLQAERARAPNAKQIAAGHYFNASCHGVNGTVHAGPRDTGDDYSPIVKALMSAVEDRGVPTKKDFGCGDPHGVSMFPNTLHEDQVRSDAAREWLLPNYQRPNLQVLTGQYVGKVLLSQNGTTPRAVGVEFGTHKGNTHNVYAKHEVLLAAGSAVSPTILEYSGIGMKSILEPLGIDTVVDLPVGLNLQDQTTATVRSRITSAGAGQGQAAWFATFNETFGDYSEKAHELLNTKLEQWAEEAVARGGFHNTTALLIQYENYRDWIVNHNVAYSELFLDTAGVASFDVWDLLPFTRGYVHILDKDPYLHHFAYDPQYFLNELDLLGQAAATQLARNISNSGAMQTYFAGETIPGDNLAYDADLSAWTEYIPYHFRPNYHGVGTCSMMPKEMGGVVDNAARVYGVQGLRVIDGSIPPTQMSSHVMTVFYAMALKISDAILEDYAKMQ

SEQ ID NO: 300 - protein, 581 aa, Aspergillus niger
GIEASLLTDPKDVSGRTVDYIIAGGGLTGLTTAARLTENPNISVLVIESGSYESDRGPIIEDLNAYGDIFGSSVDHAYETVELATNNQTALIRSGNGLGGSTLVNGGTWTRPHKAQVDSWETVFGNEGWNWDNVAAYSLQAERARAPNAKQIAAGHYFNASCHGVNGTVHAGPRDTGDDYSPIVKALMSAVEDRGVPTKKDFGCGDPHGVSMFPNTLHEDQVRSDAAREWLLPNYQRPNLQVLTGQYVGKVLLSQNGTTPRAVGVEFGTHKGNTHNVYAKHEVLLAAGSAVSPTILEYSGIGMKSILEPLGIDTVVDLPVGLNLQDQTTATVRSRITSAGAGQGQAAWFATFNETFGDYSEKAHELLNTKLEQWAEEAVARGGFHNTTALLIQYENYRDWIVNHNVAYAELFLDTAGVASFDVWDLLPFTRGYVHILDKDPYLHHFAYDPQYFLNELDLLGQAAATQLARNISNSGAMQTYFAGETIPGDNLAYDADLSAWTEYIPYHFRPNYHGVGTCSMMPKEMGGVVDNAARVYGVQGLRVIDGSIPPTQMSSHVMTVFYAMALKISDAILEDYASMQ

SEQ ID NO: 301 - protein, 581 aa, Aspergillus niger
GIEASLLTDPKDVSGRTVDYIIAGGGLTGLTTAARLTENPNISVLVIESGSYESDRGPIIEDLNAYGDIFGSSVDHAYETVELATNNQTALIRSGNGLGGSTLVNGGTWTRPHKAQVDSWETVFGNEGWNWDNVAAYSLQAERARAPNAKQIAAGHYFNASCHGVNGTVHAGPRDTGDDYSPIVKALMSAVEDRGVPTKKDFGCGDPHGVSMFPNTLHEDQVRSDAAREWLLPNYQRPNLQVLTGQYVGKVLLSQNGTTPRAVGVEFGTHKGNTHNVYAKHEVLLAAGSAVSPTILEYSGIGMKSILEPLGIDTVVDLPVGLNLQDQTTATVRSRITSAGAGQGQAAWFATFNETFGDYSELAHELLNTKLEQWAEEAVARGGFHNTTALLIQYENYRDWIVNHNVAYSELFLDTAGVASFDVWDLLPFTRGYVHILDKDPYLHHFAYDPQYFLNELDLLGQAAATQLARNISNSGAMQTYFAGETIPGDNLAYDADLSAWTEYIPYHFRPNYHGVGTCSMMPKEMGGVVDNAARVYGVQGLRVIDGSIPPTQMSSHVMTVFYAMALKISDAILEDYASMQ

SEQ ID NO: 302 - protein, 581 aa, Aspergillus niger
GIEASLLTDPKDVSGRTVDYIIAGGGLTGLTTAARLTENPNISVLVIESGSYESDRGPIIEDLNAYGDIFGSSVDHAYETVELATNNQTALIRSGNGLGGSTLVNGGTWTRPHKAQVDSWETVFGNEGWNWDNVAAYSLQAERARAPNAKQIAAGHYFNASCHGVNGTVHAGPRDTGDDYSPIVKALMSAVEDRGVPTKKDFGCGDPHGVSMFPNTLHEDQVRSDAAREWLLPNYQRPNLQVLTGQYVGKVLLSQNGTTPRAVGVEFGTHKGNTHNVYAKHEVLLAAGSAVSPTILEYSGIGMKSILEPLGIDTVVDLPVGLNLQDQTTATVRSRITSAGAGQGQAAWFATFNETFGDYSEKAHELLNTKLEQWAEEAVARGGFHNTTALLIQYENYRDWIVNHNVAYSELFLDTAGVASFDVWDLLPFTRGYVHILDKDPYLHHFAYDPQYFLNELDLLGQAAATQLARNISNSGAMQTYFAGETIPGDNLAPDADLSAWTEYIPYHFRPNYHGVGTCSMMPKEMGGVVDNAARVYGVQGLRVIDGSIPPTQMSSHVMTVFYAMALKISDAILEDYASMQ

SEQ ID NO: 303 - protein, 581 aa, Aspergillus niger
GIEASLLTDPKDVSGRTVDYIIAGGGLTGLTTAARLTENPNISVLVIESGSYESDRGPIIEDLNAYGDIFGSSVDHAYETVELATNNQTALIRSGNGLGGSTLVNGGTWTRPHKAQVDSWETVFGNEGWNWDNVAAYSLQAERARAPNAKQIAAGHYFNASCHGVNGTVHAGPRDTGDDYSPIVKALMSAVEDRGVPTKKDFGCGDPHGVSMFPNTLHEDQVRSDAAREWLLPNYQRPNLQVLTGQYVGKVLLSQNGTTPRAVGVEFGTHKGNTHNVYAKHEVLLAAGSAVSPTILEYSGIGMKSILEPLGIDTVVDLPVGLNLQDQTTATVRSRITSAGAGQGQAAWFATFNETFGDYSEKAHELLNTKLEQWAEEAVARGGFHNTTALLIQYENYRDWIVNHNVAYSELFLDTAGVASFDVWDLLPFTRGYVHILDKDPYLHHFAYDPQYFLNELDLLGQAAATQLARNISNSGAMQTYFAGETIPGDNLAYDADLSAWTEYIPYHFRPNYHGVGTCSMMPKEMGGVVDNAARVYGVQGLRVIDGSIPPTQMSSHVMTVFYAMALKISDAILEDYARMQ

SEQ ID NO: 304 - protein, 581 aa, Aspergillus niger
GIEASLLTDPKDVAGRTVDYIIAGGGLTGLTTAARLTENPNISVLVIESGSYESDRGPIIEDLNAYGDIFGSSVDHAYETVELATNNQTALIRSGNGLGGSTLVNGGTWTRPHKAQVDSWETVFGNEGWNWDNVAAYSLQAERARAPNAKQIAAGHYFNASCHGVNGTVHAGPRDTGDDYSPIVKALMSAVEDRGVPTKKDFGCGDPHGVSMFPNTLHEDQVRSDAAREWLLPNYQRPNLQVLTGQYVGKVLLSQNGTTPRAVGVEFGTHKGNTHNVYAKHEVLLAAGSAVSPTILEYSGIGMKSILEPLGIDTVVDLPVGLNLQDQTTATVRSRITSAGAGQGQAAWFATFNETFGDYSEKAHELLNTKLEQWAEEAVARGGFHNTTALLIQYENYRDWIVNHNVAYSELFLDTAGVASFDVWDLLPFTRGYVHILDKDPYLHHFAYDPQYFLNELDLLGQAAATQLARNISNSGAMQTYFAGETIPGDNLAYDADLSAWTEYIPYHFRPNYHGVGTCSMMPKEMGGVVDNAARVYGVQGLRVIDGSIPPTQMSSHVMTVFYAMALKISDAILEDYASMQ

SEQ ID NO: 305 - protein, 581 aa, Aspergillus niger
GIEASLLTDPKDVSGRTVDYIIAGGGLTGLTTAARLTENPNISVLVIESGSYESDRGPIIEDLNAYGDIFGSSVDHAYETVELATNNQTALIRSGNGLGGSTLVNGGTWTRPHKAQVDSWETVFGNEGWNWDNVAAYSLQAERARAPNDKQIAAGHYFNASCHGVNGTVHAGPRDTGDDYSPIVKALMSAVEDRGVPTKKDFGCGDPHGVSMFPNTLHEDQVRSDAAREWLLPNYQRPNLQVLTGQYVGKVLLSQNGTTPRAVGVEFGTHKGNTHNVYAKHEVLLAAGSAVSPTILEYSGIGMKSILEPLGIDTVVDLPVGLNLQDQTTATVRSRITSAGAGQGQAAWFATFNETFGDYSEKAHELLNTKLEQWAEEAVARGGFHNTTALLIQYENYRDWIVNHNVAYSELFLDTAGVASFDVWDLLPFTRGYVHILDKDPYLHHFAYDPQYFLNELDLLGQAAATQLARNISNSGAMQTYFAGETIPGDNLAYDADLSAWTEYIPYHFRPNYHGVGTCSMMPKEMGGVVDNAARVYGVQGLRVIDGSIPPTQMSSHVMTVFYAMALKISDAILEDYASMQ

SEQ ID NO: 306 - protein, 581 aa, Aspergillus niger
GIEASLLTDPKDVSGRTVDYIIAGGGLTGLTTAARLTENPNISVLVIESGSYESDRGPIIEDLNAYGDIFGSSVDHAYETVELATNNQTALIRSGNGLGGSTLVNGGTWTRPHKAQVDSWETVFGNEGWNWDNVAAYSLQAERARAPNAKQIAAGHYFNASCHGVNGTVHAGPRDTGDDYSPIVKALMSAVEDRGVPTKKDFGCGDPHGVSMFPNTLHEDQVRSDAAREWLLPNYQRPNLQVLTGQYVGKVLLSQNGTTPRAVGVEFGTHKGNTHNVYAKHEVLLAAGSAVSPLILEYSGIGMKSILEPLGIDTVVDLPVGLNLQDQTTATVRSRITSAGAGQGQAAWFATFNETFGDYSEKAHELLNTKLEQWAEEAVARGGFHNTTALLIQYENYRDWIVNHNVAYSELFLDTAGVASFDVWDLLPFTRGYVHILDKDPYLHHFAYDPQYFLNELDLLGQAAATQLARNISNSGAMQTYFAGETIPGDNLAYDADLSAWTEYIPYHFRPNYHGVGTCSMMPKEMGGVVDNAARVYGVQGLRVIDGSIPPTQMSSHVMTVFYAMALKISDAILEDYASMQ

SEQ ID NO: 307 - protein, 581 aa, Aspergillus niger
GIEASLLTDPKDVSGRTVDYIIAGGGLTGLTTAARLTENPNISVLVIESGSYESDRGPIIEDLNAYGDIFGSSVDHAYETVPLATNNQTALIRSGNGLGGSTLVNGGTWTRPHKAQVDSWETVFGNEGWNWDNVAAYSLQAERARAPNAKQIAAGHYFNASCHGVNGTVHAGPRDTGDDYSPIVKALMSAVEDRGVPTKKDFGCGDPHGVSMFPNTLHEDQVRSDAAREWLLPNYQRPNLQVLTGQYVGKVLLSQNGTTPRAVGVEFGTHKGNTHNVYAKHEVLLAAGSAVSPTILEYSGIGMKSILEPLGIDTVVDLPVGLNLQDQTTATVRSRITSAGAGQGQAAWFATFNETFGDYSEKAHELLNTKLEQWAEEAVARGGFHNTTALLIQYENYRDWIVNHNVAYSELFLDTAGVASFDVWDLLPFTRGYVHILDKDPYLHHFAYDPQYFLNELDLLGQAAATQLARNISNSGAMQTYFAGETIPGDNLAYDADLSAWTEYIPYHFRPNYHGVGTCSMMPKEMGGVVDNAARVYGVQGLRVIDGSIPPTQMSSHVMTVFYAMALKISDAILEDYASMQ

SEQ ID NO: 308 - protein, 581 aa, Aspergillus niger
GIEASLLTDPKDVSGRTVDYIIAGGGLTGLTTAARLTENPNISVLVIESGSYESDRGPIIEDLNAYGDIFGSSVDHAYETVELATNNQTALIRSGNGLGGSTLVNGGTWTRPHKAQVDSWETVFGNEGWNWDNVAAYSLQAERARAPNAKQIAAGHYFNASCHGVNGTVHAGPRDTGDDYSPIVKALMSAVEDRGVPTKKDFGCGDPHGVSMFPNTLHEDQVRSDAAREWLLPNYQRPNLQVLTGQYVGKVLLSQNGTTPRAVGVEFGTHKGNTHNVYAKHEVLLAAGSLVSPTILEYSGIGMKSILEPLGIDTVVDLPVGLNLQDQTTATVRSRITSAGAGQGQAAWFATFNETFGDYSEKAHELLNTKLEQWAEEAVARGGFHNTTALLIQYENYRDWIVNHNVAYSELFLDTAGVASFDVWDLLPFTRGYVHILDKDPYLHHFAYDPQYFLNELDLLGQAAATQLARNISNSGAMQTYFAGETIPGDNLAYDADLSAWTEYIPYHFRPNYHGVGTCSMMPKEMGGVVDNAARVYGVQGLRVIDGSIPPTQMSSHVMTVFYAMALKISDAILEDYASMQ

SEQ ID NO: 309 - protein, 581 aa, Aspergillus niger
GIEASLLTDPKDVSGRTVDYIIAGGGLTGLTTAARLTENPNISVLVIESGSYESDRGPIIEDLNAYGDIFGSSVDHAYETVELATNNQTALIRSGNGLGGSTLVNGGTWTRPHKAQVDSWETVFGNEGWNWDNVAAYSLQAERARAPNAKQIAAGHYFNASCHGVNGTVHAGPRDTGDDYSPIVKALMSAVEDRGVPTKKDFGCGDPHGVSMFPNTLHEDQVRSDAAREWLLPNYQRPNLQVLTGQYVGKVLLSQNGTTPRAVGVEFGTHKGNTHNVYAKHEVLLAAGSAVSPTILEYSGIGMKSILEPLGIDTVVDLPVGLNLQDQTTATVRSRITSAGAGQGQAAWFATFNETFGDYSEKAHELLNTKLEQWAEEAVARGGFHNTTALLIQYENYRDWIVNHNVAYSELFLDTAGVASFDVWDLLPFTRGYVHILDKDPYLHHFAYDPQYFLNELDLLGQAAATQLARNISNSGPMQTYFAGETIPGDNLAYDADLSAWTEYIPYHFRPNYHGVGTCSMMPKEMGGVVDNAARVYGVQGLRVIDGSIPPTQMSSHVMTVFYAMALKISDAILEDYASMQ

SEQ ID NO: 310 - protein, 581 aa, Aspergillus niger
GIEASLLTDPKDVSGRTVDYIIAGGGLTGLTTAARLTENPNISVLVIESGSYESDRGPIIEDLNAYGDIFGSSVDHAYETVELATNNQTALIRSGNGLGGSTLVNGGTWTRPHKAQVDSWETVFGNEGWNWDNVAAYSLQAERARAPNAKQIAAGHYFNASCHGVNGTVHAGPRDTGDDYSPIVKALMSAVEDRGVPTKKDFGCGDPHGVSMFPNTLHEDQVRSDAAREWLLPNYQRPNLQVLTGQYVGKVLLSQNGTTPRAVGVEFGTHKGNTHNVYAKHEVLLAAGSAVSPTILEYSGIGMKSILEPLGIDTVVDLPVGLNLQDQTTATVRSRITSAGAGQGQAAWFATFNETFGDYSEFAHELLNTKLEQWAEEAVARGGFHNTTALLIQYENYRDWIVNHNVAYSELFLDTAGVASFDVWDLLPFTRGYVHILDKDPYLHHFAYDPQYFLNELDLLGQAAATQLARNISNSGAMQTYFAGETIPGDNLAYDADLSAWTEYIPYHFRPNYHGVGTCSMMPKEMGGVVDNAARVYGVQGLRVIDGSIPPTQMSSHVMTVFYAMALKISDAILEDYASMQ

SEQ ID NO: 311 - protein, 581 aa, Aspergillus niger
GIEASLLTDPKDVSGRTVDYIIAGGGLTGLTTAARLTENPNISVLVIESGSYESDRGPIIEDLNAYGDIFGSSVDHAYETVELATNNQTALIRSGNGLGGSTLVNGGTWTRPHKAQVDSWETVFGNEGWNWDNVAAYSLQAERARAPNAKQIAAGHYFNASCHGVNGTVHAGPRDTGDDYSPIVKALMSAVEDRGVPTKKDFGCGDPHGVSMFPNTLHEDQVRSDAAREWLLPNYQRPNLQVLTGQYVGKVLLSFNGTTPRAVGVEFGTHKGNTHNVYAKHEVLLAAGSAVSPTILEYSGIGMKSILEPLGIDTVVDLPVGLNLQDQTTATVRSRITSAGAGQGQAAWFATFNETFGDYSEKAHELLNTKLEQWAEEAVARGGFHNTTALLIQYENYRDWIVNHNVAYSELFLDTAGVASFDVWDLLPFTRGYVHILDKDPYLHHFAYDPQYFLNELDLLGQAAATQLARNISNSGAMQTYFAGETIPGDNLAYDADLSAWTEYIPYHFRPNYHGVGTCSMMPKEMGGVVDNAARVYGVQGLRVIDGSIPPTQMSSHVMTVFYAMALKISDAILEDYASMQ

SEQ ID NO: 312 - protein, 581 aa, Aspergillus niger
GIEASLLTDPKDVSGRTVDYIIAGGGLTGLTTAARLTENPNISVLVIESGSYESDRGPIIEDLNAYGDIFGSSVDHAYETVELATNNQTALIRSGNGLGGSTLVNGGTWTRPHKAQVDSWETVFGNEGWNWDNVAAYSLQAERARAPNAKQIAAGHYFNASCHGVNGTVHAGPRDTGDDYSPIVKALMSAVEDRGVPTKKDFGCGDPHGVSMFPNTLHEDQVRSDAAREWLLPNYQRPNLQVLTGQYVGKVLLSQNGTTPRAVGVEFGTHKGNTHNVYAKREVLLAAGSAVSPTILEYSGIGMKSILEPLGIDTVVDLPVGLNLQDQTTATVRSRITSAGAGQGQAAWFATFNETFGDYSEKAHELLNTKLEQWAEEAVARGGFHNTTALLIQYENYRDWIVNHNVAYSELFLDTAGVASFDVWDLLPFTRGYVHILDKDPYLHHFAYDPQYFLNELDLLGQAAATQLARNISNSGAMQTYFAGETIPGDNLAYDADLSAWTEYIPYHFRPNYHGVGTCSMMPKEMGGVVDNAARVYGVQGLRVIDGSIPPTQMSSHVMTVFYAMALKISDAILEDYASMQ

SEQ ID NO: 313 - protein, 581 aa, Aspergillus niger
GIEASLLTDPKDVSGRTVDYIIAGGGLTGLTTAARLTENPNISVLVIESGSYESDRGPIIEDLNAYGDIFGSSVDHAYETVELATNNQTALIRSGNGLGGSTLVNGGTWTRPHKAQVDSWETVFGNEGWNWDNVAAYSLQAERARAPNAKQIAAGHYFNASCHGVNGTVHAGPRDTGDDYSPIVKALMSAVEDRGVPTKKDFGCGDPHGVSMFPNTLHEDQVRSDAAREWLLPNYQRPNLQVLTGQYVGKVLLSQNGTTPRAVGVEFGTHKGNTHNVYAKHEVLLAAGSAVSPTILEYSGIGMKSILEPLGIDTVVDLPVGLNLQDQTTATVRSRITSAGAGQGQAAWFATFNETFGDYSEKAHELLNTKLEQWAEEAVARGGFHNTTALLIQYENYRDWIVNHNVAYSELFLDTAGVASFDVWDLLPFTRGYVHILDKDPYLHHFAYDPQYFLNELDLLGQAAATQLARNISNSGAMQTYFAGETIPGDNLPYDADLSAWTEYIPYHFRPNYHGVGTCSMMPKEMGGVVDNAARVYGVQGLRVIDGSIPPTQMSSHVMTVFYAMALKISDAILEDYASMQ

SEQ ID NO: 314 - protein, 581 aa, Aspergillus niger
GIEASLLTDPKDVSGRTVDYIIAGGGLTGLTTAARLTENPNISVLVIESGSYESDRGPIIEDLNAYGDIFGSSVDHAYETVELATNNQTALIRSGNGLGGSTLVNGGTWTRPHKAQVDSWETVFGNEGWNWDNVAAYSLQAERARAPNAKQIAAGHYFNASCHGVNGTVHAGPRDTGDDYSPIVKALMSAVEDRGVPTKKDFGCGDPHGVSMFPNTLHPDQVRSDAAREWLLPNYQRPNLQVLTGQYVGKVLLSQNGTTPRAVGVEFGTHKGNTHNVYAKHEVLLAAGSAVSPTILEYSGIGMKSILEPLGIDTVVDLPVGLNLQDQTTATVRSRITSAGAGQGQAAWFATFNETFGDYSEKAHELLNTKLEQWAEEAVARGGFHNTTALLIQYENYRDWIVNHNVAYSELFLDTAGVASFDVWDLLPFTRGYVHILDKDPYLHHFAYDPQYFLNELDLLGQAAATQLARNISNSGAMQTYFAGETIPGDNLAYDADLSAWTEYIPYHFRPNYHGVGTCSMMPKEMGGVVDNAARVYGVQGLRVIDGSIPPTQMSSHVMTVFYAMALKISDAILEDYASMQ

SEQ ID NO: 315 - protein, 581 aa, Aspergillus niger
GIEASLLTDPKDVSGRTVDYIIAGGGLTGLTTAARLTENPNISVLVIESGSYESDRGPIIEDLNAYGDIFGSSVDHAYETVELATNNQTALIRSGNGLGGSTLVNGGTWTRPHKAQVDSWETVFGNEGWNWDNVAAYSLQAERARAPNAKQIAAGHYFNAECHGVNGTVHAGPRDTGDDYSPIVKALMSAVEDRGVPTKKDFGCGDPHGVSMFPNTLHEDQVRSDAAREWLLPNYQRPNLQVLTGQYVGKVLLSQNGTTPRAVGVEFGTHKGNTHNVYAKHEVLLAAGSAVSPTILEYSGIGMKSILEPLGIDTVVDLPVGLNLQDQTTATVRSRITSAGAGQGQAAWFATFNETFGDYSEKAHELLNTKLEQWAEEAVARGGFHNTTALLIQYENYRDWIVNHNVAYSELFLDTAGVASFDVWDLLPFTRGYVHILDKDPYLHHFAYDPQYFLNELDLLGQAAATQLARNISNSGAMQTYFAGETIPGDNLAYDADLSAWTEYIPYHFRPNYHGVGTCSMMPKEMGGVVDNAARVYGVQGLRVIDGSIPPTQMSSHVMTVFYAMALKISDAILEDYASMQ

SEQ ID NO: 316 - protein, 581 aa, Aspergillus niger
GIEASLLTDPKDVSGRTVDYIIAGGGLTGLTTAARLTENPNISVLVIESGSYESDRGPIIEDLNAYGDIFGSSVDHAYETVELATNNQTALIRSGNGLGGSTLVNGGTWTRPHKAQVDSWETVFGNEGWNWDNVAAYSLQAERARAPNAKQIAAGHYFNASCHGVNGTVHAGPRDTGDDYSPIVDALMSAVEDRGVPTKKDFGCGDPHGVSMFPNTLHEDQVRSDAAREWLLPNYQRPNLQVLTGQYVGKVLLSQNGTTPRAVGVEFGTHKGNTHNVYAKHEVLLAAGSAVSPTILEYSGIGMKSILEPLGIDTVVDLPVGLNLQDQTTATVRSRITSAGAGQGQAAWFATFNETFGDYSEKAHELLNTKLEQWAEEAVARGGFHNTTALLIQYENYRDWIVNHNVAYSELFLDTAGVASFDVWDLLPFTRGYVHILDKDPYLHHFAYDPQYFLNELDLLGQAAATQLARNISNSGAMQTYFAGETIPGDNLAYDADLSAWTEYIPYHFRPNYHGVGTCSMMPKEMGGVVDNAARVYGVQGLRVIDGSIPPTQMSSHVMTVFYAMALKISDAILEDYASMQ

SEQ ID NO: 317 - protein, 581 aa, Aspergillus niger
GIEASLLTDPKDVSGRTVDYIIAGGGLTGLTVAARLTENPNISVLVIESGSYESDRGPIIEDLNAYGDIFGSSVDHAYETVELATNNQTALIRSGNGLGGSTLVNGGTWTRPHKAQVDSWETVFGNEGWNWDNVAAYSLQAERARAPNAKQIAAGHYFNASCHGVNGTVHAGPRDTGDDYSPIVKALMSAVEDRGVPTKKDFGCGDPHGVSMFPNTLHEDQVRSDAAREWLLPNYQRPNLQVLTGQYVGKVLLSQNGTTPRAVGVEFGTHKGNTHNVYAKHEVLLAAGSAVSPTILEYSGIGMKSILEPLGIDTVVDLPVGLNLQDQTTATVRSRITSAGAGQGQAAWFATFNETFGDYSEKAHELLNTKLEQWAEEAVARGGFHNTTALLIQYENYRDWIVNHNVAYSELFLDTAGVASFDVWDLLPFTRGYVHILDKDPYLHHFAYDPQYFLNELDLLGQAAATQLARNISNSGAMQTYFAGETIPGDNLAYDADLSAWTEYIPYHFRPNYHGVGTCSMMPKEMGGVVDNAARVYGVQGLRVIDGSIPPTQMSSHVMTVFYAMALKISDAILEDYASMQ

SEQ ID NO: 318 - protein, 581 aa, Aspergillus niger
GIEASLLTDPKDVSGRTVDYIIAGGGLTGLTTAARLTENPNISVLVIESGSYESDRGPIIEDLNAYGDIFGSSVDHAYETVELATNNQTALIRSGNGLGGSTLVNGGTWTRPHKAQVDSWETVFGNEGWNWDNVAAYSLQAERARPPNAKQIAAGHYFNASCHGVNGTVHAGPRDTGDDYSPIVKALMSAVEDRGVPTKKDFGCGDPHGVSMFPNTLHEDQVRSDAAREWLLPNYQRPNLQVLTGQYVGKVLLSQNGTTPRAVGVEFGTHKGNTHNVYAKHEVLLAAGSAVSPTILEYSGIGMKSILEPLGIDTVVDLPVGLNLQDQTTATVRSRITSAGAGQGQAAWFATFNETFGDYSEKAHELLNTKLEQWAEEAVARGGFHNTTALLIQYENYRDWIVNHNVAYSELFLDTAGVASFDVWDLLPFTRGYVHILDKDPYLHHFAYDPQYFLNELDLLGQAAATQLARNISNSGAMQTYFAGETIPGDNLAYDADLSAWTEYIPYHFRPNYHGVGTCSMMPKEMGGVVDNAARVYGVQGLRVIDGSIPPTQMSSHVMTVFYAMALKISDAILEDYASMQ

SEQ ID NO: 319 - protein, 581 aa, Aspergillus niger
GIEASLLTDPKDVSGRTVDYIIAGGGLTGLTTAARLTENPNISVLVIESGSYESDRGPIIEDLNAYGDIFGSSVDHAYETVELATNNQTALIRSGNGLGGSTLVNGGTWTRPHKAQVDSWETVFGNEGWNWDNVAAYSLQAERARAPNAKQIAAGHYFNASCHGVNGTVHAGPRDTGDDYSPIVKALMSAVEDRGVPTKKDFGCGDPHGVSMFPNTLHEDQVRSDAAREWLLPNYQRPNLQVLTGQYVGKVLLSQNGTTPRAVGVEFGTHKGNTHTVYAKHEVLLAAGSAVSPTILEYSGIGMKSILEPLGIDTVVDLPVGLNLQDQTTATVRSRITSAGAGQGQAAWFATFNETFGDYSEKAHELLNTKLEQWAEEAVARGGFHNTTALLIQYENYRDWIVNHNVAYSELFLDTAGVASFDVWDLLPFTRGYVHILDKDPYLHHFAYDPQYFLNELDLLGQAAATQLARNISNSGAMQTYFAGETIPGDNLAYDADLSAWTEYIPYHFRPNYHGVGTCSMMPKEMGGVVDNAARVYGVQGLRVIDGSIPPTQMSSHVMTVFYAMALKISDAILEDYASMQ

SEQ ID NO: 320 - protein, 581 aa, Aspergillus niger
GIEASLLTDPKDVSGRTVDYIIAGGGLTGLTTAARLTENPNISVLVIESGSYESDRGPIIEDLNAYGDIFGSSVDHAYETVELATNNQTALIRSGNGLGGSTLVNGGTWTRPHKAQVDSWETVFGNEGWNWDNVAAYSLQAERARAPNAKQIAAGHYFNASCHGVNGTVHAGPRDTGDDYSPIVKALMSAVEDRGVPTKKDFGCGDPHGVSMFPNTLHEDQVRSDAAREWLLPNYQRPNLQVLTGQYVGKVLLSQNGTTPRAVGVEFGTHKGNTHNVYAKHEVLLAAGSAVSPTILEYSGIGMKSILEPLGIDTVVDLPVGLNLQDQTTATVRSRITSAGAGQGQAAWFATFNETFGDYSEKAHELLNTKLEQWAEEAVARGGFHNTPALLIQYENYRDWIVNHNVAYSELFLDTAGVASFDVWDLLPFTRGYVHILDKDPYLHHFAYDPQYFLNELDLLGQAAATQLARNISNSGAMQTYFAGETIPGDNLAYDADLSAWTEYIPYHFRPNYHGVGTCSMMPKEMGGVVDNAARVYGVQGLRVIDGSIPPTQMSSHVMTVFYAMALKISDAILEDYASMQ

SEQ ID NO: 321 - protein, 581 aa, Aspergillus niger
GIEASLLTDPKDVSGRTVDYIIAGGGLTGLTTAARLTENPNISVLVIESGSYESDRGPIIEDLNAYGDIFGSSVDHAYETVELATNNQTALIRSGNGLGGSTLVNGGTWTRPHKAQVDSWETVFGNEGWNWDNVAAYSLQAERARAPNAKQIAAGHYFNASCHGVNGTVHAGPRDTGDDYSPIVKALMSAVEDRGVPTKKDFGCGDPHGVSMFPNTLHEDQVRSDAAREWLLPNYQRPNLQVLTGQYVGKVLLSQNGTTPRAVGVEFGTHKGNTHNVYAKHEVLLAAGSAVSPTILEYSGIGMKSILEPLGIDTVVDLPVGLNLQDQTTATVRSRITSAGAGQGQAAWFATFNETFGDYSEKAHELLNTKLEQWAEEAVARGGFHNPTALLIQYENYRDWIVNHNVAYSELFLDTAGVASFDVWDLLPFTRGYVHILDKDPYLHHFAYDPQYFLNELDLLGQAAATQLARNISNSGAMQTYFAGETIPGDNLAYDADLSAWTEYIPYHFRPNYHGVGTCSMMPKEMGGVVDNAARVYGVQGLRVIDGSIPPTQMSSHVMTVFYAMALKISDAILEDYASMQ

SEQ ID NO: 322 - protein, 581 aa, Aspergillus niger
GIEASLLTDPKDVSGRTVDYIIAGGGLTGLTTAARLTENPNISVLVIESGSYESDRGPIIEDLNAYGDIFGSSVDHAYETVELATNNQTALIRSGNGLGGSTLVNGGTWTRPHKAQVDSWETVFGNEGWNWDNVAAYSLQAERARAPNAKQIAAGHYFNASCHGVNGTVHAGPRDTGDDYSPIVKALMSAVEDRGVPTKKDFGCGDPHGVSMFPNTLHEDQVRSDAAREWLLPNYQRPNLQVLTGQYVGKVLLSQNGTTPRAVGVEFGTHKGNTHNVYAKHEVLLAAGSAVSPTILEYSGIGMKSILEPLGIDTVVDLPVGLNLQDQTTATVRSRITSAGAGQGQAAWYATFNETFGDYSEKAHELLNTKLEQWAEEAVARGGFHNTTALLIQYENYRDWIVNHNVAYSELFLDTAGVASFDVWDLLPFTRGYVHILDKDPYLHHFAYDPQYFLNELDLLGQAAATQLARNISNSGAMQTYFAGETIPGDNLAYDADLSAWTEYIPYHFRPNYHGVGTCSMMPKEMGGVVDNAARVYGVQGLRVIDGSIPPTQMSSHVMTVFYAMALKISDAILEDYASMQ

SEQ ID NO: 323 - protein, 581 aa, Aspergillus niger
GIEASLLTDPKDVSGRTVDYIIAGGGLTGLTTAARLTENPNISVLVIESGSYESDRGPIIEDLNAYGDIFGSSVDHAYETVELATNNQTALIRSGNGLGGSTLVNGGTWTRPHKAQVDSWETVFGNEGWNWDNVAAYSLQAERARAPNAKQIAAGHYFNASCHGVNGTVHAGPRDTGDDYSPIVKALMSAVEDRGVPTKKDFGCGDPHGVSMFPNTLHEDQVRSDAAREWLLPNYQRPNLQVLTGQYVGKVLLSKNGTTPRAVGVEFGTHKGNTHNVYAKHEVLLAAGSAVSPTILEYSGIGMKSILEPLGIDTVVDLPVGLNLQDQTTATVRSRITSAGAGQGQAAWFATFNETFGDYSEKAHELLNTKLEQWAEEAVARGGFHNTTALLIQYENYRDWIVNHNVAYSELFLDTAGVASFDVWDLLPFTRGYVHILDKDPYLHHFAYDPQYFLNELDLLGQAAATQLARNISNSGAMQTYFAGETIPGDNLAYDADLSAWTEYIPYHFRPNYHGVGTCSMMPKEMGGVVDNAARVYGVQGLRVIDGSIPPTQMSSHVMTVFYAMALKISDAILEDYASMQ

SEQ ID NO: 324 - protein, 581 aa, Aspergillus niger
GIEASLLTDPKDVSGDTVDYIIAGGGLTGLTTAARLTENPNISVLVIESGSYESDRGPIIEDLNAYGDIFGSSVDHAYETVELATNNQTALIRSGNGLGGSTLVNGGTWTRPHKAQVDSWETVFGNEGWNWDNVAAYSLQAERARAPNAKQIAAGHYFNASCHGVNGTVHAGPRDTGDDYSPIVKALMSAVEDRGVPTKKDFGCGDPHGVSMFPNTLHEDQVRSDAAREWLLPNYQRPNLQVLTGQYVGKVLLSQNGTTPRAVGVEFGTHKGNTHNVYAKHEVLLAAGSAVSPTILEYSGIGMKSILEPLGIDTVVDLPVGLNLQDQTTATVRSRITSAGAGQGQAAWFATFNETFGDYSEKAHELLNTKLEQWAEEAVARGGFHNTTALLIQYENYRDWIVNHNVAYSELFLDTAGVASFDVWDLLPFTRGYVHILDKDPYLHHFAYDPQYFLNELDLLGQAAATQLARNISNSGAMQTYFAGETIPGDNLAYDADLSAWTEYIPYHFRPNYHGVGTCSMMPKEMGGVVDNAARVYGVQGLRVIDGSIPPTQMSSHVMTVFYAMALKISDAILEDYASMQ

SEQ ID NO: 325 - protein, 581 aa, Aspergillus niger
GIEASLLTDPKDVSGRTVDYIIAGGGLTGLTTAARLTENPNISVLVIESGSYESDRGPIIEDLNAYGDIFGSSVDHAYETVELATNNQTALIRSGNGLGGSTLVNGGTWTRPHKAQVDSWETVFGNEGWNWDNVAAYSLQAERARAPNAKQIAAGHYFNASCHGVNGTVHAGPRDTGDDYSPIVKALMSAVEDRGVPTKKDFGCGDPHGVSMFPNTLHEDQVRSDAAREWLLPNYQRPNLQVLTGQYVGKVLLSQNGTTPRAVGVEFGTHKGNTHNVYAKHEVLLAAGSAVSPTILEYSGIGMKSILEPLGIDTVVDLPVGLNLQDQTTATVRSRITSAGAGQGQAAWFATFNETFGDYSEKAHELLNTKLEQWAEEAVARGGFHNTTALLIQYENYRDWIVNHNVAYSELFLDTAGVASFDVWDLLPFTRGYVHILDKDPYLHHFAYDPQYFLNELDLLGQAAATKLARNISNSGAMQTYFAGETIPGDNLAYDADLSAWTEYIPYHFRPNYHGVGTCSMMPKEMGGVVDNAARVYGVQGLRVIDGSIPPTQMSSHVMTVFYAMALKISDAILEDYASMQ

SEQ ID NO: 326 - protein, 581 aa, Aspergillus niger
GIEASLLTDPKDVSGRTVDYIIAGGGLTGLTTAARLTENPNISVLVIESGSYESDRGPIIEDLNAYGDIFGSSVDHAYETVELATNNQTALIRSGNGLGGSTLVNGGTWTRPHKAQVDSWETVFGNEGWNWDNVAAYSLQAERARAPNAKQIAAGHYFNASCHGVNGTVHAGPRDTGDDYSPIVKALMSAVEDRGVPTKKDFGCGDPHGVSMFPNTLHEDQVRSDAAREWLLPNYQRPNLQVLTGQYVGKVLLSQNGTTPRAVGVEFGTHKGNTHNVYAKHEVLLAAGSAVSPTILEYSGIGMKSILEPLGIDTVVDLPVGLNLQDQTTATVRSRITSAGAGQGQAAWFATFNETFGDYSEKAHELLNTKLEQWAEEAVARGGFHNTTALLIQYENYRDWIVNHNVAYSELFLDTAGVASFDVWDLLPFTRGYVHILDKDPYLHHFAYDPQYFLNELDLLGQAAATQLAREISNSGAMQTYFAGETIPGDNLAYDADLSAWTEYIPYHFRPNYHGVGTCSMMPKEMGGVVDNAARVYGVQGLRVIDGSIPPTQMSSHVMTVFYAMALKISDAILEDYASMQ

SEQ ID NO: 327 - protein, 581 aa, Aspergillus niger
GIEASLLTDPKDVSGRTVDYIIAGGGLTGLTTAARLTENPNISVLVIESGSYESDRGPIIEDLNAYGDIFGSSVDHAYETVELATNNQTALIRSGNGLGGSTLVNGGTWTRPHKAQVDSWETVFGNEGWNWDNVAAYSLQAERARAPNAKQIAAGHYFNASCHGVNGTVHAGPRDTGDDYSPIVKALMSAVEDLGVPTKKDFGCGDPHGVSMFPNTLHEDQVRSDAAREWLLPNYQRPNLQVLTGQYVGKVLLSQNGTTPRAVGVEFGTHKGNTHNVYAKHEVLLAAGSAVSPTILEYSGIGMKSILEPLGIDTVVDLPVGLNLQDQTTATVRSRITSAGAGQGQAAWFATFNETFGDYSEKAHELLNTKLEQWAEEAVARGGFHNTTALLIQYENYRDWIVNHNVAYSELFLDTAGVASFDVWDLLPFTRGYVHILDKDPYLHHFAYDPQYFLNELDLLGQAAATQLARNISNSGAMQTYFAGETIPGDNLAYDADLSAWTEYIPYHFRPNYHGVGTCSMMPKEMGGVVDNAARVYGVQGLRVIDGSIPPTQMSSHVMTVFYAMALKISDAILEDYASMQ

SEQ ID NO: 328 - protein, 581 aa, Aspergillus niger
GIEASLLTDPKDVSGRTVDYIIAGGGLTGLTTAARLTENPNISVLVIESGSYESDRGPIIEDLNAYGDIFGSSVDHAYETVELATNNQTALIRSGNGLGGSTLVNGGTWTRPHKAQVDSWETVFGNEGWNWDNVAAYSLQAERARAPNAKQIAAGHYFNASCHGVNGTVHAGPRDTGDDYSPIVKALMSAVEDRGVPTKKDFGCGDPHGVSMFPNTLHEDQVRSDAAREWLLPNYQRPNLQVLTGQYVGKVLLSQNGTTPRAVGVEFGTHKGNTHKVYAKHEVLLAAGSAVSPTILEYSGIGMKSILEPLGIDTVVDLPVGLNLQDQTTATVRSRITSAGAGQGQAAWFATFNETFGDYSEKAHELLNTKLEQWAEEAVARGGFHNTTALLIQYENYRDWIVNHNVAYSELFLDTAGVASFDVWDLLPFTRGYVHILDKDPYLHHFAYDPQYFLNELDLLGQAAATQLARNISNSGAMQTYFAGETIPGDNLAYDADLSAWTEYIPYHFRPNYHGVGTCSMMPKEMGGVVDNAARVYGVQGLRVIDGSIPPTQMSSHVMTVFYAMALKISDAILEDYASMQ

SEQ ID NO: 329 - protein, 581 aa, Aspergillus niger
GIEASLLTDPKDVSGRTVDYIIAGGGLTGLTTAARLTENPNISVLVIESGSYESDRGPIIEDLNAYGDIFGSSVDHAYETVELATNNQTALIRSGNGLGGSTLVNGGTWTRPHKAQVDSWEKVFGNEGWNWDNVAAYSLQAERARAPNAKQIAAGHYFNASCHGVNGTVHAGPRDTGDDYSPIVKALMSAVEDRGVPTKKDFGCGDPHGVSMFPNTLHEDQVRSDAAREWLLPNYQRPNLQVLTGQYVGKVLLSQNGTTPRAVGVEFGTHKGNTHNVYAKHEVLLAAGSAVSPTILEYSGIGMKSILEPLGIDTVVDLPVGLNLQDQTTATVRSRITSAGAGQGQAAWFATFNETFGDYSEKAHELLNTKLEQWAEEAVARGGFHNTTALLIQYENYRDWIVNHNVAYSELFLDTAGVASFDVWDLLPFTRGYVHILDKDPYLHHFAYDPQYFLNELDLLGQAAATQLARNISNSGAMQTYFAGETIPGDNLAYDADLSAWTEYIPYHFRPNYHGVGTCSMMPKEMGGVVDNAARVYGVQGLRVIDGSIPPTQMSSHVMTVFYAMALKISDAILEDYASMQ

SEQ ID NO: 330 - protein, 581 aa, Aspergillus niger
GIEASLLTDPKDVSGRTVDYIIAGGGLTGLTTAARLTENPNISVLVIESGSYESDRGPIIEDLNAYGDIFGSSVDHAYETVELATNNQTALIRSGNGLGGSTLVNGGTWTRPHKAQVDSWETVFGNEGWNWDNVAAYSLQAERARAPNAKQIAAGHYFNASCHGVNGTVHAGPRDRGDDYSPIVKALMSAVEDRGVPTKKDFGCGDPHGVSMFPNTLHEDQVRSDAAREWLLPNYQRPNLQVLTGQYVGKVLLSQNGTTPRAVGVEFGTHKGNTHNVYAKHEVLLAAGSAVSPTILEYSGIGMKSILEPLGIDTVVDLPVGLNLQDQTTATVRSRITSAGAGQGQAAWFATFNETFGDYSEKAHELLNTKLEQWAEEAVARGGFHNTTALLIQYENYRDWIVNHNVAYSELFLDTAGVASFDVWDLLPFTRGYVHILDKDPYLHHFAYDPQYFLNELDLLGQAAATQLARNISNSGAMQTYFAGETIPGDNLAYDADLSAWTEYIPYHFRPNYHGVGTCSMMPKEMGGVVDNAARVYGVQGLRVIDGSIPPTQMSSHVMTVFYAMALKISDAILEDYASMQ

SEQ ID NO: 331 - protein, 581 aa, Aspergillus niger
GIEASLLTDPKDVSGRTVDYIIAGGGLTGLTTAARLTENPNISVLVIESGSYESDRGPIIEDLNAYGDIFGSSVDHAYETVELATNNQTALIRSGNGLGGSTLVNGGTWTRPHKAQVDSWETVFGNPGWNWDNVAAYSLQAERARAPNAKQIAAGHYFNASCHGVNGTVHAGPRDTGDDYSPIVKALMSAVEDRGVPTKKDFGCGDPHGVSMFPNTLHEDQVRSDAAREWLLPNYQRPNLQVLTGQYVGKVLLSQNGTTPRAVGVEFGTHKGNTHNVYAKHEVLLAAGSAVSPTILEYSGIGMKSILEPLGIDTVVDLPVGLNLQDQTTATVRSRITSAGAGQGQAAWFATFNETFGDYSEKAHELLNTKLEQWAEEAVARGGFHNTTALLIQYENYRDWIVNHNVAYSELFLDTAGVASFDVWDLLPFTRGYVHILDKDPYLHHFAYDPQYFLNELDLLGQAAATQLARNISNSGAMQTYFAGETIPGDNLAYDADLSAWTEYIPYHFRPNYHGVGTCSMMPKEMGGVVDNAARVYGVQGLRVIDGSIPPTQMSSHVMTVFYAMALKISDAILEDYASMQ

SEQ ID NO: 332 - protein, 581 aa, Aspergillus niger
GIEASLLTDPKDVSGRTVDYIIAGGGLTGLTTAARLTENPNISVLVIESGSYESDRGPIIEDLNAYGDIFGSSVDHAYETVELATNNQTALIRSGNGLGGSTLVNGGTWTRPHKAQVDSWETVFGNEGWNWDNVAAYSLQAERARAPNAKQIAAGHYFNASCHGVNGTVHAGPRDTGDDYSPIVKALMSAVEDRGVPTKKDFGCGDPHGVSMFPNTLHEDQVRSDAAREWLLPNYQRPNLQVLTGQYVGKVLLSQNGTTPRAVGVEFGTHKGNTHNVYAKHEVLLAAGSAVSPTILEYSGIGMKSILEPLGIDTVVDLPVGLNLQDQTTATVRSRITSAGAGQGQAAWFATFNETFGDYSEKAHELLNTKLEQWAEEAVARGGFHNTTALLIQYENYRDWIVNHNVAYSELFLDTAGVASFDVWDLLPFTRGYVHILDKDPYLHHFAYDPQYFLNELDLLGQAAATQLARNISNSGAMQTYFAGETIPGDNLAYDADLSAWTEYIPYHFRPNYHGVGTCSMMPKEMGGVVDNAARVYGVQGLRVIDASIPPTQMSSHVMTVFYAMALKISDAILEDYASMQ

SEQ ID NO: 333 - protein, 581 aa, Aspergillus niger
GIEASLLTDPKDVSGRTVDYIIAGGGLTGLTTAARLTENPNISVLVIESGSYESDRGPIIEDLNAYGDIFGSSVDHAYETVELATNNQTALIRSGNGLGGSTLVNGGTWTRPHKAQVDSWETVFGNEGWNWDNVLAYSLQAERARAPNAKQIAAGHYFNASCHGVNGTVHAGPRDTGDDYSPIVKALMSAVEDRGVPTKKDFGCGDPHGVSMFPNTLHEDQVRSDAAREWLLPNYQRPNLQVLTGQYVGKVLLSQNGTTPRAVGVEFGTHKGNTHNVYAKHEVLLAAGSAVSPTILEYSGIGMKSILEPLGIDTVVDLPVGLNLQDQTTATVRSRITSAGAGQGQAAWFATFNETFGDYSEKAHELLNTKLEQWAEEAVARGGFHNTTALLIQYENYRDWIVNHNVAYSELFLDTAGVASFDVWDLLPFTRGYVHILDKDPYLHHFAYDPQYFLNELDLLGQAAATQLARNISNSGAMQTYFAGETIPGDNLAYDADLSAWTEYIPYHFRPNYHGVGTCSMMPKEMGGVVDNAARVYGVQGLRVIDGSIPPTQMSSHVMTVFYAMALKISDAILEDYASMQ

SEQ ID NO: 334 - protein, 581 aa, Aspergillus niger
GIEASLLTDPKDVSGRTVDYIIAGGGLTGLTTAARLTENPNISVLVIESGSYESDRGPIIEDLNAYGDIFGSSVDHAYETVELATNNQTALIRSGNGLGGSTLVNGGTWTRPHKAQIDSWETVFGNEGWNWDNVAAYSLQAERARAPNAKQIAAGHYFNASCHGVNGTVHAGPRDTGDDYSPIVKALMSAVEDRGVPTKKDFGCGDPHGVSMFPNTLHEDQVRSDAAREWLLPNYQRPNLQVLTGQYVGKVLLSQNGTTPRAVGVEFGTHKGNTHNVYAKHEVLLAAGSAVSPTILEYSGIGMKSILEPLGIDTVVDLPVGLNLQDQTTATVRSRITSAGAGQGQAAWFATFNETFGDYSEKAHELLNTKLEQWAEEAVARGGFHNTTALLIQYENYRDWIVNHNVAYSELFLDTAGVASFDVWDLLPFTRGYVHILDKDPYLHHFAYDPQYFLNELDLLGQAAATQLARNISNSGAMQTYFAGETIPGDNLAYDADLSAWTEYIPYHFRPNYHGVGTCSMMPKEMGGVVDNAARVYGVQGLRVIDGSIPPTQMSSHVMTVFYAMALKISDAILEDYASMQ

SEQ ID NO: 335 - protein, 581 aa, Aspergillus niger
GIEASLLTDPKDVSGRTVDYIIAGGGLTGLTTAARLTENPNISVLVIESGSYESDRGPIIEDLNAYGDIFGSSVDHAYETVELATNNQTALIRSGNGLGGSTLVNGGTWTRPHKAQVDSWETVFGNEGWNWDNVAAYSLQAERARAPNAKQIAAGHYFNASCHGVNGTVHAGPRDTGDDYSPIVEALMSAVEDRGVPTKKDFGCGDPHGVSMFPNTLHEDQVRSDAAREWLLPNYQRPNLQVLTGQYVGKVLLSQNGTTPRAVGVEFGTHKGNTHNVYAKHEVLLAAGSAVSPTILEYSGIGMKSILEPLGIDTVVDLPVGLNLQDQTTATVRSRITSAGAGQGQAAWFATFNETFGDYSEKAHELLNTKLEQWAEEAVARGGFHNTTALLIQYENYRDWIVNHNVAYSELFLDTAGVASFDVWDLLPFTRGYVHILDKDPYLHHFAYDPQYFLNELDLLGQAAATQLARNISNSGAMQTYFAGETIPGDNLAYDADLSAWTEYIPYHFRPNYHGVGTCSMMPKEMGGVVDNAARVYGVQGLRVIDGSIPPTQMSSHVMTVFYAMALKISDAILEDYASMQ

SEQ ID NO: 336 - protein, 581 aa, Aspergillus niger
GIEASLLTDPKDVSGRTVDYIIAGGGLTGLTTAARLTENPNISVLVIESGSYESDRGPIIEDLNAYGDIFGSSVDHAYETVELATNNQTALIRSGNGLGGSTLVNGGTWTRPHKAQVDSWETVFGNEGWNWDNVAAYSLQAERARAPNAKQIAAGHYFNASCHGVNGTVHAGPRDTGDDYSPIVKALMEAVEDRGVPTKKDFGCGDPHGVSMFPNTLHEDQVRSDAAREWLLPNYQRPNLQVLTGQYVGKVLLSQNGTTPRAVGVEFGTHKGNTHNVYAKHEVLLAAGSAVSPTILEYSGIGMKSILEPLGIDTVVDLPVGLNLQDQTTATVRSRITSAGAGQGQAAWFATFNETFGDYSEKAHELLNTKLEQWAEEAVARGGFHNTTALLIQYENYRDWIVNHNVAYSELFLDTAGVASFDVWDLLPFTRGYVHILDKDPYLHHFAYDPQYFLNELDLLGQAAATQLARNISNSGAMQTYFAGETIPGDNLAYDADLSAWTEYIPYHFRPNYHGVGTCSMMPKEMGGVVDNAARVYGVQGLRVIDGSIPPTQMSSHVMTVFYAMALKISDAILEDYASMQ

SEQ ID NO: 337 - protein, 581 aa, Aspergillus niger
GIEASLLTDPKDVSGRTVDYIIAGGGLTGLTTAARLTENPNISVLVIESGSYESDRGPIIEDLNAYGDIFGSSVDHAYETVELATNNQTALIRSGNGLGGSTLVNGGTWTRPHKAQVDSWETVFGNEGWNWDNVAAYSLQAERARAPNAKQIAAGHYFNASCHGVNGTVHAGPRDTGDDYSPIVKALMSAVEDRGVPTKKDFGCGDPHGVSMFPNTLHEDQVRSDAAREWLLPNYQRPNLQVLTGQYVGKVLLSQNGTTPRAVGVEFGTHKGNTHNVYAKHEVLLAAGSAVSPTILEYSGIGMKSILEPLGIDTVVDLPVGLNLQDQTTATVRSRITSAGAGQGQAAWFATFNETFGPYSEKAHELLNTKLEQWAEEAVARGGFHNTTALLIQYENYRDWIVNHNVAYSELFLDTAGVASFDVWDLLPFTRGYVHILDKDPYLHHFAYDPQYFLNELDLLGQAAATQLARNISNSGAMQTYFAGETIPGDNLAYDADLSAWTEYIPYHFRPNYHGVGTCSMMPKEMGGVVDNAARVYGVQGLRVIDGSIPPTQMSSHVMTVFYAMALKISDAILEDYASMQ

SEQ ID NO: 338 - protein, 581 aa, Aspergillus niger
GIEASLLTDPKDVSGRTVDYIIAGGGLTGLTTAARLTENPNISVLVIESGSYESDRGPIIEDLNAYGDIFGSSVDHAYETVELATNNQTALIRSGNGLGGSTLVNGGTWTRPHKAQVDSWETVFGNEGWNWDNVAAYSLQAERARAPNAKQIAAGHYFNASCHGVNGTVHAGPRDTGDDYSPIVKALMSAVEDRGVPTKKDFGCGDPHGVSMFPNTLHEDQVRSDAAREWLLPNYQRPNLQVLTGQYVGKVLLSQNGTTPRAVGVEFGTHKGNTHNVYAKHEVLLAAGSAVSPTILEYSGIGMKSILEPLGIDTVVDLPVGLNLQDQTTATVRSRITSAGAGQGQAAWFATFNETFGDYSEKAHELLNTKLEQWAEEAVARGGFHNTTALLIQYENYRDWIVNHNVAYSELFLDTAGVASFDVWDLLPFTRGYVHILDKDPYLHHFAYDPQYFLNELDLLGQAAATQLARNISNSGAMQTYFAGETIPGDNLAYDADLSAWEEYIPYHFRPNYHGVGTCSMMPKEMGGVVDNAARVYGVQGLRVIDGSIPPTQMSSHVMTVFYAMALKISDAILEDYASMQ

SEQ ID NO: 339 - protein, 581 aa, Aspergillus niger
GIEASLLTDPKDVSGRTVDYIIAGGGLTGLTTAARLTENPNISVLVIESGSYESDRGPIIEDLNAYGDIFGSSVDHAYETVELATNNQTALIRSGNGLGGSTLVNGGTWTRPHKAQVDSWETVFGNEGWNWDNVAAYSLQAERARAPNAKQIAAGHYFNASCHGVNGTVHAGPRDTGDDYSPIVKALMSAVEDRGVPTKKDFGCGDPHGVSMFPNTLHEDQVRSDAAREWLLPNYQRPNLQVLTGQYVGKVLLSQNGTTPRAVGVEFGTHKGNTHNVYAKHEVLLAAGSAVSPTILEYSGIGMKSILEPLGIDTVVDLPVGLNLQDQTTATVRSRITSAGAGQGQAAWFATFNETFGDYSEKAHELLNTKLEQWAEEAVARGGFHNTTALLIQYENYRDWIVNHNVAYSELFLDTAGVASFDVWDLLPFTRGYVHILDKDPYLHHFAYDPQYFLNELDLLGQAAATQLARNISNSGAMQTYFAGETIPGDNLAYDADLSAWREYIPYHFRPNYHGVGTCSMMPKEMGGVVDNAARVYGVQGLRVIDGSIPPTQMSSHVMTVFYAMALKISDAILEDYASMQ

SEQ ID NO: 340 - protein, 581 aa, Aspergillus niger
GIEASLLTDPKDVSGRTVDYIIAGGGLTGLTIAARLTENPNISVLVIESGSYESDRGPIIEDLNAYGDIFGSSVDHAYETVELATNNQTALIRSGNGLGGSTLVNGGTWTRPHKAQVDSWETVFGNEGWNWDNVAAYSLQAERARAPNAKQIAAGHYFNASCHGVNGTVHAGPRDTGDDYSPIVKALMSAVEDRGVPTKKDFGCGDPHGVSMFPNTLHEDQVRSDAAREWLLPNYQRPNLQVLTGQYVGKVLLSQNGTTPRAVGVEFGTHKGNTHNVYAKHEVLLAAGSAVSPTILEYSGIGMKSILEPLGIDTVVDLPVGLNLQDQTTATVRSRITSAGAGQGQAAWFATFNETFGDYSEKAHELLNTKLEQWAEEAVARGGFHNTTALLIQYENYRDWIVNHNVAYSELFLDTAGVASFDVWDLLPFTRGYVHILDKDPYLHHFAYDPQYFLNELDLLGQAAATQLARNISNSGAMQTYFAGETIPGDNLAYDADLSAWTEYIPYHFRPNYHGVGTCSMMPKEMGGVVDNAARVYGVQGLRVIDGSIPPTQMSSHVMTVFYAMALKISDAILEDYASMQ

SEQ ID NO: 341 - protein, 581 aa, Aspergillus niger
GIEASLLTDPKDVSGRTFDYIIAGGGLTGLTTAARLTENPNISVLVIESGSYESDRGPIIEDLNAYGDIFGSSVDHAYETVELATNNQTALIRSGNGLGGSTLVNGGTWTRPHKAQVDSWETVFGNEGWNWDNVAAYSLQAERARAPNAKQIAAGHYFNASCHGVNGTVHAGPRDTGDDYSPIVKALMSAVEDRGVPTKKDFGCGDPHGVSMFPNTLHEDQVRSDAAREWLLPNYQRPNLQVLTGQYVGKVLLSQNGTTPRAVGVEFGTHKGNTHNVYAKHEVLLAAGSAVSPTILEYSGIGMKSILEPLGIDTVVDLPVGLNLQDQTTATVRSRITSAGAGQGQAAWFATFNETFGDYSEKAHELLNTKLEQWAEEAVARGGFHNTTALLIQYENYRDWIVNHNVAYSELFLDTAGVASFDVWDLLPFTRGYVHILDKDPYLHHFAYDPQYFLNELDLLGQAAATQLARNISNSGAMQTYFAGETIPGDNLAYDADLSAWTEYIPYHFRPNYHGVGTCSMMPKEMGGVVDNAARVYGVQGLRVIDGSIPPTQMSSHVMTVFYAMALKISDAILEDYASMQ

SEQ ID NO: 342 - protein, 581 aa, Aspergillus niger
GIEASLLTDPKDVSGRTVDYIIAGGGLTGLTTAARLTENPNISVLVIESGSYESDRGPIIEDLNAYGDIFGSSVDHAYETVELATNNQTALIRSGNGLGGSTLVNGGTWTRPHKAQVDSWETVFGNEGWNWDNVAAYSLQAERARAPNAKQIAAGHYFNASCHGVNGTVHAGPRDTGDDYSPIVKALMSAVEDRGVPTKKDFGCGDPHGVSMFPNTLHEDQVRSDAAREWLLPNYQRPNLQVLTGQYVGKVLLSQNGTTPRAVGVEFGTHKGNTHNVYAKHEVLLAAGSAVSPTILEYSGIGMKSILEPLGIDTVVDLPVGLNLQDQTTATVRSRITSAGAGQGQAAWFATFNETFGDYSEKAHELLNTKLPQWAEEAVARGGFHNTTALLIQYENYRDWIVNHNVAYSELFLDTAGVASFDVWDLLPFTRGYVHILDKDPYLHHFAYDPQYFLNELDLLGQAAATQLARNISNSGAMQTYFAGETIPGDNLAYDADLSAWTEYIPYHFRPNYHGVGTCSMMPKEMGGVVDNAARVYGVQGLRVIDGSIPPTQMSSHVMTVFYAMALKISDAILEDYASMQ

SEQ ID NO: 343 - protein, 581 aa, Aspergillus niger
GIEASLLTDPKDVSGRTVDYIIAGGGLTGLTTAARLTENPNISVLVIESGSYESDRGPIIEDLNAYGDIFGSSVDHAYETVELATNNQTALIRSGNGLGGSTLVNGGTWTRPHKAQVDSWETVFGNEGWNWDNVAAYSLQAERARAPNAKQIAAGHYFNASCHGVNGTVHAGPRDTGDDYSPIVKALMSAVEDRGVPTKKDFGCGDPHGVSMFPNTLHEDQVRSDAAREWLLPNYQRPNLQVLTGQYVGKVLLSQNGTTPRAVGVEFGTHKGNTHNVYAKHEVLLAAGSAVSPTILEYSGIGMKSILEPLGIDTVVDLPVGLNLQDQTTATVRSRITSAGAGQGQAAWFATFNETFGDYSEKAHELLNTKLEQWAEEAVARGGFHNTTALLIQYENYRDWIVNHNVAYSELFLDTAGVASFDVWDLLPFTRGYVHILDKDPYLHHFAYDPQYFLNELDLLGQAAATQLARNISNSGAMQTYFAGETIPGDNLAYDADLSAWYEYIPYHFRPNYHGVGTCSMMPKEMGGVVDNAARVYGVQGLRVIDGSIPPTQMSSHVMTVFYAMALKISDAILEDYASMQ

SEQ ID NO: 344 - protein, 581 aa, Aspergillus niger
GIEASLLTDPKDVSGRTVDYIIAGGGLTGLTTAARLTENPNISVLVIESGSYESDRGPIIEDLNAYGDIFGSSVDHAYETVELATNNQTALIRSGNGLGGSTLVNGGTWTRPHKAQVDSWETVFGNEGWNWDNVAAYSLQAERARAPNAKQIAAGHYFNASCHGVNGTVHAGPRDTGDDYSPIVKALMSAVEDRGVPTKKDFGCGDPHGVSMFPNTLHEDQVRSDAAREWLLPNYQRPNLQVLTGQYVGKVLLSQNGTTPRAVGVEFGTHKGNTHNVYAKHEVLLAAGSAVSPTILEYSGIGMPSILEPLGIDTVVDLPVGLNLQDQTTATVRSRITSAGAGQGQAAWFATFNETFGDYSEKAHELLNTKLEQWAEEAVARGGFHNTTALLIQYENYRDWIVNHNVAYSELFLDTAGVASFDVWDLLPFTRGYVHILDKDPYLHHFAYDPQYFLNELDLLGQAAATQLARNISNSGAMQTYFAGETIPGDNLAYDADLSAWTEYIPYHFRPNYHGVGTCSMMPKEMGGVVDNAARVYGVQGLRVIDGSIPPTQMSSHVMTVFYAMALKISDAILEDYASMQ

SEQ ID NO: 345 - protein, 581 aa, Aspergillus niger
GIEASLLTDPKDVSGRTVDYIIAGGGLTGLTTAARLTENPNISVLVIESGSYESDRGPIIEDLNAYGDIFGSSVDHAYETVELATNNQTALIRSGNGLGGSTLVNGGTWTRPHKAQVDSWETVFGNEGWNWDNVAAYSLQAERARAPNAKQIAAGHYFNASCHGVNGTVHAGPRDTGDDYSPIVKALMSAVEDRGVPTKKDFGCGDPHGVSMFPNTLHEDQVRSDAAREWLLPNYQRPNLQVLTGQYVGKVLLSQNGTTPRAVGVEFGTHKGNTHNVYAKHEVLLAAGSAVSPTILEYSGIGMKSILEPLGIDTVVDLPVGLNLQDQTTATVRSRITSAGAGQGQAAWFATFNETFGDYSEKAHELLNTKLEQWAEEAVARGGFHNTTALLIQYENYRDWIVNHNVAYSELFLDTRGVASFDVWDLLPFTRGYVHILDKDPYLHHFAYDPQYFLNELDLLGQAAATQLARNISNSGAMQTYFAGETIPGDNLAYDADLSAWTEYIPYHFRPNYHGVGTCSMMPKEMGGVVDNAARVYGVQGLRVIDGSIPPTQMSSHVMTVFYAMALKISDAILEDYASMQ

SEQ ID NO: 346 - protein, 581 aa, Aspergillus niger
GIEASLLTDPKDVSGRTVDYIIAGGGLTGLTTAARLTENPNISVLVIESGSYESDRGPIIEDLNAYGDIFGSSVDHAYETVELATNNQTALIRSGNGLGGSTLVNGGTWTRPHKAQVDSWETVFGNEGWNWDNVAAYSLQAERARAPNAKQIAAGHYFNASCHGVNGTVHAGPRDTGDDYSPIVKALMSAVEDRGVPTKKDFGCGDPHGVSMFPNTLHEDQVRSDAAREWLLPNYQRPNLQVLTGQYVGKVLLSQNGKTPRAVGVEFGTHKGNTHNVYAKHEVLLAAGSAVSPTILEYSGIGMKSILEPLGIDTVVDLPVGLNLQDQTTATVRSRITSAGAGQGQAAWFATFNETFGDYSEKAHELLNTKLEQWAEEAVARGGFHNTTALLIQYENYRDWIVNHNVAYSELFLDTAGVASFDVWDLLPFTRGYVHILDKDPYLHHFAYDPQYFLNELDLLGQAAATQLARNISNSGAMQTYFAGETIPGDNLAYDADLSAWTEYIPYHFRPNYHGVGTCSMMPKEMGGVVDNAARVYGVQGLRVIDGSIPPTQMSSHVMTVFYAMALKISDAILEDYASMQ

SEQ ID NO: 347 - protein, 581 aa, Aspergillus niger
GIEASLLTDPKDVSGRTVDYIIAGGGLTGLTTAARLTENPNISVLVIESGSYESDRGPIIEDLNRYGDIFGSSVDHAYETVELATNNQTALIRSGNGLGGSTLVNGGTWTRPHKAQVDSWETVFGNEGWNWDNVAAYSLQAERARAPNAKQIAAGHYFNASCHGVNGTVHAGPRDTGDDYSPIVKALMSAVEDRGVPTKKDFGCGDPHGVSMFPNTLHEDQVRSDAAREWLLPNYQRPNLQVLTGQYVGKVLLSQNGTTPRAVGVEFGTHKGNTHNVYAKHEVLLAAGSAVSPTILEYSGIGMKSILEPLGIDTVVDLPVGLNLQDQTTATVRSRITSAGAGQGQAAWFATFNETFGDYSEKAHELLNTKLEQWAEEAVARGGFHNTTALLIQYENYRDWIVNHNVAYSELFLDTAGVASFDVWDLLPFTRGYVHILDKDPYLHHFAYDPQYFLNELDLLGQAAATQLARNISNSGAMQTYFAGETIPGDNLAYDADLSAWTEYIPYHFRPNYHGVGTCSMMPKEMGGVVDNAARVYGVQGLRVIDGSIPPTQMSSHVMTVFYAMALKISDAILEDYASMQ

SEQ ID NO: 348 - protein, 581 aa, Aspergillus niger
GIEASLLTDPKDVSGRTVDYIIAGGGLTGLTLAARLTENPNISVLVIESGSYESDRGPIIEDLNAYGDIFGSSVDHAYETVELATNNQTALIRSGNGLGGSTLVNGGTWTRPHKAQVDSWETVFGNEGWNWDNVAAYSLQAERARAPNAKQIAAGHYFNASCHGVNGTVHAGPRDTGDDYSPIVKALMSAVEDRGVPTKKDFGCGDPHGVSMFPNTLHEDQVRSDAAREWLLPNYQRPNLQVLTGQYVGKVLLSQNGTTPRAVGVEFGTHKGNTHNVYAKHEVLLAAGSAVSPTILEYSGIGMKSILEPLGIDTVVDLPVGLNLQDQTTATVRSRITSAGAGQGQAAWFATFNETFGDYSEKAHELLNTKLEQWAEEAVARGGFHNTTALLIQYENYRDWIVNHNVAYSELFLDTAGVASFDVWDLLPFTRGYVHILDKDPYLHHFAYDPQYFLNELDLLGQAAATQLARNISNSGAMQTYFAGETIPGDNLAYDADLSAWTEYIPYHFRPNYHGVGTCSMMPKEMGGVVDNAARVYGVQGLRVIDGSIPPTQMSSHVMTVFYAMALKISDAILEDYASMQ

SEQ ID NO: 349 - protein, 581 aa, Aspergillus niger
GIEASLLTDPKDVSGRTVDYIIAGGGLTGLTTAARLTENPNISVLVIESGSYESDRGPIIEDLNAYGDIFGSSVDHAYETVELATNNQTALIRSGNGLGGSTLVNGGTWTRPHKAQVDSWETVFGNEGWNWDNVAAYSLQAERARAPNAKQIAAGHYFNASCHGVNGTVHAGPRDTGDDYSPIVKALMSAVEDRGVPTKKDFGCGDPHGVSMFPNTLHEDQVRSDAAREWLLPNYQRPNLQVLTGQYVGKVLLSQNGTTPRAVGVEFGTHKGNTHNVYAKHEVLLAAGSAVSPTILEYSGIGMKSILEPLGIDTVVDLPVGLNLQDQTTATVRSRITSAGAGQGQAAWFATFNETFGDYSEKAHELLNTKLEQWAEEAVARGGFHNTTALLIQYENYRDWIVNHNVAYSELFLDTAGVASFDVWDLLPFTRGYVHILDKDPYLHHFAYDPQYFLNELDLLGQAAATQLARNISNSGAMQTYFAGETIPGDNLAYDADLSAWKEYIPYHFRPNYHGVGTCSMMPKEMGGVVDNAARVYGVQGLRVIDGSIPPTQMSSHVMTVFYAMALKISDAILEDYASMQ

SEQ ID NO: 350 - protein, 581 aa, Aspergillus niger
GIEASLLTDPKDVSGRTVDYIIAGGGLTGLTTAARLTENPNISVLVIESGSYESDRGPIIEDLNAYGDIFGSSVDHAYETVELATNNQTALIRSGNGLGGSTLVNGGTWTRPHKAQVDSWETVFGNEGWNWDNVAAYSLQAERARAPNAKQIAAGHYFNASCHGVNGTVHAGPRDTGDDYSPIVKALMSAVEDRGVPTKKDFGCGDPHGVSMFPNTLHEDQVRSDAAREWLLPNYQRPNLQVLTGQYVGKILLSQNGTTPRAVGVEFGTHKGNTHNVYAKHEVLLAAGSAVSPTILEYSGIGMKSILEPLGIDTVVDLPVGLNLQDQTTATVRSRITSAGAGQGQAAWFATFNETFGDYSEKAHELLNTKLEQWAEEAVARGGFHNTTALLIQYENYRDWIVNHNVAYSELFLDTAGVASFDVWDLLPFTRGYVHILDKDPYLHHFAYDPQYFLNELDLLGQAAATQLARNISNSGAMQTYFAGETIPGDNLAYDADLSAWTEYIPYHFRPNYHGVGTCSMMPKEMGGVVDNAARVYGVQGLRVIDGSIPPTQMSSHVMTVFYAMALKISDAILEDYASMQ

SEQ ID NO: 351 - protein, 581 aa, Aspergillus niger
GIEASLLTDPKDVSGRTVDYIIAGGGLTGLTTAARLTENPNISVLVIESGSYESDRGPIIEDLNAYGDIFGSSVDHAYETVELATNNQTALIRSGNGLGGSTLVNGGTWTRPHKAQVDSWETVFGNEGWNWDNVAAYSLQAERARAPNAKQIAAGHYFNASCHGVNGTVHAGPRDTGDDYSPIVKALMSAVEDRGVPTKKDFGCGDPHGVSMFPNTLHEDQVRSDAAREWLLPNYQRPNLQVLTGQYVGKVLLSQNGTTPRAVGVEFGTHKGNTHNVYAKHEVLLAAGSAVSPTILEYSGIGMKSILEPLGIDTVVDLPVGLNLQDQTTATVRSRITSAGAGQGQAAWFATFNETFGDYSEKAHELLNTKLEQWAEEAVARGGFHNTEALLIQYENYRDWIVNHNVAYSELFLDTAGVASFDVWDLLPFTRGYVHILDKDPYLHHFAYDPQYFLNELDLLGQAAATQLARNISNSGAMQTYFAGETIPGDNLAYDADLSAWTEYIPYHFRPNYHGVGTCSMMPKEMGGVVDNAARVYGVQGLRVIDGSIPPTQMSSHVMTVFYAMALKISDAILEDYASMQ

SEQ ID NO: 352 - protein, 581 aa, Aspergillus niger
GIEASLLTDPKDVSGRTVDYIIAGGGLTGLTTAARLTENPNISVLVIESGSYESDRGPIIEDLNAYGDIFGSSVDHAYETVELATNNQTALIRSGNGLGGSTLVNGGTWTRPHKAQVDSWETVFGNEGWNWDNVAAYSLQAERARAPNAKQIAAGHYFNASCHGVNGTVHAGPRDTGDDYSPIVKALMSAVEDRGVPTKKDFGCGDPHGVSMFPNTLHEDQVRSDAAREWLLPNYQRPNLQVLTGQYVGKVLLSQNGTTPRAVGVEFGTHKGNTHNVYAKHEVLLAAGSAVSPTILEYSGIGMKSILEPLGIDTVVDLPVGLNLQDQTTATVRSRITSAGAGQGQAAWFATFNETFGDYSEKAHELLNTKLEQWAEEAVARGGFHNTTALLIQYENYRDWIVNHNVAYSELFLDTAGVASFDVWDLLPFTRGYVHILDKDPYLHHFAYDPQYFLNELDLLGQAAATQLARNISNSGAMQTYFAGETIPGDNLAYDADLSAWTEYIPYHFRPNYHGVGTCSMMPKEMGGVVDNAARVYGVQGLRVIDGSIPPTQMSSHVMTVFYAMALKISDAILEDYAYMQ

SEQ ID NO: 353 - protein, 581 aa, Aspergillus niger
GIEASLLTDPKDVSGRTVDYIIAGGGLTGLTTAARLTENPNISVLVIESGSYESDRGPIIEDLNAYGDIFGSSVDHAYETVELATNNQTALIRSGNGLGGSTLVNGGTWTRPHKAQVDSWETVFGNEGWNWDNVAAYSLQAERARAPNAKQIAAGHYFNASCHGVNGTVHAGPRDTGDDYSPIVKALMSAVEDRGVPTKKDFGCGDPHGVSMFPNTLHEDQVRSDAAREWLLPNYQRPNLQVLTGQYVGKVLLSQNGTTPRAVGVEFGTHKGNTHYVYAKHEVLLAAGSAVSPTILEYSGIGMKSILEPLGIDTVVDLPVGLNLQDQTTATVRSRITSAGAGQGQAAWFATFNETFGDYSEKAHELLNTKLEQWAEEAVARGGFHNTTALLIQYENYRDWIVNHNVAYSELFLDTAGVASFDVWDLLPFTRGYVHILDKDPYLHHFAYDPQYFLNELDLLGQAAATQLARNISNSGAMQTYFAGETIPGDNLAYDADLSAWTEYIPYHFRPNYHGVGTCSMMPKEMGGVVDNAARVYGVQGLRVIDGSIPPTQMSSHVMTVFYAMALKISDAILEDYASMQ

SEQ ID NO: 354 - protein, 581 aa, Aspergillus niger
GIEASLLTDPKDVSGRTVDYIIAGGGLTGLTTAARLTENPNISVLVIESGSYESDRGPIIEDLNAYGDIFGSSVDHAYETVELATNNQTALIRSGNGLGGSTLVNGGTWTRPHKAQVDSWETVFGNEGWNWDNVAAYSLQAERARAPNAKQIAAGHYFNASCHGVNGTVHAGPRDTGDDYSPIVKALMSAVEDRGVPTKKDFGCGDPHGVSMFPNTLHEDQVRSDAAREWLLPNYQRPNLQVLTGQYVGKVLLSQNGTTPRAVGVEFGTHKGNTHNVYAKHEVLLAAGSAVSPTILEYSGIGMKSILEPLGIDTVVDLPVGLNLQDQTTATVRSRITSAGAGQGQAAWFATFNETFGDYSEKAHELLNTKLEQWAEEAVARGGFHNTTALLIQYENYRDWIVNHNVAYSELFLDTAGVASFDVWDLLPFTRGYVHILDKDPYLHHFAYDPQYFLNELDLLGQAAATQLARNISNSGAMQDYFAGETIPGDNLAYDADLSAWTEYIPYHFRPNYHGVGTCSMMPKEMGGVVDNAARVYGVQGLRVIDGSIPPTQMSSHVMTVFYAMALKISDAILEDYASMQ

SEQ ID NO: 355 - protein, 581 aa, Aspergillus niger
GIEASLLTDPKDVSGRTVDYIIAGGGLTGLTTAARLTENPNISVLVIESGSYESDRGPIIEDLNAYGDIFGSSVDHAYETVELATNNQTALIRSGNGLGGSTLVNGGTWTRPHKAQVDSWETVFGNEGWNWDNVAAYSLQAERARAPNAKQIAAGHYFNASCHGVNGTVHAGPRDTGDDYSPIVKALMSAVEDRGVPTKKDFGCGDPHGVSMFPNTLHEDQVRSDAAREWLLPNYQRPNLQVLTGQYVGKVLLDQNGTTPRAVGVEFGTHKGNTHNVYAKHEVLLAAGSAVSPTILEYSGIGMKSILEPLGIDTVVDLPVGLNLQDQTTATVRSRITSAGAGQGQAAWFATFNETFGDYSEKAHELLNTKLEQWAEEAVARGGFHNTTALLIQYENYRDWIVNHNVAYSELFLDTAGVASFDVWDLLPFTRGYVHILDKDPYLHHFAYDPQYFLNELDLLGQAAATQLARNISNSGAMQTYFAGETIPGDNLAYDADLSAWTEYIPYHFRPNYHGVGTCSMMPKEMGGVVDNAARVYGVQGLRVIDGSIPPTQMSSHVMTVFYAMALKISDAILEDYASMQ

SEQ ID NO: 356 - protein, 581 aa, Aspergillus niger
GIEASLLTDPKDVSGRTVDYIIAGGGLTGLTTAARLTENPNISVLVIESGSYESDRGPIIEDLNAYGDIFGSSVDHAYETVELATNNQTALIRSGNGLGGSTLVNGGTWTRPHKAQVDSWETVFGNEGWNWDNVAAYSLQAERARAPNAKQIAAGHYFNASCHGVNGTVHAGPRDTGDDYSPIVKALMSAVEDRGVPTKKDFGCGDPHGVSMFPNTLHEDQVRSDAAREWLLPNYQRPNLQVLTGQYVGKVLLSQNGTTPRAVGVEFGTHKGNTHNVYAKHEVLLAAGSAVSPTILEYSGIGMKSILEPLGIDTVVDLPVGLNLQDQTTATVRSRITSAGAGQGQAAWFATFNETFGDYSEKAHELLNTKLEQWAEEAVARGGFHNFTALLIQYENYRDWIVNHNVAYSELFLDTAGVASFDVWDLLPFTRGYVHILDKDPYLHHFAYDPQYFLNELDLLGQAAATQLARNISNSGAMQTYFAGETIPGDNLAYDADLSAWTEYIPYHFRPNYHGVGTCSMMPKEMGGVVDNAARVYGVQGLRVIDGSIPPTQMSSHVMTVFYAMALKISDAILEDYASMQ

SEQ ID NO: 357 - protein, 581 aa, Aspergillus niger
GIEASLLTDPKDVSGRTVDYIIAGGGLTGLTTAARLTENPNISVLVIESGSYESDRGPIIEDLNAYGDIFGSSVDHAYETVELATNNQTALIRSGNGLGGSTLVNGGTWTRPHKAQVDSWETVFGNEGWNWDNVAAYSLQAERARAPNAKQIAAGHYFNASCHGVNGTVHAGPRDTGDDYSPIVKALMSAVEDRGVPTKKDFGCGDPHGVSMFPNTLHEDQVRSDAAREWLLPNYQRPNLQVLTGQYVGKVLLSQNGTTPRAVGVEFGTHKGNTHNVYAKHEVLLAAGSAVSPTILEYSGIGMKSILEPLGIDTVVDLPVGLNLQDQTTATVRSRITSAGAGQGQAAWFATFNETFGDYSEKAHELLNTKLEQWAEEAVARGGFHNTTALLIQYENYRDWIVNHNVAYSELFLDTAGVASFDVWDLLPFTRGYVHILDKDPYLHHFAYDPQYFLNELDLLGQAAATQLARNISNSGAMQTYFAGETIPGDNLAYDADLSAWTEYIPYHFRPNYHGVGTCSMMPKEMGGVVDNRARVYGVQGLRVIDGSIPPTQMSSHVMTVFYAMALKISDAILEDYASMQ

SEQ ID NO: 358 - protein, 581 aa, Aspergillus niger
GIEASLLTDPKDVDGRTVDYIIAGGGLTGLTTAARLTENPNISVLVIESGSYESDRGPIIEDLNAYGDIFGSSVDHAYETVELATNNQTALIRSGNGLGGSTLVNGGTWTRPHKAQVDSWETVFGNEGWNWDNVAAYSLQAERARAPNAKQIAAGHYFNASCHGVNGTVHAGPRDTGDDYSPIVKALMSAVEDRGVPTKKDFGCGDPHGVSMFPNTLHEDQVRSDAAREWLLPNYQRPNLQVLTGQYVGKVLLSQNGTTPRAVGVEFGTHKGNTHNVYAKHEVLLAAGSAVSPTILEYSGIGMKSILEPLGIDTVVDLPVGLNLQDQTTATVRSRITSAGAGQGQAAWFATFNETFGDYSEKAHELLNTKLEQWAEEAVARGGFHNTTALLIQYENYRDWIVNHNVAYSELFLDTAGVASFDVWDLLPFTRGYVHILDKDPYLHHFAYDPQYFLNELDLLGQAAATQLARNISNSGAMQTYFAGETIPGDNLAYDADLSAWTEYIPYHFRPNYHGVGTCSMMPKEMGGVVDNAARVYGVQGLRVIDGSIPPTQMSSHVMTVFYAMALKISDAILEDYASMQ

SEQ ID NO: 359 - protein, 581 aa, Aspergillus niger
GIEASLLTDPKDVSGRTVDYIIAGGGLTGLTTAARLTENPNISVLVIESGSYESDRGPIIEDLNAYGDIFGSSVDHAYETVELATNNQTALIRSGNGLGGSTLVNGGTWTRPHKAQVDSWETVFGNEGWNWDNVAAYSLQAERARAPNAKQIAAGHYFNASCHGVNGTVHAGPRDTGDDYSPIVKALMSAVEDRGVPTKKDFGCGDPHGVSMFPNTLHEDQVRSDAAREWLLPNYQRPNLQVLTGQYVGKVLLSQNGTTPRAVGVEFGTHKGNTHEVYAKHEVLLAAGSAVSPTILEYSGIGMKSILEPLGIDTVVDLPVGLNLQDQTTATVRSRITSAGAGQGQAAWFATFNETFGDYSEKAHELLNTKLEQWAEEAVARGGFHNTTALLIQYENYRDWIVNHNVAYSELFLDTAGVASFDVWDLLPFTRGYVHILDKDPYLHHFAYDPQYFLNELDLLGQAAATQLARNISNSGAMQTYFAGETIPGDNLAYDADLSAWTEYIPYHFRPNYHGVGTCSMMPKEMGGVVDNAARVYGVQGLRVIDGSIPPTQMSSHVMTVFYAMALKISDAILEDYASMQ

SEQ ID NO: 360 - protein, 581 aa, Aspergillus niger
GIEASLLTDPKDVSGRTVDYIIAGGGLTGLTTAARLTENPNISVLVIESGSYESDRGPIIEDLNAYGDIFGSSVDHAYETVELATNNQTALIRSGNGLGGSTLVNGGTWTRPHKAQVDSWETVFGNEGWNWDNVAAYSLQAERARAPNAKQIAAGHYFNASCHGVNGTVHAGPRDTGDDYSPIVKALMSAVEDRGVPTKKDFGCGDPHGVSMFPNTLHEDQVRSDAAREWLLPNYQRPNLQVLTGQYVGKVLLSQNGTTPRAVGVEFGTHKGNTHNVYAKHEVLLAAGSAVSPTILEYSGIGMKSILEPLGIDTVVDLPVGLNLQDQTTATVRSRITSAGAGQGQAAWFATFNETFGDYSEKAHELLNTKLEQWAEEAVARGGFHNTTALLIQYENYRDWIVNHNVPYSELFLDTAGVASFDVWDLLPFTRGYVHILDKDPYLHHFAYDPQYFLNELDLLGQAAATQLARNISNSGAMQTYFAGETIPGDNLAYDADLSAWTEYIPYHFRPNYHGVGTCSMMPKEMGGVVDNAARVYGVQGLRVIDGSIPPTQMSSHVMTVFYAMALKISDAILEDYASMQ

SEQ ID NO: 361 - protein, 581 aa, Aspergillus niger
GIEASLLTDPKDVSGRTVDYIIAGGGLTGLTTAARLTENPNISVLVIESGSYESDRGPIIEDLNAYGDIFGSSVDHAYETVELATNNQTALIRSGNGLGGSTLVNGGTWTRPHKAQVDSWETVFGNEGWNWDNVAPYSLQAERARAPNAKQIAAGHYFNASCHGVNGTVHAGPRDTGDDYSPIVKALMSAVEDRGVPTKKDFGCGDPHGVSMFPNTLHEDQVRSDAAREWLLPNYQRPNLQVLTGQYVGKVLLSQNGTTPRAVGVEFGTHKGNTHNVYAKHEVLLAAGSAVSPTILEYSGIGMKSILEPLGIDTVVDLPVGLNLQDQTTATVRSRITSAGAGQGQAAWFATFNETFGDYSEKAHELLNTKLEQWAEEAVARGGFHNTTALLIQYENYRDWIVNHNVAYSELFLDTAGVASFDVWDLLPFTRGYVHILDKDPYLHHFAYDPQYFLNELDLLGQAAATQLARNISNSGAMQTYFAGETIPGDNLAYDADLSAWTEYIPYHFRPNYHGVGTCSMMPKEMGGVVDNAARVYGVQGLRVIDGSIPPTQMSSHVMTVFYAMALKISDAILEDYASMQ

SEQ ID NO: 362 - protein, 581 aa, Aspergillus niger
GIEASLLTDPKDVSGRTVDYIIAGGGLTGLTTAARLTENPNISVLVIESGSYESDRGPIIEDLNAYGDIFGSSVDHAYETVELATNNQTALIRSGNGLGGSTLVNGGTWTRPHKAQVDSWETVFGNEGWNWDNVAAYSLQAERARAPNAKQIAAGHYFNASCHGVNGTVHAGPRDTGDDYSPIVKALMSAVEDRGVPTKEDFGCGDPHGVSMFPNTLHEDQVRSDAAREWLLPNYQRPNLQVLTGQYVGKVLLSQNGTTPRAVGVEFGTHKGNTHNVYAKHEVLLAAGSAVSPTILEYSGIGMKSILEPLGIDTVVDLPVGLNLQDQTTATVRSRITSAGAGQGQAAWFATFNETFGDYSEKAHELLNTKLEQWAEEAVARGGFHNTTALLIQYENYRDWIVNHNVAYSELFLDTAGVASFDVWDLLPFTRGYVHILDKDPYLHHFAYDPQYFLNELDLLGQAAATQLARNISNSGAMQTYFAGETIPGDNLAYDADLSAWTEYIPYHFRPNYHGVGTCSMMPKEMGGVVDNAARVYGVQGLRVIDGSIPPTQMSSHVMTVFYAMALKISDAILEDYASMQ

SEQ ID NO: 363 - protein, 581 aa, Aspergillus niger
GIEASLLTDPKDVSGRTVDYIIAGGGLTGLTTAARLTENPNISVLVIESGSYESDRGPIIEDLNAYGDIFGSSVDHAYETVELATNNQTALIRSGNGLGGSTLVNGGTWTRPHKAQVDSWETVFGNEGWNWDNVAAYSLQAERARAPNAKQIAAGHYFNASCHGVNGTVHAGPRDTGDDYSPIVKALMSAVEDRGVPTKKDFGCGDPHGVSMFPNTLHEDQVRSDAAREWLLPNYQRPNLQVLTGQYVGKVLLSQNGTTPRAVGVEFGTHKGNTYNVYAKHEVLLAAGSAVSPTILEYSGIGMKSILEPLGIDTVVDLPVGLNLQDQTTATVRSRITSAGAGQGQAAWFATFNETFGDYSEKAHELLNTKLEQWAEEAVARGGFHNTTALLIQYENYRDWIVNHNVAYSELFLDTAGVASFDVWDLLPFTRGYVHILDKDPYLHHFAYDPQYFLNELDLLGQAAATQLARNISNSGAMQTYFAGETIPGDNLAYDADLSAWTEYIPYHFRPNYHGVGTCSMMPKEMGGVVDNAARVYGVQGLRVIDGSIPPTQMSSHVMTVFYAMALKISDAILEDYASMQ

SEQ ID NO: 364 - protein, 581 aa, Aspergillus niger
GIEASLLTDPKDVSGRTVDYIIAGGGLTGLTTAARLTENPNISVLVIESGSYESDRGPIIEDLNNYGDIFGSSVDHAYETVELATNNQTALIRSGNGLGGSTLVNGGTWTRPHKAQVDSWETVFGNEGWNWDNVAAYSLQAERARAPNAKQIAAGHYFNASCHGVNGTVHAGPRDTGDDYSPIVKALMSAVEDRGVPTKKDFGCGDPHGVSMFPNTLHEDQVRSDAAREWLLPNYQRPNLQVLTGQYVGKVLLSQNGTTPRAVGVEFGTHKGNTHNVYAKHEVLLAAGSAVSPTILEYSGIGMKSILEPLGIDTVVDLPVGLNLQDQTTATVRSRITSAGAGQGQAAWFATFNETFGDYSEKAHELLNTKLEQWAEEAVARGGFHNTTALLIQYENYRDWIVNHNVAYSELFLDTAGVASFDVWDLLPFTRGYVHILDKDPYLHHFAYDPQYFLNELDLLGQAAATQLARNISNSGAMQTYFAGETIPGDNLAYDADLSAWTEYIPYHFRPNYHGVGTCSMMPKEMGGVVDNAARVYGVQGLRVIDGSIPPTQMSSHVMTVFYAMALKISDAILEDYASMQ

SEQ ID NO: 365 - protein, 581 aa, Aspergillus niger
GIEASLLTDPKDVSGRTVDYIIAGGGLTGLTTAARLTENPNISVLVIESGSYESDRGPIIEDLNAYGDIFGSSVDHAYETVELATNNQTALIRSGNGLGGSTLVNGGTWTRPHKAQVDSWETVFGNEGWNWDNVAAYSLQAERARAPNAKQIAAGHYFNASCHGVNGTVHAGPRDTGDDYSPIVKALMSAVEDRGVPTKKDFGCGDPHGVSMFPNTLHEDQVRSDAAREWLLPNYQRPNLQVLTGQYVGKVLLSQNGETPRAVGVEFGTHKGNTHNVYAKHEVLLAAGSAVSPTILEYSGIGMKSILEPLGIDTVVDLPVGLNLQDQTTATVRSRITSAGAGQGQAAWFATFNETFGDYSEKAHELLNTKLEQWAEEAVARGGFHNTTALLIQYENYRDWIVNHNVAYSELFLDTAGVASFDVWDLLPFTRGYVHILDKDPYLHHFAYDPQYFLNELDLLGQAAATQLARNISNSGAMQTYFAGETIPGDNLAYDADLSAWTEYIPYHFRPNYHGVGTCSMMPKEMGGVVDNAARVYGVQGLRVIDGSIPPTQMSSHVMTVFYAMALKISDAILEDYASMQ

SEQ ID NO: 366 - protein, 581 aa, Aspergillus niger
GIEASLLTDPKDVSGRTVDYIIAGGGLTGLTTAARLTENPNISVLVIESGSYESDRGPIIEDLNAYGDIFGSSVDHAYETVELATNNQTALIRSGNGLGGSTLVNGGTWTRPHKAQVDSWETVFGNEGWNWDNVAAYSLQAERARAPNAKQIAAGHYFNASCHGVNGTVHAGPRDTGDDYSPIVKALMSAVEDRGVPTKKDFGCGDPHGVSMFPNTLHEDQVRSDAAREWLLPNYQRPNLQVLTGQYVGKVLLSQNGTTPRAVGVEFGTHKGNTHNVYAKHEVLLAAGSAVSPTILEYSGIGMKSILEPLGIDTVVDLPVGLNLQDQTTATVRSRITSDGAGQGQAAWFATFNETFGDYSEKAHELLNTKLEQWAEEAVARGGFHNTTALLIQYENYRDWIVNHNVAYSELFLDTAGVASFDVWDLLPFTRGYVHILDKDPYLHHFAYDPQYFLNELDLLGQAAATQLARNISNSGAMQTYFAGETIPGDNLAYDADLSAWTEYIPYHFRPNYHGVGTCSMMPKEMGGVVDNAARVYGVQGLRVIDGSIPPTQMSSHVMTVFYAMALKISDAILEDYASMQ

SEQ ID NO: 367 - protein, 581 aa, Aspergillus niger
GIEASLLTDPKDVSGRTVDYIIAGGGLTGLTTAARLTENPNISVLVIESGSYESDRGPIIEDLNAYGDIFGSSVDHAYETVELATNNQTALIRSGNGLGGSTLINGGTWTRPHKAQVDSWETVFGNEGWNWDNVAAYSLQAERARAPNAKQIAAGHYFNASCHGVNGTVHAGPRDTGDDYSPIVKALMSAVEDRGVPTKKDFGCGDPHGVSMFPNTLHEDQVRSDAAREWLLPNYQRPNLQVLTGQYVGKVLLSQNGTTPRAVGVEFGTHKGNTHNVYAKHEVLLAAGSAVSPTILEYSGIGMKSILEPLGIDTVVDLPVGLNLQDQTTATVRSRITSAGAGQGQAAWFATFNETFGDYSEKAHELLNTKLEQWAEEAVARGGFHNTTALLIQYENYRDWIVNHNVAYSELFLDTAGVASFDVWDLLPFTRGYVHILDKDPYLHHFAYDPQYFLNELDLLGQAAATQLARNISNSGAMQTYFAGETIPGDNLAYDADLSAWTEYIPYHFRPNYHGVGTCSMMPKEMGGVVDNAARVYGVQGLRVIDGSIPPTQMSSHVMTVFYAMALKISDAILEDYASMQ

SEQ ID NO: 368 - protein, 581 aa, Aspergillus niger
GIEASLLTDPKDVSGRTVDYIIAGGGLTGLTTAARLTENPNISVLVIESGSYESDRGPIIEDLNAYGDIFGSSVDHAYETVELATNNQTALIRSGNGLGGSTLVNGGTWTRPHKAQVDSWETVFGNEGWNWDNVAAYSLQAERARAPNAKQIAAGHYFNASCHGVNGTVHAGPRDTGDDYSPIVKALMSAVEDRGVPTKKDFGCGDPHGVSMFPNTLHEDQVRSDAAREWLLPNYQRPNLQVLTGQYVGKVLLSQNGTTPRAVGVEFGTHKGNTHNVYAKHEVLLAAGSAVSPTILEYSGIGDKSILEPLGIDTVVDLPVGLNLQDQTTATVRSRITSAGAGQGQAAWFATFNETFGDYSEKAHELLNTKLEQWAEEAVARGGFHNTTALLIQYENYRDWIVNHNVAYSELFLDTAGVASFDVWDLLPFTRGYVHILDKDPYLHHFAYDPQYFLNELDLLGQAAATQLARNISNSGAMQTYFAGETIPGDNLAYDADLSAWTEYIPYHFRPNYHGVGTCSMMPKEMGGVVDNAARVYGVQGLRVIDGSIPPTQMSSHVMTVFYAMALKISDAILEDYASMQ

SEQ ID NO: 369 - protein, 581 aa, Aspergillus niger
GIEASLLTDPKDVSGRTVDYIIAGGGLTGLTTAARLTENPNISVLVIESGSYESDRGPIIEDLNAYGDIFGSSVDHAYETVELATNNQTALIRSGNGLGGSTLVNGGTWTRPHKAQVDSWETVFGNEGWNWDNVAAYSLQAERARAPNAKQIAAGHYFNASCHGVNGTVHAGPRDTGDDYSPIVKALMSAVEDRGVPTKKDFGCGDPHGVSMFPNTLHEDQVRSDAAREWLLPNYQRPNLQVLTGQYVGKVLLSQNGTTPRAVGVEFGTHKGNTHNVYAKHEVLLAAGSAVSPTILEYSGIGMKDILEPLGIDTVVDLPVGLNLQDQTTATVRSRITSAGAGQGQAAWFATFNETFGDYSEKAHELLNTKLEQWAEEAVARGGFHNTTALLIQYENYRDWIVNHNVAYSELFLDTAGVASFDVWDLLPFTRGYVHILDKDPYLHHFAYDPQYFLNELDLLGQAAATQLARNISNSGAMQTYFAGETIPGDNLAYDADLSAWTEYIPYHFRPNYHGVGTCSMMPKEMGGVVDNAARVYGVQGLRVIDGSIPPTQMSSHVMTVFYAMALKISDAILEDYASMQ

SEQ ID NO: 370 - protein, 581 aa, Aspergillus niger
GIEASLLTDPKDVSGRTVDYIIAGGGLTGLTTAARLTENPNISVLVIESGSYESDRGPIIEDLNAYGDIFGSSVDHAYETVELATNNQTALIRSGNGLGGSTLVNGGTWTRPHKAQVDSWETVFGNEGWNWDNLAAYSLQAERARAPNAKQIAAGHYFNASCHGVNGTVHAGPRDTGDDYSPIVKALMSAVEDRGVPTKKDFGCGDPHGVSMFPNTLHEDQVRSDAAREWLLPNYQRPNLQVLTGQYVGKVLLSQNGTTPRAVGVEFGTHKGNTHNVYAKHEVLLAAGSAVSPTILEYSGIGMKSILEPLGIDTVVDLPVGLNLQDQTTATVRSRITSAGAGQGQAAWFATFNETFGDYSEKAHELLNTKLEQWAEEAVARGGFHNTTALLIQYENYRDWIVNHNVAYSELFLDTAGVASFDVWDLLPFTRGYVHILDKDPYLHHFAYDPQYFLNELDLLGQAAATQLARNISNSGAMQTYFAGETIPGDNLAYDADLSAWTEYIPYHFRPNYHGVGTCSMMPKEMGGVVDNAARVYGVQGLRVIDGSIPPTQMSSHVMTVFYAMALKISDAILEDYASMQ

SEQ ID NO: 371 - protein, 605 aa, Aspergillus niger
MQTLLVSSLVVSLAAALPHYIRSNGIEASLLTDPKDVSGRTVDYIIAGGGLTGLTTAARLTENPNISVLVIESGSYESDRGPIIEDLNAYGDIFGSSVDHAYETVELATNNQTALIRSGNGLGGSTLVNGGXWTRPHKAQVDSWETVFGNEGWNWDNVAAYSLQAERARAPNAKQIAAGHYFNASCHGVNGTVHAGPRDTGDDYSPIVKALMSAVEDRGVPTKKDFGCGDPHGVSMFPNTLHEDQVRSDAAREWLLPNYQRPNLQVLTGQYVGKVLLSQNGTTPRAVGVEFGTHKGNTHNVYAKHEVLLAAGSAVSPTILEYSGIGMKSILEPLGIDTVVDLPVGLNLQDQTTATVRSRITSAGAGQGQAAWXATFNETFGDYSEKAHELLNTKLEQWAEEAVARGGFHNTTALLIQYENYRDWIVNHNVAYSELFLDTAGVASFDVWDLLPFTRGYVHILDKDPYLHHFAYDPQYFLNELDLLGQAAATQLARNISNSGAMQTYFAGETIPGDNLAYDADLSAWTEYIPYHFRPNYHGVGTCSMMPKEMGGVVDNAARVYGVQGLRVIDGSIPPTQMSSHVMTVFYAMALKISDAILEDYASMQ

SEQ ID NO: 372 - protein, 589 aa, Aspergillus niger
LPHYIRSNGIEASLLTDPKDVSGRTVDYLIAGGGLTGLTTAARLTENPNISVLVIESGSYESDRGPIIEDLNAYGDIFGSSVDHAYETVELATNNQTALIRSGNGLGGSTLVNGGTWTRPHKAQVDSWETVFGNEGWNWDNVPAYSLQAERARAPNAKQIAAGHYFNASCHGTNGTVHAGPRDTGDDYSPIVKALMSAVEDRGVPTKKDFGCGDPHGVSMFPNTLHEDQVRSDAAREWLLPNYQRPNLQVLTGQYVGKVLLSQNGTTPRAVGVEFGTHKGNTHNVYAEHEVLLAAGSAVSPTILEYSGIGMKSILEPLGIDTVVDLPVGLNLQDQTTATVRSRITSAGAGQGQAAWFATFNETFGDYSEKAHELLNTKLEQWAEEAVARRGFHNTTALLIQYENYRDWIVNHNVAYSELFLDTAGVASFDVWDLLPFTRGYVHILDKDPYLHHFAYDPQYILNELDLLGQAAATQLARNISNSGAMQTYFAGETIPGDNLAYDADLSAWTEYIPYHFRPNYHGVGTCSMMPKEMGGVVDNAARVYGVQGLRVIDGSIPPTQMSSHVMTVFYAMALKISDAILEDYASMQ

SEQ ID NO: 373 - protein, 589 aa, Aspergillus niger
LPHYIRSNGIEASLLTDPKDVSGRTVDYIIAGGGLTGLTTAARLTENPNISVLVIESGSYESDRGPIIEDLNAYGDIFGSSVDHAYETVELATNNQTALIRSGNGLGGSTLVNGGTWTRPHKAQVDSWETVFGNEGWNWDNVPAYSLQAERARAPNAKQIAAGHYFNASCHGTNGTVHAGPRDTGDDYSPIVKALMSAVEDRGVPTKKDFGCGDPHGVSMFPNTLHEDQVRSDAAREWLLDNYQRPNLQVLTGQYVGKVLLSQNGTTPRAVGVEFGTHKGNTHNVYAEHEVLLAAGSAVSPTILEYSGIGMKSILEPLGIDTVVDLPVGLNLQDQTTATVRSRITSAGAGQGQAAWFASFNETFGDYSEKAHELLNTKLEQWAEEAVARGGFHNTTALLIQYENYRDWIVNHNVAYSELFLDTAGVASFDVWDLLPFTRGYVHILDKDPYLHHFAYDPQYILNELDLLGQAAATQLARNISNSGAMQTYFAGETIPGDNLAYDADLSAWTEYIPYHFRPNYHGVGTCSMMPKEMGGVVDNAARVYGVQGLRVIDGSIPPTQMSSHVMTVFYAMALKISDAILEDYASMQ

SEQ ID NO: 374 - protein, 589 aa, Aspergillus niger
LPHYIRSNGIEASLLTDPKDVSGRTVDYIIAGGGLTGLKTAARLTENPNISVLVIESGSYESDRGPIIEDLNAYGDIFGSSVDHAYETVELATNNQTALIRSGNGLGGSTLINGGTWTRPHKAQVDSWETVFGNEGWNWDNVAAYSLQAERARAPNAKQIAAGHYFNASCHGVNGTVHAGPRDTGDDYSPIVKALMSAVEDRGVPTKKDFGCGDPHGVSMFPNTLHEDQVRSDAAREWLLPNYQRPNLQVLTGQYVGKVLLSQNGTTPRAVGVEFGTHKGNTHNVYAKHEVLLAAGSAVSPTILEYSGIGMKSILEPLGIDTVVDLPVGLNLQDQTTATVRSRITSAGAGQGQAAWFATFNETFGDYSEKAHELLNTKLEQWAEEAVARGGFHNTTALLIQYENYRDWIVNHNVAYSELFLDTAGVASFDVWDLLPFTRGYVHILDKDPYLHHFAYDPQYFLNELDLLGQAAATQLARNISNSGAMQTYFAGETIPGDNLAYDADLSAWTEYIPYHFRPNYHGVGTCSMMPKEMGGVVDNAARVYGVQGLRVIDGSIPPTQMSSHVMTVFYAMALKISDAILEDYASMQ

SEQ ID NO: 375 - protein, 589 aa, Aspergillus niger
LPHYIRSNGIEASLLTDPKDVSGRTVDYIIAGGGLTGLTTAARLTENPNISVLVIESGSYESDRGPIIEDLNAYGDIFGSSVDHAYETVELAPNNQTALIRSGNGLGGSTLINGGTWTRPHKAQVDSWETVFGNEGWNWDNVAAYSLQAERARAPNAKQIAAGHYFNASCHGVNGTVHAGPRDTGDDYSPIVKALMSAVEDRGVPTKKDFGCGDPHGVSMFPNTLHEDQVRSDAAREWLLPNYQRPNLQVLTGQYVGKVLLSQNGTTPRAVGVEFGTHKGNTHNVYAKHEVLLAAGSAVSPTILEYSGIGMKSILEPLGIDTVVDLPVGLNLQDQTTATVRSRITSAGAGQGQAAWFATFNETFGDYSEKAHELLNTKLEQWAEEAVARGGFHNTTALLIQYENYRDWIVNHNVAYSELFLDTAGVASFDVWDLLPFTRGYVHILDKDPYLHHFAYDPQYFLNELDLLGQAAATQLARNISNSGAMQTYFAGETIPGDNLAYDADLSAWTEYIPYHFRPNYHGVGTCSMMPKEMGGVVDNAARVYGVQGLRVIDGSIPPTQMSSHVMTVFYAMALKISDAILEDYASMQ

SEQ ID NO: 376 - protein, 589 aa, Aspergillus niger
LPHYIRSNGIEASLLTDPKDVSGRTVDYIIAGGGLTGLTTAARLTENPNISVLVIESGSYESDRGPIIEDLNAYGDIFGSSVDHAYETVELATNNQTALIRSGNGLGGSTLVNGGTWTRPHNAQVDSWETVFGNEGWNWDNVAAYSLQAERARAPNAKQIAAGHYFNASCHGTNGTVHAGPRDTGDDYSPIVKALMSAVEDRGVPTKKDFGCGDPHGVSMFPNTLHEDQVRSDAAREWLLPNYQRPNLQVLTGQYVGKVLLSPNGTTPRAVGVEFGTHKGNTHNVYAEHEVLLAAGSAVSPTILEYSGIGMKSILEPLGIDTVVDLPVGLNLQDQTTATVSSRITSAGAGQGQAAWFATFNETFGDYSEKAHELLNTKLEQWAEEAVARGGFHNTTALLIQYENYRDWIVNHNVAYSELFLDTAGVASFDVWDLLPFTRGYVHILDKDPYLHHFAYDPQYFLNELDLLGQAAATQLARNISNSGAMQTYFAEETIPGDNLAYDADLSAWTEYIPYHFRPNYHGVGTCSMMPKEMGGVVDNAARVYGVQGLRVIDGSIPPTQMSSHVMTVFYAMALKISDAILEDYASMQ

SEQ ID NO: 377 - protein, 585 aa, Aspergillus niger
YVSNGIEASLLTDPKDVSGRTVDYIIAGGGLTGLTTAARLTENPNISVLVIESGSYESDRGPIIEDLNAYGDIFGSSVDHAYETVEPATNNQTALIRSGNGLGGSTLVNGGTWTRPHKAQVDSWETVFGNEGWNWDNVAAYSLQAERARAPNAKQIAAGHYFNASCHGVNGTVHAGPRDTGDDYSPIVKALMSAVEDRGVPTKKDFGCGDPHGVSMFPNTLHEDQVRSDAAREWLLPNYQRPNLQVLTGQYVGKVLLSQNGTTPRAVGVEFGTHKGNTHNVYAKHEVLLAAGSAVSPTILEYSGIGMKSILEPLGIDTVVDLPVGLNLQDQTTATVRSRITSAGAGQGQAAWFATFNETFGDYSEKAHELLNTKLEQWAEEAVARGGFHNTTALLIQYENYRDWIVNHNVAYSELFLDTAGVASFDVWDLLPFTRGYVHILDKDPYLHHFAYDPQYFLNELDLLGQAAATQLARNISNSGAMQTYFAGETIPGDNLAYDADLSAWTEYIPYHFRPNYHGVGTCSMMPKEMGGVVDNAARVYGVQGLRVIDGSIPPTQMSSHVMTVFYAMALKISDAILEDYASMQ

SEQ ID NO: 378 - protein, 583 aa, Aspergillus niger
SNGIEASLLTDPKDVSGRTVDYIIAGGGLTGLTTAARLTENPNISVLVIESGSYESDRGPIIEDLNAYGDIFGSSVDHAYETVELATNNQTALIRSGNGLGGSTLVNGGTWTRPHKAQVDSWETVFGNEGWNWDNVAAYSLQAERARAPNAKQIAAGHYFNASCHGVNGTVHAGPRDTGDDYSPIVKALMSAVEDRGVPTKKDFGCGDPHGVSMFPNTLHEDQVRSDAAREWLLPNYQRPNLQVLTGQYVGKVLLSQNGTTPRAVGVEFGTHKGNTHNVYAKHEVLLAAGSAVSPTILEYSGIGMKSILEPLGIDTVVDLPVGLNLQDQTTATVRSRITSAGAGQGQAAWFATFNETFGDYSEKAHELLNTKLEQWAEEAVARGGFHNTTALLIQYENYRNWIVNHNVAYSELFLDTAGVASFDVWDLLPFTRGYVHILDKDPYLHHFAYDPQYFLNELDLLGQAAATQLARNISNSGAMQTYFAGETIPGDNLAYDADLSAWTEYIPYHFRPNYHGVGTCSMMPKEMGGVVDNAARVYGVQGLRVIDGSIPPTQMSSHVMTVFYAMALKISDVILEDYASMQ

SEQ ID NO: 379 - protein, 583 aa, Aspergillus niger
SNGIEASLLTDPKDVSGRTWDYIIAGGGLWGLTTAARLTENPNISVLVIESGSYESDRGPIIEDLNAYGDIFGSSVDHAYETVELATNNQTALIRSGNGLGGSTLVNGGTWTRPHKAQVDSWETVFGNEGWNWDNVAAYSLQAERARAPNAKQIAAGHYFNASCHGVNGTVHAGPRDTGDDYSPIVKALMSAVEDRGVPTKKDFGCGDPHGVSMFPNTLHEDQVRSDAAREWLLPNYQRPNLQVLTGQYVGKVLLSQNGTTPRAVGVEFGTHKGNTHNVYAKHEVLLAAGSAVSPTILEYSGIGMKSILEPLGIDTVVDLPVGLNLQDQTTATVRSRITSAGAGQGQAAWFATFNETFGDYSEKAHELLNTKLEQWAEEAVARGGFHNTTALLIQYENYRDWIVNHNVAYSELFLDTAGVASFDVWDLLPFTRGYVHILDKDPYLHHFAYDPQYFLNELDLLGQAAATQLARNISNSGAMQTYFAGETIPGDNLAYDADLSAWTEYIPYHFRPNYHGVGTCSMMPKEMGGVVDNAARVYGVQGLRVIDGSIPPTQMSSHVMTVFYAMALKISDAILEDYASMQ

SEQ ID NO: 380 - protein, 583 aa, Aspergillus niger
SNGIEASLLTDPKDVSGRTVDYIIAGGGLTGLTTAARLTENPNISVLVIESCSYESDRGPIIEDLNAYGDIFGSSVDHAYETVELATNNQTALIRSGNCLGGSTLVNGGTWTRPHKAQVDSWETVFGNEGWNWDNVAAYSLQAERARAPNAKQIAAGHYFNASCHGVNGTVHAGPRDTGDDYSPIVKALMSAVEDRGVPTKKDFGCGDPHGVSMFPNTLHEDQVRSDAAREWLLPNYQRPNLQVLTGQYVGKVLLSQNGTTPRAVGVEFGTHKGNTHNVYAKHEVLLAAGSAVSPTILEYSGIGMKSILEPLGIDTVVDLPVGLNLQDQTTATVRSRITSAGAGQGQAAWFATFNETFGDYSEKAHELLNTKLEQWAEEAVARGGFHNTTALLIQYENYRDWIVNHNVAYSELFLDTAGVASFDVWDLLPFTRGYVHILDKDPYLHHFAYDPQYFLNELDLLGQAAATQLARNISNSGAMQTYFAGETIPGDNLAYDADLSAWTEYIPYHFRPNYHGVGTCSMMPKEMGGVVDNAARVYGVQGLRVIDGSIPPTQMSSHVMTVFYAMALKISDAILEDYASMQ

SEQ ID NO: 381 - protein, 583 aa, Aspergillus niger
SNGIEASLLTDPKDVSGRTVDYIIAGGGLTGLTTAARLTENPNISVLVIESGSYESDRGPIIEDLNAYGDIFGSSVDHAYETVELACNNQTALIRSGNGLGGSTLVNGGTWTRPHKAQVDSWETVFGNEGWNWDNVAAYSLQAERARAPNAKQIAAGHYFNASCHGVNGTVHAGPRDTGDDYSPIVKALMSAVEDRGVPTKKDFGCGDPHGVSMFPNTLHEDQVRSDAAREWLLPNYQRPNLQVLTGQYVGKVLLSQNGTTPRAVGVEFGTHKGNTHNVYAKHEVLLAAGSAVSPTILEYSGIGMKSILEPLGIDTVVDLPVGLNLQDQTTATVRSRITSAGAGQGQAAWFATFNETFGDYSEKAHELLNTKLEQWAEEAVARGGFHNTTALLIQYENYRDWIVNHNVAYSELFLDTAGVASFDVWDLLPFTRGYVHILDKDPYLHHFAYDPQYFLNELDLLGQAAATQLARNISNSGAMQTYFAGETIPGDNLAYDADLSAWTEYICYHFRPNYHGVGTCSMMPKEMGGVVDNAARVYGVQGLRVIDGSIPPTQMSSHVMTVFYAMALKISDAILEDYASMQ

SEQ ID NO: 382 - protein, 583 aa, Aspergillus niger
SNGIEASLLTDPKDVSGRTCDYIIAGGGLTGLTTAARLTENPNICVLVIESGSYESDRGPIIEDLNAYGDIFGSSVDHAYETVELATNNQTALIRSGNGLGGSTLVNGGTWTRPHKAQVDSWETVFGNEGWNWDNVAAYSLQAERARAPNAKQIAAGHYFNASCHGVNGTVHAGPRDTGDDYSPIVKALMSAVEDRGVPTKKDFGCGDPHGVSMFPNTLHEDQVRSDAAREWLLPNYQRPNLQVLTGQYVGKVLLSQNGTTPRAVGVEFGTHKGNTHNVYAKHEVLLAAGSAVSPTILEYSGIGMKSILEPLGIDTVVDLPVGLNLQDQTTATVRSRITSAGAGQGQAAWFATFNETFGDYSEKAHELLNTKLEQWAEEAVARGGFHNTTALLIQYENYRDWIVNHNVAYSELFLDTAGVASFDVWDLLPFTRGYVHILDKDPYLHHFAYDPQYFLNELDLLGQAAATQLARNISNSGAMQTYFAGETIPGDNLAYDADLSAWTEYIPYHFRPNYHGVGTCSMMPKEMGGVVDNAARVYGVQGLRVIDGSIPPTQMSSHVMTVFYAMALKISDAILEDYASMQ

SEQ ID NO: 383 - protein, 583 aa, Aspergillus niger
SNGIEASLLTDPKDVSGRTVDYIIAGGGLVGLTTAARLTENPNISVLVIESGSYESDRGPIIEDLNAYGDIFGSSVDHAYETVELATNNQTALVRSGNGLGGSTLVNGGTWTRPHKAQVDSWETVFGNEGWNWDNVAAYSLQAERARAPNAKQIAAGHYFNASCHGVNGTVHAGPRDTGDDYSPIVKALMSAVEDRGVPTKKDFGCGDPHGVSMFPNTLHEDQVRSDAAREWLLPNYQRPNLQVLTGQYVGKVLLSQNGTTPRAVGVEFGTHKGNTHNVYAKHEVLLAAGSAVSPTILEYSGIGMKSILEPLGIDTVVDLPVGLNLQDQTTATVRSRITSAGAGQGQAAWFATFNETFGDYSEKAHELLNTKLEQWAEEAVARGGFHNTTALLIQYENYRDWIVNHNVAYSELFLDTAGVASFDVWDLLPFTRGYVHILDKDPYLHHFAYDPQYFLNELDLLGQAAATQLARNISNSGAMQTYFAGETIPGDNLAYDADLSAWTEYIPYHFRPNYHGVGTCSMMPKEMGGVVDNAARVYGVQGLRVIDGSIPPTQMSSHVMTVFYAMALKISDAILEDYASMQ

SEQ ID NO: 384 - protein, 583 aa, Aspergillus niger
SNGIEASLLTDPKDVSGRTVDYIIAGGGLTGLTTAARLCENPNISVLVIESGSYESDRGPIIEDLNAYGDIFGSSVDHAYETVELATNNQTALIRSGNGLGGSTLVNGGTWTRPHKAQVDSWETVFGNEGWNWDNVAAYSLQAERARAPNAKQIAAGHYFNASCHGVNGTVHAGPRDTGDDYSPIVKALMSAVEDRGVPTKKDFGCGDPHGVSMFPNTLHEDQVRSDAAREWLLPNYQRPNCQVLTGQYVGKVLLSQNGTTPRAVGVEFGTHKGNTHNVYAKHEVLLAAGSAVSPTILEYSGIGMKSILEPLGIDTVVDLPVGLNLQDQTTATVRSRITSAGAGQGQAAWFATFNETFGDYSEKAHELLNTKLEQWAEEAVARGGFHNTTALLIQYENYRDWIVNHNVAYSELFLDTAGVASFDVWDLLPFTRGYVHILDKDPYLHHFAYDPQYFLNELDLLGQAAATQLARNISNSGAMQTYFAGETIPGDNLAYDADLSAWTEYIPYHFRPNYHGVGTCSMMPKEMGGVVDNAARVYGVQGLRVIDGSIPPTQMSSHVMTVFYAMALKISDAILEDYASMQ

SEQ ID NO: 385 - protein, 583 aa, Aspergillus niger
SNGIEASLLTDPKDVSGRTVDYIIAGGGLTGLTTAARLTENPNISVLVIESGCYESDRGPIIEDLNAYGDIFGSSVDHAYETVELATNNQTALIRSGNGLGGSTLVNGGTWTRPHKAQVDSWETVFGNEGWNWDNVAAYSLQAERARAPNAKQIAAGHYFNASCHGVNGTVHAGPRDTGDDYSPIVKALMSAVEDRGVPTKKDFGCGDPHGVSMFPNTLHEDQVRSDAAREWLLPNYQRPNLQVLCGQYVGKVLLSQNGTTPRAVGVEFGTHKGNTHNVYAKHEVLLAAGSAVSPTILEYSGIGMKSILEPLGIDTVVDLPVGLNLQDQTTATVRSRITSAGAGQGQAAWFATFNETFGDYSEKAHELLNTKLEQWAEEAVARGGFHNTTALLIQYENYRDWIVNHNVAYSELFLDTAGVASFDVWDLLPFTRGYVHILDKDPYLHHFAYDPQYFLNELDLLGQAAATQLARNISNSGAMQTYFAGETIPGDNLAYDADLSAWTEYIPYHFRPNYHGVGTCSMMPKEMGGVVDNAARVYGVQGLRVIDGSIPPTQMSSHVMTVFYAMALKISDAILEDYASMQ

SEQ ID NO: 386 - protein, 583 aa, Aspergillus niger
SNGIEASLLTDPKDVSGRTVDYIIAGGGLTGLTTAARLTENPNISVLVIESGSYESDRGPIIEDLNAYGDIFGSSVDHAYETVELATNNQTALIRSGNGLGGSTLVNGGTWTRPHKAQVDSWETVFGNEGWNWDNVAAYSLQAERARAPNAKQIAAGHYFNASCHGVNGTVHAGPRDTGDDYSPIVKALMCAVEDRGVPTKKDFGCGDPHGVSMFPNTLHEDQVRSDAAREWLLPNYQRPNLQVLTGQYVGKVLLSQNGTTPRAVGVEFGTHKGNTHNVYAKHEVLLAAGSAVSPTILEYSGIGMKSILEPLGIDTVVDLPVGLNLQDQTTATVRSRITSAGAGQGQAAWFATFNETFGDYSEKAHELLNTKLEQWAEEAVARGGFHNTTALLIQYENYRDWIVNHNVAYSELFLDTAGVASFDVWDLLPFTRGYVHILDKDPYLHHFAYDPQYFLNELDLLGQAAATQLARNISNSGCMQTYFAGETIPGDNLAYDADLSAWTEYIPYHFRPNYHGVGTCSMMPKEMGGVVDNAARVYGVQGLRVIDGSIPPTQMSSHVMTVFYAMALKISDAILEDYASMQ

SEQ ID NO: 387 - protein, 583 aa, Aspergillus niger
SNGIEASLLTDPKDVSGRTVDYIIAGGGLTGLTTAARLTENPNISVLVIESGSYECDRGPIIEDLNAYGDIFGSSVDHAYETVELATNNQTALIRSGNGLGGSTLVNGGTWTRPHKAQVDSWETVFGNEGWNWDNVAAYSLQAERARAPNAKQIAAGHYFNASCHGVNGTVHAGPRDTGDDYSPIVKALMSAVEDRGVPTKKDFGCGDPHGVSMFPNTLHEDQVRSDAACEWLLPNYQRPNLQVLTGQYVGKVLLSQNGTTPRAVGVEFGTHKGNTHNVYAKHEVLLAAGSAVSPTILEYSGIGMKSILEPLGIDTVVDLPVGLNLQDQTTATVRSRITSAGAGQGQAAWFATFNETFGDYSEKAHELLNTKLEQWAEEAVARGGFHNTTALLIQYENYRDWIVNHNVAYSELFLDTAGVASFDVWDLLPFTRGYVHILDKDPYLHHFAYDPQYFLNELDLLGQAAATQLARNISNSGAMQTYFAGETIPGDNLAYDADLSAWTEYIPYHFRPNYHGVGTCSMMPKEMGGVVDNAARVYGVQGLRVIDGSIPPTQMSSHVMTVFYAMALKISDAILEDYASMQ

SEQ ID NO: 388 - protein, 583 aa, Aspergillus niger
SNGIEASLLTDPKDVSGRTVDYIIAGGGLTGLTTAARLTENPNISVLVIESGSYESDRGPIICDLNAYGDIFGSSVDHAYETVELATNNQTALIRSGNGLGGSTLVNGGTWTRPHKAQVDSWETVFGNEGWNWDNVAAYSLQAERARAPNAKQIAAGHYFNASCHGVNGTVHAGPRDTGDDYSPIVKALMSAVEDRGVPTKKDFGCGDPHGVSMFPNTLHEDQCRSDAAREWLLPNYQRPNLQVLTGQYVGKVLLSQNGTTPRAVGVEFGTHKGNTHNVYAKHEVLLAAGSAVSPTILEYSGIGMKSILEPLGIDTVVDLPVGLNLQDQTTATVRSRITSAGAGQGQAAWFATFNETFGDYSEKAHELLNTKLEQWAEEAVARGGFHNTTALLIQYENYRDWIVNHNVAYSELFLDTAGVASFDVWDLLPFTRGYVHILDKDPYLHHFAYDPQYFLNELDLLGQAAATQLARNISNSGAMQTYFAGETIPGDNLAYDADLSAWTEYIPYHFRPNYHGVGTCSMMPKEMGGVVDNAARVYGVQGLRVIDGSIPPTQMSSHVMTVFYAMALKISDAILEDYASMQ

SEQ ID NO: 389 - protein, 583 aa, Aspergillus niger
SNGIEASLLTDPKDVSGRTVDYIIAGGGLTGLTTAARLTENPNISVLVIESGSYESDRGPIIEDLNAYGDIFGSSVDHAYETVELATNNQTALIRSGNGLGGSTLVNGGTWTRPHKAQVDSWETVFGNEGWNWDNVAAYSLQAERARAPNAKQIAAGHYFNASCHGVNGTVHAGPRDTGDDCSPIVKALMSAVEDRGVPTKKDFGCGDPHGVSMFPNTLHEDQVRSDAAREWLLPNYQRPNLQVLTGQYVGKVLLSQNGTTPRAVGVEFGTHKGNTHNVYAKHEVLLAAGSAVSPTILEYSGIGMKSILEPLGIDTVVDLPVGLNLQDQTTATVRSRITSAGAGQCQAAWFATFNETFGDYSEKAHELLNTKLEQWAEEAVARGGFHNTTALLIQYENYRDWIVNHNVAYSELFLDTAGVASFDVWDLLPFTRGYVHILDKDPYLHHFAYDPQYFLNELDLLGQAAATQLARNISNSGAMQTYFAGETIPGDNLAYDADLSAWTEYIPYHFRPNYHGVGTCSMMPKEMGGVVDNAARVYGVQGLRVIDGSIPPTQMSSHVMTVFYAMALKISDAILEDYASMQ

SEQ ID NO: 390 - protein, 583 aa, Aspergillus niger
SNGIEASLLTDPKDVSGRTVDYIIAGGGLTGLTTAARLTENPNISVLVIESGSYESDRGPIIEDLNAYGDIFGSSVDHAYETVELATNNQTALIRSGNGLGGSTLVNGGTWTRPHKAQVDSWETVFGNEGWNWDNVAAYSLQAERARAPNAKQIAAGHYFNASCHGVNGTVHAGPRDTGDDYSPIVKALMSAVEDRGVPTKKDFGCGDPHGVSMFPNTLHEDQVRSDAAREWLLPNYQRPNLQVLTGQYVCKVLLSQNGTTPRAVGVEFGTHKGNTHNVYAKHEVLLAAGSAVSPTILEYSGIGMKSILEPLGIDTVVDLPVGLNLQDQTTATVRSRITSAGAGQGQAAWFATFNETFGDYSEKAHELLNTKLEQWAEEAVARGGFHNTTALLIQYENYRDWIVNHNVAYSELFLDTAGVASFDVWDLLPFTRGYVHILDKDCYLHHFAYDPQYFLNELDLLGQAAATQLARNISNSGAMQTYFAGETIPGDNLAYDADLSAWTEYIPYHFRPNYHGVGTCSMMPKEMGGVVDNAARVYGVQGLRVIDGSIPPTQMSSHVMTVFYAMALKISDAILEDYASMQ

SEQ ID NO: 391 - protein, 583 aa, Aspergillus niger
SNGIEASLLTDPKDVSGRTVDYIIAGGGLTGLTTAARLTENPNISVLVIYSGSYESDRGPIIEDLNAYGDIFGSSVDHAYETVELATNNQTALIRSGNGLGGSTLVNGGTWTRPHKAQVDSWETVFGNEGWNWDNVAAYSLQAERARAPNAKQIAAGHYFNASCHGVNGTVHAGPRDTGDDYSPIVKALMSAVEDRGVPTKKDFGCGDPHGVSMFPNTLHEDQVRSDAAREWLLPNYQRPNLQVLTGQYVGKVLLSQNGTTPRAVGVEFGTHKGNTHNVYAKHEVLLAAGSAVSPTILEYSGIGMKSILEPLGIDTVVDLPVGLNLQDQTTATVRSRITSAGAGQGQAAWFATFNETFGDYSEKAHELLNTKLEQWAEEAVARGGFHNTTALLIQYENYRDWIVNHNVAYSELFLDTAGVASFDVWDLLPFTRGYVHILDKDPYLHHFAYDPQYFLNELDLLGQAAATQLARNISNSGAMQTYFAGETIPGDNLAYDADLSAWTEYIPYHFRPNYHGVGTCSMMPKEMGGVVDNAARVYGVQGLRVIDGSIPPTQMSSTVMTVFYAMALKISDAILEDYASMQ

SEQ ID NO: 392 - protein, 583 aa, Aspergillus niger
SNGIEASLLTDPKDVSGRTVDYIICGGGLTGLTTAARLTENPNISVLVIESGSYESDRGPIIEDLNAYGDIFGSSVDHAYETVELATNNQTALIRSGNGLGGSTLVNGGTWTRPHKAQVDSWETVFGNEGWNWDNVAAYSLQAERARAPNAKQIAAGHYFNASCHGVNGTVHAGPRDTGDDYSPIVKALMSAVEDRGVPTKKDFGCGDPHGVSMFPNTLHEDQVRSDAAREWLLPNYQRPNLQVLTGQYCGKVLLSQNGTTPRAVGVEFGTHKGNTHNVYAKHEVLLAAGSAVSPTILEYSGIGMKSILEPLGIDTVVDLPVGLNLQDQTTATVRSRITSAGAGQGQAAWFATFNETFGDYSEKAHELLNTKLEQWAEEAVARGGFHNTTALLIQYENYRDWIVNHNVAYSELFLDTAGVASFDVWDLLPFTRGYVHILDKDPYLHHFAYDPQYFLNELDLLGQAAATQLARNISNSGAMQTYFAGETIPGDNLAYDADLSAWTEYIPYHFRPNYHGVGTCSMMPKEMGGVVDNAARVYGVQGLRVIDGSIPPTQMSSHVMTVFYAMALKISDAILEDYASMQ

SEQ ID NO: 393 - protein, 583 aa, Aspergillus niger
SNGIEASLLTDPKDVSGRTVDYIIAGGGLTGLTTAARLTENPNISVLVIESGSYESDRGPIIEDLNAYGDIFGSSVDHAYETVELATNNQTALIRSGNGLGGSTLVNGGTWTRPHKAQVDSWETVFGNPGWNWDNVAAYSLQAERARAPNAKQIAAGHYFNASCHGVNGTVHAGPRDTGDDYSPIVKALMSAVEDRGVPTKKDFGCGDPHGVSMFPNTLHEDQVRSDAAREWLLPNYQRPNLVVLTGQYVGKVLLSQNGTTPRAVGVEFGTHKGNTHNVYAKHEVLLAAGSAVSPTILEYSGIGMKSILEPLGIDTVVDLPVGLNLQDQTTATVRSRITSAGAGQGQAAWFATFNETFGDYSEKAHELLNTKLEQWAEEAVARGGFHNTTALLIQYENYRDWIVNHNVAYSELFLDTAGVASFDVWDLLPFTRGYVHILDKDPYLHHFAYDPQYFLNELDLLGQAAATQLARNISNSGAMQTYFAGETIPGDNLAYDADLSAWTEYIPYHFRPNYHGVGTCSMMPKEMGGVVDNAARVYGVQGLRVIDGSIPPTQMSSHVMTVFYAMALKISDAILEDYASMQ

SEQ ID NO: 394 - protein, 583 aa, Aspergillus niger
SNGIEASLLTDPKDVSGRTVDYIIAGGGLTGLTTAARLTENPNICVLVIESGSYESDRGPIIEDLNAYGDIFGSSVDHAYETVELATNNQTALIRSGNGLGGSTLVNGGTWTRPHKAQVDSWETVFGNEGWNWDNVAAYSLQAERARAPNAKQIAAGHYFNASCHGVNGTVHAGPRDTGDDYSPIVKALMSAVEDRGVPTKKDFGCGDPHGVSMFPNTLHEDQVRSDAAREWLLPNYQRPCLQVLTGQYVGKVLLSQNGTTPRAVGVEFGTHKGNTHNVYAKHEVLLAAGSAVSPTILEYSGIGMKSILEPLGIDTVVDLPVGLNLQDQTTATVRSRITSAGAGQGQAAWFATFNETFGDYSEKAHELLNTKLEQWAEEAVARGGFHNTTALLIQYENYRDWIVNHNVAYSELFLDTAGVASFDVWDLLPFTRGYVHILDKDPYLHHFAYDPQYFLNELDLLGQAAATQLARNISNSGAMQTYFAGETIPGDNLAYDADLSAWTEYIPYHFRPNYHGVGTCSMMPKEMGGVVDNAARVYGVQGLRVIDGSIPPTQMSSHVMTVFYAMALKISDAILEDYASMQ

SEQ ID NO: 395 - protein, 583 aa, Aspergillus niger
SNGIEASLLTDPKDVSGRTCDYIIAGGGLSGLTTAARLTENPNISVLVIESGSYESDRGPIIEDLNAYGDIFGSSVDHAYETVELATNNQTALIRSGNGLGGSTLVNGGTWTRPHKAQVDSWETVFGNEGWNWDNVAAYSLQAERARAPNAKQIAAGHYFNASCHGVNGTVHAGPRDTGDDYSPIVKALMSAVEDRGVPTKKDFGCGDPHGVSMFPNTLHEDQVRSDAAREWLLPNYQRPNLQVLTGQYVGKVLLSQNGTTPRAVGVEFGTHKGNTHNVYAKHEVLLAAGSAVSPTILEYSGIGMKSILEPLGIDTVVDLPVGLNLQDQTTATVRSRITSAGAGQGQAAWFATFNETFGDYSEKAHELLNTKLEQWAEEAVARGGFHNTTALLIQYENYRDWIVNHNVAYSELFLDTAGVASFDVWDLLPFTRGYVHILDKDPYLHHFAYDPQYFLNELDLLGQAAATQLARNISNSGAMQTYFAGETIPGDNLAYDADLSAWTEYIPYHFRPNYHGVGTCSMMPKEMGGVVDNAARVYGVQGLRVIDGSIPPTQMSSHVMTVFYAMALKISDAILEDYASMQ

SEQ ID NO: 396 - protein, 583 aa, Aspergillus niger
SNGIEASLLTDPKDVSGRTWDYIIAGGGLVGLTTAARLTENPNISVLVIESGSYESDRGPIIEDLNAYGDIFGSSVDHAYETVELATNNQTALIRSGNGLGGSTLVNGGTWTRPHKAQVDSWETVFGNEGWNWDNVAAYSLQAERARAPNAKQIAAGHYFNASCHGVNGTVHAGPRDTGDDYSPIVKALMSAVEDRGVPTKKDFGCGDPHGVSMFPNTLHEDQVRSDAAREWLLPNYQRPNLQVLTGQYVGKVLLSQNGTTPRAVGVEFGTHKGNTHNVYAKHEVLLAAGSAVSPTILEYSGIGMKSILEPLGIDTVVDLPVGLNLQDQTTATVRSRITSAGAGQGQAAWFATFNETFGDYSEKAHELLNTKLEQWAEEAVARGGFHNTTALLIQYENYRDWIVNHNVAYSELFLDTAGVASFDVWDLLPFTRGYVHILDKDPYLHHFAYDPQYFLNELDLLGQAAATQLARNISNSGAMQTYFAGETIPGDNLAYDADLSAWTEYIPYHFRPNYHGVGTCSMMPKEMGGVVDNAARVYGVQGLRVIDGSIPPTQMSSHVMTVFYAMALKISDAILEDYASMQ

SEQ ID NO: 397 - protein, 583 aa, Aspergillus niger
SNGIEASLCTDPKDVSGRTVDYIIAGGGLTGLTTAARLTENPNISVLVIESGSYESDRGPIIEDLNAYGDIFGSSVDHAYETVELATNNQTALIRSGNGLGGSTLVNGGTWTRPHKAQVDSWETVFGNEGWNWDNVAAYSLQAERARAPNAKQIAAGHYFNASCHGVNGTVHAGPRDTGDDYSPIVKALMSAVEDRGVPTKKDFGCGDPHGVSMFPNTLHEDQVRSDAAREWLLPNYQRPNLQVCTGQYVGKVLLSQNGTTPRAVGVEFGTHKGNTHNVYAKHEVLLAAGSAVSPTILEYSGIGMKSILEPLGIDTVVDLPVGLNLQDQTTATVRSRITSAGAGQGQAAWFATFNETFGDYSEKAHELLNTKLEQWAEEAVARGGFHNTTALLIQYENYRDWIVNHNVAYSELFLDTAGVASFDVWDLLPFTRGYVHILDKDPYLHHFAYDPQYFLNELDLLGQAAATQLARNISNSGAMQTYFAGETIPGDNLAYDADLSAWTEYIPYHFRPNYHGVGTCSMMPKEMGGVVDNAARVYGVQGLRVIDGSIPPTQMSSHVMTVFYAMALKISDAILEDYASMQ

SEQ ID NO: 398 - protein, 583 aa, Aspergillus niger
SNGIEASLLTDPKDVSGRTMDYIIAGGGLSGLTTAARLTENPNISVLVIESGSYESDRGPIIEDLNAYGDIFGSSVDHAYETVELATNNQTALIRSGNGLGGSTLVNGGTWTRPHKAQVDSWETVFGNEGWNWDNVAAYSLQAERARAPNAKQIAAGHYFNASCHGVNGTVHAGPRDTGDDYSPIVKALMSAVEDRGVPTKKDFGCGDPHGVSMFPNTLHEDQVRSDAAREWLLPNYQRPNLQVLTGQYVGKVLLSQNGTTPRAVGVEFGTHKGNTHNVYAKHEVLLAAGSAVSPTILEYSGIGMKSILEPLGIDTVVDLPVGLNLQDQTTATVRSRITSAGAGQGQAAWFATFNETFGDYSEKAHELLNTKLEQWAEEAVARGGFHNTTALLIQYENYRDWIVNHNVAYSELFLDTAGVASFDVWDLLPFTRGYVHILDKDPYLHHFAYDPQYFLNELDLLGQAAATQLARNISNSGAMQTYFAGETIPGDNLAYDADLSAWTEYIPYHFRPNYHGVGTCSMMPKEMGGVVDNAARVYGVQGLRVIDGSIPPTQMSSHVMTVFYAMALKISDAILEDYASMQ

SEQ ID NO: 399 - protein, 581 aa, Aspergillus niger
GIEASLLTDPKDVSGRTVDYIIAGGGLTGLTTAARLTENPNISVLVIESGSYESDRGPIIEDLNQYGDIFGSSVDHAYETVELATNNQTALIRSGNGLGGSTLVNGGTWTRPHKAQVDSWETVFGNEGWNWDNVAAYSLQAERARAPNAKQIAAGHYFNASCHGVNGTVHAGPRDTGDDYSPIVKALMSAVEDRGVPTKKDFGCGDPHGVSMFPNTLHEDQVRSDAAREWLLPNYQRPNLQVLTGQYVGKVLLSQNGTTPRAVGVEFGTHKGNTHNVYAKHEVLLAAGSAVSPTILEYSGIGMKSILEPLGIDTVVDLPVGLNLQDQTTATVRSRITSAGAGQGQAAWFATFNETFGDYSEKAHELLNTKLEQWAEEAVARGGFHNTTALLIQYENYRDWIVNHNVAYSELFLDTKGVASFDVWDLLPFTRGYVHILDKDPYLHHFAYDPQYFLNELDLLGQAAATQLARNISNSGAMQTYFAGETIPGDNLAYDADLSAWTEYIPYHFRPNYHGVGTCSMMPKEMGGVVDNAARVYGVQGLRVIDGSIPPTQMSSHVMTVFYAMALKISDAILEDYASMQ

SEQ ID NO: 400 - protein, 581 aa, Aspergillus niger
GIEASLLTDPKDVSGRTVDYIIAGGGLTGLTTAARLTENPNISVLVIESGSYESDRGPIIEDLNKYGDIFGSSVDHAYETVELATNNQTALIRSGNGLGGSTLVNGGTWTRPHKAQVDSWETVFGNEGWNWDNVAAYSLQAERARAPNAKQIAAGHYFNASCHGVNGTVHAGPRDTGDDYSPIVKALMSAVEDRGVPTKKDFGCGDPHGVSMFPNTLHEDQVRSDAAREWLLPNYQRPNLQVLTGQYVGKVLLSQNGTTPRAVGVEFGTHKGNTHNVYAKHEVLLAAGSAVSPTILEYSGIGMKSILEPLGIDTVVDLPVGLNLQDQTTATVRSRITSAGAGQGQAAWFATFNETFGDYSEKAHELLNTKLEQWAEEAVARGGFHNTTALLIQYENYRDWIVNHNVAYSELFLDTRGVASFDVWDLLPFTRGYVHILDKDPYLHHFAYDPQYFLNELDLLGQAAATQLARNISNSGAMQTYFAGETIPGDNLAYDADLSAWTEYIPYHFRPNYHGVGTCSMMPKEMGGVVDNAARVYGVQGLRVIDGSIPPTQMSSHVMTVFYAMALKISDAILEDYASMQ

SEQ ID NO: 401 - protein, 581 aa, Aspergillus niger
GIEASLLTDPKDVSGRTVDYIIAGGGLTGLTTAARLTENPNISVLVIESGSYESDRGPIIEDLNRYGDIFGSSVDHAYETVELATNNQTALIRSGNGLGGSTLVNGGTWTRPHKAQVDSWETVFGNEGWNWDNVAAYSLQAERARAPNAKQIAAGHYFNASCHGVNGTVHAGPRDTGDDYSPIVKALMSAVEDRGVPTKKDFGCGDPHGVSMFPNTLHEDQVRSDAAREWLLPNYQRPNLQVLTGQYVGKVLLSQNGTTPRAVGVEFGTHKGNTHNVYAKHEVLLAAGSAVSPTILEYSGIGMKSILEPLGIDTVVDLPVGLNLQDQTTATVRSRITSAGAGQGQAAWFATFNETFGDYSEKAHELLNTKLEQWAEEAVARGGFHNTTALLIQYENYRDWIVNHNVAYSELFLDTRGVASFDVWDLLPFTRGYVHILDKDPYLHHFAYDPQYFLNELDLLGQAAATQLARNISNSGAMQTYFAGETIPGDNLAYDADLSAWTEYIPYHFRPNYHGVGTCSMMPKEMGGVVDNAARVYGVQGLRVIDGSIPPTQMSSHVMTVFYAMALKISDAILEDYASMQ

SEQ ID NO: 402 - protein, 581 aa, Aspergillus niger
GIEASLLTDPKDVSGRTVDYIIAGGGLTGLTTAARLTENPNISVLVIESGSYESDRGPIIEDLNNYGDIFGSSVDHAYETVELATNNQTALIRSGNGLGGSTLVNGGTWTRPHKAQVDSWETVFGNEGWNWDNVAAYSLQAERARAPNAKQIAAGHYFNASCHGVNGTVHAGPRDTGDDYSPIVKALMSAVEDRGVPTKKDFGCGDPHGVSMFPNTLHEDQVRSDAAREWLLPNYQRPNLQVLTGQYVGKVLLSQNGTTPRAVGVEFGTHKGNTHNVYAKHEVLLAAGSAVSPTILEYSGIGMKSILEPLGIDTVVDLPVGLNLQDQTTATVRSRITSAGAGQGQAAWFATFNETFGDYSEKAHELLNTKLEQWAEEAVARGGFHNTTALLIQYENYRDWIVNHNVAYSELFLDTRGVASFDVWDLLPFTRGYVHILDKDPYLHHFAYDPQYFLNELDLLGQAAATQLARNISNSGAMQTYFAGETIPGDNLAYDADLSAWTEYIPYHFRPNYHGVGTCSMMPKEMGGVVDNAARVYGVQGLRVIDGSIPPTQMSSHVMTVFYAMALKISDAILEDYASMQ

SEQ ID NO: 403 - protein, 581 aa, Aspergillus niger
GIEASLLTDPKDVSGRTVDYIIAGGGLTGLTTAARLTENPNISVLVIESGSYESDRGPIIEDLNMYGDIFGSSVDHAYETVELATNNQTALIRSGNGLGGSTLVNGGTWTRPHKAQVDSWETVFGNEGWNWDNVAAYSLQAERARAPNAKQIAAGHYFNASCHGVNGTVHAGPRDTGDDYSPIVKALMSAVEDRGVPTKKDFGCGDPHGVSMFPNTLHEDQVRSDAAREWLLPNYQRPNLQVLTGQYVGKVLLSQNGTTPRAVGVEFGTHKGNTHNVYAKHEVLLAAGSAVSPTILEYSGIGMKSILEPLGIDTVVDLPVGLNLQDQTTATVRSRITSAGAGQGQAAWFATFNETFGDYSEKAHELLNTKLEQWAEEAVARGGFHNTTALLIQYENYRDWIVNHNVAYSELFLDTRGVASFDVWDLLPFTRGYVHILDKDPYLHHFAYDPQYFLNELDLLGQAAATQLARNISNSGAMQTYFAGETIPGDNLAYDADLSAWTEYIPYHFRPNYHGVGTCSMMPKEMGGVVDNAARVYGVQGLRVIDGSIPPTQMSSHVMTVFYAMALKISDAILEDYASMQ

SEQ ID NO: 404 - protein, 581 aa, Aspergillus niger
GIEASLLTDPKDVSGRTVDYIIAGGGLTGLTTAARLTENPNISVLVIESGSYESDRGPIIEDLNKYGDIFGSSVDHAYETVELATNNQTALIRSGNGLGGSTLVNGGTWTRPHKAQVDSWETVFGNEGWNWDNVAAYSLQAERARAPNAKQIAAGHYFNASCHGVNGTVHAGPRDTGDDYSPIVKALMSAVEDRGVPTKKDFGCGDPHGVSMFPNTLHEDQVRSDAAREWLLPNYQRPNLQVLTGQYVGKVLLSQNGTTPRAVGVEFGTHKGNTHNVYAKHEVLLAAGSAVSPTILEYSGIGMKSILEPLGIDTVVDLPVGLNLQDQTTATVRSRITSAGAGQGQAAWFATFNETFGDYSEKAHELLNTKLEQWAEEAVARGGFHNTTALLIQYENYRDWIVNHNVAYSELFLDTNGVASFDVWDLLPFTRGYVHILDKDPYLHHFAYDPQYFLNELDLLGQAAATQLARNISNSGAMQTYFAGETIPGDNLAYDADLSAWTEYIPYHFRPNYHGVGTCSMMPKEMGGVVDNAARVYGVQGLRVIDGSIPPTQMSSHVMTVFYAMALKISDAILEDYASMQ

SEQ ID NO: 405 - protein, 581 aa, Aspergillus niger
GIEASLLTDPKDVSGRTVDYIIAGGGLTGLTTAARLTENPNISVLVIESGSYESDRGPIIEDLNLYGDIFGSSVDHAYETVELATNNQTALIRSGNGLGGSTLVNGGTWTRPHKAQVDSWETVFGNEGWNWDNVAAYSLQAERARAPNAKQIAAGHYFNASCHGVNGTVHAGPRDTGDDYSPIVKALMSAVEDRGVPTKKDFGCGDPHGVSMFPNTLHEDQVRSDAAREWLLPNYQRPNLQVLTGQYVGKVLLSQNGTTPRAVGVEFGTHKGNTHNVYAKHEVLLAAGSAVSPTILEYSGIGMKSILEPLGIDTVVDLPVGLNLQDQTTATVRSRITSAGAGQGQAAWFATFNETFGDYSEKAHELLNTKLEQWAEEAVARGGFHNTTALLIQYENYRDWIVNHNVAYSELFLDTKGVASFDVWDLLPFTRGYVHILDKDPYLHHFAYDPQYFLNELDLLGQAAATQLARNISNSGAMQTYFAGETIPGDNLAYDADLSAWTEYIPYHFRPNYHGVGTCSMMPKEMGGVVDNAARVYGVQGLRVIDGSIPPTQMSSHVMTVFYAMALKISDAILEDYASMQ

SEQ ID NO: 406 - protein, 581 aa, Aspergillus niger
GIEASLLTDPKDVSGRTVDYIIAGGGLTGLTTAARLTENPNISVLVIESGSYESDRGPIIEDLNQYGDIFGSSVDHAYETVELATNNQTALIRSGNGLGGSTLVNGGTWTRPHKAQVDSWETVFGNEGWNWDNVAAYSLQAERARAPNAKQIAAGHYFNASCHGVNGTVHAGPRDTGDDYSPIVKALMSAVEDRGVPTKKDFGCGDPHGVSMFPNTLHEDQVRSDAAREWLLPNYQRPNLQVLTGQYVGKVLLSQNGTTPRAVGVEFGTHKGNTHNVYAKHEVLLAAGSAVSPTILEYSGIGMKSILEPLGIDTVVDLPVGLNLQDQTTATVRSRITSAGAGQGQAAWFATFNETFGDYSEKAHELLNTKLEQWAEEAVARGGFHNTTALLIQYENYRDWIVNHNVAYSELFLDTNGVASFDVWDLLPFTRGYVHILDKDPYLHHFAYDPQYFLNELDLLGQAAATQLARNISNSGAMQTYFAGETIPGDNLAYDADLSAWTEYIPYHFRPNYHGVGTCSMMPKEMGGVVDNAARVYGVQGLRVIDGSIPPTQMSSHVMTVFYAMALKISDAILEDYASMQ

SEQ ID NO: 407 - protein, 581 aa, Aspergillus niger
GIEASLLTDPKDVSGRTVDYIIAGGGLTGLTTAARLTENPNISVLVIESGSYESDRGPIIEDLNLYGDIFGSSVDHAYETVELATNNQTALIRSGNGLGGSTLVNGGTWTRPHKAQVDSWETVFGNEGWNWDNVAAYSLQAERARAPNAKQIAAGHYFNASCHGVNGTVHAGPRDTGDDYSPIVKALMSAVEDRGVPTKKDFGCGDPHGVSMFPNTLHEDQVRSDAAREWLLPNYQRPNLQVLTGQYVGKVLLSQNGTTPRAVGVEFGTHKGNTHNVYAKHEVLLAAGSAVSPTILEYSGIGMKSILEPLGIDTVVDLPVGLNLQDQTTATVRSRITSAGAGQGQAAWFATFNETFGDYSEKAHELLNTKLEQWAEEAVARGGFHNTTALLIQYENYRDWIVNHNVAYSELFLDTNGVASFDVWDLLPFTRGYVHILDKDPYLHHFAYDPQYFLNELDLLGQAAATQLARNISNSGAMQTYFAGETIPGDNLAYDADLSAWTEYIPYHFRPNYHGVGTCSMMPKEMGGVVDNAARVYGVQGLRVIDGSIPPTQMSSHVMTVFYAMALKISDAILEDYASMQ

SEQ ID NO: 408 - protein, 581 aa, Aspergillus niger
GIEASLLTDPKDVSGRTVDYIIAGGGLTGLTTAARLTENPNISVLVIESGSYESDRGPIIEDLNQYGDIFGSSVDHAYETVELATNNQTALIRSGNGLGGSTLVNGGTWTRPHKAQVDSWETVFGNEGWNWDNVAAYSLQAERARAPNAKQIAAGHYFNASCHGVNGTVHAGPRDTGDDYSPIVKALMSAVEDRGVPTKKDFGCGDPHGVSMFPNTLHEDQVRSDAAREWLLPNYQRPNLQVLTGQYVGKVLLSQNGTTPRAVGVEFGTHKGNTHNVYAKHEVLLAAGSAVSPTILEYSGIGMKSILEPLGIDTVVDLPVGLNLQDQTTATVRSRITSAGAGQGQAAWFATFNETFGDYSEKAHELLNTKLEQWAEEAVARGGFHNTTALLIQYENYRDWIVNHNVAYSELFLDTRGVASFDVWDLLPFTRGYVHILDKDPYLHHFAYDPQYFLNELDLLGQAAATQLARNISNSGAMQTYFAGETIPGDNLAYDADLSAWTEYIPYHFRPNYHGVGTCSMMPKEMGGVVDNAARVYGVQGLRVIDGSIPPTQMSSHVMTVFYAMALKISDAILEDYASMQ

SEQ ID NO: 409 - protein, 581 aa, Aspergillus niger
GIEASLLTDPKDVSGRTVDYIIAGGGLTGLTTAARLTENPNISVLVIESGSYESDRGPIIEDLNFYGDIFGSSVDHAYETVELATNNQTALIRSGNGLGGSTLVNGGTWTRPHKAQVDSWETVFGNEGWNWDNVAAYSLQAERARAPNAKQIAAGHYFNASCHGVNGTVHAGPRDTGDDYSPIVKALMSAVEDRGVPTKKDFGCGDPHGVSMFPNTLHEDQVRSDAAREWLLPNYQRPNLQVLTGQYVGKVLLSQNGTTPRAVGVEFGTHKGNTHNVYAKHEVLLAAGSAVSPTILEYSGIGMKSILEPLGIDTVVDLPVGLNLQDQTTATVRSRITSAGAGQGQAAWFATFNETFGDYSEKAHELLNTKLEQWAEEAVARGGFHNTTALLIQYENYRDWIVNHNVAYSELFLDTNGVASFDVWDLLPFTRGYVHILDKDPYLHHFAYDPQYFLNELDLLGQAAATQLARNISNSGAMQTYFAGETIPGDNLAYDADLSAWTEYIPYHFRPNYHGVGTCSMMPKEMGGVVDNAARVYGVQGLRVIDGSIPPTQMSSHVMTVFYAMALKISDAILEDYASMQ

SEQ ID NO: 410 - protein, 581 aa, Aspergillus niger
GIEASLLTDPKDVSGRTVDYIIAGGGLTGLTTAARLTENPNISVLVIESGSYESDRGPIIEDLNMYGDIFGSSVDHAYETVELATNNQTALIRSGNGLGGSTLVNGGTWTRPHKAQVDSWETVFGNEGWNWDNVAAYSLQAERARAPNAKQIAAGHYFNASCHGVNGTVHAGPRDTGDDYSPIVKALMSAVEDRGVPTKKDFGCGDPHGVSMFPNTLHEDQVRSDAAREWLLPNYQRPNLQVLTGQYVGKVLLSQNGTTPRAVGVEFGTHKGNTHNVYAKHEVLLAAGSAVSPTILEYSGIGMKSILEPLGIDTVVDLPVGLNLQDQTTATVRSRITSAGAGQGQAAWFATFNETFGDYSEKAHELLNTKLEQWAEEAVARGGFHNTTALLIQYENYRDWIVNHNVAYSELFLDTKGVASFDVWDLLPFTRGYVHILDKDPYLHHFAYDPQYFLNELDLLGQAAATQLARNISNSGAMQTYFAGETIPGDNLAYDADLSAWTEYIPYHFRPNYHGVGTCSMMPKEMGGVVDNAARVYGVQGLRVIDGSIPPTQMSSHVMTVFYAMALKISDAILEDYASMQ

SEQ ID NO: 411 - protein, 581 aa, Aspergillus niger
GIEASLLTDPKDVSGRTVDYIIAGGGLTGLTTAARLTENPNISVLVIESGSYESDRGPIIEDLNLYGDIFGSSVDHAYETVELATNNQTALIRSGNGLGGSTLVNGGTWTRPHKAQVDSWETVFGNEGWNWDNVAAYSLQAERARAPNAKQIAAGHYFNASCHGVNGTVHAGPRDTGDDYSPIVKALMSAVEDRGVPTKKDFGCGDPHGVSMFPNTLHEDQVRSDAAREWLLPNYQRPNLQVLTGQYVGKVLLSQNGTTPRAVGVEFGTHKGNTHNVYAKHEVLLAAGSAVSPTILEYSGIGMKSILEPLGIDTVVDLPVGLNLQDQTTATVRSRITSAGAGQGQAAWFATFNETFGDYSEKAHELLNTKLEQWAEEAVARGGFHNTTALLIQYENYRDWIVNHNVAYSELFLDTRGVASFDVWDLLPFTRGYVHILDKDPYLHHFAYDPQYFLNELDLLGQAAATQLARNISNSGAMQTYFAGETIPGDNLAYDADLSAWTEYIPYHFRPNYHGVGTCSMMPKEMGGVVDNAARVYGVQGLRVIDGSIPPTQMSSHVMTVFYAMALKISDAILEDYASMQ

SEQ ID NO: 412 - protein, 581 aa, Aspergillus niger
GIEASLLTDPKDVSGRTVDYIIAGGGLTGLTTAARLTENPNISVLVIESGSYESDRGPIIEDLNMYGDIFGSSVDHAYETVELATNNQTALIRSGNGLGGSTLVNGGTWTRPHKAQVDSWETVFGNEGWNWDNVAAYSLQAERARAPNAKQIAAGHYFNASCHGVNGTVHAGPRDTGDDYSPIVKALMSAVEDRGVPTKKDFGCGDPHGVSMFPNTLHEDQVRSDAAREWLLPNYQRPNLQVLTGQYVGKVLLSQNGTTPRAVGVEFGTHKGNTHNVYAKHEVLLAAGSAVSPTILEYSGIGMKSILEPLGIDTVVDLPVGLNLQDQTTATVRSRITSAGAGQGQAAWFATFNETFGDYSEKAHELLNTKLEQWAEEAVARGGFHNTTALLIQYENYRDWIVNHNVAYSELFLDTNGVASFDVWDLLPFTRGYVHILDKDPYLHHFAYDPQYFLNELDLLGQAAATQLARNISNSGAMQTYFAGETIPGDNLAYDADLSAWTEYIPYHFRPNYHGVGTCSMMPKEMGGVVDNAARVYGVQGLRVIDGSIPPTQMSSHVMTVFYAMALKISDAILEDYASMQ

SEQ ID NO: 413 - protein, 581 aa, Synthetic construct
GIEASLLTDPKDVSGRTVDYIIAGGGLTGLTTAARLTENPNISVLVIESGSYESDRGPIIEDLNRYGDIFGSSVDHAYETVELATNNQTALIRSGNGLGGSTLVNGGTWTRPHKAQVDSWETVFGNEGWNWDNVAAYSLQAERARAPNAKQIAAGHYFNASCHGVNGTVHAGPRDTGDDYSPIVKALMSAVEDRGVPTKKDFGCGDPHGVSMFPNTLHEDQVRSDAAREWLLPNYQRPNLQVLTGQYVGKVLLSQNGTTPRAVGVEFGTHKGNTHNVYAKHEVLLAAGSAVSPTILEYSGIGMKSILEPLGIDTVVDLPVGLNLQDQTTATVRSRITSAGAGQGQAAWFATFNETFGDYSEKAHELLNTKLEQWAEEAVARGGFHNTTALLIQYENYRDWIVNHNVAYSELFLDTKGVASFDVWDLLPFTRGYVHILDKDPYLHHFAYDPQYFLNELDLLGQAAATQLARNISNSGAMQTYFAGETIPGDNLAYDADLSAWTEYIPYHFRPNYHGVGTCSMMPKEMGGVVDNAARVYGVQGLRVIDGSIPPTQMSSHVMTVFYAMALKISDAILEDYASMQ

SEQ ID NO: 414 - protein, 581 aa, Aspergillus niger
GIEASLLTDPKDVSGRTVDYIIAGGGLTGLTTAARLTENPNISVLVIESGSYESDRGPIIEDLNNYGDIFGSSVDHAYETVELATNNQTALIRSGNGLGGSTLVNGGTWTRPHKAQVDSWETVFGNEGWNWDNVAAYSLQAERARAPNAKQIAAGHYFNASCHGVNGTVHAGPRDTGDDYSPIVKALMSAVEDRGVPTKKDFGCGDPHGVSMFPNTLHEDQVRSDAAREWLLPNYQRPNLQVLTGQYVGKVLLSQNGTTPRAVGVEFGTHKGNTHNVYAKHEVLLAAGSAVSPTILEYSGIGMKSILEPLGIDTVVDLPVGLNLQDQTTATVRSRITSAGAGQGQAAWFATFNETFGDYSEKAHELLNTKLEQWAEEAVARGGFHNTTALLIQYENYRDWIVNHNVAYSELFLDTKGVASFDVWDLLPFTRGYVHILDKDPYLHHFAYDPQYFLNELDLLGQAAATQLARNISNSGAMQTYFAGETIPGDNLAYDADLSAWTEYIPYHFRPNYHGVGTCSMMPKEMGGVVDNAARVYGVQGLRVIDGSIPPTQMSSHVMTVFYAMALKISDAILEDYASMQ

SEQ ID NO: 415 - protein, 581 aa, Aspergillus niger
GIEASLLTDPKDVSGRTVDYIIAGGGLTGLTTAARLTENPNISVLVIESGSYESDRGPIIEDLNKYGDIFGSSVDHAYETVELATNNQTALIRSGNGLGGSTLVNGGTWTRPHKAQVDSWETVFGNEGWNWDNVAAYSLQAERARAPNAKQIAAGHYFNASCHGVNGTVHAGPRDTGDDYSPIVKALMSAVEDRGVPTKKDFGCGDPHGVSMFPNTLHEDQVRSDAAREWLLPNYQRPNLQVLTGQYVGKVLLSQNGTTPRAVGVEFGTHKGNTHNVYAKHEVLLAAGSAVSPTILEYSGIGMKSILEPLGIDTVVDLPVGLNLQDQTTATVRSRITSAGAGQGQAAWFATFNETFGDYSEKAHELLNTKLEQWAEEAVARGGFHNTTALLIQYENYRDWIVNHNVAYSELFLDTKGVASFDVWDLLPFTRGYVHILDKDPYLHHFAYDPQYFLNELDLLGQAAATQLARNISNSGAMQTYFAGETIPGDNLAYDADLSAWTEYIPYHFRPNYHGVGTCSMMPKEMGGVVDNAARVYGVQGLRVIDGSIPPTQMSSHVMTVFYAMALKISDAILEDYASMQ

SEQ ID NO: 416 - protein, 581 aa, Aspergillus niger
GIEASLLTDPKDVSGRTVDYIIAGGGLTGLTTAARLTENPNISVLVIESGSYESDRGPIIEDLNFYGDIFGSSVDHAYETVELATNNQTALIRSGNGLGGSTLVNGGTWTRPHKAQVDSWETVFGNEGWNWDNVAAYSLQAERARAPNAKQIAAGHYFNASCHGVNGTVHAGPRDTGDDYSPIVKALMSAVEDRGVPTKKDFGCGDPHGVSMFPNTLHEDQVRSDAAREWLLPNYQRPNLQVLTGQYVGKVLLSQNGTTPRAVGVEFGTHKGNTHNVYAKHEVLLAAGSAVSPTILEYSGIGMKSILEPLGIDTVVDLPVGLNLQDQTTATVRSRITSAGAGQGQAAWFATFNETFGDYSEKAHELLNTKLEQWAEEAVARGGFHNTTALLIQYENYRDWIVNHNVAYSELFLDTKGVASFDVWDLLPFTRGYVHILDKDPYLHHFAYDPQYFLNELDLLGQAAATQLARNISNSGAMQTYFAGETIPGDNLAYDADLSAWTEYIPYHFRPNYHGVGTCSMMPKEMGGVVDNAARVYGVQGLRVIDGSIPPTQMSSHVMTVFYAMALKISDAILEDYASMQ

SEQ ID NO: 417 - protein, 581 aa, Aspergillus niger
GIEASLLTDPKDVSGRTVDYIIAGGGLTGLTTAARLTENPNISVLVIESGSYESDRGPIIEDLNFYGDIFGSSVDHAYETVELATNNQTALIRSGNGLGGSTLVNGGTWTRPHKAQVDSWETVFGNEGWNWDNVAAYSLQAERARAPNAKQIAAGHYFNASCHGVNGTVHAGPRDTGDDYSPIVKALMSAVEDRGVPTKKDFGCGDPHGVSMFPNTLHEDQVRSDAAREWLLPNYQRPNLQVLTGQYVGKVLLSQNGTTPRAVGVEFGTHKGNTHNVYAKHEVLLAAGSAVSPTILEYSGIGMKSILEPLGIDTVVDLPVGLNLQDQTTATVRSRITSAGAGQGQAAWFATFNETFGDYSEKAHELLNTKLEQWAEEAVARGGFHNTTALLIQYENYRDWIVNHNVAYSELFLDTRGVASFDVWDLLPFTRGYVHILDKDPYLHHFAYDPQYFLNELDLLGQAAATQLARNISNSGAMQTYFAGETIPGDNLAYDADLSAWTEYIPYHFRPNYHGVGTCSMMPKEMGGVVDNAARVYGVQGLRVIDGSIPPTQMSSHVMTVFYAMALKISDAILEDYASMQ

SEQ ID NO: 418 - protein, 581 aa, Aspergillus niger
GIEASLLTDPKDVSGRTVDYIIAGGGLTGLTTAARLTENPNISVLVIESGSYESDRGPIIEDLNNYGDIFGSSVDHAYETVELATNNQTALIRSGNGLGGSTLVNGGTWTRPHKAQVDSWETVFGNEGWNWDNVAAYSLQAERARAPNAKQIAAGHYFNASCHGVNGTVHAGPRDTGDDYSPIVKALMSAVEDRGVPTKKDFGCGDPHGVSMFPNTLHEDQVRSDAAREWLLPNYQRPNLQVLTGQYVGKVLLSQNGTTPRAVGVEFGTHKGNTHNVYAKHEVLLAAGSAVSPTILEYSGIGMKSILEPLGIDTVVDLPVGLNLQDQTTATVRSRITSAGAGQGQAAWFATFNETFGDYSEKAHELLNTKLEQWAEEAVARGGFHNTTALLIQYENYRDWIVNHNVAYSELFLDTNGVASFDVWDLLPFTRGYVHILDKDPYLHHFAYDPQYFLNELDLLGQAAATQLARNISNSGAMQTYFAGETIPGDNLAYDADLSAWTEYIPYHFRPNYHGVGTCSMMPKEMGGVVDNAARVYGVQGLRVIDGSIPPTQMSSHVMTVFYAMALKISDAILEDYASMQ

SEQ ID NO: 419 - protein, 581 aa, Aspergillus niger
GIEASLLTDPKDVSGRTVDYIIAGGGLTGLTTAARLTENPNISVLVIESGSYESDRGPIIEDLNRYGDIFGSSVDHAYETVELATNNQTALIRSGNGLGGSTLVNGGTWTRPHKAQVDSWETVFGNEGWNWDNVAAYSLQAERARAPNAKQIAAGHYFNASCHGVNGTVHAGPRDTGDDYSPIVKALMSAVEDRGVPTKKDFGCGDPHGVSMFPNTLHEDQVRSDAAREWLLPNYQRPNLQVLTGQYVGKVLLSQNGTTPRAVGVEFGTHKGNTHNVYAKHEVLLAAGSAVSPTILEYSGIGMKSILEPLGIDTVVDLPVGLNLQDQTTATVRSRITSAGAGQGQAAWFATFNETFGDYSEKAHELLNTKLEQWAEEAVARGGFHNTTALLIQYENYRDWIVNHNVAYSELFLDTNGVASFDVWDLLPFTRGYVHILDKDPYLHHFAYDPQYFLNELDLLGQAAATQLARNISNSGAMQTYFAGETIPGDNLAYDADLSAWTEYIPYHFRPNYHGVGTCSMMPKEMGGVVDNAARVYGVQGLRVIDGSIPPTQMSSHVMTVFYAMALKISDAILEDYASMQ

SEQ ID NO: 420 - protein, 581 aa, Aspergillus niger
GIEASLLTDPNDVSGRTVDYIIAGGGLTGLTTAARLTENPNISVLVIESGSYESDRGPIIEDLNAYGDIFGSSVDHAYETVELATNNQTALIRSGNGLGGSTLVNGGTWTRPHKAQVDSWETVFGNEGWNWDNVAAYSLQAERARAPNAKQIAAGHYFNASCHGTNGTVHAGPRDTGDDYSPIVRALMSAVEDRGVPTKKDFGCGDPHGVSMFPNTLHEDQVRSDAAREWLLPNYQRPNLQVLTGQYVGKVLLSQNGTTPRAVGVEFGTHKGNTHNVYAKHEVLLAAGSAVSPTILEYSGIGMKSILEPLGIDTVVDLPVGLNLQDQTTATVRSRITSAGAGQGQAAWFATFNETFGDYSEKAHELPNTKLEQWAEEAVARGGFHNTTALLIQYENYRDWIVNHNVAYSELFLDTAGVASFDVWDLLPFTRGYVHILDKDPYLHHFAYDPQYFLNELDLLGQAAATQLARNISNSGAMQTYFAGETIPGDNLAYDADLSAWTEYIPYHFRPNYHGVGTCSMMPKEMGGVVDNAARVYGVQGLRVIDGSIPPTQMSSHVMTVFYAMALKISDAILEDYASMQ

SEQ ID NO: 421 - protein, 420 aa, Aspergillus niger
MQTLLVSSLVVSLAAALPHYIRSNGIEASLLTDPKEVSGRTVDYIIAGGGLTGLTTAARLTENPNISVLVIESGSYESDRGPIIEDLNAYGDIFGSSVDHAYETVELATNNQTALIRSGNGLGGSTLVNGGTWTRPHKAQVDSWETVFGNEGWNWDNVAAYSLQAERARAPNAKQIAAGHYFNASCHGLNGTVHAGPRDTGDDYSPIVKALMSAVEDRGVPTKKDFGCGDPHGVSMFPNTLHEDQVRSDAAREWLLPNYQRPNLQVLTGQYVGKVLLSQNGTTPRAVGVEFGTHKGNTHNVYAKHEVLLAAGSAVSPTILEYSGIGMKSILEPLGIDTVVDLPVGLNLQDQTTATVRSRITSAGAGQGQAAWFATFNETFGDYSEKAHELLNTKLEQWAEEAVARGGFHNTTALLIQYEN

SEQ ID NO: 422 - protein, 589 aa, Aspergillus niger
LPHYIRSNGIEASLLTDPKDVSGRTVDYIIAGGGLTGLTTAARLTENPNISVLVIESGSYESDRGPIIEDLNAYGDIFGSSVDHAYETVELATNNQTALIRSGNGLGGSTLINGGTWTRPHKAQVDSWETVFGNEGWNWDNVAAYSLQAERARAPNAKQIAAGHYFNASCHGVNGTVHAGPRDTGDDYSPIVKALMSAVEDRGVPTKKDFDCGDPHGVSMFPNTLHEDQVRSDAAREWLLPNYQRPNLQVLTGQYVGKVLLSQNGTTPRAVGVEFGTHKGNTHNVYAKHEVLLAAGSAVSPTILEYSGIGMKSILEPLGIDTVVDLPVGLNLQDQTTATVRSRITSAGAGQGQAAWFATFNETFGDYSEKAHELLNTKLEQWAEEAVARGGFHNTTALLIQYENYRDWIVNHNVAYSELFLDTAGVASFDVWDLLPFTRGYVHILDKDPYLHHFAYDPQYFLNELDLLGQAAATQLARNISNSGAMQTYFAGETIPGDNLAYDADLSAWTEWIPYHFRPNYHGVGTCSMMPKEMGGVVDNAARVYGVQGLRVIDGSIPPTQMSSHVMTVFYAMALKISDAILEDYASMQ

SEQ ID NO: 423 - protein, 589 aa, Aspergillus niger
LPHYIRSNGIEASLLTDPKDVSGRTVDYIIAGGGLTGLTTAARLTENPNISVLVIESGSYESDRGPIIEDLNAYGDIFGSSVDHAYETVELATNNQTALIRSGNGLGGSTLINGGTWTRPHKAQVDSWETVFGNEGWNWDNVAAYSLQAERARAPNAKQIAAGHYFNASCHGVNGTVHAGPRDTGDDYSPIVKALMSAVEDRGVPTKKDFGCGDPHGVSMFPNTLHEDQVRSDAAREWLLPNYQRPNLQVLTGQYVGKVLLSQNGTTPRAVGVEFGTHNGNTHNVYAKHEVLLTAGSAVSPTILEYSGIGMKSILEPLGIDTVVDLPVGLNLQDQTTATVRSRITSAGAGQGQAAWFATFNETFGDYSEKAHELLNTKLEQWAEEAVARGGFHNTTALLIQYENYRDWIVNHNVAYSELFLDTAGVASFDVWDLLPFTRGYVHILDKDPYLHHFAYDPQYFLNELDLLGQAAATQLARNISNSGAMQTYFAGETIPGDNLAYDADLSAWTEYIPYHFRPNYHGVGTCSMMPKEMGGVVDNAARVYGVQGLRVIDGSIPPTQMSSHVMTVFYAMALKISDAILEDYASMQ

SEQ ID NO: 424 - protein, 583 aa, Aspergillus niger
SNGIEASLLTDPKDVSGRTVDYIIAGGGLVGLTTAARLTENPNISVLVIESGSYESDRGPIIEDLNAYGDIFGSSVDHAYETVELATNNQTALVRSGNGLGGSTLVNGGTWTRPHKAQVDSWETVFGNEGWNWDNVAAYSLQAERARAPNAKQIAAGHYFNTSCHGVNGTVHAGPRDTGDDYSPIVKALMSAVEDRGVPTKKDFGCGDPHGVSMFPNTLHEDQVRSDAAREWLLPNYQRPNLQVLTGQYVGKVLLSQNGTTPRAVGVEFGTHKGNTHNVYAKHEVLLAAGSAVSPTILEYSGIGMKSILEPLGIDTVVDLPVGLNLQDQTTATVRSRITSAGAGQGQAAWFATFNETFGDYSEKAHELLNTKLEQWAEEAVARGGFHNTTALLIQYENYRDWIVNHNVAYSELFLDTAGVASFDVWDLLPFTRGYVHILDKDPYLHHFAYDPQYFLNELDLLGQAAATQLARNISNSGAMQTYFAGETIPGDNLAYDADLSAWTEYIPYHFRPNYHGVGTCSMMPKEMGGVVDNAARVYGVQGLRVIDGSIPPTQMSSHVMTVFYAMALKISDAILEDYASMQ

SEQ ID NO: 425 - protein, 583 aa, Aspergillus niger
SNGIEASLLTDPNDVSGRTVDYIIAGGGLTGLTTAARLTENPNISVLVIESGSYESDRGPIIEDLNAYGDIFGSSVDHAYETVELATNNQTALIRSGNGLGGSTLVNGGXWTRPHKAQVDSWETVFGNEGWNWDNVAAYSLQAERARAPNAKQIAAGHYFNASCHGTNGTVHAGPRDTGDDYSPIVKALMSAVEDRGVPTQKDFGCGDPHGVSMFPNTLHEDQVRSDAAREWLLPNYQRPNLQVLTGQYVGKVLLSQNGTTPRAVGVEFGTHKGNTHNVYAKHEVLLAAGSAVSPTILEYSGIGMKSILEPLGIDTVVDLPVGLNLQDQTTATVRSRITSAGAGQGQAAWXATFNETFGDYSEKAHELLNTKLEQWAEEAVARGGFHNTTALLIQYENYRDWIVNHNVAYSELFLDTAGVASFDVWDLLPFTRGYVHILDKDPYLHHFAYDPQYFLNELDLLGQAAATQLARNISNSGAMQTYFAGETIPGDNLAYDADLSAWTEYIPYHFRPNYHGVGTCSMMPKEMGGVVDNAARVYGVQGLRVIDGSIPPTQMSSHVMTVFYAMALKISDAILEDYASMQ

SEQ ID NO: 426 - protein, 583 aa, Aspergillus niger
SNGIEASLLTDPKDVSGRTVDYIIAGGGLVGLTTAARLTENPNISVLVIESGSYESDRGPIIEDLNAYGDIFGSSVDHAYETVELATNNQTALVRSGNGLGGSTLVNGGTWTRPHKAQVDSWETVFGNEGWNWDNVLAYSLQAERARAPNAKQIAAGHYFNASCHGVNGTVHAGPRDTGDDYSPIVKALMSAVEDRGVPTKKDFGCGDPHGVSMFPNTLHEDQVRSDAAREWLLPNYQRPNLQVLTGQYVGKVLLSQNGTTPRAVGVEFGTHKGNTHNVYAKHEVLLAAGSAVSPTILEYSGIGMKSILEPLGIDTVVDLPVGLNLQDQTTATVRSRITSAGAGQGQAAWFATFNETFGDYSEKAHELLNTKLEQWAEEAVARGGFHNTTALLIQYENYRDWIVNHNVAYSELFLDTAGVASFDVWDLLPFTRGYVHILDKDPYLHHFAYDPQYFLNELDLLGQAAATQLARNISNSGAMQTYFAGETIPGDNLAYDADLSAWTEYIPYHFRPNYHGVGTCSMMPKEMGGVVDNAARVYGVQGLRVIDGSIPPTQMSSHVMTVFYAMALKISDAILEDYASMQ

SEQ ID NO: 427 - protein, 582 aa, Synthetic construct
SNGIEASLLTDPKDVSGRTVDYIIAGGGLTGLTTAARLTENPNISVLVIESGSYESDRGPIIEDLNAYGDIFGSSVDHAYETVELATNNQTALIRSGNGLGGSTLVNGGTWTRPHKAQVDSWETVFGNEGWNWDNVAYSLQAERARAPNAKQIAAGHYFNASCHGVNGTVHAGPRDTGDDYSPIVKALMSAVEDRGVPTKKDFGCGDPHGVSMFPNTLHEDQVRSDAAREWLLPNYQRPNLQVLTGQTVGKVLLSQNGTTPRAVGVEFGTHKGNTHNVYAKHEVLLAAGSAVSPTILEYSGIGMKSILEPLGIDTVVDLPVGLNLQDQTTATVRSRITSAGAGQGQAAWFATFNETFGDYSEKAHELLNTKLEQWAEEAVARGGFHNTTALLIQYENYRDWIVNHNVAYSELFLDTAGVASFDVWDLLPFTRGYVHILDKDPYLHHFAYDPQYFLNELDLLGQAAATQLARNISNSGAMQTTFAGETIPGDNLAYDADLSAWTEYIPYHFRPNTHGVGTCSMMPKEMGGVVDNAARVYGVQGLRVIDGSIPPTQMSSHVMTVFYAMALKISDAILEDYASMQ

SEQ ID NO: 428 - protein, 581 aa, Aspergillus niger
GIEASLLTDPKDVSGRTVDYIIAGGGLTGLTTAARLTENPNISVLVIESGSYESDRGPIIEDLNRYGDIFGSSVDHAYETVELATNNQTALIRSGNGLGGSTLVNGGTWTRPHKAQVDSWETVFGNEGWNWDNVAAYSLQAERARAPNAKQIAAGHYFNASCHGVNGTVHAGPRDTGDDYSPIVKALMSAVEDRGVPTKKDFGCGDPHGVSMFPNTLHEDQVRSDAAREWLLPNYQRPNLQVLTGQYVGKVLLSQNGTTPRAVGVEFGTHKGNTFNVYAKHEVLLAAGSAVSPTILEYSGIGMKSILEPLGIDTVVDLPVGLNLQDQTTATVRSRITSAGAGQGQAAWFATFNETFGDYSEKAHELLNTKLEQWAEEAVARGGFHNTTALLIQYENYRDWIVNHNVAYSELFLDTKGVASFDVWDLLPFTRGYVHILDKDPYLHHFAYDPQYFLNELDLLGQAAATQLARNISNSGAMQTYFAGETIPGDNLAYDADLSAWTEYIPYHFRPNYHGVGTCSMMPKEMGGVVDNAARVYGVQGLRVIDGSIPPTQMSSHVMTVFYAMALKISDAILEDYASMQ

SEQ ID NO: 429 - protein, 583 aa, Aspergillus niger
SNGIEASLLTDPKDVSGRTVDYIIAGGGLVGLTTAARLTENPNISVLVIESGFYESDRGPIIEDLNAYGDIFGSSVDHAYETVELATNNQTALVRSGNGLGGSTLVNGGTWTRPHKAQVDSWETVFGNEGWNWDNVAAYSLQAERARAPNAKQIAAGHYFNASCHGVNGTVHAGPRDTGDDYSPIVKALMSAVEDRGVPTKKDFGCGDPHGVSMFPNTLHEDQVRSDAAREWLLPNYQRPNLQVLTGQYVGKVLLSQNGTTPRAVGVEFGTHKGNTHNVYAKHEVLLAAGSAVSPTILEYSGIGMKSILEPLGIDTVVDLPVGLNLQDQTTSTVRSRITSAGAGQGQAAWFATFNETFGDYSEKAHELLNTKLEQWAEEAVARGGFHNTTALLIQYENYRDWIVNHNVAYSELFLDTAGVASFDVWDLLPFTRGYVHILDKDPYLHHFAYDPQYFLNELDLLGQAAATQLARNISNSGAMQTYFAGETIPGDNLAYDADLSAWTEYIPYHFRPNYHGVGTCSMMPKEMGGVVDNAARVYGVQGLRVIDGSIPPTQMSSHVMTVFYAMALKISDAILEDYASMQ

SEQ ID NO: 430 - protein, 583 aa, Aspergillus niger
SNGIEASLLTDPKDVSGRTVDYIIAGGGLVGLTTAARLTENPNISVLVIESGSYESDRGPIIEDLNAYGDIFGSSVDHAYETVELATNNQTALVRSGNGLGGSTLVNGGTWTRPHKAQVDSWETVFGNEGWNWDNVAAYSLQAERARAPNAKQIAAGHYFNASCHGVNGTVHAGPRDTGDDYSPIVKALMSAVEDRGVPTKKDFGCGDPHGVSMFPNTLHEDQVRSDAAREWLLPNYQRPNLQVLTGQYVGKVLLSQNGTTPRAVGVEFGTHKGNTHNVYAKHEVLLAAGSAVSPTILEYSGIGMKSILEPLGIDTVVDLPVGLNLQDQTTSTVRSRITSAGAGQGQAAWFATFNETFGDYSEKAHELLNTKLEQWAEEAVARGGFHNTTALLIQYENYRDWIVNHNVAYSELFLDTAGVASFDVWDLLPFTRGYVHILDKDPYLHHFAYDPQYFLNELDLLGQAAATQLARNISNSGAMQTYFAGETIPGDNLAYDADLSAWTEYIPYHFRPNYHGVGTCSMMPKEMGGVVDNAARVYGVQGLRVIDGSIPPTQMSSHAMTVFYAMALKISDAILEDYASMQ

SEQ ID NO: 431 - protein, 583 aa, Aspergillus niger
SNGIEASLLTDPKDVSGRTVDYIIAGGGLVGLTTAARLTENPNISVLVIESGSYESDRGPIIEDLNAYGDIFGSSVDHAYETVELATNNQTALVRSGNGLGGSTLVNGGTWTRPHKAQVDSWETVFGNEGWNWDNVAAYSLQAERARAPNAKQIAAGHYFNASCHGVNGTVHAGPRDTGDDYSPIVKALMSAVEDRGVPTKKDFGCGDPHGVSMFPNTLHEDQVRSDAAREWLLPNYQRPNLQVLTGQYVGKVLLSQNGTTPRAVGVEFGTHKGNTHNVYAKHEVLLAAGSAVSPTILEYSGIGMKSILEPLGIDTVVDLPVGLNLQDQTTATVRSRITSAGAGQGQAAWFATFNETFGDYSEKAHELLNTKLEQWAEEAVARGGFHNTTALLIQYENYRDWIVNHNVAYSELFLDTAGVASFDVWDLLPFTRGYVHILDKDPYLHHFAYDPQYFLNELDLLGQAAATQLARNISNSGAMQTYFAGETIPGDNLAYDADLSAWTEYIPYHFRPNYHGVGTCSMMPKEMGGVVDNAAKVYGVQGLRVIDGSIPPTQVSSHVMTVFYAMALKISDAILEDYASMQ

SEQ ID NO: 432 - protein, 583 aa, Aspergillus niger
SNGIEASLLTDPKDVSGRTVDYIIAGGGLVGLTTAARLTENPNISVLVIESGSYESDRGPIIEDLNAYGDIFGSSVDHAYETVELATNNQTALVRSGNGLGGSTLVNGGTWTRPHKAQVDSWETVFGNEGWNWDNVAAYSLQAERARAPNAKQIAAGHYFNASCHGVNGTVHTGPRDTGDDYSPIVKALMSAVEDRGVPTKKDFGCGDPHGVSMFPNTLHEDQVRSDAAREWLLPNYQRPNLQVLTGQYVGKVLLSQNGTTPRAVGVEFGTHKGNTHNVYAKHEVLLAAGSAVSPTILEYSGIGMKSILEPLGIDTVVDLPVGLNLQDQTTATVRSRITSAGAGQGQAAWFATFNETFGDYSEKAHELLNTKLEQWAEEAVARGGFHNTTALLIQYENYRDWIVNHNVAYSELLLDTAGVASFDVWDLLPFTRGYVHILDKDPYLHHFAYDPQYFLNELDLLGQAAATQLARNISNSGAMQTYFAGETIPGDNLAYDADLSAWTEYIPYHFRPNYHGVGTCSMMPKEMGGVVDNAARVYGVQGLRVIDGSIPPTQMSSHVMTVFYAMALKISDAILEDYASMQ

SEQ ID NO: 433 - protein, 583 aa, Aspergillus niger
SNGIEASLLTDPKDVSGRTVDYIIAGGGLVGLTTAARLTENPNISVLVIESGSYESDRGPIIEDLNAYGKIFGSSVDHAYETVELATNNQTALIRSGNGLGGSTLVNGGTWTRPHKAQVDSWETVFGNEGWNWDNVAAYSLQAERARAPNAKQIAAGHYFNTSCHGVNGTVHAGPRDTGDDYSPIVKALMSAVEDRGVPTKKDFGCGDPHGVSMFPNTLHEDQVRSDAAREWLLPNYQRPNLQVLTGQYVGKVLLSQNGTTPRAVGVEFGTHKGNTHNVYAKHEVLLAAGSAVSPTILEYSGIGMKSILEPLGIKTVVDLPVGLNLQDQTTATVRSRITSAGAGQGQAAWFATFNETFGDYSEKAHELLNTKLEQWAEEAVARGGFHNTTALLIQYENYRDWIVNHNVAYSELFLDTAGVASFDVWDLLPFTRGYVHILDKDPYLHHFAYDPQYFLNELDLLGQAAATQLARNISNSGAMQTYFAGETIPGDNLAYDADLSAWTEYIPYHFRPNYHGVGTCSMMPKEMGGVVDNAARVYGVQGLRVIDGSIPPTQMSSHVMTVFYAMALKISDAILEDYASMQ

SEQ ID NO: 434 - protein, 583 aa, Aspergillus niger
SNGIEASLLTDPKDVSGRTVDYIIAGGGLVGLTTAARLTENPNISVLVIESGSYESDRGPIIEDLNAYGDIFGSSVDHAYETVELATNNQTALVRSGNGLGGSTLVNGGTWTRPHKAQVDSWETVFGNEGWNWDNVAAYSLQAERARAPNAKQIAAGHYFNASCHGVNGTVHAGPRDTGDDYSPIVKALMSAVEDRGVPTKKDFGCGDPHGVSMFPNTLHEDQVRSDAAREWLLPNYQRPNLQVLTGQYVGKVLLSQNGTTPRAVGVEFGTHKGNTHNVYAKHEVLLAAGSAVSPTILEYSGIGMKSILEPLGIDTVVDLPVGLNLQDQTTSTVRSRITSAGAGQGQAAWFATFNETFGDYSEKAHELLNTKLEQWAEEAVARGGFHNTTALLIQYENYRDWIVNHNVAYSELFLDTAGVASFDVWDLLPFTRGYVHILDKDPYLHHFAYDPQYFLNELDLLGQAAATQLARNISNSGAMQTYFAGETIPGDNLAYDADLSAWTEYIPYHFRPNYHGVGTCSMMPKEMGGVVDNAARVYGVQGLRVIDGSIPPTQMSSHPMTVFYAMALKISDAILEDYASMQ

SEQ ID NO: 435 - protein, 581 aa, Aspergillus niger
GIEASLLTDPKDVSGRTVDYIIAGGGLTGLTTAARLTENPNISVLVIESGSYESDRGPIIEDLNRYGDIFGSSVDHAYETVELATNNQTALIRSGNGLGGSTLINGGTWTRPHKAQVDSWETVFGNEGWNWDNVAAYSLQAERARAPNAKQIAAGHYFNASCHGVNGTVHAGPRDTGDDYSPIVKALMSAVEDRGVPTKKDFGCGDPHGVSMFPNTLHEDQVRSDAAREWLLPNYQRPNLQVLTGQYVGKVLLSQNGTTPRAVGVEFGTHKGNTFNVYAKHEVLLAAGSAVSPTILEYSGIGMKSILEPLGIDTVVDLPVGLNLQDQTTATVRSRITSAGAGQGQAAWFATFNETFGDYSEKAHELLNTKLEQWAEEAVARGGFHNTTALLIQYENYRDWIVNHNVAYSELFLDTKGVASFDVWDLLPFTRGYVHILDKDPYLHHFAYDPQYFLNELDLLGQAAATQLARNISNSGAMQTYFAGETIPGDNLAYDADLSAWTEYIPYHFRPNYHGVGTCSMMPKEMGGVVDNAARVYGVQGLRVIDGSIPPTQMSSHVMTVFYAMALKISDAILEDYASMQ

SEQ ID NO: 436 - protein, 590 aa, Aspergillus oryzae
SFPIHKRSNGIEASLLTDPKDVSGRTVDYIIAGGGLTGLTTAARLTENPNISVLVIESGSYESDRGPIIEDLNAYGDIFGSSVDHAYETVELATNNQTALIRSGNGLGGSTLVNGGTWTRPHKAQVDSWETVFGNEGWNWDNVAAYSLQAERARAPNAKQIAAGHYFNASCHGVNGTVHAGPRDTGDDYSPIVKALMSAVEDRGVPTKKDFGCGDPHGVSMFPNTLHEDQVRSDAAREWLLPNYQRPNLQVLTGQYVGKVLLSQNGTTPRAVGVEFGTHKGNTHNVYAKHEVLLAAGSAVSPTILEYSGIGMKSILEPLGIDTVVDLPVGLNLQDQTTATVRSRITSAGAGQGQAAWFATFNETFGDYSEKAHELLNTKLEQWAEEAVARGGFHNTTALLIQYENYRDWIVNHNVAYSELFLDTAGVASFDVWDLLPFTRGYVHILDKDPYLHHFAYDPQYFLNELDLLGQAAATQLARNISNSGAMQTYFAGETIPGDNLAYDADLSAWTEYIPYHFRPNYHGVGTCSMMPKEMGGVVDNAARVYGVQGLRVIDGSIPPTQMSSHVMTVFYAMALKISDAILEDYASMQ

SEQ ID NO: 437 - protein, 583 aa, Aspergillus niger
SNGIEASLLTDPKDVSGRTVDYIIAGGGLVGLTTAARLTENPNISVLVIESGSYESDRGPIIEDLNAYGDIFGSSVDHAYETVELATNNQTALVRSGNGLGGSTLVNGGTWTRPHKAQVDSWETVFGNEGWNWDNVAAYSLQAERARAPNAKQIAAGHYFNTSCHGVNGTVHAGPRDTGDDYSPIVKALMSAVEDRGVPTKKDFGCGDPHGVSMFPNTLHEDQVRSDAAREWLLPNYQRPNLQVLTGQYVGKVLLSQNGTTPRAVGVEFGTHKGNTHNVYAKHEVLLAAGSAVSPTILEYSGIGMKSILEPLGIDTVVDLPVGLNLQDQTTATVRSRITSAGAGQGQAAWFATFNETFGDYSEKAHELLNTKLEQWAEEAVARGGFHNTTALLIQYENYRDWIVNHNVAYSELFLDTAGVASFDVWDLLPFTRGYVHILDKDPYLHHFAYDPQYFLNELDLLGQAAATQLARNISNSGAMQTYFAGETIPGDNLAYDADLSAWTEYIPYHFRPNYHGVGTCSMMPKEMGGVVDNAAKVYGVQGLRVIDGSIPPTQVSSHVMTVFYAMALKISDAILEDYASMQ

SEQ ID NO: 438 - protein, 583 aa, Aspergillus niger
SNGIEASLLTDPKDVSGRTVDYIIAGGGLVGLTTAARLTENPNISVLVIESGSYESDRGPIIEDLNAYGDIFGSSVDHAYETVELATNNQTALVRSGNGLGGSTLVNGGTWTRPHKAQVDSWETVFGNEGWNWDNVAAYSLQAERARAPNAKQIAAGHYFNASCHGVNGTVHIGPRDTGDDYSPIVKALMSAVEDRGVPTKKDFGCGDPHGVSMFPNTLHEDQVRSDAAREWLLPNYQRPNLQVLTGQYVGKVLLSQNGTTPRAVGVEFGTHKGNTHNVYAKHEVLLAAGSAVSPTILEYSGIGMKSILEPLGIDTVVDLPVGLNLQDQTTSTVRSRITSAGAGQGQAAWFATFNETFGDYSEKAHELLNTKLEQWAEEAVARGGFHNTTALLIQYENYRDWIVNHNVAYSELLLDTAGVASFDVWDLLPFTRGYVHILDKDPYLHHFAYDPQYFLNELDLLGQAAATQLARNISNSGAMQTYFAGETIPGDNLAYDADLSAWTEYIPYHFRPNYHGVGTCSMMPKEMGGVVDNAARVYGVQGLRVIDGSIPPTQMSSHVMTVFYAMALKISDAILEDYASMQ

SEQ ID NO: 439 - protein, 583 aa, Aspergillus niger
SNGIEASLLTDPKDVSGRTVDYIIAGGGLVGLTTAARLTENPNISVLVIESGSYESDRGPIIEDLNAYGDIFGSSVDHAYETVELATNNQTALVRSGNGLGGSTLVNGGTWTRPHKAQVDSWETVFGNEGWNWDNVAAYSLQAERARAPNAKQIAAGHYFNASCHGVNGTVHVGPRDTGDDYSPIVKALMSAVEDRGVPTKKDFGCGDPHGVSMFPNTLHEDQVRSDAAREWLLPNYQRPNLQVLTGQYVGKVLLSQNGTTPRAVGVEFGTHKGNTHNVYAKHEVLLAAGSAVSPTILEYSGIGMKSILEPLGIDTVVDLPVGLNLQDQTTNTVRSRITSAGAGQGQAAWFATFNETFGDYSEKAHELLNTKLEQWAEEAVARGGFHNTTALLIQYENYRDWIVNHNVAYSELFLDTAGVASFDVWDLLPFTRGYVHILDKDPYLHHFAYDPQYFLNELDLLGQAAATQLARNISNSGAMQTYFAGETIPGDNLAYDADLSAWTEYIPYHFRPNYHGVGTCSMMPKEMGGVVDNAARVYGVQGLRVIDGSIPPTQMSSHPMTVFYAMALKISDAILEDYASMQ

SEQ ID NO: 440 - protein, 583 aa, Aspergillus niger
SNGIEASLLTDPKDVSGRTVDYIIAGGGLVGLTTAAKLTENPNISVLVIESGSYESDRGPIIEDLNAYGDIFGSSVDHAYETVELATNNQTALVRSGNGLGGSTLINGGTWTRPHKAQVDSWETVFGNEGWNWDNVAAYSLQAERARAPNAKQIAAGHYFNTSCHGVNGTVHAGPRDTGDDYSPIVKALMSAVEDRGVPTKKDFGCGDPHGVSMFPNTLHEDQVRSDAAREWLLPNYQRPNLQVLTGQYVGKVLLSQNGTTPRAVGVEFGTHKGNTHNVYAKHEVLLAAGSAVSPTILEYSGIGMKSILEPLGIDTVVDLPVGLNLQDQTTATVRSRITSAGAGQGQAAWFATFNETFGDYSEKAHELLNTKLEQWAEEAVARGGFHNTTALLIQYENYRDWIVNHNVAYSELFLDTAGVASFDVWDLLPFTRGYVHILDKDPYLHHFAYDPQYFLNELDLLGQAAATQLARNISNSGAMQTYFAGETIPGDNLAYDADLSAWTEYIPYHFRPNYHGVGTCSMMPKEMGGVVDNAARVYGVQGLRVIDGSIPPTQMSSHVMTVFYAMALKISDAILEDYASMQ

SEQ ID NO: 441 - protein, 583 aa, Aspergillus niger
SYGIEASLLTDPEDVSGRTVDYIIAGGGLVGLTTAARLTENPNISVLVIESGSYESDRGPIIEDLNAYGDIFGSSVDHAYETVELATNNQTALVRSGNGLGGSTLVNGGTWTRPHKAQVDSWETVFGNEGWNWDNVAAYSLQAERARAPNARQIAAGHYFNASCHGVNGTVHAGPRDTGDDYSPIVKALMSAVEDRGVPTKKDFGCGDPHGVSMFPNTLHEDQVRSDAAREWLLPNYQRPNLQVLTGQYVGKVLLSQNGTTPRAVGVEFGTHKGNTHNVYAKHEVLLAAGSAVSPTILEYSGIGMKSILEPLGIDTVVDLPVGLNLQDQTTATVRSRITSAGAGQGQAAWFATFNETFGDYSEKAHELLNTKLEQWAEEAVARGGFHNTTALLIQYENYRDWIVNHNVAYSELFLDTAGVASFDVWDLLPFTRGYVHILDKDPYLHHFAYDPQYFLNELDLLGQAAATQLARNISNSGAMQTYFAGETIPGDNLAYDADLSAWTEYIPYHFRPNYHGVGTCSMMPKEMGGVVDNAARVYGVQGLRVIDGSIPPTQMSSHVMTVFYAMALKISDAILEDYASMQ

SEQ ID NO: 442 - protein, 581 aa, Aspergillus niger
GIEASLLTDPKDVSGRTVDYIIAGGGLTGLTTAARLTENPNISVLVIESGSYESDRGPIIEDLNRYGDIFGSSVDHAYETVELATNNQTALIRSGNGLGGSTLINGGTWTRPHKAQVDSWETVFGNEGWNWDNVAAYSLQAERARAPNAKQIAAGHYFNASCHGVNGTVHAGPRDTGDDYSPIVKALMSAVEDRGVPTKKDFGCGDPHGVSMFPNTLHEDQVRSDAAREWLLPNYQRPNLQVLTGQYVGKVLLSQNGTTPRAVGVEFGTHKGNTFNVYAKHEVLLAAGSLVSPTILEYSGIGMKSILEPLGIDTVVDLPVGLNLQDQTTATVRSRITSAGAGQGQAAWFATFNETFGDYSEKAHELLNTKLEQWAEEAVARGGFHNTTALLIQYENYRDWIVNHNVAYSELFLDTKGVASFDVWDLLPFTRGYVHILDKDPYLHHFAYDPQYFLNELDLLGQAAATQLARNISNSGAMQTYFAGETIPGDNLAYDADLSAWTEYIPYHFRPNYHGVGTCSMMPKEMGGVVDNAARVYGVQGLRVIDGSIPPTQMSSHVMTVFYAMALKISDAILEDYASMQ

SEQ ID NO: 443 - protein, 581 aa, Aspergillus niger
GIEASLLTDPKDVSGRTVDYIIAGGGLTGLTLAARLTENPNISVLVIESGSYESDRGPIIEDLNRYGDIFGSSVDHAYETVELATNNQTALIRSGNGLGGSTLINGGTWTRPHKAQVDSWETVFGNEGWNWDNVAAYSLQAERARAPNAKQIAAGHYFNASCHGVNGTVHAGPRDTGDDYSPIVKALMSAVEDRGVPTKKDFGCGDPHGVSMFPNTLHEDQVRSDAAREWLLPNYQRPNLQVLTGQYVGKVLLSQNGTTPRAVGVEFGTHKGNTFNVYAKHEVLLAAGSAVSPTILEYSGIGMKSILEPLGIDTVVDLPVGLNLQDQTTATVRSRITSAGAGQGQAAWFATFNETFGDYSEKAHELLNTKLEQWAEEAVARGGFHNTTALLIQYENYRDWIVNHNVAYSELFLDTKGVASFDVWDLLPFTRGYVHILDKDPYLHHFAYDPQYFLNELDLLGQAAATQLARNISNSGAMQTYFAGETIPGDNLAYDADLSAWTEYIPYHFRPNYHGVGTCSMMPKEMGGVVDNAARVYGVQGLRVIDGSIPPTQMSSHVMTVFYAMALKISDAILEDYASMQ

SEQ ID NO: 444 - protein, 605 aa, Aspergillus niger
MQTLLVSSLVVSLAAALPHYIRSNGIEASLLTDPKDVSGRTVDYIIAGGGLTGLTTAARLTENPNISVLVIESGSYESDRGPIIEDLNAYGDIFGSSVDHAYETVELATNNQTALIRSGNGLGGSTLVNGGTWTRPHKAQVDSWETVFGNEGWNWDNVAAYSLQAERARAPNAKQIAAGHYFNASCHGVNGTVHAGPRDTGDDYSPIVKALMSAVEDRGVPTKKDFGCGDPHGVSMFPNTLHEDQVRSDAAREWLLPNYQRPNLQVLTGQYVGKVLLSQNGTTPRAVGVEFGTHKGNTHNVYAKHEVLLAAGSAVSPTILEYSGIGMKSILEPLGIDTVVDLPVGLNLQDQTTATVRSRITSAGAGQGQAAWFATFNETFGDYSEKAHELLNTKLEQWAEEAVARGGFHNTTALLIQYENYRDWIVNHNVAYSELFLDTAGVASFDVWDLLPFDRGYVHILDKDPYLHHFAYDPQYFLNELDLLGQAAATQLARNISNSGAMQTYFAGEILPGDNLAYDADLSAWTEYIPYHFRPNYHDVGTCSMMPKEMGSVVDNAARVYGVRGLRVIDGSIPPTQMSSHVMTVFYAMALKISDAILEDYASMQ

SEQ ID NO: 445 - protein, 583 aa, Aspergillus niger
SNGIEASLLTDPKDVSGRTVDYIIAGGGLVGLTTAARLTENPNISVLVIESGSYESDRGPIIEDLNAYGDIFGSSVDHAYETVELATNNQTALVRSGNGLGGSTLVNGGTWTRPHKAQVDSWETVFGNEGWNWDNVAAYSLQAERARAPNAKQIAAGHYFNASCHGVNGTVHVGPRDTGDDYSPIVKALMSAVEDRGVPTKKDFGCGDPHGVSMFPNTLHEDQVRSDAAREWLLPNYQRPNLQVLTGQYVGKVLLSQNGTTPRAVGVEFGTHKGNTHNVYAKHEVLLAAGSAVSPTILEYSGIGMKSILEPLGIDTVVDLPVGLNLQDQTTNTVRSRITSAGAGQGQAAWFATFNETFGDYSEKAHELLNTKLEQWAEEAVARGGFHNTTALLIQYENYRDWIVNHNVAYSELVLDTAGVASFDVWDLLPFTRGYVHILDKDPYLHHFAYDPQYFLNELDLLGQAAATQLARNISNSGAMQTYFAGETIPGDNLAYDADLSAWTEYIPYHFRPNYHGVGTCSMMPKEMGGVVDNAARVYGVQGLRVIDGSIPPTQMSSHLMTVFYAMALKISDAILEDYASMQ

SEQ ID NO: 446 - protein, 583 aa, Aspergillus niger
SNGIEASLLTDPKDVSGRTVDYIIAGGGLVGLTTAAKLTENPNISVLVIESGSYESDRGPIIEDLNAYGDIFGSSVDHAYETVELATNNQTALVRSGNGLGGSTLINGGTWTRPHKAQVDSWETVFGNEGWNWDNVAAYSLQAERARAPNAKQIAAGHYFNTSCHGVNGTVHAGPRDTGDDYSPIVKALMSAVEDRGVPTKKDFGCGDPHGVSMFPNTLHEDQVRSDAAREWLLPNYQRPNLQVLTGQYVGKVLLSQNGTTPRAVGVEFGTHKGNTHNVYAKHEVLLAAGSAVSPTILEYSGIGMKSILEPLGIDTVVDLPVGLNLQDQTTATVRSRITSAGAGQGQAAWFATFNETFGDYSEKAHELLNTKLEQWAEEAVARGGFHNTTALLIQYENYRDWIVNHNVAYSELFLDTAGVASFDVWDLLPFTRGYVHILDKDPYLHHFAYDPQYFLNELDLLGQAAATQLARNISNSGAMQTYFAGETIPGDNLAYDADLSAWTEYIPYHFRPNYHGVGTCSMMPKEMGGVVDNAARVYGVQGLRVIDGSIPPTQVSSHVMTVFYAMALKISDAILEDYASMQ

SEQ ID NO: 447 - protein, 583 aa, Aspergillus niger
SNGIEASLLTDPKDVSGRTVDYIIAGGGLVGLTTAARLTENPNISVLVIESGSYESDRGPIIEDLNAYGDIFGSSVDHAYETVELATNNQTALVRSGNGLGGSTLVNGGTWTRPHKAQVDSWETVFGNEGWNWDNVAAYSLQAERARAPNAKQIAAGHYFNASCHGVNGTVHVGPRDTGDDYSPIVKALMSAVEDRGVPTKKDFGCGDPHGVSMFPNTLHEDQVRSDAAREWLLPNYQRPNLQVLTGQYVGKVLLSQNGTTPRAVGVEFGTHKGNTHNVYAKHEVLLAAGSAVSPTILEYSGIGMKSILEPLGIDTVVDLPVGLNLQDQTTSTVRSRITSAGAGQGQAAWFATFNETFGDYSEKAHELLNTKLEQWAEEAVARGGFHNTTALLIQYENYRDWIVNHNVAYSELILDTAGVASFDVWDLLPFTRGYVHILDKDPYLHHFAYDPQYFLNELDLLGQAAATQLARNISNSGAMQTYFAGETIPGDNLAYDADLSAWTEYIPYHFRPNYHGVGTCSMMPKEMGGVVDNAARVYGVQGLRVIDGSIPPTQMSSHTMTVFYAMALKISDAILEDYASMQ

SEQ ID NO: 448 - protein, 581 aa, Aspergillus niger
GIEASLLTDPEDVSGRTVDYIIAGGGLTGLTTAARLTENPNISVLVIESGSYESDRGPIIEDLNAYGDIFGSSVDHAYETVELATNNQTALIRSGNGLGGSTLVNGGTWTRPHKAQVDSWETVFGNEGWNWDNVAAYSLQAERARAPNAKQIAAGHYFNASCHGKNGTVHAGPRDTGDDYSPIVDALMSAVEDRGVPTKKDFGCGDPHGVSMFPNTLHEDQVRSDAAREWLLPNYQRPNLQVLTGQYVGKVLLSQNGTTPRAVGVEFGTHKGNTHNVYAKHEVLLAAGSAVSPTILEYSGIGMKSILEPLGIDTVVDLPVGLNLQDQTTATVRSRITSAGAGQGQAAWFATFNETFGDYTEKAHELPNTKLEQWAEEAVARGGFHNTTALLIQYENYRDWIVNHNVAYSELFLDTAGVASFDVWDLLPFTRGYVHILDKDPYLHHFAYDPQYFLNELDLLGQAAATQLARNISNSGAMQTYFAGETIPGDNLAYDADLSAWQEYIPYHFRPNYHGVGTCSMMPKEMGGVVDNAARVYGVQGLRVIDGSIPPTQMSSHVMTVFYAMALKIADAILEDYASMQ

SEQ ID NO: 449 - protein, 581 aa, Aspergillus niger
GIEASLLTDPKDVSGRTVDYIIAGGGLTGLTLAARLTENPNISVLVIESGSYESDRGPIIEDLNRYGDIFGSSVDHAYETVELATNNQTALIRSGNGLGGSTLINGGTWTRPHKAQVDSWETVFGNEGWNWDNVAAYSLQAERARAPNAKQIAAGHYFNASCHGVNGTVHAGPRDTGDDYSPIVKALMSAVEDRGVPTKKDFGCGDPHGVSMFPNTLHEDQVRSDAAREWLLPNYQRPNLQVLTGQYVGKVLLSQNGTTPRAVGVEFGTHKGNTFNVYAKHEVLLAAGSLVSPTILEYSGIGMKSILEPLGIDTVVDLPVGLNLQDQTTATVRSRITSAGAGQGQAAWFATFNETFGDYSEKAHELLNTKLEQWAEEAVARGGFHNTTALLIQYENYRDWIVNHNVAYSELFLDTKGVASFDVWDLLPFTRGYVHILDKDPYLHHFAYDPQYFLNELDLLGQAAATQLARNISNSGAMQTYFAGETIPGDNLAYDADLSAWTEYIPYHFRPNYHGVGTCSMMPKEMGGVVDNAARVYGVQGLRVIDGSIPPTQMSSHVMTVFYAMALKISDAILEDYASMQ

SEQ ID NO: 450 - protein, 583 aa, Aspergillus niger
SNGIEASLLTDPKDVSGRTVDYIIAGGGLVGLTTAAKLTENPNISVLVIESGCYESDRGPIIEDLNAYGDIFGSSVDHAYETVELATNNQTALVRSGNGLGGSTLINGGTWTRPHKAQVDSWETVFGNEGWNWDNVAAYSLQAERARAPNAKQIAAGHYFNTSCHGVNGTVHAGPRDTGDDYSPIVKALMSAVEDRGVPTKKDFGCGDPHGVSMFPNTLHEDQVRSDAAREWLLPNYQRPNLQVLCGQYVGKVLLSQNGTTPRAVGVEFGTHKGNTHNVYAKHEVLLAAGSAVSPTILEYSGIGMKSILEPLGIDTVVDLPVGLNLQDQTTATVRSRITSAGAGQGQAAWFATFNETFGDYSEKAHELLNTKLEQWAEEAVARGGFHNTTALLIQYENYRDWIVNHNVAYSELFLDTAGVASFDVWDLLPFTRGYVHILDKDPYLHHFAYDPQYFLNELDLLGQAAATQLARNISNSGAMQTYFAGETIPGDNLAYDADLSAWTEYIPYHFRPNYHGVGTCSMMPKEMGGVVDNAARVYGVQGLRVIDGSIPPTQMSSHVMTVFYAMALKISDAILEDYASMQ

SEQ ID NO: 451 - protein, 583 aa, Aspergillus niger
SNGIEASLLTDPKDVSGRTVDYIICGGGLVGLTTAAKLTENPNISVLVIESGSYESDRGPIIEDLNAYGDIFGSSVDHAYETVELATNNQTALVRSGNGLGGSTLINGGTWTRPHKAQVDSWETVFGNEGWNWDNVAAYSLQAERARAPNAKQIAAGHYFNTSCHGVNGTVHAGPRDTGDDYSPIVKALMSAVEDRGVPTKKDFGCGDPHGVSMFPNTLHEDQVRSDAAREWLLPNYQRPNLQVLTGQYCGKVLLSQNGTTPRAVGVEFGTHKGNTHNVYAKHEVLLAAGSAVSPTILEYSGIGMKSILEPLGIDTVVDLPVGLNLQDQTTATVRSRITSAGAGQGQAAWFATFNETFGDYSEKAHELLNTKLEQWAEEAVARGGFHNTTALLIQYENYRDWIVNHNVAYSELFLDTAGVASFDVWDLLPFTRGYVHILDKDPYLHHFAYDPQYFLNELDLLGQAAATQLARNISNSGAMQTYFAGETIPGDNLAYDADLSAWTEYIPYHFRPNYHGVGTCSMMPKEMGGVVDNAARVYGVQGLRVIDGSIPPTQMSSHVMTVFYAMALKISDAILEDYASMQ

SEQ ID NO: 452 - protein, 605 aa, Aspergillus niger
MQTLLVSSLVVSLAAALPHYIRSNGIEASLLTDPKDVSGRTVDYIIAGGGLTGLTTAARLTENPNISVLVIESGSYESDRGPIIEDLNAYGDIFGSSVDHAYETVELATNNQTALIRSGNGLGGSTLVNGGXWTRPHKAQVDSWETVFGNEGWNWDNVAAYSLQAERARAPNAKQIAAGHYFNASCHGVNGTVHAGPRDTGDDYSPIVKALMSAVEDRGVPTKKDFGCGDPHGVSMFPNTLHEDQVRSDAAREWLLPNYQRPNLQVLTGQYVGKVLLSQNGTTPRAVGVEFGTHKGNTHNVYAKHEVLLAAGSAVSPTILEYSGIGMKSILEPLGIDTVVDLPVGLNLQDQTTATVRSRITSAGAGQGQAAWXATFNETFGDYSEKAHELLNTKLEQWAEEAVARGGFHNTTALLIQYENYRDWIVNHNVAYSELFLDTAGVASFDVWDLLPFDRGYVHILDKDPYLHHFAYDPQYFLNELDLLGQAAATQLARNISNSGAMQTYFAGEILPGDNLAYDADLSAWTEYIPYHFRPNYHDVGTCSMMPKEMGSVVDNAARVYGVRGLRVIDGSIPPTQMSSHVMTVFYAMALKISDAILEDYASMQ

SEQ ID NO: 453 - protein, 583 aa, Aspergillus niger
SNGIEASLLTDPKDVSGRTVDYIIAGGGLVGLTTAAKLTENPNISVLVIESGSYESDRGPIIEDLNAYGDIFGSSVDHAYETVELATNNQTALVRSGNGLGGSTLVNGGTWTRPHKAQVDSWETVFGNEGWNWDNVAAYSLQAERARAPNAKQIAAGHYFNTSCHGVNGTVHAGPRDTGDDYSPIVKALMSAVEDRGVPTKKDFGCGDPHGVSMFPNTLHEDQVRSDAAREWLLPNYQRPNLQVLTGQYVGKVLLSQNGTTPRAVGVEFGTHKGNTHNVYAKHEVLLAAGSAISPTILEYSGIGMKSILDPLGIDTVVDLPVGLNLQDQTTATVRSRITSAGAGQGQAAWFATFNETFGDYSEKAHELLNTKLEQWAEEAVARGGFHNTTALLIQYENYRDWIVNHNVAYSELFLDTAGVASFDVWDLLPFTRGYVHILDKDPYLHHFAYDPQYFLNELDLLGQAAATQLARNISNSGAMQTYFAGETIPGDNLAYDADLSAWTEYIPYHFRPNYHGVGTCSMMPKEMGGVVDNAAKVYGVQGLRVIDGSIPPTQVSSHVMTVFYAMALKISDAILEDYASMQ

SEQ ID NO: 454 - protein, 587 aa, Aspergillus niger
SNGIEASLLTDPKDVSGRTVDYIIAGGGLTGLTTAARLTENPNISVLVIESGSYESDRGPIIEDLNAYGDIFGSSVDHAYETVELATNNQTALIRSGNGLGGSTLVNGGTWTRPHKAQVDSWETVFGNEGWNWDNVAAYSLQAERARAPNAKQIAAGHYFNASCHGVNGTVHAGPRDTGDDYSPIVKALMSAVEDRGVPIKKDFGCGDPHGVSMFPNTLHEDQVRSDAAREWLLPNYQRPNLQVLIGQYVGKVLLSQNGTTPRAVGVEFGTHKGNTHNVYAKHEVLLAAGSAVSPTILEYSGIGMKSILEPLGIDTVVDLPVGLNLQDQTTATVRSRITSAGAGQGQAAWFATFNETFGDYSEKAHELLNTKLEQWAEEAVARGGFEINTTALLIQYENYRDWIVNEINVAYSELFLDTAGVASFDVWDLLPFTRGYVHILDKDPYLHHFAYDPQYFLNELDLLGQAAATQLARNISNSGAMQTYFAGETIPGDNLAYDADLSAWTEYIPYIIFRPNYEGVGICSMMPKEMGGVVDNAARVYGVQGLRVIDGSIPPTQMSSEIVMTVFYAMALKISDAILEDYASMQ

SEQ ID NO: 455 - protein, 583 aa, unidentified
SNGIEASLLTDPKDVSGRTVDYIIAGGGLTGLTTAARLTENPNISVLVIYSGSYESDRGPIIEDLNAYGDIFGSSVDHAYETVELATNNQTALIRSGNGLGGSTLVNGGTWTRPHKAQVDSWETVFGNEGWNWDNVAYSLQAERARAPNAKQIAAGHYFNASCHGVNGTVHAGPRDTGDDYSPIVKALMSAVEDRGVPTKKDFGCGDPHGVSMFPNTLHEDQVRSDAAREWLLPNYQRPNLQVLTGQTVGKVLLSQNGTTPRAVGVEFGTHKGNTHNVYALHEVLLAAGSAVSPTILEYSGIGMKSILEPLGIDTVVDLPVGLNLQDQTTATVRSRITSAGAGQGQAAWFATFNETFGDYSEKAHELLNTKLEQWAEEAVARGGFHNTTALLIQYENTRDWIVNHNVATSELFLDTAGVASFDVWDLLPFTRGYVHILDKDPTTLHHFAYDPQTFLNELDLLGQAAATQLARNISNSGAMQTTFAGETIPGDNLATDADLSAWTEYIPYHFRPNTHGVGTCSMMPKEMGGVVDNAARVYGVQVLRVIDGSIPPTQMSSTVMTVFYAMALKISDAILEDYASMQ

SEQ ID NO: 456 - protein, 605 aa, Penicillium polonicum
MKLLGVLSGLGLVVVATALPLQEFDLQSSLLTDPRKVAGETFDYVIAGGGLTGLTVAARLTENPDINVLVIESGFYESNIGPIIENLNHYGDIFTTSVDQAFETVPLAIHNRTEIVRSGKGLGGSTLVNGGSWTRPHKAQVNSWEKVFGMEGWNWDNLLPYMNKVEASRPPNAAQIAAGHYFDPACHGVNGTVQVGPRDTGESYSPMIKSLMETAKNSGVPVQKDFSCGVPHGISMFPNDVHEDQTRSDAAREWLLPNYKRKNLKVLTGQMVGRVLFDTTTSTPKAVGVNFGTHNKVNFDVHAKHEVLLAAGSTVSPQILEHSGVGLKTVLDKVGVKQLVELPVGLNLQDQTTTTVRSAINPIGAGQGQAAYFATFNETFGDQAPRAHELLNTKLEQWAKDAVSRGGFHNETALLIQYENYRDWLVNSDVSYAEIFIDTAGKLSLDLWDLIPFTRGYVHILDSDPYLRRFAYDPQYFLNELDLLGQAAASKLAREISNKGEMTKYFNSETVPGNNLAYDATLDQWVDYVKQNFRPNYHGVGTCSMMSKELGGVVDAAARVYDVEGLRVIDGSIPPTQVSSHVMTVFYGMAEKISEAILADYHAAS

SEQ ID NO: 457 - protein, 598 aa, Escherichia coli BL21(DE3)
SLFLYGLQVAAPALASNGIEASLLTDPRDVSGRTVDYIIAGGGLTGLTTAARLTENPNISVLVIESGSYESDRGPIIEDLNAYGDIFGSSVDHAYETVELATNNQTALIRSGNGLGGSTLVNGGTWTRPHKAQVDSWETVFGNEGWNWDNVAAYSLQAERARAPNAKQIAAGHYFNASCHGVNGTVHAGPRDTGDDYSPIVKALMSAVEDRGVPTKKDFGCGDPHGVSMFPNTLHEDQVRSDAAREWLLPNYQRPNLQVLTGQYVGKVLLSQNGTTPRAVGVEFGTHKGNTHNVYAKHEVLLAAGSAVSPTILEYSGIGMKSILEPLGIDTVVDLPVGLNLQDQTTATVRSRITSAGAGQGQAAWFATFNETFGDYSEKAHELLNTKLEQWAEEAVARGGFHNTTALLIQYENYRDWIVNHNVAYSELFLDTAGVASFDVWDLLPFTRGYVHILDKDPYLHHFAYDPQYFLNELDLLGQAAATQLARNISNSGAMQTYFAGETIPGDNLAYDADLSAWTEYIPYHFRPNYHGVGTCSMMPKEMGGVVDNAARVYGVQGLRVIDGSIPPTQMSSHVMTVFYAMALKISDAILEDYASMQ

SEQ ID NO: 458 - protein, 605 aa, Aspergillus niger
MQTLLVSSLVVSLAAALPHYIRSNGIEASLLTDPKEVAGRTVDYIIAGGGLTGLTTAARLTENPDITVLVIESGSYESDRGPIIEDLNAYGDIFGSSVDHAYETVELATNNQTALIRSGNGLGGSTLVNGGTWTRPHKAQVDSWETVFGNEGWNWDSVAAYSLQAERARAPNAKQIAAGHYFNASCHGINGTVHAGPRDTGDDYSPIVKALMSAVEDRGVPTKKDLGCGDPHGVSMFPNTLHEDQVRSDAAREWLLPNYQRPNLQVLTGQYVGKVLLSQNATTPRAVGVEFGTHKGNTHNVYAKHEVLLAAGSAVSPTILEYSGIGMKSILEPLGIDTVVDLPVGLNLQDQTTSTVRSRITSAGAGQGQAAWFATFNETFGDYAEKAHELLNTKLEQWAEEAVARGGFHNTTALLIQYENYRDWIVKDNVAYSELFLDTAGVASFDVWDLLPFTRGYVHILDKDPYLRHFAYDPQYFLNELDLLGQAAATQLARNISNSGAMQTYFAGETIPGDNLAYDADLSAWVEYIPYNFRPNYHGVGTCSMMPKEMGGVVDNAARVYGVQGLRVIDGSIPPTQMSSHVMTVFYAMALKIADAILADYASMQ

SEQ ID NO: 459 - protein, 589 aa, Aspergillus niger
LPHYIRSNGIEASLLTDPKEVAGRTVDYIIAGGGLTGLTTAARLTENPDITVLVIESGSYESDRGPIIEDLNAYGDIFGSSVDHAYETVELATNNQTALIRSGNGLGGSTLVNGGTWTRPHKAQVDSWETVFGNEGWNWDSVAAYSLQAERARAPNAKQIAAGHYFNASCHGINGTVHAGPRDTGDDYSPIVKALMSAVEDRGVPTKKDLGCGDPHGVSMFPNTLHEDQVRSDAAREWLLPNYQRPNLQVLTGQYVGKVLLSQNATTPRAVGVEFGTHKGNTHNVYAKHEVLLAAGSAVSPTILEYSGIGMKSILEPLGIDTVVDLPVGLNLQDQTTSTVRSRITSAGAGQGQAAWFATFNETFGDYAEKAHELLNTKLEQWAEEAVARGGFHNTTALLIQYENYRDWIVKDNVAYSELFLDTAGVASFDVWDLLPFTRGYVHILDKDPYLRHFAYDPQYFLNELDLLGQAAATQLARNISNSGAMQTYFAGETIPGDNLAYDADLSAWVEYIPYNFRPNYHGVGTCSMMPKEMGGVVDNAARVYGVQGLRVIDGSIPPTQMSSHVMTVFYAMALKIADAILADYASMQ

SEQ ID NO: 460 - protein, 583 aa, Aspergillus niger
SNGIEASLLTDPKEVAGRTVDYIIAGGGLTGLTTAARLTENPDITVLVIESGSYESDRGPIIEDLNAYGDIFGSSVDHAYETVELATNNQTALIRSGNGLGGSTLVNGGTWTRPHKAQVDSWETVFGNEGWNWDSVAAYSLQAERARAPNAKQIAAGHYFNASCHGINGTVHAGPRDTGDDYSPIVKALMSAVEDRGVPTKKDLGCGDPHGVSMFPNTLHEDQVRSDAAREWLLPNYQRPNLQVLTGQYVGKVLLSQNATTPRAVGVEFGTHKGNTHNVYAKHEVLLAAGSAVSPTILEYSGIGMKSILEPLGIDTVVDLPVGLNLQDQTTSTVRSRITSAGAGQGQAAWFATFNETFGDYAEKAHELLNTKLEQWAEEAVARGGFHNTTALLIQYENYRDWIVKDNVAYSELFLDTAGVASFDVWDLLPFTRGYVHILDKDPYLRHFAYDPQYFLNELDLLGQAAATQLARNISNSGAMQTYFAGETIPGDNLAYDADLSAWVEYIPYNFRPNYHGVGTCSMMPKEMGGVVDNAARVYGVQGLRVIDGSIPPTQMSSHVMTVFYAMALKIADAILADYASMQ

SEQ ID NO: 461 - protein, 582 aa, Aspergillus niger
SNGIEASLLTDPKEVAGRTVDYIIAGGGLTGLTTAARLTENPDITVLVIESGSYESDRGPIIEDLNAYGDIFGSSVDHAYETVELTNNQTALIRSGNGLGGSTLVNGGTWTRPHKAQVDSWETVFGNEGWNWDSVAAYSLQAERARAPNAKQIAAGHYFNASCHGINGTVHAGPRDTGDDYSPIVKALMSAVEDRGVPTKKDLGCGDPHGVSMFPNTLHEDQVRSDAAREWLLPNYQRPNLQVLTGQYVGKVLLSQNATTPRAVGVEFGTHKGNTHNVYAKHEVLLAAGSAVSPTILEYSGIGMKSILEPLGIDTVVDLPVGLNLQDQTTSTVRSRITSAGAGQGQAAWFATFNETFGDYAEKAHELLNTKLEQWAEEAVARGGFHNTTALLIQYENYRDWIVKDNVAYSELFLDTAGVASFDVWDLLPFTRGYVHILDKDPYLRHFAYDPQYFLNELDLLGQAAATQLARNISNSGAMQTYFAGETIPGDNLAYDADLSAWVEYIPYNFRPNYHGVGTCSMMPKEMGGVVDNAARVYGVQGLRVIDGSIPPTQMSSHVMTVFYAMALKIADAILADYASMQ

SEQ ID NO: 462 - protein, 605 aa, Aspergillus tubingensis
MQTLFVSSLVVSLAAALPHYIRSNGIEASLLTDPKEVAGRTVDYIIAGGGLTGLTTAARLTENPDITVLVIESGSYESDRGPIIEDLNAYGDIFGSSVDHAYETVELATNNQTALIRSGNGLGGSTLVNGGTWTRPHKAQVDSWETVFGNEGWNWDSVAAYSLQAERARAPNAKQIAAGHYFNASCHGINGTVHAGPRDTGDDYSPIVKALMSAVEDRGVPTKKDLGCGDPHGVSMFPNTLHEDQVRSDAAREWLLPNYQRPNLQVLTGQYVGKVLLSQNATTPRAVGVEFGTHKGNTHNVYAKHEVLLAAGSAVSPTILEYSGIGMKSILEPLGIDTVVDLPVGLNLQDQTTSTVRSRITSAGAGQGQAAWFATFNETFGDYAEKAHELLNTKLEQWAEEAVARGGFHNTTALLIQYENYRDWIVKDNVAYSELFLDTAGVASFDVWDLLPFTRGYVHILDKDPYLRHFAYDPQYFLNELDLLGQAAATQLARNISNSGAMQTYFAGETIPGDNLAYDADLSAWVEYIPYNFRPNYHGVGTCSMMPKEMGGVVDNAARVYGVQGLRVIDGSIPPTQMSSHVMTVFYAMALKIADAILADYASMQ

SEQ ID NO: 463 - protein, 583 aa, Aspergillus niger
SNGYEASLLTDPKEVAGRTVDYIIAGGGLTGLTTAARLTENPDITVLVIESGSYESDRGPIIEDLNAYGDIFGSSVDHAYETVELATNNQTALIRSGNGLGGSTLVNGGTWTRPHKAQVDSWETVFGNEGWNWDSVAAYSLQAERARAPNAKQIAAGHYFNASCHGINGTVHAGPRDTGDDYSPIVKALMSAVEDRGVPTKKDLGCGDPHGVSMFPNTLHEDQVRSDAAREWLLPNYQRPNLQVLTGQYVGKVLLSQNATTPRAVGVEFGTHKGNTHNVYAKHEVLLAAGSAVSPTILEYSGIGMKSILEPLGIDTVVDLPVGLNLQDQTTSTVRSRITSAGAGQGQAAWFATFNETFGDYAEKAHELLNTKLEQWAEEAVARGGFHNTTALLIQYENYRDWIVKDNVAYSELFLDTAGVASFDVWDLLPFTRGYVHILDKDPYLRHFAYDPQYFLNELDLLGQAAATQLARNISNSGAMQTYFAGETIPGDNLAYDADLSAWVEYIPYNFRPNYHGVGTCSMMPKEMGGVVDNAARVYGVQGLRVIDGSIPPTQMSSHVMTVFYAMALKIADAILADYASMQ

SEQ ID NO: 464 - protein, 583 aa, Aspergillus niger
SNGIEASLLTDPKEVAGRTVDYIIAGGGLTGLTTAARLTENPDITVLVIESGSYESDRGPIIEDLNAYGDIFGSSVDHAYETVELATNNQTALIRSGNGLGGSTLVNGGTWTRPHKAQVDSWETVFGNEGWNWDSVAAYSLQAERARAPNAKQIAAGHYFNASCHGINGTVHAGPRDTGDDYSPIVKALMSAVEDRGVPTKKDLGCGDPHGVSMFPNTLHEDQVRSDAAREWLLPNYQRPNLQVLTGQYVGKVLLSQNATTPRAVGVEFGTHKSNTHNVYAKHEVLLAAGSAVSPTILEYSGIGMKSILEPLGIDTVVDLPVGLNLQDQTTSTVRSRITSAGAGQGQAAWFATFNETFGDYAEKAHELLNTKLEQWAEEAVARGGFHNTTALLIQYENYRDWIVKDNVAYSELFLDTAGVASFDVWDLLPFTRGYVHILDKDPYLRHFAYDPQYFLNELDLLGQAAATQLARNISNSGAMQTYFAGETIPGDNLAYDADLSAWVEYIPYNFRPNYHGVGTCSMMPKEMGGVVDNAARVYGVQGLRVIDGSIPPTQMSSHVMTVFYAMALKIADAILADYASMQ

SEQ ID NO: 465 - protein, 583 aa, Aspergillus niger
SNGIEASLLTDPKEVAGRTVDYIIAGGGLTGLTTAARLTENPDITVLVIESGSYESDRGPIIEDLNAYGDIFGSSVDHAYETVELATNNQTALIRSGNGLGGSTLVNGGTWTRPHKAQVDSWETVFGNEGWNWDSVAAYSLQAERARAPNAKQIAAGHYFNASCHGINGTVHAGPRDTGDDYSPIVKALMSAVEDRGVPTKKDLGCGDPHGVSMFPNTLHEDQVRSDAAREWLLPNYQRPNLQVLTGQYVGKVLLSQNATTPRAVGVEFGTHKGNTHNVYAKHEVLLAAGSAVSPTILEYSGIGMKSILEPLGIDTVVDLPVGLNLQDQTTSTVRSRITSAGAGQGQAAWFATFNETFGDYAEKAHELLNTKLEQWAEEAVARGGFHNTTALLIQYENYRDWIVKDNVAYSELFLDTAGVASFDVWDLLPFTRGYVHILDKDPYLRHFAYDPQYFLNELDLLGQAAATQLARNISNSGAMQTYFAGETIPGDNLAYDADLSAWVEYICYNFRPNYHGVGTCSMMPKEMGGVVDNAARVYGVQGLRVIDGSIPPTQMSSHVMTVFYAMALKIADAILADYASMQ

SEQ ID NO: 466 - protein, 583 aa, Aspergillus niger
SNGIEASLLTDPKEVAGRTVDYIIAGGGLTGLTTAARLTENPDITVLVIESGSYESDRGPIIEDLNAYGQIFGSSVDHAYETVELATNNQTALIRSGNGLGGSTLVNGGTWTRPHKAQVDSWETVFGNEGWNWDSVAAYSLQAERARAPNAKQIAAGHYFNASCHGINGTVHAGPRDTGDDYSPIVKALMSAVEDRGVPTKKDLGCGDPHGVSMFPNTLHEDQVRSDAAREWLLPNYQRPNLQVLTGQYVGKVLLSQNATTPRAVGVEFGTHKGNTHNVYAKHEVLLAAGSAVSPTILEYSGIGMKSILEPLGIDTVVDLPVGLNLQDQTTSTVRSRITSAGAGQGQAAWFATFNETFGDYAEKAHELLNTKLEQWAEEAVARGGFHNTTALLIQYENYRDWIVKDNVAYSELFLDTAGVASFDVWDLLPFTRGYVHILDKDPYLRHFAYDPQYFLNELDLLGQAAATQLARNISNSGAMQTYFAGETIPGDNLAYDADLSAWVEYIPYNFRPNYHGVGTCSMMPKEMGGVVDNAARVYGVQGLRVIDGSIPPTQMSSHVMTVFYAMALKIADAILADYASMQ

SEQ ID NO: 467 - protein, 583 aa, Aspergillus niger
SNGIEASLLTDPKEVAGRTVDYIIAGGGLTGLTTAARLTENPDITVLVIESGSYESDRGPIIEDLNAYGKIFGSSVDHAYETVELATNNQTALIRSGNGLGGSTLVNGGTWTRPHKAQVDSWETVFGNEGWNWDSVAAYSLQAERARAPNAKQIAAGHYFNASCHGINGTVHAGPRDTGDDYSPIVKALMSAVEDRGVPTKKDLGCGDPHGVSMFPNTLHEDQVRSDAAREWLLPNYQRPNLQVLTGQYVGKVLLSQNATTPRAVGVEFGTHKGNTHNVYAKHEVLLAAGSAVSPTILEYSGIGMKSILEPLGIDTVVDLPVGLNLQDQTTSTVRSRITSAGAGQGQAAWFATFNETFGDYAEKAHELLNTKLEQWAEEAVARGGFHNTTALLIQYENYRDWIVKDNVAYSELFLDTAGVASFDVWDLLPFTRGYVHILDKDPYLRHFAYDPQYFLNELDLLGQAAATQLARNISNSGAMQTYFAGETIPGDNLAYDADLSAWVEYIPYNFRPNYHGVGTCSMMPKEMGGVVDNAARVYGVQGLRVIDGSIPPTQMSSHVMTVFYAMALKIADAILADYASMQ

SEQ ID NO: 468 - protein, 583 aa, Aspergillus niger
SNGIEASLLTDPKEVAGRTVDYIIAGGGLTGLTTAARLTENPDITVLVIESGSYESDRGPIIEDLNAYGDIFGSSVDHAYETVELATNNQTALIRSGNGLGGSTLVNGGTWTRPHKAQVDSWETVFGNEGWNWDSVAAYSLQAERARAPNAKQIAAGHYFNASCHGINGTVHAGPRDTGDDYSPIVKALMSAVEDRGVPTKKDLGCGDPHGVSMFPNTLHEDQVRSDAAREWLLPNYQRPNLQVLTGQYVGKVLLSQNATTPRAVGVEFGTHKHNTHNVYAKHEVLLAAGSAVSPTILEYSGIGMKSILEPLGIDTVVDLPVGLNLQDQTTSTVRSRITSAGAGQGQAAWFATFNETFGDYAEKAHELLNTKLEQWAEEAVARGGFHNTTALLIQYENYRDWIVKDNVAYSELFLDTAGVASFDVWDLLPFTRGYVHILDKDPYLRHFAYDPQYFLNELDLLGQAAATQLARNISNSGAMQTYFAGETIPGDNLAYDADLSAWVEYIPYNFRPNYHGVGTCSMMPKEMGGVVDNAARVYGVQGLRVIDGSIPPTQMSSHVMTVFYAMALKIADAILADYASMQ

SEQ ID NO: 469 - protein, 583 aa, Aspergillus niger
SNGIEASLLTDPKEVAGRTVDYIIAGGGLTGLTTAARLTENPDITVLVIESGSYESDRGPIIEDLNAYGDIFGSSVDHAYETVELATNNQTALIRSGNGLGGSTLVNGGTWTRPHKAQVDSWETVFGNEGWNWDSVAAYSLQAERARAPNAKQIAAGHYFNASCHGINGTVHAGPRDTGDDYSPIVKALMSAVEDRGVPTKKDLGCGDPHGVSMFPNTLHEDQVRSDAAREWLLPNYQRPNLQVLTGQYVGKVLLSQNATTPRAVGVEFGTHKGNTHNVYAKHEVLLAAGSAVSPTILEYSGIGMKSILEPLGIDTVVDLPVGLNLQDQTTSTVRSRITSAGAGQGQAAWFATFNETFGDYAEKAHELLNTKLEQWAEEAVARGGFHNTTALLIQYENYRDWIVKDNVAYSELFLDTAGVASFDVWDLLPFTRGYVHILDKDPYLRHFAYDPQYFLNELDLLGQAAATQLARNISNSGAMQTYFAGETIPGDNLAYDADLSAWVEYIHYNFRPNYHGVGTCSMMPKEMGGVVDNAARVYGVQGLRVIDGSIPPTQMSSHVMTVFYAMALKIADAILADYASMQ

SEQ ID NO: 470 - protein, 583 aa, Aspergillus niger
SNGIEASLLTDPKEVAGRTVDYIIAGGGLTGLTTAARLTENPDITVLVIESGSYESDRGPIIEDLNAYGDIFGSSVDHAYETVELATNNQTALIRAGNGLGGSTLVNGGTWTRPHKAQVDSWETVFGNEGWNWDSVAAYSLQAERARAPNAKQIAAGHYFNASCHGINGTVHAGPRDTGDDYSPIVKALMSAVEDRGVPTKKDLGCGDPHGVSMFPNTLHEDQVRSDAAREWLLPNYQRPNLQVLTGQYVGKVLLSQNATTPRAVGVEFGTHKGNTHNVYAKHEVLLAAGSAVSPTILEYSGIGMKSILEPLGIDTVVDLPVGLNLQDQTTSTVRSRITSAGAGQGQAAWFATFNETFGDYAEKAHELLNTKLEQWAEEAVARGGFHNTTALLIQYENYRDWIVKDNVAYSELFLDTAGVASFDVWDLLPFTRGYVHILDKDPYLRHFAYDPQYFLNELDLLGQAAATQLARNISNSGAMQTYFAGETIPGDNLAYDADLSAWVEYIPYNFRPNYHGVGTCSMMPKEMGGVVDNAARVYGVQGLRVIDGSIPPTQMSSHVMTVFYAMALKIADAILADYASMQ

SEQ ID NO: 471 - protein, 583 aa, Aspergillus niger
SNGIEASLLTDPKEVAGRTVDYIIAGGGLTGLTTAARLTENPDITVLVIESGSYESDRGPIIEDLNAYGDIFGSSVDHAYETVELATNNQTALIRNGNGLGGSTLVNGGTWTRPHKAQVDSWETVFGNEGWNWDSVAAYSLQAERARAPNAKQIAAGHYFNASCHGINGTVHAGPRDTGDDYSPIVKALMSAVEDRGVPTKKDLGCGDPHGVSMFPNTLHEDQVRSDAAREWLLPNYQRPNLQVLTGQYVGKVLLSQNATTPRAVGVEFGTHKGNTHNVYAKHEVLLAAGSAVSPTILEYSGIGMKSILEPLGIDTVVDLPVGLNLQDQTTSTVRSRITSAGAGQGQAAWFATFNETFGDYAEKAHELLNTKLEQWAEEAVARGGFHNTTALLIQYENYRDWIVKDNVAYSELFLDTAGVASFDVWDLLPFTRGYVHILDKDPYLRHFAYDPQYFLNELDLLGQAAATQLARNISNSGAMQTYFAGETIPGDNLAYDADLSAWVEYIPYNFRPNYHGVGTCSMMPKEMGGVVDNAARVYGVQGLRVIDGSIPPTQMSSHVMTVFYAMALKIADAILADYASMQ

SEQ ID NO: 472 - protein, 583 aa, Aspergillus niger
SNGIEASLLTDPKEVAGRTVDYIIAGGGLTGLTTAARLTENPDITVLVIESGSYESDRGPIIEDLNAYGDIFGSSVDHAYETVELATNNQTALIRSGNGLGGSTLVNGGTWTRPHKAQVDSWETVFGNEGWNWDSVAAYSLQAERARAPNAKQIAAGHYFNASCHGINGTVHAGPRDTGDDYSPIVKALMSAVEDRGVPTKKDLGCGDPHGVSMFPNTLHEDQVRSDAAREWLLPNYQRPNLQVLTGQYVGKVLLSQNATTPRAVGVEFGTHKQNTHNVYAKHEVLLAAGSAVSPTILEYSGIGMKSILEPLGIDTVVDLPVGLNLQDQTTSTVRSRITSAGAGQGQAAWFATFNETFGDYAEKAHELLNTKLEQWAEEAVARGGFHNTTALLIQYENYRDWIVKDNVAYSELFLDTAGVASFDVWDLLPFTRGYVHILDKDPYLRHFAYDPQYFLNELDLLGQAAATQLARNISNSGAMQTYFAGETIPGDNLAYDADLSAWVEYIPYNFRPNYHGVGTCSMMPKEMGGVVDNAARVYGVQGLRVIDGSIPPTQMSSHVMTVFYAMALKIADAILADYASMQ

SEQ ID NO: 473 - protein, 583 aa, Aspergillus niger
SNGIEASLLTDPKEVAGRTVDYIIAGGGLTGLTTAARLTENPDITVLVIESGSYESDRGPIIEDLNAYGDIFGSSVDHAYETVELQTNNQTALIRSGNGLGGSTLVNGGTWTRPHKAQVDSWETVFGNEGWNWDSVAAYSLQAERARAPNAKQIAAGHYFNASCHGINGTVHAGPRDTGDDYSPIVKALMSAVEDRGVPTKKDLGCGDPHGVSMFPNTLHEDQVRSDAAREWLLPNYQRPNLQVLTGQYVGKVLLSQNATTPRAVGVEFGTHKGNTHNVYAKHEVLLAAGSAVSPTILEYSGIGMKSILEPLGIDTVVDLPVGLNLQDQTTSTVRSRITSAGAGQGQAAWFATFNETFGDYAEKAHELLNTKLEQWAEEAVARGGFHNTTALLIQYENYRDWIVKDNVAYSELFLDTAGVASFDVWDLLPFTRGYVHILDKDPYLRHFAYDPQYFLNELDLLGQAAATQLARNISNSGAMQTYFAGETIPGDNLAYDADLSAWVEYIPYNFRPNYHGVGTCSMMPKEMGGVVDNAARVYGVQGLRVIDGSIPPTQMSSHVMTVFYAMALKIADAILADYASMQ

SEQ ID NO: 474 - protein, 583 aa, Aspergillus niger
SNGAEASLLTDPKEVAGRTVDYIIAGGGLTGLTTAARLTENPDITVLVIESGSYESDRGPIIEDLNAYGDIFGSSVDHAYETVELATNNQTALIRSGNGLGGSTLVNGGTWTRPHKAQVDSWETVFGNEGWNWDSVAAYSLQAERARAPNAKQIAAGHYFNASCHGINGTVHAGPRDTGDDYSPIVKALMSAVEDRGVPTKKDLGCGDPHGVSMFPNTLHEDQVRSDAAREWLLPNYQRPNLQVLTGQYVGKVLLSQNATTPRAVGVEFGTHKGNTHNVYAKHEVLLAAGSAVSPTILEYSGIGMKSILEPLGIDTVVDLPVGLNLQDQTTSTVRSRITSAGAGQGQAAWFATFNETFGDYAEKAHELLNTKLEQWAEEAVARGGFHNTTALLIQYENYRDWIVKDNVAYSELFLDTAGVASFDVWDLLPFTRGYVHILDKDPYLRHFAYDPQYFLNELDLLGQAAATQLARNISNSGAMQTYFAGETIPGDNLAYDADLSAWVEYIPYNFRPNYHGVGTCSMMPKEMGGVVDNAARVYGVQGLRVIDGSIPPTQMSSHVMTVFYAMALKIADAILADYASMQ

SEQ ID NO: 475 - protein, 583 aa, Aspergillus niger
SNGIEASLLTDPKEVAGRTVDYIIAGGGLTGLTTAARLTENPDITVLVIESGSYESDRGPIIEDLNAYGDIFGSSVDHAYETVELATNNQTALIRSGNGLGGSTLVNGGTWTRPHKAQVDSWETVFGNEGWNWDSVAAYSLQAERARAPNAKQIAAGHYFNASCHGINGTVHAGPRDTGDDYSPIVKALMSAVEDRGVPTKKDLGCGDPHGVSMFPNTLHEDQVRSDAAREWLLPNYQRPNLQVLTGQYVGKVLLSQNATTPRAVGVEFGTHKGNTHNVYAKHEVLLAAGSAVSPTILEYSGIGMKSILEPLGIDTVVDLPVGLNLQDQTTSTVRSRITSAGAGQGQAAWFATFNETFGDYAEKAHELLNTKLEQWAEEAVARGGFHNTTALLIQYENYRDWIVKDNVAYSELFLDTAGVASFDVWDLLPFTRGYVHILDKDPYLRHFAYDPQYFLNELDLLGQAAATQLARNISNSGAMQTYFAGETIPGDNLAYDADLSAWVEYIAYNFRPNYHGVGTCSMMPKEMGGVVDNAARVYGVQGLRVIDGSIPPTQMSSHVMTVFYAMALKIADAILADYASMQ

SEQ ID NO: 476 - protein, 583 aa, Aspergillus niger
SNGIEASLLTDPKEVAGRTVDYIIAGGGLTGLTTAARLTENPDITVLVIESGSYESDRGPIIEDLNAYGDIFGSSVDHAYETVELATNNQTALIRSGNGLGGSTLVNGGTWTRPHKAQVDSWETVFGNEGWNWDSVAAYSLQAERARAPNAKQIAAGHYFNASCHGINGTVHAGPRDTGDDYSPIVKALMSAVEDRGVPTKKDLGCGDPHGVSMFPNTLHEDQVRSDAAREWLLPNYQRPNLQVLTGQYVGKVLLSQNATTPRAIGVEFGTHKGNTHNVYAKHEVLLAAGSAVSPTILEYSGIGMKSILEPLGIDTVVDLPVGLNLQDQTTSTVRSRITSAGAGQGQAAWFATFNETFGDYAEKAHELLNTKLEQWAEEAVARGGFHNTTALLIQYENYRDWIVKDNVAYSELFLDTAGVASFDVWDLLPFTRGYVHILDKDPYLRHFAYDPQYFLNELDLLGQAAATQLARNISNSGAMQTYFAGETIPGDNLAYDADLSAWVEYIPYNFRPNYHGVGTCSMMPKEMGGVVDNAARVYGVQGLRVIDGSIPPTQMSSHVMTVFYAMALKIADAILADYASMQ

SEQ ID NO: 477 - protein, 583 aa, Aspergillus niger
SNGIEASLLTDPKEVAGRTVDYIIAGGGLTGLTTAARLTENPDITVLVIESGSYESDRGPIIEDLNAYGDIFGSSVDHAYETVELFTNNQTALIRSGNGLGGSTLVNGGTWTRPHKAQVDSWETVFGNEGWNWDSVAAYSLQAERARAPNAKQIAAGHYFNASCHGINGTVHAGPRDTGDDYSPIVKALMSAVEDRGVPTKKDLGCGDPHGVSMFPNTLHEDQVRSDAAREWLLPNYQRPNLQVLTGQYVGKVLLSQNATTPRAVGVEFGTHKGNTHNVYAKHEVLLAAGSAVSPTILEYSGIGMKSILEPLGIDTVVDLPVGLNLQDQTTSTVRSRITSAGAGQGQAAWFATFNETFGDYAEKAHELLNTKLEQWAEEAVARGGFHNTTALLIQYENYRDWIVKDNVAYSELFLDTAGVASFDVWDLLPFTRGYVHILDKDPYLRHFAYDPQYFLNELDLLGQAAATQLARNISNSGAMQTYFAGETIPGDNLAYDADLSAWVEYIPYNFRPNYHGVGTCSMMPKEMGGVVDNAARVYGVQGLRVIDGSIPPTQMSSHVMTVFYAMALKIADAILADYASMQ

SEQ ID NO: 478 - protein, 583 aa, Aspergillus niger
SNGIEASLLTDPKEVAGRTVDYIIAGGGLTGLTTAARLTENPDITVLVIESGSYESDRGPIIEDLNAYGDIFGSSVDHAYETVELATNNQTALIRFGNGLGGSTLVNGGTWTRPHKAQVDSWETVFGNEGWNWDSVAAYSLQAERARAPNAKQIAAGHYFNASCHGINGTVHAGPRDTGDDYSPIVKALMSAVEDRGVPTKKDLGCGDPHGVSMFPNTLHEDQVRSDAAREWLLPNYQRPNLQVLTGQYVGKVLLSQNATTPRAVGVEFGTHKGNTHNVYAKHEVLLAAGSAVSPTILEYSGIGMKSILEPLGIDTVVDLPVGLNLQDQTTSTVRSRITSAGAGQGQAAWFATFNETFGDYAEKAHELLNTKLEQWAEEAVARGGFHNTTALLIQYENYRDWIVKDNVAYSELFLDTAGVASFDVWDLLPFTRGYVHILDKDPYLRHFAYDPQYFLNELDLLGQAAATQLARNISNSGAMQTYFAGETIPGDNLAYDADLSAWVEYIPYNFRPNYHGVGTCSMMPKEMGGVVDNAARVYGVQGLRVIDGSIPPTQMSSHVMTVFYAMALKIADAILADYASMQ

SEQ ID NO: 479 - protein, 583 aa, Aspergillus niger
SNGPEASLLTDPKEVAGRTVDYIIAGGGLTGLTTAARLTENPDITVLVIESGSYESDRGPIIEDLNAYGDIFGSSVDHAYETVELATNNQTALIRSGNGLGGSTLVNGGTWTRPHKAQVDSWETVFGNEGWNWDSVAAYSLQAERARAPNAKQIAAGHYFNASCHGINGTVHAGPRDTGDDYSPIVKALMSAVEDRGVPTKKDLGCGDPHGVSMFPNTLHEDQVRSDAAREWLLPNYQRPNLQVLTGQYVGKVLLSQNATTPRAVGVEFGTHKGNTHNVYAKHEVLLAAGSAVSPTILEYSGIGMKSILEPLGIDTVVDLPVGLNLQDQTTSTVRSRITSAGAGQGQAAWFATFNETFGDYAEKAHELLNTKLEQWAEEAVARGGFHNTTALLIQYENYRDWIVKDNVAYSELFLDTAGVASFDVWDLLPFTRGYVHILDKDPYLRHFAYDPQYFLNELDLLGQAAATQLARNISNSGAMQTYFAGETIPGDNLAYDADLSAWVEYIPYNFRPNYHGVGTCSMMPKEMGGVVDNAARVYGVQGLRVIDGSIPPTQMSSHVMTVFYAMALKIADAILADYASMQ

SEQ ID NO: 480 - protein, 605 aa, Aspergillus niger
MQTLLVSSLVVSLAAALPHYIRSNGIEASLLTDPKEVAGRTVDYIIAGGGLTGLTTAARLTENPDITVLVIESGSYESDRGPIIEDLNAYGDIFGSSVDHAYETVELATNNQTALIRSGNGLGGSTLVNGGXWTRPHKAQVDSWETVFGNEGWNWDSVAAYSLQAERARAPNAKQIAAGHYFNASCHGINGTVHAGPRDTGDDYSPIVKALMSAVEDRGVPTKKDLGCGDPHGVSMFPNTLHEDQVRSDAAREWLLPNYQRPNLQVLTGQYVGKVLLSQNATTPRAVGVEFGTHKGNTHNVYAKHEVLLAAGSAVSPTILEYSGIGMKSILEPLGIDTVVDLPVGLNLQDQTTSTVRSRITSAGAGQGQAAWXATFNETFGDYAEKAHELLNTKLEQWAEEAVARGGFHNTTALLIQYENYRDWIVKDNVAYSELFLDTAGVASFDVWDLLPFTRGYVHILDKDPYLRHFAYDPQYFLNELDLLGQAAATQLARNISNSGAMQTYFAGETIPGDNLAYDADLSAWVEYIPYNFRPNYHGVGTCSMMPKEMGGVVDNAARVYGVQGLRVIDGSIPPTQMSSHVMTVFYAMALKIADAILADYASMQ

SEQ ID NO: 481 - protein, 605 aa, Aspergillus niger
MQTLLVSSLVVSLAAALPHYIRSNGIEASLLTDPKEVAGRTVDYIIAGGGLTGLTTAARLTENPDITVLVIESGSCESDRGPIIEDLNAYGDIFGSSVDHAYETVELATNNQTALIRSGNGLGGSTLVNGGTWTRPHKAQVDSWETVFGNEGWNWDSVAAYSLQAERARAPNAKQIAAGHYFNASCHGINGTVHAGPRDTGDDYSPIVKALMSAVEDRGVPTKKDLGCGDPHGVSMFPNTLHEDQVRSDAAREWLLPNYQRPNLQVLTGQYVGKVLLSKNATTPRAVGVEFGTHKGNTHNVYAKHEVLLAAGSAVSPTILEYSGIGMKSILEPLGIDTVVDLPVGLNLQDQTTSTVRSRITSAGAGQGQAAWFATFNETFGDYAEKAHELLNTKLEQWAEEAVARGGFHNTTALLIQYENYRDWIVKDNVAYSELFLDTAGVASFDVWDLLPFTRGYVHILDKDPYLRHFAYDPQYFLNELDLLGQAAATQLARNISNSGAMQTYFAGETIPGDNLAYDADLSAWVEYIPYNFRPNYHGVGTCSMMPKEMGGVVDNAARVYGVQGLRVIDGSIPPTQMSSHVMTVFYAMALKIADAILADYASMQ

SEQ ID NO: 482 - protein, 605 aa, Aspergillus niger
MQTLLVSSLVVSLAAALPHYIRSNGIEASLLTDPKEVAGRTVDYIIAGGGLTGLTTAARLTENPDITVLVIESGSYESDRGPIIEDLNAYGDIFGSSVDHAYETVELATNNQTALIRSGNGLGGSTLVNGGTWTRPHKAQVDSWETVFGNEGWNWDSVAAYSLQAERARAPNAKQIAAGHYFNASCHGINGTVHAGPRDTGDDYSPIVKALMSAVEDRGVPTKKDLGCGDPHGVSMFPNTLHEDQVRSDAAREWLLPNYQRPNLQVLTGRYVGKVLLSQNATTPRAVGVEFGTHKGNTHNVYAKHEVLLAAGSAVSPTILEYSGIGMKSILEPLGIDTVVDLPVGLNLQDQTTSTVRSRITSAGAGQGQAAWFATFNETFGDYAEKAHELLNTKLEQWAEEAVARGGFHNTTALLIQYENYRDWIVKDNVAYSELFLDTAGVASFDVWDLLPFTRGYVHILDKDPYLRHFAYDPQYFLNELDLLGQAAATQLARNISNSGAMQTYFAGETIPGDNLAYDADLSAWVEYIPYNFRPNYHGVGTCSMMPKEMGGVVDNAARVYGVQGLRVIDGSIPPTQMSSHVMTVFYAMALKVADAILADYASMQ

SEQ ID NO: 483 - protein, 583 aa, Aspergillus niger
SNGIEASLLTDPKEVAGRTVDYIIAGGGLTGLTTAARLTENPDITVLVIESGSYESDRGPIIEDLNAYGDIFGSSVDHAYETVELATNNQTALIRSGNGLGGSTLVNGGTWTRPHKAQVDSWETVFGNEGWNWDSVAAYSLQAERARAPNAKQIAAGHYFNASCHGINGTVHAGPRDTGDDYSPIVKALMSAVEDRGVPTKKDLGCGDPHGVSMFPNTLHEDQVRSDAAREWLLPNYQRPNLQVLTGQYVGKVLLSQNATTPRAVGVEFGTHKGNTHNVYAKHEVLLAAGSAVSPTILEYSGIGMKSILEPLGIDTVVDLPVGLNLQDQTTSTVRSRITSAGAGQGQAAWFATFNETFGDYTEKAHELLNTKLEQWAEEAVARGGFHNTTALLIQYENYRDWIVKDNVAYSELFLDTAGVASFDVWDLLPFTRGYVHILDKDPYLRHFAYDPQYFLNELDLLGQAAATQLARNISNSGAMQTYFAGETIPGDNLAYDADLRAWVEYIPYNFRPNYHGVGTCSMMPKEMGGVVDNAARVYGVQGLRVIDGSIPPTQMSSHVMTVFYAMALKIADAVLADYASMQ

SEQ ID NO: 484 - protein, 581 aa, Aspergillus niger
GIEASLLTDPKEVAGRTVDYIIAGGGLTGLTTAARLTENPDITVLVIESGSYESDRGPIIEDLNAYGDIFGSSVDHAYETVELATNNQTALIRSGNGLGGSTLVNGGTWTRPHKAQVDSWETVFGNEGWNWDSVAAYSLQAERARAPNAKQIAAGHYFNASCHGINGTVHAGPRDTGDDYSPIVKALMSAVEDRGVPTKKDLGCGDPHGVSMFPNTLHEDQVRSDAAREWLLPNYQRPNLQVLTGQYVGKVLLSQNATTPRAVGVEFGTHKGNTHNVYAKHEVLLAAGSAVSPTILEYSGIGMKSILEPLGIDTVVDLPVGLNLQDQTTSTVRSRITSAGAGQGQAAWFATFNETFGDYTEKAHELLNTKLEQWAEEAVARGGFHNTTALLIQYENYRDWIVKDNVAYSELFLDTAGVASFDVWDLLPFTRGYVHILDKDPYLRHFAYDPQYFLNELDLLGQAAATQLARNISNSGAMQTYFAGETIPGDNLAYDADLRAWVEYIPYNFRPNYHGVGTCSMMPKEMGGVVDNAARVYGVQGLRVIDGSIPPTQMSSHVMTVFYAMALKIADAVLADYASMQ

SEQ ID NO: 485 - protein, 605 aa, Aspergillus niger
MQTLLVSSLVVSLAAALPHYIRSNGIEASLLTDPKEVAGRTVDYIIAGGGLTGLTTAARLTENPDITVLVIESGSYESDRGPIIEDLNAYGDIFGSSVDHAYETVELATNNQTALIRSGNGLGGSTLVNGGTWTRPHKAQVDSWETVFGNEGWNWDSVAAYSLQAERARAPNAKQIAAGHYFNASCHGINGTVHAGPRDTGDDYSPIVKALMSAVEDRGVPTKKDLGCGDPHGVSMFPNTLHEDQVRSDAAREWLLPNYQRPNLQVLTGRYVGKVLLSQNATTPRAVGVEFGTHKGNTHNVYAKHEVLLAAGSAVSPTILEYSGIGMKSILEPLGIDTVVDLPVGLNLQDQTTSTVRSRITSAGAGQGQAAWFATFNETFGDYAEKAHELLNTKLEQWAEEAVARGGFHNTTALLIQYENYRDWIVKDNVAYSELFLDTAGVASFDVWDLLPFTRGYVHILDKDPYLRHFAYDPQYFLNELDLLGQAAATQLARNISNSGAMQTYFAGETIPGDNLAYDADLSAWVEYIPYNFRPNYHGVGTCSMMPKEMGGVVDNAARVYGVQGLRVIDGSIPPTQMSSHLMTVFYAMALKVADAILADYASMQ

SEQ ID NO: 486 - protein, 605 aa, Aspergillus niger
MQTLLVSSLVVSLAAALPHYIRSNGIEASLLTDPKEVAGRTVDYIIAGGGLTGLTTAARLTENPDITVLVIESGSYESDRGPIIEDLNAYGDIFGSSVDHAYETVELATNNQTALIRSGNGLGGSTLVNGGTWTRPHKAQVDSWETVFGNEGWNWDSVAAYSLQAERARAPNAKQIAAGHYFNASCHGINGTVHAGPRDTGDDYSPIVKALMSAVEDRGVPTKKDLGCGDPHGVSMFPNTLHEDQVRSDAAREWLLPNYQRPNLQVLTGRYVGKVLLSQNATTPRAVGVEFGTHKGNTHNVYAKHEVLLAAGSAVSPTILEYSGIGMKSILEPLGIDTVVDLPVGLNLQDQTTSTVRSRITSAGAGQGQAAWFATFNETFGDYAEKAHELLNTKLEQWAEEAVARGGFHNTTALLIQYENYRDWIVKDNVAYSELFLDTAGVASFDVWDLLPFTRGYVHILDKDPYLRHFAYDPQYFLNELDLLGQAAATQLARNISNSGAMQTYFAGETIPGDNLAYDADLSAWVEYIPYNFRPNYHGVGTCSMMPKEMGGVVDNAARVYGVQGLRVIDGSIPPTQMSSHMMTVFYAMALKVADAILADYASMQ

SEQ ID NO: 487 - protein, 605 aa, Aspergillus niger
MQTLLVSSLVVSLAAALPHYIRSNGIEASLLTDPKEVAGRTVDYIIAGGGLTGLTTAARLTENPDITVLVIESGSYESDRGPIIEDLNAYGDIFGSSVDHAYETVELATNNQTALIRSGNGLGGSTLVNGGTWTRPHKAQVDSWETVFGNEGWNWDSVAAYSLQAERARAPNAKQIAAGHYFNASCHGINGTVHAGPRDTGDDYSPIVKALMSAVEDRGVPTKKDLGCGDPHGVSMFPNTLHEDQVRSDAAREWLLPNYQRPNLQVLTGRYVGKVLLSQNATTPRAVGVEFGTHKGNTHNVYAKHEVLLAAGSAVSPTILEYSGIGMKSILEPLGIDTVVDLPVGLNLQDQTTSTVRSRITSAGAGQGQAAWFATFNETFGDYAEKAHELLNTKLEQWAEEAVARGGFHNTTALLIQYENYRDWIVKDNVAYSELFLDTAGVASFDVWDLLPFTRGYVHILDKDPYLRHFAYDPQYFLNELDLLGQAAATQLARNISNSGAMQTYFAGETIPGDNLAYDADLSAWVEYIPYNFRPNYHGVGTCSMMPKEMGGVVDNAARVYGVQGLRVIDGSIPPTQMSSHIMTVFYAMALKVADAILADYASMQ

SEQ ID NO: 488 - protein, 605 aa, Aspergillus niger
MQTLLVSSLVVSLAAALPHYIRSNGIEASLLTDPKEVAGRTVDYIIAGGGLTGLTTAARLTENPDITVLVIESGSYESDRGPIIEDLNAYGDIFGSSVDHAYETVELATNNQTALIRSGNGLGGSTLVNGGTWTRPHKAQVDSWETVFGNEGWNWDSVAAYSLQAERARAPNAKQIAAGHYFNASCHGINGTVHAGPRDTGDDYSPIVKALMSAVEDRGVPTKKDLGCGDPHGVSMFPNTLHEDQVRSDAAREWLLPNYQRPNLQVLTGRYVGKVLLSQNATTPRAVGVEFGTHKGNTHNVYAKHEVLLAAGSAVSPTILEYSGIGMKSILEPLGIDTVVDLPVGLNLQDQTTSTVRSRITSAGAGQGQAAWFATFNETFGDYAEKAHELLNTKLEQWAEEAVARGGFHNTTALLIQYENYRDWIVKDNVAYSELFLDTAGVASFDVWDLLPFTRGYVHILDKDPYLRHFAYDPQYFLNELDLLGQAAATQLARNISNSGAMQTYFAGETIPGDNLAYDADLSAWVEYIPYNFRPNYHGVGTCSMMPKEMGGVVDNAARVYGVQGLRVIDGSIPPTQMSSHFMTVFYAMALKVADAILADYASMQ

SEQ ID NO: 489 - protein, 605 aa, Aspergillus niger
MQTLLVSSLVVSLAAALPHYIRSNGIEASLLTDPKEVAGRTVDYIIAGGGLTGLTTAARLTENPDITVLVIESGSYESDRGPIIEDLNAYGDIFGSSVDHAYETVELATNNQTALIRSGNGLGGSTLVNGGTWTRPHKAQVDSWETVFGNEGWNWDSVAAYSLQAERARAPNAKQIAAGHYFNASCHGINGTVHAGPRDTGDDYSPIVKALMSAVEDRGVPTKKDLGCGDPHGVSMFPNTLHEDQVRSDAAREWLLPNYQRPNLQVLTGRYVGKVLLSQNATTPRAVGVEFGTHKGNTHNVYAKHEVLLAAGSAVSPTILEYSGIGMKSILEPLGIDTVVDLPVGLNLQDQTTSTVRSRITSAGAGQGQAAWFATFNETFGDYAEKAHELLNTKLEQWAEEAVARGGFHNTTALLIQYENYRDWIVKDNVAYSELFLDTAGVASFDVWDLLPFTRGYVHILDKDPYLRHFAYDPQYFLNELDLLGQAAATQLARNISNSGAMQTYFAGETIPGDNLAYDADLSAWVEYIPYNFRPNYHGVGTCSMMPKEMGGVVDNAARVYGVQGLRVIDGSIPPTQMSSHTMTVFYAMALKVADAILADYASMQ

SEQ ID NO: 490 - protein, 605 aa, Aspergillus niger
MQTLLVSSLVVSLAAALPHYIRSNGIEASLLTDPKEVAGRTVDYIIAGGGLTGLTTAARLTENPDITVLVIESGSYESDRGPIIEDLNAYGDIFGSSVDHAYETVELATNNQTALIRSGNGLGGSTLVNGGTWTRPHKAQVDSWETVFGNEGWNWDSVAAYSLQAERARAPNAKQIAAGHYFNASCHGINGTVHAGPRDTGDDYSPIVKALMSAVEDRGVPTKKDLGCGDPHGVSMFPNTLHEDQVRSDAAREWLLPNYQRPNLQVLTGRYVGKVLLSQNATTPRAVGVEFGTHKGNTHNVYAKHEVLLAAGSAVSPTILEYSGIGMKSILEPLGIDTVVDLPVGLNLQDQTTSTVRSRITSAGAGQGQAAWFATFNETFGDYAEKAHELLNTKLEQWAEEAVARGGFHNTTALLIQYENYRDWIVKDNVAYSELFLDTAGVAHFDVWDLLPFTRGYVHILDKDPYLRHFAYDPQYFLNELDLLGQAAATQLARNISNSGAMQTYFAGETIPGDNLAYDADLSAWVEYIPYNFRPNYHGVGTCSMMPKEMGGVVDNAARVYGVQGLRVIDGSIPPTQMSSHVMTVFYAMALKVADAILADYASMQ

SEQ ID NO: 491 - protein, 605 aa, Aspergillus niger
MQTLLVSSLVVSLAAALPHYIRSNGIEASLLTDPKEVAGRTVDYIIAGGGLTGLTTAARLTENPDITVLVIESGSYESDRGPIIEDLNAYGDIFGSSVDHAYETVELATNNQTALIRSGNGLGGSTLVNGGTWTRPHKAQVDSWETVFGNEGWNWDSVAAYSLQAERARAPNAKQIAAGHYFNASCHGINGTVHAGPRDTGDDYSPIVKALMSAVEDRGVPTKKDLGCGDPHGVSMFPNTLHEDQVRSDAAREWLLPNYQRPNLQVLTGRYVGKVLLSQNATTPRAVGVEFGTHKGNTHNVYAKHEVLLAAGSAVSPTILEYSGIGMKSILEPLGIDTVVDLPVGLNLQDQTTSTVRSRITSAGAGQGQAAWFATFNETFGDYAEKAHELLNTKLEQWAEEAVARGGFHNTTALLIQYENYRDWIVKDNVAYSELFLDTAGVASFDVWDLLPFTRGYVHILDKDPYLRHFAYDPQYFLNELDLLGQAAATQLARNISNSGAMQTYFAGETIPGDNLAYDADLSAWVEYIPYNFRPNYHGVGTCSMMPKEMGGVVDNAARVYGVQGLRVIDGSIPPTQMSSHSMTVFYAMALKVADAILADYASMQ

SEQ ID NO: 492 - protein, 605 aa, Aspergillus niger
MQTLLVSSLVVSLAAALPHYIRSNGIEASLLTDPKEVAGRTVDYIIAGGGLTGLTTAARLTENPDITVLVIESGSYESDRGPIIEDLNAYGDIFGSSVDHAYETVELATNNQTALIRSGNGLGGSTLVNGGTWTRPHKAQVDSWETVFGNEGWNWDSVAAYSLQAERARAPNAKQIAAGHYFNASCHGINGTVHAGPRDTGDDYSPIVKALMSAVEDRGVPTKKDLGCGDPHGVSMFPNTLHEDQVRSDAAREWLLPNYQRPNLQVLTGRYVGKVLLSQNATTPRAVGVEFGTHKGNTHNVYAKHEVLLAAGSAVSPTILEYSGIGMKSILEPLGIDTVVDLPVGLNLQDQTTSTVRSRITSAGAGQGQAAWFATFNETFGDYAEKAHELLNTKLEQWAEEAVARGGFHNTTALLIQYENYRDWIVKDNVAYSELFLDTAGVACFDVWDLLPFTRGYVHILDKDPYLRHFAYDPQYFLNELDLLGQAAATQLARNISNSGAMQTYFAGETIPGDNLAYDADLSAWVEYIPYNFRPNYHGVGTCSMMPKEMGGVVDNAARVYGVQGLRVIDGSIPPTQMSSHVMTVFYAMALKVADAILADYASMQ

SEQ ID NO: 493 - protein, 605 aa, Aspergillus niger
MQTLLVSSLVVSLAAALPHYIRSNGIEASLLTDPKEVAGRTVDYIIAGGGLTGLTTAARLTENPDITVLVIESGSYESDRGPIIEDLNAYGDIFGSSVDHAYETVELATNNQTALIRSGNGLGGSTLVNGGTWTRPHKAQVDSWETVFGNEGWNWDSVAAYSLQAERARAPNAKQIAAGHYFNASCHGINGTVHAGPRDTGDDYSPIVKALMSAVEDRGVPTKKDLGCGDPHGVSMFPNTLHEDQVRSDAAREWLLPNYQRPNLQVLTGRYVGKVLLSQNATTPRAVGVEFGTHKGNTHNVYAKHEVLLAAGSAVSPTILEYSGIGMKSILEPLGIDTVVDLPVGLNLQDQTTSTVRSRITSAGAGQGQAAWFATFNETFGDYAEKAHELLNTKLEQWAEEAVARGGFHNTTALLIQYENYRDWIVKDNVAYSELFLDTAGVALFDVWDLLPFTRGYVHILDKDPYLRHFAYDPQYFLNELDLLGQAAATQLARNISNSGAMQTYFAGETIPGDNLAYDADLSAWVEYIPYNFRPNYHGVGTCSMMPKEMGGVVDNAARVYGVQGLRVIDGSIPPTQMSSHVMTVFYAMALKVADAILADYASMQ

SEQ ID NO: 494 - protein, 605 aa, Aspergillus niger
MQTLLVSSLVVSLAAALPHYIRSNGIEASLLTDPKEVAGRTVDYIIAGGGLTGLTTAARLTENPDITVLVIESGSYESDRGPIIEDLNAYGDIFGSSVDHAYETVELATNNQTALIRSGNGLGGSTLVNGGTWTRPHKAQVDSWETVFGNEGWNWDSVAAYSLQAERARAPNAKQIAAGHYFNASCHGINGTVHAGPRDTGDDYSPIVKALMSAVEDRGVPTKKDLGCGDPHGVSMFPNTLHEDQVRSDAAREWLLPNYQRPNLQVLTGRYVGKVLLSQNATTPRAVGVEFGTHKGNTHNVYAKHEVLLAAGSAVSPTILEYSGIGMKSILEPLGIDTVVDLPVGLNLQDQTTSTVRSRITSAGAGQGQAAWFATFNETFGDYAEKAHELLNTKLEQWAEEAVARGGFHNTTALLIQYENYRDWIVKDNVAYSELFLDTAGVASFDVWDLLPFTRGYVHILDKDPYLRHFAYDPQYFLNELDLLGQAAATQLARNISNSGAMQTYFAGETIPGDNLAYDADLSAWVEYIPYNFRPNYHGVGTCSMMPKEMGGVVDNAARVYGVQGLRVIDGSIPPTQMSSHWMTVFYAMALKVADAILADYASMQ

SEQ ID NO: 495 - protein, 605 aa, Aspergillus niger
MQTLLVSSLVVSLAAALPHYIRSNGIEASLLTDPKEVAGRTVDYIIAGGGLTGLTTAARLTENPDITVLVIESGSYESDRGPIIEDLNAYGDIFGSSVDHAYETVELATNNQTALIRSGNGLGGSTLVNGGTWTRPHKAQVDSWETVFGNEGWNWDSVAAYSLQAERARAPNAKQIAAGHYFNASCHGINGTVHAGPRDTGDDYSPIVKALMSAVEDRGVPTKKDLGCGDPHGVSMFPNTLHEDQVRSDAAREWLLPNYQRPNLQVLTGRYVGKVLLSQNATTPRAVGVEFGTHKGNTHNVYAKHEVLLAAGSAVSPTILEYSGIGMKSILEPLGIDTVVDLPVGLNLQDQTTSTVRSRITSAGAGQGQAAWFATFNETFGDYAEKAHELLNTKLEQWAEEAVARGGFHNTTALLIQYENYRDWIVKDNVAYSELFLDTAGVASFDVWDLLPFTRGYVHILDKDPYLRHFAYDPQYFLNELDLLGQAAATQLARNISNSGAMQTYFAGETIPGDNLAYDADLSAWVEYIPYNFRPNYHGVGTCSMMPKEMGGVVDNAARVYGVQGLRVIDGSIPPTQMSSHKMTVFYAMALKVADAILADYASMQ

SEQ ID NO: 496 - protein, 605 aa, Aspergillus niger
MQTLLVSSLVVSLAAALPHYIRSNGIEASLLTDPKEVAGRTVDYIIAGGGLTGLTTAARLTENPDITVLVIESGSYESDRGPIIEDLNAYGDIFGSSVDHAYETVELATNNQTALIRSGNGLGGSTLVNGGAWTRPHKAQVDSWETVFGNEGWNWDSVAAYSLQAERARAPNAKQIAAGHYFNASCHGINGTVHAGPRDTGDDYSPIVKALMSAVEDRGVPTKKDLGCGDPHGVSMFPNTLHEDQVRSDAAREWLLPNYQRPNLQVLTGRYVGKVLLSQNATTPRAVGVEFGTHKGNTHNVYAKHEVLLAAGSAVSPTILEYSGIGMKSILEPLGIDTVVDLPVGLNLQDQTTSTVRSRITSAGAGQGQAAWFATFNETFGDYAEKAHELLNTKLEQWAEEAVARGGFHNTTALLIQYENYRDWIVKDNVAYSELFLDTAGVASFDVWDLLPFTRGYVHILDKDPYLRHFAYDPQYFLNELDLLGQAAATQLARNISNSGAMQTYFAGETIPGDNLAYDADLSAWVEYIPYNFRPNYHGVGTCSMMPKEMGGVVDNAARVYGVQGLRVIDGSIPPTQMSSHVMTVFYAMALKVADAILADYASMQ

SEQ ID NO: 497 - protein, 605 aa, Aspergillus niger
MQTLLVSSLVVSLAAALPHYIRSNGIEASLLTDPKEVAGRTVDYIIAGGGLTGLTTAARLTENPDITVLVIESGSYESDRGPIIEDLNAYGDIFGSSVDHAYETVELATNNQTALIRSGNGLGGSTLVNGGTWTRPHKAQVDSWETVFGNEGWNWDSVAAYSLQAERARAPNAKQIAAGHYFNASCHGINGTVHAGPRDTGDDYSPIVKALMSAVEDRGVPTKKDLGCGDPHGVSMFPNTLHEDQVRSDAAREWLLPNYQRPNLQVLTGRYVGKVLLSQNATTPRAVGVEFGTHKGNTHNVYAKHEVLLAAGSAVSPTILEYSGIGMKSILEPLGIDTVVDLPVGLNLQDQTTSTVRSRITSAGAGQGQAAWFATFNETFGDYAEKAHELLNTKLEQWAEEAVARGGFHNTTALLIQYENYRDWIVKDNVAYSELFLDTAGVAEFDVWDLLPFTRGYVHILDKDPYLRHFAYDPQYFLNELDLLGQAAATQLARNISNSGAMQTYFAGETIPGDNLAYDADLSAWVEYIPYNFRPNYHGVGTCSMMPKEMGGVVDNAARVYGVQGLRVIDGSIPPTQMSSHVMTVFYAMALKVADAILADYASMQ

SEQ ID NO: 498 - protein, 605 aa, Aspergillus niger
MQTLLVSSLVVSLAAALPHYIRSNGIEASLLTDPKEVAGRTVDYIIAGGGLTGLTTAARLTENPDITVLVIESGSYESDRGPIIEDLNAYGDIFGSSVDHAYETVELATNNQTALIRSGNGLGGSTLVNGGTWTRPHKAQVDSWETVFGNEGWNWDSVAAYSLQAERARAPNAKQIAAGHYFNASCHGINGTVHAGPRDTGDDYSPIVKALMSAVEDRGVPTKKDLGCGDPHGVSMFPNTLHEDQVRSDAAREWLLPNYQRPNLQVLTGRYVGKVLLSQNATTPRAVGVEFGTHKGNTHNVYAKHEVLLAAGSAVSPTILEYSGIGMKSILEPLGIDTVVDLPVGLNLQDQTTSTVRSRITSAGAGQGQAAWFATFNETFGDYAEKAHELLNTKLEQWAEEAVARGGFHNTTALLIQYENYRDWIVKDNVAYSELFLDTAGVAMFDVWDLLPFTRGYVHILDKDPYLRHFAYDPQYFLNELDLLGQAAATQLARNISNSGAMQTYFAGETIPGDNLAYDADLSAWVEYIPYNFRPNYHGVGTCSMMPKEMGGVVDNAARVYGVQGLRVIDGSIPPTQMSSHVMTVFYAMALKVADAILADYASMQ

SEQ ID NO: 499 - protein, 605 aa, Aspergillus niger
MQTLLVSSLVVSLAAALPHYIRSNGIEASLLTDPKEVAGRTVDYIIAGGGLTGLTTAARLTENPDITVLVIESGSYESDRGPIIEDLNAYGDIFGSSVDHAYETVELATNNQTALIRSGNGLGGSTLVNGGTWTRPHKAQVDSWETVFGNEGWNWDSVAAYSLQAERARAPNAKQIAAGHYFNASCHGINGTVHAGPRDTGDDYSPIVKALMSAVEDRGVPTKKDLGCGDPHGVSMFPNTLHEDQVRSDAAREWLLPNYQRPNLQVLTGRYVGKVLLSQNATTPRAVGVEFGTHKGNTHNVYAKHEVLLAAGSAVSPTILEYSGIGMKSILEPLGIDTVVDLPVGLNLQDQTTSTVRSRITSAGAGQGQAAWFATFNETFGDYAEKAHELLNTKLEQWAEEAVARGGFHNTTALLIQYENYRDWIVKDNVAYSELFLDTAGVASFDVWDLLPFTRGYVHILDKDPYLRHFAYDPQYFLNELDLLGQAAATQLARNISNSGAMQTYFAGETIPGDNLAYDADLSAWVEYIPYNFRPNYHGVGTCSMMPKEMGGVVDNAARVYGVQGLRVIDGSIPPTQMSSHCMTVFYAMALKVADAILADYASMQ

SEQ ID NO: 500 - protein, 605 aa, Aspergillus niger
MQTLLVSSLVVSLAAALPHYIRSNGIEASLLTDPKEVAGRTVDYIIAGGGLTGLTTAARLTENPDITVLVIESGSYESDRGPIIEDLNAYGDIFGSSVDHAYETVELATNNQTALIRSGNGLGGSTLVNGGTWTRPHKAQVDSWETVFGNEGWNWDSVAAYSLQAERARAPNAKQIAAGHYFNASCHGINGTVHAGPRDTGDDYSPIVKALMSAVEDRGVPTKKDLGCGDPHGVSMFPNTLHEDQVRSDAAREWLLPNYQRPNLQVLTGRYVGKVLLSQNATTPRAVGVEFGTHKGNTHNVYAKHEVLLAAGSAVSPTILEYSGIGMKSILEPLGIDTVVDLPVGLNLQDQTTSTVRSRITSAGAGQGQAAWFATFNETFGDYAEKAHELLNTKLEQWAEEAVARGGFHNTTALLIQYENYRDWIVKDNVAYSELFLDTAGVAKFDVWDLLPFTRGYVHILDKDPYLRHFAYDPQYFLNELDLLGQAAATQLARNISNSGAMQTYFAGETIPGDNLAYDADLSAWVEYIPYNFRPNYHGVGTCSMMPKEMGGVVDNAARVYGVQGLRVIDGSIPPTQMSSHVMTVFYAMALKVADAILADYASMQ

SEQ ID NO: 501 - protein, 605 aa, Aspergillus niger
MQTLLVSSLVVSLAAALPHYIRSNGIEASLLTDPKEVAGRTVDYIIAGGGLTGLTTAARLTENPDITVLVIESGSYESDRGPIIEDLNAYGDIFGSSVDHAYETVELATNNQTALIRSGNGLGGSTLVNGGTWTRPHKAQVDSWETVFGNEGWNWDSVAAYSLQAERARAPNAKQIAAGHYFNASCHGINGTVHAGPRDTGDDYSPIVKALMSAVEDRGVPTKKDLGCGDPHGVSMFPNTLHEDQVRSDAAREWLLPNYQRPNLQVLTGRYVGKVLLSQNATTPRAVGVEFGTHKGNTHNVYAKHEVLLAAGSAVSPTILEYSGIGMKSILEPLGIDTVVDLPVGLNLQDQTTSTVRSRITSAGAGQGQAAWFATFNETFGDYAEKAHELLNTKLEQWAEEAVARGGFHNTTALLIQYENYRDWIVKDNVAYSELFLDTAGVASFDVWDLLPFTRGYVHILDKDPYLRHFAYDPQYFLNELDLLGQAAATQLARNISNSGAMQTYFAGETIPGDNLAYDADLSAWVEYIPYNFRPNYHGVGTCSMMPKEMGGVVDNAARVYGVQGLRVIDGSIPPTQMSSHAMTVFYAMALKVADAILADYASMQ

SEQ ID NO: 502 - protein, 605 aa, Aspergillus niger
MQTLLVSSLVVSLAAALPHYIRSNGIEASLLTDPKEVAGRTVDYIIAGGGLTGLTTAARLTENPDITVLVIESGSYESDRGPIIEDLNAYGDIFGSSVDHAYETVELATNNQTALIRSGNGLGGSTLVNGGTWTRPHKAQVDSWETVFGNEGWNWDSVAAYSLQAERARAPNAKQIAAGHYFNASCHGINGTVHAGPRDTGDDYSPIVKALMSAVEDRGVPTKKDLGCGDPHGVSMFPNTLHEDQVRSDAAREWLLPNYQRPNLQVLTGRYVGKVLLSQNATTPRAVGVEFGTHKGNTHNVYAKHEVLLAAGSAVSPTILEYSGIGMKSILEPLGIDTVVDLPVGLNLQDQTTSTVRSRITSAGAGQGQAAWFATFNETFGDYAEKAHELLNTKLEQWAEEAVARGGFHNTTALLIQYENYRDWIVKDNVAYSELFLDTAGVASFDVWDLLPFTRGYVHILDKDPYLRHFAYDPQYFLNELDLLGQAAATQLARNISNSGAMQTYFAGETIPGDNLAYDADLSAWVEYIPYNFRPNYHGVGTCSMMPKEMGGVVDNAARVYGVQGLRVIDGSIPPTQMSSHRMTVFYAMALKVADAILADYASMQ

SEQ ID NO: 503 - protein, 605 aa, Aspergillus niger
MQTLLVSSLVVSLAAALPHYIRSNGIEASLLTDPKEVAGRTVDYIIAGGGLTGLTTAARLTENPDITVLVIESGSYESDRGPIIEDLNAYGDIFGSSVDHAYETVELATNNQTALIRSGNGLGGSTLVNGGTWTRPHKAQVDSWETVFGNEGWNWDSVAAYSLQAERARAPNAKQIAAGHYFNASCHGINGTVHAGPRDTGDDYSPIVKALMSAVEDRGVPTKKDLGCGDPHGVSMFPNTLHEDQVRSDAAREWLLPNYQRPNLQVLTGRYVGKVLLSQNATTPRAVGVEFGTHKGNTHNVYAKHEVLLAAGSAVSPTILEYSGIGMKSILEPLGIDTVVDLPVGLNLQDQTTSTVRSRITSAGAGQGQAAWFATFNETFGDYAEKAHELLNTKLEQWAEEAVARGGFHNTTALLIQYENYRDWIVKDNVAYSELFLDTAGVAWFDVWDLLPFTRGYVHILDKDPYLRHFAYDPQYFLNELDLLGQAAATQLARNISNSGAMQTYFAGETIPGDNLAYDADLSAWVEYIPYNFRPNYHGVGTCSMMPKEMGGVVDNAARVYGVQGLRVIDGSIPPTQMSSHVMTVFYAMALKVADAILADYASMQ

SEQ ID NO: 504 - protein, 605 aa, Aspergillus niger
MQTLLVSSLVVSLAAALPHYIRSNGIEASLLTDPKEVAGRTVDYIIAGGGLTGLTTAARLTENPDITVLVIESGSYESDRGPIIEDLNAYGDIFGSSVDHAYETVELATNNQTALIRSGNGLGGSTLVNGGTWTRPHKAQVDSWETVFGNEGWNWDSVAAYSLQAERARAPNAKQIAAGHYFNASCHGINGTVHAGPRDTGDDYSPIVKALMSAVEDRGVPTKKDLGCGDPHGVSMFPNTLHEDQVRSDAAREWLLPNYQRPNLQVLTGRYVGKVLLSQNATTPRAVGVEFGTHKGNTHNVYAKHEVLLAAGSAVSPTILEYSGIGMKSILEPLGIDTVVDLPVGLNLQDQTTSTVRSRITSAGAGQGQAAWFATFNETFGDYAEKAHELLNTKLEQWAEEAVARGGFHNTTALLIQYENYRDWIVKDNVAYSELFLDTAGVASFDVWDLLPFTRGYVHILDKDPYLRHFAYDPQYFLNELDLLGQAAATQLARNISNSGAMQTYFAGETIPGDNLAYDADLSAWVEYIPYNFRPNYHGVGTCSMMPKEMGGVVDNAARVYGVQGLRVIDGSIPPTQMSSHNMTVFYAMALKVADAILADYASMQ

SEQ ID NO: 505 - protein, 605 aa, Aspergillus niger
MQTLLVSSLVVSLAAALPHYIRSNGIEASLLTDPKEVAGRTVDYIIAGGGLTGLTTAARLTENPDITVLVIESGSYESDRGPIIEDLNAYGDIFGSSVDHAYETVELATNNQTALIRSGNGLGGSTLVNGGTWTRPHKAQVDSWETVFGNEGWNWDSVAAYSLQAERARAPNAKQIAAGHYFNASCHGINGTVHAGPRDTGDDYSPIVKALMSAVEDRGVPTKKDLGCGDPHGVSMFPNTLHEDQVRSDAAREWLLPNYQRPNLQVLTGRYVGKVLLSQNATTPRAVGVEFGTHKGNTHNVYAKHEVLLAAGSAVSPTILEYSGIGMKSILEPLGIDTVVDLPVGLNLQDQTTSTVRSRITSAGAGQGQAAWFATFNETFGDYAEKAHELLNTKLEQWAEEAVARGGFHNTTALLIQYENYRDWIVKDNVAYSELFLDTAGVAPFDVWDLLPFTRGYVHILDKDPYLRHFAYDPQYFLNELDLLGQAAATQLARNISNSGAMQTYFAGETIPGDNLAYDADLSAWVEYIPYNFRPNYHGVGTCSMMPKEMGGVVDNAARVYGVQGLRVIDGSIPPTQMSSHVMTVFYAMALKVADAILADYASMQ

SEQ ID NO: 506 - protein, 605 aa, Aspergillus niger
MQTLLVSSLVVSLAAALPHYIRSNGIEASLLTDPKEVAGRTVDYIIAGGGLTGLTTAARLTENPDITVLVIESGSYESDRGPIIEDLNAYGDIFGSSVDHAYETVELATNNQTALIRSGNGLGGSTLVNGGTWTRPHKAQVDSWETVFGNEGWNWDSVAAYSLQAERARAPNAKQIAAGHYFNASCHGINGTVHAGPRDTGDDYSPIVKALMSAVEDRGVPTKKDLGCGDPHGVSMFPNTLHEDQVRSDAAREWLLPNYQRPNLQVLTGRYVGKVLLSQNATTPRAVGVEFGTHKGNTHNVYAKHEVLLAAGSAVSPTILEYSGIGMKSILEPLGIDTVVDLPVGLNLQDQTTSTVRSRITSAGAGQGQAAWFATFNETFGDYAEKAHELLNTKLEQWAEEAVARGGFHNTTALLIQYENYRDWIVKDNVAYSELFLDTAGVAFFDVWDLLPFTRGYVHILDKDPYLRHFAYDPQYFLNELDLLGQAAATQLARNISNSGAMQTYFAGETIPGDNLAYDADLSAWVEYIPYNFRPNYHGVGTCSMMPKEMGGVVDNAARVYGVQGLRVIDGSIPPTQMSSHVMTVFYAMALKVADAILADYASMQ

SEQ ID NO: 507 - protein, 605 aa, Aspergillus niger
MQTLLVSSLVVSLAAALPHYIRSNGIEASLLTDPKEVAGRTVDYIIAGGGLTGLTTAARLTENPDITVLVIESGSYESDRGPIIEDLNAYGDIFGSSVDHAYETVELATNNQTALIRSGNGLGGSTLVNGGTWTRPHKAQVDSWETVFGNEGWNWDSVAAYSLQAERARAPNAKQIAAGHYFNASCHGINGTVHAGPRDTGDDYSPIVKALMSAVEDRGVPTKKDLGCGDPHGVSMFPNTLHEDQVRSDAAREWLLPNYQRPNLQVLTGRYVGKVLLSQNATTPRAVGVEFGTHKGNTHNVYAKHEVLLAAGSAVSPTILEYSGIGMKSILEPLGIDTVVDLPVGLNLQDQTTSTVRSRITSAGAGQGQAAWFATFNETFGDYAEKAHELLNTKLEQWAEEAVARGGFHNTTALLIQYENYRDWIVKDNVAYSELFLDTAGVAVFDVWDLLPFTRGYVHILDKDPYLRHFAYDPQYFLNELDLLGQAAATQLARNISNSGAMQTYFAGETIPGDNLAYDADLSAWVEYIPYNFRPNYHGVGTCSMMPKEMGGVVDNAARVYGVQGLRVIDGSIPPTQMSSHVMTVFYAMALKVADAILADYASMQ

SEQ ID NO: 508 - protein, 605 aa, Aspergillus niger
MQTLLVSSLVVSLAAALPHYIRSNGIEASLLTDPKEVAGRTVDYIIAGGGLTGLTTAARLTENPDITVLVIESGSYESDRGPIIEDLNAYGDIFGSSVDHAYETVELATNNQTALIRSGNGLGGSTLVNGGTWTRPHKAQVDSWETVFGNEGWNWDSVAAYSLQAERARAPNAKQIAAGHYFNASCHGINGTVHAGPRDTGDDYSPIVKALMSAVEDRGVPTKKDLGCGDPHGVSMFPNTLHEDQVRSDAAREWLLPNYQRPNLQVLTGRYVGKVLLSQNATTPRAVGVEFGTHKGNTHNVYAKHEVLLAAGSAVSPTILEYSGIGMKSILEPLGIDTVVDLPVGLNLQDQTTSTVRSRITSAGAGQGQAAWFATFNETFGDYAEKAHELLNTKLEQWAEEAVARGGFHNTTALLIQYENYRDWIVKDNVAYSELFLDTAGVATFDVWDLLPFTRGYVHILDKDPYLRHFAYDPQYFLNELDLLGQAAATQLARNISNSGAMQTYFAGETIPGDNLAYDADLSAWVEYIPYNFRPNYHGVGTCSMMPKEMGGVVDNAARVYGVQGLRVIDGSIPPTQMSSHVMTVFYAMALKVADAILADYASMQ

SEQ ID NO: 509 - protein, 605 aa, Aspergillus niger
MQTLLVSSLVVSLAAALPHYIRSNGIEASLLTDPKEVAGRTVDYIIAGGGLTGLTTAARLTENPDITVLVIESGSYESDRGPIIEDLNAYGDIFGSSVDHAYETVELATNNQTALIRSGNGLGGSTLVNGGTWTRPHKAQVDSWETVFGNEGWNWDSVAAYSLQAERARAPNAKQIAAGHYFNASCHGINGTVHAGPRDTGDDYSPIVKALMSAVEDRGVPTKKDLGCGDPHGVSMFPNTLHEDQVRSDAAREWLLPNYQRPNLQVLTGRYVGKVLLSQNATTPRAVGVEFGTHKGNTHNVYAKHEVLLAAGSAVSPTILEYSGIGMKSILEPLGIDTVVDLPVGLNLQDQTTSTVRSRITSAGAGQGQAAWFATFNETFGDYAEKAHELLNTKLEQWAEEAVARGGFHNTTALLIQYENYRDWIVKDNVAYSELFLDTAGVASFDVWDLLPFTRGYVHILDKDPYLRHFAYDPQYFLNELDLLGQAAATQLARNISNSGAMQTYFAGETIPGDNLAYDADLSAWVEYIPYNFRPNYHGVGTCSMMPKEMGGVVDNAARVYGVQGLRVIDGSIPPTQMSSHPMTVFYAMALKVADAILADYASMQ

SEQ ID NO: 510 - protein, 605 aa, Aspergillus niger
MQTLLVSSLVVSLAAALPHYIRSNGIEASLLTDPKEVAGRTVDYIIAGGGLTGLTTAARLTENPDITVLVIESGSYESDRGPIIEDLNAYGDIFGSSVDHAYETVELATNNQTALIRSGNGLGGSTLVNGGTWTRPHKAQVDSWETVFGNEGWNWDSVAAYSLQAERARAPNAKQIAAGHYFNASCHGINGTVHAGPRDTGDDYSPIVKALMSAVEDRGVPTKKDLGCGDPHGVSMFPNTLHEDQVRSDAAREWLLPNYQRPNLQVLTGRYVGKVLLSQNATTPRAVGVEFGTHKGNTHNVYAKHEVLLAAGSAVSPTILEYSGIGMKSILEPLGIDTVVDLPVGLNLQDQTHSTVRSRITSAGAGQGQAAWFATFNETFGDYAEKAHELLNTKLEQWAEEAVARGGFHNTTALLIQYENYRDWIVKDNVAYSELFLDTAGVASFDVWDLLPFTRGYVHILDKDPYLRHFAYDPQYFLNELDLLGQAAATQLARNISNSGAMQTYFAGETIPGDNLAYDADLSAWVEYIPYNFRPNYHGVGTCSMMPKEMGGVVDNAARVYGVQGLRVIDGSIPPTQMSSHVMTVFYAMALKVADAILADYASMQ

SEQ ID NO: 511 - protein, 605 aa, Aspergillus niger
MQTLLVSSLVVSLAAALPHYIRSNGIEASLLTDPKEVAGRTVDYIIAGGGLTGLTTAARLTENPDITVLVIESGSYESDRGPIIEDLNAYGDIFGSSVDHAYETVELATNNQTALIRSGNGLGGSTLVNGGTWTRPHKAQVDSWETVFGNEGWNWDSVAAYSLQAERARAPNAKQIAAGHYFNASCHGINGTVHAGPRDTGDDYSPIVKALMSAVEDRGVPTKKDLGCGDPHGVSMFPNTLHEDQVRSDAAREWLLPNYQRPNLQVLTGRYVGKVLLSQNATTPRAVGVEFGTHKGNTHNVYAKHEVLLAAGSAVSPTILEYSGIGMKSILEPLGIDTVVDLPVGLNLQDQTTSTVRSRITSAGAGQGQAAWFATFNETFGDYAEKAHELLNTKLEQWAEEAVARGGFHNTTALLIQYENYRDWIVKDNVAYSELFLDTAGVAAFDVWDLLPFTRGYVHILDKDPYLRHFAYDPQYFLNELDLLGQAAATQLARNISNSGAMQTYFAGETIPGDNLAYDADLSAWVEYIPYNFRPNYHGVGTCSMMPKEMGGVVDNAARVYGVQGLRVIDGSIPPTQMSSHVMTVFYAMALKVADAILADYASMQ

SEQ ID NO: 512 - protein, 605 aa, Aspergillus niger
MQTLLVSSLVVSLAAALPHYIRSNGIEASLLTDPKEVAGRTVDYIIAGGGLTGLTTAARLTENPDITVLVIESGSYESDRGPIIEDLNAYGDIFGSSVDHAYETVELATNNQTALIRSGNGLGGSTLVNGGTWTRPHKAQVDSWETVFGNEGWNWDSVAAYSLQAERARAPNAKQIAAGHYFNASCHGINGTVHAGPRDTGDDYSPIVKALMSAVEDRGVPTKKDLGCGDPHGVSMFPNTLHEDQVRSDAAREWLLPNYQRPNLQVLTGRYVGKVLLSQNATTPRAVGVEFGTHKGNTHNVYAKHEVLLAAGSAVSPTILEYSGIGMKSILEPLGIDTVVDLPVGLNLQDQTASTVRSRITSAGAGQGQAAWFATFNETFGDYAEKAHELLNTKLEQWAEEAVARGGFHNTTALLIQYENYRDWIVKDNVAYSELFLDTAGVASFDVWDLLPFTRGYVHILDKDPYLRHFAYDPQYFLNELDLLGQAAATQLARNISNSGAMQTYFAGETIPGDNLAYDADLSAWVEYIPYNFRPNYHGVGTCSMMPKEMGGVVDNAARVYGVQGLRVIDGSIPPTQMSSHVMTVFYAMALKVADAILADYASMQ

SEQ ID NO: 513 - protein, 605 aa, Aspergillus niger
MQTLLVSSLVVSLAAALPHYIRSNGIEASLLTDPKEVAGRTVDYIIAGGGLTGLTTAARLTENPDITVLVIESGSYESDRGPIIEDLNAYGDIFGSSVDHAYETVELATNNQTALIRSGNGLGGSTLVNGGTWTRPHKAQVDSWETVFGNEGWNWDSVAAYSLQAERARAPNAKQIAAGHYFNASCHGINGTVHAGPRDTGDDYSPIVKALMSAVEDRGVPTKKDLGCGDPHGVSMFPNTLHEDQVRSDAAREWLLPNYQRPNLQVLTGRYVGKVLLSQNATTPRAVGVEFGTHKGNTHNVYAKHEVLLAAGSAVSPTILEYSGIGMKSILEPLGIDTVVDLPVGLNLQDQTTSTVRSRITSAGAGQGQAAWFATFNETFGDYAEKAHELLNTKLEQWAEEAVARGGFHNTTALLIQYENYRDWIVKDNVAYSELFLDTAGVASFDVWDLLPFTRGYVHILDKDPYLRHFAYDPQYFLNELDLLGQAAATQLARNISNSGAMQTYFAGETIPGDNLAYDADLSAWVEYIPYNFRPNYHGVGTCSMMPKEMGGVVDNAARVYGVQGLRVIDGSIPPTQMSSHQMTVFYAMALKVADAILADYASMQ

SEQ ID NO: 514 - protein, 605 aa, Aspergillus niger
MQTLLVSSLVVSLAAALPHYIRSNGIEASLLTDPKEVAGRTVDYIIAGGGLTGLTTAARLTENPDITVLVIESGSYESDRGPIIEDLNAYGDIFGSSVDHAYETVELATNNQTALIRSGNGLGGSTLVNGGTWTRPHKAQVDSWETVFGNEGWNWDSVAAYSLQAERARAPNAKQIAAGHYFNASCHGINGTVHAGPRDTGDDYSPIVKALMSAVEDRGVPTKKDLGCGDPHGVSMFPNTLHEDQVRSDAAREWLLPNYQRPNLQVLTGRYVGKVLLSQNATTPRAVGVEFGTHKGNTHNVYAKHEVLLAAGSAVSPTILEYSGIGMKSILEPLGIDTVVDLPVGLNLQDQTTSTVRSRITSAGAGQGQAAWFATFNETFGDYAEKAHELLNTKLEQWAEEAVARGGFHNTTALLIQYENYRDWIVKDNVAYSELFLDTAGVARFDVWDLLPFTRGYVHILDKDPYLRHFAYDPQYFLNELDLLGQAAATQLARNISNSGAMQTYFAGETIPGDNLAYDADLSAWVEYIPYNFRPNYHGVGTCSMMPKEMGGVVDNAARVYGVQGLRVIDGSIPPTQMSSHVMTVFYAMALKVADAILADYASMQ

SEQ ID NO: 515 - protein, 605 aa, Aspergillus niger
MQTLLVSSLVVSLAAALPHYIRSNGIEASLLTDPKEVAGRTVDYIIAGGGLTGLTTAARLTENPDITVLVIESGSYESDRGPIIEDLNAYGDIFGSSVDHAYETVELATNNQTALIRSGNGLGGSTLVNGGTWTRPHKAQVDSWETVFGNEGWNWDSVAAYSLQAERARAPNAKQIAAGHYFNASCHGINGTVHAGPRDTGDDYSPIVKALMSAVEDRGVPTKKDLGCGDPHGVSMFPNTLHEDQVRSDAAREWLLPNYQRPNLQVLTGRYVGKVLLSQNATTPRAVGVEFGTHKGNTHNVYAKHEVLLAAGSAVSPTILEYSGIGMKSILEPLGIDTVVDLPVGLNLQDQTTSTVRSRITSAGAGQGQAAWFATFNETFGDYAEKAHELLNTKLEQWAEEAVARGGFHNTTALLIQYENYRDWIVKDNVAYSELFLDTAGVASFDVWDLLPFTRGYVHILDKDPYLRHFAYDPQYFLNELDLLGQAAATQLARNISNSGAMQTYFAGETIPGDNLAYDADLSAWVEYIPYNFRPNYHGVGTCSMMPKEMGGVVDNAARVYGVQGLRVIDGSIPPTQMSSHHMTVFYAMALKVADAILADYASMQ

SEQ ID NO: 516 - protein, 605 aa, Aspergillus niger
MQTLLVSSLVVSLAAALPHYIRSNGIEASLLTDPKEVAGRTVDYIIAGGGLTGLTTAARLTENPDITVLVIESGSYESDRGPIIEDLNAYGDIFGSSVDHAYETVELATNNQTALIRSGNGLGGSTLVNGGTWTRPHKAQVDSWETVFGNEGWNWDSVAAYSLQAERARAPNAKQIAAGHYFNASCHGINGTVHAGPRDTGDDYSPIVKALMSAVEDRGVPTKKDLGCGDPHGVSMFPNTLHEDQVRSDAAREWLLPNYQRPNLQVLTGRYVGKVLLSQNATTPRAVGVEFGTHKGNTHNVYAKHEVLLAAGSAVSPTILEYSGIGMKSILEPLGIDTVVDLPVGLNLQDQTTSTVRSRITSAGAGQGQAAWFATFNETFGDYAEKAHELLNTKLEQWAEEAVARGGFHNTTALLIQYENYRDWIVKDNVAYSELFLDTAGVAYFDVWDLLPFTRGYVHILDKDPYLRHFAYDPQYFLNELDLLGQAAATQLARNISNSGAMQTYFAGETIPGDNLAYDADLSAWVEYIPYNFRPNYHGVGTCSMMPKEMGGVVDNAARVYGVQGLRVIDGSIPPTQMSSHVMTVFYAMALKVADAILADYASMQ

SEQ ID NO: 517 - protein, 605 aa, Aspergillus niger
MQTLLVSSLVVSLAAALPHYIRSNGIEASLLTDPKEVAGRTVDYIIAGGGLTGLTTAARLTENPDITVLVIESGSYESDRGPIIEDLNAYGDIFGSSVDHAYETVELATNNQTALIRSGNGLGGSTLVNGGTWTRPHKAQVDSWETVFGNEGWNWDSVAAYSLQAERARAPNAKQIAAGHYFNASCHGINGTVHAGPRDTGDDYSPIVKALMSAVEDRGVPTKKDLGCGDPHGVSMFPNTLHEDQVRSDAAREWLLPNYQRPNLQVLTGRYVGKVLLSQNATTPRAVGVEFGTHKGNTHNVYAKHEVLLAAGSAVSPTILEYSGIGMKSILEPLGIDTVVDLPVGLNLQDQTTSTVRSRITSAGAGQGQAAWFATFNETFGDYAEKAHELLNTKLEQWAEEAVARGGFHNTTALLIQYENYRDWIVKDNVAYSELFLDTAGVASFDVWDLLPFTRGYVHILDKDPYLRHFAYDPQYFLNELDLLGQAAATQLARNISNSGAMQTYFAGETIPGDNLAYDADLSAWVEYIPYNFRPNYHGVGTCSMMPKEMGGVVDNAARVYGVQGLRVIDGSIPPTQMSSHEMTVFYAMALKVADAILADYASMQ

SEQ ID NO: 518 - protein, 605 aa, Aspergillus niger
MQTLLVSSLVVSLAAALPHYIRSNGIEASLLTDPKEVAGRTVDYIIAGGGLTGLTTAARLTENPDITVLVIESGSYESDRGPIIEDLNAYGDIFGSSVDHAYETVELATNNQTALIRSGNGLGGSTLVNGGTWTRPHKAQVDSWETVFGNEGWNWDSVAAYSLQAERARAPNAKQIAAGHYFNASCHGINGTVHAGPRDTGDDYSPIVKALMSAVEDRGVPTKKDLGCGDPHGVSMFPNTLHEDQVRSDAAREWLLPNYQRPNLQVLTGRYVGKVLLSQNATTPRAVGVEFGTHKGNTHNVYAKHEVLLAAGSAVSPTILEYSGIGMKSILEPLGIDTVVDLPVGLNLQDQTTSTVRSRITSAGAGQGQAAWFATFNETFGDYAEKAHELLNTKLEQWAEEAVARGGFHNTTALLIQYENYRDWIVKDNVAYSELFLDTAGVAIFDVWDLLPFTRGYVHILDKDPYLRHFAYDPQYFLNELDLLGQAAATQLARNISNSGAMQTYFAGETIPGDNLAYDADLSAWVEYIPYNFRPNYHGVGTCSMMPKEMGGVVDNAARVYGVQGLRVIDGSIPPTQMSSHVMTVFYAMALKVADAILADYASMQ

SEQ ID NO: 519 - protein, 605 aa, Aspergillus niger
MQTLLVSSLVVSLAAALPHYIRSNGIEASLLTDPKEVAGRTVDYIIAGGGLTGLTTAARLTENPDITVLVIESGSYESDRGPIIEDLNAYGDIFGSSVDHAYETVELATNNQTALIRSGNGLGGSTLVNGGTWTRPHKAQVDSWETVFGNEGWNWDSVAAYSLQAERARAPNAKQIAAGHYFNASCHGINGTVHAGPRDTGDDYSPIVKALMSAVEDRGVPTKKDLGCGDPHGVSMFPNTLHEDQVRSDAAREWLLPNYQRPNLQVLTGRYVGKVLLSQNATTPRAVGVEFGTHKGNTHNVYAKHEVLLAAGSAVSPTILEYSGIGMKSILEPLGIDTVVDLPVGLNLQDQTTSTVRSRITSAGAGQGQAAWFATFNETFGDYAEKAHELLNTKLEQWAEEAVARGGFHNTTALLIQYENYRDWIVKDNVAYSELFLDTAGVASFDVWDLLPFTRGYVHILDKDPYLRHFAYDPQYFLNELDLLGQAAATQLARNISNSGAMQTYFAGETIPGDNLAYDADLSAWVEYIPYNFRPNYHGVGTCSMMPKEMGGVVDNAARVYGVQGLRVIDGSIPPTQMSSHYMTVFYAMALKVADAILADYASMQ

SEQ ID NO: 520 - protein, 605 aa, Aspergillus niger
MQTLLVSSLVVSLAAALPHYIRSNGIEASLLTDPKEVAGRTVDYIIAGGGLTGLTTAARLTENPDITVLVIESGSYESDRGPIIEDLNAYGDIFGSSVDHAYETVELATNNQTALIRSGNGLGGSTLVNGGTWTRPHKAQVDSWETVFGNEGWNWDSVAAYSLQAERARAPNAKQIAAGHYFNASCHGINGTVHAGPRDTGDDYSPIVKALMSAVEDRGVPTKKDLGCGDPHGVSMFPNTLHEDQVRSDAAREWLLPNYQRPNLQVLTGRYVGKVLLSQNATTPRAVGVEFGTHKGNTHNVYAKHEVLLAAGSAVSPTILEYSGIGMKSILEPLGIDTVVDLPVGLNLQDQTTSTVRSRITSAGAGQGQAAWFATFNETFGDYAEKAHELLNTKLEQWAEEAVARGGFHNTTALLIQYENYRDWIVKDNVAYSELFLDTAGVANFDVWDLLPFTRGYVHILDKDPYLRHFAYDPQYFLNELDLLGQAAATQLARNISNSGAMQTYFAGETIPGDNLAYDADLSAWVEYIPYNFRPNYHGVGTCSMMPKEMGGVVDNAARVYGVQGLRVIDGSIPPTQMSSHVMTVFYAMALKVADAILADYASMQ

SEQ ID NO: 521 - protein, 605 aa, Aspergillus niger
MQTLLVSSLVVSLAAALPHYIRSNGIEASLLTDPKEVAGRTVDYIIAGGGLTGLTTAARLTENPDITVLVIESGSYESDRGPIIEDLNAYGDIFGSSVDHAYETVELATNNQTALIRSGNGLGGSTLVNGGTWTRPHKAQVDSWETVFGNEGWNWDSVAAYSLQAERARAPNAKQIAAGHYFNASCHGINGTVHAGPRDTGDDYSPIVKALMSAVEDRGVPTKKDLGCGDPHGVSMFPNTLHEDQVRSDAAREWLLPNYQRPNLQVLTGRYVGKVLLSQNATTPRAVGVEFGTHKGNTHNVYAKHEVLLAAGSAVSPTILEYSGIGMKSILEPLGIDTVVDLPVGLNLQDQTTSTVRSRITSAGAGQGQAAWFATFNETFGDYAEKAHELLNTKLEQWAEEAVARGGFHNTTALLIQYENYRDWIVKDNVAYSELFLDTAGVASFDVWDLLPFTRGYVHILDKDPYLRHFAYDPQYFLNELDLLGQAAATQLARNISNSGAMQTYFAGETIPGDNLAYDADLSAWVEYIPYNFRPNYHGVGTCSMMPKEMGGVVDNAARVYGVQGLRVIDGSIPPTQMSSHDMTVFYAMALKVADAILADYASMQ

SEQ ID NO: 522 - protein, 605 aa, Aspergillus niger
MQTLLVSSLVVSLAAALPHYIRSNGIEASLLTDPKEVAGRTVDYIIAGGGLTGLTTAARLTENPDITVLVIESGSYESDRGPIIEDLNAYGDIFGSSVDHAYETVELATNNQTALIRSGNGLGGSTLVNGGTWTRPHKAQVDSWETVFGNEGWNWDSVAAYSLQAERARAPNAKQIAAGHYFNASCHGINGTVHAGPRDTGDDYSPIVKALMSAVEDRGVPTKKDLGCGDPHGVSMFPNTLHEDQVRSDAAREWLLPNYQRPNLQVLTGRYVGKVLLSQNATTPRAVGVEFGTHKGNTHNVYAKHEVLLAAGSAVSPTILEYSGIGMKSILEPLGIDTVVDLPVGLNLQDQTTSTVRSRITSAGAGQGQAAWFATFNETFGDYAEKAHELLNTKLEQWAEEAVARGGFHNTTALLIQYENYRDWIVKDNVAYSELFLDTAGVAGFDVWDLLPFTRGYVHILDKDPYLRHFAYDPQYFLNELDLLGQAAATQLARNISNSGAMQTYFAGETIPGDNLAYDADLSAWVEYIPYNFRPNYHGVGTCSMMPKEMGGVVDNAARVYGVQGLRVIDGSIPPTQMSSHVMTVFYAMALKVADAILADYASMQ

SEQ ID NO: 523 - protein, 605 aa, Aspergillus niger
MQTLLVSSLVVSLAAALPHYIRSNGIEASLLTDPKEVAGRTVDYIIAGGGLTGLTTAARLTENPDITVLVIESGSYESDRGPIIEDLNAYGDIFGSSVDHAYETVELATNNQTALIRSGNGLGGSTLVNGGTWTRPHKAQVDSWETVFGNEGWNWDSVAAYSLQAERARAPNAKQIAAGHYFNASCHGINGTVHAGPRDTGDDYSPIVKALMSAVEDRGVPTKKDLGCGDPHGVSMFPNTLHEDQVRSDAAREWLLPNYQRPNLQVLTGRYVGKVLLSQNATTPRAVGVEFGTHKGNTHNVYAKHEVLLAAGSAVSPTILEYSGIGMKSILEPLGIDTVVDLPVGLNLQDQTTSTVRSRITSAGAGQGQAAWFATFNETFGDYAEKAHELLNTKLEQWAEEAVARGGFHNTTALLIQYENYRDWIVKDNVAYSELFLDTAGVASFDVWDLLPFTRGYVHILDKDPYLRHFAYDPQYFLNELDLLGQAAATQLARNISNSGAMQTYFAGETIPGDNLAYDADLSAWVEYIPYNFRPNYHGVGTCSMMPKEMGGVVDNAARVYGVQGLRVIDGSIPPTQMSSHGMTVFYAMALKVADAILADYASMQ

SEQ ID NO: 524 - protein, 605 aa, Aspergillus niger
MQTLLVSSLVVSLAAALPHYIRSNGIEASLLTDPKEVAGRTVDYIIAGGGLTGLTTAARLTENPDITVLVIESGSYESDRGPIIEDLNAYGDIFGSSVDHAYETVELATNNQTALIRSGNGLGGSTLVNGGTWTRPHKAQVDSWETVFGNEGWNWDSVAAYSLQAERARAPNAKQIAAGHYFNASCHGINGTVHAGPRDTGDDYSPIVKALMSAVEDRGVPTKKDLGCGDPHGVSMFPNTLHEDQVRSDAAREWLLPNYQRPNLQVLTGRYVGKVLLSQNATTPRAVGVEFGTHKGNTHNVYAKHEVLLAAGSAVSPTILEYSGIGMKSILEPLGIDTVVDLPVGLNLQDQTTSTVRSRITSAGAGQGQAAWFATFNETFGDYAEKAHELLNTKLEQWAEEAVARGGFHNTTALLIQYENYRDWIVKDNVAYSELFLDTAGVADFDVWDLLPFTRGYVHILDKDPYLRHFAYDPQYFLNELDLLGQAAATQLARNISNSGAMQTYFAGETIPGDNLAYDADLSAWVEYIPYNFRPNYHGVGTCSMMPKEMGGVVDNAARVYGVQGLRVIDGSIPPTQMSSHVMTVFYAMALKVADAILADYASMQ

SEQ ID NO: 525 - protein, 605 aa, Aspergillus niger
MQTLLVSSLVVSLAAALPHYIRSNGIEASLLTDPKEVAGRTVDYIIAGGGLTGLTTAARLTENPDITVLVIESGSYESDRGPIIEDLNAYGDIFGSSVDHAYETVELATNNQTALIRSGNGLGGSTLVNGGTWTRPHKAQVDSWETVFGNEGWNWDSVAAYSLQAERARAPNAKQIAAGHYFNASCHGINGTVHAGPRDTGDDYSPIVKALMSAVEDRGVPTKKDLGCGDPHGVSMFPNTLHEDQVRSDAAREWLLPNYQRPNLQVLTGRYVGKVLLSQNATTPRAVGVEFGTHKGNTHNVYAKHEVLLAAGSAVSPTILEYSGIGMKSILEPLGIDTVVDLPVGLNLQDQTTSTVRSRITSAGAGQGQAAWFATFNETFGDYAEKAHELLNTKLEQWAEEAVARGGFHNTTALLIQYENYRDWIVKDNVAYSELFLDTAGVAQFDVWDLLPFTRGYVHILDKDPYLRHFAYDPQYFLNELDLLGQAAATQLARNISNSGAMQTYFAGETIPGDNLAYDADLSAWVEYIPYNFRPNYHGVGTCSMMPKEMGGVVDNAARVYGVQGLRVIDGSIPPTQMSSHVMTVFYAMALKVADAILADYASMQ

SEQ ID NO: 526 - protein, 581 aa, Aspergillus niger
GIEASLLTDPKEVAGRTVDYIIAGGGLTGLTTAARLTENPDITVLVIESGSYESDRGPIIEDLNAYGDIFGSSVDHAYETVCLATNNQTALIRSGNGLGGSTLVNGGTWTRPHKAQVDSWETVFGNEGWNWDSVAAYSLQAERARAPNAKQIAAGHYFNASCHGINGTVHAGPRDTGDDYSPIVKALMSAVEDRGVPTKKDLGCGDPHGVSMFPNTLHEDQVRSDAAREWLLPNYQRPNLQVLTGQYVGKVLLSQNATTPRAVGVEFGTHKGNTHNVYAKHEVLLAAGSAVSPTILEYSGIGMKSILEPLGIDTVVDLPVGLNLQDQTTSTVRSRITSAGAGQGQAAWFATFNETFGDYTEKAHELLNTKLEQWAEEAVARGGFHNTTALLIQYENYRDWIVKDNVAYSELFLDTAGEASFDVWDLLPFTRGYVHILDKDPYLRHFAYDPQYFLNELDLLGQAAATQLARNISNSGAMQTYFAGETIPGDNLAYDADLRAWVEYIPYHFRPNYHGVGTCSMMPKEMGGVVDNAARVYGVQGLRVIDGSIPPTQMSSHVMTVFYAMALKIADAVLADYASMQ

SEQ ID NO: 527 - protein, 581 aa, Aspergillus niger
GIEASLLTDPKEVAGRTVDYIIAGGGLTGLTTAARLTENPDITVLVIESGSYESDRGPIIEDLNAYGDIFGSSVDHAYETVCLATNNQTALIRSGNGLGGSTLVNGGTWTRPHKAQVDSWETVFGNEGWNWDSVAAYSLQAERARAPNAKQIAAGHYFNASCHGINGTVHAGPRDTGDDYSPIVKALMSAVEDRGVPTKKDLGCGDPHGVSMFPNTLHEDQVRSDAAREWLLPNYQRPNLQVLTGQYVGKVLLSQNATTPRAVGVEFGTHKGNTHNVYAKHEVLLAAGSAVSPTILEYSGIGMKSILEPLGIDTVVDLPVGLNLQDQTTSTVRSRITSAGAGQGQAAWFATFNETFGDYTEKAHELLNTKLEQWAEEAVARGGFHNTTALLIQYENYRDWIVKDNVAYSELFLDTAGVASFDVWDLLPFTRGYVHILDKDPYLRHFAYDPQYFLNELDLLGQAAATQLARNISNSGAMQTYFAGETIPGDNLAYDADLRAWVEYIPYNFRPNYHGVGTCSMMPKEMGGVVDNAARVYGVQGLRVIDGSIPPTQMSSHVMTVFYAMALKIADAVLADYASMQ

SEQ ID NO: 528 - protein, 579 aa, Aspergillus niger
GIEASLLTDPKEVAGRTVDYIIAGGGLTGLTTAARLTENPDITVLVIESGSYESDRGPIIEDLNAYGDIFGSSVDHAYETVELATNNQTALIRSGNGLGGSTLVNGGXWTRPHKAQVDSWETVFGNEGWNWDSVAAYSLQAERARAPNAKQIAAGHYFNASCHGINGTVHAGPRDTGDDYSPIVKALMSAVEDRGVPTKKDLGCGDPHGVSMFPNTLHEDQVRSDAAREWLLPNYQRPNLQVLTGQYVGKVLLSQNATTPRAVGVEFGTHKGNTHNVYAKHEVLLAAGSAVSPTILEYSDIGMKSILEPLGIDTVVDLPVGLNLQDQTTSTVRSRITSAGAGQGQAAWXATFNETFGDYAEKAHELLNTKLEQWAEEAVARGGFHNTTALLIQYENYRDWIVKDNVAYSELFLDTAGVASFDVWDLLPFTRGYVHILDKDPYLRHFAYDPQYFLNELDLLGQAAATQLARNISNSGAMQTYFAGETIPGDNLAYDADLSAWVEYIPYNFRPNYHGVGTCSMMPKEMGGVVDNAARVYGVQGLRVIDGSIPPTQMSSHVMTVFYAMALKIADAILADYAS

SEQ ID NO: 529 - protein, 605 aa, Aspergillus niger
MQTLLVSSLVVSLAAALPHYIRSNGIEASLLTDPKEVAGRTVDYIIAGGGLTGLTTAARLTENPDITVLVIESGSYESDRGPIIEDLNAYGDIFGSSVDHAYETVELATNNQTALIRSGNGLGGSTLVNGGTWTRPHKAQVDSWETVFGNEGWNWDSVAAYSLQAERARAPNAKQIAAGHYFNASCHGINGTVHAGPRDTGDDYSPIVKALMSAVEDRGVPTKKDLGCGDPHGVSMFPNTLHEDQVRSDAAREWLLPNYQRPNLQVLTGRYVGKVLLSQNATTPRAVGVEFGTHKGNTHNVYAKHEVLLAAGSAVSPTILEYSGIGMKSILEPLGIDTVVDLPVGLNLQDQTASTVRSRITSAGAGQGQAAWFATFNETFGDYAEKAHELLNTKLEQWAEEAVARGGFHNTTALLIQYENYRDWIVKDNVAYSELFLDTAGVASFHVWDLLPFTRGYVHILDKDPYLRHFAYDPQYFLNELDLLGQAAATQLARNISNSGAMQTYFAGETIPGDNLAYDADLSAWVEYIPYNFRPNYHGVGTCSMMPKEMGGVVDNAARVYGVQGLRVIDGSIPPTQMSSHVMTVFYAMALKVADAILADYASMQ

SEQ ID NO: 530 - protein, 605 aa, Aspergillus niger
MSTLLVSSLVVSLAAALPHYIRSNGIEASLLTDPKEVAGRTVDYIIAGGGLTGLTTAARLTENPDITVLVIESGSYESDRGPIIEDLNAYGDIFGSSVDHAYETVELATNNQTALIRSGNGLGGSTLVNGGTWTRPHKAQVDSWETVFGNEGWNWDSVAAYSLQAERARAPNAKQIAAGHYFNASCHGINGTVHAGPRDTGDDYSPIVKALMSAVEDRGVPTKKDLGCGDPHGVSMFPNTLHEDQVRSDAAREWLLPNYQRPNLQVLTGRYVGKVLLSQNATTPRAVGVEFGTHKGNTHNVYAKHEVLLAAGSAVSPTILEYSGIGMKSILEPLGIDTVVDLPVGLNLQDQATSTVRSRITSAGAGQGQAAWFATFNETFGDYAEKAHELLNTKLEQWAEEAVARGGFHNTTALLIQYENYRDWIVKDNVAYSELFLDTAGVASFDVWDLLPFTRGYVHILDKDPYLRHFAYDPQYFLNELDLLGQAAATQLARNISNSGAMQTYFAGETIPGDNLAYDADLSAWVEYIPYNFRPNYHGVGTCSMMPKEMGGVVDNAARVYGVQGLRVIDGSIPPTQMSSHVMTVFYAMALKVADAILADYASMQ

SEQ ID NO: 531 - protein, 605 aa, Aspergillus niger
MQTLLVSSLVVSLAAALPHYIRSNGIEASLLTDPKEVAGRTVDYIIAGGGLTGLTTAARLTENPDITVLVIESGSYESDRGPIIEDLNAYGDIFGSSVDHAYETVELATNNQTALIRSGNGLGGSTLVNGGTWTRPHKAQVDSWETVFGNEGWNWDSVAAYSLQAERARAPNAKQIAAGHYFNASCHGINGTVHAGPRDTGDDYSPIVKALMSAVEDRGVPTKKDLGCGDPHGVSMFPNTLHEDQVRSDAAREWLLPNYQRPNLQVLTGRYVGKVLLSQNATTPRAVGVEFGTHKGNTHNVYAKHEVLLAAGSAVSPTILEYSGIGMKSILEPLGIDTVVDLPVGLNLQDQTTSTVRSRITSAGAGQGQAAWFATFNETFGDYAEKAHELLNTKLEQWAEEAVARGGFHNTTALLIQYENYRDWIVKDNVAYSELFLDTAGVASFHVWDLLPFTRGYVHILDKDPYLRHFAYDPQYFLNELDLLGQAAATQLARNISNSGAMQTYFAGETIPGDNLAYDADLSAWVEYIPYNFRPNYHGVGTCSMMPKEMGGVVDNAARVYGVQGLRVIDGSIPPTQMSSHPMTVFYAMALKVADAILADYASMQ

SEQ ID NO: 532 - protein, 605 aa, Aspergillus niger
MSTLLVSSLVVSLAAALPHYIRSNGIEASLLTDPKEVAGRTVDYIIAGGGLTGLTTAARLTENPDITVLVIESGSYESDRGPIIEDLNAYGDIFGSSVDHAYETVELATNNQTALIRSGNGLGGSTLVNGGAWTRPHKAQVDSWETVFGNEGWNWDSVAAYSLQAERARAPNAKQIAAGHYFNASCHGINGTVHAGPRDTGDDYSPIVKALMSAVEDRGVPTKKDLGCGDPHGVSMFPNTLHEDQVRSDAAREWLLPNYQRPNLQVLTGRYVGKVLLSQNATTPRAVGVEFGTHKGNTHNVYAKHEVLLAAGSAVSPTILEYSGIGMKSILEPLGIDTVVDLPVGLNLQDQTTSTVRSRITSAGAGQGQAAWFATFNETFGDYAEKAHELLNTKLEQWAEEAVARGGFHNTTALLIQYENYRDWIVKDNVAYSELFLDTAGVASFDVWDLLPFTRGYVHILDKDPYLRHFAYDPQYFLNELDLLGQAAATQLARNISNSGAMQTYFAGETIPGDNLAYDADLSAWVEYIPYNFRPNYHGVGTCSMMPKEMGGVVDNAARVYGVQGLRVIDGSIPPTQMSSHVMTVFYAMALKVADAILADYASMQ

SEQ ID NO: 533 - protein, 605 aa, Aspergillus niger
MQTLLVSSLVVSLAAALPHYIRSNGIEASLLTDPKEVAGRTVDYIIAGGGLTGLTTAARLTENPDITVLVIESGSYESDRGPIIEDLNAYGDIFGSSVDHAYETVELATNNQTALIRSGNGLGGSTLVNGGTWTRPHKAQVDSWETVFGNEGWNWDSVAAYSLQAERARAPNAKQIAAGHYFNASCHGINGTVHAGPRDTGDDYSPIVKALMSAVEDRGVPTKKDLGCGDPHGVSMFPNTLHEDQVRSDAAREWLLPNYQRPNLQVLTGRYVGKVLLSQNATTPRAVGVEFGTHKGNTHNVYAKHEVLLAAGSAVSPTILEYSGIGMKSILEPLGIDTVVDLPVGLNLQDQTASTVRSRITSAGAGQGQAAWFATFNETFGDYAEKAHELLNTKLEQWAEEAVARGGFHNTTALLIQYENYRDWIVKDNVAYSELFLDTAGVASFDVWDLLPFTRGYVHILDKDPYLRHFAYDPQYFLNELDLLGQAAATQLARNISNSGAMQTYFAGETIPGDNLAYDADLSAWVEYIPYNFRPNYHGVGTCSMMPKEMGGVVDNAARVYGVQGLRVIDGSIPPTQMSSHSMTVFYAMALKVADAILADYASMQ

SEQ ID NO: 534 - protein, 605 aa, Aspergillus niger
MQTLLVSSLVVSLAAALPHYIRSNGIEASLLTDPKEVAGRTVDYIIAGGGLTGLTTAARLTENPDITVLVIESGSYESDRGPIIEDLNAYGDIFGSSVDHAYETVELATNNQTALIRSGNGLGGSTLVNGGTWTRPHKAQVDSWETVFGNEGWNWDSVAAYSLQAERARAPNAKQIAAGHYFNASCHGINGTVHAGPRDTGDDYSPIVKALMSAVEDRGVPTKKDLGCGDPHGVSMFPNTLHEDQVRSDAAREWLLPNYQRPNLQVLTGRYVGKVLLSQNATTPRAVGVEFGTHKGNTHNVYAKHEVLLAAGSAVSPTILEYSGIGMKSILEPLGIDTVVDLPVGLNLQDQTTSTVRSRITSAGAGQGQAAWFATFNETFGDYAEKAHELLNTKLEQWAEEAVARGGFHNTTALLIQYENYRDWIVKDNVAYSELFLDTAGVAEFDVWDLLPFTRGYVHILDKDPYLRHFAYDPQYFLNELDLLGQAAATQLARNISNSGAMQTYFAGETIPGDNLAYDADLSAWVEYIPYNFRPNYHGVGTCSMMPKEMGGVVDNAARVYGVQGLRVIDGSIPPTQMSSHPMTVFYAMALKVADAILADYASMQ

SEQ ID NO: 535 - protein, 605 aa, Aspergillus niger
MQTLLVSSLVVSLAAALPHYIRSNGIEASLLTDPKEVAGRTVDYIIAGGGLTGLTTAARLTENPDITVLVIESGSYESDRGPIIEDLNAYGDIFGSSVDHAYETVELATNNQTALIRSGNGLGGSTLVNGGTWTRPHKAQVDSWETVFGNEGWNWDSVAAYSLQAERARAPNAKQIAAGHYFNASCHGINGTVHAGPRDTGDDYSPIVKALMSAVEDRGVPTKKDLGCGDPHGVSMFPNTLHEDQVRSDAAREWLLPNYQRPNLQVLTGRYVGKVLLSQNATTPRAVGVEFGTHKGNTHNVYAKHEVLLAAGSAVSPTILEYSGIGMKSILEPLGIDTVVDLPVGLNLQDQTTSTVRSRITSAGAGQGQAAWFATFNETFGDYAEKAHELLNTKLEQWAEEAVARGGFHNTTALLIQYENYRDWIVKDNVAYSELFLDTAGVAQFDVWDLLPFTRGYVHILDKDPYLRHFAYDPQYFLNELDLLGQAAATQLARNISNSGAMQTYFAGETIPGDNLAYDADLSAWVEYIPYNFRPNYHGVGTCSMMPKEMGGVVDNAARVYGVQGLRVIDGSIPPTQMSSHPMTVFYAMALKVADAILADYASMQ

SEQ ID NO: 536 - protein, 605 aa, Aspergillus niger
MQTLLVSSLVVSLAAALPHYIRSNGIEASLLTDPKEVAGRTVDYIIAGGGLTGLTTAARLTENPDITVLVIESGSYESDRGPIIEDLNAYGDIFGSSVDHAYETVELATNNQTALIRSGNGLGGSTLVNGGTWTRPHKAQVDSWETVFGNEGWNWDSVAAYSLQAERARAPNAKQIAAGHYFNASCHGINGTVHAGPRDTGDDYSPIVKALMSAVEDRGVPTKKDLGCGDPHGVSMFPNTLHEDQVRSDAAREWLLPNYQRPNLQVLTGRYVGKVLLSQNATTPRAVGVEFGTHKGNTHNVYAKHEVLLAAGSAVSPTILEYSGIGMKSILEPLGIDTVVDLPVGLNLQDQTTSTVRSRITSAGAGQGQAAWFATFNETFGDYAEKAHELLNTKLEQWAEEAVARGGFHNTTALLIQYENYRDWIVKDNVAYSELFLDTAGVARFDVWDLLPFTRGYVHILDKDPYLRHFAYDPQYFLNELDLLGQAAATQLARNISNSGAMQTYFAGETIPGDNLAYDADLSAWVEYIPYNFRPNYHGVGTCSMMPKEMGGVVDNAARVYGVQGLRVIDGSIPPTQMSSHPMTVFYAMALKVADAILADYASMQ

SEQ ID NO: 537 - protein, 605 aa, Aspergillus niger
MQTLLVSSLVVSLAAALPHYIRSNGIEASLLTDPKEVAGRTVDYIIAGGGLTGLTTAARLTENPDITVLVIESGSYESDRGPIIEDLNAYGDIFGSSVDHAYETVELATNNQTALIRSGNGLGGSTLVNGGAWTRPHKAQVDSWETVFGNEGWNWDSVAAYSLQAERARAPNAKQIAAGHYFNASCHGINGTVHAGPRDTGDDYSPIVKALMSAVEDRGVPTKKDLGCGDPHGVSMFPNTLHEDQVRSDAAREWLLPNYQRPNLQVLTGRYVGKVLLSQNATTPRAVGVEFGTHKGNTHNVYAKHEVLLAAGSAVSPTILEYSGIGMKSILEPLGIDTVVDLPVGLNLQDQTASTVRSRITSAGAGQGQAAWFATFNETFGDYAEKAHELLNTKLEQWAEEAVARGGFHNTTALLIQYENYRDWIVKDNVAYSELFLDTAGVASFDVWDLLPFTRGYVHILDKDPYLRHFAYDPQYFLNELDLLGQAAATQLARNISNSGAMQTYFAGETIPGDNLAYDADLSAWVEYIPYNFRPNYHGVGTCSMMPKEMGGVVDNAARVYGVQGLRVIDGSIPPTQMSSHVMTVFYAMALKVADAILADYASMQ

SEQ ID NO: 538 - protein, 605 aa, Aspergillus niger
MSTLLVSSLVVSLAAALPHYIRSNGIEASLLTDPKEVAGRTVDYIIAGGGLTGLTTAARLTENPDITVLVIESGSYESDRGPIIEDLNAYGDIFGSSVDHAYETVELATNNQTALIRSGNGLGGSTLVNGGTWTRPHKAQVDSWETVFGNEGWNWDSVAAYSLQAERARAPNAKQIAAGHYFNASCHGINGTVHAGPRDTGDDYSPIVKALMSAVEDRGVPTKKDLGCGDPHGVSMFPNTLHEDQVRSDAAREWLLPNYQRPNLQVLTGRYVGKVLLSQNATTPRAVGVEFGTHKGNTHNVYAKHEVLLAAGSAVSPTILEYSGIGMKSILEPLGIDTVVDLPVGLNLQDQTTSTVRSRITSAGAGQGQAAWFATFNETFGDYAEKAHELLNTKLEQWAEEAVARGGFHNTTALLIQYENYRDWIVKDNVAYSELFLDTAGVASFDVWDLLPFTRGYVHILDKDPYLRHFAYDPQYFLNELDLLGQAAATQLARNISNSGAMQTYFAGETIPGDNLAYDADLSAWVEYIPYNFRPNYHGVGTCSMMPKEMGGVVDNAARVYGVQGLRVIDGSIPPTQMSSHSMTVFYAMALKVADAILADYASMQ

SEQ ID NO: 539 - protein, 605 aa, Aspergillus niger
MSTLLVSSLVVSLAAALPHYIRSNGIEASLLTDPKEVAGRTVDYIIAGGGLTGLTTAARLTENPDITVLVIESGSYESDRGPIIEDLNAYGDIFGSSVDHAYETVELATNNQTALIRSGNGLGGSTLVNGGTWTRPHKAQVDSWETVFGNEGWNWDSVAAYSLQAERARAPNAKQIAAGHYFNASCHGINGTVHAGPRDTGDDYSPIVKALMSAVEDRGVPTKKDLGCGDPHGVSMFPNTLHEDQVRSDAAREWLLPNYQRPNLQVLTGRYVGKVLLSQNATTPRAVGVEFGTHKGNTHNVYAKHEVLLAAGSAVSPTILEYSGIGMKSILEPLGIDTVVDLPVGLNLQDQTTSTVRSRITSAGAGQGQAAWFATFNETFGDYAEKAHELLNTKLEQWAEEAVARGGFHNTTALLIQYENYRDWIVKDNVAYSELFLDTAGVASFHVWDLLPFTRGYVHILDKDPYLRHFAYDPQYFLNELDLLGQAAATQLARNISNSGAMQTYFAGETIPGDNLAYDADLSAWVEYIPYNFRPNYHGVGTCSMMPKEMGGVVDNAARVYGVQGLRVIDGSIPPTQMSSHVMTVFYAMALKVADAILADYASMQ

SEQ ID NO: 540 - protein, 583 aa, Aspergillus niger
SNGIEASLLKDPKEVAGRTYDYIIAGGGLTGLTVAARLTENPNITVLVIESGSYESDRGPIIEDLNAYGDIFGSSVDHAYETVELATNNQTALIRSGNGLGGSTLINGGTWTRPHKAQVDSWETVFGNEGWNWDSVAAYSLQAERARAPNAKQIAAGHYFNASCHGLNGTVHAGPRDTGDDYSPIVKALMSAVEDRGVPTKKDLGCGDPHGVSMFPNTLHEDQVRSDAAREWLLPNYQRPNLQVLTGQYVGKVLLSQNATTPRAVGVEFGTHKGNTHNVYAKHEVLLAAGSAVSPTILEYSGIGMKSILEPLGIDTVVDLPVGLNLQDQTTSTVRSRITSAGAGQGQAAWFATFNETFGDYTEKAHELLNTKLEQWAEEAVARGGFHNTTALLIQYENYRDWIVKDNVAYSELFLDTAGVASFDVWDLLPFTRGYVHILDKDPYLRHFAYDPQYFLNELDLLGQAAATQLARNISNSGAMQTYFAGETIPGDNLAYDADLSAWVEYIPENFRPNYHGVGTCSMMPKEMGGVVDNAARVYGVQGLRVIDGSIPPTQMSSHVMTVFYAMALKIADAILADYASMQ

SEQ ID NO: 541 - protein, 583 aa, Aspergillus niger
SNGIEASLLKDPKEVAGRTYDYIIAGGGLTGLTVAARLTENPNITVLVIESGSYESDRGPIIEDLNAYGDIFGSSVDHAYETVELATNNQTALIRSGNGLGGSTLINGGTWTRPHKAQVDSWETVFGNEGWNWDSVAAYSLQAERARAPNAKQIAAGHYFNASCHGLNGTVHAGPRDTGDDYSPIVKALMSAVEDRGVPTKKDLGCGDPHGVSMFPNTLHEDQVRSDAAREWLLPNYQRPNLQVLTGQYVGKVLLSQNATTPRAVGVEFGTHKGNTHNVYAKHEVLLAAGSAVSPTILEYSGIGMKSILEPLGIDTVVDLPVGLNLQDQTTSTVRSRITSAGAGQGQAAWFATFNETFGDYAEKAHELLNTKLEQWAEEAVARGGFHNTTALLIQYENYRDWIVKDNVAYSELFLDTAGVASFDVWDLLPFTRGYVHILDKDPYLRHFAYDPQYFLNELDLLGQAAATQLARNISNSGAMQTYFAGETIPGDNLAYDADLSAWVEYIPENFRPNYHGVGTCSMMPKEMGGVVDNAARVYGVQGLRVIDGSIPPTQMSSHVMTVFYAMALKIADAILADYASMQ

SEQ ID NO: 542 - protein, 583 aa, Aspergillus niger
SNGIEASLLKDPKEVAGRTYDYIIAGGGLTGLTVAARLTENPNITVLVIESGSYESDRGPIIEDLNAYGDIFGSSVDHAYETVELATNNQTALIRSGNGLGGSTLINGGTWTRPHKAQVDSWETVFGNEGWNWDSVAAYSLQAERARAPNAKQIAAGHYFNASCHGINGTVHAGPRDTGDDYSPIVKALMSAVEDRGVPTKKDLGCGDPHGVSMFPNTLHEDQVRSDAAREWLLPNYQRPNLQVLTGQYVGKVLLSQNATTPRAVGVEFGTHKGNTHNVYAKHEVLLAAGSAVSPTILEYSGIGMKSILEPLGIDTVVDLPVGLNLQDQTTSTVRSRITSAGAGQGQAAWFATFNETFGDYTEKAHELLNTKLEQWAEEAVARGGFHNTTALLIQYENYRDWIVKDNVAYSELFLDTAGVASFDVWDLLPFTRGYVHILDKDPYLRHFAYDPQYFLNELDLLGQAAATQLARNISNSGAMQTYFAGETIPGDNLAYDADLSAWVEYIPENFRPNYHGVGTCSMMPKEMGGVVDNAARVYGVQGLRVIDGSIPPTQMSSHVMTVFYAMALKIADAILADYASMQ

SEQ ID NO: 543 - protein, 583 aa, Aspergillus niger
SNGIEASLLKDPKEVAGRTYDYIIAGGGLTGLTVAARLTENPNITVLVIESGSYESDRGPIIEDLNAYGDIFGSSVDHAYETVELATNNQTALIRSGNGLGGSTLINGGTWTRPHKAQVDSWETVFGNEGWNWDSVAAYSLQAERARAPNAKQIAAGHYFNASCHGINGTVHAGPRDTGDDYSPIVKALMSAVEDRGVPTKKDLGCGDPHGVSMFPNTLHEDQVRSDAAREWLLPNYQRPNLQVLTGQYVGKVLLSQNATTPRAVGVEFGTHKGNTHNVYAKHEVLLAAGSAVSPTILEYSGIGMKSILEPLGIDTVVDLPVGLNLQDQTTSTVRSRITSAGAGQGQAAWFATFNETFGDYAEKAHELLNTKLEQWAEEAVARGGFHNTTALLIQYENYRDWIVKDNVAYSELFLDTAGVASFDVWDLLPFTRGYVHILDKDPYLRHFAYDPQYFLNELDLLGQAAATQLARNISNSGAMQTYFAGETIPGDNLAYDADLSAWVEYIPENFRPNYHGVGTCSMMPKEMGGVVDNAARVYGVQGLRVIDGSIPPTQMSSHVMTVFYAMALKIADAILADYASMQ

SEQ ID NO: 544 - protein, 581 aa, Aspergillus niger
GIEASLLTDPKEVAGRTVDYIIAGGGLTGLTTAARLTENPDITVLVIESGSYESDRGPIIEDLNAYGDIFGSSVDHAYETVCLATNNQTALIRSGNGLGGSTLVNGGTWTRPHKAQVDSWETVFGNEGWNWDSVAAYSLQAERARAPNAKQIAAGHYFNASCHGINGTVHAGPRDTGDDYSPIVKALMSAVEDRGVPTKKDLGCGDPHGVSMFPNTLHEDQVRSDAAREWLLPNYQRPNLQVLTGQYVGKVLLSQNATTPRAVGVEFGTHKGNTHNVYAKHEVLLAAGSAVSPTILEYSGIGMKSILEPLGIDTVVDLPVGLNLQDQTTSTVRSRITSAGAGQGQAAWFATFNETFGDYTEKAHELLNTKLEQWAEEAVARGGFHNTTALLIQYENYRDWIVKDNVAYSELFLDTAGEASFDVWDLLPFTRGYVHILDKDPYLRHFAYDPQYFLNELDLLGQAAATQLARNISNSGAMQTYFAGETIPGDNLAYDADLRAWVEYIPYNFRPNYHGVGTCSMMPKEMGGVVDNAARVYGVQGLRVIDGSIPPTQMSSHVMTVFYAMALKIADAVLADYASMQ

SEQ ID NO: 545 - protein, 581 aa, Aspergillus niger
GIEASLLTDPKEVAGRTVDYIIAGGGLTGLTTAARLTENPDITVLVIESGSYESDRGPIIEDLNAYGDIFGSSVDHAYETVELATNNQTALIRSGNGLGGSTLVNGGTWTRPHKAQVDSWETVFGNEGWNWDSVAAYSLQAERARAPNAKQIAAGHYFDASCHGINGTVHAGPRDTGDDYSPIVKALMSAVEDRGVPTKKDLGCGDPHGVSMFPNTLHEDQVRSDAAREWLLPNYQRPNLQVLTGQYVGKVLLSQNATTPRAVGVEFGTHKGNTHNVYAKHEVLLAAGSAVSPTILEYSGIGMKSILEPLGIDTVVDLPVGLNLQDQTTSTVRSRITSAGAGQGQAAWFATFNETFGDYTEKAHELLNTKLEQWAEEAVARGGFHNTTALLIQYENYRDWIVKDNVAYSELFLDTAGEASFDVWDLLPFTRGYVHILDKDPYLRHFAYDPQYFLNELDLLGQAAATQLARNISNSGAMQTYFAGETIPGDNLAYDADLRAWVEYIPYNFRPNYHGVGTCSMMPKEMGGVVDNAARVYGVQGLRVIDGSIPPTQMSSHVMTVFYAMALKIADAVLADYASMQ

SEQ ID NO: 546 - protein, 581 aa, Aspergillus niger
GIEASLLTDPKEVAGRTVDYIIAGGGLTGLTVAARLTENPDITVLVIESGSYESDRGPIIEDLNAYGDIFGSSVDHAYETVCLATNNQTALIRSGNGLGGSTLVNGGTWTRPHKAQVDSWETVFGNEGWNWDSVAAYSLQAERARAPNAKQIAAGHYFNASCHGINGTVHAGPRDTGDDYSPIVKALMSAVEDRGVPTKKDLGCGDPHGVSMFPNTLHEDQVRSDAAREWLLPNYQRPNLQVLTGQYVGKVLLSQNATTPRAVGVEFGTHKGNTHNVYAKHEVLLAAGSAVSPTILEYSGIGMKSILEPLGIDTVVDLPVGLNLQDQTTSTVRSRITSAGAGQGQAAWFATFNETFGDYTEKAHELLNTKLEQWAEEAVARGGFHNTTALLIQYENYRDWIVKDNVAYSELFLDTAGEASFDVWDLLPFTRGYVHILDKDPYLRHFAYDPQYFLNELDLLGQAAATQLARNISNSGAMQTYFAGETIPGDNLAYDADLRAWVEYIPYHFRPNYHGVGTCSMMPKEMGGVVDNAARVYGVQGLRVIDGSIPPTQMSSHVMTVFYAMALKIADAVLADYASMQ

SEQ ID NO: 547 - protein, 581 aa, Aspergillus niger
GIEASLLTDPKEVAGRTVDYIIAGGGLTGLTTAARLTENPDITVLVIESGSYESDRGPIIEDLNAYGDIFGSSVDHAYETVELATNNQTALIRSGNGLGGSTLVNGGTWTRPHKAQVDSWETVFGNEGWNWDSVAAYSLQAERARAPNAKQIAAGHYFDPSCHGINGTVHAGPRDTGDDYSPIVKALMSAVEDRGVPTKKDLGCGDPHGVSMFPNTLHEDQVRSDAAREWLLPNYQRPNLQVLTGQYVGKVLLSQNATTPRAVGVEFGTHKGNTHNVYAKHEVLLAAGSAVSPTILEYSGIGMKSILEPLGIDTVVDLPVGLNLQDQTTSTVRSRITSAGAGQGQAAWFATFNETFGDYTEKAHELLNTKLEQWAEEAVARGGFHNTTALLIQYENYRDWIVKDNVAYSELFLDTAGVASFDVWDLLPFTRGYVHILDKDPYLRHFAYDPQYFLNELDLLGQAAATQLARNISNSGAMQTYFAGETIPGDNLAYDADLRAWVEYIPYNFRPNYHGVGTCSMMPKEMGGVVDNAARVYGVQGLRVIDGSIPPTQMSSHVMTVFYAMALKIADAVLADYASMQ

SEQ ID NO: 548 - protein, 581 aa, Aspergillus niger
GIEASLLTDPKEVAGRTVDYIIAGGGLTGLTTAARLTENPDITVLVIESGSYESDRGPIIEDLNAYGDIFGSSVDHAYETVELATNNQTALIRSGNGLGGSTLVNGGTWTRPHKAQVDSWETVFGNEGWNWDSVAAYSLQAERARAPNAKQIAAGHYFNPSCHGINGTVHAGPRDTGDDYSPIVKALMSAVEDRGVPTKKDLGCGDPHGVSMFPNTLHEDQVRSDAAREWLLPNYQRPNLQVLTGQYVGKVLLSQNATTPRAVGVEFGTHKGNTHNVYAKHEVLLAAGSAVSPTILEYSGIGMKSILEPLGIDTVVDLPVGLNLQDQTTSTVRSRITSAGAGQGQAAWFATFNETFGDYTEKAHELLNTKLEQWAEEAVARGGFHNTTALLIQYENYRDWIVKDNVAYSELFLDTAGEASFDVWDLLPFTRGYVHILDKDPYLRHFAYDPQYFLNELDLLGQAAATQLARNISNSGAMQTYFAGETIPGDNLAYDADLRAWVEYIPYNFRPNYHGVGTCSMMPKEMGGVVDNAARVYGVQGLRVIDGSIPPTQMSSHVMTVFYAMALKIADAVLADYASMQ

SEQ ID NO: 549 - protein, 581 aa, Aspergillus niger
GIEASLLTDPKEVAGRTVDYIIAGGGLTGLTTAARLTENPDITVLVIESGSYESDRGPIIEDLNAYGDIFGSSVDHAYETVELATNNQTALIRSGNGLGGSTLVNGGXWTRPHKAQVDSWETVFGNEGWNWDSVAAYSLQAERARAPNAKQIAAGHYFNASCHGINGTVHAGPRDTGDDYSPIVKALMSAVEDRGVPTKKDLGCGDPHGVSMFPNTLHEDQVRSDAAREWLLPNYQRPNLQVLTGQYVGKVLLSQNATTPRAVGVEFGTHKGNTHNVYAKHEVLLAAGSAVSPTILEYSGIGMKSILEPLGIDTVVDLPVGLNLQDQTTSTVRSRITSAGAGQGQAAWXATFNETFGDYTEKAHELLNTKLEQWAEEAVARGGFHNTTALLIQYENYRDWIVKDNVAYSELFLDTAGVASFDVWDLLPFTRGYVHILDKDPYLRHFAYDPQYFLNELDLLGQAAATQLARNISNSGAMQTYFAGETIPGDNLAYDADLRAWVEYIPYNFRPNYHGVGTCSMMPKEMGGVVDNAARVYGVQGLRVIDGSIPPTQMSSHVMTVFYAMALKIADAVLADYASMQ

SEQ ID NO: 550 - protein, 605 aa, Aspergillus niger
MSTLLVSSLVVSLAAALPHYIRSNGIEASLLTDPKEVAGRTVDYIIAGGGLTGLTTAARLTENPDITVLVIESGSYESDRGPIIEDLNAYGDIFGSSVDHAYETVELATNNQTALIRSGNGLGGSTLVNGGTWTRPHKAQVDSWETVFGNEGWNWDSVAAYSLQAERARAPNAKQIAAGHYFNASCHGINGTVHAGPRDTGDDYSPIVKALMSAVEDRGVPTKKDLGCGDPHGVSMFPNTLHEDQVRSDAAREWLLPNYQRPNLQVLTGRYVGKVLLSQNATTPRAVGVEFGTHKGNTHNVYAKHEVLLAAGSAVSPTILEYSGIGMKSILEPLGIDTVVDLPVGLNLQDQTTSTVRSRITSAGAGQGQAAWFATFNETFGDYAEKAHELLNTKLEQWAEEAVARGGFHNTTALLIQYENYRDWIVKDNVAYSELFLDTAGVASFHVWDLLPFTRGYVHILDKDPYLRHFAYDPQYFLNELDLLGQAAATQLARNISNSGAMQTYFAGETIPGDNLAYDADLSAWVEYIPYNFRPNYHGVGTCSMMPKEMGGVVDNAARVYGVQGLRVIDGSIPPTQMSSHSMTVFYAMALKVADAILADYASMQ

SEQ ID NO: 551 - protein, 605 aa, Aspergillus niger
MSTLLVSSLVVSLAAALPHYIRSNGIEASLLTDPKEVAGRTVDYIIAGGGLTGLTTAARLTENPDITVLVIESGSYESDRGPIIEDLNAYGDIFGSSVDHAYETVELATNNQTALIRSGNGLGGSTLVNGGAWTRPHKAQVDSWETVFGNEGWNWDSVAAYSLQAERARAPNAKQIAAGHYFNASCHGINGTVHAGPRDTGDDYSPIVKALMSAVEDRGVPTKKDLGCGDPHGVSMFPNTLHEDQVRSDAAREWLLPNYQRPNLQVLTGRYVGKVLLSQNATTPRAVGVEFGTHKGNTHNVYAKHEVLLAAGSAVSPTILEYSGIGMKSILEPLGIDTVVDLPVGLNLQDQTTSTVRSRITSAGAGQGQAAWFATFNETFGDYAEKAHELLNTKLEQWAEEAVARGGFHNTTALLIQYENYRDWIVKDNVAYSELFLDTAGVASFDVWDLLPFTRGYVHILDKDPYLRHFAYDPQYFLNELDLLGQAAATQLARNISNSGAMQTYFAGETIPGDNLAYDADLSAWVEYIPYNFRPNYHGVGTCSMMPKEMGGVVDNAARVYGVQGLRVIDGSIPPTQMSSHSMTVFYAMALKVADAILADYASMQ

SEQ ID NO: 552 - protein, 605 aa, Aspergillus niger
MSTLLVSSLVVSLAAALPHYIRSNGIEASLLTDPKEVAGRTVDYIIAGGGLTGLTTAARLTENPDITVLVIESGSYESDRGPIIEDLNAYGDIFGSSVDHAYETVELATNNQTALIRSGNGLGGSTLVNGGTWTRPHKAQVDSWETVFGNEGWNWDSVAAYSLQAERARAPNAKQIAAGHYFNASCHGINGTVHAGPRDTGDDYSPIVKALMSAVEDRGVPTKKDLGCGDPHGVSMFPNTLHEDQVRSDAAREWLLPNYQRPNLQVLTGRYVGKVLLSQNATTPRAVGVEFGTHKGNTHNVYAKHEVLLAAGSAVSPTILEYSGIGMKSILEPLGIDTVVDLPVGLNLQDQTTSTVRSRITSAGAGQGQAAWFATFNETFGDYAEKAHELLNTKLEQWAEEAVARGGFHNTTALLIQYENYRDWIVKDNVAYSELFLDTAGVASFHVWDLLPFTRGYVHILDKDPYLRHFAYDPQYFLNELDLLGQAAATQLARNISNSGAMQTYFAGETIPGDNLAYDADLSAWVEYIPYNFRPNYHGVGTCSMMPKEMGGVVDNAARVYGVQGLRVIDGSIPPTQMSSHPMTVFYAMALKVADAILADYASMQ

SEQ ID NO: 553 - protein, 605 aa, Aspergillus niger
MQTLLVSSLVVSLAAALPHYIRSNGIEASLLTDPKEVAGRTVDYIIAGGGLTGLTTAARLTENPDITVLVIESGSYESDRGPIIEDLNAYGDIFGSSVDHAYETVELATNNQTALIRSGNGLGGSTLVNGGAWTRPHKAQVDSWETVFGNEGWNWDSVAAYSLQAERARAPNAKQIAAGHYFNASCHGINGTVHAGPRDTGDDYSPIVKALMSAVEDRGVPTKKDLGCGDPHGVSMFPNTLHEDQVRSDAAREWLLPNYQRPNLQVLTGRYVGKVLLSQNATTPRAVGVEFGTHKGNTHNVYAKHEVLLAAGSAVSPTILEYSGIGMKSILEPLGIDTVVDLPVGLNLQDQTASTVRSRITSAGAGQGQAAWFATFNETFGDYAEKAHELLNTKLEQWAEEAVARGGFHNTTALLIQYENYRDWIVKDNVAYSELFLDTAGVASFDVWDLLPFTRGYVHILDKDPYLRHFAYDPQYFLNELDLLGQAAATQLARNISNSGAMQTYFAGETIPGDNLAYDADLSAWVEYIPYNFRPNYHGVGTCSMMPKEMGGVVDNAARVYGVQGLRVIDGSIPPTQMSSHSMTVFYAMALKVADAILADYASMQ

SEQ ID NO: 554 - protein, 605 aa, Aspergillus niger
MSTLLVSSLVVSLAAALPHYIRSNGIEASLLTDPKEVAGRTVDYIIAGGGLTGLTTAARLTENPDITVLVIESGSYESDRGPIIEDLNAYGDIFGSSVDHAYETVELATNNQTALIRSGNGLGGSTLVNGGAWTRPHKAQVDSWETVFGNEGWNWDSVAAYSLQAERARAPNAKQIAAGHYFNASCHGINGTVHAGPRDTGDDYSPIVKALMSAVEDRGVPTKKDLGCGDPHGVSMFPNTLHEDQVRSDAAREWLLPNYQRPNLQVLTGRYVGKVLLSQNATTPRAVGVEFGTHKGNTHNVYAKHEVLLAAGSAVSPTILEYSGIGMKSILEPLGIDTVVDLPVGLNLQDQTTSTVRSRITSAGAGQGQAAWFATFNETFGDYAEKAHELLNTKLEQWAEEAVARGGFHNTTALLIQYENYRDWIVKDNVAYSELFLDTAGVASFHVWDLLPFTRGYVHILDKDPYLRHFAYDPQYFLNELDLLGQAAATQLARNISNSGAMQTYFAGETIPGDNLAYDADLSAWVEYIPYNFRPNYHGVGTCSMMPKEMGGVVDNAARVYGVQGLRVIDGSIPPTQMSSHVMTVFYAMALKVADAILADYASMQ

SEQ ID NO: 555 - protein, 605 aa, Aspergillus niger
MSTLLVSSLVVSLAAALPHYIRSNGIEASLLTDPKEVAGRTVDYIIAGGGLTGLTTAARLTENPDITVLVIESGSYESDRGPIIEDLNAYGDIFGSSVDHAYETVELATNNQTALIRSGNGLGGSTLVNGGTWTRPHKAQVDSWETVFGNEGWNWDSVAAYSLQAERARAPNAKQIAAGHYFNASCHGINGTVHAGPRDTGDDYSPIVKALMSAVEDRGVPTKKDLGCGDPHGVSMFPNTLHEDQVRSDAAREWLLPNYQRPNLQVLTGRYVGKVLLSQNATTPRAVGVEFGTHKGNTHNVYAKHEVLLAAGSAVSPTILEYSGIGMKSILEPLGIDTVVDLPVGLNLQDQATSTVRSRITSAGAGQGQAAWFATFNETFGDYAEKAHELLNTKLEQWAEEAVARGGFHNTTALLIQYENYRDWIVKDNVAYSELFLDTAGVASFHVWDLLPFTRGYVHILDKDPYLRHFAYDPQYFLNELDLLGQAAATQLARNISNSGAMQTYFAGETIPGDNLAYDADLSAWVEYIPYNFRPNYHGVGTCSMMPKEMGGVVDNAARVYGVQGLRVIDGSIPPTQMSSHVMTVFYAMALKVADAILADYASMQ

SEQ ID NO: 556 - protein, 605 aa, Aspergillus niger
MQTLLVSSLVVSLAAALPHYIRSNGIEASLLTDPKEVAGRTVDYIIAGGGLTGLTTAARLTENPDITVLVIESGSYESDRGPIIEDLNAYGDIFGSSVDHAYETVELATNNQTALIRSGNGLGGSTLVNGGTWTRPHKAQVDSWETVFGNEGWNWDSVAAYSLQAERARAPNAKQIAAGHYFNASCHGINGTVHAGPRDTGDDYSPIVKALMSAVEDRGVPTKKDLGCGDPHGVSMFPNTLHEDQVRSDAAREWLLPNYQRPNLQVLTGRYVGKVLLSQNATTPRAVGVEFGTHKGNTHNVYAKHEVLLAAGSAVSPTILEYSGIGMKSILEPLGIDTVVDLPVGLNLQDQTASTVRSRITSAGAGQGQAAWFATFNETFGDYAEKAHELLNTKLEQWAEEAVARGGFHNTTALLIQYENYRDWIVKDNVAYSELFLDTAGVASFHVWDLLPFTRGYVHILDKDPYLRHFAYDPQYFLNELDLLGQAAATQLARNISNSGAMQTYFAGETIPGDNLAYDADLSAWVEYIPYNFRPNYHGVGTCSMMPKEMGGVVDNAARVYGVQGLRVIDGSIPPTQMSSHSMTVFYAMALKVADAILADYASMQ

SEQ ID NO: 557 - protein, 605 aa, Aspergillus niger
MSTLLVSSLVVSLAAALPHYIRSNGIEASLLTDPKEVAGRTVDYIIAGGGLTGLTTAARLTENPDITVLVIESGSYESDRGPIIEDLNAYGDIFGSSVDHAYETVELATNNQTALIRSGNGLGGSTLVNGGTWTRPHKAQVDSWETVFGNEGWNWDSVAAYSLQAERARAPNAKQIAAGHYFNASCHGINGTVHAGPRDTGDDYSPIVKALMSAVEDRGVPTKKDLGCGDPHGVSMFPNTLHEDQVRSDAAREWLLPNYQRPNLQVLTGRYVGKVLLSQNATTPRAVGVEFGTHKGNTHNVYAKHEVLLAAGSAVSPTILEYSGIGMKSILEPLGIDTVVDLPVGLNLQDQTTSTVRSRITSAGAGQGQAAWFATFNETFGDYAEKAHELLNTKLEQWAEEAVARGGFHNTTALLIQYENYRDWIVKDNVAYSELFLDTAGVASFHVWDLLPFTRGYVHILDKDPYLRHFAYDPQYFLNELDLLGQAAATQLARNISNSGAMQTYFAGETIPGDNLAYDADLSAWVEYIPYNFRPNYHGVGTCSMMPKEMGGVVDNAARVYGVQGLRVIDGSIPPTQMSSHLMTVFYAMALKVADAILADYASMQ

SEQ ID NO: 558 - protein, 605 aa, Aspergillus niger
MSTLLVSSLVVSLAAALPHYIRSNGIEASLLTDPKEVAGRTVDYIIAGGGLTGLTTAARLTENPDITVLVIESGSYESDRGPIIEDLNAYGDIFGSSVDHAYETVELATNNQTALIRSGNGLGGSTLVNGGTWTRPHKAQVDSWETVFGNEGWNWDSVAAYSLQAERARAPNAKQIAAGHYFNASCHGINGTVHAGPRDTGDDYSPIVKALMSAVEDRGVPTKKDLGCGDPHGVSMFPNTLHEDQVRSDAAREWLLPNYQRPNLQVLTGRYVGKVLLSQNATTPRAVGVEFGTHKGNTHNVYAKHEVLLAAGSAVSPTILEYSGIGMKSILEPLGIDTVVDLPVGLNLQDQTTSTVRSRITSAGAGQGQAAWFATFNETFGDYAEKAHELLNTKLEQWAEEAVARGGFHNTTALLIQYENYRDWIVKDNVAYSELFLDTAGVASFHVWDLLPFTRGYVHILDKDPYLRHFAYDPQYFLNELDLLGQAAATQLARNISNSGAMQTYFAGETIPGDNLAYDADLSAWVEYIPYNFRPNYHGVGTCSMMPKEMGGVVDNAARVYGVQGLRVIDGSIPPTQMSSHRMTVFYAMALKVADAILADYASMQ

SEQ ID NO: 559 - protein, 605 aa, Aspergillus niger
MQTLLVSSLVVSLAAALPHYIRSNGIEASLLTDPKEVAGRTVDYIIAGGGLTGLTTAARLTENPDITVLVIESGSYESDRGPIIEDLNAYGDIFGSSVDHAYETVELATNNQTALIRSGNGLGGSTLVNGGAWTRPHKAQVDSWETVFGNEGWNWDSVAAYSLQAERARAPNAKQIAAGHYFNASCHGINGTVHAGPRDTGDDYSPIVKALMSAVEDRGVPTKKDLGCGDPHGVSMFPNTLHEDQVRSDAAREWLLPNYQRPNLQVLTGRYVGKVLLSQNATTPRAVGVEFGTHKGNTHNVYAKHEVLLAAGSAVSPTILEYSGIGMKSILEPLGIDTVVDLPVGLNLQDQTASTVRSRITSAGAGQGQAAWFATFNETFGDYAEKAHELLNTKLEQWAEEAVARGGFHNTTALLIQYENYRDWIVKDNVAYSELFLDTAGVASFHVWDLLPFTRGYVHILDKDPYLRHFAYDPQYFLNELDLLGQAAATQLARNISNSGAMQTYFAGETIPGDNLAYDADLSAWVEYIPYNFRPNYHGVGTCSMMPKEMGGVVDNAARVYGVQGLRVIDGSIPPTQMSSHVMTVFYAMALKVADAILADYASMQ

SEQ ID NO: 560 - protein, 605 aa, Aspergillus niger
MSTLLVSSLVVSLAAALPHYIRSNGIEASLLTDPKEVAGRTVDYIIAGGGLTGLTTAARLTENPDITVLVIESGSYESDRGPIIEDLNAYGDIFGSSVDHAYETVELATNNQTALIRSGNGLGGSTLVNGGAWTRPHKAQVDSWETVFGNEGWNWDSVAAYSLQAERARAPNAKQIAAGHYFNASCHGINGTVHAGPRDTGDDYSPIVKALMSAVEDRGVPTKKDLGCGDPHGVSMFPNTLHEDQVRSDAAREWLLPNYQRPNLQVLTGRYVGKVLLSQNATTPRAVGVEFGTHKGNTHNVYAKHEVLLAAGSAVSPTILEYSGIGMKSILEPLGIDTVVDLPVGLNLQDQATSTVRSRITSAGAGQGQAAWFATFNETFGDYAEKAHELLNTKLEQWAEEAVARGGFHNTTALLIQYENYRDWIVKDNVAYSELFLDTAGVASFDVWDLLPFTRGYVHILDKDPYLRHFAYDPQYFLNELDLLGQAAATQLARNISNSGAMQTYFAGETIPGDNLAYDADLSAWVEYIPYNFRPNYHGVGTCSMMPKEMGGVVDNAARVYGVQGLRVIDGSIPPTQMSSHVMTVFYAMALKVADAILADYASMQ

SEQ ID NO: 561 - protein, 605 aa, Aspergillus niger
MSTLLVSSLVVSLAAALPHYIRSNGIEASLLTDPKEVAGRTVDYIIAGGGLTGLTTAARLTENPDITVLVIESGSYESDRGPIIEDLNAYGDIFGSSVDHAYETVELATNNQTALIRSGNGLGGSTLVNGGTWTRPHKAQVDSWETVFGNEGWNWDSVAAYSLQAERARAPNAKQIAAGHYFNASCHGINGTVHAGPRDTGDDYSPIVKALMSAVEDRGVPTKKDLGCGDPHGVSMFPNTLHEDQVRSDAAREWLLPNYQRPNLQVLTGRYVGKVLLSQNATTPRAVGVEFGTHKGNTHNVYAKHEVLLAAGSAVSPTILEYSGIGMKSILEPLGIDTVVDLPVGLNLQDQATSTVRSRITSAGAGQGQAAWFATFNETFGDYAEKAHELLNTKLEQWAEEAVARGGFHNTTALLIQYENYRDWIVKDNVAYSELFLDTAGVASFDVWDLLPFTRGYVHILDKDPYLRHFAYDPQYFLNELDLLGQAAATQLARNISNSGAMQTYFAGETIPGDNLAYDADLSAWVEYIPYNFRPNYHGVGTCSMMPKEMGGVVDNAARVYGVQGLRVIDGSIPPTQMSSHSMTVFYAMALKVADAILADYASMQ

SEQ ID NO: 562 - protein, 583 aa, Aspergillus niger
SNGIEASLLKDPKEVAGRTYDYIIAGGGLTGLTVAARLTENPNITVLVIESGSYESDRGPIIEDLNAYGDIFGSSVDHAYETVELATNNQTALIRSGNGLGGSTLINGGTWTRPHKAQVDSWETVFGNEGWNWDSVAAYSLQAERARAPNAKQIAAGHYFNASCHGINGTVHAGPRDTGDDYSPIVKALMSAVEDRGVPTKKDLGCGDPHGVSMFPNTLHPDQVRSDAAREWLLPNYQRPNLQVLTGQYVGKVLLSQNATTPRAVGVEFGTHKGNTHNVYAKHEVLLAAGSAVSPTILEYSGIGMKSILEPLGIDTVVDLPVGLNLQDQTTSTVRSRITSAGAGQGQAAWFATFNETFGDYTEKAHELLNTKLEQWAEEAVARGGFHNTTALLIQYENYRDWIVKDNVAYSELFLDTAGVASFDVWDLLPFTRGYVHILDKDPYLRHFAYDPQYFLNELDLLGQAAATQLARNISNSGAMQTYFAGETIPGDNLAYDADLSAWVEYIPENFRPNYHGVGTCSMMPKEMGGVVDNAARVYGVQGLRVIDGSIPPTQMSSHVMTVFYAMALKIADAILADYASMQ

SEQ ID NO: 563 - protein, 583 aa, Aspergillus niger
SNGIEASLLKDPKEVAGRTYDYIIAGGGLTGLTVAARLTENPNITVLVIESGSYESDRGPIIEDLNAYGDIFGSSVDHAYETVELATNNQTALIRSGNGLGGSTLINGGTWTRPHKAQVDSWETVFGNEGWNWDSVAAYSLQAERARAPNAKQIAAGHYFNASCHGINGTVHAGPRDTGDDYSPIVKALMSAVEDRGVPTKKDLGCGDPHGVSMFPNTLHEDQVRSDAAREWLLPNYQRPNLQVLTGQYVGKVLLSQNATTPRAVGVEFGTHKGNTHNVYAKHEVLLAAGSAVSPTILEYSGIGMKSILEPLGIDTVVDLPVGLNLQDQTTSTVRSRITSAGAGQGQAAWFATFNETFGDYAEKAHELLNTKLEQWAEEAVARGGFHNTTALLIQYENYRDWIVKDNVAYSELFLDTAGVASFDVWDLLPFTRGYVHILDKDPYLRHFAYDPQYFLNELDLLGQAAATQLARNISNSGAMQTYFAGETIPGDNLAYDADLSAWVEYIPENFRPNYHGVGTCSMMPKEMGGVVDNAARVYGVQGLRVIDGSIPPTQLSSHVMTVFYAMALKIADAILADYASMQ

SEQ ID NO: 564 - protein, 583 aa, Aspergillus niger
SNGIEASLLKDPKEVAGRTYDYIIAGGGLTGLTVAARLTENPNITVLVIESGSYESDRGPIIEDLNAYGDIFGSSVDHAYETVELATNNQTALIRSGNGLGGSTLINGGTWTRPHKAQVDSWETVFGNEGWNWDSVAAYSLQAERARAPNAKQIAAGHYFNASCHGINGTVHAGPRDTGDDYSPIVKALMSAVEDRGVPTKKDLGCGDPHGVSMFPNTLHEDQVRSDAAREWLLPNYQRPNLQVLTGQYVGKVLLSQNATTPRAVGVEFGTHKGNTHNVYAKHEVLLAAGSAVSPTILEYSGIGMKSILEPLGIDTVVDLPVGLNLQDQTTSTVRSRITSAGAGQGQAAWFATFNETFGDYAEKAHELLNTKLEQWAEEAVARGGFHNTTALLIQYENYRDWIVKDNVAYSELFLDTAGVASFDVWDLLPFTRGYVHILDKDPYLRHFAYDPQYFLNELDLLGQAAATQLARNISNSGAMQTYFAGETIPGDNLAYDADLRAWVEYIPENFRPNYHGVGTCSMMPKEMGGVVDNAARVYGVQGLRVIDGSIPPTQMSSHVMTVFYAMALKIADAILADYASMQ

SEQ ID NO: 565 - protein, 583 aa, Aspergillus niger
SNGIEASLLKDPKEVAGRTYDYIIAGGGLTGLTVAAKLTENPNITVLVIESGSYESDRGPIIEDLNAYGDIFGSSVDHAYETVELATNNQTALIRSGNGLGGSTLINGGTWTRPHKAQVDSWETVFGNEGWNWDSVAAYSLQAERARAPNAKQIAAGHYFNASCHGLNGTVHAGPRDTGDDYSPIVKALMSAVEDRGVPTKKDLGCGDPHGVSMFPNTLHEDQVRSDAAREWLLPNYQRPNLQVLTGQYVGKVLLSQNATTPRAVGVEFGTHKGNTHNVYAKHEVLLAAGSAVSPTILEYSGIGMKSILEPLGIDTVVDLPVGLNLQDQTTSTVRSRITSAGAGQGQAAWFATFNETFGDYTEKAHELLNTKLEQWAEEAVARGGFHNTTALLIQYENYRDWIVKDNVAYSELFLDTAGVASFDVWDLLPFTRGYVHILDKDPYLRHFAYDPQYFLNELDLLGQAAATQLARNISNSGAMQTYFAGETIPGDNLAYDADLSAWVEYIPENFRPNYHGVGTCSMMPKEMGGVVDNAARVYGVQGLRVIDGSIPPTQMSSHVMTVFYAMALKIADAILADYASMQ

SEQ ID NO: 566 - protein, 583 aa, Aspergillus niger
SNGIEASLLKDPKEVAGRTYDYIIAGGGLTGLTVAARLTENPNITVLVIESGSYESDRGPIIEDLNAYGDIFGSSVDHAYETVELATNNQTALIRSGNGLGGSTLINGGTWTRPHKAQVDSWETVFGNEGWNWDSVAAYSLQAERARAPNAKQIAAGHYFNASCHGINGTVHAGPRDTGDDYSPIVKALMSAVEDRGVPTKKDLGCGDPHGVSMFPNTLHPDQVRSDAAREWLLPNYQRPNLQVLTGQYVGKVLLSQNATTPRAVGVEFGTHKGNTHNVYAKHEVLLAAGSAVSPTILEYSGIGMKSILEPLGIDTVVDLPVGLNLQDQTTSTVRSRITSAGAGQGQAAWFATFNETFGDYAEKAHELLNTKLEQWAEEAVARGGFHNTTALLIQYENYRDWIVKDNVAYSELFLDTAGVASFDVWDLLPFTRGYVHILDKDPYLRHFAYDPQYFLNELDLLGQAAATQLARNISNSGAMQTYFAGETIPGDNLAYDADLSAWVEYIPENFRPNYHGVGTCSMMPKEMGGVVDNAARVYGVQGLRVIDGSIPPTQMSSHVMTVFYAMALKIADAILADYASMQ

SEQ ID NO: 567 - protein, 583 aa, Aspergillus niger
SNGIEASLLKDPKEVAGRTYDYIIAGGGLTGLTVAARLTENPNITVLVIESGSYESDRGPIIEDLNAYGDIFGSSVDHAYETVELPTNNQTALIRSGNGLGGSTLINGGTWTRPHKAQVDSWETVFGNEGWNWDSVAAYSLQAERARAPNAKQIAAGHYFNASCHGINGTVHAGPRDTGDDYSPIVKALMSAVEDRGVPTKKDLGCGDPHGVSMFPNTLHEDQVRSDAAREWLLPNYQRPNLQVLTGQYVGKVLLSQNATTPRAVGVEFGTHKGNTHNVYAKHEVLLAAGSAVSPTILEYSGIGMKSILEPLGIDTVVDLPVGLNLQDQTTSTVRSRITSAGAGQGQAAWFATFNETFGDYAEKAHELLNTKLEQWAEEAVARGGFHNTTALLIQYENYRDWIVKDNVAYSELFLDTAGVASFDVWDLLPFTRGYVHILDKDPYLRHFAYDPQYFLNELDLLGQAAATQLARNISNSGAMQTYFAGETIPGDNLAYDADLSAWVEYIPENFRPNYHGVGTCSMMPKEMGGVVDNAARVYGVQGLRVIDGSIPPTQMSSHVMTVFYAMALKIADAILADYASMQ

SEQ ID NO: 568 - protein, 583 aa, Aspergillus niger
SNGAEASLLTDPKEVAGRTVDYIIAGGGLTGLTTAARLTENPDITVLVIESGSYESDRGPIIEDLNAYGDIFGSSVDHAYETVELQTNNQTALIRFGNGLGGSTLVNGGTWTRPHKAQVDSWETVFGNEGWNWDSVAAYSLQAERARAPNAKQIAAGHYFNASCHGINGTVHAGPRDTGDDYSPIVKALMSAVEDRGVPTKKDLGCGDPHGVSMFPNTLHEDQVRSDAAREWLLPNYQRPNLQVLTGQYVGKVLLSQNATTPRAVGVEFGTHKQNTHNVYAKHEVLLAAGSAVSPTILEYSGIGMKSILEPLGIDTVVDLPVGLNLQDQTTSTVRSRITSAGAGQGQAAWFATFNETFGDYAEKAHELLNTKLEQWAEEAVARGGFHNTTALLIQYENYRDWIVKDNVAYSELFLDTAGVASFDVWDLLPFTRGYVHILDKDPYLRHFAYDPQYFLNELDLLGQAAATQLARNISNSGAMQTYFAGETIPGDNLAYDADLSAWVEYIHYNFRPNYHGVGTCSMMPKEMGGVVDNAARVYGVQGLRVIDGSIPPTQMSSHVMTVFYAMALKIADAILADYASMQ

SEQ ID NO: 569 - protein, 583 aa, Aspergillus niger
SNGIEASLLKDPKEVAGRTYDYIIAGGGLTGLTVAAKLTENPNITVLVIESGSYESDRGPIIEDLNAYGDIFGSSVDHAYETVELATNNQTALIRSGNGLGGSTLINGGTWTRPHKAQVDSWETVFGNEGWNWDSVAAYSLQAERARAPNAKQIAAGHYFNASCHGINGTVHAGPRDTGDDYSPIVKALMSAVEDRGVPTKKDLGCGDPHGVSMFPNTLHEDQVRSDAAREWLLPNYQRPNLQVLTGQYVGKVLLSQNATTPRAVGVEFGTHKGNTHNVYAKHEVLLAAGSAVSPTILEYSGIGMKSILEPLGIDTVVDLPVGLNLQDQTTSTVRSRITSAGAGQGQAAWFATFNETFGDYTEKAHELLNTKLEQWAEEAVARGGFHNTTALLIQYENYRDWIVKDNVAYSELFLDTAGVASFDVWDLLPFTRGYVHILDKDPYLRHFAYDPQYFLNELDLLGQAAATQLARNISNSGAMQTYFAGETIPGDNLAYDADLSAWVEYIPENFRPNYHGVGTCSMMPKEMGGVVDNAARVYGVQGLRVIDGSIPPTQMSSHVMTVFYAMALKIADAILADYASMQ

SEQ ID NO: 570 - protein, 583 aa, Aspergillus niger
SNGIEASLLKDPKEVAGRTYDYIIAGGGLTGLTVAARLTENPNITVLVIESGSYESDRGPIIEDLNAYGDIFGSSVDHAYETVELATNNQTALIRSGNGLGGSTLINGGTWTRPHKAQVDSWETVFGNEGWNWDSVAAYSLQAERARAPNAKQIAAGHYFNASCHGINGTVHAGPRDTGDDYSPIVKALMSAVEDRGVPTKKDLGCGDPHGVSMFPNTLHEDQVRSDAAREWLLPNYQRPNLQVLTGQYVGKVLLSQNATTPRAVGVEFGTHKGNTHNVYAKHEVLLAAGSAVSPTILEYSGIGMKSILEPLGIDTVVDLPVGLNLQDQTTSTVRSRITPAGAGQGQAAWFATFNETFGDYTEKAHELLNTKLEQWAEEAVARGGFHNTTALLIQYENYRDWIVKDNVAYSELFLDTAGVASFDVWDLLPFTRGYVHILDKDPYLRHFAYDPQYFLNELDLLGQAAATQLARNISNSGAMQTYFAGETIPGDNLAYDADLSAWVEYIPENFRPNYHGVGTCSMMPKEMGGVVDNAARVYGVQGLRVIDGSIPPTQMSSHVMTVFYAMALKIADAILADYASMQ

SEQ ID NO: 571 - protein, 583 aa, Aspergillus niger
SNGIEASLLKDPKEVAGRTYDYIIAGGGLTGLTVAARLTENPNITVLVIESGSYESDRGPIIEDLNAYGDIFGSSVDHAYETVELATNNQTALIRSGNGLGGSTLINGGTWTRPHKAQVDSWETVFGNEGWNWDSVAAYSLQAERARAPNAKQIAAGHYFNPSCHGINGTVHAGPRDTGDDYSPIVKALMSAVEDRGVPTKKDLGCGDPHGVSMFPNTLHEDQVRSDAAREWLLPNYQRPNLQVLTGQYVGKVLLSQNATTPRAVGVEFGTHKGNTHNVYAKHEVLLAAGSAVSPTILEYSGIGMKSILEPLGIDTVVDLPVGLNLQDQTTSTVRSRITSAGAGQGQAAWFATFNETFGDYTEKAHELLNTKLEQWAEEAVARGGFHNTTALLIQYENYRDWIVKDNVAYSELFLDTAGVASFDVWDLLPFTRGYVHILDKDPYLRHFAYDPQYFLNELDLLGQAAATQLARNISNSGAMQTYFAGETIPGDNLAYDADLSAWVEYIPENFRPNYHGVGTCSMMPKEMGGVVDNAARVYGVQGLRVIDGSIPPTQMSSHVMTVFYAMALKIADAILADYASMQ

SEQ ID NO: 572 - protein, 583 aa, Aspergillus niger
SNGIEASLLKDPKEVAGRTYDYIIAGGGLTGLTVAARLTENPNITVLVIESGSYESDRGPIIEDLNAYGDIFGSSVDHAYETVELPTNNQTALIRSGNGLGGSTLINGGTWTRPHKAQVDSWETVFGNEGWNWDSVAAYSLQAERARAPNAKQIAAGHYFNASCHGINGTVHAGPRDTGDDYSPIVKALMSAVEDRGVPTKKDLGCGDPHGVSMFPNTLHEDQVRSDAAREWLLPNYQRPNLQVLTGQYVGKVLLSQNATTPRAVGVEFGTHKGNTHNVYAKHEVLLAAGSAVSPTILEYSGIGMKSILEPLGIDTVVDLPVGLNLQDQTTSTVRSRITSAGAGQGQAAWFATFNETFGDYTEKAHELLNTKLEQWAEEAVARGGFHNTTALLIQYENYRDWIVKDNVAYSELFLDTAGVASFDVWDLLPFTRGYVHILDKDPYLRHFAYDPQYFLNELDLLGQAAATQLARNISNSGAMQTYFAGETIPGDNLAYDADLSAWVEYIPENFRPNYHGVGTCSMMPKEMGGVVDNAARVYGVQGLRVIDGSIPPTQMSSHVMTVFYAMALKIADAILADYASMQ

SEQ ID NO: 573 - protein, 583 aa, Aspergillus niger
SNGIEASLLKDPKEVAGRTYDYIIAGGGLTGLTVAAKLTENPNITVLVIESGSYESDRGPIIEDLNAYGDIFGSSVDHAYETVELATNNQTALIRSGNGLGGSTLINGGTWTRPHKAQVDSWETVFGNEGWNWDSVAAYSLQAERARAPNAKQIAAGHYFNASCHGINGTVHAGPRDTGDDYSPIVKALMSAVEDRGVPTKKDLGCGDPHGVSMFPNTLHEDQVRSDAAREWLLPNYQRPNLQVLTGQYVGKVLLSQNATTPRAVGVEFGTHKGNTHNVYAKHEVLLAAGSAVSPTILEYSGIGMKSILEPLGIDTVVDLPVGLNLQDQTTSTVRSRITSAGAGQGQAAWFATFNETFGDYAEKAHELLNTKLEQWAEEAVARGGFHNTTALLIQYENYRDWIVKDNVAYSELFLDTAGVASFDVWDLLPFTRGYVHILDKDPYLRHFAYDPQYFLNELDLLGQAAATQLARNISNSGAMQTYFAGETIPGDNLAYDADLSAWVEYIPENFRPNYHGVGTCSMMPKEMGGVVDNAARVYGVQGLRVIDGSIPPTQMSSHVMTVFYAMALKIADAILADYASMQ

SEQ ID NO: 574 - protein, 583 aa, Aspergillus niger
SNGIEASLLKDPKEVAGRTYDYIIAGGGLTGLTVAARLTENPNITVLVIESGSYESDRGPIIEDLNAYGDIFGSSVDHAYETVELATNNRTALIRSGNGLGGSTLINGGTWTRPHKAQVDSWETVFGNEGWNWDSVAAYSLQAERARAPNAKQIAAGHYFNASCHGLNGTVHAGPRDTGDDYSPIVKALMSAVEDRGVPTKKDLGCGDPHGVSMFPNTLHEDQVRSDAAREWLLPNYQRPNLQVLTGQYVGKVLLSQNATTPRAVGVEFGTHKGNTHNVYAKHEVLLAAGSAVSPTILEYSGIGMKSILEPLGIDTVVDLPVGLNLQDQTTSTVRSRITSAGAGQGQAAWFATFNETFGDYAEKAHELLNTKLEQWAEEAVARGGFHNTTALLIQYENYRDWIVKDNVAYSELFLDTAGVASFDVWDLLPFTRGYVHILDKDPYLRHFAYDPQYFLNELDLLGQAAATQLARNISNSGAMQTYFAGETIPGDNLAYDADLSAWVEYIPENFRPNYHGVGTCSMMPKEMGGVVDNAARVYGVQGLRVIDGSIPPTQMSSHVMTVFYAMALKIADAILADYASMQ

SEQ ID NO: 575 - protein, 583 aa, Aspergillus niger
SNGIEASLLKDPKEVAGRTYDYIIAGGGLTGLTVAARLTENPNITVLVIESGSYESDRGPIIEDLNAYGDIFGSSVDHAYETVELATNNQTALIRSGNGLGGSTLINGGTWTRPHKAQVDSWETVFGNEGWNWDSVAAYSLQAERARAPNAKQIAAGHYFNPSCHGLNGTVHAGPRDTGDDYSPIVKALMSAVEDRGVPTKKDLGCGDPHGVSMFPNTLHEDQVRSDAAREWLLPNYQRPNLQVLTGQYVGKVLLSQNATTPRAVGVEFGTHKGNTHNVYAKHEVLLAAGSAVSPTILEYSGIGMKSILEPLGIDTVVDLPVGLNLQDQTTSTVRSRITSAGAGQGQAAWFATFNETFGDYTEKAHELLNTKLEQWAEEAVARGGFHNTTALLIQYENYRDWIVKDNVAYSELFLDTAGVASFDVWDLLPFTRGYVHILDKDPYLRHFAYDPQYFLNELDLLGQAAATQLARNISNSGAMQTYFAGETIPGDNLAYDADLSAWVEYIPENFRPNYHGVGTCSMMPKEMGGVVDNAARVYGVQGLRVIDGSIPPTQMSSHVMTVFYAMALKIADAILADYASMQ

SEQ ID NO: 576 - protein, 583 aa, Aspergillus niger
SNGIEASLLKDPKEVAGRTYDYIIAGGGLTGLTVAARLTENPNITVLVIESGSYESDRGPIIEDLNAYGDIFGSSVDHAYETVELATNNQTALIRSGNGLGGSTLINGGTWTRPHKAQVDSWETVFGNEGWNWDSVAAYSLQAERARAPNAKQIAAGHYFNASCHGINGTVHAGPRDTGDDYSPIVKALMSAVEDRGVPTKKDLGCGDPHGVSMFPNTLHEDQVRSDAAREWLLPNYQRPNLQVLTGQYVGKVLLSQNATTPRAVGVEFGTHKGNTHNVYAKHEVLLAAGSAVSPTILEYSGIGMKSILEPLGIDTVVDLPVGLNLQDQTTSTVRSRITSAGAGQGQAAWFATFNETFGDYAEKAHELLNTKLEQWAEEAVARGGFHNTTALLIQYENYRDWIVKDNVAYSELFLDTAGVASFDVWDLLPFTRGYVHILDKDPYLRHFAYDPQYFLNELDLLGQAAATQLARNISNSGAMQTYFAGETIPGDNLAYDADLSAWVEYIPENFRPNYHGVGTCSMMPKEMGGVVDNAARVYGVQGLRVIDGSIPPTQMSSHVMTVFYAMALKIADAVLADYASMQ

SEQ ID NO: 577 - protein, 583 aa, Aspergillus niger
SNGIEASLLKDPKEVAGRTYDYIIAGGGLTGLTVAARLTENPNITVLVIESGSYESDRGPIIEDLNAYGDIFGSSVDHAYETVELATNNQTALIRSGNGLGGSTLINGGTWTRPHKAQVDSWETVFGNEGWNWDSVAAYSLQAERARAPNAKQIAAGHYFNASCHGINGTVHAGPRDTGDDYSPIVKALMSAVEDRGVPTKKDLGCGDPHGVSMFPNTLHEDQVRSDAAREWLLPNYQRPNLQVLTGQYVGKVLLSQNATTPRAVGVEFGTHKGNTHNVYAKHEVLLAAGSAVSPTILEYSGIGMKSILEPLGIDTVVDLPVGLNLQDQTTSTVRSRITPAGAGQGQAAWFATFNETFGDYAEKAHELLNTKLEQWAEEAVARGGFHNTTALLIQYENYRDWIVKDNVAYSELFLDTAGVASFDVWDLLPFTRGYVHILDKDPYLRHFAYDPQYFLNELDLLGQAAATQLARNISNSGAMQTYFAGETIPGDNLAYDADLSAWVEYIPENFRPNYHGVGTCSMMPKEMGGVVDNAARVYGVQGLRVIDGSIPPTQMSSHVMTVFYAMALKIADAILADYASMQ

SEQ ID NO: 578 - protein, 583 aa, Aspergillus niger
SNGIEASLLKDPKEVAGRTYDYIIAGGGLTGLTVAARLTENPNITVLVIESGSYESDRGPIIEDLNAYGDIFGSSVDHAYETVELATNNQTALIRSGNGLGGSTLINGGTWTRPHKAQVDSWETVFGNEGWNWDSVAAYSLQAERARAPNAKQIAAGHYFNPSCHGINGTVHAGPRDTGDDYSPIVKALMSAVEDRGVPTKKDLGCGDPHGVSMFPNTLHEDQVRSDAAREWLLPNYQRPNLQVLTGQYVGKVLLSQNATTPRAVGVEFGTHKGNTHNVYAKHEVLLAAGSAVSPTILEYSGIGMKSILEPLGIDTVVDLPVGLNLQDQTTSTVRSRITSAGAGQGQAAWFATFNETFGDYAEKAHELLNTKLEQWAEEAVARGGFHNTTALLIQYENYRDWIVKDNVAYSELFLDTAGVASFDVWDLLPFTRGYVHILDKDPYLRHFAYDPQYFLNELDLLGQAAATQLARNISNSGAMQTYFAGETIPGDNLAYDADLSAWVEYIPENFRPNYHGVGTCSMMPKEMGGVVDNAARVYGVQGLRVIDGSIPPTQMSSHVMTVFYAMALKIADAILADYASMQ

SEQ ID NO: 579 - protein, 583 aa, Aspergillus niger
SNGIEASLLKDPKEVAGRTYDYIIAGGGLTGLTVAARLTENPNITVLVIESGSYESDRGPIIEDLNAYGDIFGSSVDHAYETVELPTNNQTALIRSGNGLGGSTLINGGTWTRPHKAQVDSWETVFGNEGWNWDSVAAYSLQAERARAPNAKQIAAGHYFNASCHGLNGTVHAGPRDTGDDYSPIVKALMSAVEDRGVPTKKDLGCGDPHGVSMFPNTLHEDQVRSDAAREWLLPNYQRPNLQVLTGQYVGKVLLSQNATTPRAVGVEFGTHKGNTHNVYAKHEVLLAAGSAVSPTILEYSGIGMKSILEPLGIDTVVDLPVGLNLQDQTTSTVRSRITSAGAGQGQAAWFATFNETFGDYAEKAHELLNTKLEQWAEEAVARGGFHNTTALLIQYENYRDWIVKDNVAYSELFLDTAGVASFDVWDLLPFTRGYVHILDKDPYLRHFAYDPQYFLNELDLLGQAAATQLARNISNSGAMQTYFAGETIPGDNLAYDADLSAWVEYIPENFRPNYHGVGTCSMMPKEMGGVVDNAARVYGVQGLRVIDGSIPPTQMSSHVMTVFYAMALKIADAILADYASMQ

SEQ ID NO: 580 - protein, 583 aa, Aspergillus niger
SNGIEASLLKDPKEVAGRTYDYIIAGGGLTGLTVAAKLTENPNITVLVIESGSYESDRGPIIEDLNAYGDIFGSSVDHAYETVELATNNQTALIRSGNGLGGSTLINGGTWTRPHKAQVDSWETVFGNEGWNWDSVAAYSLQAERARAPNAKQIAAGHYFNASCHGLNGTVHAGPRDTGDDYSPIVKALMSAVEDRGVPTKKDLGCGDPHGVSMFPNTLHEDQVRSDAAREWLLPNYQRPNLQVLTGQYVGKVLLSQNATTPRAVGVEFGTHKGNTHNVYAKHEVLLAAGSAVSPTILEYSGIGMKSILEPLGIDTVVDLPVGLNLQDQTTSTVRSRITSAGAGQGQAAWFATFNETFGDYAEKAHELLNTKLEQWAEEAVARGGFHNTTALLIQYENYRDWIVKDNVAYSELFLDTAGVASFDVWDLLPFTRGYVHILDKDPYLRHFAYDPQYFLNELDLLGQAAATQLARNISNSGAMQTYFAGETIPGDNLAYDADLSAWVEYIPENFRPNYHGVGTCSMMPKEMGGVVDNAARVYGVQGLRVIDGSIPPTQMSSHVMTVFYAMALKIADAILADYASMQ

SEQ ID NO: 581 - protein, 583 aa, Aspergillus niger
SNGIEASLLKDPKEVAGRTYDYIIAGGGLTGLTVAARLTENPNITVLVIESGSYESDRGPIIEDLNAYGDIFGSSVDHAYETVELATNNQTALIRSGNGLGGSTLINGGTWTRPHKAQVDSWETVFGNEGWNWDSVAAYSLQAERARAPNAKQIAAGHYFNPSCHGLNGTVHAGPRDTGDDYSPIVKALMSAVEDRGVPTKKDLGCGDPHGVSMFPNTLHEDQVRSDAAREWLLPNYQRPNLQVLTGQYVGKVLLSQNATTPRAVGVEFGTHKGNTHNVYAKHEVLLAAGSAVSPTILEYSGIGMKSILEPLGIDTVVDLPVGLNLQDQTTSTVRSRITSAGAGQGQAAWFATFNETFGDYAEKAHELLNTKLEQWAEEAVARGGFHNTTALLIQYENYRDWIVKDNVAYSELFLDTAGVASFDVWDLLPFTRGYVHILDKDPYLRHFAYDPQYFLNELDLLGQAAATQLARNISNSGAMQTYFAGETIPGDNLAYDADLSAWVEYIPENFRPNYHGVGTCSMMPKEMGGVVDNAARVYGVQGLRVIDGSIPPTQMSSHVMTVFYAMALKIADAILADYASMQ

SEQ ID NO: 582 - protein, 583 aa, Aspergillus niger
SNGIEASLLTDPKEVAGRTVDYIIAGGGLTGLTVAARLTENPDITVLVIESGSYESDRGPIIEDLNAYGDIFGSSVDHAYETVCLATNNQTALIRSGNGLGGSTLVNGGTWTRPHKAQVDSWETVFGNEGWNWDSVAAYSLQAERARAPNAKQIAAGHYFNASCHGINGTVHAGPRDTGDDYSPIVKALMSAVEDRGVPTKKDLGCGDPHGVSMFPNTLHEDQVRSDAAREWLLPNYQRPNLQVLTGQYVGKVLLSQNATTPRAVGVEFGTHKGNTHNVYAKHEVLLAAGSAVSPTILEYSGIGMKSILEPLGIKTVVDLPVGLNLQDQTTSTVRSRITSAGAGQGQAAWFATFNETFGDYTEKAHELLNTKLEQWAEEAVARGGFHNTTALLIQYENYRDWIVKDNVAYSELFLDTAGEASFDVWDLLPFTRGYVHILDKDPYLRHFAYDPQYFLNELDLLGQAAATQLARNISNSGAMQTYFAGETIPGDNLAYDADLRAWVEYIPYHFRPNYHGVGTCSMMPKEMGGVVDNAARVYGVQGLRVIDGSIPPTQMSSHVMTVFYAMALKIADAVLADYASMQ

SEQ ID NO: 583 - protein, 583 aa, Aspergillus niger
SNGIEASLLKDPKEVAGRTYDYIIAGGGLTGLTVAARLTENPNITVLVIESGSYESDRGPIIEDLNAYGDIFGSSVDHAYETVELPTNNQTALIRSGNGLGGSTLINGGTWTRPHKAQVDSWETVFGNEGWNWDSVAAYSLQAERARAPNAKQIAAGHYFNASCHGLNGTVHAGPRDTGDDYSPIVKALMSAVEDRGVPTKKDLGCGDPHGVSMFPNTLHEDQVRSDAAREWLLPNYQRPNLQVLTGQYVGKVLLSQNATTPRAVGVEFGTHKGNTHNVYAKHEVLLAAGSAVSPTILEYSGIGMKSILEPLGIDTVVDLPVGLNLQDQTTSTVRSRITSAGAGQGQAAWFATFNETFGDYTEKAHELLNTKLEQWAEEAVARGGFHNTTALLIQYENYRDWIVKDNVAYSELFLDTAGVASFDVWDLLPFTRGYVHILDKDPYLRHFAYDPQYFLNELDLLGQAAATQLARNISNSGAMQTYFAGETIPGDNLAYDADLSAWVEYIPENFRPNYHGVGTCSMMPKEMGGVVDNAARVYGVQGLRVIDGSIPPTQMSSHVMTVFYAMALKIADAILADYASMQ

SEQ ID NO: 584 - protein, 583 aa, Aspergillus niger
SNGIEASLLKDPKEVAGRTYDYIIAGGGLTGLTVAARLTENPNITVLVIESGSYESDRGPIIEDLNAYGDIFGSSVDHAYETVELATNNRTALIRSGNGLGGSTLINGGTWTRPHKAQVDSWETVFGNEGWNWDSVAAYSLQAERARAPNAKQIAAGHYFNASCHGLNGTVHAGPRDTGDDYSPIVKALMSAVEDRGVPTKKDLGCGDPHGVSMFPNTLHEDQVRSDAAREWLLPNYQRPNLQVLTGQYVGKVLLSQNATTPRAVGVEFGTHKGNTHNVYAKHEVLLAAGSAVSPTILEYSGIGMKSILEPLGIDTVVDLPVGLNLQDQTTSTVRSRITSAGAGQGQAAWFATFNETFGDYTEKAHELLNTKLEQWAEEAVARGGFHNTTALLIQYENYRDWIVKDNVAYSELFLDTAGVASFDVWDLLPFTRGYVHILDKDPYLRHFAYDPQYFLNELDLLGQAAATQLARNISNSGAMQTYFAGETIPGDNLAYDADLSAWVEYIPENFRPNYHGVGTCSMMPKEMGGVVDNAARVYGVQGLRVIDGSIPPTQMSSHVMTVFYAMALKIADAILADYASMQ

SEQ ID NO: 585 - protein, 583 aa, Aspergillus niger
SNGIEASLLKDPKEVAGRTYDYIIAGGGLTGLTVAARLTENPNITVLVIESGSYESDRGPIIEDLNAYGDIFGSSVDHAYETVELATNNRTALIRSGNGLGGSTLINGGTWTRPHKAQVDSWETVFGNEGWNWDSVAAYSLQAERARAPNAKQIAAGHYFNASCHGINGTVHAGPRDTGDDYSPIVKALMSAVEDRGVPTKKDLGCGDPHGVSMFPNTLHEDQVRSDAAREWLLPNYQRPNLQVLTGQYVGKVLLSQNATTPRAVGVEFGTHKGNTHNVYAKHEVLLAAGSAVSPTILEYSGIGMKSILEPLGIDTVVDLPVGLNLQDQTTSTVRSRITSAGAGQGQAAWFATFNETFGDYTEKAHELLNTKLEQWAEEAVARGGFHNTTALLIQYENYRDWIVKDNVAYSELFLDTAGVASFDVWDLLPFTRGYVHILDKDPYLRHFAYDPQYFLNELDLLGQAAATQLARNISNSGAMQTYFAGETIPGDNLAYDADLSAWVEYIPENFRPNYHGVGTCSMMPKEMGGVVDNAARVYGVQGLRVIDGSIPPTQMSSHVMTVFYAMALKIADAILADYASMQ

SEQ ID NO: 586 - protein, 582 aa, Aspergillus niger
SNGPEASLLTDPKEVAGRTVDYIIAGGGLTGLTTAARLTENPDITVLVIESGSYESDRGPIIEDLNAYGKIFGSSVDHAYETVELTNNQTALIRAGNGLGGSTLVNGGTWTRPHKAQVDSWETVFGNEGWNWDSVAAYSLQAERARAPNAKQIAAGHYFNASCHGINGTVHAGPRDTGDDYSPIVKALMSAVEDRGVPTKKDLGCGDPHGVSMFPNTLHEDQVRSDAAREWLLPNYQRPNLQVLTGQYVGKVLLSQNATTPRAVGVEFGTHKSNTHNVYAKHEVLLAAGSAVSPTILEYSGIGMKSILEPLGIDTVVDLPVGLNLQDQTTSTVRSRITSAGAGQGQAAWFATFNETFGDYAEKAHELLNTKLEQWAEEAVARGGFHNTTALLIQYENYRDWIVKDNVAYSELFLDTAGVASFDVWDLLPFTRGYVHILDKDPYLRHFAYDPQYFLNELDLLGQAAATQLARNISNSGAMQTYFAGETIPGDNLAYDADLSAWVEYICYNFRPNYHGVGTCSMMPKEMGGVVDNAARVYGVQGLRVIDGSIPPTQMSSHVMTVFYAMALKIADAILADYASMQ

SEQ ID NO: 587 - protein, 582 aa, Aspergillus niger
SNGAEASLLTDPKEVAGRTVDYIIAGGGLTGLTTAARLTENPDITVLVIESGSYESDRGPIIEDLNAYGKIFGSSVDHAYETVELTNNQTALIRAGNGLGGSTLVNGGTWTRPHKAQVDSWETVFGNEGWNWDSVAAYSLQAERARAPNAKQIAAGHYFNASCHGINGTVHAGPRDTGDDYSPIVKALMSAVEDRGVPTKKDLGCGDPHGVSMFPNTLHEDQVRSDAAREWLLPNYQRPNLQVLTGQYVGKVLLSQNATTPRAVGVEFGTHKQNTHNVYAKHEVLLAAGSAVSPTILEYSGIGMKSILEPLGIDTVVDLPVGLNLQDQTTSTVRSRITSAGAGQGQAAWFATFNETFGDYAEKAHELLNTKLEQWAEEAVARGGFHNTTALLIQYENYRDWIVKDNVAYSELFLDTAGVASFDVWDLLPFTRGYVHILDKDPYLRHFAYDPQYFLNELDLLGQAAATQLARNISNSGAMQTYFAGETIPGDNLAYDADLSAWVEYIHYNFRPNYHGVGTCSMMPKEMGGVVDNAARVYGVQGLRVIDGSIPPTQMSSHVMTVFYAMALKIADAILADYASMQ

SEQ ID NO: 588 - protein, 581 aa, Aspergillus niger
GIEASLLTDPKEVAGRTVDYIIAGGGLTGLTVAARLTENPDITVLVIESGSYESDRGPIIEDLNAYGDIFGSSVDHAYETVCLATNNQTALIRSGNGLGGSTLVNGGTWTRPHKAQVDSWETVFGNEGWNWDSVAAYSLQAERARAPNAKQIAAGHYFNASCHGINGTVHAGPRDTGDDYSPIVKALMSAVEDRGVPTKKDLGCGDPHGVSMFPNTLHEDQVRSDAAREWLLPNYQRPNLQVLTGQYVGKVLLSQNATTPRAVGVEFGTHKGNTHNVYAKHEVLLAAGSAVSPTILEYSGIGMKSILEPLGIKTVVDLPVGLNLQDQTTSTVRSRITSAGAGQGQAAWFATFNETFGDYTEKAHELLNTKLEQWAEEAVARGGFHNTTALLIQYENYRDWIVKDNVAYSELFLDTAGEASFDVWDLLPFTRGYVHILDKDPYLRHFAYDPQYFLNELDLLGQAAATQLARNISNSGAMQTYFAGETIPGDNLAYDADLRAWVEYIPYHFRPNYHGVGTCSMMPKEMGGVVDNAARVYGVQGLRVIDGSIPPTQMSSHVMTVFYAMALKIADAVLADYASMQ

SEQ ID NO: 589 - protein, 581 aa, Aspergillus niger
GIEASLLTDPKEVAGRTVDYIIAGGGLTGLTTAARLTENPDITVLVIESGSYESDRGPIIEDLNAYGDIFGSSVDHAYETVELATNNQTALIRSGNGLGGSTLVNGGTWTRPHKAQVDSWETVFGNEGWNWDSVAAYSLQAERARAPNAKQIAAGHYFDPSCHGINGTVHAGPRDTGDDYSPIVKALMSAVEDRGVPTKKDLGCGDPHGVSMFPNTLHEDQVRSDAAREWLLPNYQRPNLQVLTGQYVGKVLLSQNATTPRAVGVEFGTHKGNTHNVYAKHEVLLAAGSAVSPTILEYSGIGMKSILEPLGIDTVVDLPVGLNLQDQTTSTVRSRITSAGAGQGQAAWFATFNETFGDYTEKAHELLNTKLEQWAEEAVARGGFHNTTALLIQYENYRDWIVKDNVAYSELFLDTAGEASFDVWDLLPFTRGYVHILDKDPYLRHFAYDPQYFLNELDLLGQAAATQLARNISNSGAMQTYFAGETIPGDNLAYDADLRAWVEYIPYNFRPNYHGVGTCSMMPKEMGGVVDNAARVYGVQGLRVIDGSIPPTQMSSHVMTVFYAMALKIADAVLADYASMQ

SEQ ID NO: 590 - protein, 605 aa, Aspergillus niger
MSTLLVSSLVVSLAAALPHYIRSNGIEASLLTDPKEVAGRTVDYIIAGGGLTGLTTAARLTENPDITVLVIESGSYESDRGPIIEDLNAYGDIFGSSVDHAYETVELATNNQTALIRSGNGLGGSTLVNGGTWTRPHKAQVDSWETVFGNEGWNWDSVAAYSLQAERARAPNAKQIAAGHYFNASCHGINGTVHAGPRDTGDDYSPIVKALMSAVEDRGVPTKKDLGCGDPHGVSMFPNTLHEDQVRSDAAREWLLPNYQRPNLQVLTGRYVGKVLLSQNATTPRAVGVEFGTHKGNTHNVYAKHEVLLAAGSAVSPTILEYSGIGMKSILEPLGIDTVVDLPVGLNLQDQATSTVRSRITSAGAGQGQAAWFATFNETFGDYAEKAHELLNTKLEQWAEEAVARGGFHNTTALLIQYENYRDWIVKDNVAYSELFLDTAGVASFHVWDLLPFTRGYVHILDKDPYLRHFAYDPQYFLNELDLLGQAAATQLARNISNSGAMQTYFAGETIPGDNLAYDADLSAWVEYIPYNFRPNYHGVGTCSMMPKEMGGVVDNAARVYGVQGLRVIDGSIPPTQMSSHSMTVFYAMALKVADAILADYASMQ

SEQ ID NO: 591 - protein, 605 aa, Aspergillus niger
MSTLLVSSLVVSLAAALPHYIRSNGIEASLLTDPKEVAGRTVDYIIAGGGLTGLTTAARLTENPDITVLVIESGSYESDRGPIIEDLNAYGDIFGSSVDHAYETVELATNNQTALIRSGNGLGGSTLVNGGAWTRPHKAQVDSWETVFGNEGWNWDSVAAYSLQAERARAPNAKQIAAGHYFNASCHGINGTVHAGPRDTGDDYSPIVKALMSAVEDRGVPTKKDLGCGDPHGVSMFPNTLHEDQVRSDAAREWLLPNYQRPNLQVLTGRYVGKVLLSQNATTPRAVGVEFGTHKGNTHNVYAKHEVLLAAGSAVSPTILEYSGIGMKSILEPLGIDTVVDLPVGLNLQDQATSTVRSRITSAGAGQGQAAWFATFNETFGDYAEKAHELLNTKLEQWAEEAVARGGFHNTTALLIQYENYRDWIVKDNVAYSELFLDTAGVASFDVWDLLPFTRGYVHILDKDPYLRHFAYDPQYFLNELDLLGQAAATQLARNISNSGAMQTYFAGETIPGDNLAYDADLSAWVEYIPYNFRPNYHGVGTCSMMPKEMGGVVDNAARVYGVQGLRVIDGSIPPTQMSSHSMTVFYAMALKVADAILADYASMQ

SEQ ID NO: 592 - protein, 605 aa, Aspergillus niger
MSTLLVSSLVVSLAAALPHYIRSNGIEASLLTDPKEVAGRTVDYIIAGGGLTGLTTAARLTENPDITVLVIESGSYESDRGPIIEDLNAYGDIFGSSVDHAYETVELATNNQTALIRSGNGLGGSTLVNGGAWTRPHKAQVDSWETVFGNEGWNWDSVAAYSLQAERARAPNAKQIAAGHYFNASCHGINGTVHAGPRDTGDDYSPIVKALMSAVEDRGVPTKKDLGCGDPHGVSMFPNTLHEDQVRSDAAREWLLPNYQRPNLQVLTGRYVGKVLLSQNATTPRAVGVEFGTHKGNTHNVYAKHEVLLAAGSAVSPTILEYSGIGMKSILEPLGIDTVVDLPVGLNLQDQTTSTVRSRITSAGAGQGQAAWFATFNETFGDYAEKAHELLNTKLEQWAEEAVARGGFHNTTALLIQYENYRDWIVKDNVAYSELFLDTAGVASFHVWDLLPFTRGYVHILDKDPYLRHFAYDPQYFLNELDLLGQAAATQLARNISNSGAMQTYFAGETIPGDNLAYDADLSAWVEYIPYNFRPNYHGVGTCSMMPKEMGGVVDNAARVYGVQGLRVIDGSIPPTQMSSHSMTVFYAMALKVADAILADYASMQ

SEQ ID NO: 593 - protein, 605 aa, Aspergillus niger
MQTLLVSSLVVSLAAALPHYIRSNGIEASLLTDPKEVAGRTVDYIIAGGGLTGLTTAARLTENPDITVLVIESGSYESDRGPIIEDLNAYGDIFGSSVDHAYETVELATNNQTALIRSGNGLGGSTLVNGGAWTRPHKAQVDSWETVFGNEGWNWDSVAAYSLQAERARAPNAKQIAAGHYFNASCHGINGTVHAGPRDTGDDYSPIVKALMSAVEDRGVPTKKDLGCGDPHGVSMFPNTLHEDQVRSDAAREWLLPNYQRPNLQVLTGRYVGKVLLSQNATTPRAVGVEFGTHKGNTHNVYAKHEVLLAAGSAVSPTILEYSGIGMKSILEPLGIDTVVDLPVGLNLQDQTASTVRSRITSAGAGQGQAAWFATFNETFGDYAEKAHELLNTKLEQWAEEAVARGGFHNTTALLIQYENYRDWIVKDNVAYSELFLDTAGVASFHVWDLLPFTRGYVHILDKDPYLRHFAYDPQYFLNELDLLGQAAATQLARNISNSGAMQTYFAGETIPGDNLAYDADLSAWVEYIPYNFRPNYHGVGTCSMMPKEMGGVVDNAARVYGVQGLRVIDGSIPPTQMSSHSMTVFYAMALKVADAILADYASMQ

SEQ ID NO: 594 - protein, 605 aa, Aspergillus niger
MSTLLVSSLVVSLAAALPHYIRSNGIEASLLTDPKEVAGRTVDYIIAGGGLTGLTTAARLTENPDITVLVIESGSYESDRGPIIEDLNAYGDIFGSSVDHAYETVELATNNQTALIRSGNGLGGSTLVNGGAWTRPHKAQVDSWETVFGNEGWNWDSVAAYSLQAERARAPNAKQIAAGHYFNASCHGINGTVHAGPRDTGDDYSPIVKALMSAVEDRGVPTKKDLGCGDPHGVSMFPNTLHEDQVRSDAAREWLLPNYQRPNLQVLTGRYVGKVLLSQNATTPRAVGVEFGTHKGNTHNVYAKHEVLLAAGSAVSPTILEYSGIGMKSILEPLGIDTVVDLPVGLNLQDQATSTVRSRITSAGAGQGQAAWFATFNETFGDYAEKAHELLNTKLEQWAEEAVARGGFHNTTALLIQYENYRDWIVKDNVAYSELFLDTAGVASFHVWDLLPFTRGYVHILDKDPYLRHFAYDPQYFLNELDLLGQAAATQLARNISNSGAMQTYFAGETIPGDNLAYDADLSAWVEYIPYNFRPNYHGVGTCSMMPKEMGGVVDNAARVYGVQGLRVIDGSIPPTQMSSHVMTVFYAMALKVADAILADYASMQ

SEQ ID NO: 595 - protein, 583 aa, Aspergillus niger
SNGIEASLLKDPKEVAGRTYDYIIAGGGLTGLTVAARLTENPNITVLVIESGSYESDRGPIIEDLNAYGDIFGSSVDHAYETVELPTNNQTALIRSGNGLGGSTLINGGTWTRPHKAQVDSWETVFGNEGWNWDSVAAYSLQAERARAPNAKQIAAGHYFNASCHGINGTVHAGPRDTGDDYSPIVKALMSAVEDRGVPTKKDLGCGDPHGVSMFPNTLHEDQVRSDAAREWLLPNYQRPNLQVLTGQYVGKVLLSQNATTPRAVGVEFGTHKGNTHNVYAKHEVLLAAGSAVSPTILEYSGIGMKSILEPLGIDTVVDLPVGLNLQDQTTSTVRSRITSAGAGQGQAAWFATFNETFGDYAEKAHELLNTKLEQWAEEAVARGGFHNTTALLIQYENYRDWIVKDNVAYSELFLDTAGVASFDVWDLLPFTRGYVHILDKDPYLRHFAYDPQYFLNELDLLGQAAATQLARNISNSGAMQTYFAGETIPGDNLAYDADLSAWVEYIPENFRPNYHGVGTCSMMPKEMGGVVDNAARVYGVQGLRVIDGSIPPTQMSSHVMTVFYAMALKIADAVLADYASMQ

SEQ ID NO: 596 - protein, 583 aa, Aspergillus niger
SNGIEASLLKDPKEVAGRTYDYIIAGGGLTGLTVAARLTENPNITVLVIESGSYESDRGPIIEDLNAYGDIFGSSVDHAYETVELATNNQTALIRSGNGLGGSTLINGGTWTRPHKAQVDSWETVFGNEGWNWDSVAAYSLQAERARAPNAKQIAAGHYFNASCHGINGTVHAGPRDTGDDYSPIVKALMSAVEDRGVPTKKDLGCGDPHGVSMFPNTLHEDQVRSDAAREWLLPNYQRPNLQVLTGQYVGKVLLSQNATTPRAVGVEFGTHKGNTHNVYAKHEVLLAAGSAVSPTILEYSGIGMKSILEPLGIDTVVDLPVGLNLQDQTTSTVRSRITPAGAGQGQAAWFATFNETFGDYAEKAHELLNTKLEQWAEEAVARGGFHNTTALLIQYENYRDWIVKDNVAYSELFLDTAGVASFDVWDLLPFTRGYVHILDKDPYLRHFAYDPQYFLNELDLLGQAAATQLARNISNSGAMQTYFAGETIPGDNLAYDADLSAWVEYIPENFRPNYHGVGTCSMMPKEMGGVVDNAARVYGVQGLRVIDGSIPPTQMSSHVMTVFYAMALKIADAVLADYASMQ

SEQ ID NO: 597 - protein, 583 aa, Aspergillus niger
SNGIEASLLTDPKEVAGRTYDYIIAGGGLTGLTVAARLTENPDITVLVIESGSYESDRGPIIEDLNAYGQIFGSSVDHAYETVELATNNRTALIRSGNGLGGSTLINGGTWTRPHKAQVDSWETVFGNEGWNWDSVAAYSLQAERARAPNAKQIAAGHYFNASCHGVNGTVHAGPRDTGDDYSPIVKALMSAVEDRGVPTKKDLGCGDPHGVSMFPNTLHEDQVRSDAAREWLLPNYQRPNLQVLTGQYVGKVLLSQNATTPRAVGVEFGTHKGNTHNVYAKHEVLLAAGSAVSPTILEYSGIGLKSILEPLGIDTVVDLPVGLNLQDQTTSTVRSRITSAGAGQGQAAWFATFNETFGDYAEKAHELLNTKLEQWAEEAVARGGFHNTTALLIQYENYRDWIVKDNVAYSELFLDTAGVASFDVWDLLPFTRGYVHILDKDPYLRHFAYDPQYFLNELDLLGQAAATQLARNISNSGAMQTYFAGETIPGDNLAYDADLSAWVEYIPYNFRPNYHGVGTCSMMPKEMGGVVDNAARVYGVQGLRVIDGSIPPTQMSSHVMTVFYAMALKIADAILADYASMQ

SEQ ID NO: 598 - protein, 583 aa, Aspergillus niger
SNGIEASLLKDPKEVAGRTYDYIIAGGGLTGLTVAARLTENPNITVLVIESGSYESDRGPIIEDLNAYGDIFGSSVDHAYETVELATNNQTALIRSGNGLGGSTLINGGTWTRPHKAQVDSWETVFGNEGWNWDSVAAYSLQAERARAPNAKQIAAGHYFNASCHGINGTVHAGPRDTGDDYSPIVKALMSAVEDRGVPTKKDLGCGDPHGVSMFPNTLHEDQVRSDAAREWLLPNYQRPNLQVLTGQYVGKVLLSQNATTPRAVGVEFGTHKGNTHNVYAKHEVLLAAGSAVSPTILEYSGIGMKSILEPLGIDTVVDLPVGLNLQDQTTSTVRSRITSAGAGQGQAAWFATFNETFGDYTEKAHELLNTKLEQWAEEAVARGGFHNTTALLIQYENYRDWIVKDNVAYSELFLDTAGVASFDVWDLLPFTRGYVHILDKDPYLRHFAYDPQYFLNELDLLGQAAATQLARNISNSGAMQTYFAGETIPGDNLAYDADLRAWVEYIPENFRPNYHGVGTCSMMPKEMGGVVDNAARVYGVQGLRVIDGSIPPTQMSSHVMTVFYAMALKIADAVLADYASMQ

SEQ ID NO: 599 - protein, 583 aa, Aspergillus niger
SNGIEASLLKDPKEVAGRTYDYIIAGGGLTGLTVAARLTENPNITVLVIESGSYESDRGPIIEDLNAYGDIFGSSVDHAYETVELATNNQTALIRSGNGLGGSTLINGGTWTRPHKAQVDSWETVFGNEGWNWDSVAAYSLQAERARAPNAKQIAAGHYFNASCHGINGTVHAGPRDTGDDYSPIVKALMSAVEDRGVPTKKDLGCGDPHGVSMFPNTLHEDQVRSDAAREWLLPNYQRPNLQVLTGQYVGKVLLSQNATTPRAVGVEFGTHKGNTHNVYAKHEVLLAAGSAVSPTILEYSGIGMKSILEPLGIDTVVDLPVGLNLQDQTTSTVRSRITPAGAGQGQAAWFATFNETFGDYAEKAHELLNTKLEQWAEEAVARGGFHNTTALLIQYENYRDWIVKDNVAYSELFLDTAGVASFDVWDLLPFTRGYVHILDKDPYLRHFAYDPQYFLNELDLLGQAAATQLARNISNSGAMQTYFAGETIPGDNLAYDADLSAWVEYIPENFRPNYHGVGTCSMMPKEMGGVVDNAARVYGVQGLRVIDGSIPPTQLSSHVMTVFYAMALKIADAILADYASMQ

SEQ ID NO: 600 - protein, 583 aa, Aspergillus niger
SNGIEASLLKDPKEVAGRTYDYIIAGGGLTGLTVAAKLTENPNITVLVIESGSYESDRGPIIEDLNAYGDIFGSSVDHAYETVELATNNQTALIRSGNGLGGSTLINGGTWTRPHKAQVDSWETVFGNEGWNWDSVAAYSLQAERARAPNAKQIAAGHYFNASCHGINGTVHAGPRDTGDDYSPIVKALMSAVEDRGVPTKKDLGCGDPHGVSMFPNTLHEDQVRSDAAREWLLPNYQRPNLQVLTGQYVGKVLLSQNATTPRAVGVEFGTHKGNTHNVYAKHEVLLAAGSAVSPTILEYSGIGMKSILEPLGIDTVVDLPVGLNLQDQTTSTVRSRITSAGAGQGQAAWFATFNETFGDYAEKAHELLNTKLEQWAEEAVARGGFHNTTALLIQYENYRDWIVKDNVAYSELFLDTAGVASFDVWDLLPFTRGYVHILDKDPYLRHFAYDPQYFLNELDLLGQAAATQLARNISNSGAMQTYFAGETIPGDNLAYDADLRAWVEYIPENFRPNYHGVGTCSMMPKEMGGVVDNAARVYGVQGLRVIDGSIPPTQMSSHVMTVFYAMALKIADAILADYASMQ

SEQ ID NO: 601 - protein, 583 aa, Aspergillus niger
SNGIEASLLKDPKEVAGRTYDYIIAGGGLTGLTVAARLTENPNITVLVIESGSYESDRGPIIEDLNAYGDIFGSSVDHAYETVELATNNRTALIRSGNGLGGSTLINGGTWTRPHKAQVDSWETVFGNEGWNWDSVAAYSLQAERARAPNAKQIAAGHYFNASCHGINGTVHAGPRDTGDDYSPIVKALMSAVEDRGVPTKKDLGCGDPHGVSMFPNTLHPDQVRSDAAREWLLPNYQRPNLQVLTGQYVGKVLLSQNATTPRAVGVEFGTHKGNTHNVYAKHEVLLAAGSAVSPTILEYSGIGMKSILEPLGIDTVVDLPVGLNLQDQTTSTVRSRITSAGAGQGQAAWFATFNETFGDYAEKAHELLNTKLEQWAEEAVARGGFHNTTALLIQYENYRDWIVKDNVAYSELFLDTAGVASFDVWDLLPFTRGYVHILDKDPYLRHFAYDPQYFLNELDLLGQAAATQLARNISNSGAMQTYFAGETIPGDNLAYDADLSAWVEYIPENFRPNYHGVGTCSMMPKEMGGVVDNAARVYGVQGLRVIDGSIPPTQMSSHVMTVFYAMALKIADAILADYASMQ

SEQ ID NO: 602 - protein, 583 aa, Aspergillus niger
SNGIEASLLKDPKEVAGRTYDYIIAGGGLTGLTVAAKLTENPNITVLVIESGSYESDRGPIIEDLNAYGDIFGSSVDHAYETVELATNNQTALIRSGNGLGGSTLINGGTWTRPHKAQVDSWETVFGNEGWNWDSVAAYSLQAERARAPNAKQIAAGHYFNASCHGINGTVHAGPRDTGDDYSPIVKALMSAVEDRGVPTKKDLGCGDPHGVSMFPNTLHEDQVRSDAAREWLLPNYQRPNLQVLTGQYVGKVLLSQNATTPRAVGVEFGTHKGNTHNVYAKHEVLLAAGSAVSPTILEYSGIGMKSILEPLGIDTVVDLPVGLNLQDQTTSTVRSRITPAGAGQGQAAWFATFNETFGDYAEKAHELLNTKLEQWAEEAVARGGFHNTTALLIQYENYRDWIVKDNVAYSELFLDTAGVASFDVWDLLPFTRGYVHILDKDPYLRHFAYDPQYFLNELDLLGQAAATQLARNISNSGAMQTYFAGETIPGDNLAYDADLSAWVEYIPENFRPNYHGVGTCSMMPKEMGGVVDNAARVYGVQGLRVIDGSIPPTQMSSHVMTVFYAMALKIADAILADYASMQ

SEQ ID NO: 603 - protein, 583 aa, Aspergillus niger
SNGIEASLLKDPKEVAGRTYDYIIAGGGLTGLTVAAKLTENPNITVLVIESGSYESDRGPIIEDLNAYGDIFGSSVDHAYETVELATNNRTALIRSGNGLGGSTLINGGTWTRPHKAQVDSWETVFGNEGWNWDSVAAYSLQAERARAPNAKQIAAGHYFNASCHGINGTVHAGPRDTGDDYSPIVKALMSAVEDRGVPTKKDLGCGDPHGVSMFPNTLHEDQVRSDAAREWLLPNYQRPNLQVLTGQYVGKVLLSQNATTPRAVGVEFGTHKGNTHNVYAKHEVLLAAGSAVSPTILEYSGIGMKSILEPLGIDTVVDLPVGLNLQDQTTSTVRSRITSAGAGQGQAAWFATFNETFGDYAEKAHELLNTKLEQWAEEAVARGGFHNTTALLIQYENYRDWIVKDNVAYSELFLDTAGVASFDVWDLLPFTRGYVHILDKDPYLRHFAYDPQYFLNELDLLGQAAATQLARNISNSGAMQTYFAGETIPGDNLAYDADLSAWVEYIPENFRPNYHGVGTCSMMPKEMGGVVDNAARVYGVQGLRVIDGSIPPTQMSSHVMTVFYAMALKIADAILADYASMQ

SEQ ID NO: 604 - protein, 583 aa, Aspergillus niger
SNGIEASLLTDPKEVAGRTYDYIIAGGGLTGLTVAARLTENPDITVLVIESGSYESDRGPIIEDLNAYGQIFGSSVDHAYETVELATNNRTALIRSGNGLGGSTLINGGTWTRPHKAQVDSWETVFGNEGWNWDSVAAYSLQAERARAPNAKQIAAGHYFNASCHGLNGTVHAGPRDTGDDYSPIVKALMSAVEDRGVPTKKDLGCGDPHGVSMFPNTLHEDQVRSDAAREWLLPNYQRPNLQVLTGQYVGKVLLSQNATTPRAVGVEFGTHKGNTHNVYAKHEVLLAAGSAVSPTILEYSGIGLKSILEPLGIDTVVDLPVGLNLQDQTTSTVRSRITSAGAGQGQAAWFATFNETFGDYAEKAHELLNTKLEQWAEEAVARGGFHNTTALLIQYENYRDWIVKDNVAYSELFLDTAGVASFDVWDLLPFTRGYVHILDKDPYLRHFAYDPQYFLNELDLLGQAAATQLARNISNSGAMQTYFAGETIPGDNLAYDADLSAWVEYIPYNFRPNYHGVGTCSMMPKEMGGVVDNAARVYGVQGLRVIDGSIPPTQMSSHVMTVFYAMALKIADAILADYASMQ

SEQ ID NO: 605 - protein, 583 aa, Aspergillus niger
SNGIEASLLKDPKEVAGRTYDYIIAGGGLTGLTVAARLTENPNITVLVIESGSYESDRGPIIEDLNAYGDIFGSSVDHAYETVELATNNQTALIRSGNGLGGSTLINGGTWTRPHKAQVDSWETVFGNEGWNWDSVAAYSLQAERARAPNAKQIAAGHYFNASCHGINGTVHAGPRDTGDDYSPIVKALMSAVEDRGVPTKKDLGCGDPHGVSMFPNTLHEDQVRSDAAREWLLPNYQRPNLQVLTGQYVGKVLLSQNATTPRAVGVEFGTHKGNTHNVYAKHEVLLAAGSAVSPTILEYSGIGMKSILEPLGIDTVVDLPVGLNLQDQTTSTVRSRITSAGAGQGQAAWFATFNETFGDYAEKAHELLNTKLEQWAEEAVARGGFHNTTALLIQYENYRDWIVKDNVAYSELFLDTAGVASFDVWDLLPFTRGYVHILDKDPYLRHFAYDPQYFLNELDLLGQAAATQLARNISNSGAMQTYFAGETIPGDNLAYDADLRAWVEYIPENFRPNYHGVGTCSMMPKEMGGVVDNAARVYGVQGLRVIDGSIPPTQMSSHVMTVFYAMALKIADAVLADYASMQ

SEQ ID NO: 606 - protein, 583 aa, Aspergillus niger
SNGIEASLLKDPKEVAGRTYDYIIAGGGLTGLTVAAKLTENPNITVLVIESGSYESDRGPIIEDLNAYGDIFGSSVDHAYETVELATNNQTALIRSGNGLGGSTLINGGTWTRPHKAQVDSWETVFGNEGWNWDSVAAYSLQAERARAPNAKQIAAGHYFNASCHGINGTVHAGPRDTGDDYSPIVKALMSAVEDRGVPTKKDLGCGDPHGVSMFPNTLHEDQVRSDAAREWLLPNYQRPNLQVLTGQYVGKVLLSQNATTPRAVGVEFGTHKGNTHNVYAKHEVLLAAGSAVSPTILEYSGIGMKSILEPLGIDTVVDLPVGLNLQDQTTSTVRSRITSAGAGQGQAAWFATFNETFGDYAEKAHELLNTKLEQWAEEAVARGGFHNTTALLIQYENYRDWIVKDNVAYSELFLDTAGVASFDVWDLLPFTRGYVHILDKDPYLRHFAYDPQYFLNELDLLGQAAATQLARNISNSGAMQTYFAGETIPGDNLAYDADLSAWVEYIPENFRPNYHGVGTCSMMPKEMGGVVDNAARVYGVQGLRVIDGSIPPTQLSSHVMTVFYAMALKIADAILADYASMQ

SEQ ID NO: 607 - protein, 583 aa, Aspergillus niger
SNGIEASLLKDPKEVAGRTYDYIIAGGGLTGLTVAAKLTENPNITVLVIESGSYESDRGPIIEDLNAYGDIFGSSVDHAYETVELATNNRTALIRSGNGLGGSTLINGGTWTRPHKAQVDSWETVFGNEGWNWDSVAAYSLQAERARAPNAKQIAAGHYFNASCHGLNGTVHAGPRDTGDDYSPIVKALMSAVEDRGVPTKKDLGCGDPHGVSMFPNTLHEDQVRSDAAREWLLPNYQRPNLQVLTGQYVGKVLLSQNATTPRAVGVEFGTHKGNTHNVYAKHEVLLAAGSAVSPTILEYSGIGMKSILEPLGIDTVVDLPVGLNLQDQTTSTVRSRITSAGAGQGQAAWFATFNETFGDYTEKAHELLNTKLEQWAEEAVARGGFHNTTALLIQYENYRDWIVKDNVAYSELFLDTAGVASFDVWDLLPFTRGYVHILDKDPYLRHFAYDPQYFLNELDLLGQAAATQLARNISNSGAMQTYFAGETIPGDNLAYDADLSAWVEYIPENFRPNYHGVGTCSMMPKEMGGVVDNAARVYGVQGLRVIDGSIPPTQMSSHVMTVFYAMALKIADAILADYASMQ

SEQ ID NO: 608 - protein, 583 aa, Aspergillus niger
SNGIEASLLKDPKEVAGRTYDYIIAGGGLTGLTVAARLTENPNITVLVIESGSYESDRGPIIEDLNAYGDIFGSSVDHAYETVELATNNQTALIRSGNGLGGSTLINGGTWTRPHKAQVDSWETVFGNEGWNWDSVAAYSLQAERARAPNAKQIAAGHYFNASCHGINGTVHAGPRDTGDDYSPIVKALMSAVEDRGVPTKKDLGCGDPHGVSMFPNTLHEDQVRSDAAREWLLPNYQRPNLQVLTGQYVGKVLLSQNATTPRAVGVEFGTHKGNTHNVYAKHEVLLAAGSAVSPTILEYSGIGMKSILEPLGIDTVVDLPVGLNLQDQTTSTVRSRITSAGAGQGQAAWFATFNETFGDYAEKAHELLNTKLEQWAEEAVARGGFHNTTALLIQYENYRDWIVKDNVAYSELFLDTAGVASFDVWDLLPFTRGYVHILDKDPYLRHFAYDPQYFLNELDLLGQAAATQLARNISNSGAMQTYFAGETIPGDNLAYDADLRAWVEYIPENFRPNYHGVGTCSMMPKEMGGVVDNAARVYGVQGLRVIDGSIPPTQLSSHVMTVFYAMALKIADAILADYASMQ

SEQ ID NO: 609 - protein, 583 aa, Aspergillus niger
SNGIEASLLKDPKEVAGRTYDYIIAGGGLTGLTVAARLTENPNITVLVIESGSYESDRGPIIEDLNAYGDIFGSSVDHAYETVELATNNRTALIRSGNGLGGSTLINGGTWTRPHKAQVDSWETVFGNEGWNWDSVAAYSLQAERARAPNAKQIAAGHYFNASCHGINGTVHAGPRDTGDDYSPIVKALMSAVEDRGVPTKKDLGCGDPHGVSMFPNTLHEDQVRSDAAREWLLPNYQRPNLQVLTGQYVGKVLLSQNATTPRAVGVEFGTHKGNTHNVYAKHEVLLAAGSAVSPTILEYSGIGMKSILEPLGIDTVVDLPVGLNLQDQTTSTVRSRITPAGAGQGQAAWFATFNETFGDYAEKAHELLNTKLEQWAEEAVARGGFHNTTALLIQYENYRDWIVKDNVAYSELFLDTAGVASFDVWDLLPFTRGYVHILDKDPYLRHFAYDPQYFLNELDLLGQAAATQLARNISNSGAMQTYFAGETIPGDNLAYDADLSAWVEYIPENFRPNYHGVGTCSMMPKEMGGVVDNAARVYGVQGLRVIDGSIPPTQMSSHVMTVFYAMALKIADAILADYASMQ

SEQ ID NO: 610 - protein, 583 aa, Aspergillus niger
SNGIEASLLKDPKEVAGRTYDYIIAGGGLTGLTVAARLTENPNITVLVIESGSYESDRGPIIEDLNAYGDIFGSSVDHAYETVELPTNNQTALIRSGNGLGGSTLINGGTWTRPHKAQVDSWETVFGNEGWNWDSVAAYSLQAERARAPNAKQIAAGHYFNASCHGINGTVHAGPRDTGDDYSPIVKALMSAVEDRGVPTKKDLGCGDPHGVSMFPNTLHEDQVRSDAAREWLLPNYQRPNLQVLTGRYVGKVLLSQNATTPRAVGVEFGTHKGNTHNVYAKHEVLLAAGSAVSPTILEYSGIGMKSILEPLGIDTVVDLPVGLNLQDQTTSTVRSRITSAGAGQGQAAWFATFNETFGDYAEKAHELLNTKLEQWAEEAVARGGFHNTTALLIQYENYRDWIVKDNVAYSELFLDTAGVASFDVWDLLPFTRGYVHILDKDPYLRHFAYDPQYFLNELDLLGQAAATQLARNISNSGAMQTYFAGETIPGDNLAYDADLSAWVEYIPENFRPNYHGVGTCSMMPKEMGGVVDNAARVYGVQGLRVIDGSIPPTQMSSHVMTVFYAMALKIADAILADYASMQ

SEQ ID NO: 611 - protein, 583 aa, Aspergillus niger
SNGIEASLLKDPKEVAGRTYDYIIAGGGLTGLTVAAKLTENPNITVLVIESGSYESDRGPIIEDLNAYGDIFGSSVDHAYETVELATNNQTALIRSGNGLGGSTLINGGTWTRPHKAQVDSWETVFGNEGWNWDSVAAYSLQAERARAPNAKQIAAGHYFNASCHGINGTVHAGPRDTGDDYSPIVKALMSAVEDRGVPTKKDLGCGDPHGVSMFPNTLHEDQVRSDAAREWLLPNYQRPNLQVLTGRYVGKVLLSQNATTPRAVGVEFGTHKGNTHNVYAKHEVLLAAGSAVSPTILEYSGIGMKSILEPLGIDTVVDLPVGLNLQDQTTSTVRSRITSAGAGQGQAAWFATFNETFGDYAEKAHELLNTKLEQWAEEAVARGGFHNTTALLIQYENYRDWIVKDNVAYSELFLDTAGVASFDVWDLLPFTRGYVHILDKDPYLRHFAYDPQYFLNELDLLGQAAATQLARNISNSGAMQTYFAGETIPGDNLAYDADLSAWVEYIPENFRPNYHGVGTCSMMPKEMGGVVDNAARVYGVQGLRVIDGSIPPTQMSSHVMTVFYAMALKIADAILADYASMQ

SEQ ID NO: 612 - protein, 583 aa, Aspergillus niger
SNGIEASLLTDPKEVAGRTYDYIIAGGGLTGLTVAARLTENPDITVLVIESGSYESDRGPIIEDLNAYGQIFGSSVDHAYETVELATNNQTALIRSGNGLGGSTLINGGTWTRPHKAQVDSWETVFGNEGWNWDSVAAYSLQAERARAPNAKQIAAGHYFNASCHGLNGTVHAGPRDTGDDYSPIVKALMSAVEDRGVPTKKDLGCGDPHGVSMFPNTLHEDQVRSDAAREWLLPNYQRPNLQVLTGQYVGKVLLSKNATTPRAVGVEFGTHKGNTHNVYAKHEVLLAAGSAVSPTILEYSGIGMKSILEPLGIDTVVDLPVGLNLQDQTTSTVRSRITSAGAGQGQAAWFATFNETFGDYTEKAHELLNTKLEQWAEEAVARGGFHNTTALLIQYENYRDWIVKDNVAYSELFLDTAGVASFDVWDLLPFTRGYVHILDKDPYLRHFAYDPQYFLNELDLLGQAAATQLARNISNSGAMQTYFAGETIPGDNLAYDADLSAWVEYIPYNFRPNYHAVGTCSMMPKEMGGVVDNAARVYGVQGLRVIDGSIPPTQMSSHVMTVFYAMALKIADAILADYASMQ

SEQ ID NO: 613 - protein, 583 aa, Aspergillus niger
SNGIEASLLKDPKEVAGRTYDYIIAGGGLTGLTVAAKLTENPNITVLVIESGSYESDRGPIIEDLNAYGDIFGSSVDHAYETVELATNNRTALIRSGNGLGGSTLINGGTWTRPHKAQVDSWETVFGNEGWNWDSVAAYSLQAERARAPNAKQIAAGHYFNASCHGINGTVHAGPRDTGDDYSPIVKALMSAVEDRGVPTKKDLGCGDPHGVSMFPNTLHEDQVRSDAAREWLLPNYQRPNLQVLTGQYVGKVLLSQNATTPRAVGVEFGTHKGNTHNVYAKHEVLLAAGSAVSPTILEYSGIGMKSILEPLGIDTVVDLPVGLNLQDQTTSTVRSRITSAGAGQGQAAWFATFNETFGDYTEKAHELLNTKLEQWAEEAVARGGFHNTTALLIQYENYRDWIVKDNVAYSELFLDTAGVASFDVWDLLPFTRGYVHILDKDPYLRHFAYDPQYFLNELDLLGQAAATQLARNISNSGAMQTYFAGETIPGDNLAYDADLSAWVEYIPENFRPNYHGVGTCSMMPKEMGGVVDNAARVYGVQGLRVIDGSIPPTQMSSHVMTVFYAMALKIADAILADYASMQ

SEQ ID NO: 614 - protein, 583 aa, Aspergillus niger
SNGIEASLLKDPKEVAGRTYDYIIAGGGLTGLTVAAKLTENPNITVLVIESGSYESDRGPIIEDLNAYGDIFGSSVDHAYETVELATNNRTALIRSGNGLGGSTLINGGTWTRPHKAQVDSWETVFGNEGWNWDSVAAYSLQAERARAPNAKQIAAGHYFNASCHGLNGTVHAGPRDTGDDYSPIVKALMSAVEDRGVPTKKDLGCGDPHGVSMFPNTLHEDQVRSDAAREWLLPNYQRPNLQVLTGQYVGKVLLSQNATTPRAVGVEFGTHKGNTHNVYAKHEVLLAAGSAVSPTILEYSGIGMKSILEPLGIDTVVDLPVGLNLQDQTTSTVRSRITSAGAGQGQAAWFATFNETFGDYAEKAHELLNTKLEQWAEEAVARGGFHNTTALLIQYENYRDWIVKDNVAYSELFLDTAGVASFDVWDLLPFTRGYVHILDKDPYLRHFAYDPQYFLNELDLLGQAAATQLARNISNSGAMQTYFAGETIPGDNLAYDADLSAWVEYIPENFRPNYHGVGTCSMMPKEMGGVVDNAARVYGVQGLRVIDGSIPPTQMSSHVMTVFYAMALKIADAILADYASMQ

SEQ ID NO: 615 - protein, 583 aa, Aspergillus niger
SNGIEASLLKDPKEVAGRTYDYIIAGGGLTGLTVAARLTENPNITVLVIESGSYESDRGPIIEDLNAYGDIFGSSVDHAYETVELATNNQTALIRSGNGLGGSTLINGGTWTRPHKAQVDSWETVFGNEGWNWDSVAAYSLQAERARAPNAKQIAAGHYFNPSCHGINGTVHAGPRDTGDDYSPIVKALMSAVEDRGVPTKKDLGCGDPHGVSMFPNTLHPDQVRSDAAREWLLPNYQRPNLQVLTGQYVGKVLLSQNATTPRAVGVEFGTHKGNTHNVYAKHEVLLAAGSAVSPTILEYSGIGMKSILEPLGIDTVVDLPVGLNLQDQTTSTVRSRITSAGAGQGQAAWFATFNETFGDYAEKAHELLNTKLEQWAEEAVARGGFHNTTALLIQYENYRDWIVKDNVAYSELFLDTAGVASFDVWDLLPFTRGYVHILDKDPYLRHFAYDPQYFLNELDLLGQAAATQLARNISNSGAMQTYFAGETIPGDNLAYDADLSAWVEYIPENFRPNYHGVGTCSMMPKEMGGVVDNAARVYGVQGLRVIDGSIPPTQMSSHVMTVFYAMALKIADAILADYASMQ

SEQ ID NO: 616 - protein, 583 aa, Aspergillus niger
SNGIEASLLKDPKEVAGRTYDYIIAGGGLTGLTVAARLTENPNITVLVIESGSYESDRGPIIEDLNAYGDIFGSSVDHAYETVELATNNQTALIRSGNGLGGSTLINGGTWTRPHKAQVDSWETVFGNEGWNWDSVAAYSLQAERARAPNAKQIAAGHYFNASCHGINGTVHAGPRDTGDDYSPIVKALMSAVEDRGVPTKKDLGCGDPHGVSMFPNTLHEDQVRSDAAREWLLPNYQRPNLQVLTGQYVGKVLLSQNATTPRAVGVEFGTHKGNTHNVYAKHEVLLAAGSAVSPTILEYSGIGMKSILEPLGIDTVVDLPVGLNLQDQTTSTVRSRITSAGAGQGQAAWFATFNETFGDYAEKAHELLNTKLEQWAEEAVARGGFHNTTALLIQYENYRDWIVKDNVAYSELFLDTAGVASFDVWDLLPFTRGYVHILDKDPYLRHFAYDPQYFLNELDLLGQAAATQLARNISNSGAMQTYFAGETIPGDNLAYDADLSAWVEYIPENFRPNYHGVGTCSMMPKEMGGVVDNAARVYGVQGLRVIDGSIPPTQLSSHVMTVFYAMALKIADAVLADYASMQ

SEQ ID NO: 617 - protein, 583 aa, Aspergillus niger
SNGIEASLLKDPKEVAGRTYDYIIAGGGLTGLTVAARLTENPNITVLVIESGSYESDRGPIIEDLNAYGDIFGSSVDHAYETVELPTNNRTALIRSGNGLGGSTLINGGTWTRPHKAQVDSWETVFGNEGWNWDSVAAYSLQAERARAPNAKQIAAGHYFNASCHGLNGTVHAGPRDTGDDYSPIVKALMSAVEDRGVPTKKDLGCGDPHGVSMFPNTLHEDQVRSDAAREWLLPNYQRPNLQVLTGQYVGKVLLSQNATTPRAVGVEFGTHKGNTHNVYAKHEVLLAAGSAVSPTILEYSGIGMKSILEPLGIDTVVDLPVGLNLQDQTTSTVRSRITSAGAGQGQAAWFATFNETFGDYAEKAHELLNTKLEQWAEEAVARGGFHNTTALLIQYENYRDWIVKDNVAYSELFLDTAGVASFDVWDLLPFTRGYVHILDKDPYLRHFAYDPQYFLNELDLLGQAAATQLARNISNSGAMQTYFAGETIPGDNLAYDADLSAWVEYIPENFRPNYHGVGTCSMMPKEMGGVVDNAARVYGVQGLRVIDGSIPPTQMSSHVMTVFYAMALKIADAILADYASMQ

SEQ ID NO: 618 - protein, 583 aa, Aspergillus niger
SNGPEASLLTDPKEVAGRTVDYIIAGGGLTGLTTAARLTENPDITVLVIESGSYESDRGPIIEDLNAYGKIFGSSVDHAYETVELFTNNQTALIRAGNGLGGSTLVNGGTWTRPHKAQVDSWETVFGNEGWNWDSVAAYSLQAERARAPNAKQIAAGHYFNASCHGINGTVHAGPRDTGDDYSPIVKALMSAVEDRGVPTKKDLGCGDPHGVSMFPNTLHEDQVRSDAAREWLLPNYQRPNLQVLTGQYVGKVLLSQNATTPRAVGVEFGTHKSNTHNVYAKHEVLLAAGSAVSPTILEYSGIGMKSILEPLGIDTVVDLPVGLNLQDQTTSTVRSRITSAGAGQGQAAWFATFNETFGDYAEKAHELLNTKLEQWAEEAVARGGFHNTTALLIQYENYRDWIVKDNVAYSELFLDTAGVASFDVWDLLPFTRGYVHILDKDPYLRHFAYDPQYFLNELDLLGQAAATQLARNISNSGAMQTYFAGETIPGDNLAYDADLSAWVEYIAYNFRPNYHGVGTCSMMPKEMGGVVDNAARVYGVQGLRVIDGSIPPTQMSSHVMTVFYAMALKIADAILADYASMQ

SEQ ID NO: 619 - protein, 583 aa, Aspergillus niger
SNGIEASLLKDPKEVAGRTYDYIIAGGGLTGLTVAARLTENPNITVLVIESGSYESDRGPIIEDLNAYGDIFGSSVDHAYETVELATNNQTALIRSGNGLGGSTLINGGTWTRPHKAQVDSWETVFGNEGWNWDSVAAYSLQAERARAPNAKQIAAGHYFNASCHGINGTVHAGPRDTGDDYSPIVKALMSAVEDRGVPTKKDLGCGDPHGVSMFPNTLHPDQVRSDAAREWLLPNYQRPNLQVLTGQYVGKVLLSQNATTPRAVGVEFGTHKGNTHNVYAKHEVLLAAGSAVSPTILEYSGIGMKSILEPLGIDTVVDLPVGLNLQDQTTSTVRSRITPAGAGQGQAAWFATFNETFGDYAEKAHELLNTKLEQWAEEAVARGGFHNTTALLIQYENYRDWIVKDNVAYSELFLDTAGVASFDVWDLLPFTRGYVHILDKDPYLRHFAYDPQYFLNELDLLGQAAATQLARNISNSGAMQTYFAGETIPGDNLAYDADLSAWVEYIPENFRPNYHGVGTCSMMPKEMGGVVDNAARVYGVQGLRVIDGSIPPTQMSSHVMTVFYAMALKIADAILADYASMQ

SEQ ID NO: 620 - protein, 583 aa, Aspergillus niger
SNGIEASLLKDPKEVAGRTYDYIIAGGGLTGLTVAARLTENPNITVLVIESGSYESDRGPIIEDLNAYGDIFGSSVDHAYETVELATNNRTALIRSGNGLGGSTLINGGTWTRPHKAQVDSWETVFGNEGWNWDSVAAYSLQAERARAPNAKQIAAGHYFNASCHGINGTVHAGPRDTGDDYSPIVKALMSAVEDRGVPTKKDLGCGDPHGVSMFPNTLHEDQVRSDAAREWLLPNYQRPNLQVLTGQYVGKVLLSQNATTPRAVGVEFGTHKGNTHNVYAKHEVLLAAGSAVSPTILEYSGIGMKSILEPLGIDTVVDLPVGLNLQDQTTSTVRSRITSAGAGQGQAAWFATFNETFGDYAEKAHELLNTKLEQWAEEAVARGGFHNTTALLIQYENYRDWIVKDNVAYSELFLDTAGVASFDVWDLLPFTRGYVHILDKDPYLRHFAYDPQYFLNELDLLGQAAATQLARNISNSGAMQTYFAGETIPGDNLAYDADLSAWVEYIPENFRPNYHGVGTCSMMPKEMGGVVDNAARVYGVQGLRVIDGSIPPTQLSSHVMTVFYAMALKIADAILADYASMQ

SEQ ID NO: 621 - protein, 583 aa, Aspergillus niger
SNGIEASLLKDPKEVAGRTYDYIIAGGGLTGLTVAARLTENPNITVLVIESGSYESDRGPIIEDLNAYGDIFGSSVDHAYETVELATNNQTALIRSGNGLGGSTLINGGTWTRPHKAQVDSWETVFGNEGWNWDSVAAYSLQAERARAPNAKQIAAGHYFNPSCHGINGTVHAGPRDTGDDYSPIVKALMSAVEDRGVPTKKDLGCGDPHGVSMFPNTLHEDQVRSDAAREWLLPNYQRPNLQVLTGQYVGKVLLSQNATTPRAVGVEFGTHKGNTHNVYAKHEVLLAAGSAVSPTILEYSGIGMKSILEPLGIDTVVDLPVGLNLQDQTTSTVRSRITSAGAGQGQAAWFATFNETFGDYAEKAHELLNTKLEQWAEEAVARGGFHNTTALLIQYENYRDWIVKDNVAYSELFLDTAGVASFDVWDLLPFTRGYVHILDKDPYLRHFAYDPQYFLNELDLLGQAAATQLARNISNSGAMQTYFAGETIPGDNLAYDADLSAWVEYIPENFRPNYHGVGTCSMMPKEMGGVVDNAARVYGVQGLRVIDGSIPPTQMSSHVMTVFYAMALKIADAVLADYASMQ

SEQ ID NO: 622 - protein, 583 aa, Aspergillus niger
SNGIEASLLKDPKEVAGRTYDYIIAGGGLTGLTVAARLTENPNITVLVIESGSYESDRGPIIEDLNAYGDIFGSSVDHAYETVELPTNNQTALIRSGNGLGGSTLINGGTWTRPHKAQVDSWETVFGNEGWNWDSVAAYSLQAERARAPNAKQIAAGHYFNASCHGLNGTVHAGPRDTGDDYSPIVKALMSAVEDRGVPTKKDLGCGDPHGVSMFPNTLHEDQVRSDAAREWLLPNYQRPNLQVLTGQYVGKVLLSQNATTPRAVGVEFGTHKGNTHNVYAKHEVLLAAGSAVSPTILEYSGIGMKSILEPLGIDTVVDLPVGLNLQDQTTSTVRSRITPAGAGQGQAAWFATFNETFGDYTEKAHELLNTKLEQWAEEAVARGGFHNTTALLIQYENYRDWIVKDNVAYSELFLDTAGVASFDVWDLLPFTRGYVHILDKDPYLRHFAYDPQYFLNELDLLGQAAATQLARNISNSGAMQTYFAGETIPGDNLAYDADLSAWVEYIPENFRPNYHGVGTCSMMPKEMGGVVDNAARVYGVQGLRVIDGSIPPTQMSSHVMTVFYAMALKIADAILADYASMQ

SEQ ID NO: 623 - protein, 583 aa, Aspergillus niger
SNGIEASLLKDPKEVAGRTYDYIIAGGGLTGLTVAARLTENPNITVLVIESGSYESDRGPIIEDLNAYGDIFGSSVDHAYETVELATNNQTALIRSGNGLGGSTLINGGTWTRPHKAQVDSWETVFGNEGWNWDSVAAYSLQAERARAPNAKQIAAGHYFNPSCHGINGTVHAGPRDTGDDYSPIVKALMSAVEDRGVPTKKDLGCGDPHGVSMFPNTLHEDQVRSDAAREWLLPNYQRPNLQVLTGQYVGKVLLSQNATTPRAVGVEFGTHKGNTHNVYAKHEVLLAAGSAVSPTILEYSGIGMKSILEPLGIDTVVDLPVGLNLQDQTTSTVRSRITSAGAGQGQAAWFATFNETFGDYAEKAHELLNTKLEQWAEEAVARGGFHNTTALLIQYENYRDWIVKDNVAYSELFLDTAGVASFDVWDLLPFTRGYVHILDKDPYLRHFAYDPQYFLNELDLLGQAAATQLARNISNSGAMQTYFAGETIPGDNLAYDADLRAWVEYIPENFRPNYHGVGTCSMMPKEMGGVVDNAARVYGVQGLRVIDGSIPPTQMSSHVMTVFYAMALKIADAILADYASMQ

SEQ ID NO: 624 - protein, 583 aa, Aspergillus niger
SNGIEASLLKDPKEVAGRTYDYIIAGGGLTGLTVAARLTENPNITVLVIESGSYESDRGPIIEDLNAYGDIFGSSVDHAYETVELATNNRTALIRSGNGLGGSTLINGGTWTRPHKAQVDSWETVFGNEGWNWDSVAAYSLQAERARAPNAKQIAAGHYFNASCHGLNGTVHAGPRDTGDDYSPIVKALMSAVEDRGVPTKKDLGCGDPHGVSMFPNTLHEDQVRSDAAREWLLPNYQRPNLQVLTGRYVGKVLLSQNATTPRAVGVEFGTHKGNTHNVYAKHEVLLAAGSAVSPTILEYSGIGMKSILEPLGIDTVVDLPVGLNLQDQTTSTVRSRITSAGAGQGQAAWFATFNETFGDYAEKAHELLNTKLEQWAEEAVARGGFHNTTALLIQYENYRDWIVKDNVAYSELFLDTAGVASFDVWDLLPFTRGYVHILDKDPYLRHFAYDPQYFLNELDLLGQAAATQLARNISNSGAMQTYFAGETIPGDNLAYDADLSAWVEYIPENFRPNYHGVGTCSMMPKEMGGVVDNAARVYGVQGLRVIDGSIPPTQMSSHVMTVFYAMALKIADAILADYASMQ

SEQ ID NO: 625 - protein, 583 aa, Aspergillus niger
SNGIEASLLKDPKEVAGRTYDYIIAGGGLTGLTVAARLTENPNITVLVIESGSYESDRGPIIEDLNAYGDIFGSSVDHAYETVELATNNQTALIRSGNGLGGSTLINGGTWTRPHKAQVDSWETVFGNEGWNWDSVAAYSLQAERARAPNAKQIAAGHYFNPSCHGINGTVHAGPRDTGDDYSPIVKALMSAVEDRGVPTKKDLGCGDPHGVSMFPNTLHEDQVRSDAAREWLLPNYQRPNLQVLTGQYVGKVLLSQNATTPRAVGVEFGTHKGNTHNVYAKHEVLLAAGSAVSPTILEYSGIGMKSILEPLGIDTVVDLPVGLNLQDQTTSTVRSRITSAGAGQGQAAWFATFNETFGDYAEKAHELLNTKLEQWAEEAVARGGFHNTTALLIQYENYRDWIVKDNVAYSELFLDTAGVASFDVWDLLPFTRGYVHILDKDPYLRHFAYDPQYFLNELDLLGQAAATQLARNISNSGAMQTYFAGETIPGDNLAYDADLSAWVEYIPENFRPNYHGVGTCSMMPKEMGGVVDNAARVYGVQGLRVIDGSIPPTQLSSHVMTVFYAMALKIADAILADYASMQ

SEQ ID NO: 626 - protein, 583 aa, Aspergillus niger
SNGIEASLLKDPKEVAGRTYDYIIAGGGLTGLTVAAKLTENPNITVLVIESGSYESDRGPIIEDLNAYGDIFGSSVDHAYETVELATNNQTALIRSGNGLGGSTLINGGTWTRPHKAQVDSWETVFGNEGWNWDSVAAYSLQAERARAPNAKQIAAGHYFNASCHGINGTVHAGPRDTGDDYSPIVKALMSAVEDRGVPTKKDLGCGDPHGVSMFPNTLHEDQVRSDAAREWLLPNYQRPNLQVLTGQYVGKVLLSQNATTPRAVGVEFGTHKGNTHNVYAKHEVLLAAGSAVSPTILEYSGIGMKSILEPLGIDTVVDLPVGLNLQDQTTSTVRSRITSAGAGQGQAAWFATFNETFGDYAEKAHELLNTKLEQWAEEAVARGGFHNTTALLIQYENYRDWIVKDNVAYSELFLDTAGVASFDVWDLLPFTRGYVHILDKDPYLRHFAYDPQYFLNELDLLGQAAATQLARNISNSGAMQTYFAGETIPGDNLAYDADLSAWVEYIPENFRPNYHGVGTCSMMPKEMGGVVDNAARVYGVQGLRVIDGSIPPTQMSSHVMTVFYAMALKIADAVLADYASMQ

SEQ ID NO: 627 - protein, 583 aa, Aspergillus niger
SNGIEASLLKDPKEVAGRTYDYIIAGGGLTGLTVAARLTENPNITVLVIESGSYESDRGPIIEDLNAYGDIFGSSVDHAYETVELATNNRTALIRSGNGLGGSTLINGGTWTRPHKAQVDSWETVFGNEGWNWDSVAAYSLQAERARAPNAKQIAAGHYFNPSCHGINGTVHAGPRDTGDDYSPIVKALMSAVEDRGVPTKKDLGCGDPHGVSMFPNTLHEDQVRSDAAREWLLPNYQRPNLQVLTGQYVGKVLLSQNATTPRAVGVEFGTHKGNTHNVYAKHEVLLAAGSAVSPTILEYSGIGMKSILEPLGIDTVVDLPVGLNLQDQTTSTVRSRITSAGAGQGQAAWFATFNETFGDYAEKAHELLNTKLEQWAEEAVARGGFHNTTALLIQYENYRDWIVKDNVAYSELFLDTAGVASFDVWDLLPFTRGYVHILDKDPYLRHFAYDPQYFLNELDLLGQAAATQLARNISNSGAMQTYFAGETIPGDNLAYDADLSAWVEYIPENFRPNYHGVGTCSMMPKEMGGVVDNAARVYGVQGLRVIDGSIPPTQMSSHVMTVFYAMALKIADAILADYASMQ

SEQ ID NO: 628 - protein, 583 aa, Aspergillus niger
SNGIEASLLKDPKEVAGRTYDYIIAGGGLTGLTVAARLTENPNITVLVIESGSYESDRGPIIEDLNAYGDIFGSSVDHAYETVELATNNRTALIRSGNGLGGSTLINGGTWTRPHKAQVDSWETVFGNEGWNWDSVAAYSLQAERARAPNAKQIAAGHYFNASCHGINGTVHAGPRDTGDDYSPIVKALMSAVEDRGVPTKKDLGCGDPHGVSMFPNTLHEDQVRSDAAREWLLPNYQRPNLQVLTGQYVGKVLLSQNATTPRAVGVEFGTHKGNTHNVYAKHEVLLAAGSAVSPTILEYSGIGMKSILEPLGIDTVVDLPVGLNLQDQTTSTVRSRITSAGAGQGQAAWFATFNETFGDYAEKAHELLNTKLEQWAEEAVARGGFHNTTALLIQYENYRDWIVKDNVAYSELFLDTAGVASFDVWDLLPFTRGYVHILDKDPYLRHFAYDPQYFLNELDLLGQAAATQLARNISNSGAMQTYFAGETIPGDNLAYDADLRAWVEYIPENFRPNYHGVGTCSMMPKEMGGVVDNAARVYGVQGLRVIDGSIPPTQMSSHVMTVFYAMALKIADAILADYASMQ

SEQ ID NO: 629 - protein, 583 aa, Aspergillus niger
SNGIEASLLKDPKEVAGRTYDYIIAGGGLTGLTVAARLTENPNITVLVIESGSYESDRGPIIEDLNAYGDIFGSSVDHAYETVELATNNQTALIRSGNGLGGSTLINGGTWTRPHKAQVDSWETVFGNEGWNWDSVAAYSLQAERARAPNAKQIAAGHYFNPSCHGINGTVHAGPRDTGDDYSPIVKALMSAVEDRGVPTKKDLGCGDPHGVSMFPNTLHEDQVRSDAAREWLLPNYQRPNLQVLTGQYVGKVLLSQNATTPRAVGVEFGTHKGNTHNVYAKHEVLLAAGSAVSPTILEYSGIGMKSILEPLGIDTVVDLPVGLNLQDQTTSTVRSRITPAGAGQGQAAWFATFNETFGDYAEKAHELLNTKLEQWAEEAVARGGFHNTTALLIQYENYRDWIVKDNVAYSELFLDTAGVASFDVWDLLPFTRGYVHILDKDPYLRHFAYDPQYFLNELDLLGQAAATQLARNISNSGAMQTYFAGETIPGDNLAYDADLSAWVEYIPENFRPNYHGVGTCSMMPKEMGGVVDNAARVYGVQGLRVIDGSIPPTQMSSHVMTVFYAMALKIADAILADYASMQ

SEQ ID NO: 630 - protein, 583 aa, Aspergillus niger
SNGIEASLLKDPKEVAGRTYDYIIAGGGLTGLTVAARLTENPNITVLVIESGSYESDRGPIIEDLNAYGDIFGSSVDHAYETVELATNNQTALIRSGNGLGGSTLINGGTWTRPHKAQVDSWETVFGNEGWNWDSVAAYSLQAERARAPNAKQIAAGHYFNASCHGINGTVHAGPRDTGDDYSPIVKALMSAVEDRGVPTKKDLGCGDPHGVSMFPNTLHEDQVRSDAAREWLLPNYQRPNLQVLTGQYVGKVLLSQNATTPRAVGVEFGTHKGNTHNVYAKHEVLLAAGSAVSPTILEYSGIGMKSILEPLGIDTVVDLPVGLNLQDQTTSTVRSRITPAGAGQGQAAWFATFNETFGDYTEKAHELLNTKLEQWAEEAVARGGFHNTTALLIQYENYRDWIVKDNVAYSELFLDTAGVASFDVWDLLPFTRGYVHILDKDPYLRHFAYDPQYFLNELDLLGQAAATQLARNISNSGAMQTYFAGETIPGDNLAYDADLRAWVEYIPENFRPNYHGVGTCSMMPKEMGGVVDNAARVYGVQGLRVIDGSIPPTQMSSHVMTVFYAMALKIADAILADYASMQ

SEQ ID NO: 631 - protein, 583 aa, Aspergillus niger
SNGIEASLLKDPKEVAGRTYDYIIAGGGLTGLTVAARLTENPNITVLVIESGSYESDRGPIIEDLNAYGDIFGSSVDHAYETVELATNNRTALIRSGNGLGGSTLINGGTWTRPHKAQVDSWETVFGNEGWNWDSVAAYSLQAERARAPNAKQIAAGHYFNASCHGINGTVHAGPRDTGDDYSPIVKALMSAVEDRGVPTKKDLGCGDPHGVSMFPNTLHEDQVRSDAAREWLLPNYQRPNLQVLTGRYVGKVLLSQNATTPRAVGVEFGTHKGNTHNVYAKHEVLLAAGSAVSPTILEYSGIGMKSILEPLGIDTVVDLPVGLNLQDQTTSTVRSRITSAGAGQGQAAWFATFNETFGDYAEKAHELLNTKLEQWAEEAVARGGFHNTTALLIQYENYRDWIVKDNVAYSELFLDTAGVASFDVWDLLPFTRGYVHILDKDPYLRHFAYDPQYFLNELDLLGQAAATQLARNISNSGAMQTYFAGETIPGDNLAYDADLSAWVEYIPENFRPNYHGVGTCSMMPKEMGGVVDNAARVYGVQGLRVIDGSIPPTQMSSHVMTVFYAMALKIADAILADYASMQ

SEQ ID NO: 632 - protein, 583 aa, Aspergillus niger
SNGIEASLLKDPKEVAGRTYDYIIAGGGLTGLTVAAKLTENPNITVLVIESGSYESDRGPIIEDLNAYGDIFGSSVDHAYETVELATNNQTALIRSGNGLGGSTLINGGTWTRPHKAQVDSWETVFGNEGWNWDSVAAYSLQAERARAPNAKQIAAGHYFNASCHGLNGTVHAGPRDTGDDYSPIVKALMSAVEDRGVPTKKDLGCGDPHGVSMFPNTLHEDQVRSDAAREWLLPNYQRPNLQVLTGQYVGKVLLSQNATTPRAVGVEFGTHKGNTHNVYAKHEVLLAAGSAVSPTILEYSGIGMKSILEPLGIDTVVDLPVGLNLQDQTTSTVRSRITSAGAGQGQAAWFATFNETFGDYTEKAHELLNTKLEQWAEEAVARGGFHNTTALLIQYENYRDWIVKDNVAYSELFLDTAGVASFDVWDLLPFTRGYVHILDKDPYLRHFAYDPQYFLNELDLLGQAAATQLARNISNSGAMQTYFAGETIPGDNLAYDADLSAWVEYIPENFRPNYHGVGTCSMMPKEMGGVVDNAARVYGVQGLRVIDGSIPPTQLSSHVMTVFYAMALKIADAILADYASMQ

SEQ ID NO: 633 - protein, 583 aa, Aspergillus niger
SNGIEASLLKDPKEVAGRTYDYIIAGGGLTGLTVAAKLTENPNITVLVIESGSYESDRGPIIEDLNAYGDIFGSSVDHAYETVELPTNNQTALIRSGNGLGGSTLINGGTWTRPHKAQVDSWETVFGNEGWNWDSVAAYSLQAERARAPNAKQIAAGHYFNASCHGINGTVHAGPRDTGDDYSPIVKALMSAVEDRGVPTKKDLGCGDPHGVSMFPNTLHEDQVRSDAAREWLLPNYQRPNLQVLTGQYVGKVLLSQNATTPRAVGVEFGTHKGNTHNVYAKHEVLLAAGSAVSPTILEYSGIGMKSILEPLGIDTVVDLPVGLNLQDQTTSTVRSRITSAGAGQGQAAWFATFNETFGDYAEKAHELLNTKLEQWAEEAVARGGFHNTTALLIQYENYRDWIVKDNVAYSELFLDTAGVASFDVWDLLPFTRGYVHILDKDPYLRHFAYDPQYFLNELDLLGQAAATQLARNISNSGAMQTYFAGETIPGDNLAYDADLSAWVEYIPENFRPNYHGVGTCSMMPKEMGGVVDNAARVYGVQGLRVIDGSIPPTQMSSHVMTVFYAMALKIADAILADYASMQ

SEQ ID NO: 634 - protein, 583 aa, Aspergillus niger
SNGIEASLLKDPKEVAGRTYDYIIAGGGLTGLTVAARLTENPNITVLVIESGSYESDRGPIIEDLNAYGDIFGSSVDHAYETVELATNNRTALIRSGNGLGGSTLINGGTWTRPHKAQVDSWETVFGNEGWNWDSVAAYSLQAERARAPNAKQIAAGHYFNASCHGLNGTVHAGPRDTGDDYSPIVKALMSAVEDRGVPTKKDLGCGDPHGVSMFPNTLHEDQVRSDAAREWLLPNYQRPNLQVLTGQYVGKVLLSQNATTPRAVGVEFGTHKGNTHNVYAKHEVLLAAGSAVSPTILEYSGIGMKSILEPLGIDTVVDLPVGLNLQDQTTSTVRSRITPAGAGQGQAAWFATFNETFGDYTEKAHELLNTKLEQWAEEAVARGGFHNTTALLIQYENYRDWIVKDNVAYSELFLDTAGVASFDVWDLLPFTRGYVHILDKDPYLRHFAYDPQYFLNELDLLGQAAATQLARNISNSGAMQTYFAGETIPGDNLAYDADLSAWVEYIPENFRPNYHGVGTCSMMPKEMGGVVDNAARVYGVQGLRVIDGSIPPTQMSSHVMTVFYAMALKIADAILADYASMQ

SEQ ID NO: 635 - protein, 583 aa, Aspergillus niger
SNGIEASLLKDPKEVAGRTYDYIIAGGGLTGLTVAARLTENPNITVLVIESGSYESDRGPIIEDLNAYGDIFGSSVDHAYETVELATNNRTALIRSGNGLGGSTLINGGTWTRPHKAQVDSWETVFGNEGWNWDSVAAYSLQAERARAPNAKQIAAGHYFNASCHGINGTVHAGPRDTGDDYSPIVKALMSAVEDRGVPTKKDLGCGDPHGVSMFPNTLHEDQVRSDAAREWLLPNYQRPNLQVLTGQYVGKVLLSQNATTPRAVGVEFGTHKGNTHNVYAKHEVLLAAGSAVSPTILEYSGIGMKSILEPLGIDTVVDLPVGLNLQDQTTSTVRSRITSAGAGQGQAAWFATFNETFGDYTEKAHELLNTKLEQWAEEAVARGGFHNTTALLIQYENYRDWIVKDNVAYSELFLDTAGVASFDVWDLLPFTRGYVHILDKDPYLRHFAYDPQYFLNELDLLGQAAATQLARNISNSGAMQTYFAGETIPGDNLAYDADLRAWVEYIPENFRPNYHGVGTCSMMPKEMGGVVDNAARVYGVQGLRVIDGSIPPTQMSSHVMTVFYAMALKIADAILADYASMQ

SEQ ID NO: 636 - protein, 583 aa, Aspergillus niger
SNGIEASLLKDPKEVAGRTYDYIIAGGGLTGLTVAARLTENPNITVLVIESGSYESDRGPIIEDLNAYGDIFGSSVDHAYETVELATNNQTALIRSGNGLGGSTLINGGTWTRPHKAQVDSWETVFGNEGWNWDSVAAYSLQAERARAPNAKQIAAGHYFNASCHGINGTVHAGPRDTGDDYSPIVKALMSAVEDRGVPTKKDLGCGDPHGVSMFPNTLHPDQVRSDAAREWLLPNYQRPNLQVLTGQYVGKVLLSQNATTPRAVGVEFGTHKGNTHNVYAKHEVLLAAGSAVSPTILEYSGIGMKSILEPLGIDTVVDLPVGLNLQDQTTSTVRSRITSAGAGQGQAAWFATFNETFGDYAEKAHELLNTKLEQWAEEAVARGGFHNTTALLIQYENYRDWIVKDNVAYSELFLDTAGVASFDVWDLLPFTRGYVHILDKDPYLRHFAYDPQYFLNELDLLGQAAATQLARNISNSGAMQTYFAGETIPGDNLAYDADLRAWVEYIPENFRPNYHGVGTCSMMPKEMGGVVDNAARVYGVQGLRVIDGSIPPTQMSSHVMTVFYAMALKIADAILADYASMQ

SEQ ID NO: 637 - protein, 583 aa, Aspergillus niger
SNGIEASLLKDPKEVAGRTYDYIIAGGGLTGLTVAARLTENPNITVLVIESGSYESDRGPIIEDLNAYGDIFGSSVDHAYETVELATNNRTALIRSGNGLGGSTLINGGTWTRPHKAQVDSWETVFGNEGWNWDSVAAYSLQAERARAPNAKQIAAGHYFNPSCHGLNGTVHAGPRDTGDDYSPIVKALMSAVEDRGVPTKKDLGCGDPHGVSMFPNTLHEDQVRSDAAREWLLPNYQRPNLQVLTGQYVGKVLLSQNATTPRAVGVEFGTHKGNTHNVYAKHEVLLAAGSAVSPTILEYSGIGMKSILEPLGIDTVVDLPVGLNLQDQTTSTVRSRITSAGAGQGQAAWFATFNETFGDYAEKAHELLNTKLEQWAEEAVARGGFHNTTALLIQYENYRDWIVKDNVAYSELFLDTAGVASFDVWDLLPFTRGYVHILDKDPYLRHFAYDPQYFLNELDLLGQAAATQLARNISNSGAMQTYFAGETIPGDNLAYDADLSAWVEYIPENFRPNYHGVGTCSMMPKEMGGVVDNAARVYGVQGLRVIDGSIPPTQMSSHVMTVFYAMALKIADAILADYASMQ

SEQ ID NO: 638 - protein, 583 aa, Aspergillus niger
SNGIEASLLKDPKEVAGRTYDYIIAGGGLTGLTVAAKLTENPNITVLVIESGSYESDRGPIIEDLNAYGDIFGSSVDHAYETVELATNNQTALIRSGNGLGGSTLINGGTWTRPHKAQVDSWETVFGNEGWNWDSVAAYSLQAERARAPNAKQIAAGHYFNASCHGINGTVHAGPRDTGDDYSPIVKALMSAVEDRGVPTKKDLGCGDPHGVSMFPNTLHPDQVRSDAAREWLLPNYQRPNLQVLTGQYVGKVLLSQNATTPRAVGVEFGTHKGNTHNVYAKHEVLLAAGSAVSPTILEYSGIGMKSILEPLGIDTVVDLPVGLNLQDQTTSTVRSRITSAGAGQGQAAWFATFNETFGDYAEKAHELLNTKLEQWAEEAVARGGFHNTTALLIQYENYRDWIVKDNVAYSELFLDTAGVASFDVWDLLPFTRGYVHILDKDPYLRHFAYDPQYFLNELDLLGQAAATQLARNISNSGAMQTYFAGETIPGDNLAYDADLSAWVEYIPENFRPNYHGVGTCSMMPKEMGGVVDNAARVYGVQGLRVIDGSIPPTQMSSHVMTVFYAMALKIADAILADYASMQ

SEQ ID NO: 639 - protein, 583 aa, Aspergillus niger
SNGIEASLLKDPKEVAGRTYDYIIAGGGLTGLTVAARLTENPNITVLVIESGSYESDRGPIIEDLNAYGDIFGSSVDHAYETVELATNNQTALIRSGNGLGGSTLINGGTWTRPHKAQVDSWETVFGNEGWNWDSVAAYSLQAERARAPNAKQIAAGHYFNPSCHGINGTVHAGPRDTGDDYSPIVKALMSAVEDRGVPTKKDLGCGDPHGVSMFPNTLHPDQVRSDAAREWLLPNYQRPNLQVLTGQYVGKVLLSQNATTPRAVGVEFGTHKGNTHNVYAKHEVLLAAGSAVSPTILEYSGIGMKSILEPLGIDTVVDLPVGLNLQDQTTSTVRSRITSAGAGQGQAAWFATFNETFGDYTEKAHELLNTKLEQWAEEAVARGGFHNTTALLIQYENYRDWIVKDNVAYSELFLDTAGVASFDVWDLLPFTRGYVHILDKDPYLRHFAYDPQYFLNELDLLGQAAATQLARNISNSGAMQTYFAGETIPGDNLAYDADLSAWVEYIPENFRPNYHGVGTCSMMPKEMGGVVDNAARVYGVQGLRVIDGSIPPTQMSSHVMTVFYAMALKIADAILADYASMQ

SEQ ID NO: 640 - protein, 583 aa, Aspergillus niger
SNGIEASLLKDPKEVAGRTYDYIIAGGGLTGLTVAARLTENPNITVLVIESGSYESDRGPIIEDLNAYGDIFGSSVDHAYETVELPTNNQTALIRSGNGLGGSTLINGGTWTRPHKAQVDSWETVFGNEGWNWDSVAAYSLQAERARAPNAKQIAAGHYFNPSCHGINGTVHAGPRDTGDDYSPIVKALMSAVEDRGVPTKKDLGCGDPHGVSMFPNTLHEDQVRSDAAREWLLPNYQRPNLQVLTGQYVGKVLLSQNATTPRAVGVEFGTHKGNTHNVYAKHEVLLAAGSAVSPTILEYSGIGMKSILEPLGIDTVVDLPVGLNLQDQTTSTVRSRITSAGAGQGQAAWFATFNETFGDYAEKAHELLNTKLEQWAEEAVARGGFHNTTALLIQYENYRDWIVKDNVAYSELFLDTAGVASFDVWDLLPFTRGYVHILDKDPYLRHFAYDPQYFLNELDLLGQAAATQLARNISNSGAMQTYFAGETIPGDNLAYDADLSAWVEYIPENFRPNYHGVGTCSMMPKEMGGVVDNAARVYGVQGLRVIDGSIPPTQMSSHVMTVFYAMALKIADAILADYASMQ

SEQ ID NO: 641 - protein, 583 aa, Aspergillus niger
SNGIEASLLKDPKEVAGRTYDYIIAGGGLTGLTVAARLTENPNITVLVIESGSYESDRGPIIEDLNAYGDIFGSSVDHAYETVELATNNQTALIRSGNGLGGSTLINGGTWTRPHKAQVDSWETVFGNEGWNWDSVAAYSLQAERARAPNAKQIAAGHYFNASCHGINGTVHAGPRDTGDDYSPIVKALMSAVEDRGVPTKKDLGCGDPHGVSMFPNTLHPDQVRSDAAREWLLPNYQRPNLQVLTGQYVGKVLLSQNATTPRAVGVEFGTHKGNTHNVYAKHEVLLAAGSAVSPTILEYSGIGMKSILEPLGIDTVVDLPVGLNLQDQTTSTVRSRITSAGAGQGQAAWFATFNETFGDYAEKAHELLNTKLEQWAEEAVARGGFHNTTALLIQYENYRDWIVKDNVAYSELFLDTAGVASFDVWDLLPFTRGYVHILDKDPYLRHFAYDPQYFLNELDLLGQAAATQLARNISNSGAMQTYFAGETIPGDNLAYDADLSAWVEYIPENFRPNYHGVGTCSMMPKEMGGVVDNAARVYGVQGLRVIDGSIPPTQMSSHVMTVFYAMALKIADAVLADYASMQ

SEQ ID NO: 642 - protein, 583 aa, Aspergillus niger
SNGIEASLLKDPKEVAGRTYDYIIAGGGLTGLTVAARLTENPNITVLVIESGSYESDRGPIIEDLNAYGDIFGSSVDHAYETVELPTNNRTALIRSGNGLGGSTLINGGTWTRPHKAQVDSWETVFGNEGWNWDSVAAYSLQAERARAPNAKQIAAGHYFNASCHGINGTVHAGPRDTGDDYSPIVKALMSAVEDRGVPTKKDLGCGDPHGVSMFPNTLHEDQVRSDAAREWLLPNYQRPNLQVLTGQYVGKVLLSQNATTPRAVGVEFGTHKGNTHNVYAKHEVLLAAGSAVSPTILEYSGIGMKSILEPLGIDTVVDLPVGLNLQDQTTSTVRSRITSAGAGQGQAAWFATFNETFGDYAEKAHELLNTKLEQWAEEAVARGGFHNTTALLIQYENYRDWIVKDNVAYSELFLDTAGVASFDVWDLLPFTRGYVHILDKDPYLRHFAYDPQYFLNELDLLGQAAATQLARNISNSGAMQTYFAGETIPGDNLAYDADLSAWVEYIPENFRPNYHGVGTCSMMPKEMGGVVDNAARVYGVQGLRVIDGSIPPTQMSSHVMTVFYAMALKIADAILADYASMQ

SEQ ID NO: 643 - protein, 583 aa, Aspergillus niger
SNGIEASLLKDPKEVAGRTYDYIIAGGGLTGLTVAARLTENPNITVLVIESGSYESDRGPIIEDLNAYGDIFGSSVDHAYETVELPTNNQTALIRSGNGLGGSTLINGGTWTRPHKAQVDSWETVFGNEGWNWDSVAAYSLQAERARAPNAKQIAAGHYFNASCHGINGTVHAGPRDTGDDYSPIVKALMSAVEDRGVPTKKDLGCGDPHGVSMFPNTLHEDQVRSDAAREWLLPNYQRPNLQVLTGQYVGKVLLSQNATTPRAVGVEFGTHKGNTHNVYAKHEVLLAAGSAVSPTILEYSGIGMKSILEPLGIDTVVDLPVGLNLQDQTTSTVRSRITSAGAGQGQAAWFATFNETFGDYTEKAHELLNTKLEQWAEEAVARGGFHNTTALLIQYENYRDWIVKDNVAYSELFLDTAGVASFDVWDLLPFTRGYVHILDKDPYLRHFAYDPQYFLNELDLLGQAAATQLARNISNSGAMQTYFAGETIPGDNLAYDADLRAWVEYIPENFRPNYHGVGTCSMMPKEMGGVVDNAARVYGVQGLRVIDGSIPPTQMSSHVMTVFYAMALKIADAILADYASMQ

SEQ ID NO: 644 - protein, 583 aa, Aspergillus niger
SNGYEASLLTDPKEVAGRTVDYIIAGGGLTGLTTAARLTENPDITVLVIESGSYESDRGPIIEDLNAYGQIFGSSVDHAYETVELQTNNQTALIRAGNGLGGSTLVNGGTWTRPHKAQVDSWETVFGNEGWNWDSVAAYSLQAERARAPNAKQIAAGHYFNASCHGINGTVHAGPRDTGDDYSPIVKALMSAVEDRGVPTKKDLGCGDPHGVSMFPNTLHEDQVRSDAAREWLLPNYQRPNLQVLTGQYVGKVLLSQNATTPRAVGVEFGTHKHNTHNVYAKHEVLLAAGSAVSPTILEYSGIGMKSILEPLGIDTVVDLPVGLNLQDQTTSTVRSRITSAGAGQGQAAWFATFNETFGDYAEKAHELLNTKLEQWAEEAVARGGFHNTTALLIQYENYRDWIVKDNVAYSELFLDTAGVASFDVWDLLPFTRGYVHILDKDPYLRHFAYDPQYFLNELDLLGQAAATQLARNISNSGAMQTYFAGETIPGDNLAYDADLSAWVEYICYNFRPNYHGVGTCSMMPKEMGGVVDNAARVYGVQGLRVIDGSIPPTQMSSHVMTVFYAMALKIADAILADYASMQ

SEQ ID NO: 645 - protein, 583 aa, Aspergillus niger
SNGIEASLLKDPKEVAGRTYDYIIAGGGLTGLTVAARLTENPNITVLVIESGSYESDRGPIIEDLNAYGDIFGSSVDHAYETVELPTNNQTALIRSGNGLGGSTLINGGTWTRPHKAQVDSWETVFGNEGWNWDSVAAYSLQAERARAPNAKQIAAGHYFNPSCHGLNGTVHAGPRDTGDDYSPIVKALMSAVEDRGVPTKKDLGCGDPHGVSMFPNTLHEDQVRSDAAREWLLPNYQRPNLQVLTGQYVGKVLLSQNATTPRAVGVEFGTHKGNTHNVYAKHEVLLAAGSAVSPTILEYSGIGMKSILEPLGIDTVVDLPVGLNLQDQTTSTVRSRITSAGAGQGQAAWFATFNETFGDYAEKAHELLNTKLEQWAEEAVARGGFHNTTALLIQYENYRDWIVKDNVAYSELFLDTAGVASFDVWDLLPFTRGYVHILDKDPYLRHFAYDPQYFLNELDLLGQAAATQLARNISNSGAMQTYFAGETIPGDNLAYDADLSAWVEYIPENFRPNYHGVGTCSMMPKEMGGVVDNAARVYGVQGLRVIDGSIPPTQMSSHVMTVFYAMALKIADAILADYASMQ

SEQ ID NO: 646 - protein, 583 aa, Aspergillus niger
SNGIEASLLKDPKEVAGRTYDYIIAGGGLTGLTVAARLTENPNITVLVIESGSYESDRGPIIEDLNAYGDIFGSSVDHAYETVELATNNRTALIRSGNGLGGSTLINGGTWTRPHKAQVDSWETVFGNEGWNWDSVAAYSLQAERARAPNAKQIAAGHYFNASCHGINGTVHAGPRDTGDDYSPIVKALMSAVEDRGVPTKKDLGCGDPHGVSMFPNTLHPDQVRSDAAREWLLPNYQRPNLQVLTGQYVGKVLLSQNATTPRAVGVEFGTHKGNTHNVYAKHEVLLAAGSAVSPTILEYSGIGMKSILEPLGIDTVVDLPVGLNLQDQTTSTVRSRITSAGAGQGQAAWFATFNETFGDYTEKAHELLNTKLEQWAEEAVARGGFHNTTALLIQYENYRDWIVKDNVAYSELFLDTAGVASFDVWDLLPFTRGYVHILDKDPYLRHFAYDPQYFLNELDLLGQAAATQLARNISNSGAMQTYFAGETIPGDNLAYDADLSAWVEYIPENFRPNYHGVGTCSMMPKEMGGVVDNAARVYGVQGLRVIDGSIPPTQMSSHVMTVFYAMALKIADAILADYASMQ

SEQ ID NO: 647 - protein, 583 aa, Aspergillus niger
SNGIEASLLKDPKEVAGRTYDYIIAGGGLTGLTVAARLTENPNITVLVIESGSYESDRGPIIEDLNAYGDIFGSSVDHAYETVELATNNQTALIRSGNGLGGSTLINGGTWTRPHKAQVDSWETVFGNEGWNWDSVAAYSLQAERARAPNAKQIAAGHYFNASCHGINGTVHAGPRDTGDDYSPIVKALMSAVEDRGVPTKKDLGCGDPHGVSMFPNTLHPDQVRSDAAREWLLPNYQRPNLQVLTGQYVGKVLLSQNATTPRAVGVEFGTHKGNTHNVYAKHEVLLAAGSAVSPTILEYSGIGMKSILEPLGIDTVVDLPVGLNLQDQTTSTVRSRITPAGAGQGQAAWFATFNETFGDYTEKAHELLNTKLEQWAEEAVARGGFHNTTALLIQYENYRDWIVKDNVAYSELFLDTAGVASFDVWDLLPFTRGYVHILDKDPYLRHFAYDPQYFLNELDLLGQAAATQLARNISNSGAMQTYFAGETIPGDNLAYDADLSAWVEYIPENFRPNYHGVGTCSMMPKEMGGVVDNAARVYGVQGLRVIDGSIPPTQMSSHVMTVFYAMALKIADAILADYASMQ

SEQ ID NO: 648 - protein, 583 aa, Aspergillus niger
SNGIEASLLKDPKEVAGRTYDYIIAGGGLTGLTVAARLTENPNITVLVIESGSYESDRGPIIEDLNAYGDIFGSSVDHAYETVELATNNQTALIRSGNGLGGSTLINGGTWTRPHKAQVDSWETVFGNEGWNWDSVAAYSLQAERARAPNAKQIAAGHYFNASCHGINGTVHAGPRDTGDDYSPIVKALMSAVEDRGVPTKKDLGCGDPHGVSMFPNTLHPDQVRSDAAREWLLPNYQRPNLQVLTGQYVGKVLLSQNATTPRAVGVEFGTHKGNTHNVYAKHEVLLAAGSAVSPTILEYSGIGMKSILEPLGIDTVVDLPVGLNLQDQTTSTVRSRITSAGAGQGQAAWFATFNETFGDYTEKAHELLNTKLEQWAEEAVARGGFHNTTALLIQYENYRDWIVKDNVAYSELFLDTAGVASFDVWDLLPFTRGYVHILDKDPYLRHFAYDPQYFLNELDLLGQAAATQLARNISNSGAMQTYFAGETIPGDNLAYDADLRAWVEYIPENFRPNYHGVGTCSMMPKEMGGVVDNAARVYGVQGLRVIDGSIPPTQMSSHVMTVFYAMALKIADAILADYASMQ

SEQ ID NO: 649 - protein, 583 aa, Aspergillus niger
SNGIEASLLKDPKEVAGRTYDYIIAGGGLTGLTVAARLTENPNITVLVIESGSYESDRGPIIEDLNAYGDIFGSSVDHAYETVELATNNQTALIRSGNGLGGSTLINGGTWTRPHKAQVDSWETVFGNEGWNWDSVAAYSLQAERARAPNAKQIAAGHYFNASCHGINGTVHAGPRDTGDDYSPIVKALMSAVEDRGVPTKKDLGCGDPHGVSMFPNTLHEDQVRSDAAREWLLPNYQRPNLQVLTGQYVGKVLLSQNATTPRAVGVEFGTHKGNTHNVYAKHEVLLAAGSAVSPTILEYSGIGMKSILEPLGIDTVVDLPVGLNLQDQTTSTVRSRITPAGAGQGQAAWFATFNETFGDYAEKAHELLNTKLEQWAEEAVARGGFHNTTALLIQYENYRDWIVKDNVAYSELFLDTAGVASFDVWDLLPFTRGYVHILDKDPYLRHFAYDPQYFLNELDLLGQAAATQLARNISNSGAMQTYFAGETIPGDNLAYDADLRAWVEYIPENFRPNYHGVGTCSMMPKEMGGVVDNAARVYGVQGLRVIDGSIPPTQMSSHVMTVFYAMALKIADAILADYASMQ

SEQ ID NO: 650 - protein, 583 aa, Aspergillus niger
SNGIEASLLKDPKEVAGRTYDYIIAGGGLTGLTVAAKLTENPNITVLVIESGSYESDRGPIIEDLNAYGDIFGSSVDHAYETVELATNNQTALIRSGNGLGGSTLINGGTWTRPHKAQVDSWETVFGNEGWNWDSVAAYSLQAERARAPNAKQIAAGHYFNPSCHGINGTVHAGPRDTGDDYSPIVKALMSAVEDRGVPTKKDLGCGDPHGVSMFPNTLHEDQVRSDAAREWLLPNYQRPNLQVLTGQYVGKVLLSQNATTPRAVGVEFGTHKGNTHNVYAKHEVLLAAGSAVSPTILEYSGIGMKSILEPLGIDTVVDLPVGLNLQDQTTSTVRSRITSAGAGQGQAAWFATFNETFGDYAEKAHELLNTKLEQWAEEAVARGGFHNTTALLIQYENYRDWIVKDNVAYSELFLDTAGVASFDVWDLLPFTRGYVHILDKDPYLRHFAYDPQYFLNELDLLGQAAATQLARNISNSGAMQTYFAGETIPGDNLAYDADLSAWVEYIPENFRPNYHGVGTCSMMPKEMGGVVDNAARVYGVQGLRVIDGSIPPTQMSSHVMTVFYAMALKIADAILADYASMQ

SEQ ID NO: 651 - protein, 583 aa, Aspergillus niger
SNGIEASLLKDPKEVAGRTYDYIIAGGGLTGLTVAARLTENPNITVLVIESGSYESDRGPIIEDLNAYGDIFGSSVDHAYETVELPTNNRTALIRSGNGLGGSTLINGGTWTRPHKAQVDSWETVFGNEGWNWDSVAAYSLQAERARAPNAKQIAAGHYFNASCHGINGTVHAGPRDTGDDYSPIVKALMSAVEDRGVPTKKDLGCGDPHGVSMFPNTLHEDQVRSDAAREWLLPNYQRPNLQVLTGQYVGKVLLSQNATTPRAVGVEFGTHKGNTHNVYAKHEVLLAAGSAVSPTILEYSGIGMKSILEPLGIDTVVDLPVGLNLQDQTTSTVRSRITSAGAGQGQAAWFATFNETFGDYTEKAHELLNTKLEQWAEEAVARGGFHNTTALLIQYENYRDWIVKDNVAYSELFLDTAGVASFDVWDLLPFTRGYVHILDKDPYLRHFAYDPQYFLNELDLLGQAAATQLARNISNSGAMQTYFAGETIPGDNLAYDADLSAWVEYIPENFRPNYHGVGTCSMMPKEMGGVVDNAARVYGVQGLRVIDGSIPPTQMSSHVMTVFYAMALKIADAILADYASMQ

SEQ ID NO: 652 - protein, 583 aa, Aspergillus niger
SNGIEASLLKDPKEVAGRTYDYIIAGGGLTGLTVAARLTENPNITVLVIESGSYESDRGPIIEDLNAYGDIFGSSVDHAYETVELPTNNQTALIRSGNGLGGSTLINGGTWTRPHKAQVDSWETVFGNEGWNWDSVAAYSLQAERARAPNAKQIAAGHYFNASCHGINGTVHAGPRDTGDDYSPIVKALMSAVEDRGVPTKKDLGCGDPHGVSMFPNTLHEDQVRSDAAREWLLPNYQRPNLQVLTGQYVGKVLLSQNATTPRAVGVEFGTHKGNTHNVYAKHEVLLAAGSAVSPTILEYSGIGMKSILEPLGIDTVVDLPVGLNLQDQTTSTVRSRITSAGAGQGQAAWFATFNETFGDYAEKAHELLNTKLEQWAEEAVARGGFHNTTALLIQYENYRDWIVKDNVAYSELFLDTAGVASFDVWDLLPFTRGYVHILDKDPYLRHFAYDPQYFLNELDLLGQAAATQLARNISNSGAMQTYFAGETIPGDNLAYDADLSAWVEYIPENFRPNYHGVGTCSMMPKEMGGVVDNAARVYGVQGLRVIDGSIPPTQLSSHVMTVFYAMALKIADAILADYASMQ

SEQ ID NO: 653 - protein, 583 aa, Aspergillus niger
SNGIEASLLKDPKEVAGRTYDYIIAGGGLTGLTVAARLTENPNITVLVIESGSYESDRGPIIEDLNAYGDIFGSSVDHAYETVELPTNNQTALIRSGNGLGGSTLINGGTWTRPHKAQVDSWETVFGNEGWNWDSVAAYSLQAERARAPNAKQIAAGHYFNASCHGINGTVHAGPRDTGDDYSPIVKALMSAVEDRGVPTKKDLGCGDPHGVSMFPNTLHEDQVRSDAAREWLLPNYQRPNLQVLTGQYVGKVLLSQNATTPRAVGVEFGTHKGNTHNVYAKHEVLLAAGSAVSPTILEYSGIGMKSILEPLGIDTVVDLPVGLNLQDQTTSTVRSRITSAGAGQGQAAWFATFNETFGDYAEKAHELLNTKLEQWAEEAVARGGFHNTTALLIQYENYRDWIVKDNVAYSELFLDTAGVASFDVWDLLPFTRGYVHILDKDPYLRHFAYDPQYFLNELDLLGQAAATQLARNISNSGAMQTYFAGETIPGDNLAYDADLRAWVEYIPENFRPNYHGVGTCSMMPKEMGGVVDNAARVYGVQGLRVIDGSIPPTQMSSHVMTVFYAMALKIADAILADYASMQ

SEQ ID NO: 654 - protein, 583 aa, Aspergillus niger
SNGIEASLLKDPKEVAGRTYDYIIAGGGLTGLTVAARLTENPNITVLVIESGSYESDRGPIIEDLNAYGDIFGSSVDHAYETVELPTNNQTALIRSGNGLGGSTLINGGTWTRPHKAQVDSWETVFGNEGWNWDSVAAYSLQAERARAPNAKQIAAGHYFNASCHGINGTVHAGPRDTGDDYSPIVKALMSAVEDRGVPTKKDLGCGDPHGVSMFPNTLHEDQVRSDAAREWLLPNYQRPNLQVLTGQYVGKVLLSQNATTPRAVGVEFGTHKGNTHNVYAKHEVLLAAGSAVSPTILEYSGIGMKSILEPLGIDTVVDLPVGLNLQDQTTSTVRSRITPAGAGQGQAAWFATFNETFGDYAEKAHELLNTKLEQWAEEAVARGGFHNTTALLIQYENYRDWIVKDNVAYSELFLDTAGVASFDVWDLLPFTRGYVHILDKDPYLRHFAYDPQYFLNELDLLGQAAATQLARNISNSGAMQTYFAGETIPGDNLAYDADLSAWVEYIPENFRPNYHGVGTCSMMPKEMGGVVDNAARVYGVQGLRVIDGSIPPTQMSSHVMTVFYAMALKIADAILADYASMQ

SEQ ID NO: 655 - protein, 583 aa, Aspergillus niger
SNGIEASLLKDPKEVAGRTYDYIIAGGGLTGLTVAARLTENPNITVLVIESGSYESDRGPIIEDLNAYGDIFGSSVDHAYETVELATNNQTALIRSGNGLGGSTLINGGTWTRPHKAQVDSWETVFGNEGWNWDSVAAYSLQAERARAPNAKQIAAGHYFNASCHGINGTVHAGPRDTGDDYSPIVKALMSAVEDRGVPTKKDLGCGDPHGVSMFPNTLHPDQVRSDAAREWLLPNYQRPNLQVLTGRYVGKVLLSQNATTPRAVGVEFGTHKGNTHNVYAKHEVLLAAGSAVSPTILEYSGIGMKSILEPLGIDTVVDLPVGLNLQDQTTSTVRSRITSAGAGQGQAAWFATFNETFGDYAEKAHELLNTKLEQWAEEAVARGGFHNTTALLIQYENYRDWIVKDNVAYSELFLDTAGVASFDVWDLLPFTRGYVHILDKDPYLRHFAYDPQYFLNELDLLGQAAATQLARNISNSGAMQTYFAGETIPGDNLAYDADLSAWVEYIPENFRPNYHGVGTCSMMPKEMGGVVDNAARVYGVQGLRVIDGSIPPTQMSSHVMTVFYAMALKIADAILADYASMQ

SEQ ID NO: 656 - protein, 583 aa, Aspergillus niger
SNGIEASLLKDPKEVAGRTYDYIIAGGGLTGLTVAARLTENPNITVLVIESGSYESDRGPIIEDLNAYGDIFGSSVDHAYETVELATNNQTALIRSGNGLGGSTLINGGTWTRPHKAQVDSWETVFGNEGWNWDSVAAYSLQAERARAPNAKQIAAGHYFNPSCHGINGTVHAGPRDTGDDYSPIVKALMSAVEDRGVPTKKDLGCGDPHGVSMFPNTLHEDQVRSDAAREWLLPNYQRPNLQVLTGRYVGKVLLSQNATTPRAVGVEFGTHKGNTHNVYAKHEVLLAAGSAVSPTILEYSGIGMKSILEPLGIDTVVDLPVGLNLQDQTTSTVRSRITSAGAGQGQAAWFATFNETFGDYAEKAHELLNTKLEQWAEEAVARGGFHNTTALLIQYENYRDWIVKDNVAYSELFLDTAGVASFDVWDLLPFTRGYVHILDKDPYLRHFAYDPQYFLNELDLLGQAAATQLARNISNSGAMQTYFAGETIPGDNLAYDADLSAWVEYIPENFRPNYHGVGTCSMMPKEMGGVVDNAARVYGVQGLRVIDGSIPPTQMSSHVMTVFYAMALKIADAILADYASMQ

SEQ ID NO: 657 - protein, 583 aa, Aspergillus niger
SNGIEASLLKDPKEVAGRTYDYIIAGGGLTGLTVAARLTENPNITVLVIESGSYESDRGPIIEDLNAYGDIFGSSVDHAYETVELATNNQTALIRSGNGLGGSTLINGGTWTRPHKAQVDSWETVFGNEGWNWDSVAAYSLQAERARAPNAKQIAAGHYFNASCHGINGTVHAGPRDTGDDYSPIVKALMSAVEDRGVPTKKDLGCGDPHGVSMFPNTLHPDQVRSDAAREWLLPNYQRPNLQVLTGQYVGKVLLSQNATTPRAVGVEFGTHKGNTHNVYAKHEVLLAAGSAVSPTILEYSGIGMKSILEPLGIDTVVDLPVGLNLQDQTTSTVRSRITSAGAGQGQAAWFATFNETFGDYAEKAHELLNTKLEQWAEEAVARGGFHNTTALLIQYENYRDWIVKDNVAYSELFLDTAGVASFDVWDLLPFTRGYVHILDKDPYLRHFAYDPQYFLNELDLLGQAAATQLARNISNSGAMQTYFAGETIPGDNLAYDADLSAWVEYIPENFRPNYHGVGTCSMMPKEMGGVVDNAARVYGVQGLRVIDGSIPPTQLSSHVMTVFYAMALKIADAILADYASMQ

SEQ ID NO: 658 - protein, 583 aa, Aspergillus niger
SNGYEASLLTDPKEVAGRTVDYIIAGGGLTGLTTAARLTENPDITVLVIESGSYESDRGPIIEDLNAYGQIFGSSVDHAYETVELQTNNQTALIRNGNGLGGSTLVNGGTWTRPHKAQVDSWETVFGNEGWNWDSVAAYSLQAERARAPNAKQIAAGHYFNASCHGINGTVHAGPRDTGDDYSPIVKALMSAVEDRGVPTKKDLGCGDPHGVSMFPNTLHEDQVRSDAAREWLLPNYQRPNLQVLTGQYVGKVLLSQNATTPRAVGVEFGTHKQNTHNVYAKHEVLLAAGSAVSPTILEYSGIGMKSILEPLGIDTVVDLPVGLNLQDQTTSTVRSRITSAGAGQGQAAWFATFNETFGDYAEKAHELLNTKLEQWAEEAVARGGFHNTTALLIQYENYRDWIVKDNVAYSELFLDTAGVASFDVWDLLPFTRGYVHILDKDPYLRHFAYDPQYFLNELDLLGQAAATQLARNISNSGAMQTYFAGETIPGDNLAYDADLSAWVEYIAYNFRPNYHGVGTCSMMPKEMGGVVDNAARVYGVQGLRVIDGSIPPTQMSSHVMTVFYAMALKIADAILADYASMQ

SEQ ID NO: 659 - protein, 583 aa, Aspergillus niger
SNGIEASLLKDPKEVAGRTYDYIIAGGGLTGLTVAARLTENPNITVLVIESGSYESDRGPIIEDLNAYGDIFGSSVDHAYETVELATNNRTALIRSGNGLGGSTLINGGTWTRPHKAQVDSWETVFGNEGWNWDSVAAYSLQAERARAPNAKQIAAGHYFNASCHGINGTVHAGPRDTGDDYSPIVKALMSAVEDRGVPTKKDLGCGDPHGVSMFPNTLHEDQVRSDAAREWLLPNYQRPNLQVLTGQYVGKVLLSQNATTPRAVGVEFGTHKGNTHNVYAKHEVLLAAGSAVSPTILEYSGIGMKSILEPLGIDTVVDLPVGLNLQDQTTSTVRSRITSAGAGQGQAAWFATFNETFGDYAEKAHELLNTKLEQWAEEAVARGGFHNTTALLIQYENYRDWIVKDNVAYSELFLDTAGVASFDVWDLLPFTRGYVHILDKDPYLRHFAYDPQYFLNELDLLGQAAATQLARNISNSGAMQTYFAGETIPGDNLAYDADLSAWVEYIPENFRPNYHGVGTCSMMPKEMGGVVDNAARVYGVQGLRVIDGSIPPTQMSSHVMTVFYAMALKIADAVLADYASMQ

SEQ ID NO: 660 - protein, 583 aa, Aspergillus niger
SNGIEASLLKDPKEVAGRTYDYIIAGGGLTGLTVAARLTENPNITVLVIESGSYESDRGPIIEDLNAYGDIFGSSVDHAYETVELPTNNQTALIRSGNGLGGSTLINGGTWTRPHKAQVDSWETVFGNEGWNWDSVAAYSLQAERARAPNAKQIAAGHYFNASCHGINGTVHAGPRDTGDDYSPIVKALMSAVEDRGVPTKKDLGCGDPHGVSMFPNTLHPDQVRSDAAREWLLPNYQRPNLQVLTGQYVGKVLLSQNATTPRAVGVEFGTHKGNTHNVYAKHEVLLAAGSAVSPTILEYSGIGMKSILEPLGIDTVVDLPVGLNLQDQTTSTVRSRITSAGAGQGQAAWFATFNETFGDYAEKAHELLNTKLEQWAEEAVARGGFHNTTALLIQYENYRDWIVKDNVAYSELFLDTAGVASFDVWDLLPFTRGYVHILDKDPYLRHFAYDPQYFLNELDLLGQAAATQLARNISNSGAMQTYFAGETIPGDNLAYDADLSAWVEYIPENFRPNYHGVGTCSMMPKEMGGVVDNAARVYGVQGLRVIDGSIPPTQMSSHVMTVFYAMALKIADAILADYASMQ

SEQ ID NO: 661 - protein, 583 aa, Aspergillus niger
SNGIEASLLKDPKEVAGRTYDYIIAGGGLTGLTVAARLTENPNITVLVIESGSYESDRGPIIEDLNAYGDIFGSSVDHAYETVELATNNQTALIRSGNGLGGSTLINGGTWTRPHKAQVDSWETVFGNEGWNWDSVAAYSLQAERARAPNAKQIAAGHYFNASCHGINGTVHAGPRDTGDDYSPIVKALMSAVEDRGVPTKKDLGCGDPHGVSMFPNTLHEDQVRSDAAREWLLPNYQRPNLQVLTGQYVGKVLLSQNATTPRAVGVEFGTHKGNTHNVYAKHEVLLAAGSAVSPTILEYSGIGMKSILEPLGIDTVVDLPVGLNLQDQTTSTVRSRITSAGAGQGQAAWFATFNETFGDYTEKAHELLNTKLEQWAEEAVARGGFHNTTALLIQYENYRDWIVKDNVAYSELFLDTAGVASFDVWDLLPFTRGYVHILDKDPYLRHFAYDPQYFLNELDLLGQAAATQLARNISNSGAMQTYFAGETIPGDNLAYDADLRAWVEYIPENFRPNYHGVGTCSMMPKEMGGVVDNAARVYGVQGLRVIDGSIPPTQLSSHVMTVFYAMALKIADAILADYASMQ

SEQ ID NO: 662 - protein, 583 aa, Aspergillus niger
SNGIEASLLKDPKEVAGRTYDYIIAGGGLTGLTVAAKLTENPNITVLVIESGSYESDRGPIIEDLNAYGDIFGSSVDHAYETVELATNNQTALIRSGNGLGGSTLINGGTWTRPHKAQVDSWETVFGNEGWNWDSVAAYSLQAERARAPNAKQIAAGHYFNASCHGINGTVHAGPRDTGDDYSPIVKALMSAVEDRGVPTKKDLGCGDPHGVSMFPNTLHEDQVRSDAAREWLLPNYQRPNLQVLTGQYVGKVLLSQNATTPRAVGVEFGTHKGNTHNVYAKHEVLLAAGSAVSPTILEYSGIGMKSILEPLGIDTVVDLPVGLNLQDQTTSTVRSRITSAGAGQGQAAWFATFNETFGDYTEKAHELLNTKLEQWAEEAVARGGFHNTTALLIQYENYRDWIVKDNVAYSELFLDTAGVASFDVWDLLPFTRGYVHILDKDPYLRHFAYDPQYFLNELDLLGQAAATQLARNISNSGAMQTYFAGETIPGDNLAYDADLRAWVEYIPENFRPNYHGVGTCSMMPKEMGGVVDNAARVYGVQGLRVIDGSIPPTQMSSHVMTVFYAMALKIADAILADYASMQ

SEQ ID NO: 663 - protein, 605 aa, Aspergillus niger
MSTLLVSSLVVSLAAALPHYIRSNGIEASLLTDPKEVAGRTVDYIIAGGGLTGLTTAARLTENPDITVLVIESGSYESDRGPIIEDLNAYGDIFGSSVDHAYETVELATNNQTALIRSGNGLGGSTLVNGGAWTRPHKAQVDSWETVFGNEGWNWDSVAAYSLQAERARAPNAKQIAAGHYFNASCHGINGTVHAGPRDTGDDYSPIVKALMSAVEDRGVPTKKDLGCGDPHGVSMFPNTLHEDQVRSDAAREWLLPNYQRPNLQVLTGRYVGKVLLSQNATTPRAVGVEFGTHKGNTHNVYAKHEVLLAAGSAVSPTILEYSGIGMKSILEPLGIDTVVDLPVGLNLQDQATSTVRSRITSAGAGQGQAAWFATFNETFGDYAEKAHELLNTKLEQWAEEAVARGGFHNTTALLIQYENYRDWIVKDNVAYSELFLDTAGVASFHVWDLLPFTRGYVHILDKDPYLRHFAYDPQYFLNELDLLGQAAATQLARNISNSGAMQTYFAGETIPGDNLAYDADLSAWVEYIPYNFRPNYHGVGTCSMMPKEMGGVVDNAARVYGVQGLRVIDGSIPPTQMSSHSMTVFYAMALKVADAILADYASMQ

SEQ ID NO: 664 - protein, 583 aa, Aspergillus niger
SNGIEASLLKDPKEVAGRTYDYIIAGGGLTGLTVAARLTENPNITVLVIESGSYESDRGPIIEDLNAYGDIFGSSVDHAYETVELATNNQTALIRSGNGLGGSTLINGGTWTRPHKAQVDSWETVFGNEGWNWDSVAAYSLQAERARAPNAKQIAAGHYFNPSCHGINGTVHAGPRDTGDDYSPIVKALMSAVEDRGVPTKKDLGCGDPHGVSMFPNTLHPDQVRSDAAREWLLPNYQRPNLQVLTGQYVGKVLLSQNATTPRAVGVEFGTHKGNTHNVYAKHEVLLAAGSAVSPTILEYSGIGMKSILEPLGIDTVVDLPVGLNLQDQTTSTVRSRITSAGAGQGQAAWFATFNETFGDYAEKAHELLNTKLEQWAEEAVARGGFHNTTALLIQYENYRDWIVKDNVAYSELFLDTAGVASFDVWDLLPFTRGYVHILDKDPYLRHFAYDPQYFLNELDLLGQAAATQLARNISNSGAMQTYFAGETIPGDNLAYDADLRAWVEYIPENFRPNYHGVGTCSMMPKEMGGVVDNAARVYGVQGLRVIDGSIPPTQMSSHVMTVFYAMALKIADAILADYASMQ

SEQ ID NO: 665 - protein, 583 aa, Aspergillus niger
SNGIEASLLKDPKEVAGRTYDYIIAGGGLTGLTVAARLTENPNITVLVIESGSYESDRGPIIEDLNAYGDIFGSSVDHAYETVELATNNQTALIRSGNGLGGSTLINGGTWTRPHKAQVDSWETVFGNEGWNWDSVAAYSLQAERARAPNAKQIAAGHYFNASCHGINGTVHAGPRDTGDDYSPIVKALMSAVEDRGVPTKKDLGCGDPHGVSMFPNTLHEDQVRSDAAREWLLPNYQRPNLQVLTGQYVGKVLLSQNATTPRAVGVEFGTHKGNTHNVYAKHEVLLAAGSAVSPTILEYSGIGMKSILEPLGIDTVVDLPVGLNLQDQTTSTVRSRITSAGAGQGQAAWFATFNETFGDYTEKAHELLNTKLEQWAEEAVARGGFHNTTALLIQYENYRDWIVKDNVAYSELFLDTAGVASFDVWDLLPFTRGYVHILDKDPYLRHFAYDPQYFLNELDLLGQAAATQLARNISNSGAMQTYFAGETIPGDNLAYDADLRAWVEYIPENFRPNYHGVGTCSMMPKEMGGVVDNAARVYGVQGLRVIDGSIPPTQLSSHVMTVFYAMALKIADAVLADYASMQ

SEQ ID NO: 666 - protein, 583 aa, Aspergillus niger
SNGIEASLLTDPKEVAGRTVDYIIAGGGLTGLTVAARLTENPDITVLVIEGGSYESDRGAIIEDLNAYGDIFGSSVDHAYETVELATNNRTALIRSGNGLGGSTLFNGGTWTRPHKAQVDSWETVFGNEGWNWDSVAAYSLQAERARAPNAKQIAAGHYFNASCHGINGTVHAGPRDTGDDYSPIVKALMSAVEDRGVPTKKDLGCGDPHGVSMFPNTLHEDQVRSDAAREWLLPNYQRPNLHVLTGQYVGKVLLSQNATTPRAVGVEFGTHKGNTHNVYAKHEVLLAAGSAVSPTILEYSGIGMKSILEPLGIDTVVDLPVGLNLQDQTTSTVRSRITSAGAGQGQAAWFATFNETFGDYAEKAHELLNTKLEQWAEEAVARGGFHNTTALLIQYENYRDWIVKDNVAYSELFLDTAGVASFDVWDLLPFTRGYVHILDKDPYLRHFAYDPQYFLNELDLLGQAAATQLARNISNSGAMQTYFAGETIPGDNLAYDADLSAWVEYIPYNFRPNYHGVGTCSMMPKEMGGVVDNAARVYGVQGLRVIDGSIPPTQMSSHVSTVFYAMALKIADAILADYASMQ

SEQ ID NO: 667 - protein, 583 aa, Aspergillus niger
SNGIEASLLKDPKEVAGRTYDYIIAGGGLTGLTVAARLTENPNITVLVIESGSYESDRGPIIEDLNAYGDIFGSSVDHAYETVELPTNNQTALIRSGNGLGGSTLINGGTWTRPHKAQVDSWETVFGNEGWNWDSVAAYSLQAERARAPNAKQIAAGHYFNASCHGINGTVHAGPRDTGDDYSPIVKALMSAVEDRGVPTKKDLGCGDPHGVSMFPNTLHEDQVRSDAAREWLLPNYQRPNLQVLTGQYVGKVLLSQNATTPRAVGVEFGTHKGNTHNVYAKHEVLLAAGSAVSPTILEYSGIGMKSILEPLGIDTVVDLPVGLNLQDQTTSTVRSRITSAGAGQGQAAWFATFNETFGDYAEKAHELLNTKLEQWAEEAVARGGFHNTTALLIQYENYRDWIVKDNVAYSELFLDTAGVASFDVWDLLPFTRGYVHILDKDPYLRHFAYDPQYFLNELDLLGQAAATQLARNISNSGAMQTYFAGETIPGDNLAYDADLRAWVEYIPENFRPNYHGVGTCSMMPKEMGGVVDNAARVYGVQGLRVIDGSIPPTQMSSHVMTVFYAMALKIADAVLADYASMQ

SEQ ID NO: 668 - protein, 583 aa, Aspergillus niger
SNGIEASLLTDPKEVAGRTYDYIIAGGGLTGLTVAARLTENPDITVLVIESGSYESDRGPIIEDLNAYGQIFGSSVDHAYETVELATNNQTALIRSGNGLGGSTLINGGNWTRPHKAQVDSWETVFGNEGWNWDSVAAYSLQAERARAPNAKQIAAGHYFNASCHGINGTVHAGPRDTGDDYSPIVKALMSAVEDRGVPTKKDLGCGDPHGVSMFPNTLHEDQVRSDAAREWLLPNYQRPNLQVLTGQYVGKVLLSKNATTPRAVGVEFGTHKGNTHNVYAKHEVLLAAGSAVSPTILEYSGIGMKSILEPLGIDTVVDLPVGLNLQDQTTSTVRSRITSAGAGQGQAAWFATFNETFGDYAEKAHELLNTKLEQWAEEAVARGGFHNTTALLIQYENYRDWIVKDNVAYSELFLDTAGVASFDVWDLLPFTRGYVHILDKDPYLRHFAYDPQYFLNELDLLGQAAATQLARNISNSGAMQTYFAGETIPGDNLAYDADLSAWVEYIPYNFRPNYHAVGTCSMMPKEMGGVVDNAARVYGVQGLRVIDGSIPPTQMSSHVMTVFYAMALKIADAILADYASMQ

SEQ ID NO: 669 - protein, 583 aa, Aspergillus niger
SNGIEASLLKDPKEVAGRTYDYIIAGGGLTGLTVAAKLTENPNITVLVIESGSYESDRGPIIEDLNAYGDIFGSSVDHAYETVELATNNQTALIRSGNGLGGSTLINGGTWTRPHKAQVDSWETVFGNEGWNWDSVAAYSLQAERARAPNAKQIAAGHYFNASCHGINGTVHAGPRDTGDDYSPIVKALMSAVEDRGVPTKKDLGCGDPHGVSMFPNTLHEDQVRSDAAREWLLPNYQRPNLQVLTGQYVGKVLLSQNATTPRAVGVEFGTHKGNTHNVYAKHEVLLAAGSAVSPTILEYSGIGMKSILEPLGIDTVVDLPVGLNLQDQTTSTVRSRITSAGAGQGQAAWFATFNETFGDYAEKAHELLNTKLEQWAEEAVARGGFHNTTALLIQYENYRDWIVKDNVAYSELFLDTAGVASFDVWDLLPFTRGYVHILDKDPYLRHFAYDPQYFLNELDLLGQAAATQLARNISNSGAMQTYFAGETIPGDNLAYDADLSAWVEYIPENFRPNYHGVGTCSMMPKEMGGVVDNAARVYGVQGLRVIDGSIPPTQLSSHVMTVFYAMALKIADAVLADYASMQ

SEQ ID NO: 670 - protein, 583 aa, Aspergillus niger
SNGIEASLLTDPKEVAGRTVDYIIAGGGLTGLTVAARLTENPDITVLVIESGCYESDRGPIIEDLNAYGDIFGSSVDHAYETVCLATNNQTALIRSGNGLGGSTLVNGGTWTRPHKAQVDSWETVFGNEGWNWDSVAAYSLQAERARAPNAKQIAAGHYFNASCHGINGTVHAGPRDTGDDYSPIVKALMSAVEDRGVPTKKDLGCGDPHGVSMFPNTLHEDQVRSDAAREWLLPNYQRPNLQVLCGQYVGKVLLSQNATTPRAVGVEFGTHKGNTHNVYAKHEVLLAAGSAVSPTILEYSGIGMKSILEPLGIKTVVDLPVGLNLQDQTTSTVRSRITSAGAGQGQAAWFATFNETFGDYTEKAHELLNTKLEQWAEEAVARGGFHNTTALLIQYENYRDWIVKDNVAYSELFLDTAGEASFDVWDLLPFTRGYVHILDKDPYLRHFAYDPQYFLNELDLLGQAAATQLARNISNSGAMQTYFAGETIPGDNLAYDADLRAWVEYIPYHFRPNYHGVGTCSMMPKEMGGVVDNAARVYGVQGLRVIDGSIPPTQMSSHVMTVFYAMALKIADAVLADYASMQ

SEQ ID NO: 671 - protein, 583 aa, Aspergillus niger
SNGIEASLLKDPKEVAGRTYDYIIAGGGLTGLTVAARLTENPNITVLVIESGSYESDRGPIIEDLNAYGDIFGSSVDHAYETVELATNNQTALIRSGNGLGGSTLINGGTWTRPHKAQVDSWETVFGNEGWNWDSVAAYSLQAERARAPNAKQIAAGHYFNASCHGINGTVHAGPRDTGDDYSPIVKALMSAVEDRGVPTKKDLGCGDPHGVSMFPNTLHEDQVRSDAAREWLLPNYQRPNLQVLTGQYVGKVLLSQNATTPRAVGVEFGTHKGNTHNVYAKHEVLLAAGSAVSPTILEYSGIGMKSILEPLGIDTVVDLPVGLNLQDQTTSTVRSRITPAGAGQGQAAWFATFNETFGDYTEKAHELLNTKLEQWAEEAVARGGFHNTTALLIQYENYRDWIVKDNVAYSELFLDTAGVASFDVWDLLPFTRGYVHILDKDPYLRHFAYDPQYFLNELDLLGQAAATQLARNISNSGAMQTYFAGETIPGDNLAYDADLSAWVEYIPENFRPNYHGVGTCSMMPKEMGGVVDNAARVYGVQGLRVIDGSIPPTQLSSHVMTVFYAMALKIADAVLADYASMQ

SEQ ID NO: 672 - protein, 583 aa, Aspergillus niger
SNGIEASLLKDPKEVAGRTYDYIIAGGGLTGLTVAAKLTENPNITVLVIESGSYESDRGPIIEDLNAYGDIFGSSVDHAYETVELATNNQTALIRSGNGLGGSTLINGGTWTRPHKAQVDSWETVFGNEGWNWDSVAAYSLQAERARAPNAKQIAAGHYFNPSCHGINGTVHAGPRDTGDDYSPIVKALMSAVEDRGVPTKKDLGCGDPHGVSMFPNTLHPDQVRSDAAREWLLPNYQRPNLQVLTGQYVGKVLLSQNATTPRAVGVEFGTHKGNTHNVYAKHEVLLAAGSAVSPTILEYSGIGMKSILEPLGIDTVVDLPVGLNLQDQTTSTVRSRITSAGAGQGQAAWFATFNETFGDYAEKAHELLNTKLEQWAEEAVARGGFHNTTALLIQYENYRDWIVKDNVAYSELFLDTAGVASFDVWDLLPFTRGYVHILDKDPYLRHFAYDPQYFLNELDLLGQAAATQLARNISNSGAMQTYFAGETIPGDNLAYDADLSAWVEYIPENFRPNYHGVGTCSMMPKEMGGVVDNAARVYGVQGLRVIDGSIPPTQMSSHVMTVFYAMALKIADAILADYASMQ

SEQ ID NO: 673 - protein, 583 aa, Aspergillus niger
SNGIEASLLKDPKEVAGRTYDYIIAGGGLTGLTVAARLTENPNITVLVIESGSYESDRGPIIEDLNAYGDIFGSSVDHAYETVELPTNNRTALIRSGNGLGGSTLINGGTWTRPHKAQVDSWETVFGNEGWNWDSVAAYSLQAERARAPNAKQIAAGHYFNASCHGLNGTVHAGPRDTGDDYSPIVKALMSAVEDRGVPTKKDLGCGDPHGVSMFPNTLHEDQVRSDAAREWLLPNYQRPNLQVLTGQYVGKVLLSQNATTPRAVGVEFGTHKGNTHNVYAKHEVLLAAGSAVSPTILEYSGIGMKSILEPLGIDTVVDLPVGLNLQDQTTSTVRSRITSAGAGQGQAAWFATFNETFGDYTEKAHELLNTKLEQWAEEAVARGGFHNTTALLIQYENYRDWIVKDNVAYSELFLDTAGVASFDVWDLLPFTRGYVHILDKDPYLRHFAYDPQYFLNELDLLGQAAATQLARNISNSGAMQTYFAGETIPGDNLAYDADLRAWVEYIPENFRPNYHGVGTCSMMPKEMGGVVDNAARVYGVQGLRVIDGSIPPTQMSSHVMTVFYAMALKIADAILADYASMQ

SEQ ID NO: 674 - protein, 583 aa, Aspergillus niger
SNGIEASLLKDPKEVAGRTYDYIIAGGGLTGLTVAARLTENPNITVLVIESGSYESDRGPIIEDLNAYGDIFGSSVDHAYETVELATNNQTALIRSGNGLGGSTLINGGTWTRPHKAQVDSWETVFGNEGWNWDSVAAYSLQAERARAPNAKQIAAGHYFNPSCHGLNGTVHAGPRDTGDDYSPIVKALMSAVEDRGVPTKKDLGCGDPHGVSMFPNTLHPDQVRSDAAREWLLPNYQRPNLQVLTGQYVGKVLLSQNATTPRAVGVEFGTHKGNTHNVYAKHEVLLAAGSAVSPTILEYSGIGMKSILEPLGIDTVVDLPVGLNLQDQTTSTVRSRITSAGAGQGQAAWFATFNETFGDYTEKAHELLNTKLEQWAEEAVARGGFHNTTALLIQYENYRDWIVKDNVAYSELFLDTAGVASFDVWDLLPFTRGYVHILDKDPYLRHFAYDPQYFLNELDLLGQAAATQLARNISNSGAMQTYFAGETIPGDNLAYDADLRAWVEYIPENFRPNYHGVGTCSMMPKEMGGVVDNAARVYGVQGLRVIDGSIPPTQMSSHVMTVFYAMALKIADAILADYASMQ

SEQ ID NO: 675 - protein, 583 aa, Aspergillus niger
SNGIEASLLKDPKEVAGRTYDYIIAGGGLTGLTVAARLTENPNITVLVIESGSYESDRGPIIEDLNAYGDIFGSSVDHAYETVELATNNRTALIRSGNGLGGSTLINGGTWTRPHKAQVDSWETVFGNEGWNWDSVAAYSLQAERARAPNAKQIAAGHYFNASCHGINGTVHAGPRDTGDDYSPIVKALMSAVEDRGVPTKKDLGCGDPHGVSMFPNTLHEDQVRSDAAREWLLPNYQRPNLQVLTGQYVGKVLLSQNATTPRAVGVEFGTHKGNTHNVYAKHEVLLAAGSAVSPTILEYSGIGMKSILEPLGIDTVVDLPVGLNLQDQTTSTVRSRITSAGAGQGQAAWFATFNETFGDYTEKAHELLNTKLEQWAEEAVARGGFHNTTALLIQYENYRDWIVKDNVAYSELFLDTAGVASFDVWDLLPFTRGYVHILDKDPYLRHFAYDPQYFLNELDLLGQAAATQLARNISNSGAMQTYFAGETIPGDNLAYDADLRAWVEYIPENFRPNYHGVGTCSMMPKEMGGVVDNAARVYGVQGLRVIDGSIPPTQLSSHVMTVFYAMALKIADAILADYASMQ

SEQ ID NO: 676 - protein, 583 aa, Aspergillus niger
SNGIEASLLKDPKEVAGRTYDYIIAGGGLTGLTVAARLTENPNITVLVIESGSYESDRGPIIEDLNAYGDIFGSSVDHAYETVELPTNNRTALIRSGNGLGGSTLINGGTWTRPHKAQVDSWETVFGNEGWNWDSVAAYSLQAERARAPNAKQIAAGHYFNPSCHGLNGTVHAGPRDTGDDYSPIVKALMSAVEDRGVPTKKDLGCGDPHGVSMFPNTLHEDQVRSDAAREWLLPNYQRPNLQVLTGQYVGKVLLSQNATTPRAVGVEFGTHKGNTHNVYAKHEVLLAAGSAVSPTILEYSGIGMKSILEPLGIDTVVDLPVGLNLQDQTTSTVRSRITSAGAGQGQAAWFATFNETFGDYAEKAHELLNTKLEQWAEEAVARGGFHNTTALLIQYENYRDWIVKDNVAYSELFLDTAGVASFDVWDLLPFTRGYVHILDKDPYLRHFAYDPQYFLNELDLLGQAAATQLARNISNSGAMQTYFAGETIPGDNLAYDADLSAWVEYIPENFRPNYHGVGTCSMMPKEMGGVVDNAARVYGVQGLRVIDGSIPPTQMSSHVMTVFYAMALKIADAILADYASMQ

SEQ ID NO: 677 - protein, 583 aa, Aspergillus niger
SNGIEASLLKDPKEVAGRTYDYIIAGGGLTGLTVAARLTENPNITVLVIESGSYESDRGPIIEDLNAYGDIFGSSVDHAYETVELPTNNQTALIRSGNGLGGSTLINGGTWTRPHKAQVDSWETVFGNEGWNWDSVAAYSLQAERARAPNAKQIAAGHYFNPSCHGINGTVHAGPRDTGDDYSPIVKALMSAVEDRGVPTKKDLGCGDPHGVSMFPNTLHPDQVRSDAAREWLLPNYQRPNLQVLTGQYVGKVLLSQNATTPRAVGVEFGTHKGNTHNVYAKHEVLLAAGSAVSPTILEYSGIGMKSILEPLGIDTVVDLPVGLNLQDQTTSTVRSRITSAGAGQGQAAWFATFNETFGDYAEKAHELLNTKLEQWAEEAVARGGFHNTTALLIQYENYRDWIVKDNVAYSELFLDTAGVASFDVWDLLPFTRGYVHILDKDPYLRHFAYDPQYFLNELDLLGQAAATQLARNISNSGAMQTYFAGETIPGDNLAYDADLSAWVEYIPENFRPNYHGVGTCSMMPKEMGGVVDNAARVYGVQGLRVIDGSIPPTQMSSHVMTVFYAMALKIADAILADYASMQ

SEQ ID NO: 678 - protein, 583 aa, Aspergillus niger
SNGIEASLLKDPKEVAGRTYDYIIAGGGLTGLTVAARLTENPNITVLVIESGSYESDRGPIIEDLNAYGDIFGSSVDHAYETVELATNNQTALIRSGNGLGGSTLINGGTWTRPHKAQVDSWETVFGNEGWNWDSVAAYSLQAERARAPNAKQIAAGHYFNASCHGINGTVHAGPRDTGDDYSPIVKALMSAVEDRGVPTKKDLGCGDPHGVSMFPNTLHPDQVRSDAAREWLLPNYQRPNLQVLTGQYVGKVLLSQNATTPRAVGVEFGTHKGNTHNVYAKHEVLLAAGSAVSPTILEYSGIGMKSILEPLGIDTVVDLPVGLNLQDQTTSTVRSRITPAGAGQGQAAWFATFNETFGDYAEKAHELLNTKLEQWAEEAVARGGFHNTTALLIQYENYRDWIVKDNVAYSELFLDTAGVASFDVWDLLPFTRGYVHILDKDPYLRHFAYDPQYFLNELDLLGQAAATQLARNISNSGAMQTYFAGETIPGDNLAYDADLSAWVEYIPENFRPNYHGVGTCSMMPKEMGGVVDNAARVYGVQGLRVIDGSIPPTQMSSHVMTVFYAMALKIADAVLADYASMQ

SEQ ID NO: 679 - protein, 583 aa, Aspergillus niger
SNGIEASLLKDPKEVAGRTYDYIIAGGGLTGLTVAAKLTENPNITVLVIESGSYESDRGPIIEDLNAYGDIFGSSVDHAYETVELATNNQTALIRSGNGLGGSTLINGGTWTRPHKAQVDSWETVFGNEGWNWDSVAAYSLQAERARAPNAKQIAAGHYFNASCHGINGTVHAGPRDTGDDYSPIVKALMSAVEDRGVPTKKDLGCGDPHGVSMFPNTLHEDQVRSDAAREWLLPNYQRPNLQVLTGQYVGKVLLSQNATTPRAVGVEFGTHKGNTHNVYAKHEVLLAAGSAVSPTILEYSGIGMKSILEPLGIDTVVDLPVGLNLQDQTTSTVRSRITSAGAGQGQAAWFATFNETFGDYTEKAHELLNTKLEQWAEEAVARGGFHNTTALLIQYENYRDWIVKDNVAYSELFLDTAGVASFDVWDLLPFTRGYVHILDKDPYLRHFAYDPQYFLNELDLLGQAAATQLARNISNSGAMQTYFAGETIPGDNLAYDADLSAWVEYIPENFRPNYHGVGTCSMMPKEMGGVVDNAARVYGVQGLRVIDGSIPPTQLSSHVMTVFYAMALKIADAVLADYASMQ

SEQ ID NO: 680 - protein, 583 aa, Aspergillus niger
SNGIEASLLKDPKEVAGRTYDYIIAGGGLTGLTVAAKLTENPNITVLVIESGSYESDRGPIIEDLNAYGDIFGSSVDHAYETVELATNNRTALIRSGNGLGGSTLINGGTWTRPHKAQVDSWETVFGNEGWNWDSVAAYSLQAERARAPNAKQIAAGHYFNPSCHGLNGTVHAGPRDTGDDYSPIVKALMSAVEDRGVPTKKDLGCGDPHGVSMFPNTLHEDQVRSDAAREWLLPNYQRPNLQVLTGQYVGKVLLSQNATTPRAVGVEFGTHKGNTHNVYAKHEVLLAAGSAVSPTILEYSGIGMKSILEPLGIDTVVDLPVGLNLQDQTTSTVRSRITSAGAGQGQAAWFATFNETFGDYAEKAHELLNTKLEQWAEEAVARGGFHNTTALLIQYENYRDWIVKDNVAYSELFLDTAGVASFDVWDLLPFTRGYVHILDKDPYLRHFAYDPQYFLNELDLLGQAAATQLARNISNSGAMQTYFAGETIPGDNLAYDADLSAWVEYIPENFRPNYHGVGTCSMMPKEMGGVVDNAARVYGVQGLRVIDGSIPPTQMSSHVMTVFYAMALKIADAILADYASMQ

SEQ ID NO: 681 - protein, 583 aa, Aspergillus niger
SNGIEASLLKDPKEVAGRTYDYIIAGGGLTGLTVAARLTENPNITVLVIESGSYESDRGPIIEDLNAYGDIFGSSVDHAYETVELATNNRTALIRSGNGLGGSTLINGGTWTRPHKAQVDSWETVFGNEGWNWDSVAAYSLQAERARAPNAKQIAAGHYFNASCHGLNGTVHAGPRDTGDDYSPIVKALMSAVEDRGVPTKKDLGCGDPHGVSMFPNTLHEDQVRSDAAREWLLPNYQRPNLQVLTGQYVGKVLLSQNATTPRAVGVEFGTHKGNTHNVYAKHEVLLAAGSAVSPTILEYSGIGMKSILEPLGIDTVVDLPVGLNLQDQTTSTVRSRITSAGAGQGQAAWFATFNETFGDYTEKAHELLNTKLEQWAEEAVARGGFHNTTALLIQYENYRDWIVKDNVAYSELFLDTAGVASFDVWDLLPFTRGYVHILDKDPYLRHFAYDPQYFLNELDLLGQAAATQLARNISNSGAMQTYFAGETIPGDNLAYDADLRAWVEYIPENFRPNYHGVGTCSMMPKEMGGVVDNAARVYGVQGLRVIDGSIPPTQMSSHVMTVFYAMALKIADAVLADYASMQ

SEQ ID NO: 682 - protein, 583 aa, Aspergillus niger
SNGIEASLLTDPKEVAGRTVDYIICGGGLTGLTVAARLTENPDITVLVIESGSYESDRGPIIEDLNAYGDIFGSSVDHAYETVCLATNNQTALIRSGNGLGGSTLVNGGTWTRPHKAQVDSWETVFGNEGWNWDSVAAYSLQAERARAPNAKQIAAGHYFNASCHGINGTVHAGPRDTGDDYSPIVKALMSAVEDRGVPTKKDLGCGDPHGVSMFPNTLHEDQVRSDAAREWLLPNYQRPNLQVLTGQYCGKVLLSQNATTPRAVGVEFGTHKGNTHNVYAKHEVLLAAGSAVSPTILEYSGIGMKSILEPLGIKTVVDLPVGLNLQDQTTSTVRSRITSAGAGQGQAAWFATFNETFGDYTEKAHELLNTKLEQWAEEAVARGGFHNTTALLIQYENYRDWIVKDNVAYSELFLDTAGEASFDVWDLLPFTRGYVHILDKDPYLRHFAYDPQYFLNELDLLGQAAATQLARNISNSGAMQTYFAGETIPGDNLAYDADLRAWVEYIPYHFRPNYHGVGTCSMMPKEMGGVVDNAARVYGVQGLRVIDGSIPPTQMSSHVMTVFYAMALKIADAVLADYASMQ

SEQ ID NO: 683 - protein, 583 aa, Aspergillus niger
SYGIEASLLTDPKEVAGRTYDYIIAGGGLTGLTVAARLTENPDITVLVIESGSYESDRGPIIEDLNAYGQIFGSSVDHAYETVELATNNRTALIRSGNGLGGSTLINGGTWTRPHKAQVDSWETVFGNEGWNWDSVAAYSLQAERARAPNAKQIAAGHYFNASCHGINGTVHAGPRDTGDDYSPIVKALMSAVEDRGVPTKKDLGCGDPHGVSMFPNTLHEDQVRSDAAREWLLPNYQRPNLQVLTGQYVGKVLLSQNATTPRAVGVEFGTHKGNTHNVYAKHEVLLAAGSAVSPTILEYSGIGLKSILEPLGIDTVVDLPVGLNLQDQTTSTVRSRITSAGAGQGQAAWFATFNETFGDYAEKAHELLNTKLEQWAEEAVARGGFHNTTALLIQYENYRDWIVKDNVAYSELFLDTAGVASFDVWDLLPFTRGYVHILDKDPYLRHFAYDPQYFLNELDLLGQAAATQLARNISNSGAMQTYFAGETIPGDNLAYDADLSAWVEYIPYNFRPNYHGVGTCSMMPKEMGGVVDNAARVYGVQGLRVIDGSIPPTQMSSHVMTVFYAMALKIADAILADYASMQ

SEQ ID NO: 684 - protein, 583 aa, Aspergillus niger
SNGIEASLLKDPKEVAGRTYDYIIAGGGLTGLTVAAKLTENPNITVLVIESGSYESDRGPIIEDLNAYGDIFGSSVDHAYETVELATNNQTALIRSGNGLGGSTLINGGTWTRPHKAQVDSWETVFGNEGWNWDSVAAYSLQAERARAPNAKQIAAGHYFNASCHGINGTVHAGPRDTGDDYSPIVKALMSAVEDRGVPTKKDLGCGDPHGVSMFPNTLHEDQVRSDAAREWLLPNYQRPNLQVLTGRYVGKVLLSQNATTPRAVGVEFGTHKGNTHNVYAKHEVLLAAGSAVSPTILEYSGIGMKSILEPLGIDTVVDLPVGLNLQDQTTSTVRSRITPAGAGQGQAAWFATFNETFGDYAEKAHELLNTKLEQWAEEAVARGGFHNTTALLIQYENYRDWIVKDNVAYSELFLDTAGVASFDVWDLLPFTRGYVHILDKDPYLRHFAYDPQYFLNELDLLGQAAATQLARNISNSGAMQTYFAGETIPGDNLAYDADLSAWVEYIPENFRPNYHGVGTCSMMPKEMGGVVDNAARVYGVQGLRVIDGSIPPTQMSSHVMTVFYAMALKIADAILADYASMQ

SEQ ID NO: 685 - protein, 583 aa, Aspergillus niger
SNGIEASLLKDPKEVAGRTYDYIIAGGGLTGLTVAAKLTENPNITVLVIESGSYESDRGPIIEDLNAYGDIFGSSVDHAYETVELATNNRTALIRSGNGLGGSTLINGGTWTRPHKAQVDSWETVFGNEGWNWDSVAAYSLQAERARAPNAKQIAAGHYFNASCHGLNGTVHAGPRDTGDDYSPIVKALMSAVEDRGVPTKKDLGCGDPHGVSMFPNTLHEDQVRSDAAREWLLPNYQRPNLQVLTGRYVGKVLLSQNATTPRAVGVEFGTHKGNTHNVYAKHEVLLAAGSAVSPTILEYSGIGMKSILEPLGIDTVVDLPVGLNLQDQTTSTVRSRITSAGAGQGQAAWFATFNETFGDYAEKAHELLNTKLEQWAEEAVARGGFHNTTALLIQYENYRDWIVKDNVAYSELFLDTAGVASFDVWDLLPFTRGYVHILDKDPYLRHFAYDPQYFLNELDLLGQAAATQLARNISNSGAMQTYFAGETIPGDNLAYDADLSAWVEYIPENFRPNYHGVGTCSMMPKEMGGVVDNAARVYGVQGLRVIDGSIPPTQMSSHVMTVFYAMALKIADAILADYASMQ

SEQ ID NO: 686 - protein, 583 aa, Aspergillus niger
SNGIEASLLTDPKEVAGRTVDYIIAGGGLTGLTVAARLTENPDITVLVIEPGSYESDRGAIIEDLNAYGDIFGSSVDHAYETVELATNNRTALIRSGNGLGGSTLLNGGTWTRPHKAQVDSWETVFGNEGWNWDSVAAYSLQAERARAPNAKQIAAGHYFNASCHGINGTVHAGPRDTGDDYSPIVKALMSAVEDRGVPTKKDLGCGDPHGVSMFPNTLHEDQVRSDAAREWLLPNYQRPNLHVLTGQYVGKVLLSQNATTPRAVGVEFGTHKGNTHNVYAKHEVLLAAGSAVSPTILEYSGIGMKSILEPLGIDTVVDLPVGLNLQDQTTSTVRSRITSAGAGQGQAAWFATFNETFGDYAEKAHELLNTKLEQWAEEAVARGGFHNTTALLIQYENYRDWIVKDNVAYSELFLDTAGVASFDVWDLLPFTRGYVHILDKDPYLRHFAYDPQYFLNELDLLGQAAATQLARNISNSGAMQTYFAGETIPGDNLAYDADLSAWVEYIPYNFRPNYHGVGTCSMMPKEMGGVVDNAARVYGVQGLRVIDGSIPPTQMSSHVTTVFYAMALKIADAILADYASMQ

SEQ ID NO: 687 - protein, 583 aa, Aspergillus niger
SNGIEASLLKDPKEVAGRTYDYIIAGGGLTGLTVAARLTENPNITVLVIESGSYESDRGPIIEDLNAYGDIFGSSVDHAYETVELATNNQTALIRSGNGLGGSTLINGGTWTRPHKAQVDSWETVFGNEGWNWDSVAAYSLQAERARAPNAKQIAAGHYFNASCHGINGTVHAGPRDTGDDYSPIVKALMSAVEDRGVPTKKDLGCGDPHGVSMFPNTLHPDQVRSDAAREWLLPNYQRPNLQVLTGRYVGKVLLSQNATTPRAVGVEFGTHKGNTHNVYAKHEVLLAAGSAVSPTILEYSGIGMKSILEPLGIDTVVDLPVGLNLQDQTTSTVRSRITSAGAGQGQAAWFATFNETFGDYTEKAHELLNTKLEQWAEEAVARGGFHNTTALLIQYENYRDWIVKDNVAYSELFLDTAGVASFDVWDLLPFTRGYVHILDKDPYLRHFAYDPQYFLNELDLLGQAAATQLARNISNSGAMQTYFAGETIPGDNLAYDADLRAWVEYIPENFRPNYHGVGTCSMMPKEMGGVVDNAARVYGVQGLRVIDGSIPPTQMSSHVMTVFYAMALKIADAILADYASMQ

SEQ ID NO: 688 - protein, 583 aa, Aspergillus niger
SNGIEASLLKDPKEVAGRTYDYIIAGGGLTGLTVAARLTENPNITVLVIESGSYESDRGPIIEDLNAYGDIFGSSVDHAYETVELATNNQTALIRSGNGLGGSTLINGGTWTRPHKAQVDSWETVFGNEGWNWDSVAAYSLQAERARAPNAKQIAAGHYFNASCHGINGTVHAGPRDTGDDYSPIVKALMSAVEDRGVPTKKDLGCGDPHGVSMFPNTLHPDQVRSDAAREWLLPNYQRPNLQVLTGQYVGKVLLSQNATTPRAVGVEFGTHKGNTHNVYAKHEVLLAAGSAVSPTILEYSGIGMKSILEPLGIDTVVDLPVGLNLQDQTTSTVRSRITSAGAGQGQAAWFATFNETFGDYAEKAHELLNTKLEQWAEEAVARGGFHNTTALLIQYENYRDWIVKDNVAYSELFLDTAGVASFDVWDLLPFTRGYVHILDKDPYLRHFAYDPQYFLNELDLLGQAAATQLARNISNSGAMQTYFAGETIPGDNLAYDADLSAWVEYIPENFRPNYHGVGTCSMMPKEMGGVVDNAARVYGVQGLRVIDGSIPPTQLSSHVMTVFYAMALKIADAVLADYASMQ

SEQ ID NO: 689 - protein, 583 aa, Aspergillus niger
SNGIEASLLKDPKEVAGRTYDYIIAGGGLTGLTVAARLTENPNITVLVIESGSYESDRGPIIEDLNAYGDIFGSSVDHAYETVELATNNQTALIRSGNGLGGSTLINGGTWTRPHKAQVDSWETVFGNEGWNWDSVAAYSLQAERARAPNAKQIAAGHYFNASCHGINGTVHAGPRDTGDDYSPIVKALMSAVEDRGVPTKKDLGCGDPHGVSMFPNTLHPDQVRSDAAREWLLPNYQRPNLQVLTGQYVGKVLLSQNATTPRAVGVEFGTHKGNTHNVYAKHEVLLAAGSAVSPTILEYSGIGMKSILEPLGIDTVVDLPVGLNLQDQTTSTVRSRITSAGAGQGQAAWFATFNETFGDYTEKAHELLNTKLEQWAEEAVARGGFHNTTALLIQYENYRDWIVKDNVAYSELFLDTAGVASFDVWDLLPFTRGYVHILDKDPYLRHFAYDPQYFLNELDLLGQAAATQLARNISNSGAMQTYFAGETIPGDNLAYDADLRAWVEYIPENFRPNYHGVGTCSMMPKEMGGVVDNAARVYGVQGLRVIDGSIPPTQMSSHVMTVFYAMALKIADAVLADYASMQ

SEQ ID NO: 690 - protein, 583 aa, Aspergillus niger
SNGIEASLLKDPKEVAGRTYDYIIAGGGLTGLTVAARLTENPNITVLVIESGSYESDRGPIIEDLNAYGDIFGSSVDHAYETVELATNNQTALIRSGNGLGGSTLINGGTWTRPHKAQVDSWETVFGNEGWNWDSVAAYSLQAERARAPNAKQIAAGHYFNASCHGINGTVHAGPRDTGDDYSPIVKALMSAVEDRGVPTKKDLGCGDPHGVSMFPNTLHEDQVRSDAAREWLLPNYQRPNLQVLTGQYVGKVLLSQNATTPRAVGVEFGTHKGNTHNVYAKHEVLLAAGSAVSPTILEYSGIGMKSILEPLGIDTVVDLPVGLNLQDQTTSTVRSRITPAGAGQGQAAWFATFNETFGDYAEKAHELLNTKLEQWAEEAVARGGFHNTTALLIQYENYRDWIVKDNVAYSELFLDTAGVASFDVWDLLPFTRGYVHILDKDPYLRHFAYDPQYFLNELDLLGQAAATQLARNISNSGAMQTYFAGETIPGDNLAYDADLSAWVEYIPENFRPNYHGVGTCSMMPKEMGGVVDNAARVYGVQGLRVIDGSIPPTQLSSHVMTVFYAMALKIADAVLADYASMQ

SEQ ID NO: 691 - protein, 583 aa, Aspergillus niger
SNGIEASLLKDPKEVAGRTYDYIIAGGGLTGLTVAARLTENPNITVLVIESGSYESDRGPIIEDLNAYGDIFGSSVDHAYETVELATNNRTALIRSGNGLGGSTLINGGTWTRPHKAQVDSWETVFGNEGWNWDSVAAYSLQAERARAPNAKQIAAGHYFNASCHGINGTVHAGPRDTGDDYSPIVKALMSAVEDRGVPTKKDLGCGDPHGVSMFPNTLHEDQVRSDAAREWLLPNYQRPNLQVLTGRYVGKVLLSQNATTPRAVGVEFGTHKGNTHNVYAKHEVLLAAGSAVSPTILEYSGIGMKSILEPLGIDTVVDLPVGLNLQDQTTSTVRSRITSAGAGQGQAAWFATFNETFGDYTEKAHELLNTKLEQWAEEAVARGGFHNTTALLIQYENYRDWIVKDNVAYSELFLDTAGVASFDVWDLLPFTRGYVHILDKDPYLRHFAYDPQYFLNELDLLGQAAATQLARNISNSGAMQTYFAGETIPGDNLAYDADLRAWVEYIPENFRPNYHGVGTCSMMPKEMGGVVDNAARVYGVQGLRVIDGSIPPTQMSSHVMTVFYAMALKIADAILADYASMQ

SEQ ID NO: 692 - protein, 583 aa, Aspergillus niger
SNGIEASLLKDPKEVAGRTYDYIIAGGGLTGLTVAARLTENPNITVLVIESGSYESDRGPIIEDLNAYGDIFGSSVDHAYETVELPTNNRTALIRSGNGLGGSTLINGGTWTRPHKAQVDSWETVFGNEGWNWDSVAAYSLQAERARAPNAKQIAAGHYFNASCHGLNGTVHAGPRDTGDDYSPIVKALMSAVEDRGVPTKKDLGCGDPHGVSMFPNTLHEDQVRSDAAREWLLPNYQRPNLQVLTGQYVGKVLLSQNATTPRAVGVEFGTHKGNTHNVYAKHEVLLAAGSAVSPTILEYSGIGMKSILEPLGIDTVVDLPVGLNLQDQTTSTVRSRITPAGAGQGQAAWFATFNETFGDYAEKAHELLNTKLEQWAEEAVARGGFHNTTALLIQYENYRDWIVKDNVAYSELFLDTAGVASFDVWDLLPFTRGYVHILDKDPYLRHFAYDPQYFLNELDLLGQAAATQLARNISNSGAMQTYFAGETIPGDNLAYDADLSAWVEYIPENFRPNYHGVGTCSMMPKEMGGVVDNAARVYGVQGLRVIDGSIPPTQMSSHVMTVFYAMALKIADAILADYASMQ

SEQ ID NO: 693 - protein, 583 aa, Aspergillus niger
SNGIEASLLKDPKEVAGRTYDYIIAGGGLTGLTVAARLTENPDITVLVIESGSYESDRGPIIEDLNAYGQIFGSSVDHAYETVELATNNQTALIRSGNGLGGSTLINGGTWTRPHKAQVDSWETVFGNEGWNWDSVAAYSLQAERARAPNAKQIAAGHYFNASCHGINGTVHAGPRDTGDDYSPIVKALMSAVEDRGVPTKKDLGCGDPHGVSMFPNTLHEDQVRSDAAREWLLPNYQRPNLQVLTGQYVGKVLLSQNATTPRAVGVEFGTHKGNTHNVYAKHEVLLAAGSAVSPTILEYSGIGLKSILEPLGIDTVVDLPVGLNLQDQTTSTVRSRITSAGAGQGQAAWFATFNETFGDYAEKAHELLNTKLEQWAEEAVARGGFHNTTALLIQYENYRDWIVKDNVAYSELFLDTAGVASFDVWDLLPFTRGYVHILDKDPYLRHFAYDPQYFLNELDLLGQAAATQLARNISNSGAMQTYFAGETIPGDNLAYDADLSAWVEYIPENFRPNYHGVGTCSMMPKEMGGVVDNAARVYGVQGLRVIDGSIPPTQMSSHVMTVFYAMALKIADAILADYASMQ

SEQ ID NO: 694 - protein, 583 aa, Aspergillus niger
SNGIEASLLKDPKEVAGRTYDYIIAGGGLTGLTVAAKLTENPNITVLVIESGSYESDRGPIIEDLNAYGDIFGSSVDHAYETVELATNNQTALIRSGNGLGGSTLINGGTWTRPHKAQVDSWETVFGNEGWNWDSVAAYSLQAERARAPNAKQIAAGHYFNASCHGINGTVHAGPRDTGDDYSPIVKALMSAVEDRGVPTKKDLGCGDPHGVSMFPNTLHPDQVRSDAAREWLLPNYQRPNLQVLTGRYVGKVLLSQNATTPRAVGVEFGTHKGNTHNVYAKHEVLLAAGSAVSPTILEYSGIGMKSILEPLGIDTVVDLPVGLNLQDQTTSTVRSRITSAGAGQGQAAWFATFNETFGDYAEKAHELLNTKLEQWAEEAVARGGFHNTTALLIQYENYRDWIVKDNVAYSELFLDTAGVASFDVWDLLPFTRGYVHILDKDPYLRHFAYDPQYFLNELDLLGQAAATQLARNISNSGAMQTYFAGETIPGDNLAYDADLSAWVEYIPENFRPNYHGVGTCSMMPKEMGGVVDNAARVYGVQGLRVIDGSIPPTQMSSHVMTVFYAMALKIADAILADYASMQ

SEQ ID NO: 695 - protein, 583 aa, Aspergillus niger
SNGIEASLLTDPKEVAGRTVDYIIAGGGLTGLTSAARLTENPDITVLVIEKGSYESDRGAIIEDLNAYGDIFGSSVDHAYETVELATNNATALIRSGNGLGGSTLLNGGTWTRPHKAQVDSWETVFGNEGWNWDSVAAYSLQAERARAPNAKQIAAGHYFNASCHGINGTVHAGPRDTGDDYSPIVKALMSAVEDRGVPTKKDLGCGDPHGVSMFPNTLHEDQVRSDAAREWLLPNYQRPNLEVLTGQYVGKVLLSQNATTPRAVGVEFGTHKGNTHNVYAKHEVLLAAGSAVSPTILEYSGIGMKSILEPLGIDTVVDLPVGLNLQDQTTSTVRSRITSAGAGQGQAAWFATFNETFGDYAEKAHELLNTKLEQWAEEAVARGGFHNTTALLIQYENYRDWIVKDNVAYSELFLDTAGVASFDVWDLLPFTRGYVHILDKDPYLRHFAYDPQYFLNELDLLGQAAATQLARNISNSGAMQTYFAGETIPGDNLAYDADLSAWVEYIPYNFRPNYHGVGTCSMMPKEMGGVVDNAARVYGVQGLRVIDGSIPPTQMSSHVSTVFYAMALKIADAILADYASMQ

SEQ ID NO: 696 - protein, 583 aa, Aspergillus niger
SNGIEASLLKDPKEVAGRTYDYIIAGGGLTGLTVAAKLTENPNITVLVIESGSYESDRGPIIEDLNAYGDIFGSSVDHAYETVELATNNQTALIRSGNGLGGSTLINGGTWTRPHKAQVDSWETVFGNEGWNWDSVAAYSLQAERARAPNAKQIAAGHYFNASCHGLNGTVHAGPRDTGDDYSPIVKALMSAVEDRGVPTKKDLGCGDPHGVSMFPNTLHEDQVRSDAAREWLLPNYQRPNLQVLTGQYVGKVLLSQNATTPRAVGVEFGTHKGNTHNVYAKHEVLLAAGSAVSPTILEYSGIGMKSILEPLGIDTVVDLPVGLNLQDQTTSTVRSRITSAGAGQGQAAWFATFNETFGDYTEKAHELLNTKLEQWAEEAVARGGFHNTTALLIQYENYRDWIVKDNVAYSELFLDTAGVASFDVWDLLPFTRGYVHILDKDPYLRHFAYDPQYFLNELDLLGQAAATQLARNISNSGAMQTYFAGETIPGDNLAYDADLSAWVEYIPENFRPNYHGVGTCSMMPKEMGGVVDNAARVYGVQGLRVIDGSIPPTQLSSHVMTVFYAMALKIADAVLADYASMQ

SEQ ID NO: 697 - protein, 583 aa, Aspergillus niger
SNGIEASLLKDPKEVAGRTYDYIIAGGGLTGLTVAAKLTENPNITVLVIESGSYESDRGPIIEDLNAYGDIFGSSVDHAYETVELPTNNRTALIRSGNGLGGSTLINGGTWTRPHKAQVDSWETVFGNEGWNWDSVAAYSLQAERARAPNAKQIAAGHYFNASCHGINGTVHAGPRDTGDDYSPIVKALMSAVEDRGVPTKKDLGCGDPHGVSMFPNTLHEDQVRSDAAREWLLPNYQRPNLQVLTGQYVGKVLLSQNATTPRAVGVEFGTHKGNTHNVYAKHEVLLAAGSAVSPTILEYSGIGMKSILEPLGIDTVVDLPVGLNLQDQTTSTVRSRITSAGAGQGQAAWFATFNETFGDYAEKAHELLNTKLEQWAEEAVARGGFHNTTALLIQYENYRDWIVKDNVAYSELFLDTAGVASFDVWDLLPFTRGYVHILDKDPYLRHFAYDPQYFLNELDLLGQAAATQLARNISNSGAMQTYFAGETIPGDNLAYDADLSAWVEYIPENFRPNYHGVGTCSMMPKEMGGVVDNAARVYGVQGLRVIDGSIPPTQMSSHVMTVFYAMALKIADAILADYASMQ

SEQ ID NO: 698 - protein, 583 aa, Aspergillus niger
SNGIEASLLKDPKEVAGRTYDYIIAGGGLTGLTVAARLTENPNITVLVIESGSYESDRGPIIEDLNAYGDIFGSSVDHAYETVELPTNNQTALIRSGNGLGGSTLINGGTWTRPHKAQVDSWETVFGNEGWNWDSVAAYSLQAERARAPNAKQIAAGHYFNASCHGINGTVHAGPRDTGDDYSPIVKALMSAVEDRGVPTKKDLGCGDPHGVSMFPNTLHPDQVRSDAAREWLLPNYQRPNLQVLTGQYVGKVLLSQNATTPRAVGVEFGTHKGNTHNVYAKHEVLLAAGSAVSPTILEYSGIGMKSILEPLGIDTVVDLPVGLNLQDQTTSTVRSRITPAGAGQGQAAWFATFNETFGDYAEKAHELLNTKLEQWAEEAVARGGFHNTTALLIQYENYRDWIVKDNVAYSELFLDTAGVASFDVWDLLPFTRGYVHILDKDPYLRHFAYDPQYFLNELDLLGQAAATQLARNISNSGAMQTYFAGETIPGDNLAYDADLSAWVEYIPENFRPNYHGVGTCSMMPKEMGGVVDNAARVYGVQGLRVIDGSIPPTQMSSHVMTVFYAMALKIADAILADYASMQ

SEQ ID NO: 699 - protein, 583 aa, Aspergillus niger
SNGIEASLLKDPKEVAGRTYDYIIAGGGLTGLTVAARLTENPNITVLVIESGSYESDRGPIIEDLNAYGDIFGSSVDHAYETVELATNNRTALIRSGNGLGGSTLINGGTWTRPHKAQVDSWETVFGNEGWNWDSVAAYSLQAERARAPNAKQIAAGHYFNASCHGLNGTVHAGPRDTGDDYSPIVKALMSAVEDRGVPTKKDLGCGDPHGVSMFPNTLHEDQVRSDAAREWLLPNYQRPNLQVLTGQYVGKVLLSQNATTPRAVGVEFGTHKGNTHNVYAKHEVLLAAGSAVSPTILEYSGIGMKSILEPLGIDTVVDLPVGLNLQDQTTSTVRSRITSAGAGQGQAAWFATFNETFGDYTEKAHELLNTKLEQWAEEAVARGGFHNTTALLIQYENYRDWIVKDNVAYSELFLDTAGVASFDVWDLLPFTRGYVHILDKDPYLRHFAYDPQYFLNELDLLGQAAATQLARNISNSGAMQTYFAGETIPGDNLAYDADLSAWVEYIPENFRPNYHGVGTCSMMPKEMGGVVDNAARVYGVQGLRVIDGSIPPTQLSSHVMTVFYAMALKIADAVLADYASMQ

SEQ ID NO: 700 - protein, 583 aa, Aspergillus niger
SNGIEASLLKDPKEVAGRTYDYIIAGGGLTGLTVAARLTENPNITVLVIESGSYESDRGPIIEDLNAYGDIFGSSVDHAYETVELPTNNQTALIRSGNGLGGSTLINGGTWTRPHKAQVDSWETVFGNEGWNWDSVAAYSLQAERARAPNAKQIAAGHYFNASCHGLNGTVHAGPRDTGDDYSPIVKALMSAVEDRGVPTKKDLGCGDPHGVSMFPNTLHEDQVRSDAAREWLLPNYQRPNLQVLTGQYVGKVLLSQNATTPRAVGVEFGTHKGNTHNVYAKHEVLLAAGSAVSPTILEYSGIGMKSILEPLGIDTVVDLPVGLNLQDQTTSTVRSRITSAGAGQGQAAWFATFNETFGDYTEKAHELLNTKLEQWAEEAVARGGFHNTTALLIQYENYRDWIVKDNVAYSELFLDTAGVASFDVWDLLPFTRGYVHILDKDPYLRHFAYDPQYFLNELDLLGQAAATQLARNISNSGAMQTYFAGETIPGDNLAYDADLSAWVEYIPENFRPNYHGVGTCSMMPKEMGGVVDNAARVYGVQGLRVIDGSIPPTQLSSHVMTVFYAMALKIADAVLADYASMQ

SEQ ID NO: 701 - protein, 583 aa, Aspergillus niger
SNGIEASLLKDPKEVAGRTYDYIIAGGGLTGLTVAARLTENPNITVLVIESGSYESDRGPIIEDLNAYGDIFGSSVDHAYETVELATNNQTALIRSGNGLGGSTLINGGTWTRPHKAQVDSWETVFGNEGWNWDSVAAYSLQAERARAPNAKQIAAGHYFNASCHGINGTVHAGPRDTGDDYSPIVKALMSAVEDRGVPTKKDLGCGDPHGVSMFPNTLHPDQVRSDAAREWLLPNYQRPNLQVLTGQYVGKVLLSQNATTPRAVGVEFGTHKGNTHNVYAKHEVLLAAGSAVSPTILEYSGIGMKSILEPLGIDTVVDLPVGLNLQDQTTSTVRSRITSAGAGQGQAAWFATFNETFGDYTEKAHELLNTKLEQWAEEAVARGGFHNTTALLIQYENYRDWIVKDNVAYSELFLDTAGVASFDVWDLLPFTRGYVHILDKDPYLRHFAYDPQYFLNELDLLGQAAATQLARNISNSGAMQTYFAGETIPGDNLAYDADLSAWVEYIPENFRPNYHGVGTCSMMPKEMGGVVDNAARVYGVQGLRVIDGSIPPTQLSSHVMTVFYAMALKIADAVLADYASMQ

SEQ ID NO: 702 - protein, 583 aa, Aspergillus niger
SNGIEASLLKDPKEVAGRTYDYIIAGGGLTGLTVAARLTENPNITVLVIESGSYESDRGPIIEDLNAYGDIFGSSVDHAYETVELPTNNQTALIRSGNGLGGSTLINGGTWTRPHKAQVDSWETVFGNEGWNWDSVAAYSLQAERARAPNAKQIAAGHYFNASCHGINGTVHAGPRDTGDDYSPIVKALMSAVEDRGVPTKKDLGCGDPHGVSMFPNTLHEDQVRSDAAREWLLPNYQRPNLQVLTGQYVGKVLLSQNATTPRAVGVEFGTHKGNTHNVYAKHEVLLAAGSAVSPTILEYSGIGMKSILEPLGIDTVVDLPVGLNLQDQTTSTVRSRITSAGAGQGQAAWFATFNETFGDYTEKAHELLNTKLEQWAEEAVARGGFHNTTALLIQYENYRDWIVKDNVAYSELFLDTAGVASFDVWDLLPFTRGYVHILDKDPYLRHFAYDPQYFLNELDLLGQAAATQLARNISNSGAMQTYFAGETIPGDNLAYDADLRAWVEYIPENFRPNYHGVGTCSMMPKEMGGVVDNAARVYGVQGLRVIDGSIPPTQLSSHVMTVFYAMALKIADAILADYASMQ

SEQ ID NO: 703 - protein, 583 aa, Aspergillus niger
SNGIEASLLKDPKEVAGRTYDYIIAGGGLTGLTVAARLTENPNITVLVIESGSYESDRGPIIEDLNAYGDIFGSSVDHAYETVELPTNNQTALIRSGNGLGGSTLINGGTWTRPHKAQVDSWETVFGNEGWNWDSVAAYSLQAERARAPNAKQIAAGHYFNASCHGINGTVHAGPRDTGDDYSPIVKALMSAVEDRGVPTKKDLGCGDPHGVSMFPNTLHPDQVRSDAAREWLLPNYQRPNLQVLTGRYVGKVLLSQNATTPRAVGVEFGTHKGNTHNVYAKHEVLLAAGSAVSPTILEYSGIGMKSILEPLGIDTVVDLPVGLNLQDQTTSTVRSRITSAGAGQGQAAWFATFNETFGDYAEKAHELLNTKLEQWAEEAVARGGFHNTTALLIQYENYRDWIVKDNVAYSELFLDTAGVASFDVWDLLPFTRGYVHILDKDPYLRHFAYDPQYFLNELDLLGQAAATQLARNISNSGAMQTYFAGETIPGDNLAYDADLSAWVEYIPENFRPNYHGVGTCSMMPKEMGGVVDNAARVYGVQGLRVIDGSIPPTQMSSHVMTVFYAMALKIADAILADYASMQ

SEQ ID NO: 704 - protein, 583 aa, Aspergillus niger
SNGIEASLLKDPKEVAGRTYDYIIAGGGLTGLTVAAKLTENPNITVLVIESGSYESDRGPIIEDLNAYGDIFGSSVDHAYETVELPTNNRTALIRSGNGLGGSTLINGGTWTRPHKAQVDSWETVFGNEGWNWDSVAAYSLQAERARAPNAKQIAAGHYFNASCHGLNGTVHAGPRDTGDDYSPIVKALMSAVEDRGVPTKKDLGCGDPHGVSMFPNTLHEDQVRSDAAREWLLPNYQRPNLQVLTGQYVGKVLLSQNATTPRAVGVEFGTHKGNTHNVYAKHEVLLAAGSAVSPTILEYSGIGMKSILEPLGIDTVVDLPVGLNLQDQTTSTVRSRITSAGAGQGQAAWFATFNETFGDYTEKAHELLNTKLEQWAEEAVARGGFHNTTALLIQYENYRDWIVKDNVAYSELFLDTAGVASFDVWDLLPFTRGYVHILDKDPYLRHFAYDPQYFLNELDLLGQAAATQLARNISNSGAMQTYFAGETIPGDNLAYDADLSAWVEYIPENFRPNYHGVGTCSMMPKEMGGVVDNAARVYGVQGLRVIDGSIPPTQMSSHVMTVFYAMALKIADAILADYASMQ

SEQ ID NO: 705 - protein, 583 aa, Aspergillus niger
SNGIEASLLKDPKEVAGRTYDYIIAGGGLTGLTVAARLTENPNITVLVIESGSYESDRGPIIEDLNAYGDIFGSSVDHAYETVELATNNQTALIRSGNGLGGSTLINGGTWTRPHKAQVDSWETVFGNEGWNWDSVAAYSLQAERARAPNAKQIAAGHYFNASCHGINGTVHAGPRDTGDDYSPIVKALMSAVEDRGVPTKKDLGCGDPHGVSMFPNTLHPDQVRSDAAREWLLPNYQRPNLQVLTGQYVGKVLLSQNATTPRAVGVEFGTHKGNTHNVYAKHEVLLAAGSAVSPTILEYSGIGMKSILEPLGIDTVVDLPVGLNLQDQTTSTVRSRITSAGAGQGQAAWFATFNETFGDYTEKAHELLNTKLEQWAEEAVARGGFHNTTALLIQYENYRDWIVKDNVAYSELFLDTAGVASFDVWDLLPFTRGYVHILDKDPYLRHFAYDPQYFLNELDLLGQAAATQLARNISNSGAMQTYFAGETIPGDNLAYDADLRAWVEYIPENFRPNYHGVGTCSMMPKEMGGVVDNAARVYGVQGLRVIDGSIPPTQLSSHVMTVFYAMALKIADAILADYASMQ

SEQ ID NO: 706 - protein, 583 aa, Aspergillus niger
SNGIEASLLKDPKEVAGRTYDYIIAGGGLTGLTVAARLTENPNITVLVIESGSYESDRGPIIEDLNAYGDIFGSSVDHAYETVELATNNRTALIRSGNGLGGSTLINGGTWTRPHKAQVDSWETVFGNEGWNWDSVAAYSLQAERARAPNAKQIAAGHYFNASCHGINGTVHAGPRDTGDDYSPIVKALMSAVEDRGVPTKKDLGCGDPHGVSMFPNTLHEDQVRSDAAREWLLPNYQRPNLQVLTGQYVGKVLLSQNATTPRAVGVEFGTHKGNTHNVYAKHEVLLAAGSAVSPTILEYSGIGMKSILEPLGIDTVVDLPVGLNLQDQTTSTVRSRITSAGAGQGQAAWFATFNETFGDYAEKAHELLNTKLEQWAEEAVARGGFHNTTALLIQYENYRDWIVKDNVAYSELFLDTAGVASFDVWDLLPFTRGYVHILDKDPYLRHFAYDPQYFLNELDLLGQAAATQLARNISNSGAMQTYFAGETIPGDNLAYDADLSAWVEYIPENFRPNYHGVGTCSMMPKEMGGVVDNAARVYGVQGLRVIDGSIPPTQLSSHVMTVFYAMALKIADAVLADYASMQ

SEQ ID NO: 707 - protein, 583 aa, Aspergillus niger
SNGIEASLLKDPKEVAGRTYDYIIAGGGLTGLTVAAKLTENPNITVLVIESGSYESDRGPIIEDLNAYGDIFGSSVDHAYETVELATNNRTALIRSGNGLGGSTLINGGTWTRPHKAQVDSWETVFGNEGWNWDSVAAYSLQAERARAPNAKQIAAGHYFNASCHGLNGTVHAGPRDTGDDYSPIVKALMSAVEDRGVPTKKDLGCGDPHGVSMFPNTLHEDQVRSDAAREWLLPNYQRPNLQVLTGQYVGKVLLSQNATTPRAVGVEFGTHKGNTHNVYAKHEVLLAAGSAVSPTILEYSGIGMKSILEPLGIDTVVDLPVGLNLQDQTTSTVRSRITSAGAGQGQAAWFATFNETFGDYTEKAHELLNTKLEQWAEEAVARGGFHNTTALLIQYENYRDWIVKDNVAYSELFLDTAGVASFDVWDLLPFTRGYVHILDKDPYLRHFAYDPQYFLNELDLLGQAAATQLARNISNSGAMQTYFAGETIPGDNLAYDADLSAWVEYIPENFRPNYHGVGTCSMMPKEMGGVVDNAARVYGVQGLRVIDGSIPPTQLSSHVMTVFYAMALKIADAILADYASMQ

SEQ ID NO: 708 - protein, 583 aa, Aspergillus niger
SNGIEASLLKDPKEVAGRTYDYIIAGGGLTGLTVAARLTENPNITVLVIESGSYESDRGPIIEDLNAYGDIFGSSVDHAYETVELATNNQTALIRSGNGLGGSTLINGGTWTRPHKAQVDSWETVFGNEGWNWDSVAAYSLQAERARAPNAKQIAAGHYFNPSCHGINGTVHAGPRDTGDDYSPIVKALMSAVEDRGVPTKKDLGCGDPHGVSMFPNTLHEDQVRSDAAREWLLPNYQRPNLQVLTGRYVGKVLLSQNATTPRAVGVEFGTHKGNTHNVYAKHEVLLAAGSAVSPTILEYSGIGMKSILEPLGIDTVVDLPVGLNLQDQTTSTVRSRITPAGAGQGQAAWFATFNETFGDYAEKAHELLNTKLEQWAEEAVARGGFHNTTALLIQYENYRDWIVKDNVAYSELFLDTAGVASFDVWDLLPFTRGYVHILDKDPYLRHFAYDPQYFLNELDLLGQAAATQLARNISNSGAMQTYFAGETIPGDNLAYDADLSAWVEYIPENFRPNYHGVGTCSMMPKEMGGVVDNAARVYGVQGLRVIDGSIPPTQMSSHVMTVFYAMALKIADAILADYASMQ

SEQ ID NO: 709 - protein, 583 aa, Aspergillus niger
SNGIEASLLKDPKEVAGRTYDYIIAGGGLTGLTVAAKLTENPNITVLVIESGSYESDRGPIIEDLNAYGDIFGSSVDHAYETVELATNNRTALIRSGNGLGGSTLINGGTWTRPHKAQVDSWETVFGNEGWNWDSVAAYSLQAERARAPNAKQIAAGHYFNPSCHGINGTVHAGPRDTGDDYSPIVKALMSAVEDRGVPTKKDLGCGDPHGVSMFPNTLHEDQVRSDAAREWLLPNYQRPNLQVLTGQYVGKVLLSQNATTPRAVGVEFGTHKGNTHNVYAKHEVLLAAGSAVSPTILEYSGIGMKSILEPLGIDTVVDLPVGLNLQDQTTSTVRSRITSAGAGQGQAAWFATFNETFGDYAEKAHELLNTKLEQWAEEAVARGGFHNTTALLIQYENYRDWIVKDNVAYSELFLDTAGVASFDVWDLLPFTRGYVHILDKDPYLRHFAYDPQYFLNELDLLGQAAATQLARNISNSGAMQTYFAGETIPGDNLAYDADLSAWVEYIPENFRPNYHGVGTCSMMPKEMGGVVDNAARVYGVQGLRVIDGSIPPTQMSSHVMTVFYAMALKIADAILADYASMQ

SEQ ID NO: 710 - protein, 583 aa, Aspergillus niger
SNGIEASLLKDPKEVAGRTYDYIIAGGGLTGLTVAARLTENPNITVLVIESGSYESDRGPIIEDLNAYGDIFGSSVDHAYETVELATNNRTALIRSGNGLGGSTLINGGTWTRPHKAQVDSWETVFGNEGWNWDSVAAYSLQAERARAPNAKQIAAGHYFNPSCHGLNGTVHAGPRDTGDDYSPIVKALMSAVEDRGVPTKKDLGCGDPHGVSMFPNTLHEDQVRSDAAREWLLPNYQRPNLQVLTGRYVGKVLLSQNATTPRAVGVEFGTHKGNTHNVYAKHEVLLAAGSAVSPTILEYSGIGMKSILEPLGIDTVVDLPVGLNLQDQTTSTVRSRITSAGAGQGQAAWFATFNETFGDYAEKAHELLNTKLEQWAEEAVARGGFHNTTALLIQYENYRDWIVKDNVAYSELFLDTAGVASFDVWDLLPFTRGYVHILDKDPYLRHFAYDPQYFLNELDLLGQAAATQLARNISNSGAMQTYFAGETIPGDNLAYDADLSAWVEYIPENFRPNYHGVGTCSMMPKEMGGVVDNAARVYGVQGLRVIDGSIPPTQMSSHVMTVFYAMALKIADAILADYASMQ

SEQ ID NO: 711 - protein, 583 aa, Aspergillus niger
SNGIEASLLKDPKEVAGRTYDYIIAGGGLTGLTVAARLTENPNITVLVIESGSYESDRGPIIEDLNAYGDIFGSSVDHAYETVELPTNNRTALIRSGNGLGGSTLINGGTWTRPHKAQVDSWETVFGNEGWNWDSVAAYSLQAERARAPNAKQIAAGHYFNPSCHGINGTVHAGPRDTGDDYSPIVKALMSAVEDRGVPTKKDLGCGDPHGVSMFPNTLHEDQVRSDAAREWLLPNYQRPNLQVLTGQYVGKVLLSQNATTPRAVGVEFGTHKGNTHNVYAKHEVLLAAGSAVSPTILEYSGIGMKSILEPLGIDTVVDLPVGLNLQDQTTSTVRSRITSAGAGQGQAAWFATFNETFGDYAEKAHELLNTKLEQWAEEAVARGGFHNTTALLIQYENYRDWIVKDNVAYSELFLDTAGVASFDVWDLLPFTRGYVHILDKDPYLRHFAYDPQYFLNELDLLGQAAATQLARNISNSGAMQTYFAGETIPGDNLAYDADLSAWVEYIPENFRPNYHGVGTCSMMPKEMGGVVDNAARVYGVQGLRVIDGSIPPTQMSSHVMTVFYAMALKIADAILADYASMQ

SEQ ID NO: 712 - protein, 583 aa, Aspergillus niger
SNGIEASLLKDPKEVAGRTYDYIIAGGGLTGLTVAARLTENPNITVLVIESGSYESDRGPIIEDLNAYGDIFGSSVDHAYETVELPTNNQTALIRSGNGLGGSTLINGGTWTRPHKAQVDSWETVFGNEGWNWDSVAAYSLQAERARAPNAKQIAAGHYFNASCHGINGTVHAGPRDTGDDYSPIVKALMSAVEDRGVPTKKDLGCGDPHGVSMFPNTLHEDQVRSDAAREWLLPNYQRPNLQVLTGRYVGKVLLSQNATTPRAVGVEFGTHKGNTHNVYAKHEVLLAAGSAVSPTILEYSGIGMKSILEPLGIDTVVDLPVGLNLQDQTTSTVRSRITSAGAGQGQAAWFATFNETFGDYTEKAHELLNTKLEQWAEEAVARGGFHNTTALLIQYENYRDWIVKDNVAYSELFLDTAGVASFDVWDLLPFTRGYVHILDKDPYLRHFAYDPQYFLNELDLLGQAAATQLARNISNSGAMQTYFAGETIPGDNLAYDADLRAWVEYIPENFRPNYHGVGTCSMMPKEMGGVVDNAARVYGVQGLRVIDGSIPPTQMSSHVMTVFYAMALKIADAILADYASMQ

SEQ ID NO: 713 - protein, 583 aa, Aspergillus niger
SNGIEASLLKDPKEVAGRTYDYIIAGGGLTGLTVAARLTENPNITVLVIESGSYESDRGPIIEDLNAYGDIFGSSVDHAYETVELATNNQTALIRSGNGLGGSTLINGGTWTRPHKAQVDSWETVFGNEGWNWDSVAAYSLQAERARAPNAKQIAAGHYFNASCHGINGTVHAGPRDTGDDYSPIVKALMSAVEDRGVPTKKDLGCGDPHGVSMFPNTLHEDQVRSDAAREWLLPNYQRPNLQVLTGQYVGKVLLSQNATTPRAVGVEFGTHKGNTHNVYAKHEVLLAAGSAVSPTILEYSGIGMKSILEPLGIDTVVDLPVGLNLQDQTTSTVRSRITSAGAGQGQAAWFATFNETFGDYAEKAHELLNTKLEQWAEEAVARGGFHNTTALLIQYENYRDWIVKDNVAYSELFLDTAGVASFDVWDLLPFTRGYVHILDKDPYLRHFAYDPQYFLNELDLLGQAAATQLARNISNSGAMQTYFAGETIPGDNLAYDADLRAWVEYIPENFRPNYHGVGTCSMMPKEMGGVVDNAARVYGVQGLRVIDGSIPPTQLSSHVMTVFYAMALKIADAVLADYASMQ

SEQ ID NO: 714 - protein, 583 aa, Aspergillus niger
SNGIEASLLKDPKEVAGRTYDYIIAGGGLTGLTVAARLTENPNITVLVIESGSYESDRGPIIEDLNAYGDIFGSSVDHAYETVELATNNQTALIRSGNGLGGSTLINGGTWTRPHKAQVDSWETVFGNEGWNWDSVAAYSLQAERARAPNAKQIAAGHYFNPSCHGINGTVHAGPRDTGDDYSPIVKALMSAVEDRGVPTKKDLGCGDPHGVSMFPNTLHEDQVRSDAAREWLLPNYQRPNLQVLTGQYVGKVLLSQNATTPRAVGVEFGTHKGNTHNVYAKHEVLLAAGSAVSPTILEYSGIGMKSILEPLGIDTVVDLPVGLNLQDQTTSTVRSRITSAGAGQGQAAWFATFNETFGDYAEKAHELLNTKLEQWAEEAVARGGFHNTTALLIQYENYRDWIVKDNVAYSELFLDTAGVASFDVWDLLPFTRGYVHILDKDPYLRHFAYDPQYFLNELDLLGQAAATQLARNISNSGAMQTYFAGETIPGDNLAYDADLSAWVEYIPENFRPNYHGVGTCSMMPKEMGGVVDNAARVYGVQGLRVIDGSIPPTQLSSHVMTVFYAMALKIADAVLADYASMQ

SEQ ID NO: 715 - protein, 583 aa, Aspergillus niger
SNGIEASLLKDPKEVAGRTYDYIIAGGGLTGLTVAARLTENPNITVLVIESGSYESDRGPIIEDLNAYGDIFGSSVDHAYETVELATNNQTALIRSGNGLGGSTLINGGTWTRPHKAQVDSWETVFGNEGWNWDSVAAYSLQAERARAPNAKQIAAGHYFNASCHGINGTVHAGPRDTGDDYSPIVKALMSAVEDRGVPTKKDLGCGDPHGVSMFPNTLHEDQVRSDAAREWLLPNYQRPNLQVLTGQYVGKVLLSQNATTPRAVGVEFGTHKGNTHNVYAKHEVLLAAGSAVSPTILEYSGIGMKSILEPLGIDTVVDLPVGLNLQDQTTSTVRSRITPAGAGQGQAAWFATFNETFGDYTEKAHELLNTKLEQWAEEAVARGGFHNTTALLIQYENYRDWIVKDNVAYSELFLDTAGVASFDVWDLLPFTRGYVHILDKDPYLRHFAYDPQYFLNELDLLGQAAATQLARNISNSGAMQTYFAGETIPGDNLAYDADLRAWVEYIPENFRPNYHGVGTCSMMPKEMGGVVDNAARVYGVQGLRVIDGSIPPTQMSSHVMTVFYAMALKIADAVLADYASMQ

SEQ ID NO: 716 - protein, 583 aa, Aspergillus niger
SNGIEASLLKDPKEVAGRTYDYIIAGGGLTGLTVAARLTENPNITVLVIESGSYESDRGPIIEDLNAYGDIFGSSVDHAYETVELATNNQTALIRSGNGLGGSTLINGGTWTRPHKAQVDSWETVFGNEGWNWDSVAAYSLQAERARAPNAKQIAAGHYFNASCHGINGTVHAGPRDTGDDYSPIVKALMSAVEDRGVPTKKDLGCGDPHGVSMFPNTLHEDQVRSDAAREWLLPNYQRPNLQVLTGQYVGKVLLSQNATTPRAVGVEFGTHKGNTHNVYAKHEVLLAAGSAVSPTILEYSGIGMKSILEPLGIDTVVDLPVGLNLQDQTTSTVRSRITPAGAGQGQAAWFATFNETFGDYTEKAHELLNTKLEQWAEEAVARGGFHNTTALLIQYENYRDWIVKDNVAYSELFLDTAGVASFDVWDLLPFTRGYVHILDKDPYLRHFAYDPQYFLNELDLLGQAAATQLARNISNSGAMQTYFAGETIPGDNLAYDADLRAWVEYIPENFRPNYHGVGTCSMMPKEMGGVVDNAARVYGVQGLRVIDGSIPPTQLSSHVMTVFYAMALKIADAILADYASMQ

SEQ ID NO: 717 - protein, 583 aa, Aspergillus niger
SNGIEASLLKDPKEVAGRTYDYIIAGGGLTGLTVAARLTENPNITVLVIESGSYESDRGPIIEDLNAYGDIFGSSVDHAYETVELPTNNQTALIRSGNGLGGSTLINGGTWTRPHKAQVDSWETVFGNEGWNWDSVAAYSLQAERARAPNAKQIAAGHYFNPSCHGLNGTVHAGPRDTGDDYSPIVKALMSAVEDRGVPTKKDLGCGDPHGVSMFPNTLHEDQVRSDAAREWLLPNYQRPNLQVLTGRYVGKVLLSQNATTPRAVGVEFGTHKGNTHNVYAKHEVLLAAGSAVSPTILEYSGIGMKSILEPLGIDTVVDLPVGLNLQDQTTSTVRSRITSAGAGQGQAAWFATFNETFGDYAEKAHELLNTKLEQWAEEAVARGGFHNTTALLIQYENYRDWIVKDNVAYSELFLDTAGVASFDVWDLLPFTRGYVHILDKDPYLRHFAYDPQYFLNELDLLGQAAATQLARNISNSGAMQTYFAGETIPGDNLAYDADLSAWVEYIPENFRPNYHGVGTCSMMPKEMGGVVDNAARVYGVQGLRVIDGSIPPTQMSSHVMTVFYAMALKIADAILADYASMQ

SEQ ID NO: 718 - protein, 583 aa, Aspergillus niger
SNGIEASLLKDPKEVAGRTYDYIIAGGGLTGLTVAARLTENPNITVLVIESGSYESDRGPIIEDLNAYGDIFGSSVDHAYETVELATNNQTALIRSGNGLGGSTLINGGTWTRPHKAQVDSWETVFGNEGWNWDSVAAYSLQAERARAPNAKQIAAGHYFNASCHGLNGTVHAGPRDTGDDYSPIVKALMSAVEDRGVPTKKDLGCGDPHGVSMFPNTLHPDQVRSDAAREWLLPNYQRPNLQVLTGRYVGKVLLSQNATTPRAVGVEFGTHKGNTHNVYAKHEVLLAAGSAVSPTILEYSGIGMKSILEPLGIDTVVDLPVGLNLQDQTTSTVRSRITPAGAGQGQAAWFATFNETFGDYAEKAHELLNTKLEQWAEEAVARGGFHNTTALLIQYENYRDWIVKDNVAYSELFLDTAGVASFDVWDLLPFTRGYVHILDKDPYLRHFAYDPQYFLNELDLLGQAAATQLARNISNSGAMQTYFAGETIPGDNLAYDADLSAWVEYIPENFRPNYHGVGTCSMMPKEMGGVVDNAARVYGVQGLRVIDGSIPPTQMSSHVMTVFYAMALKIADAILADYASMQ

SEQ ID NO: 719 - protein, 605 aa, Aspergillus niger
MSTLLVSSLVVSLAAALPHYIRSNGIEASLLTDPKEVAGRTVDYIIAGGGLTGLTTAARLTENPDITVLVIESGSYESDRGPIIEDLNAYGDIFGSSVDHAYETVELATNNQTALIRSGNGLGGSTLVNGGTWTRPHKAQVDSWETVFGNEGWNWDSVAAYSLQAFRARAPNAKQIAAGHYFNASCHGINGTVHAGPRDTGDDYSPIVKALMSAVEDRGVPTKKDLGCGDPHGVSMFPNTLHEDQVRSDAAREWLLPNYQRPNLQVLTGRYVGKVLLSQNATTPRAVGVEFGTHKGNTHNVYAKHEVLLAAGSAVSPTIIEYSGIGMKSILEPLGIDTVVDLPVGLNLQDQTTSTVRSRITSAGAGQGQAAWFATFNETFGDYAEKAHELLNTKLEQWAEEAVARGGFHNTTALLIQYENYRDWIVKDNVAYSELFLDTAGVASFDVWDLLPFTRGYVHILDKDPYLRHFAYDPQYFLNFLDLLGQAAATQLARNISNSGAMQTYFAGETIPGDNLAYDADLSAWVEYIPYNFRPNYHGVGTCSMMPKEMGCVVDNAARVYGVQGLRVIDGSIPPTQMSSHVMTVFYAMALKVADATLADYASMQ

SEQ ID NO: 720 - protein, 583 aa, Aspergillus niger
SNGIEASLLKDPKEVAGRTYDYIIAGGGLTGLTVAARLTENPNITVLVIESGSYESDRGPIIEDLNAYGDIFGSSVDHAYETVELATNNQTALIRSGNGLGGSTLINGGTWTRPHKAQVDSWETVFGNEGWNWDSVAAYSLQAERARAPNAKQIAAGHYFNASCHGINGTVHAGPRDTGDDYSPIVKALMSAVEDRGVPTKKDLGCGDPHGVSMFPNTLHPDQVRSDAAREWLLPNYQRPNLQVLTGRYVGKVLLSQNATTPRAVGVEFGTHKGNTHNVYAKHEVLLAAGSAVSPTILEYSGIGMKSILEPLGIDTVVDLPVGLNLQDQTTSTVRSRITPAGAGQGQAAWFATFNETFGDYTEKAHELLNTKLEQWAEEAVARGGFHNTTALLIQYENYRDWIVKDNVAYSELFLDTAGVASFDVWDLLPFTRGYVHILDKDPYLRHFAYDPQYFLNELDLLGQAAATQLARNISNSGAMQTYFAGETIPGDNLAYDADLRAWVEYIPENFRPNYHGVGTCSMMPKEMGGVVDNAARVYGVQGLRVIDGSIPPTQMSSHVMTVFYAMALKIADAILADYASMQ

SEQ ID NO: 721 - protein, 583 aa, Aspergillus niger
SNGIEASLLKDPKEVAGRTYDYIIAGGGLTGLTVAAKLTENPNITVLVIESGSYESDRGPIIEDLNAYGDIFGSSVDHAYETVELATNNRTALIRSGNGLGGSTLINGGTWTRPHKAQVDSWETVFGNEGWNWDSVAAYSLQAERARAPNAKQIAAGHYFNASCHGLNGTVHAGPRDTGDDYSPIVKALMSAVEDRGVPTKKDLGCGDPHGVSMFPNTLHEDQVRSDAAREWLLPNYQRPNLQVLTGRYVGKVLLSQNATTPRAVGVEFGTHKGNTHNVYAKHEVLLAAGSAVSPTILEYSGIGMKSILEPLGIDTVVDLPVGLNLQDQTTSTVRSRITPAGAGQGQAAWFATFNETFGDYAEKAHELLNTKLEQWAEEAVARGGFHNTTALLIQYENYRDWIVKDNVAYSELFLDTAGVASFDVWDLLPFTRGYVHILDKDPYLRHFAYDPQYFLNELDLLGQAAATQLARNISNSGAMQTYFAGETIPGDNLAYDADLSAWVEYIPENFRPNYHGVGTCSMMPKEMGGVVDNAARVYGVQGLRVIDGSIPPTQMSSHVMTVFYAMALKIADAILADYASMQ

SEQ ID NO: 722 - protein, 583 aa, Aspergillus niger
SNGIEASLLKDPKEVAGRTYDYIIAGGGLTGLTVAARLTENPNITVLVIESGSYESDRGPIIEDLNAYGDIFGSSVDHAYETVELATNNQTALIRSGNGLGGSTLINGGTWTRPHKAQVDSWETVFGNEGWNWDSVAAYSLQAERARAPNAKQIAAGHYFNASCHGINGTVHAGPRDTGDDYSPIVKALMSAVEDRGVPTKKDLGCGDPHGVSMFPNTLHPDQVRSDAAREWLLPNYQRPNLQVLTGRYVGKVLLSQNATTPRAVGVEFGTHKGNTHNVYAKHEVLLAAGSAVSPTILEYSGIGMKSILEPLGIDTVVDLPVGLNLQDQTTSTVRSRITSAGAGQGQAAWFATFNETFGDYAEKAHELLNTKLEQWAEEAVARGGFHNTTALLIQYENYRDWIVKDNVAYSELFLDTAGVASFDVWDLLPFTRGYVHILDKDPYLRHFAYDPQYFLNELDLLGQAAATQLARNISNSGAMQTYFAGETIPGDNLAYDADLRAWVEYIPENFRPNYHGVGTCSMMPKEMGGVVDNAARVYGVQGLRVIDGSIPPTQLSSHVMTVFYAMALKIADAILADYASMQ

SEQ ID NO: 723 - protein, 583 aa, Aspergillus niger
SNGIEASLLTDPKEVAGRTVDYIIAGGGLTGLTVAARLTENPDITVLVIEPGSYESDRGAIIEDLNAYGDIFGSSVDHAYETVELATNNRTALIRSGNGLGGSTYFNGGTWTRPHKAQVDSWETVFGNEGWNWDSVAAYSLQAERARAPNAKQIAAGHYFNASCHGINGTVHAGPRDTGDDYSPIVKALMSAVEDRGVPTKKDLGCGDPHGVSMFPNTLHEDQVRSDAAREWLLPNYQRPNLEVLTGQYVGKVLLSQNATTPRAVGVEFGTHKGNTHNVYAKHEVLLAAGSAVSPTILEYSGIGMKSILEPLGIDTVVDLPVGLNLQDQTTSTVRSRITSAGAGQGQAAWFATFNETFGDYAEKAHELLNTKLEQWAEEAVARGGFHNTTALLIQYENYRDWIVKDNVAYSELFLDTAGVASFDVWDLLPFTRGYVHILDKDPYLRHFAYDPQYFLNELDLLGQAAATQLARNISNSGAMQTYFAGETIPGDNLAYDADLSAWVEYIPYNFRPNYHGVGTCSMMPKEMGGVVDNAARVYGVQGLRVIDGSIPPTQMSSHVSTVFYAMALKIADAILADYASMQ

SEQ ID NO: 724 - protein, 583 aa, Aspergillus niger
SNGIEASLLKDPKEVAGRTYDYIIAGGGLTGLTVAAKLTENPNITVLVIESGSYESDRGPIIEDLNAYGDIFGSSVDHAYETVELATNNQTALIRSGNGLGGSTLINGGTWTRPHKAQVDSWETVFGNEGWNWDSVAAYSLQAERARAPNAKQIAAGHYFNPSCHGLNGTVHAGPRDTGDDYSPIVKALMSAVEDRGVPTKKDLGCGDPHGVSMFPNTLHPDQVRSDAAREWLLPNYQRPNLQVLTGQYVGKVLLSQNATTPRAVGVEFGTHKGNTHNVYAKHEVLLAAGSAVSPTILEYSGIGMKSILEPLGIDTVVDLPVGLNLQDQTTSTVRSRITSAGAGQGQAAWFATFNETFGDYTEKAHELLNTKLEQWAEEAVARGGFHNTTALLIQYENYRDWIVKDNVAYSELFLDTAGVASFDVWDLLPFTRGYVHILDKDPYLRHFAYDPQYFLNELDLLGQAAATQLARNISNSGAMQTYFAGETIPGDNLAYDADLRAWVEYIPENFRPNYHGVGTCSMMPKEMGGVVDNAARVYGVQGLRVIDGSIPPTQMSSHVMTVFYAMALKIADAILADYASMQ

SEQ ID NO: 725 - protein, 583 aa, Aspergillus niger
SNGIEASLLKDPKEVAGRTYDYIIAGGGLTGLTVAARLTENPNITVLVIESGSYESDRGPIIEDLNAYGDIFGSSVDHAYETVELATNNRTALIRSGNGLGGSTLINGGTWTRPHKAQVDSWETVFGNEGWNWDSVAAYSLQAERARAPNAKQIAAGHYFNPSCHGLNGTVHAGPRDTGDDYSPIVKALMSAVEDRGVPTKKDLGCGDPHGVSMFPNTLHPDQVRSDAAREWLLPNYQRPNLQVLTGRYVGKVLLSQNATTPRAVGVEFGTHKGNTHNVYAKHEVLLAAGSAVSPTILEYSGIGMKSILEPLGIDTVVDLPVGLNLQDQTTSTVRSRITSAGAGQGQAAWFATFNETFGDYTEKAHELLNTKLEQWAEEAVARGGFHNTTALLIQYENYRDWIVKDNVAYSELFLDTAGVASFDVWDLLPFTRGYVHILDKDPYLRHFAYDPQYFLNELDLLGQAAATQLARNISNSGAMQTYFAGETIPGDNLAYDADLSAWVEYIPENFRPNYHGVGTCSMMPKEMGGVVDNAARVYGVQGLRVIDGSIPPTQMSSHVMTVFYAMALKIADAILADYASMQ

SEQ ID NO: 726 - protein, 583 aa, Aspergillus niger
SNGIEASLLKDPKEVAGRTYDYIIAGGGLTGLTVAARLTENPNITVLVIESGSYESDRGPIIEDLNAYGDIFGSSVDHAYETVELATNNQTALIRSGNGLGGSTLINGGTWTRPHKAQVDSWETVFGNEGWNWDSVAAYSLQAERARAPNAKQIAAGHYFNASCHGINGTVHAGPRDTGDDYSPIVKALMSAVEDRGVPTKKDLGCGDPHGVSMFPNTLHEDQVRSDAAREWLLPNYQRPNLQVLTGQYVGKVLLSQNATTPRAVGVEFGTHKGNTHNVYAKHEVLLAAGSAVSPTILEYSGIGMKSILEPLGIDTVVDLPVGLNLQDQTTSTVRSRITPAGAGQGQAAWFATFNETFGDYTEKAHELLNTKLEQWAEEAVARGGFHNTTALLIQYENYRDWIVKDNVAYSELFLDTAGVASFDVWDLLPFTRGYVHILDKDPYLRHFAYDPQYFLNELDLLGQAAATQLARNISNSGAMQTYFAGETIPGDNLAYDADLRAWVEYIPENFRPNYHGVGTCSMMPKEMGGVVDNAARVYGVQGLRVIDGSIPPTQLSSHVMTVFYAMALKIADAVLADYASMQ

SEQ ID NO: 727 - protein, 583 aa, Aspergillus niger
SNGIEASLLKDPKEVAGRTYDYIIAGGGLTGLTVAARLTENPNITVLVIESGSYESDRGPIIEDLNAYGDIFGSSVDHAYETVELATNNRTALIRSGNGLGGSTLINGGTWTRPHKAQVDSWETVFGNEGWNWDSVAAYSLQAERARAPNAKQIAAGHYFNPSCHGLNGTVHAGPRDTGDDYSPIVKALMSAVEDRGVPTKKDLGCGDPHGVSMFPNTLHPDQVRSDAAREWLLPNYQRPNLQVLTGQYVGKVLLSQNATTPRAVGVEFGTHKGNTHNVYAKHEVLLAAGSAVSPTILEYSGIGMKSILEPLGIDTVVDLPVGLNLQDQTTSTVRSRITPAGAGQGQAAWFATFNETFGDYAEKAHELLNTKLEQWAEEAVARGGFHNTTALLIQYENYRDWIVKDNVAYSELFLDTAGVASFDVWDLLPFTRGYVHILDKDPYLRHFAYDPQYFLNELDLLGQAAATQLARNISNSGAMQTYFAGETIPGDNLAYDADLSAWVEYIPENFRPNYHGVGTCSMMPKEMGGVVDNAARVYGVQGLRVIDGSIPPTQMSSHVMTVFYAMALKIADAILADYASMQ

SEQ ID NO: 728 - protein, 583 aa, Aspergillus niger
SNGIEASLLKDPKEVAGRTYDYIIAGGGLTGLTVAARLTENPNITVLVIESGSYESDRGPIIEDLNAYGDIFGSSVDHAYETVELATNNRTALIRSGNGLGGSTLINGGTWTRPHKAQVDSWETVFGNEGWNWDSVAAYSLQAERARAPNAKQIAAGHYFNPSCHGINGTVHAGPRDTGDDYSPIVKALMSAVEDRGVPTKKDLGCGDPHGVSMFPNTLHPDQVRSDAAREWLLPNYQRPNLQVLTGRYVGKVLLSQNATTPRAVGVEFGTHKGNTHNVYAKHEVLLAAGSAVSPTILEYSGIGMKSILEPLGIDTVVDLPVGLNLQDQTTSTVRSRITSAGAGQGQAAWFATFNETFGDYAEKAHELLNTKLEQWAEEAVARGGFHNTTALLIQYENYRDWIVKDNVAYSELFLDTAGVASFDVWDLLPFTRGYVHILDKDPYLRHFAYDPQYFLNELDLLGQAAATQLARNISNSGAMQTYFAGETIPGDNLAYDADLSAWVEYIPENFRPNYHGVGTCSMMPKEMGGVVDNAARVYGVQGLRVIDGSIPPTQMSSHVMTVFYAMALKIADAILADYASMQ

SEQ ID NO: 729 - protein, 583 aa, Aspergillus niger
SNGIEASLLKDPKEVAGRTYDYIIAGGGLTGLTVAARLTENPNITVLVIESGSYESDRGPIIEDLNAYGDIFGSSVDHAYETVELATNNRTALIRSGNGLGGSTLINGGTWTRPHKAQVDSWETVFGNEGWNWDSVAAYSLQAERARAPNAKQIAAGHYFNPSCHGLNGTVHAGPRDTGDDYSPIVKALMSAVEDRGVPTKKDLGCGDPHGVSMFPNTLHEDQVRSDAAREWLLPNYQRPNLQVLTGQYVGKVLLSQNATTPRAVGVEFGTHKGNTHNVYAKHEVLLAAGSAVSPTILEYSGIGMKSILEPLGIDTVVDLPVGLNLQDQTTSTVRSRITPAGAGQGQAAWFATFNETFGDYAEKAHELLNTKLEQWAEEAVARGGFHNTTALLIQYENYRDWIVKDNVAYSELFLDTAGVASFDVWDLLPFTRGYVHILDKDPYLRHFAYDPQYFLNELDLLGQAAATQLARNISNSGAMQTYFAGETIPGDNLAYDADLSAWVEYIPENFRPNYHGVGTCSMMPKEMGGVVDNAARVYGVQGLRVIDGSIPPTQMSSHVMTVFYAMALKIADAVLADYASMQ

SEQ ID NO: 730 - protein, 583 aa, Aspergillus niger
SNGIEASLLKDPKEVAGRTYDYIIAGGGLTGLTVAARLTENPNITVLVIESGSYESDRGPIIEDLNAYGDIFGSSVDHAYETVELATNNQTALIRSGNGLGGSTLINGGTWTRPHKAQVDSWETVFGNEGWNWDSVAAYSLQAERARAPNAKQIAAGHYFNASCHGLNGTVHAGPRDTGDDYSPIVKALMSAVEDRGVPTKKDLGCGDPHGVSMFPNTLHPDQVRSDAAREWLLPNYQRPNLQVLTGRYVGKVLLSQNATTPRAVGVEFGTHKGNTHNVYAKHEVLLAAGSAVSPTILEYSGIGMKSILEPLGIDTVVDLPVGLNLQDQTTSTVRSRITPAGAGQGQAAWFATFNETFGDYTEKAHELLNTKLEQWAEEAVARGGFHNTTALLIQYENYRDWIVKDNVAYSELFLDTAGVASFDVWDLLPFTRGYVHILDKDPYLRHFAYDPQYFLNELDLLGQAAATQLARNISNSGAMQTYFAGETIPGDNLAYDADLRAWVEYIPENFRPNYHGVGTCSMMPKEMGGVVDNAARVYGVQGLRVIDGSIPPTQMSSHVMTVFYAMALKIADAILADYASMQ

SEQ ID NO: 731 - protein, 583 aa, Aspergillus niger
SNGIEASLLKDPKEVAGRTYDYIIAGGGLTGLTVAARLTENPNITVLVIESGSYESDRGPIIEDLNAYGDIFGSSVDHAYETVELPTNNQTALIRSGNGLGGSTLINGGTWTRPHKAQVDSWETVFGNEGWNWDSVAAYSLQAERARAPNAKQIAAGHYFNASCHGLNGTVHAGPRDTGDDYSPIVKALMSAVEDRGVPTKKDLGCGDPHGVSMFPNTLHPDQVRSDAAREWLLPNYQRPNLQVLTGQYVGKVLLSQNATTPRAVGVEFGTHKGNTHNVYAKHEVLLAAGSAVSPTILEYSGIGMKSILEPLGIDTVVDLPVGLNLQDQTTSTVRSRITSAGAGQGQAAWFATFNETFGDYTEKAHELLNTKLEQWAEEAVARGGFHNTTALLIQYENYRDWIVKDNVAYSELFLDTAGVASFDVWDLLPFTRGYVHILDKDPYLRHFAYDPQYFLNELDLLGQAAATQLARNISNSGAMQTYFAGETIPGDNLAYDADLRAWVEYIPENFRPNYHGVGTCSMMPKEMGGVVDNAARVYGVQGLRVIDGSIPPTQLSSHVMTVFYAMALKIADAILADYASMQ

SEQ ID NO: 732 - protein, 583 aa, Aspergillus niger
SNGIEASLLKDPKEVAGRTYDYIIAGGGLTGLTVAARLTENPNITVLVIESGSYESDRGPIIEDLNAYGDIFGSSVDHAYETVELATNNQTALIRSGNGLGGSTLINGGTWTRPHKAQVDSWETVFGNEGWNWDSVAAYSLQAERARAPNAKQIAAGHYFNASCHGINGTVHAGPRDTGDDYSPIVKALMSAVEDRGVPTKKDLGCGDPHGVSMFPNTLHPDQVRSDAAREWLLPNYQRPNLQVLTGQYVGKVLLSQNATTPRAVGVEFGTHKGNTHNVYAKHEVLLAAGSAVSPTILEYSGIGMKSILEPLGIDTVVDLPVGLNLQDQTTSTVRSRITPAGAGQGQAAWFATFNETFGDYAEKAHELLNTKLEQWAEEAVARGGFHNTTALLIQYENYRDWIVKDNVAYSELFLDTAGVASFDVWDLLPFTRGYVHILDKDPYLRHFAYDPQYFLNELDLLGQAAATQLARNISNSGAMQTYFAGETIPGDNLAYDADLSAWVEYIPENFRPNYHGVGTCSMMPKEMGGVVDNAARVYGVQGLRVIDGSIPPTQLSSHVMTVFYAMALKIADAVLADYASMQ

SEQ ID NO: 733 - protein, 583 aa, Aspergillus niger
SNGIEASLLKDPKEVAGRTYDYIIAGGGLTGLTVAARLTENPNITVLVIESGSYESDRGPIIEDLNAYGDIFGSSVDHAYETVELATNNQTALIRSGNGLGGSTLINGGTWTRPHKAQVDSWETVFGNEGWNWDSVAAYSLQAERARAPNAKQIAAGHYFNASCHGLNGTVHAGPRDTGDDYSPIVKALMSAVEDRGVPTKKDLGCGDPHGVSMFPNTLHEDQVRSDAAREWLLPNYQRPNLQVLTGQYVGKVLLSQNATTPRAVGVEFGTHKGNTHNVYAKHEVLLAAGSAVSPTILEYSGIGMKSILEPLGIDTVVDLPVGLNLQDQTTSTVRSRITPAGAGQGQAAWFATFNETFGDYAEKAHELLNTKLEQWAEEAVARGGFHNTTALLIQYENYRDWIVKDNVAYSELFLDTAGVASFDVWDLLPFTRGYVHILDKDPYLRHFAYDPQYFLNELDLLGQAAATQLARNISNSGAMQTYFAGETIPGDNLAYDADLRAWVEYIPENFRPNYHGVGTCSMMPKEMGGVVDNAARVYGVQGLRVIDGSIPPTQLSSHVMTVFYAMALKIADAVLADYASMQ

SEQ ID NO: 734 - protein, 583 aa, Aspergillus niger
SNGIEASLLKDPKEVAGRTYDYIIAGGGLTGLTVAAKLTENPNITVLVIESGSYESDRGPIIEDLNAYGDIFGSSVDHAYETVELATNNRTALIRSGNGLGGSTLINGGTWTRPHKAQVDSWETVFGNEGWNWDSVAAYSLQAERARAPNAKQIAAGHYFNPSCHGLNGTVHAGPRDTGDDYSPIVKALMSAVEDRGVPTKKDLGCGDPHGVSMFPNTLHPDQVRSDAAREWLLPNYQRPNLQVLTGQYVGKVLLSQNATTPRAVGVEFGTHKGNTHNVYAKHEVLLAAGSAVSPTILEYSGIGMKSILEPLGIDTVVDLPVGLNLQDQTTSTVRSRITSAGAGQGQAAWFATFNETFGDYAEKAHELLNTKLEQWAEEAVARGGFHNTTALLIQYENYRDWIVKDNVAYSELFLDTAGVASFDVWDLLPFTRGYVHILDKDPYLRHFAYDPQYFLNELDLLGQAAATQLARNISNSGAMQTYFAGETIPGDNLAYDADLSAWVEYIPENFRPNYHGVGTCSMMPKEMGGVVDNAARVYGVQGLRVIDGSIPPTQMSSHVMTVFYAMALKIADAILADYASMQ

SEQ ID NO: 735 - protein, 583 aa, Aspergillus niger
SNGIEASLLKDPKEVAGRTYDYIIAGGGLTGLTVAARLTENPNITVLVIESGSYESDRGPIIEDLNAYGDIFGSSVDHAYETVELATNNQTALIRSGNGLGGSTLINGGTWTRPHKAQVDSWETVFGNEGWNWDSVAAYSLQAERARAPNAKQIAAGHYFNASCHGINGTVHAGPRDTGDDYSPIVKALMSAVEDRGVPTKKDLGCGDPHGVSMFPNTLHEDQVRSDAAREWLLPNYQRPNLQVLTGRYVGKVLLSQNATTPRAVGVEFGTHKGNTHNVYAKHEVLLAAGSAVSPTILEYSGIGMKSILEPLGIDTVVDLPVGLNLQDQTTSTVRSRITPAGAGQGQAAWFATFNETFGDYTEKAHELLNTKLEQWAEEAVARGGFHNTTALLIQYENYRDWIVKDNVAYSELFLDTAGVASFDVWDLLPFTRGYVHILDKDPYLRHFAYDPQYFLNELDLLGQAAATQLARNISNSGAMQTYFAGETIPGDNLAYDADLRAWVEYIPENFRPNYHGVGTCSMMPKEMGGVVDNAARVYGVQGLRVIDGSIPPTQLSSHVMTVFYAMALKIADAILADYASMQ

SEQ ID NO: 736 - protein, 583 aa, Aspergillus niger
SNGIEASLLKDPKEVAGRTYDYIIAGGGLTGLTVAARLTENPDITVLVIESGSYESDRGPIIEDLNAYGQIFGSSVDHAYETVELATNNQTALIRSGNGLGGSTLINGGTWTRPHKAQVDSWETVFGNEGWNWDSVAAYSLQAERARAPNAKQIAAGHYFNASCHGINGTVHAGPRDTGDDYSPIVKALMSAVEDRGVPTKKDLGCGDPHGVSMFPNTLHEDQVRSDAAREWLLPNYQRPNLQVLTGQYVGKVLLSKNATTPRAVGVEFGTHKGNTHNVYAKHEVLLAAGSAVSPTILEYSGIGLKSILEPLGIDTVVDLPVGLNLQDQTTSTVRSRITSAGAGQGQAAWFATFNETFGDYAEKAHELLNTKLEQWAEEAVARGGFHNTTALLIQYENYRDWIVKDNVAYSELFLDTAGVASFDVWDLLPFTRGYVHILDKDPYLRHFAYDPQYFLNELDLLGQAAATQLARNISNSGAMQTYFAGETIPGDNLAYDADLSAWVEYIPYNFRPNYHAVGTCSMMPKEMGGVVDNAARVYGVQGLRVIDGSIPPTQMSSHVMTVFYAMALKIADAILADYASMQ

SEQ ID NO: 737 - protein, 583 aa, Aspergillus niger
SNGIEASLLKDPKEVAGRTYDYIIAGGGLTGLTVAARLTENPNITVLVIESGSYESDRGPIIEDLNAYGDIFGSSVDHAYETVELPTNNQTALIRSGNGLGGSTLINGGTWTRPHKAQVDSWETVFGNEGWNWDSVAAYSLQAERARAPNAKQIAAGHYFNPSCHGINGTVHAGPRDTGDDYSPIVKALMSAVEDRGVPTKKDLGCGDPHGVSMFPNTLHPDQVRSDAAREWLLPNYQRPNLQVLTGRYVGKVLLSQNATTPRAVGVEFGTHKGNTHNVYAKHEVLLAAGSAVSPTILEYSGIGMKSILEPLGIDTVVDLPVGLNLQDQTTSTVRSRITSAGAGQGQAAWFATFNETFGDYAEKAHELLNTKLEQWAEEAVARGGFHNTTALLIQYENYRDWIVKDNVAYSELFLDTAGVASFDVWDLLPFTRGYVHILDKDPYLRHFAYDPQYFLNELDLLGQAAATQLARNISNSGAMQTYFAGETIPGDNLAYDADLSAWVEYIPENFRPNYHGVGTCSMMPKEMGGVVDNAARVYGVQGLRVIDGSIPPTQMSSHVMTVFYAMALKIADAILADYASMQ

SEQ ID NO: 738 - protein, 583 aa, Aspergillus niger
SNGIEASLLKDPKEVAGRTYDYIIAGGGLTGLTVAARLTENPNITVLVIESGSYESDRGPIIEDLNAYGDIFGSSVDHAYETVELATNNQTALIRSGNGLGGSTLINGGTWTRPHKAQVDSWETVFGNEGWNWDSVAAYSLQAERARAPNAKQIAAGHYFNASCHGINGTVHAGPRDTGDDYSPIVKALMSAVEDRGVPTKKDLGCGDPHGVSMFPNTLHEDQVRSDAAREWLLPNYQRPNLQVLTGQYVGKVLLSQNATTPRAVGVEFGTHKGNTHNVYAKHEVLLAAGSAVSPTILEYSGIGMKSILEPLGIDTVVDLPVGLNLQDQTTSTVRSRITPAGAGQGQAAWFATFNETFGDYAEKAHELLNTKLEQWAEEAVARGGFHNTTALLIQYENYRDWIVKDNVAYSELFLDTAGVASFDVWDLLPFTRGYVHILDKDPYLRHFAYDPQYFLNELDLLGQAAATQLARNISNSGAMQTYFAGETIPGDNLAYDADLRAWVEYIPENFRPNYHGVGTCSMMPKEMGGVVDNAARVYGVQGLRVIDGSIPPTQLSSHVMTVFYAMALKIADAVLADYASMQ

SEQ ID NO: 739 - protein, 583 aa, Aspergillus niger
SNGIEASLLKDPKEVAGRTYDYIIAGGGLTGLTVAARLTENPNITVLVIESGSYESDRGPIIEDLNAYGDIFGSSVDHAYETVELPTNNRTALIRSGNGLGGSTLINGGTWTRPHKAQVDSWETVFGNEGWNWDSVAAYSLQAERARAPNAKQIAAGHYFNASCHGLNGTVHAGPRDTGDDYSPIVKALMSAVEDRGVPTKKDLGCGDPHGVSMFPNTLHEDQVRSDAAREWLLPNYQRPNLQVLTGQYVGKVLLSQNATTPRAVGVEFGTHKGNTHNVYAKHEVLLAAGSAVSPTILEYSGIGMKSILEPLGIDTVVDLPVGLNLQDQTTSTVRSRITSAGAGQGQAAWFATFNETFGDYAEKAHELLNTKLEQWAEEAVARGGFHNTTALLIQYENYRDWIVKDNVAYSELFLDTAGVASFDVWDLLPFTRGYVHILDKDPYLRHFAYDPQYFLNELDLLGQAAATQLARNISNSGAMQTYFAGETIPGDNLAYDADLRAWVEYIPENFRPNYHGVGTCSMMPKEMGGVVDNAARVYGVQGLRVIDGSIPPTQLSSHVMTVFYAMALKIADAILADYASMQ

SEQ ID NO: 740 - protein, 583 aa, Aspergillus niger
SNGIEASLLKDPKEVAGRTYDYIIAGGGLTGLTVAAKLTENPNITVLVIESGSYESDRGPIIEDLNAYGDIFGSSVDHAYETVELATNNRTALIRSGNGLGGSTLINGGTWTRPHKAQVDSWETVFGNEGWNWDSVAAYSLQAERARAPNAKQIAAGHYFNASCHGLNGTVHAGPRDTGDDYSPIVKALMSAVEDRGVPTKKDLGCGDPHGVSMFPNTLHEDQVRSDAAREWLLPNYQRPNLQVLTGQYVGKVLLSQNATTPRAVGVEFGTHKGNTHNVYAKHEVLLAAGSAVSPTILEYSGIGMKSILEPLGIDTVVDLPVGLNLQDQTTSTVRSRITSAGAGQGQAAWFATFNETFGDYTEKAHELLNTKLEQWAEEAVARGGFHNTTALLIQYENYRDWIVKDNVAYSELFLDTAGVASFDVWDLLPFTRGYVHILDKDPYLRHFAYDPQYFLNELDLLGQAAATQLARNISNSGAMQTYFAGETIPGDNLAYDADLSAWVEYIPENFRPNYHGVGTCSMMPKEMGGVVDNAARVYGVQGLRVIDGSIPPTQLSSHVMTVFYAMALKIADAVLADYASMQ

SEQ ID NO: 741 - protein, 583 aa, Aspergillus niger
SNGIEASLLKDPKEVAGRTYDYIIAGGGLTGLTVAAKLTENPNITVLVIESGSYESDRGPIIEDLNAYGDIFGSSVDHAYETVELPTNNRTALIRSGNGLGGSTLINGGTWTRPHKAQVDSWETVFGNEGWNWDSVAAYSLQAERARAPNAKQIAAGHYFNASCHGLNGTVHAGPRDTGDDYSPIVKALMSAVEDRGVPTKKDLGCGDPHGVSMFPNTLHEDQVRSDAAREWLLPNYQRPNLQVLTGQYVGKVLLSQNATTPRAVGVEFGTHKGNTHNVYAKHEVLLAAGSAVSPTILEYSGIGMKSILEPLGIDTVVDLPVGLNLQDQTTSTVRSRITSAGAGQGQAAWFATFNETFGDYTEKAHELLNTKLEQWAEEAVARGGFHNTTALLIQYENYRDWIVKDNVAYSELFLDTAGVASFDVWDLLPFTRGYVHILDKDPYLRHFAYDPQYFLNELDLLGQAAATQLARNISNSGAMQTYFAGETIPGDNLAYDADLRAWVEYIPENFRPNYHGVGTCSMMPKEMGGVVDNAARVYGVQGLRVIDGSIPPTQMSSHVMTVFYAMALKIADAILADYASMQ

SEQ ID NO: 742 - protein, 583 aa, Aspergillus niger
SNGIEASLLKDPKEVAGRTYDYIIAGGGLTGLTVAARLTENPNITVLVIESGSYESDRGPIIEDLNAYGDIFGSSVDHAYETVELATNNRTALIRSGNGLGGSTLINGGTWTRPHKAQVDSWETVFGNEGWNWDSVAAYSLQAERARAPNAKQIAAGHYFNASCHGLNGTVHAGPRDTGDDYSPIVKALMSAVEDRGVPTKKDLGCGDPHGVSMFPNTLHEDQVRSDAAREWLLPNYQRPNLQVLTGRYVGKVLLSQNATTPRAVGVEFGTHKGNTHNVYAKHEVLLAAGSAVSPTILEYSGIGMKSILEPLGIDTVVDLPVGLNLQDQTTSTVRSRITSAGAGQGQAAWFATFNETFGDYAEKAHELLNTKLEQWAEEAVARGGFHNTTALLIQYENYRDWIVKDNVAYSELFLDTAGVASFDVWDLLPFTRGYVHILDKDPYLRHFAYDPQYFLNELDLLGQAAATQLARNISNSGAMQTYFAGETIPGDNLAYDADLRAWVEYIPENFRPNYHGVGTCSMMPKEMGGVVDNAARVYGVQGLRVIDGSIPPTQLSSHVMTVFYAMALKIADAILADYASMQ

SEQ ID NO: 743 - protein, 583 aa, Aspergillus niger
SNGIEASLLKDPKEVAGRTYDYIIAGGGLTGLTVAARLTENPNITVLVIESGSYESDRGPIIEDLNAYGDIFGSSVDHAYETVELATNNQTALIRSGNGLGGSTLINGGTWTRPHKAQVDSWETVFGNEGWNWDSVAAYSLQAERARAPNAKQIAAGHYFNASCHGINGTVHAGPRDTGDDYSPIVKALMSAVEDRGVPTKKDLGCGDPHGVSMFPNTLHPDQVRSDAAREWLLPNYQRPNLQVLTGRYVGKVLLSQNATTPRAVGVEFGTHKGNTHNVYAKHEVLLAAGSAVSPTILEYSGIGMKSILEPLGIDTVVDLPVGLNLQDQTTSTVRSRITSAGAGQGQAAWFATFNETFGDYTEKAHELLNTKLEQWAEEAVARGGFHNTTALLIQYENYRDWIVKDNVAYSELFLDTAGVASFDVWDLLPFTRGYVHILDKDPYLRHFAYDPQYFLNELDLLGQAAATQLARNISNSGAMQTYFAGETIPGDNLAYDADLRAWVEYIPENFRPNYHGVGTCSMMPKEMGGVVDNAARVYGVQGLRVIDGSIPPTQLSSHVMTVFYAMALKIADAILADYASMQ

SEQ ID NO: 744 - protein, 583 aa, Aspergillus niger
SNGIEASLLKDPKEVAGRTYDYIIAGGGLTGLTVAARLTENPNITVLVIESGSYESDRGPIIEDLNAYGDIFGSSVDHAYETVELPTNNRTALIRSGNGLGGSTLINGGTWTRPHKAQVDSWETVFGNEGWNWDSVAAYSLQAERARAPNAKQIAAGHYFNPSCHGLNGTVHAGPRDTGDDYSPIVKALMSAVEDRGVPTKKDLGCGDPHGVSMFPNTLHEDQVRSDAAREWLLPNYQRPNLQVLTGQYVGKVLLSQNATTPRAVGVEFGTHKGNTHNVYAKHEVLLAAGSAVSPTILEYSGIGMKSILEPLGIDTVVDLPVGLNLQDQTTSTVRSRITPAGAGQGQAAWFATFNETFGDYAEKAHELLNTKLEQWAEEAVARGGFHNTTALLIQYENYRDWIVKDNVAYSELFLDTAGVASFDVWDLLPFTRGYVHILDKDPYLRHFAYDPQYFLNELDLLGQAAATQLARNISNSGAMQTYFAGETIPGDNLAYDADLSAWVEYIPENFRPNYHGVGTCSMMPKEMGGVVDNAARVYGVQGLRVIDGSIPPTQMSSHVMTVFYAMALKIADAILADYASMQ

SEQ ID NO: 745 - protein, 583 aa, Aspergillus niger
SNGIEASLLKDPKEVAGRTYDYIIAGGGLTGLTVAARLTENPNITVLVIESGSYESDRGPIIEDLNAYGDIFGSSVDHAYETVELATNNQTALIRSGNGLGGSTLINGGTWTRPHKAQVDSWETVFGNEGWNWDSVAAYSLQAERARAPNAKQIAAGHYFNPSCHGINGTVHAGPRDTGDDYSPIVKALMSAVEDRGVPTKKDLGCGDPHGVSMFPNTLHPDQVRSDAAREWLLPNYQRPNLQVLTGQYVGKVLLSQNATTPRAVGVEFGTHKGNTHNVYAKHEVLLAAGSAVSPTILEYSGIGMKSILEPLGIDTVVDLPVGLNLQDQTTSTVRSRITSAGAGQGQAAWFATFNETFGDYTEKAHELLNTKLEQWAEEAVARGGFHNTTALLIQYENYRDWIVKDNVAYSELFLDTAGVASFDVWDLLPFTRGYVHILDKDPYLRHFAYDPQYFLNELDLLGQAAATQLARNISNSGAMQTYFAGETIPGDNLAYDADLRAWVEYIPENFRPNYHGVGTCSMMPKEMGGVVDNAARVYGVQGLRVIDGSIPPTQLSSHVMTVFYAMALKIADAILADYASMQ

SEQ ID NO: 746 - protein, 583 aa, Aspergillus niger
SNGIEASLLKDPKEVAGRTYDYIIAGGGLTGLTVAAKLTENPNITVLVIESGSYESDRGPIIEDLNAYGDIFGSSVDHAYETVELPTNNRTALIRSGNGLGGSTLINGGTWTRPHKAQVDSWETVFGNEGWNWDSVAAYSLQAERARAPNAKQIAAGHYFNPSCHGINGTVHAGPRDTGDDYSPIVKALMSAVEDRGVPTKKDLGCGDPHGVSMFPNTLHEDQVRSDAAREWLLPNYQRPNLQVLTGQYVGKVLLSQNATTPRAVGVEFGTHKGNTHNVYAKHEVLLAAGSAVSPTILEYSGIGMKSILEPLGIDTVVDLPVGLNLQDQTTSTVRSRITSAGAGQGQAAWFATFNETFGDYAEKAHELLNTKLEQWAEEAVARGGFHNTTALLIQYENYRDWIVKDNVAYSELFLDTAGVASFDVWDLLPFTRGYVHILDKDPYLRHFAYDPQYFLNELDLLGQAAATQLARNISNSGAMQTYFAGETIPGDNLAYDADLSAWVEYIPENFRPNYHGVGTCSMMPKEMGGVVDNAARVYGVQGLRVIDGSIPPTQMSSHVMTVFYAMALKIADAILADYASMQ

SEQ ID NO: 747 - protein, 583 aa, Aspergillus niger
SNGIEASLLKDPKEVAGRTYDYIIAGGGLTGLTVAARLTENPNITVLVIESGSYESDRGPIIEDLNAYGDIFGSSVDHAYETVELPTNNQTALIRSGNGLGGSTLINGGTWTRPHKAQVDSWETVFGNEGWNWDSVAAYSLQAERARAPNAKQIAAGHYFNPSCHGLNGTVHAGPRDTGDDYSPIVKALMSAVEDRGVPTKKDLGCGDPHGVSMFPNTLHPDQVRSDAAREWLLPNYQRPNLQVLTGRYVGKVLLSQNATTPRAVGVEFGTHKGNTHNVYAKHEVLLAAGSAVSPTILEYSGIGMKSILEPLGIDTVVDLPVGLNLQDQTTSTVRSRITSAGAGQGQAAWFATFNETFGDYAEKAHELLNTKLEQWAEEAVARGGFHNTTALLIQYENYRDWIVKDNVAYSELFLDTAGVASFDVWDLLPFTRGYVHILDKDPYLRHFAYDPQYFLNELDLLGQAAATQLARNISNSGAMQTYFAGETIPGDNLAYDADLSAWVEYIPENFRPNYHGVGTCSMMPKEMGGVVDNAARVYGVQGLRVIDGSIPPTQMSSHVMTVFYAMALKIADAILADYASMQ

SEQ ID NO: 748 - protein, 583 aa, Aspergillus niger
SNGIEASLLKDPKEVAGRTYDYIIAGGGLTGLTVAARLTENPNITVLVIESGSYESDRGPIIEDLNAYGDIFGSSVDHAYETVELATNNRTALIRSGNGLGGSTLINGGTWTRPHKAQVDSWETVFGNEGWNWDSVAAYSLQAERARAPNAKQIAAGHYFNASCHGINGTVHAGPRDTGDDYSPIVKALMSAVEDRGVPTKKDLGCGDPHGVSMFPNTLHEDQVRSDAAREWLLPNYQRPNLQVLTGQYVGKVLLSQNATTPRAVGVEFGTHKGNTHNVYAKHEVLLAAGSAVSPTILEYSGIGMKSILEPLGIDTVVDLPVGLNLQDQTTSTVRSRITPAGAGQGQAAWFATFNETFGDYAEKAHELLNTKLEQWAEEAVARGGFHNTTALLIQYENYRDWIVKDNVAYSELFLDTAGVASFDVWDLLPFTRGYVHILDKDPYLRHFAYDPQYFLNELDLLGQAAATQLARNISNSGAMQTYFAGETIPGDNLAYDADLSAWVEYIPENFRPNYHGVGTCSMMPKEMGGVVDNAARVYGVQGLRVIDGSIPPTQLSSHVMTVFYAMALKIADAVLADYASMQ

SEQ ID NO: 749 - protein, 583 aa, Aspergillus niger
SNGIEASLLKDPKEVAGRTYDYIIAGGGLTGLTVAARLTENPNITVLVIESGSYESDRGPIIEDLNAYGDIFGSSVDHAYETVELATNNQTALIRSGNGLGGSTLINGGTWTRPHKAQVDSWETVFGNEGWNWDSVAAYSLQAERARAPNAKQIAAGHYFNPSCHGLNGTVHAGPRDTGDDYSPIVKALMSAVEDRGVPTKKDLGCGDPHGVSMFPNTLHPDQVRSDAAREWLLPNYQRPNLQVLTGRYVGKVLLSQNATTPRAVGVEFGTHKGNTHNVYAKHEVLLAAGSAVSPTILEYSGIGMKSILEPLGIDTVVDLPVGLNLQDQTTSTVRSRITPAGAGQGQAAWFATFNETFGDYAEKAHELLNTKLEQWAEEAVARGGFHNTTALLIQYENYRDWIVKDNVAYSELFLDTAGVASFDVWDLLPFTRGYVHILDKDPYLRHFAYDPQYFLNELDLLGQAAATQLARNISNSGAMQTYFAGETIPGDNLAYDADLSAWVEYIPENFRPNYHGVGTCSMMPKEMGGVVDNAARVYGVQGLRVIDGSIPPTQMSSHVMTVFYAMALKIADAILADYASMQ

SEQ ID NO: 750 - protein, 583 aa, Aspergillus niger
SNGIEASLLKDPKEVAGRTYDYIIAGGGLTGLTVAARLTENPNITVLVIESGSYESDRGPIIEDLNAYGDIFGSSVDHAYETVELATNNQTALIRSGNGLGGSTLINGGTWTRPHKAQVDSWETVFGNEGWNWDSVAAYSLQAERARAPNAKQIAAGHYFNASCHGINGTVHAGPRDTGDDYSPIVKALMSAVEDRGVPTKKDLGCGDPHGVSMFPNTLHEDQVRSDAAREWLLPNYQRPNLQVLTGRYVGKVLLSQNATTPRAVGVEFGTHKGNTHNVYAKHEVLLAAGSAVSPTILEYSGIGMKSILEPLGIDTVVDLPVGLNLQDQTTSTVRSRITPAGAGQGQAAWFATFNETFGDYTEKAHELLNTKLEQWAEEAVARGGFHNTTALLIQYENYRDWIVKDNVAYSELFLDTAGVASFDVWDLLPFTRGYVHILDKDPYLRHFAYDPQYFLNELDLLGQAAATQLARNISNSGAMQTYFAGETIPGDNLAYDADLRAWVEYIPENFRPNYHGVGTCSMMPKEMGGVVDNAARVYGVQGLRVIDGSIPPTQMSSHVMTVFYAMALKIADAVLADYASMQ

SEQ ID NO: 751 - protein, 583 aa, Aspergillus niger
SNGIEASLLKDPKEVAGRTYDYIIAGGGLTGLTVAARLTENPDITVLVIESGSYESDRGPIIEDLNAYGQIFGSSVDHAYETVELATNNRTALIRSGNGLGGSTLINGGNWTRPHKAQVDSWETVFGNEGWNWDSVAAYSLQAERARAPNAKQIAAGHYFNASCHGINGTVHAGPRDTGDDYSPIVKALMSAVEDRGVPTKKDLGCGDPHGVSMFPNTLHEDQVRSDAAREWLLPNYQRPNLQVLTGQYVGKVLLSQNATTPRAVGVEFGTHKGNTHNVYAKHEVLLAAGSAVSPTILEYSGIGMKSILEPLGIDTVVDLPVGLNLQDQTTSTVRSRITSAGAGQGQAAWFATFNETFGDYAEKAHELLNTKLEQWAEEAVARGGFHNTTALLIQYENYRDWIVKDNVAYSELFLDTAGVASFDVWDLLPFTRGYVHILDKDPYLRHFAYDPQYFLNELDLLGQAAATQLARNISNSGAMQTYFAGETIPGDNLAYDADLSAWVEYIPENFRPNYHGVGTCSMMPKEMGGVVDNAARVYGVQGLRVIDGSIPPTQMSSHVMTVFYAMALKIADAILADYASMQ

SEQ ID NO: 752 - protein, 583 aa, Aspergillus niger
SNGIEASLLKDPKEVAGRTYDYIIAGGGLTGLTVAARLTENPNITVLVIESGSYESDRGPIIEDLNAYGDIFGSSVDHAYETVELPTNNQTALIRSGNGLGGSTLINGGTWTRPHKAQVDSWETVFGNEGWNWDSVAAYSLQAERARAPNAKQIAAGHYFNASCHGINGTVHAGPRDTGDDYSPIVKALMSAVEDRGVPTKKDLGCGDPHGVSMFPNTLHEDQVRSDAAREWLLPNYQRPNLQVLTGQYVGKVLLSQNATTPRAVGVEFGTHKGNTHNVYAKHEVLLAAGSAVSPTILEYSGIGMKSILEPLGIDTVVDLPVGLNLQDQTTSTVRSRITPAGAGQGQAAWFATFNETFGDYAEKAHELLNTKLEQWAEEAVARGGFHNTTALLIQYENYRDWIVKDNVAYSELFLDTAGVASFDVWDLLPFTRGYVHILDKDPYLRHFAYDPQYFLNELDLLGQAAATQLARNISNSGAMQTYFAGETIPGDNLAYDADLSAWVEYIPENFRPNYHGVGTCSMMPKEMGGVVDNAARVYGVQGLRVIDGSIPPTQLSSHVMTVFYAMALKIADAVLADYASMQ

SEQ ID NO: 753 - protein, 583 aa, Aspergillus niger
SNGIEASLLTDPKEVAGRTVDYIIAGGGLTGLTSAARLTENPDITVLVIEKGSYESDRGHIIEDLNAYGDIFGSSVDHAYETVELATNNATALIRSGNGLGGSTYFNGGTWTRPHKAQVDSWETVFGNEGWNWDSVAAYSLQAERARAPNAKQIAAGHYFNASCHGINGTVHAGPRDTGDDYSPIVKALMSAVEDRGVPTKKDLGCGDPHGVSMFPNTLHEDQVRSDAAREWLLPNYQRPNLEVLTGQYVGKVLLSQNATTPRAVGVEFGTHKGNTHNVYAKHEVLLAAGSAVSPTILEYSGIGMKSILEPLGIDTVVDLPVGLNLQDQTTSTVRSRITSAGAGQGQAAWFATFNETFGDYAEKAHELLNTKLEQWAEEAVARGGFHNTTALLIQYENYRDWIVKDNVAYSELFLDTAGVASFDVWDLLPFTRGYVHILDKDPYLRHFAYDPQYFLNELDLLGQAAATQLARNISNSGAMQTYFAGETIPGDNLAYDADLSAWVEYIPYNFRPNYHGVGTCSMMPKEMGGVVDNAARVYGVQGLRVIDGSIPPTQMSSHVSTVFYAMALKIADAILADYASMQ

SEQ ID NO: 754 - protein, 581 aa, Aspergillus niger
GIEASLLTDPKEIAGCTVDYIIAGGGLTGLTTAARLTENPDITVLVIESGSYESDRGPIIEDLNAYGDIFGSSVDHAYETVELATNNQTALIRSGNGLGGSSLVNGGTWTRPHKAQVDSWETVFGNEGWNWDSVAAYSLQAERARAPNAKQIAAGHYFNASCHGINGTVHAGPRDTGDDYSPIVKALMSAVEDRGVPTKKDLGCGDPHGVSMFPNTLHEDQVRSDAAREWLLPNYQRPNLQVLTGQYVGKVLLSQNATTPRAIGVEFGTHKGNTHNVYAKHEVLLAAGSAVSPTILEYSGIGMKSILEPLGIDTVVDLPVGLNLQDQTTSTVRSRITSAGAGQGQAAWFATFNETLGDYAEKAHELLNTKLEQWAEEAVARGGFHNTTALLIQYENYRDWIVKDNVAYSELFLDTAGVASFGVWDLLPFTRGYVHILDKAPYLRHFAYDPQYFLNELDLLGQAAATQLARNISNSGAMQTYFAGETIPGDNLAYDADLSAWVEYIPYNFRPNYHGVGTCSMMPKEMGGVVDNAARVYGVQGQRVIDGSIPPTQMSSHVMTVFYAMALKIADAILADYASMQ

SEQ ID NO: 755 - protein, 583 aa, Aspergillus niger
SNGIEASLLKDPKEVAGRTYDYIIAGGGLTGLTVAAKLTENPNITVLVIESGSYESDRGPIIEDLNAYGDIFGSSVDHAYETVELPTNNRTALIRSGNGLGGSTLINGGTWTRPHKAQVDSWETVFGNEGWNWDSVAAYSLQAERARAPNAKQIAAGHYFNPSCHGLNGTVHAGPRDTGDDYSPIVKALMSAVEDRGVPTKKDLGCGDPHGVSMFPNTLHEDQVRSDAAREWLLPNYQRPNLQVLTGQYVGKVLLSQNATTPRAVGVEFGTHKGNTHNVYAKHEVLLAAGSAVSPTILEYSGIGMKSILEPLGIDTVVDLPVGLNLQDQTTSTVRSRITPAGAGQGQAAWFATFNETFGDYAEKAHELLNTKLEQWAEEAVARGGFHNTTALLIQYENYRDWIVKDNVAYSELFLDTAGVASFDVWDLLPFTRGYVHILDKDPYLRHFAYDPQYFLNELDLLGQAAATQLARNISNSGAMQTYFAGETIPGDNLAYDADLSAWVEYIPENFRPNYHGVGTCSMMPKEMGGVVDNAARVYGVQGLRVIDGSIPPTQMSSHVMTVFYAMALKIADAILADYASMQ

SEQ ID NO: 756 - protein, 583 aa, Aspergillus niger
SNGIEASLLKDPKEVAGRTYDYIIAGGGLTGLTVAARLTENPNITVLVIESGSYESDRGPIIEDLNAYGDIFGSSVDHAYETVELATNNQTALIRSGNGLGGSTLINGGTWTRPHKAQVDSWETVFGNEGWNWDSVAAYSLQAERARAPNAKQIAAGHYFNPSCHGLNGTVHAGPRDTGDDYSPIVKALMSAVEDRGVPTKKDLGCGDPHGVSMFPNTLHEDQVRSDAAREWLLPNYQRPNLQVLTGQYVGKVLLSQNATTPRAVGVEFGTHKGNTHNVYAKHEVLLAAGSAVSPTILEYSGIGMKSILEPLGIDTVVDLPVGLNLQDQTTSTVRSRITPAGAGQGQAAWFATFNETFGDYAEKAHELLNTKLEQWAEEAVARGGFHNTTALLIQYENYRDWIVKDNVAYSELFLDTAGVASFDVWDLLPFTRGYVHILDKDPYLRHFAYDPQYFLNELDLLGQAAATQLARNISNSGAMQTYFAGETIPGDNLAYDADLRAWVEYIPENFRPNYHGVGTCSMMPKEMGGVVDNAARVYGVQGLRVIDGSIPPTQLSSHVMTVFYAMALKIADAVLADYASMQ

SEQ ID NO: 757 - protein, 583 aa, Aspergillus niger
SNGIEASLLKDPKEVAGRTYDYIIAGGGLTGLTVAAKLTENPNITVLVIESGSYESDRGPIIEDLNAYGDIFGSSVDHAYETVELPTNNRTALIRSGNGLGGSTLINGGTWTRPHKAQVDSWETVFGNEGWNWDSVAAYSLQAERARAPNAKQIAAGHYFNASCHGLNGTVHAGPRDTGDDYSPIVKALMSAVEDRGVPTKKDLGCGDPHGVSMFPNTLHEDQVRSDAAREWLLPNYQRPNLQVLTGQYVGKVLLSQNATTPRAVGVEFGTHKGNTHNVYAKHEVLLAAGSAVSPTILEYSGIGMKSILEPLGIDTVVDLPVGLNLQDQTTSTVRSRITSAGAGQGQAAWFATFNETFGDYAEKAHELLNTKLEQWAEEAVARGGFHNTTALLIQYENYRDWIVKDNVAYSELFLDTAGVASFDVWDLLPFTRGYVHILDKDPYLRHFAYDPQYFLNELDLLGQAAATQLARNISNSGAMQTYFAGETIPGDNLAYDADLRAWVEYIPENFRPNYHGVGTCSMMPKEMGGVVDNAARVYGVQGLRVIDGSIPPTQLSSHVMTVFYAMALKIADAILADYASMQ

SEQ ID NO: 758 - protein, 583 aa, Aspergillus niger
SYGIEASLLKDPKEVAGRTYDYIIAGGGLTGLTVAARLTENPDITVLVIESGSYESDRGPIIEDLNAYGQIFGSSVDHAYETVELATNNQTALIRSGNGLGGSTLINGGNWTRPHKAQVDSWETVFGNEGWNWDSVAAYSLQAERARAPNAKQIAAGHYFNASCHGINGTVHAGPRDTGDDYSPIVKALMSAVEDRGVPTKKDLGCGDPHGVSMFPNTLHEDQVRSDAAREWLLPNYQRPNLQVLTGQYVGKVLLSQNATTPRAVGVEFGTHKGNTHNVYAKHEVLLAAGSAVSPTILEYSGIGLKSILEPLGIDTVVDLPVGLNLQDQTTSTVRSRITSAGAGQGQAAWFATFNETFGDYAEKAHELLNTKLEQWAEEAVARGGFHNTTALLIQYENYRDWIVKDNVAYSELFLDTAGVASFDVWDLLPFTRGYVHILDKDPYLRHFAYDPQYFLNELDLLGQAAATQLARNISNSGAMQTYFAGETIPGDNLAYDADLSAWVEYIPENFRPNYHGVGTCSMMPKEMGGVVDNAARVYGVQGLRVIDGSIPPTQMSSHVMTVFYAMALKIADAILADYASMQ

SEQ ID NO: 759 - protein, 583 aa, Aspergillus niger
SNGIEASLLKDPKEVAGRTYDYIIAGGGLTGLTVAARLTENPNITVLVIESGSYESDRGPIIEDLNAYGDIFGSSVDHAYETVELATNNQTALIRSGNGLGGSTLINGGTWTRPHKAQVDSWETVFGNEGWNWDSVAAYSLQAERARAPNAKQIAAGHYFNASCHGLNGTVHAGPRDTGDDYSPIVKALMSAVEDRGVPTKKDLGCGDPHGVSMFPNTLHPDQVRSDAAREWLLPNYQRPNLQVLTGRYVGKVLLSQNATTPRAVGVEFGTHKGNTHNVYAKHEVLLAAGSAVSPTILEYSGIGMKSILEPLGIDTVVDLPVGLNLQDQTTSTVRSRITPAGAGQGQAAWFATFNETFGDYTEKAHELLNTKLEQWAEEAVARGGFHNTTALLIQYENYRDWIVKDNVAYSELFLDTAGVASFDVWDLLPFTRGYVHILDKDPYLRHFAYDPQYFLNELDLLGQAAATQLARNISNSGAMQTYFAGETIPGDNLAYDADLRAWVEYIPENFRPNYHGVGTCSMMPKEMGGVVDNAARVYGVQGLRVIDGSIPPTQMSSHVMTVFYAMALKIADAVLADYASMQ

SEQ ID NO: 760 - protein, 583 aa, Aspergillus niger
SNGIEASLLKDPKEVAGRTYDYIIAGGGLTGLTVAAKLTENPNITVLVIESGSYESDRGPIIEDLNAYGDIFGSSVDHAYETVELATNNQTALIRSGNGLGGSTLINGGTWTRPHKAQVDSWETVFGNEGWNWDSVAAYSLQAERARAPNAKQIAAGHYFNASCHGLNGTVHAGPRDTGDDYSPIVKALMSAVEDRGVPTKKDLGCGDPHGVSMFPNTLHEDQVRSDAAREWLLPNYQRPNLQVLTGRYVGKVLLSQNATTPRAVGVEFGTHKGNTHNVYAKHEVLLAAGSAVSPTILEYSGIGMKSILEPLGIDTVVDLPVGLNLQDQTTSTVRSRITPAGAGQGQAAWFATFNETFGDYTEKAHELLNTKLEQWAEEAVARGGFHNTTALLIQYENYRDWIVKDNVAYSELFLDTAGVASFDVWDLLPFTRGYVHILDKDPYLRHFAYDPQYFLNELDLLGQAAATQLARNISNSGAMQTYFAGETIPGDNLAYDADLRAWVEYIPENFRPNYHGVGTCSMMPKEMGGVVDNAARVYGVQGLRVIDGSIPPTQMSSHVMTVFYAMALKIADAVLADYASMQ

SEQ ID NO: 761 - protein, 583 aa, Aspergillus niger
SNGIEASLLKDPKEVAGRTYDYIIAGGGLTGLTVAARLTENPNITVLVIESGSYESDRGPIIEDLNAYGDIFGSSVDHAYETVELPTNNQTALIRSGNGLGGSTLINGGTWTRPHKAQVDSWETVFGNEGWNWDSVAAYSLQAERARAPNAKQIAAGHYFNASCHGINGTVHAGPRDTGDDYSPIVKALMSAVEDRGVPTKKDLGCGDPHGVSMFPNTLHEDQVRSDAAREWLLPNYQRPNLQVLTGRYVGKVLLSQNATTPRAVGVEFGTHKGNTHNVYAKHEVLLAAGSAVSPTILEYSGIGMKSILEPLGIDTVVDLPVGLNLQDQTTSTVRSRITPAGAGQGQAAWFATFNETFGDYTEKAHELLNTKLEQWAEEAVARGGFHNTTALLIQYENYRDWIVKDNVAYSELFLDTAGVASFDVWDLLPFTRGYVHILDKDPYLRHFAYDPQYFLNELDLLGQAAATQLARNISNSGAMQTYFAGETIPGDNLAYDADLRAWVEYIPENFRPNYHGVGTCSMMPKEMGGVVDNAARVYGVQGLRVIDGSIPPTQMSSHVMTVFYAMALKIADAVLADYASMQ

SEQ ID NO: 762 - protein, 583 aa, Aspergillus niger
SNGIEASLLKDPKEVAGRTYDYIIAGGGLTGLTVAARLTENPNITVLVIESGSYESDRGPIIEDLNAYGDIFGSSVDHAYETVELATNNQTALIRSGNGLGGSTLINGGTWTRPHKAQVDSWETVFGNEGWNWDSVAAYSLQAERARAPNAKQIAAGHYFNPSCHGLNGTVHAGPRDTGDDYSPIVKALMSAVEDRGVPTKKDLGCGDPHGVSMFPNTLHEDQVRSDAAREWLLPNYQRPNLQVLTGRYVGKVLLSQNATTPRAVGVEFGTHKGNTHNVYAKHEVLLAAGSAVSPTILEYSGIGMKSILEPLGIDTVVDLPVGLNLQDQTTSTVRSRITPAGAGQGQAAWFATFNETFGDYAEKAHELLNTKLEQWAEEAVARGGFHNTTALLIQYENYRDWIVKDNVAYSELFLDTAGVASFDVWDLLPFTRGYVHILDKDPYLRHFAYDPQYFLNELDLLGQAAATQLARNISNSGAMQTYFAGETIPGDNLAYDADLRAWVEYIPENFRPNYHGVGTCSMMPKEMGGVVDNAARVYGVQGLRVIDGSIPPTQLSSHVMTVFYAMALKIADAILADYASMQ

SEQ ID NO: 763 - protein, 583 aa, Aspergillus niger
SNGIEASLLKDPKEVAGRTYDYIIAGGGLTGLTVAARLTENPNITVLVIESGSYESDRGPIIEDLNAYGDIFGSSVDHAYETVELATNNQTALIRSGNGLGGSTLINGGTWTRPHKAQVDSWETVFGNEGWNWDSVAAYSLQAERARAPNAKQIAAGHYFNPSCHGINGTVHAGPRDTGDDYSPIVKALMSAVEDRGVPTKKDLGCGDPHGVSMFPNTLHEDQVRSDAAREWLLPNYQRPNLQVLTGRYVGKVLLSQNATTPRAVGVEFGTHKGNTHNVYAKHEVLLAAGSAVSPTILEYSGIGMKSILEPLGIDTVVDLPVGLNLQDQTTSTVRSRITPAGAGQGQAAWFATFNETFGDYAEKAHELLNTKLEQWAEEAVARGGFHNTTALLIQYENYRDWIVKDNVAYSELFLDTAGVASFDVWDLLPFTRGYVHILDKDPYLRHFAYDPQYFLNELDLLGQAAATQLARNISNSGAMQTYFAGETIPGDNLAYDADLRAWVEYIPENFRPNYHGVGTCSMMPKEMGGVVDNAARVYGVQGLRVIDGSIPPTQMSSHVMTVFYAMALKIADAVLADYASMQ

SEQ ID NO: 764 - protein, 583 aa, Aspergillus niger
SNGIEASLLKDPKEVAGRTYDYIIAGGGLTGLTVAARLTENPNITVLVIESGSYESDRGPIIEDLNAYGDIFGSSVDHAYETVELATNNQTALIRSGNGLGGSTLINGGTWTRPHKAQVDSWETVFGNEGWNWDSVAAYSLQAERARAPNAKQIAAGHYFNPSCHGINGTVHAGPRDTGDDYSPIVKALMSAVEDRGVPTKKDLGCGDPHGVSMFPNTLHEDQVRSDAAREWLLPNYQRPNLQVLTGRYVGKVLLSQNATTPRAVGVEFGTHKGNTHNVYAKHEVLLAAGSAVSPTILEYSGIGMKSILEPLGIDTVVDLPVGLNLQDQTTSTVRSRITPAGAGQGQAAWFATFNETFGDYTEKAHELLNTKLEQWAEEAVARGGFHNTTALLIQYENYRDWIVKDNVAYSELFLDTAGVASFDVWDLLPFTRGYVHILDKDPYLRHFAYDPQYFLNELDLLGQAAATQLARNISNSGAMQTYFAGETIPGDNLAYDADLRAWVEYIPENFRPNYHGVGTCSMMPKEMGGVVDNAARVYGVQGLRVIDGSIPPTQMSSHVMTVFYAMALKIADAVLADYASMQ

SEQ ID NO: 765 - protein, 583 aa, Aspergillus niger
SNGIEASLLKDPKEVAGRTYDYIIAGGGLTGLTVAARLTENPNITVLVIESGSYESDRGPIIEDLNAYGDIFGSSVDHAYETVELPTNNRTALIRSGNGLGGSTLINGGTWTRPHKAQVDSWETVFGNEGWNWDSVAAYSLQAERARAPNAKQIAAGHYFNASCHGLNGTVHAGPRDTGDDYSPIVKALMSAVEDRGVPTKKDLGCGDPHGVSMFPNTLHEDQVRSDAAREWLLPNYQRPNLQVLTGQYVGKVLLSQNATTPRAVGVEFGTHKGNTHNVYAKHEVLLAAGSAVSPTILEYSGIGMKSILEPLGIDTVVDLPVGLNLQDQTTSTVRSRITPAGAGQGQAAWFATFNETFGDYAEKAHELLNTKLEQWAEEAVARGGFHNTTALLIQYENYRDWIVKDNVAYSELFLDTAGVASFDVWDLLPFTRGYVHILDKDPYLRHFAYDPQYFLNELDLLGQAAATQLARNISNSGAMQTYFAGETIPGDNLAYDADLRAWVEYIPENFRPNYHGVGTCSMMPKEMGGVVDNAARVYGVQGLRVIDGSIPPTQLSSHVMTVFYAMALKIADAILADYASMQ

SEQ ID NO: 766 - protein, 583 aa, Aspergillus niger
SNGIEASLLKDPKEVAGRTYDYIIAGGGLTGLTVAAKLTENPNITVLVIESGSYESDRGPIIEDLNAYGDIFGSSVDHAYETVELATNNRTALIRSGNGLGGSTLINGGTWTRPHKAQVDSWETVFGNEGWNWDSVAAYSLQAERARAPNAKQIAAGHYFNPSCHGLNGTVHAGPRDTGDDYSPIVKALMSAVEDRGVPTKKDLGCGDPHGVSMFPNTLHPDQVRSDAAREWLLPNYQRPNLQVLTGRYVGKVLLSQNATTPRAVGVEFGTHKGNTHNVYAKHEVLLAAGSAVSPTILEYSGIGMKSILEPLGIDTVVDLPVGLNLQDQTTSTVRSRITSAGAGQGQAAWFATFNETFGDYAEKAHELLNTKLEQWAEEAVARGGFHNTTALLIQYENYRDWIVKDNVAYSELFLDTAGVASFDVWDLLPFTRGYVHILDKDPYLRHFAYDPQYFLNELDLLGQAAATQLARNISNSGAMQTYFAGETIPGDNLAYDADLSAWVEYIPENFRPNYHGVGTCSMMPKEMGGVVDNAARVYGVQGLRVIDGSIPPTQMSSHVMTVFYAMALKIADAILADYASMQ

SEQ ID NO: 767 - protein, 583 aa, Aspergillus niger
SNGIEASLLKDPKEVAGRTYDYIIAGGGLTGLTVAAKLTENPNITVLVIESGSYESDRGPIIEDLNAYGDIFGSSVDHAYETVELATNNQTALIRSGNGLGGSTLINGGTWTRPHKAQVDSWETVFGNEGWNWDSVAAYSLQAERARAPNAKQIAAGHYFNPSCHGLNGTVHAGPRDTGDDYSPIVKALMSAVEDRGVPTKKDLGCGDPHGVSMFPNTLHPDQVRSDAAREWLLPNYQRPNLQVLTGQYVGKVLLSQNATTPRAVGVEFGTHKGNTHNVYAKHEVLLAAGSAVSPTILEYSGIGMKSILEPLGIDTVVDLPVGLNLQDQTTSTVRSRITSAGAGQGQAAWFATFNETFGDYTEKAHELLNTKLEQWAEEAVARGGFHNTTALLIQYENYRDWIVKDNVAYSELFLDTAGVASFDVWDLLPFTRGYVHILDKDPYLRHFAYDPQYFLNELDLLGQAAATQLARNISNSGAMQTYFAGETIPGDNLAYDADLRAWVEYIPENFRPNYHGVGTCSMMPKEMGGVVDNAARVYGVQGLRVIDGSIPPTQLSSHVMTVFYAMALKIADAILADYASMQ

SEQ ID NO: 768 - protein, 583 aa, Aspergillus niger
SNGIEASLLKDPKEVAGRTYDYIIAGGGLTGLTVAARLTENPNITVLVIESGSYESDRGPIIEDLNAYGDIFGSSVDHAYETVELPTNNQTALIRSGNGLGGSTLINGGTWTRPHKAQVDSWETVFGNEGWNWDSVAAYSLQAERARAPNAKQIAAGHYFNPSCHGLNGTVHAGPRDTGDDYSPIVKALMSAVEDRGVPTKKDLGCGDPHGVSMFPNTLHPDQVRSDAAREWLLPNYQRPNLQVLTGRYVGKVLLSQNATTPRAVGVEFGTHKGNTHNVYAKHEVLLAAGSAVSPTILEYSGIGMKSILEPLGIDTVVDLPVGLNLQDQTTSTVRSRITPAGAGQGQAAWFATFNETFGDYAEKAHELLNTKLEQWAEEAVARGGFHNTTALLIQYENYRDWIVKDNVAYSELFLDTAGVASFDVWDLLPFTRGYVHILDKDPYLRHFAYDPQYFLNELDLLGQAAATQLARNISNSGAMQTYFAGETIPGDNLAYDADLSAWVEYIPENFRPNYHGVGTCSMMPKEMGGVVDNAARVYGVQGLRVIDGSIPPTQMSSHVMTVFYAMALKIADAILADYASMQ

SEQ ID NO: 769 - protein, 583 aa, Aspergillus niger
SNGIEASLLKDPKEVAGRTYDYIIAGGGLTGLTVAARLTENPNITVLVIESGSYESDRGPIIEDLNAYGDIFGSSVDHAYETVELATNNQTALIRSGNGLGGSTLINGGTWTRPHKAQVDSWETVFGNEGWNWDSVAAYSLQAERARAPNAKQIAAGHYFNPSCHGINGTVHAGPRDTGDDYSPIVKALMSAVEDRGVPTKKDLGCGDPHGVSMFPNTLHPDQVRSDAAREWLLPNYQRPNLQVLTGRYVGKVLLSQNATTPRAVGVEFGTHKGNTHNVYAKHEVLLAAGSAVSPTILEYSGIGMKSILEPLGIDTVVDLPVGLNLQDQTTSTVRSRITSAGAGQGQAAWFATFNETFGDYTEKAHELLNTKLEQWAEEAVARGGFHNTTALLIQYENYRDWIVKDNVAYSELFLDTAGVASFDVWDLLPFTRGYVHILDKDPYLRHFAYDPQYFLNELDLLGQAAATQLARNISNSGAMQTYFAGETIPGDNLAYDADLRAWVEYIPENFRPNYHGVGTCSMMPKEMGGVVDNAARVYGVQGLRVIDGSIPPTQLSSHVMTVFYAMALKIADAILADYASMQ

SEQ ID NO: 770 - protein, 583 aa, Aspergillus niger
SNGIEASLLKDPKEVAGRTYDYIIAGGGLTGLTVAARLTENPNITVLVIESGSYESDRGPIIEDLNAYGDIFGSSVDHAYETVELATNNQTALIRSGNGLGGSTLINGGTWTRPHKAQVDSWETVFGNEGWNWDSVAAYSLQAERARAPNAKQIAAGHYFNPSCHGLNGTVHAGPRDTGDDYSPIVKALMSAVEDRGVPTKKDLGCGDPHGVSMFPNTLHPDQVRSDAAREWLLPNYQRPNLQVLTGRYVGKVLLSQNATTPRAVGVEFGTHKGNTHNVYAKHEVLLAAGSAVSPTILEYSGIGMKSILEPLGIDTVVDLPVGLNLQDQTTSTVRSRITPAGAGQGQAAWFATFNETFGDYTEKAHELLNTKLEQWAEEAVARGGFHNTTALLIQYENYRDWIVKDNVAYSELFLDTAGVASFDVWDLLPFTRGYVHILDKDPYLRHFAYDPQYFLNELDLLGQAAATQLARNISNSGAMQTYFAGETIPGDNLAYDADLRAWVEYIPENFRPNYHGVGTCSMMPKEMGGVVDNAARVYGVQGLRVIDGSIPPTQMSSHVMTVFYAMALKIADAILADYASMQ

SEQ ID NO: 771 - protein, 583 aa, Aspergillus niger
SNGIEASLLKDPKEVAGRTYDYIIAGGGLTGLTVAARLTENPNITVLVIESGSYESDRGPIIEDLNAYGDIFGSSVDHAYETVELATNNQTALIRSGNGLGGSTLINGGTWTRPHKAQVDSWETVFGNEGWNWDSVAAYSLQAERARAPNAKQIAAGHYFNASCHGINGTVHAGPRDTGDDYSPIVKALMSAVEDRGVPTKKDLGCGDPHGVSMFPNTLHEDQVRSDAAREWLLPNYQRPNLQVLTGRYVGKVLLSQNATTPRAVGVEFGTHKGNTHNVYAKHEVLLAAGSAVSPTILEYSGIGMKSILEPLGIDTVVDLPVGLNLQDQTTSTVRSRITPAGAGQGQAAWFATFNETFGDYTEKAHELLNTKLEQWAEEAVARGGFHNTTALLIQYENYRDWIVKDNVAYSELFLDTAGVASFDVWDLLPFTRGYVHILDKDPYLRHFAYDPQYFLNELDLLGQAAATQLARNISNSGAMQTYFAGETIPGDNLAYDADLRAWVEYIPENFRPNYHGVGTCSMMPKEMGGVVDNAARVYGVQGLRVIDGSIPPTQLSSHVMTVFYAMALKIADAVLADYASMQ

SEQ ID NO: 772 - protein, 583 aa, Aspergillus niger
SNGIEASLLKDPKEVAGRTYDYIIAGGGLTGLTVAARLTENPNITVLVIESGSYESDRGPIIEDLNAYGDIFGSSVDHAYETVELATNNQTALIRSGNGLGGSTLINGGTWTRPHKAQVDSWETVFGNEGWNWDSVAAYSLQAERARAPNAKQIAAGHYFNPSCHGINGTVHAGPRDTGDDYSPIVKALMSAVEDRGVPTKKDLGCGDPHGVSMFPNTLHPDQVRSDAAREWLLPNYQRPNLQVLTGQYVGKVLLSQNATTPRAVGVEFGTHKGNTHNVYAKHEVLLAAGSAVSPTILEYSGIGMKSILEPLGIDTVVDLPVGLNLQDQTTSTVRSRITPAGAGQGQAAWFATFNETFGDYAEKAHELLNTKLEQWAEEAVARGGFHNTTALLIQYENYRDWIVKDNVAYSELFLDTAGVASFDVWDLLPFTRGYVHILDKDPYLRHFAYDPQYFLNELDLLGQAAATQLARNISNSGAMQTYFAGETIPGDNLAYDADLRAWVEYIPENFRPNYHGVGTCSMMPKEMGGVVDNAARVYGVQGLRVIDGSIPPTQLSSHVMTVFYAMALKIADAILADYASMQ

SEQ ID NO: 773 - protein, 583 aa, Aspergillus niger
SNGIEASLLKDPKEVAGRTYDYIIAGGGLTGLTVAARLTENPNITVLVIESGSYESDRGPIIEDLNAYGDIFGSSVDHAYETVELATNNQTALIRSGNGLGGSTLINGGTWTRPHKAQVDSWETVFGNEGWNWDSVAAYSLQAERARAPNAKQIAAGHYFNASCHGINGTVHAGPRDTGDDYSPIVKALMSAVEDRGVPTKKDLGCGDPHGVSMFPNTLHPDQVRSDAAREWLLPNYQRPNLQVLTGRYVGKVLLSQNATTPRAVGVEFGTHKGNTHNVYAKHEVLLAAGSAVSPTILEYSGIGMKSILEPLGIDTVVDLPVGLNLQDQTTSTVRSRITPAGAGQGQAAWFATFNETFGDYTEKAHELLNTKLEQWAEEAVARGGFHNTTALLIQYENYRDWIVKDNVAYSELFLDTAGVASFDVWDLLPFTRGYVHILDKDPYLRHFAYDPQYFLNELDLLGQAAATQLARNISNSGAMQTYFAGETIPGDNLAYDADLRAWVEYIPENFRPNYHGVGTCSMMPKEMGGVVDNAARVYGVQGLRVIDGSIPPTQMSSHVMTVFYAMALKIADAVLADYASMQ

SEQ ID NO: 774 - protein, 583 aa, Aspergillus niger
SNGIEASLLKDPKEVAGRTYDYIIAGGGLTGLTVAARLTENPNITVLVIESGSYESDRGPIIEDLNAYGDIFGSSVDHAYETVELATNNRTALIRSGNGLGGSTLINGGTWTRPHKAQVDSWETVFGNEGWNWDSVAAYSLQAERARAPNAKQIAAGHYFNASCHGLNGTVHAGPRDTGDDYSPIVKALMSAVEDRGVPTKKDLGCGDPHGVSMFPNTLHPDQVRSDAAREWLLPNYQRPNLQVLTGRYVGKVLLSQNATTPRAVGVEFGTHKGNTHNVYAKHEVLLAAGSAVSPTILEYSGIGMKSILEPLGIDTVVDLPVGLNLQDQTTSTVRSRITPAGAGQGQAAWFATFNETFGDYTEKAHELLNTKLEQWAEEAVARGGFHNTTALLIQYENYRDWIVKDNVAYSELFLDTAGVASFDVWDLLPFTRGYVHILDKDPYLRHFAYDPQYFLNELDLLGQAAATQLARNISNSGAMQTYFAGETIPGDNLAYDADLRAWVEYIPENFRPNYHGVGTCSMMPKEMGGVVDNAARVYGVQGLRVIDGSIPPTQMSSHVMTVFYAMALKIADAILADYASMQ

SEQ ID NO: 775 - protein, 583 aa, Aspergillus niger
SNGIEASLLKDPKEVAGRTYDYIIAGGGLTGLTVAAKLTENPNITVLVIESGSYESDRGPIIEDLNAYGDIFGSSVDHAYETVELATNNQTALIRSGNGLGGSTLINGGTWTRPHKAQVDSWETVFGNEGWNWDSVAAYSLQAERARAPNAKQIAAGHYFNASCHGLNGTVHAGPRDTGDDYSPIVKALMSAVEDRGVPTKKDLGCGDPHGVSMFPNTLHEDQVRSDAAREWLLPNYQRPNLQVLTGRYVGKVLLSQNATTPRAVGVEFGTHKGNTHNVYAKHEVLLAAGSAVSPTILEYSGIGMKSILEPLGIDTVVDLPVGLNLQDQTTSTVRSRITPAGAGQGQAAWFATFNETFGDYAEKAHELLNTKLEQWAEEAVARGGFHNTTALLIQYENYRDWIVKDNVAYSELFLDTAGVASFDVWDLLPFTRGYVHILDKDPYLRHFAYDPQYFLNELDLLGQAAATQLARNISNSGAMQTYFAGETIPGDNLAYDADLRAWVEYIPENFRPNYHGVGTCSMMPKEMGGVVDNAARVYGVQGLRVIDGSIPPTQMSSHVMTVFYAMALKIADAVLADYASMQ

SEQ ID NO: 776 - protein, 583 aa, Aspergillus niger
SNGIEASLLKDPKEVAGRTYDYIIAGGGLTGLTVAARLTENPNITVLVIESGSYESDRGPIIEDLNAYGDIFGSSVDHAYETVELPTNNQTALIRSGNGLGGSTLINGGTWTRPHKAQVDSWETVFGNEGWNWDSVAAYSLQAERARAPNAKQIAAGHYFNASCHGINGTVHAGPRDTGDDYSPIVKALMSAVEDRGVPTKKDLGCGDPHGVSMFPNTLHEDQVRSDAAREWLLPNYQRPNLQVLTGRYVGKVLLSQNATTPRAVGVEFGTHKGNTHNVYAKHEVLLAAGSAVSPTILEYSGIGMKSILEPLGIDTVVDLPVGLNLQDQTTSTVRSRITPAGAGQGQAAWFATFNETFGDYAEKAHELLNTKLEQWAEEAVARGGFHNTTALLIQYENYRDWIVKDNVAYSELFLDTAGVASFDVWDLLPFTRGYVHILDKDPYLRHFAYDPQYFLNELDLLGQAAATQLARNISNSGAMQTYFAGETIPGDNLAYDADLRAWVEYIPENFRPNYHGVGTCSMMPKEMGGVVDNAARVYGVQGLRVIDGSIPPTQMSSHVMTVFYAMALKIADAVLADYASMQ

SEQ ID NO: 777 - protein, 583 aa, Aspergillus niger
SNGIEASLLKDPKEVAGRTYDYIIAGGGLTGLTVAARLTENPNITVLVIESGSYESDRGPIIEDLNAYGDIFGSSVDHAYETVELPTNNQTALIRSGNGLGGSTLINGGTWTRPHKAQVDSWETVFGNEGWNWDSVAAYSLQAERARAPNAKQIAAGHYFNASCHGLNGTVHAGPRDTGDDYSPIVKALMSAVEDRGVPTKKDLGCGDPHGVSMFPNTLHPDQVRSDAAREWLLPNYQRPNLQVLTGRYVGKVLLSQNATTPRAVGVEFGTHKGNTHNVYAKHEVLLAAGSAVSPTILEYSGIGMKSILEPLGIDTVVDLPVGLNLQDQTTSTVRSRITPAGAGQGQAAWFATFNETFGDYTEKAHELLNTKLEQWAEEAVARGGFHNTTALLIQYENYRDWIVKDNVAYSELFLDTAGVASFDVWDLLPFTRGYVHILDKDPYLRHFAYDPQYFLNELDLLGQAAATQLARNISNSGAMQTYFAGETIPGDNLAYDADLRAWVEYIPENFRPNYHGVGTCSMMPKEMGGVVDNAARVYGVQGLRVIDGSIPPTQMSSHVMTVFYAMALKIADAILADYASMQ

SEQ ID NO: 778 - protein, 583 aa, Aspergillus niger
SNGIEASLLKDPKEVAGRTYDYIIAGGGLTGLTVAARLTENPNITVLVIESGSYESDRGPIIEDLNAYGDIFGSSVDHAYETVELPTNNQTALIRSGNGLGGSTLINGGTWTRPHKAQVDSWETVFGNEGWNWDSVAAYSLQAERARAPNAKQIAAGHYFNASCHGINGTVHAGPRDTGDDYSPIVKALMSAVEDRGVPTKKDLGCGDPHGVSMFPNTLHEDQVRSDAAREWLLPNYQRPNLQVLTGRYVGKVLLSQNATTPRAVGVEFGTHKGNTHNVYAKHEVLLAAGSAVSPTILEYSGIGMKSILEPLGIDTVVDLPVGLNLQDQTTSTVRSRITPAGAGQGQAAWFATFNETFGDYTEKAHELLNTKLEQWAEEAVARGGFHNTTALLIQYENYRDWIVKDNVAYSELFLDTAGVASFDVWDLLPFTRGYVHILDKDPYLRHFAYDPQYFLNELDLLGQAAATQLARNISNSGAMQTYFAGETIPGDNLAYDADLRAWVEYIPENFRPNYHGVGTCSMMPKEMGGVVDNAARVYGVQGLRVIDGSIPPTQLSSHVMTVFYAMALKIADAVLADYASMQ

SEQ ID NO: 779 - protein, 583 aa, Aspergillus niger
SNGIEASLLKDPKEVAGRTYDYIIAGGGLTGLTVAARLTENPNITVLVIESGSYESDRGPIIEDLNAYGDIFGSSVDHAYETVELATNNRTALIRSGNGLGGSTLINGGTWTRPHKAQVDSWETVFGNEGWNWDSVAAYSLQAERARAPNAKQIAAGHYFNPSCHGINGTVHAGPRDTGDDYSPIVKALMSAVEDRGVPTKKDLGCGDPHGVSMFPNTLHPDQVRSDAAREWLLPNYQRPNLQVLTGRYVGKVLLSQNATTPRAVGVEFGTHKGNTHNVYAKHEVLLAAGSAVSPTILEYSGIGMKSILEPLGIDTVVDLPVGLNLQDQTTSTVRSRITSAGAGQGQAAWFATFNETFGDYTEKAHELLNTKLEQWAEEAVARGGFHNTTALLIQYENYRDWIVKDNVAYSELFLDTAGVASFDVWDLLPFTRGYVHILDKDPYLRHFAYDPQYFLNELDLLGQAAATQLARNISNSGAMQTYFAGETIPGDNLAYDADLRAWVEYIPENFRPNYHGVGTCSMMPKEMGGVVDNAARVYGVQGLRVIDGSIPPTQLSSHVMTVFYAMALKIADAILADYASMQ

SEQ ID NO: 780 - protein, 583 aa, Aspergillus niger
SNGIEASLLKDPKEVAGRTYDYIIAGGGLTGLTVAAKLTENPNITVLVIESGSYESDRGPIIEDLNAYGDIFGSSVDHAYETVELATNNQTALIRSGNGLGGSTLINGGTWTRPHKAQVDSWETVFGNEGWNWDSVAAYSLQAERARAPNAKQIAAGHYFNASCHGLNGTVHAGPRDTGDDYSPIVKALMSAVEDRGVPTKKDLGCGDPHGVSMFPNTLHPDQVRSDAAREWLLPNYQRPNLQVLTGRYVGKVLLSQNATTPRAVGVEFGTHKGNTHNVYAKHEVLLAAGSAVSPTILEYSGIGMKSILEPLGIDTVVDLPVGLNLQDQTTSTVRSRITPAGAGQGQAAWFATFNETFGDYTEKAHELLNTKLEQWAEEAVARGGFHNTTALLIQYENYRDWIVKDNVAYSELFLDTAGVASFDVWDLLPFTRGYVHILDKDPYLRHFAYDPQYFLNELDLLGQAAATQLARNISNSGAMQTYFAGETIPGDNLAYDADLRAWVEYIPENFRPNYHGVGTCSMMPKEMGGVVDNAARVYGVQGLRVIDGSIPPTQMSSHVMTVFYAMALKIADAVLADYASMQ

SEQ ID NO: 781 - protein, 583 aa, Aspergillus niger
SNGIEASLLKDPKEVAGRTYDYIIAGGGLTGLTVAARLTENPNITVLVIESGSYESDRGPIIEDLNAYGDIFGSSVDHAYETVELPTNNQTALIRSGNGLGGSTLINGGTWTRPHKAQVDSWETVFGNEGWNWDSVAAYSLQAERARAPNAKQIAAGHYFNPSCHGLNGTVHAGPRDTGDDYSPIVKALMSAVEDRGVPTKKDLGCGDPHGVSMFPNTLHEDQVRSDAAREWLLPNYQRPNLQVLTGRYVGKVLLSQNATTPRAVGVEFGTHKGNTHNVYAKHEVLLAAGSAVSPTILEYSGIGMKSILEPLGIDTVVDLPVGLNLQDQTTSTVRSRITPAGAGQGQAAWFATFNETFGDYAEKAHELLNTKLEQWAEEAVARGGFHNTTALLIQYENYRDWIVKDNVAYSELFLDTAGVASFDVWDLLPFTRGYVHILDKDPYLRHFAYDPQYFLNELDLLGQAAATQLARNISNSGAMQTYFAGETIPGDNLAYDADLRAWVEYIPENFRPNYHGVGTCSMMPKEMGGVVDNAARVYGVQGLRVIDGSIPPTQLSSHVMTVFYAMALKIADAILADYASMQ

SEQ ID NO: 782 - protein, 583 aa, Aspergillus niger
SNGIEASLLKDPKEVAGRTYDYIIAGGGLTGLTVAARLTENPNITVLVIESGSYESDRGPIIEDLNAYGDIFGSSVDHAYETVELPTNNRTALIRSGNGLGGSTLINGGTWTRPHKAQVDSWETVFGNEGWNWDSVAAYSLQAERARAPNAKQIAAGHYFNASCHGLNGTVHAGPRDTGDDYSPIVKALMSAVEDRGVPTKKDLGCGDPHGVSMFPNTLHEDQVRSDAAREWLLPNYQRPNLQVLTGQYVGKVLLSQNATTPRAVGVEFGTHKGNTHNVYAKHEVLLAAGSAVSPTILEYSGIGMKSILEPLGIDTVVDLPVGLNLQDQTTSTVRSRITPAGAGQGQAAWFATFNETFGDYAEKAHELLNTKLEQWAEEAVARGGFHNTTALLIQYENYRDWIVKDNVAYSELFLDTAGVASFDVWDLLPFTRGYVHILDKDPYLRHFAYDPQYFLNELDLLGQAAATQLARNISNSGAMQTYFAGETIPGDNLAYDADLRAWVEYIPENFRPNYHGVGTCSMMPKEMGGVVDNAARVYGVQGLRVIDGSIPPTQLSSHVMTVFYAMALKIADAVLADYASMQ

SEQ ID NO: 783 - protein, 583 aa, Aspergillus niger
SNGIEASLLKDPKEVAGRTYDYIIAGGGLTGLTVAARLTENPNITVLVIESGSYESDRGPIIEDLNAYGDIFGSSVDHAYETVELATNNRTALIRSGNGLGGSTLINGGTWTRPHKAQVDSWETVFGNEGWNWDSVAAYSLQAERARAPNAKQIAAGHYFNASCHGINGTVHAGPRDTGDDYSPIVKALMSAVEDRGVPTKKDLGCGDPHGVSMFPNTLHPDQVRSDAAREWLLPNYQRPNLQVLTGRYVGKVLLSQNATTPRAVGVEFGTHKGNTHNVYAKHEVLLAAGSAVSPTILEYSGIGMKSILEPLGIDTVVDLPVGLNLQDQTTSTVRSRITPAGAGQGQAAWFATFNETFGDYTEKAHELLNTKLEQWAEEAVARGGFHNTTALLIQYENYRDWIVKDNVAYSELFLDTAGVASFDVWDLLPFTRGYVHILDKDPYLRHFAYDPQYFLNELDLLGQAAATQLARNISNSGAMQTYFAGETIPGDNLAYDADLRAWVEYIPENFRPNYHGVGTCSMMPKEMGGVVDNAARVYGVQGLRVIDGSIPPTQMSSHVMTVFYAMALKIADAVLADYASMQ

SEQ ID NO: 784 - protein, 583 aa, Aspergillus niger
SNGIEASLLKDPKEVAGRTYDYIIAGGGLTGLTVAARLTENPNITVLVIESGSYESDRGPIIEDLNAYGDIFGSSVDHAYETVELATNNRTALIRSGNGLGGSTLINGGTWTRPHKAQVDSWETVFGNEGWNWDSVAAYSLQAERARAPNAKQIAAGHYFNASCHGINGTVHAGPRDTGDDYSPIVKALMSAVEDRGVPTKKDLGCGDPHGVSMFPNTLHEDQVRSDAAREWLLPNYQRPNLQVLTGRYVGKVLLSQNATTPRAVGVEFGTHKGNTHNVYAKHEVLLAAGSAVSPTILEYSGIGMKSILEPLGIDTVVDLPVGLNLQDQTTSTVRSRITPAGAGQGQAAWFATFNETFGDYAEKAHELLNTKLEQWAEEAVARGGFHNTTALLIQYENYRDWIVKDNVAYSELFLDTAGVASFDVWDLLPFTRGYVHILDKDPYLRHFAYDPQYFLNELDLLGQAAATQLARNISNSGAMQTYFAGETIPGDNLAYDADLRAWVEYIPENFRPNYHGVGTCSMMPKEMGGVVDNAARVYGVQGLRVIDGSIPPTQLSSHVMTVFYAMALKIADAVLADYASMQ

SEQ ID NO: 785 - protein, 583 aa, Aspergillus niger
SNGIEASLLKDPKEVAGRTYDYIIAGGGLTGLTVAAKLTENPNITVLVIESGSYESDRGPIIEDLNAYGDIFGSSVDHAYETVELPTNNRTALIRSGNGLGGSTLINGGTWTRPHKAQVDSWETVFGNEGWNWDSVAAYSLQAERARAPNAKQIAAGHYFNASCHGLNGTVHAGPRDTGDDYSPIVKALMSAVEDRGVPTKKDLGCGDPHGVSMFPNTLHEDQVRSDAAREWLLPNYQRPNLQVLTGQYVGKVLLSQNATTPRAVGVEFGTHKGNTHNVYAKHEVLLAAGSAVSPTILEYSGIGMKSILEPLGIDTVVDLPVGLNLQDQTTSTVRSRITPAGAGQGQAAWFATFNETFGDYAEKAHELLNTKLEQWAEEAVARGGFHNTTALLIQYENYRDWIVKDNVAYSELFLDTAGVASFDVWDLLPFTRGYVHILDKDPYLRHFAYDPQYFLNELDLLGQAAATQLARNISNSGAMQTYFAGETIPGDNLAYDADLRAWVEYIPENFRPNYHGVGTCSMMPKEMGGVVDNAARVYGVQGLRVIDGSIPPTQLSSHVMTVFYAMALKIADAILADYASMQ

SEQ ID NO: 786 - protein, 583 aa, Aspergillus niger
SNGIEASLLKDPKEVAGRTYDYIIAGGGLTGLTVAARLTENPNITVLVIESGSYESDRGPIIEDLNAYGDIFGSSVDHAYETVELATNNQTALIRSGNGLGGSTLINGGTWTRPHKAQVDSWETVFGNEGWNWDSVAAYSLQAERARAPNAKQIAAGHYFNASCHGINGTVHAGPRDTGDDYSPIVKALMSAVEDRGVPTKKDLGCGDPHGVSMFPNTLHPDQVRSDAAREWLLPNYQRPNLQVLTGRYVGKVLLSQNATTPRAVGVEFGTHKGNTHNVYAKHEVLLAAGSAVSPTILEYSGIGMKSILEPLGIDTVVDLPVGLNLQDQTTSTVRSRITPAGAGQGQAAWFATFNETFGDYTEKAHELLNTKLEQWAEEAVARGGFHNTTALLIQYENYRDWIVKDNVAYSELFLDTAGVASFDVWDLLPFTRGYVHILDKDPYLRHFAYDPQYFLNELDLLGQAAATQLARNISNSGAMQTYFAGETIPGDNLAYDADLRAWVEYIPENFRPNYHGVGTCSMMPKEMGGVVDNAARVYGVQGLRVIDGSIPPTQLSSHVMTVFYAMALKIADAVLADYASMQ

SEQ ID NO: 787 - protein, 583 aa, Aspergillus niger
SNGIEASLLKDPKEVAGRTYDYIIAGGGLTGLTVAAKLTENPNITVLVIESGSYESDRGPIIEDLNAYGDIFGSSVDHAYETVELATNNQTALIRSGNGLGGSTLINGGTWTRPHKAQVDSWETVFGNEGWNWDSVAAYSLQAERARAPNAKQIAAGHYFNPSCHGLNGTVHAGPRDTGDDYSPIVKALMSAVEDRGVPTKKDLGCGDPHGVSMFPNTLHPDQVRSDAAREWLLPNYQRPNLQVLTGRYVGKVLLSQNATTPRAVGVEFGTHKGNTHNVYAKHEVLLAAGSAVSPTILEYSGIGMKSILEPLGIDTVVDLPVGLNLQDQTTSTVRSRITPAGAGQGQAAWFATFNETFGDYTEKAHELLNTKLEQWAEEAVARGGFHNTTALLIQYENYRDWIVKDNVAYSELFLDTAGVASFDVWDLLPFTRGYVHILDKDPYLRHFAYDPQYFLNELDLLGQAAATQLARNISNSGAMQTYFAGETIPGDNLAYDADLRAWVEYIPENFRPNYHGVGTCSMMPKEMGGVVDNAARVYGVQGLRVIDGSIPPTQMSSHVMTVFYAMALKIADAILADYASMQ

SEQ ID NO: 788 - protein, 583 aa, Aspergillus niger
SNGIEASLLKDPKEVAGRTYDYIIAGGGLTGLTVAARLTENPNITVLVIESGSYESDRGPIIEDLNAYGDIFGSSVDHAYETVELPTNNQTALIRSGNGLGGSTLINGGTWTRPHKAQVDSWETVFGNEGWNWDSVAAYSLQAERARAPNAKQIAAGHYFNPSCHGINGTVHAGPRDTGDDYSPIVKALMSAVEDRGVPTKKDLGCGDPHGVSMFPNTLHPDQVRSDAAREWLLPNYQRPNLQVLTGRYVGKVLLSQNATTPRAVGVEFGTHKGNTHNVYAKHEVLLAAGSAVSPTILEYSGIGMKSILEPLGIDTVVDLPVGLNLQDQTTSTVRSRITSAGAGQGQAAWFATFNETFGDYTEKAHELLNTKLEQWAEEAVARGGFHNTTALLIQYENYRDWIVKDNVAYSELFLDTAGVASFDVWDLLPFTRGYVHILDKDPYLRHFAYDPQYFLNELDLLGQAAATQLARNISNSGAMQTYFAGETIPGDNLAYDADLRAWVEYIPENFRPNYHGVGTCSMMPKEMGGVVDNAARVYGVQGLRVIDGSIPPTQLSSHVMTVFYAMALKIADAILADYASMQ

SEQ ID NO: 789 - protein, 583 aa, Aspergillus niger
SNGIEASLLKDPKEVAGRTYDYIIAGGGLTGLTVAARLTENPNITVLVIESGSYESDRGPIIEDLNAYGDIFGSSVDHAYETVELPTNNQTALIRSGNGLGGSTLINGGTWTRPHKAQVDSWETVFGNEGWNWDSVAAYSLQAERARAPNAKQIAAGHYFNASCHGINGTVHAGPRDTGDDYSPIVKALMSAVEDRGVPTKKDLGCGDPHGVSMFPNTLHPDQVRSDAAREWLLPNYQRPNLQVLTGRYVGKVLLSQNATTPRAVGVEFGTHKGNTHNVYAKHEVLLAAGSAVSPTILEYSGIGMKSILEPLGIDTVVDLPVGLNLQDQTTSTVRSRITPAGAGQGQAAWFATFNETFGDYTEKAHELLNTKLEQWAEEAVARGGFHNTTALLIQYENYRDWIVKDNVAYSELFLDTAGVASFDVWDLLPFTRGYVHILDKDPYLRHFAYDPQYFLNELDLLGQAAATQLARNISNSGAMQTYFAGETIPGDNLAYDADLRAWVEYIPENFRPNYHGVGTCSMMPKEMGGVVDNAARVYGVQGLRVIDGSIPPTQMSSHVMTVFYAMALKIADAVLADYASMQ

SEQ ID NO: 790 - protein, 583 aa, Aspergillus niger
SNGIEASLLKDPKEVAGRTYDYIIAGGGLTGLTVAARLTENPNITVLVIESGSYESDRGPIIEDLNAYGDIFGSSVDHAYETVELATNNQTALIRSGNGLGGSTLINGGTWTRPHKAQVDSWETVFGNEGWNWDSVAAYSLQAERARAPNAKQIAAGHYFNASCHGINGTVHAGPRDTGDDYSPIVKALMSAVEDRGVPTKKDLGCGDPHGVSMFPNTLHPDQVRSDAAREWLLPNYQRPNLQVLTGRYVGKVLLSQNATTPRAVGVEFGTHKGNTHNVYAKHEVLLAAGSAVSPTILEYSGIGMKSILEPLGIDTVVDLPVGLNLQDQTTSTVRSRITPAGAGQGQAAWFATFNETFGDYAEKAHELLNTKLEQWAEEAVARGGFHNTTALLIQYENYRDWIVKDNVAYSELFLDTAGVASFDVWDLLPFTRGYVHILDKDPYLRHFAYDPQYFLNELDLLGQAAATQLARNISNSGAMQTYFAGETIPGDNLAYDADLRAWVEYIPENFRPNYHGVGTCSMMPKEMGGVVDNAARVYGVQGLRVIDGSIPPTQLSSHVMTVFYAMALKIADAVLADYASMQ

SEQ ID NO: 791 - protein, 583 aa, Aspergillus niger
SNGIEASLLKDPKEVAGRTYDYIIAGGGLTGLTVAARLTENPNITVLVIESGSYESDRGPIIEDLNAYGDIFGSSVDHAYETVELATNNQTALIRSGNGLGGSTLINGGTWTRPHKAQVDSWETVFGNEGWNWDSVAAYSLQAERARAPNAKQIAAGHYFNPSCHGLNGTVHAGPRDTGDDYSPIVKALMSAVEDRGVPTKKDLGCGDPHGVSMFPNTLHPDQVRSDAAREWLLPNYQRPNLQVLTGRYVGKVLLSQNATTPRAVGVEFGTHKGNTHNVYAKHEVLLAAGSAVSPTILEYSGIGMKSILEPLGIDTVVDLPVGLNLQDQTTSTVRSRITPAGAGQGQAAWFATFNETFGDYTEKAHELLNTKLEQWAEEAVARGGFHNTTALLIQYENYRDWIVKDNVAYSELFLDTAGVASFDVWDLLPFTRGYVHILDKDPYLRHFAYDPQYFLNELDLLGQAAATQLARNISNSGAMQTYFAGETIPGDNLAYDADLRAWVEYIPENFRPNYHGVGTCSMMPKEMGGVVDNAARVYGVQGLRVIDGSIPPTQMSSHVMTVFYAMALKIADAVLADYASMQ

SEQ ID NO: 792 - protein, 583 aa, Aspergillus niger
SNGIEASLLKDPKEVAGRTYDYIIAGGGLTGLTVAAKLTENPNITVLVIESGSYESDRGPIIEDLNAYGDIFGSSVDHAYETVELATNNRTALIRSGNGLGGSTLINGGTWTRPHKAQVDSWETVFGNEGWNWDSVAAYSLQAERARAPNAKQIAAGHYFNPSCHGLNGTVHAGPRDTGDDYSPIVKALMSAVEDRGVPTKKDLGCGDPHGVSMFPNTLHPDQVRSDAAREWLLPNYQRPNLQVLTGRYVGKVLLSQNATTPRAVGVEFGTHKGNTHNVYAKHEVLLAAGSAVSPTILEYSGIGMKSILEPLGIDTVVDLPVGLNLQDQTTSTVRSRITPAGAGQGQAAWFATFNETFGDYAEKAHELLNTKLEQWAEEAVARGGFHNTTALLIQYENYRDWIVKDNVAYSELFLDTAGVASFDVWDLLPFTRGYVHILDKDPYLRHFAYDPQYFLNELDLLGQAAATQLARNISNSGAMQTYFAGETIPGDNLAYDADLSAWVEYIPENFRPNYHGVGTCSMMPKEMGGVVDNAARVYGVQGLRVIDGSIPPTQMSSHVMTVFYAMALKIADAILADYASMQ

SEQ ID NO: 793 - protein, 581 aa, Aspergillus niger
GIEASLLTDPKEIAGCTVDYIIAGGGLTGLTTAARLTENPDITVLVIESGSYESDRGPIIEDLNAYGDIFGSSVDHAYETVELATNNQTALIRSGNGLGGSSLVNGGXWTRPHKAQVDSWETVFGNEGWNWDSVAAYSLQAERARAPNAKQIAAGHYFNASCHGINGTVHAGPRDTGDDYSPIVKALMSAVEDRGVPTKKDLGCGDPHGVSMFPNTLHEDQVRSDAAREWLLPNYQRPNLQVLTGQYVGKVLLSQNATTPRAIGVEFGTHKGNTHNVYAKHEVLLAAGSAVSPTILEYSGIGMKSILEPLGIDTVVDLPVGLNLQDQTTSTVRSRITSAGAGQGQAAWXATFNETLGDYAEKAHELLNTKLEQWAEEAVARGGFHNTTALLIQYENYRDWIVKDNVAYSELFLDTAGVASFGVWDLLPFTRGYVHILDKAPYLRHFAYDPQYFLNELDLLGQAAATQLARNISNSGAMQTYFAGETIPGDNLAYDADLSAWVEYIPYNFRPNYHGVGTCSMMPKEMGGVVDNAARVYGVQGQRVIDGSIPPTQMSSHVMTVFYAMALKIADAILADYASMQ

SEQ ID NO: 794 - protein, 583 aa, Aspergillus niger
SNGIEASLLKDPKEVAGRTYDYIIAGGGLTGLTVAAKLTENPNITVLVIESGSYESDRGPIIEDLNAYGDIFGSSVDHAYETVELPTNNQTALIRSGNGLGGSTLINGGTWTRPHKAQVDSWETVFGNEGWNWDSVAAYSLQAERARAPNAKQIAAGHYFNPSCHGLNGTVHAGPRDTGDDYSPIVKALMSAVEDRGVPTKKDLGCGDPHGVSMFPNTLHEDQVRSDAAREWLLPNYQRPNLQVLTGRYVGKVLLSQNATTPRAVGVEFGTHKGNTHNVYAKHEVLLAAGSAVSPTILEYSGIGMKSILEPLGIDTVVDLPVGLNLQDQTTSTVRSRITPAGAGQGQAAWFATFNETFGDYAEKAHELLNTKLEQWAEEAVARGGFHNTTALLIQYENYRDWIVKDNVAYSELFLDTAGVASFDVWDLLPFTRGYVHILDKDPYLRHFAYDPQYFLNELDLLGQAAATQLARNISNSGAMQTYFAGETIPGDNLAYDADLRAWVEYIPENFRPNYHGVGTCSMMPKEMGGVVDNAARVYGVQGLRVIDGSIPPTQLSSHVMTVFYAMALKIADAILADYASMQ

SEQ ID NO: 795 - protein, 583 aa, Aspergillus niger
SNGIEASLLKDPKEVAGRTYDYIIAGGGLTGLTVAAKLTENPNITVLVIESGSYESDRGPIIEDLNAYGDIFGSSVDHAYETVELATNNRTALIRSGNGLGGSTLINGGTWTRPHKAQVDSWETVFGNEGWNWDSVAAYSLQAERARAPNAKQIAAGHYFNPSCHGINGTVHAGPRDTGDDYSPIVKALMSAVEDRGVPTKKDLGCGDPHGVSMFPNTLHPDQVRSDAAREWLLPNYQRPNLQVLTGRYVGKVLLSQNATTPRAVGVEFGTHKGNTHNVYAKHEVLLAAGSAVSPTILEYSGIGMKSILEPLGIDTVVDLPVGLNLQDQTTSTVRSRITSAGAGQGQAAWFATFNETFGDYTEKAHELLNTKLEQWAEEAVARGGFHNTTALLIQYENYRDWIVKDNVAYSELFLDTAGVASFDVWDLLPFTRGYVHILDKDPYLRHFAYDPQYFLNELDLLGQAAATQLARNISNSGAMQTYFAGETIPGDNLAYDADLRAWVEYIPENFRPNYHGVGTCSMMPKEMGGVVDNAARVYGVQGLRVIDGSIPPTQLSSHVMTVFYAMALKIADAILADYASMQ

SEQ ID NO: 796 - protein, 583 aa, Aspergillus niger
SNGIEASLLKDPKEVAGRTYDYIIAGGGLTGLTVAARLTENPNITVLVIESGSYESDRGPIIEDLNAYGDIFGSSVDHAYETVELATNNQTALIRSGNGLGGSTLINGGTWTRPHKAQVDSWETVFGNEGWNWDSVAAYSLQAERARAPNAKQIAAGHYFNPSCHGINGTVHAGPRDTGDDYSPIVKALMSAVEDRGVPTKKDLGCGDPHGVSMFPNTLHPDQVRSDAAREWLLPNYQRPNLQVLTGRYVGKVLLSQNATTPRAVGVEFGTHKGNTHNVYAKHEVLLAAGSAVSPTILEYSGIGMKSILEPLGIDTVVDLPVGLNLQDQTTSTVRSRITPAGAGQGQAAWFATFNETFGDYTEKAHELLNTKLEQWAEEAVARGGFHNTTALLIQYENYRDWIVKDNVAYSELFLDTAGVASFDVWDLLPFTRGYVHILDKDPYLRHFAYDPQYFLNELDLLGQAAATQLARNISNSGAMQTYFAGETIPGDNLAYDADLRAWVEYIPENFRPNYHGVGTCSMMPKEMGGVVDNAARVYGVQGLRVIDGSIPPTQLSSHVMTVFYAMALKIADAVLADYASMQ

SEQ ID NO: 797 - protein, 583 aa, Aspergillus niger
SNGIEASLLKDPKEVAGRTYDYIIAGGGLTGLTVAAKLTENPNITVLVIESGSYESDRGPIIEDLNAYGDIFGSSVDHAYETVELATNNQTALIRSGNGLGGSTLINGGTWTRPHKAQVDSWETVFGNEGWNWDSVAAYSLQAERARAPNAKQIAAGHYFNASCHGINGTVHAGPRDTGDDYSPIVKALMSAVEDRGVPTKKDLGCGDPHGVSMFPNTLHPDQVRSDAAREWLLPNYQRPNLQVLTGRYVGKVLLSQNATTPRAVGVEFGTHKGNTHNVYAKHEVLLAAGSAVSPTILEYSGIGMKSILEPLGIDTVVDLPVGLNLQDQTTSTVRSRITPAGAGQGQAAWFATFNETFGDYTEKAHELLNTKLEQWAEEAVARGGFHNTTALLIQYENYRDWIVKDNVAYSELFLDTAGVASFDVWDLLPFTRGYVHILDKDPYLRHFAYDPQYFLNELDLLGQAAATQLARNISNSGAMQTYFAGETIPGDNLAYDADLRAWVEYIPENFRPNYHGVGTCSMMPKEMGGVVDNAARVYGVQGLRVIDGSIPPTQLSSHVMTVFYAMALKIADAVLADYASMQ

SEQ ID NO: 798 - protein, 583 aa, Aspergillus niger
SNGIEASLLKDPKEVAGRTYDYIIAGGGLTGLTVAAKLTENPNITVLVIESGSYESDRGPIIEDLNAYGDIFGSSVDHAYETVELPTNNRTALIRSGNGLGGSTLINGGTWTRPHKAQVDSWETVFGNEGWNWDSVAAYSLQAERARAPNAKQIAAGHYFNASCHGLNGTVHAGPRDTGDDYSPIVKALMSAVEDRGVPTKKDLGCGDPHGVSMFPNTLHEDQVRSDAAREWLLPNYQRPNLQVLTGQYVGKVLLSQNATTPRAVGVEFGTHKGNTHNVYAKHEVLLAAGSAVSPTILEYSGIGMKSILEPLGIDTVVDLPVGLNLQDQTTSTVRSRITPAGAGQGQAAWFATFNETFGDYAEKAHELLNTKLEQWAEEAVARGGFHNTTALLIQYENYRDWIVKDNVAYSELFLDTAGVASFDVWDLLPFTRGYVHILDKDPYLRHFAYDPQYFLNELDLLGQAAATQLARNISNSGAMQTYFAGETIPGDNLAYDADLRAWVEYIPENFRPNYHGVGTCSMMPKEMGGVVDNAARVYGVQGLRVIDGSIPPTQLSSHVMTVFYAMALKIADAVLADYASMQ

SEQ ID NO: 799 - protein, 581 aa, Aspergillus niger
GIEASLLTDPKEVAGRTVDYIIAGGGLTGLVVAARLTENPDITVLVIESGSYESDRGPIIEDLNAYGKIFGSSVDHAYETVCLATNNRTALIRAGNGLGGSTLVNGGTWTRPHKAQVDSWETVFGNEGWNWDEVAAYSLQAERARAPNAKQIAAGHYFNASCHGINGTVHAGPRDTGDDYSPIVKALMSAVEDRGVPTKKDLGCGDPHGVSMFPNTLHEDQVRSDAAREWLLPNYQRPNLQVLTGQYVGKVLLSQNATTPRAVGVEFGTHKGNFHNVTAKHEVLLAAGSAVSPTILEYSGIGMKSILEPLGIKTVVDLPVGLNLQDQTTSTVRSRITSAGAGQGQAAWFATFNETFGDYTEKAHELLNTKLEQWAEEAVARGGFHNTTALLIQYENYRDWIVKDNVAYSELFLDTAGEASFDVWDLLPFTRGYVHILDKDPYLRHFAYDPQYFLNELDLLGQAAATQLARNISNSGAMQTYFAGETIPGDNLAYDADLRAWVEYIPYHFRPNYHGVGTCSMMPKEMGGVVDNAARVYGVQGLRVIDGSIPPTQMSSHVMTVFYAMALKIADAVLADYASMQ

SEQ ID NO: 800 - protein, 581 aa, Synthetic construct
GIEASLLTDPKEVAGRTVDYIIAGGGLTGLVVAARLTENPDITVLVIESGSYESDRGPIIEDLNAYGKIFGSSVDHAYETVCLATNNRTALIRAGNGLGGSTLVNGGTWTRPHKAQVDSWETVFGNEGWNWDSVAAYSLQAERARAPNAKQIAAGHYFNASCHGINGTVHAGPRDTGDDYSPIVKALMSAVEDRGVPTKKDLGCGDPHGVSMFPNTLHEDQVRSDAAREWLLPNYQRPNLQVLTGQYVGKVLLSQNATTPRAVGVEFGTHKGNFHNVTAKHEVLLAAGSAVSPTILEYSGIGMKSILEPLGIKTVVDLPVGLNLQDQTTSTVRSRITSAGAGQGQAAWFATFNETFGDYTEKAHELLNTKLEQWAEEAVARGGFHNTTALLIQYENYRDWIVKDNVAYSELFLDTAGEASFDVWDLLPFTRGYVHILDKDPYLEHFAYDPQYFLNELDLLGQAAATQLARNISNSGAMQTYFAGETIPGDNLAYDADLRAWVEYIPYHFRPNYHGVGTCSMMPKEMGGVVDNAARVYGVQGLRVIDGSIPPTQMSSHVMTVFYAMALKIADAVLADYASMQ

SEQ ID NO: 801 - protein, 581 aa, Synthetic construct
GIEASLLTDPKEVAGRTVDYIIAGGGLTGLVVAARLTENPDITVLVIESGSYESDRGPIIEDLNAYGKIFGSSVDHAYETVCLATNNRTALIRAGNGLGGSTLVNGGTWTRPHKAQVDSWETVFGNEGWNWDSVAAYSLQAERARAPNAKQIAAGHYFNASCHGINGTVHAGPRDTGDDYSPIVKALMSAVEDRGVPTKKDLGCGDPHGVSMFPNTLHEDQVRSDAAREWLLPNYQRPNLQVLTGQYVGKVLLSQNATTPRAVGVEFGTHKGNFHNVTAKHEVLLAAGSAVSPTILEYSGIGMKSILEPLGIKTVVDLPVGLNLQDQTTSTVRSRITSAGAGQGQAAWFATFNETFGDYTEKAHELLNTKLEQWAEEAVARGGFHNTTALLIQYENYRDWIVKDNVAYSELFLDTAGEASFDVWDLLPFTRGYVHILDKDPYLRHFAYDPQYFLNELDLLGQAAATQLARNISNSGAMQTYFAGETIPGDNLAYDADLRAWVEYIPYHFRPNYHGVGTCSMMPKEMGGVVDNAARVYGVQGLRVIDGSIPPTQMSSHVMTVFYAMALKIADAVLADYASMQ

SEQ ID NO: 802 - protein, 583 aa, Aspergillus niger
SNGIEASLLKDPKEVAGRTYDYIIAGGGLTGLTVAAKLTENPNITVLVIESGSYESDRGPIIEDLNAYGDIFGSSVDHAYETVELPTNNRTALIRSGNGLGGSTLINGGTWTRPHKAQVDSWETVFGNEGWNWDSVAAYSLQAERARAPNAKQIAAGHYFNPSCHGLNGTVHAGPRDTGDDYSPIVKALMSAVEDRGVPTKKDLGCGDPHGVSMFPNTLHPDQVRSDAAREWLLPNYQRPNLQVLTGRYVGKVLLSQNATTPRAVGVEFGTHKGNTHNVYAKHEVLLAAGSAVSPTILEYSGIGMKSILEPLGIDTVVDLPVGLNLQDQTTSTVRSRITPAGAGQGQAAWFATFNETFGDYAEKAHELLNTKLEQWAEEAVARGGFHNTTALLIQYENYRDWIVKDNVAYSELFLDTAGVASFDVWDLLPFTRGYVHILDKDPYLRHFAYDPQYFLNELDLLGQAAATQLARNISNSGAMQTYFAGETIPGDNLAYDADLSAWVEYIPENFRPNYHGVGTCSMMPKEMGGVVDNAARVYGVQGLRVIDGSIPPTQLSSHVMTVFYAMALKIADAILADYASMQ

SEQ ID NO: 803 - protein, 583 aa, Aspergillus niger
SNGIEASLLKDPKEVAGRTYDYIIAGGGLTGLTVAARLTENPNITVLVIESGSYESDRGPIIEDLNAYGDIFGSSVDHAYETVELPTNNRTALIRSGNGLGGSTLINGGTWTRPHKAQVDSWETVFGNEGWNWDSVAAYSLQAERARAPNAKQIAAGHYFNPSCHGLNGTVHAGPRDTGDDYSPIVKALMSAVEDRGVPTKKDLGCGDPHGVSMFPNTLHPDQVRSDAAREWLLPNYQRPNLQVLTGRYVGKVLLSQNATTPRAVGVEFGTHKGNTHNVYAKHEVLLAAGSAVSPTILEYSGIGMKSILEPLGIDTVVDLPVGLNLQDQTTSTVRSRITPAGAGQGQAAWFATFNETFGDYAEKAHELLNTKLEQWAEEAVARGGFHNTTALLIQYENYRDWIVKDNVAYSELFLDTAGVASFDVWDLLPFTRGYVHILDKDPYLRHFAYDPQYFLNELDLLGQAAATQLARNISNSGAMQTYFAGETIPGDNLAYDADLRAWVEYIPENFRPNYHGVGTCSMMPKEMGGVVDNAARVYGVQGLRVIDGSIPPTQLSSHVMTVFYAMALKIADAILADYASMQ

SEQ ID NO: 804 - protein, 583 aa, Aspergillus niger
SNGIEASLLKDPKEVAGRTYDYIIAGGGLTGLTVAAKLTENPNITVLVIESGSYESDRGPIIEDLNAYGDIFGSSVDHAYETVELPTNNRTALIRSGNGLGGSTLINGGTWTRPHKAQVDSWETVFGNEGWNWDSVAAYSLQAERARAPNAKQIAAGHYFNPSCHGLNGTVHAGPRDTGDDYSPIVKALMSAVEDRGVPTKKDLGCGDPHGVSMFPNTLHPDQVRSDAAREWLLPNYQRPNLQVLTGRYVGKVLLSQNATTPRAVGVEFGTHKGNTHNVYAKHEVLLAAGSAVSPTILEYSGIGMKSILEPLGIDTVVDLPVGLNLQDQTTSTVRSRITPAGAGQGQAAWFATFNETFGDYTEKAHELLNTKLEQWAEEAVARGGFHNTTALLIQYENYRDWIVKDNVAYSELFLDTAGVASFDVWDLLPFTRGYVHILDKDPYLRHFAYDPQYFLNELDLLGQAAATQLARNISNSGAMQTYFAGETIPGDNLAYDADLRAWVEYIPENFRPNYHGVGTCSMMPKEMGGVVDNAARVYGVQGLRVIDGSIPPTQMSSHVMTVFYAMALKIADAILADYASMQ

SEQ ID NO: 805 - protein, 581 aa, Synthetic construct
GIEASLLTDPKEVAGRTVDYIIAGGGLTGLVVAARLTENPDITVLVIESGSYESDRGPIIEDLNAYGKIFGSSVDHAYETVCLATNNRTALIRAGNGLGGSTLVNGGTWTRPHKAQVDSWETVFGNEGWNWDSVAAYSLQAERARAPNAKQIAAGHYFNASCHGINGTVHAGPRDTGDDYSPIVKALMSAVEDRGVPTKKDLCCGDPHGVSMFPNTLHEDQVRSDAAREWLLPNYQRPNLQVLTGQYVGKVLLSQNATTPRAVGVEFGTHKGNFHNVTAKHEVLLAAGSAVSPTILEYSGIGMKSILEPLGIKTVVDLPVGLNLQDQTTSTVRSRITSAGAGQGQAAWFATFNETFGDYTEKAHELLNTKLEQWAEEAVARGGFHNTTALLIQYENYRDWIVKDNVAYSELFLDTAGEASFDVWDLLPFTRGYVHILDKDPYLRHFAYDPQYFLNELDLLGQAAATQLARNISNSGAMQTYFAGETIPGDNLAYDADLRAWVEYIPYHFRPNYHGVGTCSMMPKEMGGVVDNAARVYGVQGLRVIDGSIPPTQMSSHVMTVFYAMALKIADAVLADYASMQ

SEQ ID NO: 806 - protein, 581 aa, Aspergillus niger
GIEASLLTDPKEVAGRTVDYIIAGGGLTGLVVAARLTENPDITVLVIESGSYESDRGPIIEDLNAYGKIFGSSVDHAYETVCLATNNRTALIRAGNGLGGSTLVNGGTWTRPHKAQVDSWETVFGNEGWNWDSVAAYSLQAERARAPNAKQIAAGHYFNASCHGINGTVHAGPRDTGDDYSPIVKALMSAVEDRGVPTKKDLGCGDPHGVSMFPNTLHEDQVRSDAAREWLLPNYQRPNLQVLTGQYVGKVLLSQNATTPRAVGVEFGTHKGNFHNVTAKHEVLLAAGSAVSPTILEYSGIGMKSILEPLGIKTVVDLPVGLNLQDQTTSTVRSRITSAGAGQGQAAWFATFNETFGDYTEKAHELLNTKLEQWAEEAVARGGFHNTTALLIQYENYRDWIVKDNVAYSELFLDTAGEASFDVWDLLPFTRGYVHILDKDPYLRHFAYDPQYFLNELDLLGQAAATQLARNISNSGAMQTYFAGETIPGDNLAYDANLRAWVEYIPYHFRPNYHGVGTCSMMPKEMGGVVDNAARVYGVQGLRVIDGSIPPTQMSSHVMTVFYAMALKIADAVLADYASMQ

SEQ ID NO: 807 - protein, 581 aa, Aspergillus niger
GIEASLLTDPKEVAGRTVDYIIAGGGLTGLVVAARLTENPDITVLVIESGSYESDRGPIIEDLNAYGKIFGSSVDHAYETVCLATNNRTALIRAGNGLGGSTLVNGGTWTRPHKAQVDSWETVFGNEGWNWDSVAAYSLQAERARAPNAKQIAAGHYFNASCHGINGTVHAGPRDTGDDYSPIVKALMSAVEDRGVPTKKDLGCGDPHGVSMFPNTLHEDQVRSDAAREWLLPNYQRPNLQVLTGQYVGKVLLSQNATTPRAVGVEFGTHKGNFHNVTAKHEVLLAAGSAVSPTILEYSGIGMKSILEPLGIKTVVDLPVGLNLQDQTTSTVRSRITSAGAGQGQAAWFATFNETFGDYTEKAHELLNTKLEQWAEEAVARGGFHNTTALLIQYENYRDWIVKDNVAYSELFLDTAGEASFDVWDLLPFTRGYVHILDKDPYLRHFAYDPQYFLNELDLLGQAAATQLARNISNSGAMQTYFAGETIPGDNLAYDADLRAWVEYIPYHFRPNYHGVGTCSMMPKEMGGVVDNAANVYGVQGLRVIDGSIPPTQMSSHVMTVFYAMALKIADAVLADYASMQ

SEQ ID NO: 808 - protein, 581 aa, Synthetic construct
GIEASLLTDPKEVAGRTVDYIIAGGGLTGLVVAARLTENPDITVLVIESGSYESDRGPIIEDLNAYGKIFGSSVDHAYETVCLATNNRTALIRAGNGLGGSTLVNGGTWTRPHKAQVDSWETVFGNEGWNWDSVAAYSLQAERARAPNAKQIAAGHYFNASCHGINGTVHAGPRDTGDDYSPIVKALMSAVEDRGVPTKKDLGCGDPHGVSMFPNTLHPDQVRSDAAREWLLPNYQRPNLQVLTGQYVGKVLLSQNATTPRAVGVEFGTHKGNFHNVTAKHEVLLAAGSAVSPTILEYSGIGMKSILEPLGIKTVVDLPVGLNLQDQTTSTVRSRITSAGAGQGQAAWFATFNETFGDYTEKAHELLNTKLEQWAEEAVARGGFHNTTALLIQYENYRDWIVKDNVAYSELFLDTAGEASFDVWDLLPFTRGYVHILDKDPYLRHFAYDPQYFLNELDLLGQAAATQLARNISNSGAMQTYFAGETIPGDNLAYDADLRAWVEYIPYHFRPNYHGVGTCSMMPKEMGGVVDNAARVYGVQGLRVIDGSIPPTQMSSHVMTVFYAMALKIADAVLADYASMQ

SEQ ID NO: 809 - protein, 581 aa, Aspergillus niger
GIEASLLTDPKEVAGRTVDYIIAGGGLTGLVVAARLTENPDITVLVIESGSYESDRGPIIEDLNAYGKIFGSSVDHAYETVCLATNNRTALIRAGNGLGGSTLVNGGTWTRPHKAQVDSWETVFGNEGWNWDSVAAYSLQAERARAPNAKQIAAGHYFNASCHGINGTVHAGPRDTGDDYSPIVKALMSAVENRGVPTKKDLGCGDPHGVSMFPNTLHEDQVRSDAAREWLLPNYQRPNLQVLTGQYVGKVLLSQNATTPRAVGVEFGTHKGNFHNVTAKHEVLLAAGSAVSPTILEYSGIGMKSILEPLGIKTVVDLPVGLNLQDQTTSTVRSRITSAGAGQGQAAWFATFNETFGDYTEKAHELLNTKLEQWAEEAVARGGFHNTTALLIQYENYRDWIVKDNVAYSELFLDTAGEASFDVWDLLPFTRGYVHILDKDPYLRHFAYDPQYFLNELDLLGQAAATQLARNISNSGAMQTYFAGETIPGDNLAYDADLRAWVEYIPYHFRPNYHGVGTCSMMPKEMGGVVDNAARVYGVQGLRVIDGSIPPTQMSSHVMTVFYAMALKIADAVLADYASMQ

SEQ ID NO: 810 - protein, 581 aa, Synthetic construct
GIEASLLTDPKEVAGRTVDYIIAGGGLTGLVVAARLTENPDITVLVIESGSYESDRGPIIEDLNAYGKIFGSSVDHAYETVCLATNNRTALIRAGNGLGGSTLVNGGTWTRPHKAQVDSWETVFGNEGWNWDSVAAYSLQAERARAPNAKQIAAGHYFNASCHGINGTVHAGPRDTGDDYSPIVKALMSAVEDRGVPTKKDLGCGDPHGVSMFPNTLHEDQVRSDAAREWLLPNYQRPNLQVLTGQYVGKVLLSQNATTPRAVGVEFGTHKGNFHNVTAKHEVLLAAGSAVSPTILEYSGIGMKSILEPLGIKTVVDLPVGLNLQDQTTSTVRSRITSAGAGQGQAAWFATFNETFGDYTPKAHELLNTKLEQWAEEAVARGGFHNTTALLIQYENYRDWIVKDNVAYSELFLDTAGEASFDVWDLLPFTRGYVHILDKDPYLRHFAYDPQYFLNELDLLGQAAATQLARNISNSGAMQTYFAGETIPGDNLAYDADLRAWVEYIPYHFRPNYHGVGTCSMMPKEMGGVVDNAARVYGVQGLRVIDGSIPPTQMSSHVMTVFYAMALKIADAVLADYASMQ

SEQ ID NO: 811 - protein, 581 aa, Aspergillus niger
GIEASLLTDPKEVAGRTVDYIIAGGGLTGLVVAARLTENPDITVLVIESGSYESDRGPIIEDLNAYGKIFGSSVDHAYETVCLATNNRTALIRAGNGLGGSTLVNGGTWTRPHKAQVDSWETVFGNEGWNWDSVAAYSLQAERARAPNAKQIAAGHYFNASCHGINGTVHAGPRDTGDDYSPIVKALMSAVEDRGVPTKKDLGCGDPHGVSMFPNTLHEDQVRSDAAREWLLPNYQRPNLQVLTGQYVGKVLLSQNATTPRAVGVEFGTHKGNFHNVTAKHEVLLAAGSAVSPTILEYSGIGMKSILEPLGIKTVVDLPVGLNLQDQTTSTVRSRITSAGAGQGQAAWFATFNETFGDYTEQAHELLNTKLEQWAEEAVARGGFHNTTALLIQYENYRDWIVKDNVAYSELFLDTAGEASFDVWDLLPFTRGYVHILDKDPYLRHFAYDPQYFLNELDLLGQAAATQLARNISNSGAMQTYFAGETIPGDNLAYDADLRAWVEYIPYHFRPNYHGVGTCSMMPKEMGGVVDNAARVYGVQGLRVIDGSIPPTQMSSHVMTVFYAMALKIADAVLADYASMQ

SEQ ID NO: 812 - protein, 581 aa, Synthetic construct
GIEASLLTDPKEVAGRTVDYIIAGGGLTGLVVAARLTENPDITVLVIESGSYESDRGPIIEDLNAYGKIFGSSVDHAYETVCLATNNRTALIRAGNGLGGSTLVNGGTWTRPHKAQVDSWETVFGNEGWNWDSVAAYSLQAERARAPNAKQIAAGHYFNASCHGINGTVHAGPRDTGDDYSPIVKALMSAVEDRGVPTKKDLGCGDPHGVSMFPNTLHEDQVRSDAAREWLLPNYQRPNLEVLTGQYVGKVLLSQNATTPRAVGVEFGTHKGNFHNVTAKHEVLLAAGSAVSPTILEYSGIGMKSILEPLGIKTVVDLPVGLNLQDQTTSTVRSRITSAGAGQGQAAWFATFNETFGDYTEKAHELLNTKLEQWAEEAVARGGFHNTTALLIQYENYRDWIVKDNVAYSELFLDTAGEASFDVWDLLPFTRGYVHILDKDPYLRHFAYDPQYFLNELDLLGQAAATQLARNISNSGAMQTYFAGETIPGDNLAYDADLRAWVEYIPYHFRPNYHGVGTCSMMPKEMGGVVDNAARVYGVQGLRVIDGSIPPTQMSSHVMTVFYAMALKIADAVLADYASMQ

SEQ ID NO: 813 - protein, 581 aa, Aspergillus niger
GIEDSLLTDPKEVAGRTVDYIIAGGGLTGLVVAARLTENPDITVLVIESGSYESDRGPIIEDLNAYGKIFGSSVDHAYETVCLATNNRTALIRAGNGLGGSTLVNGGTWTRPHKAQVDSWETVFGNEGWNWDSVAAYSLQAERARAPNAKQIAAGHYFNASCHGINGTVHAGPRDTGDDYSPIVKALMSAVEDRGVPTKKDLGCGDPHGVSMFPNTLHEDQVRSDAAREWLLPNYQRPNLQVLTGQYVGKVLLSQNATTPRAVGVEFGTHKGNFHNVTAKHEVLLAAGSAVSPTILEYSGIGMKSILEPLGIKTVVDLPVGLNLQDQTTSTVRSRITSAGAGQGQAAWFATFNETFGDYTEKAHELLNTKLEQWAEEAVARGGFHNTTALLIQYENYRDWIVKDNVAYSELFLDTAGEASFDVWDLLPFTRGYVHILDKDPYLRHFAYDPQYFLNELDLLGQAAATQLARNISNSGAMQTYFAGETIPGDNLAYDADLRAWVEYIPYHFRPNYHGVGTCSMMPKEMGGVVDNAARVYGVQGLRVIDGSIPPTQMSSHVMTVFYAMALKIADAVLADYASMQ

SEQ ID NO: 814 - protein, 581 aa, Synthetic construct
GIEASLLTDPKEVAGRTVDYIIAGGGLTGLVVAARLTENPDITVLVIESGSYESDRGPIIEDLNAYGKIFGSSVDHAYETVCLATNNRTALIRAGNGLGGSTLVNGGTWTRPHKAQVDSWETVFGNEGWNWDSVAAYSLQAERARAPNAKQIAAGHYFNASCHGINGTVHAGPRDTGDDYSPIVKALMSAVEDRGVPTKKDLGCGDPHGVSMFPNTLHEDQVRSDAAREWLLPNYQRPNLEVLTGQYVGKVLLSQNATTPRAVGVEFGTHKGNFHNVTAKHEVLLAAGSAVSPTILEYSGIGMKSILEPLGIKTVVDLPVGLNLQDQTTSTVRSRITSAGAGQGQAAWFATFNETFGDYTEKAHELLNTKLEQWAEEAVARGGFHNTTALLIQYENYRDWIVKDNVAYSELFLDTAGEASFDVWDLLPFTRGYVHILDKDPYLRHFAYDPQYFLNELDLLGQAAATQLARNISNSGAMQTYFAGETIPGDNLAYDADLEAWVEYIPYHFRPNYHGVGTCSMMPKEMGGVVDNAARVYGVQGLRVIDGSIPPTQMSSHVMTVFYAMALKIADAVLADYASMQ

SEQ ID NO: 815 - protein, 581 aa, Synthetic construct
GIEASLLTDPKEVAGRTVDYIIAGGGLTGLVVAARLTENPDITVLVIESGSYESDRGPIIEDLNAYGKIFGSSVDHAYETVCLATNNRTALIRAGNGLGGSTLVNGGTWTRPHKAQVDSWETVFGNEGWNWDSVAAYSLQAERARAPNAKQIAAGHYFNASCHGINGTVHAGPRDTGDDYSPIVKALMSAVEDRGVPTKKDLGCGDPHGVSMFPNTLHEDQVRSDAAREWLLPNYQRPNLQVLTGQYVGKVLLSQNATTPRAVGVEFGTHKGNFHNVTAKHEVLLAAGSAVSPTILEYSGIGMKSILEPLGIKTVVDLPVGLNLQDQTTSTVRSRITPAGAGQGQAAWFATFNETFGDYTEKAHELLNTKLEQWAEEAVARGGFHNTTALLIQYENYRDWIVKDNVAYSELFLDTAGEASFDVWDLLPFTRGYVHILDKDPYLRHFAYDPQYFLNELDLLGQAAATQLARNISNSGAMQTYFAGETIPGDNLAYDADLRAWVEYIPYHFRPNYHGVGTCSMMPKEMGGVVDNAARVYGVQGLRVIDGSIPPTQMSSHVMTVFYAMALKIADAVLADYASMQ

SEQ ID NO: 816 - protein, 581 aa, Synthetic construct
GIEASLLTDPKEVAGRTVDYIIAGGGLTGLVVAARLTENPDITVLVIESGSYESDRGPIIEDLNAYGKIFGSSVDHAYETVCLATNNRTALIRAGNGLGGSTLVNGGTWTRPHKAQVDSWETVFGNEGWNWDSVAAYSLQAERARAPNAKQIAAGHYFNASCHGINGTVHAGPRDTGDDYSPIVKALMSAVEDRGVPTKKDLGCGDPHGVSMFPNTLHEDQVRSDAAREWLLPNYQRPNLQVLTGQYVGKVLLSQNATTPRAVGVEFGTHKGNFHNVTAKHEVLLAAGSAVSPTILEYSGIGMKSILEPLGIKTVVDLPVGLNLQDQTTSTVRSRITSAGAGQGQAAWFATFNETFGDYTEKAHELLNTKLEQWAEEAVARGGFHNTTALLIQYENYRDWIVKDNVAYSELFLDTAGEISFDVWDLLPFTRGYVHILDKDPYLRHFAYDPQYFLNELDLLGQAAATQLARNISNSGAMQTYFAGETIPGDNLAYDADLRAWVEYIPYHFRPNYHGVGTCSMMPKEMGGVVDNAARVYGVQGLRVIDGSIPPTQMSSHVMTVFYAMALKIADAVLADYASMQ

SEQ ID NO: 817 - protein, 581 aa, Aspergillus niger
GIEASLLTDPKEVAGRTVDYIIAGGGLTGLVVAARLTENPDITVLVIESGSYESDRGPIIEDLNAYGKIFGSSVDHAYETVCLATNNRTALIRAGNGLGGSTLVNGGTWTRPSKAQVDSWETVFGNEGWNWDSVAAYSLQAERARAPNAKQIAAGHYFNASCHGINGTVHAGPRDTGDDYSPIVKALMSAVEDRGVPTKKDLGCGDPHGVSMFPNTLHEDQVRSDAAREWLLPNYQRPNLQVLTGQYVGKVLLSQNATTPRAVGVEFGTHKGNFHNVTAKHEVLLAAGSAVSPTILEYSGIGMKSILEPLGIKTVVDLPVGLNLQDQTTSTVRSRITSAGAGQGQAAWFATFNETFGDYTEKAHELLNTKLEQWAEEAVARGGFHNTTALLIQYENYRDWIVKDNVAYSELFLDTAGEASFDVWDLLPFTRGYVHILDKDPYLRHFAYDPQYFLNELDLLGQAAATQLARNISNSGAMQTYFAGETIPGDNLAYDADLRAWVEYIPYHFRPNYHGVGTCSMMPKEMGGVVDNAARVYGVQGLRVIDGSIPPTQMSSHVMTVFYAMALKIADAVLADYASMQ

SEQ ID NO: 818 - protein, 583 aa, Aspergillus niger
SNGIEASLLKDPKEVAGRTYDYIIAGGGLTGLTVAAKLTENPNITVLVIESGSYESDRGPIIEDLNAYGDIFGSSVDHAYETVELPTNNRTALIRSGNGLGGSTLINGGTWTRPHKAQVDSWETVFGNEGWNWDSVAAYSLQAERARAPNAKQIAAGHYFNPSCHGLNGTVHAGPRDTGDDYSPIVKALMSAVEDRGVPTKKDLGCGDPHGVSMFPNTLHPDQVRSDAAREWLLPNYQRPNLQVLTGRYVGKVLLSQNATTPRAVGVEFGTHKGNTHNVYAKHEVLLAAGSAVSPTILEYSGIGMKSILEPLGIDTVVDLPVGLNLQDQTTSTVRSRITPAGAGQGQAAWFATFNETFGDYTEKAHELLNTKLEQWAEEAVARGGFHNTTALLIQYENYRDWIVKDNVAYSELFLDTAGVASFDVWDLLPFTRGYVHILDKDPYLRHFAYDPQYFLNELDLLGQAAATQLARNISNSGAMQTYFAGETIPGDNLAYDADLRAWVEYIPENFRPNYHGVGTCSMMPKEMGGVVDNAARVYGVQGLRVIDGSIPPTQLSSHVMTVFYAMALKIADAILADYASMQ

SEQ ID NO: 819 - protein, 583 aa, Aspergillus niger
SNGIEASLLKDPKEVAGRTYDYIIAGGGLTGLTVAAKLTENPNITVLVIESGSYESDRGPIIEDLNAYGDIFGSSVDHAYETVELPTNNQTALIRSGNGLGGSTLINGGTWTRPHKAQVDSWETVFGNEGWNWDSVAAYSLQAERARAPNAKQIAAGHYFNPSCHGINGTVHAGPRDTGDDYSPIVKALMSAVEDRGVPTKKDLGCGDPHGVSMFPNTLHPDQVRSDAAREWLLPNYQRPNLQVLTGRYVGKVLLSQNATTPRAVGVEFGTHKGNTHNVYAKHEVLLAAGSAVSPTILEYSGIGMKSILEPLGIDTVVDLPVGLNLQDQTTSTVRSRITPAGAGQGQAAWFATFNETFGDYAEKAHELLNTKLEQWAEEAVARGGFHNTTALLIQYENYRDWIVKDNVAYSELFLDTAGVASFDVWDLLPFTRGYVHILDKDPYLRHFAYDPQYFLNELDLLGQAAATQLARNISNSGAMQTYFAGETIPGDNLAYDADLRAWVEYIPENFRPNYHGVGTCSMMPKEMGGVVDNAARVYGVQGLRVIDGSIPPTQLSSHVMTVFYAMALKIADAVLADYASMQ

SEQ ID NO: 820 - protein, 583 aa, Aspergillus niger
SNGIEASLLKDPKEVAGRTYDYIIAGGGLTGLTVAAKLTENPNITVLVIESGSYESDRGPIIEDLNAYGDIFGSSVDHAYETVELPTNNQTALIRSGNGLGGSTLINGGTWTRPHKAQVDSWETVFGNEGWNWDSVAAYSLQAERARAPNAKQIAAGHYFNPSCHGLNGTVHAGPRDTGDDYSPIVKALMSAVEDRGVPTKKDLGCGDPHGVSMFPNTLHPDQVRSDAAREWLLPNYQRPNLQVLTGRYVGKVLLSQNATTPRAVGVEFGTHKGNTHNVYAKHEVLLAAGSAVSPTILEYSGIGMKSILEPLGIDTVVDLPVGLNLQDQTTSTVRSRITPAGAGQGQAAWFATFNETFGDYAEKAHELLNTKLEQWAEEAVARGGFHNTTALLIQYENYRDWIVKDNVAYSELFLDTAGVASFDVWDLLPFTRGYVHILDKDPYLRHFAYDPQYFLNELDLLGQAAATQLARNISNSGAMQTYFAGETIPGDNLAYDADLRAWVEYIPENFRPNYHGVGTCSMMPKEMGGVVDNAARVYGVQGLRVIDGSIPPTQLSSHVMTVFYAMALKIADAVLADYASMQ

SEQ ID NO: 821 - protein, 583 aa, Aspergillus niger
SNGIEASLLKDPKEVAGRTYDYIIAGGGLTGLTVAARLTENPNITVLVIESGSYESDRGPIIEDLNAYGDIFGSSVDHAYETVELPTNNRTALIRSGNGLGGSTLINGGTWTRPHKAQVDSWETVFGNEGWNWDSVAAYSLQAERARAPNAKQIAAGHYFNPSCHGLNGTVHAGPRDTGDDYSPIVKALMSAVEDRGVPTKKDLGCGDPHGVSMFPNTLHPDQVRSDAAREWLLPNYQRPNLQVLTGRYVGKVLLSQNATTPRAVGVEFGTHKGNTHNVYAKHEVLLAAGSAVSPTILEYSGIGMKSILEPLGIDTVVDLPVGLNLQDQTTSTVRSRITPAGAGQGQAAWFATFNETFGDYTEKAHELLNTKLEQWAEEAVARGGFHNTTALLIQYENYRDWIVKDNVAYSELFLDTAGVASFDVWDLLPFTRGYVHILDKDPYLRHFAYDPQYFLNELDLLGQAAATQLARNISNSGAMQTYFAGETIPGDNLAYDADLRAWVEYIPENFRPNYHGVGTCSMMPKEMGGVVDNAARVYGVQGLRVIDGSIPPTQLSSHVMTVFYAMALKIADAVLADYASMQ

SEQ ID NO: 822 - protein, 583 aa, Aspergillus niger
SNGIEASLLKDPKEVAGRTYDYIIAGGGLTGLTVAAKLTENPNITVLVIESGSYESDRGPIIEDLNAYGDIFGSSVDHAYETVELPTNNQTALIRSGNGLGGSTLINGGTWTRPHKAQVDSWETVFGNEGWNWDSVAAYSLQAERARAPNAKQIAAGHYFNPSCHGLNGTVHAGPRDTGDDYSPIVKALMSAVEDRGVPTKKDLGCGDPHGVSMFPNTLHPDQVRSDAAREWLLPNYQRPNLQVLTGRYVGKVLLSQNATTPRAVGVEFGTHKGNTHNVYAKHEVLLAAGSAVSPTILEYSGIGMKSILEPLGIDTVVDLPVGLNLQDQTTSTVRSRITPAGAGQGQAAWFATFNETFGDYTEKAHELLNTKLEQWAEEAVARGGFHNTTALLIQYENYRDWIVKDNVAYSELFLDTAGVASFDVWDLLPFTRGYVHILDKDPYLRHFAYDPQYFLNELDLLGQAAATQLARNISNSGAMQTYFAGETIPGDNLAYDADLRAWVEYIPENFRPNYHGVGTCSMMPKEMGGVVDNAARVYGVQGLRVIDGSIPPTQLSSHVMTVFYAMALKIADAVLADYASMQ

SEQ ID NO: 823 - protein, 581 aa, Synthetic construct
GIEASLLTDPKEVAGRTVDYIIAGGGLTGLVVAARLTENPDITVLVIESGSYESDRGPIIEDLNAYGKIFGSSVDHAYETVCLATNNRTALIRAGNGLGGSTLVNGGTWTRPHKAQVDSWETVFGNEGWNWDSVAAYSLQAERARAPNAKQIAAGHYFNASCHGINGTVHAGPRDTGDDYSPIVKALMSAVEDRGVPTKKDLCCGDPHGVSMFPNTLHEDQVRSDAAREWLLPNYQRPNLSVLTGQYVGKVLLSQNATTPRAVGVEFGTHKGNFHNVTAKHEVLLAAGSAVSPTILEYSGIGMKSILEPLGIKTVVDLPVGLNLQDQTTSTVRSRITSAGAGQGQAAWFATFNETFGDYTEKAHELLNTKLEQWAEEAVARGGFHNTTALLIQYENYRDWIVKDNVAYSELFLDTAGEASFDVWDLLPFTRGYVHILDKDPYLRHFAYDPQYFLNELDLLGQAAATQLARNISNSGAMQTYFAGETIPGDNLAYDADLRAWVEYIPYHFRPNYHGVGTCSMMPKEMGGVVDNAARVYGVQGLRVIDGSIPPTQMSSHVMTVFYAMALKIADAVLADYASMQ

SEQ ID NO: 824 - protein, 581 aa, Synthetic construct
GIEASLLTDPKEVAGRTVDYIIAGGGLTGLVVAARLTENPDITVLVIESGSYESDRGPIIEDLNAYGKIFGSSVDHAYETVCLATNNRTALIRAGNGLGGSTLVNGGTWTRPHKAQVDSWETVFGNEGWNWDSVAAYSLQAERARAPNAKQIAAGHYFNASCHGINGTVHAGPRDTGDDYSPIVKALMSAVEDRGVPTKKDLGCGDPHGVSMFPNTLHEDQVRSDAAREWLLPNYQRPNLSVLTGQYVGKVLLSQNATTPRAVGVEFGTHKGNFHNVTAKHEVLLAAGSAVSPTILEYSGIGMKSILEPLGIKTVVDLPVGLNLQDQTTSTVRSRITSAGAGQGQAAWFATFNETFGDYTPKAHELLNTKLEQWAEEAVARGGFHNTTALLIQYENYRDWIVKDNVAYSELFLDTAGEASFDVWDLLPFTRGYVHILDKDPYLRHFAYDPQYFLNELDLLGQAAATQLARNISNSGAMQTYFAGETIPGDNLAYDADLRAWVEYIPYHFRPNYHGVGTCSMMPKEMGGVVDNAARVYGVQGLRVIDGSIPPTQMSSHVMTVFYAMALKIADAVLADYASMQ

SEQ ID NO: 825 - protein, 581 aa, Aspergillus niger
GIEASLLTDPKEVAGRTVDYIIAGGGLTGLVVAARLTENPDITVLVIESGSYESDRGPIIEDLNAYGKIFGSSVDHAYETVCLATNNRTALIRAGNGLGGSTLVNGGTWTRPHKAQVDSWETVFGNEGWNWDSVAAYSLQAERARAPNAKQIAAGHYFNASCHGINGTVHAGPRDTGDDYSPIVKALMSAVEDRGVPTKKDLGCGDPHGVSMFPNTLHEDQVRSDAAREWLLPNYQRPNLSVLTGQYVGKVLLSQNATTPRAVGVEFGTHKGNFHNVTAKHEVLLAAGSAVSPTILEYSGIGMKSILEPLGIKTVVDLPVGLNLQDQTTSTVRSRITSAGAGQGQAAWFATFNETFGDYTEKAHELLNTKLEQWAEEAVARGGFHNTTALLIQYENYRDWIVKDNVAYSELFLDTAGEASFDVWDLLPFTRGYVHILDKDPYLRHFAYDPQYFLNELDLLGQAAATQLAREISNSGAMQTYFAGETIPGDNLAYDADLRAWVEYIPYHFRPNYHGVGTCSMMPKEMGGVVDNAARVYGVQGLRVIDGSIPPTQMSSHVMTVFYAMALKIADAVLADYASMQ

SEQ ID NO: 826 - protein, 581 aa, Synthetic construct
GIEASLLTDPKEVAGRTVDYIIAGGGLTGLVVAARLTENPDITVLVIESGSYESDRGPIIEDLNAYGKIFGSSVDHAYETVCLATNNRTALIRAGNGLGGSTLVNGGTWTRPHKAQVDSWETVFGNEGWNWDSVAAYSLQAERARAPNAKQIAAGHYFNASCHGINGTVHAGPRDTGDDYSPIVKALMSAVEDRGVPTKKDLCCGDPHGVSMFPNTLHEDQVRSDAAREWLLPNYQRPNLQVLTGQYVGKVLLSQNATTPRAVGVEFGTHKGNFHNVTAKHEVLLAAGSAVSPTILEYSGIGMKSILEPLGIKTVVDLPVGLNLQDQTTSTVRSRITSAGAGQGQAAWFATFNETFGDYTPKAHELLNTKLEQWAEEAVARGGFHNTTALLIQYENYRDWIVKDNVAYSELFLDTAGEASFDVWDLLPFTRGYVHILDKDPYLRHFAYDPQYFLNELDLLGQAAATQLARNISNSGAMQTYFAGETIPGDNLAYDADLRAWVEYIPYHFRPNYHGVGTCSMMPKEMGGVVDNAARVYGVQGLRVIDGSIPPTQMSSHVMTVFYAMALKIADAVLADYASMQ

SEQ ID NO: 827 - protein, 581 aa, Aspergillus niger
GIEASLLTDPKEVAGRTVDYIIAGGGLTGLVVAARLTENPDITVLVIESGSYESDRGPIIEDLNAYGKIFGSSVDHAYETVCLATNNRTALIRAGNGLGGSTLVNGGTWTRPHKAQVDSWETVFGNEGWNWDSVAAYSLQAERARAPNAKQIAAGHYFNASCHGINGTVHAGPRDTGDDYSPIVKALMSAVENRGVPTKKDLGCGDPHGVSMFPNTLHEDQVRSDAAREWLLPNYQRPNLSVLTGQYVGKVLLSQNATTPRAVGVEFGTHKGNFHNVTAKHEVLLAAGSAVSPTILEYSGIGMKSILEPLGIKTVVDLPVGLNLQDQTTSTVRSRITSAGAGQGQAAWFATFNETFGDYTEKAHELLNTKLEQWAEEAVARGGFHNTTALLIQYENYRDWIVKDNVAYSELFLDTAGEASFDVWDLLPFTRGYVHILDKDPYLRHFAYDPQYFLNELDLLGQAAATQLARNISNSGAMQTYFAGETIPGDNLAYDADLRAWVEYIPYHFRPNYHGVGTCSMMPKEMGGVVDNAARVYGVQGLRVIDGSIPPTQMSSHVMTVFYAMALKIADAVLADYASMQ

SEQ ID NO: 828 - protein, 581 aa, Aspergillus niger
GIEASLLTDPKEVAGRTVDYIIAGGGLTGLVVAARLTENPDITVLVIESGSYESDRGPIIEDLNAYGKIFGSSVDHAYETVCLATNNRTALIRAGNGLGGSTLVNGGTWTRPSKAQVDSWETVFGNEGWNWDSVAAYSLQAERARAPNAKQIAAGHYFNASCHGINGTVHAGPRDTGDDYSPIVKALMSAVEDRGVPTKKDLGCGDPHGVSMFPNTLHEDQVRSDAAREWLLPNYQRPNLQVLTGQYVGKVLLSQNATTPRAVGVEFGTHKGNFHNVTAKHEVLLAAGSAVSPTILEYSGIGMKSILEPLGIKTVVDLPVGLNLQDQTTSTVRSRITSAGAGQGQAAWFATFNETFGDYTEKAHELLNTKLEQWAEEAVARGGFHNTTALLIQYENYRDWIVKDNVAYSELFLDTAGEASFDVWDLLPFTRGYVHILDKDPYLRHFAYDPQYFLNELDLLGQAAATQLARNISNSGAMQTYFAGETIPGDNLAYDANLRAWVEYIPYHFRPNYHGVGTCSMMPKEMGGVVDNAARVYGVQGLRVIDGSIPPTQMSSHVMTVFYAMALKIADAVLADYASMQ

SEQ ID NO: 829 - protein, 581 aa, Aspergillus niger
GIEASLLTDPKEVAGRTVDYIIAGGGLTGLVVAARLTENPDITVLVIESGSYESDRGPIIEDLNAYGKIFGSSVDHAYETVCLATNNRTALIRAGNGLGGSTLVNGGTWTRPHKAQVDSWETVFGNEGWNWDSVAAYSLQAERARAPNAKQIAAGHYFNASCHGINGTVHAGPRDTGDDYSPIVKALMSAVEDRGVPTKKDLGCGDPHGVSMFPNTLHEDQVRSDAAREWLLPNYQRPNLQVLTGQYVGKVLLSQNATTPRAVGVEFGTHKGNFHNVTAKHEVLLAAGSAVSPTILEYSGIGMKSILEPLGIKTVVDLPVGLNLQDQTTSTVRSRITSAGAGQGQAAWFATFNETFGDYTEKAHELLNTKLEQWAEEAVARGGFHNTTALLIQYENYRDWIVKDNVAYSELFLDTAGEASFDVWDLLPFTRGYVHILDKDPYLRHFAYDPQYFLNELDLLGQAAATQLARNISNSGAMQTYFAGETIPGDNLAYDANLRAWVEYIPYHFRPNYHGVGTCSMMPKEMGGVVDNAANVYGVQGLRVIDGSIPPTQMSSHVMTVFYAMALKIADAVLADYASMQ

SEQ ID NO: 830 - protein, 581 aa, Synthetic construct
GIEASLLTDPKEVAGRTVDYIIAGGGLTGLVVAARLTENPDITVLVIESGSYESDRGPIIEDLNAYGKIFGSSVDHAYETVCLATNNRTALIRAGNGLGGSTLVNGGTWTRPHKAQVDSWETVFGNEGWNWDSVAAYSLQAERARAPNAKQIAAGHYFNASCHGINGTVHAGPRDTGDDYSPIVKALMSAVEDRGVPTKKDLGCGDPHGVSMFPNTLHEDQVRSDAAREWLLPNYQRPNLSVLTGQYVGKVLLSQNATTPRAVGVEFGTHKGNFHNVTAKHEVLLAAGSAVSPTILEYSGIGMKSILEPLGIKTVVDLPVGLNLQDQTTSTVRSRITSAGAGQGQAAWFATFNETFGDYTEKAHELLNTKLEQWAEEAVARGGFHNTTALLIQYENYRDWIVKDNVAYSELFLDTAGEISFDVWDLLPFTRGYVHILDKDPYLRHFAYDPQYFLNELDLLGQAAATQLARNISNSGAMQTYFAGETIPGDNLAYDADLRAWVEYIPYHFRPNYHGVGTCSMMPKEMGGVVDNAARVYGVQGLRVIDGSIPPTQMSSHVMTVFYAMALKIADAVLADYASMQ

SEQ ID NO: 831 - protein, 581 aa, Aspergillus niger
GIEDSLLTDPKEVAGRTVDYIIAGGGLTGLVVAARLTENPDITVLVIESGSYESDRGPIIEDLNAYGKIFGSSVDHAYETVCLATNNRTALIRAGNGLGGSTLVNGGTWTRPHKAQVDSWETVFGNEGWNWDEVAAYSLQAERARAPNAKQIAAGHYFNASCHGINGTVHAGPRDTGDDYSPIVKALMSAVEDRGVPTKKDLGCGDPHGVSMFPNTLHEDQVRSDAAREWLLPNYQRPNLSVLTGQYVGKVLLSQNATTPRAVGVEFGTHKGNFHNVTAKHEVLLAAGSAVSPTILEYSGIGMKSILEPLGIKTVVDLPVGLNLQDQTTSTVRSRITSAGAGQGQAAWFATFNETFGDYTEKAHELLNTKLEQWAEEAVARGGFHNTTALLIQYENYRDWIVKDNVAYSELFLDTAGEASFDVWDLLPFTRGYVHILDKDPYLRHFAYDPQYFLNELDLLGQAAATQLARNISNSGAMQTYFAGETIPGDNLAYDADLRAWVEYIPYHFRPNYHGVGTCSMMPKEMGGVVDNAARVYGVQGLRVIDGSIPPTQMSSHVMTVFYAMALKIADAVLADYASMQ

SEQ ID NO: 832 - protein, 581 aa, Aspergillus niger
GIEASLLTDPKEVAGRTVDYIIAGGGLTGLVVAARLTENPDITVLVIESGSYESDRGPIIEDLNAYGKIFGSSVDHAYETVCLATNNRTALIRAGNGLGGSTLVNGGTWTRPHKAQVDSWETVFGNEGWNWDSVAAYSLQAERARAPNAKQIAAGHYFNASCHGINGTVHAGPRDTGDDYSPIVKALMSAVEDRGVPTKKDLGCGDPHGVSMFPNTLHEDQVRSDAAREWLLPNYQRPNLSVLTGQYVGKVLLSQNATTPRAVGVEFGTHKGNFHNVTAKHEVLLAAGSAVSPTILEYSGIGMKSILEPLGIKTVVDLPVGLNLQDQTTSTVRSRITSAGAGQGQAAWFATFNETFGDYTEKAHELLNTKLEQWAEEAVARGGFHNTTALLIQYENYRDWIVKDNVAYSELFLDTAGEASFDVWDLLPFTRGYVHILDKDPYLRHFAYDPQYFLNELDLLGQAAATQLARNISNSGAMQTYFAGETIPGDNLAYDANLRAWVEYIPYHFRPNYHGVGTCSMMPKEMGGVVDNAARVYGVQGLRVIDGSIPPTQMSSHVMTVFYAMALKIADAVLADYASMQ

SEQ ID NO: 833 - protein, 581 aa, Synthetic construct
GIEASLLTDPKEVAGRTVDYIIAGGGLTGLVVAARLTENPDITVLVIESGSYESDRGPIIEDLNAYGKIFGSSVDHAYETVCLATNNRTALIRAGNGLGGSTLVNGGTWTRPHKAQVDSWETVFGNEGWNWDSVAAYSLQAERARAPNAKQIAAGHYFNASCHGINGTVHAGPRDTGDDYSPIVKALMSAVEDRGVPTKKDLGCGDPHGVSMFPNTLHPDQVRSDAAREWLLPNYQRPNLSVLTGQYVGKVLLSQNATTPRAVGVEFGTHKGNFHNVTAKHEVLLAAGSAVSPTILEYSGIGMKSILEPLGIKTVVDLPVGLNLQDQTTSTVRSRITSAGAGQGQAAWFATFNETFGDYTEKAHELLNTKLEQWAEEAVARGGFHNTTALLIQYENYRDWIVKDNVAYSELFLDTAGEASFDVWDLLPFTRGYVHILDKDPYLRHFAYDPQYFLNELDLLGQAAATQLARNISNSGAMQTYFAGETIPGDNLAYDADLRAWVEYIPYHFRPNYHGVGTCSMMPKEMGGVVDNAARVYGVQGLRVIDGSIPPTQMSSHVMTVFYAMALKIADAVLADYASMQ

SEQ ID NO: 834 - protein, 581 aa, Aspergillus niger
GIEASLLTDPKEVAGRTVDYIIAGGGLTGLVVAARLTENPDITVLVIESGSYESDRGPIIEDLNAYGKIFGSSVDHAYETVCLATNNRTALIRAGNGLGGSTLVNGGTWTRPHKAQVDSWETVFGNEGWNWDSVAAYSLQAERARAPNAKQIAAGHYFNASCHGINGTVHAGPRDTGDDYSPIVKALMSAVEDRGVPTKKDLGCGDPHGVSMFPNTLHEDQVRSDAAREWLLPNYQRPNLQVLTGQYVGKVLLSQNATTPRAVGVEFGTHKGNFHNVTAKHEVLLAAGSAVSPTILEYSGIGMKSILEPLGIKTVVDLPVGLNLQDQTTSTVRSRITSAGAGQGQAAWFATFNETFGDYTEQAHELLNTKLEQWAEEAVARGGFHNTTALLIQYENYRDWIVKDNVAYSELFLDTAGEASFDVWDLLPFTRGYVHILDKDPYLRHFAYDPQYFLNELDLLGQAAATQLARNISNSGAMQTYFAGETIPGDNLAYDANLRAWVEYIPYHFRPNYHGVGTCSMMPKEMGGVVDNAARVYGVQGLRVIDGSIPPTQMSSHVMTVFYAMALKIADAVLADYASMQ

SEQ ID NO: 835 - protein, 581 aa, Synthetic construct
GIEASLLTDPKEVAGRTVDYIIAGGGLTGLVVAARLTENPDITVLVIESGSYESDRGPIIEDLNAYGKIFGSSVDHAYETVCLATNNRTALIRAGNGLGGSTLVNGGTWTRPHKAQVDSWETVFGNEGWNWDSVAAYSLQAERARAPNAKQIAAGHYFNASCHGINGTVHAGPRDTGDDYSPIVKALMSAVEDRGVPTKKDLGCGDPHGVSMFPNTLHPDQVRSDAAREWLLPNYQRPNLQVLTGQYVGKVLLSQNATTPRAVGVEFGTHKGNFHNVTAKHEVLLAAGSAVSPTILEYSGIGMKSILEPLGIKTVVDLPVGLNLQDQTTSTVRSRITSAGAGQGQAAWFATFNETFGDYTPKAHELLNTKLEQWAEEAVARGGFHNTTALLIQYENYRDWIVKDNVAYSELFLDTAGEASFDVWDLLPFTRGYVHILDKDPYLRHFAYDPQYFLNELDLLGQAAATQLARNISNSGAMQTYFAGETIPGDNLAYDADLRAWVEYIPYHFRPNYHGVGTCSMMPKEMGGVVDNAARVYGVQGLRVIDGSIPPTQMSSHVMTVFYAMALKIADAVLADYASMQ

SEQ ID NO: 836 - protein, 581 aa, Aspergillus niger
GIEASLLTDPKEVAGRTVDYIIAGGGLTGLVVAARLTENPDITVLVIESGSYESDRGPIIEDLNAYGKIFGSSVDHAYETVCLATNNRTALIRAGNGLGGSTLVNGGTWTRPHKAQVDSWETVFGNEGWNWDSVAAYSLQAERARAPNAKQIAAGHYFNASCHGINGTVHAGPRDTGDDYSPIVKALMSAVENRGVPTKKDLGCGDPHGVSMFPNTLHEDQVRSDAAREWLLPNYQRPNLQVLTGQYVGKVLLSQNATTPRAVGVEFGTHKGNFHNVTAKHEVLLAAGSAVSPTILEYSGIGMKSILEPLGIKTVVDLPVGLNLQDQTTSTVRSRITSAGAGQGQAAWFATFNETFGDYTEKAHELLNTKLEQWAEEAVARGGFHNTTALLIQYENYRDWIVKDNVAYSELFLDTAGEASFDVWDLLPFTRGYVHILDKDPYLRHFAYDPQYFLNELDLLGQAAATQLARNISNSGAMQTYFAGETIPGDNLAYDANLRAWVEYIPYHFRPNYHGVGTCSMMPKEMGGVVDNAARVYGVQGLRVIDGSIPPTQMSSHVMTVFYAMALKIADAVLADYASMQ

SEQ ID NO: 837 - protein, 581 aa, Aspergillus niger
GIEASLLTDPKEVAGRTVDYIIAGGGLTGLVVAARLTENPDITVLVIESGSYESDRGPIIEDLNAYGKIFGSSVDHAYETVCLATNNRTALIRAGNGLGGSTLVNGGTWTRPHKAQVDSWETVFGNEGWNWDSVAAYSLQAERARAPNAKQIAAGHYFNASCHGINGTVHAGPRDTGDDYSPIVKALMSAVEDRGVPTKKDLGCGDPHGVSMFPNTLHEDQVRSDAAREWLLPNYQRPNLSVLTGQYVGKVLLSQNATTPRAVGVEFGTHKGNFHNVTAKHEVLLAAGSAVSPTILEYSGIGMKSILEPLGIKTVVDLPVGLNLQDQTTSTVRSRITSAGAGQGQAAWFATFNETFGDYTEKAHELLNTKLEQWAEEAVARGGFHNTTALLIQYENYRDWIVKDNVAYSELFLDTAGEASFDVWDLLPFTRGYVHILDKDPYLRHFAYDPQYFLNELDLLGQAAATQLARNISNSGAMQTYFAGETIPGDNLAYDADLRAWVEYIPYHFRPNYHGVGTCSMMPKEMGGVVDNAANVYGVQGLRVIDGSIPPTQMSSHVMTVFYAMALKIADAVLADYASMQ

SEQ ID NO: 838 - protein, 581 aa, Synthetic construct
GIEASLLTDPKEVAGRTVDYIIAGGGLTGLVVAARLTENPDITVLVIESGSYESDRGPIIEDLNAYGKIFGSSVDHAYETVCLATNNRTALIRAGNGLGGSTLVNGGTWTRPHKAQVDSWETVFGNEGWNWDSVAAYSLQAERARAPNAKQIAAGHYFNASCHGINGTVHAGPRDTGDDYSPIVKALMSAVEDRGVPTKKDLGCGDPHGVSMFPNTLHEDQVRSDAAREWLLPNYQRPNLQVLTGQYVGKVLLSQNATTPRAVGVEFGTHKGNFHNVTAKHEVLLAAGSAVSPTILEYSGIGMKSILEPLGIKTVVDLPVGLNLQDQTTSTVRSRITSAGAGQGQAAWFATFNETFGDYTPKAHELLNTKLEQWAEEAVARGGFHNTTALLIQYENYRDWIVKDNVAYSELFLDTAGEISFDVWDLLPFTRGYVHILDKDPYLRHFAYDPQYFLNELDLLGQAAATQLARNISNSGAMQTYFAGETIPGDNLAYDADLRAWVEYIPYHFRPNYHGVGTCSMMPKEMGGVVDNAARVYGVQGLRVIDGSIPPTQMSSHVMTVFYAMALKIADAVLADYASMQ

SEQ ID NO: 839 - protein, 581 aa, Synthetic construct
GIEASLLTDPKEVAGRTVDYIIAGGGLTGLVVAARLTENPDITVLVIESGSYESDRGPIIEDLNAYGKIFGSSVDHAYETVCLATNNRTALIRAGNGLGGSTLVNGGTWTRPHKAQVDSWETVFGNEGWNWDSVAAYSLQAERARAPNAKQIAAGHYFNASCHGINGTVHAGPRDTGDDYSPIVKALMSAVEDRGVPTKKDLGCGDPHGVSMFPNTLHEDQVRSDAAREWLLPNYQRPNLQVLTGQYVGKVLLSQNATTPRAVGVEFGTHKGNFHNVTAKHEVLLAAGSAVSPTILEYSGIGMKSILEPLGIKTVVDLPVGLNLQDQTTSTVRSRITPAGAGQGQAAWFATFNETFGDYTPKAHELLNTKLEQWAEEAVARGGFHNTTALLIQYENYRDWIVKDNVAYSELFLDTAGEASFDVWDLLPFTRGYVHILDKDPYLRHFAYDPQYFLNELDLLGQAAATQLARNISNSGAMQTYFAGETIPGDNLAYDADLRAWVEYIPYHFRPNYHGVGTCSMMPKEMGGVVDNAARVYGVQGLRVIDGSIPPTQMSSHVMTVFYAMALKIADAVLADYASMQ

SEQ ID NO: 840 - protein, 581 aa, Aspergillus niger
GIEASLLTDPKEVAGRTVDYIIAGGGLTGLVVAARLTENPDITVLVIESGSYESDRGPIIEDLNAYGKIFGSSVDHAYETVCLATNNRTALIRAGNGLGGSTLVNGGTWTRPSKAQVDSWETVFGNEGWNWDSVAAYSLQAERARAPNAKQIAAGHYFNASCHGINGTVHAGPRDTGDDYSPIVKALMSAVEDRGVPTKKDLGCGDPHGVSMFPNTLHEDQVRSDAAREWLLPNYQRPNLSVLTGQYVGKVLLSQNATTPRAVGVEFGTHKGNFHNVTAKHEVLLAAGSAVSPTILEYSGIGMKSILEPLGIKTVVDLPVGLNLQDQTTSTVRSRITSAGAGQGQAAWFATFNETFGDYTEKAHELLNTKLEQWAEEAVARGGFHNTTALLIQYENYRDWIVKDNVAYSELFLDTAGEASFDVWDLLPFTRGYVHILDKDPYLRHFAYDPQYFLNELDLLGQAAATQLARNISNSGAMQTYFAGETIPGDNLAYDADLRAWVEYIPYHFRPNYHGVGTCSMMPKEMGGVVDNAARVYGVQGLRVIDGSIPPTQMSSHVMTVFYAMALKIADAVLADYASMQ

SEQ ID NO: 841 - protein, 581 aa, Aspergillus niger
GIEASLLTDPKEVAGRTVDYIIAGGGLTGLVVAARLTENPDITVLVIESGSYESDRGPIIEDLNAYGKIFGSSVDHAYETVCLATNNRTALIRAGNGLGGSTLVNGGTWTRPHKAQVDSWETVFGNEGWNWDSVAAYSLQAERARAPNAKQIAAGHYFNASCHGINGTVHAGPRDTGDDYSPIVKALMSAVEDRGVPTKKDLGCGDPHGVSMFPNTLHEDQVRSDAAREWLLPNYQRPNLSVLTGQYVGKVLLSQNATTPRAVGVEFGTHKGNFHNVTAKHEVLLAAGSAVSPTILEYSGIGMKSILEPLGIKTVVDLPVGLNLQDQTTSTVRSRITSAGAGQGQAAWFATFNETFGDYTEQAHELLNTKLEQWAEEAVARGGFHNTTALLIQYENYRDWIVKDNVAYSELFLDTAGEASFDVWDLLPFTRGYVHILDKDPYLRHFAYDPQYFLNELDLLGQAAATQLARNISNSGAMQTYFAGETIPGDNLAYDADLRAWVEYIPYHFRPNYHGVGTCSMMPKEMGGVVDNAARVYGVQGLRVIDGSIPPTQMSSHVMTVFYAMALKIADAVLADYASMQ

SEQ ID NO: 842 - protein, 581 aa, Aspergillus niger
GIEASLLTDPKEVAGRTVDYIIAGGGLTGLVVAARLTENPDITVLVIESGSYESDRGPIIEDLNAYGKIFGSSVDHAYETVCLATNNRTALIRAGNGLGGSTLVNGGTWTRPHKAQVDSWETVFGNEGWNWDSVAAYSLQAERARAPNAKQIAAGHYFNASCHGINGTVHAGPRDTGDDYSPIVKALMSAVEDRGVPTKKDLGCGDPHGVSMFPNTLHEDQVRSDAAREWLLPNYQRPNLSVLTGQYVGKVLLSQNATTPRAVGVEFGTHKGNFHNVTAKHEVLLAAGSAVSPTILEYSGIGMKSILEPLGIKTVVDLPVGLNLQDQTTSTVRSRITSAGAGQGQAAWFATFNETFGDYTEKAHELLNTKLEQWAEEAVARGGFHNTTALLIQYENYRDWIVKDNVAYSELFLDTAGEASFDVWDLLPFTRGYVHILDKDPYLRHFAYDPQYFLNELDLLGQAAATQLARNISNSGAMQTYFAGETIPGDNLAYDADLRAWVEYIPYHFRPNYHGVGTCSMMPKEMGGVVDNAARVYGVQGLRVIDGSIPPTQMSSHVMTVFYAMALKIADAVLADYASME

SEQ ID NO: 843 - protein, 583 aa, Aspergillus niger
SNGIEASLLKDPKEVAGRTYDYIIAGGGLTGLTVAAKLTENPNITVLVIESGSYESDRGPIIEDLNAYGDIFGSSVDHAYETVELPTNNRTALIRSGNGLGGSTLINGGTWTRPHKAQVDSWETVFGNEGWNWDSVAAYSLQAERARAPNAKQIAAGHYFNPSCHGLNGTVHAGPRDTGDDYSPIVKALMSAVEDRGVPTKKDLGCGDPHGVSMFPNTLHPDQVRSDAAREWLLPNYQRPNLQVLTGRYVGKVLLSQNATTPRAVGVEFGTHKGNTHNVYAKHEVLLAAGSAVSPTILEYSGIGMKSILEPLGIDTVVDLPVGLNLQDQTTSTVRSRITPAGAGQGQAAWFATFNETFGDYTEKAHELLNTKLEQWAEEAVARGGFHNTTALLIQYENYRDWIVKDNVAYSELFLDTAGVASFDVWDLLPFTRGYVHILDKDPYLRHFAYDPQYFLNELDLLGQAAATQLARNISNSGAMQTYFAGETIPGDNLAYDADLRAWVEYIPENFRPNYHGVGTCSMMPKEMGGVVDNAARVYGVQGLRVIDGSIPPTQLSSHVMTVFYAMALKIADAVLADYASMQ

SEQ ID NO: 844 - protein, 581 aa, Aspergillus niger
GIEASLLTDPKEVAGRTVDYIIAGGGLTGLVVAARLTENPDITVLVIESGSYESDRGPIIEDLNAYGKIFGSSVDHAYETVCLATNNRTALIRAGNGLGGSTLVNGGTWTRPHKAQVDSWETVFGNEGWNWDSVAAYSLQAERARAPNAKQIAAGHYFNASCHGINGTVHAGPRDTGDDYSPIVKALMSAVEDRGVPTKKDLGCGDPHGVSMFPNTLHEDQVRSDAAREWLLPNYQRPNLSVLTGQYVGKVLLSQNATTPRAVGVEFGTHKGNFHNVTAKHEVLLAAGSAVSPTILEYSGIGMKSILEPLGIKTVVDLPVGLNLQDQTTSTVRSRITSAGAGQGQAAWFATFNETFGDYTEQAHELLNTKLEQWAEEAVARGGFHNTTALLIQYENYRDWIVKDNVAYSELFLDTAGEASFDVWDLLPFTRGYVHILDKDPYLRHFAYDPQYFLNELDLLGQAAATQLARNISNSGAMQTYFAGETIPGDNLAYDANLRAWVEYIPYHFRPNYHGVGTCSMMPKEMGGVVDNAARVYGVQGLRVIDGSIPPTQMSSHVMTVFYAMALKIADAVLADYASMQ

SEQ ID NO: 845 - protein, 581 aa, Synthetic construct
GIEASLLTDPKEVAGRTVDYIIAGGGLTGLVVAARLTENPDITVLVIESGSYESDRGPIIEDLNAYGKIFGSSVDHAYETVCLATNNRTALIRAGNGLGGSTLVNGGTWTRPHKAQVDSWETVFGNEGWNWDSVAAYSLQAERARAPNAKQIAAGHYFNASCHGINGTVHAGPRDTGDDYSPIVKALMSAVEDRGVPTKKDLCCGDPHGVSMFPNTLHEDQVRSDAAREWLLPNYQRPNLSVLTGQYVGKVLLSQNATTPRAVGVEFGTHKGNFHNVTAKHEVLLAAGSAVSPTILEYSGIGMKSILEPLGIKTVVDLPVGLNLQDQTTSTVRSRITSAGAGQGQAAWFATFNETFGDYTPKAHELLNTKLEQWAEEAVARGGFHNTTALLIQYENYRDWIVKDNVAYSELFLDTAGEASFDVWDLLPFTRGYVHILDKDPYLRHFAYDPQYFLNELDLLGQAAATQLARNISNSGAMQTYFAGETIPGDNLAYDADLRAWVEYIPYHFRPNYHGVGTCSMMPKEMGGVVDNAARVYGVQGLRVIDGSIPPTQMSSHVMTVFYAMALKIADAVLADYASMQ

SEQ ID NO: 846 - protein, 581 aa, Synthetic construct
GIEASLLTDPKEVAGRTVDYIIAGGGLTGLVVAARLTENPDITVLVIESGSYESDRGPIIEDLNAYGKIFGSSVDHAYETVCLATNNRTALIRAGNGLGGSTLVNGGTWTRPHKAQVDSWETVFGNEGWNWDSVAAYSLQAERARAPNAKQIAAGHYFNASCHGINGTVHAGPRDTGDDYSPIVKALMSAVEDRGVPTKKDLGCGDPHGVSMFPNTLHEDQVRSDAAREWLLPNYQRPNLQVLTGQYVGKVLLSQNATTPRAVGVEFGTHKGNFHNVTAKHEVLLAAGSAVSPTILEYSGIGMKSILEPLGIKTVVDLPVGLNLQDQTTSTVRSRITPAGAGQGQAAWFATFNETFGDYTPKAHELLNTKLEQWAEEAVARGGFHNTTALLIQYENYRDWIVKDNVAYSELFLDTAGEISFDVWDLLPFTRGYVHILDKDPYLRHFAYDPQYFLNELDLLGQAAATQLARNISNSGAMQTYFAGETIPGDNLAYDADLRAWVEYIPYHFRPNYHGVGTCSMMPKEMGGVVDNAARVYGVQGLRVIDGSIPPTQMSSHVMTVFYAMALKIADAVLADYASMQ

SEQ ID NO: 847 - protein, 581 aa, Aspergillus niger
GIEDSLLTDPKEVAGRTVDYIIAGGGLTGLVVAARLTENPDITVLVIESGSYESDRGPIIEDLNAYGKIFGSSVDHAYETVCLATNNRTALIRAGNGLGGSTLVNGGTWTRPHKAQVDSWETVFGNEGWNWDSVAAYSLQAERARAPNAKQIAAGHYFNASCHGINGTVHAGPRDTGDDYSPIVKALMSAVEDRGVPTKKDLGCGDPHGVSMFPNTLHEDQVRSDAAREWLLPNYQRPNLSVLTGQYVGKVLLSQNATTPRAVGVEFGTHKGNFHNVTAKHEVLLAAGSAVSPTILEYSGIGMKSILEPLGIKTVVDLPVGLNLQDQTTSTVRSRITSAGAGQGQAAWFATFNETFGDYTEKAHELLNTKLEQWAEEAVARGGFHNTTALLIQYENYRDWIVKDNVAYSELFLDTAGEASFDVWDLLPFTRGYVHILDKDPYLRHFAYDPQYFLNELDLLGQAAATQLAREISNSGAMQTYFAGETIPGDNLAYDADLRAWVEYIPYHFRPNYHGVGTCSMMPKEMGGVVDNAARVYGVQGLRVIDGSIPPTQMSSHVMTVFYAMALKIADAVLADYASMQ

SEQ ID NO: 848 - protein, 581 aa, Aspergillus niger
GIEDSLLTDPKEVAGRTVDYIIAGGGLTGLVVAARLTENPDITVLVIESGSYESDRGPIIEDLNAYGKIFGSSVDHAYETVCLATNNRTALIRAGNGLGGSTLVNGGTWTRPHKAQVDSWETVFGNEGWNWDSVAAYSLQAERARAPNAKQIAAGHYFNASCHGINGTVHAGPRDTGDDYSPIVKALMSAVEDRGVPTKKDLGCGDPHGVSMFPNTLHEDQVRSDAAREWLLPNYQRPNLSVLTGQYVGKVLLSQNATTPRAVGVEFGTHKGNFHNVTAKHEVLLAAGSAVSPTILEYSGIGMKSILEPLGIKTVVDLPVGLNLQDQTTSTVRSRITSAGAGQGQAAWFATFNETFGDYTEKAHELLNTKLEQWAEEAVARGGFHNTTALLIQYENYRDWIVKDNVAYSELFLDTAGEASFDVWDLLPFTRGYVHILDKDPYLRHFAYDPQYFLNELDLLGQAAATQLARNISNSGAMQTYFAGETIPGDNLAYDADLRAWVEYIPYHFRPNYHGVGTCSMMPKEMGGVVDNAARVYGVQGLRVIDGSIPPTQMSSHVMTVFYAMALKIADAVLADYASME

SEQ ID NO: 849 - protein, 581 aa, Synthetic construct
GIEASLLTDPKEVAGRTVDYIIAGGGLTGLVVAARLTENPDITVLVIESGSYESDRGPIIEDLNAYGKIFGSSVDHAYETVCLATNNRTALIRAGNGLGGSTLVNGGTWTRPHKAQVDSWETVFGNEGWNWDSVAAYSLQAERARAPNAKQIAAGHYFNASCHGINGTVHAGPRDTGDDYSPIVKALMSAVEDRGVPTKKDLCCGDPHGVSMFPNTLHEDQVRSDAAREWLLPNYQRPNLQVLTGQYVGKVLLSQNATTPRAVGVEFGTHKGNFHNVTAKHEVLLAAGSAVSPTILEYSGIGMKSILEPLGIKTVVDLPVGLNLQDQTTSTVRSRITSAGAGQGQAAWFATFNETFGDYTPKAHELLNTKLEQWAEEAVARGGFHNTTALLIQYENYRDWIVKDNVAYSELFLDTAGEISFDVWDLLPFTRGYVHILDKDPYLRHFAYDPQYFLNELDLLGQAAATQLARNISNSGAMQTYFAGETIPGDNLAYDADLRAWVEYIPYHFRPNYHGVGTCSMMPKEMGGVVDNAARVYGVQGLRVIDGSIPPTQMSSHVMTVFYAMALKIADAVLADYASMQ

SEQ ID NO: 850 - protein, 581 aa, Aspergillus niger
GIEASLLTDPKEVAGRTVDYIIAGGGLTGLVVAARLTENPDITVLVIESGSYESDRGPIIEDLNAYGKIFGSSVDHAYETVCLATNNRTALIRAGNGLGGSTLVNGGTWTRPSKAQVDSWETVFGNEGWNWDSVAAYSLQAERARAPNAKQIAAGHYFNASCHGINGTVHAGPRDTGDDYSPIVKALMSAVEDRGVPTKKDLGCGDPHGVSMFPNTLHEDQVRSDAAREWLLPNYQRPNLSVLTGQYVGKVLLSQNATTPRAVGVEFGTHKGNFHNVTAKHEVLLAAGSAVSPTILEYSGIGMKSILEPLGIKTVVDLPVGLNLQDQTTSTVRSRITSAGAGQGQAAWFATFNETFGDYTEKAHELLNTKLEQWAEEAVARGGFHNTTALLIQYENYRDWIVKDNVAYSELFLDTAGEASFDVWDLLPFTRGYVHILDKDPYLRHFAYDPQYFLNELDLLGQAAATQLARNISNSGAMQTYFAGETIPGDNLAYDANLRAWVEYIPYHFRPNYHGVGTCSMMPKEMGGVVDNAARVYGVQGLRVIDGSIPPTQMSSHVMTVFYAMALKIADAVLADYASMQ

SEQ ID NO: 851 - protein, 581 aa, Aspergillus niger
GIEASLLTDPKEVAGRTVDYIIAGGGLTGLVVAARLTENPDITVLVIESGSYESDRGPIIEDLNAYGKIFGSSVDHAYETVCLATNNRTALIRAGNGLGGSTLVNGGTWTRPHKAQVDSWETVFGNEGWNWDSVAAYSLQAERARAPNAKQIAAGHYFNASCHGINGTVHAGPRDTGDDYSPIVKALMSAVEDRGVPTKKDLGCGDPHGVSMFPNTLHEDQVRSDAAREWLLPNYQRPNLSVLTGQYVGKVLLSQNATTPRAVGVEFGTHKGNFHNVTAKHEVLLAAGSAVSPTILEYSGIGMKSILEPLGIKTVVDLPVGLNLQDQTTSTVRSRITSAGAGQGQAAWFATFNETFGDYTEKAHELLNTKLEQWAEEAVARGGFHNTTALLIQYENYRDWIVKDNVAYSELFLDTAGEASFDVWDLLPFTRGYVHILDKDPYLRHFAYDPQYFLNELDLLGQAAATQLARNISNSGAMQTYFAGETIPGDNLAYDANLRAWVEYIPYHFRPNYHGVGTCSMMPKEMGGVVDNAANVYGVQGLRVIDGSIPPTQMSSHVMTVFYAMALKIADAVLADYASMQ

SEQ ID NO: 852 - protein, 581 aa, Synthetic construct
GIEASLLTDPKEVAGRTVDYIIAGGGLTGLVVAARLTENPDITVLVIESGSYESDRGPIIEDLNAYGKIFGSSVDHAYETVCLATNNRTALIRAGNGLGGSTLVNGGTWTRPHKAQVDSWETVFGNEGWNWDSVAAYSLQAERARAPNAKQIAAGHYFNASCHGINGTVHAGPRDTGDDYSPIVKALMSAVEDRGVPTKKDLGCGDPHGVSMFPNTLHEDQVRSDAAREWLLPNYQRPNLSVLTGQYVGKVLLSQNATTPRAVGVEFGTHKGNFHNVTAKHEVLLAAGSAVSPTILEYSGIGMKSILEPLGIKTVVDLPVGLNLQDQTTSTVRSRITPAGAGQGQAAWFATFNETFGDYTPKAHELLNTKLEQWAEEAVARGGFHNTTALLIQYENYRDWIVKDNVAYSELFLDTAGEASFDVWDLLPFTRGYVHILDKDPYLRHFAYDPQYFLNELDLLGQAAATQLARNISNSGAMQTYFAGETIPGDNLAYDADLRAWVEYIPYHFRPNYHGVGTCSMMPKEMGGVVDNAARVYGVQGLRVIDGSIPPTQMSSHVMTVFYAMALKIADAVLADYASMQ

SEQ ID NO: 853 - protein, 581 aa, Aspergillus niger
GIEASLLTDPKEVAGRTVDYIIAGGGLTGLVVAARLTENPDITVLVIESGSYESDRGPIIEDLNAYGKIFGSSVDHAYETVCLATNNRTALIRAGNGLGGSTLVNGGTWTRPHKAQVDSWETVFGNEGWNWDSVAAYSLQAERARAPNAKQIAAGHYFNASCHGINGTVHAGPRDTGDDYSPIVKALMSAVENRGVPTKKDLGCGDPHGVSMFPNTLHEDQVRSDAAREWLLPNYQRPNLSVLTGQYVGKVLLSQNATTPRAVGVEFGTHKGNFHNVTAKHEVLLAAGSAVSPTILEYSGIGMKSILEPLGIKTVVDLPVGLNLQDQTTSTVRSRITSAGAGQGQAAWFATFNETFGDYTEKAHELLNTKLEQWAEEAVARGGFHNTTALLIQYENYRDWIVKDNVAYSELFLDTAGEASFDVWDLLPFTRGYVHILDKDPYLRHFAYDPQYFLNELDLLGQAAATQLARNISNSGAMQTYFAGETIPGDNLAYDANLRAWVEYIPYHFRPNYHGVGTCSMMPKEMGGVVDNAARVYGVQGLRVIDGSIPPTQMSSHVMTVFYAMALKIADAVLADYASMQ

SEQ ID NO: 854 - protein, 581 aa, Synthetic construct
GIEASLLTDPKEVAGRTVDYIIAGGGLTGLVVAARLTENPDITVLVIESGSYESDRGPIIEDLNAYGKIFGSSVDHAYETVCLATNNRTALIRAGNGLGGSTLVNGGTWTRPHKAQVDSWETVFGNEGWNWDSVAAYSLQAERARAPNAKQIAAGHYFNASCHGINGTVHAGPRDTGDDYSPIVKALMSAVEDRGVPTKKDLGCGDPHGVSMFPNTLHEDQVRSDAAREWLLPNYQRPNLSVLTGQYVGKVLLSQNATTPRAVGVEFGTHKGNFHNVTAKHEVLLAAGSAVSPTILEYSGIGMKSILEPLGIKTVVDLPVGLNLQDQTTSTVRSRITSAGAGQGQAAWFATFNETFGDYTPKAHELLNTKLEQWAEEAVARGGFHNTTALLIQYENYRDWIVKDNVAYSELFLDTAGEISFDVWDLLPFTRGYVHILDKDPYLRHFAYDPQYFLNELDLLGQAAATQLARNISNSGAMQTYFAGETIPGDNLAYDADLRAWVEYIPYHFRPNYHGVGTCSMMPKEMGGVVDNAARVYGVQGLRVIDGSIPPTQMSSHVMTVFYAMALKIADAVLADYASMQ

SEQ ID NO: 855 - protein, 581 aa, Synthetic construct
GIEASLLTDPKEVAGRTVDYIIAGGGLTGLVVAARLTENPDITVLVIESGSYESDRGPIIEDLNAYGKIFGSSVDHAYETVCLATNNRTALIRAGNGLGGSTLVNGGTWTRPHKAQVDSWETVFGNEGWNWDSVAAYSLQAERARAPNAKQIAAGHYFNASCHGINGTVHAGPRDTGDDYSPIVKALMSAVEDRGVPTKKDLGCGDPHGVSMFPNTLHPDQVRSDAAREWLLPNYQRPNLSVLTGQYVGKVLLSQNATTPRAVGVEFGTHKGNFHNVTAKHEVLLAAGSAVSPTILEYSGIGMKSILEPLGIKTVVDLPVGLNLQDQTTSTVRSRITSAGAGQGQAAWFATFNETFGDYTPKAHELLNTKLEQWAEEAVARGGFHNTTALLIQYENYRDWIVKDNVAYSELFLDTAGEASFDVWDLLPFTRGYVHILDKDPYLRHFAYDPQYFLNELDLLGQAAATQLARNISNSGAMQTYFAGETIPGDNLAYDADLRAWVEYIPYHFRPNYHGVGTCSMMPKEMGGVVDNAARVYGVQGLRVIDGSIPPTQMSSHVMTVFYAMALKIADAVLADYASMQ

SEQ ID NO: 856 - protein, 581 aa, Synthetic construct
GIEASLLTDPKEVAGRTVDYIIAGGGLTGLVVAARLTENPDITVLVIESGSYESDRGPIIEDLNAYGKIFGSSVDHAYETVCLATNNRTALIRAGNGLGGSTLVNGGTWTRPHKAQVDSWETVFGNEGWNWDSVAAYSLQAERARAPNAKQIAAGHYFNASCHGINGTVHAGPRDTGDDYSPIVKALMSAVENRGVPTKKDLGCGDPHGVSMFPNTLHEDQVRSDAAREWLLPNYQRPNLQVLTGQYVGKVLLSQNATTPRAVGVEFGTHKGNFHNVTAKHEVLLAAGSAVSPTILEYSGIGMKSILEPLGIKTVVDLPVGLNLQDQTTSTVRSRITSAGAGQGQAAWFATFNETFGDYTPKAHELLNTKLEQWAEEAVARGGFHNTTALLIQYENYRDWIVKDNVAYSELFLDTAGEISFDVWDLLPFTRGYVHILDKDPYLRHFAYDPQYFLNELDLLGQAAATQLARNISNSGAMQTYFAGETIPGDNLAYDANLRAWVEYIPYHFRPNYHGVGTCSMMPKEMGGVVDNAARVYGVQGLRVIDGSIPPTQMSSHVMTVFYAMALKIADAVLADYASMQ

SEQ ID NO: 857 - protein, 581 aa, Synthetic construct
GIEASLLTDPKEVAGRTVDYIIAGGGLTGLVVAARLTENPDITVLVIESGSYESDRGPIIEDLNAYGKIFGSSVDHAYETVCLATNNRTALIRAGNGLGGSTLVNGGTWTRPHKAQVDSWETVFGNEGWNWDSVAAYSLQAERARAPNAKQIAAGHYFNASCHGINGTVHAGPRDTGDDYSPIVKALMSAVEDRGVPTKKDLGCGDPHGVSMFPNTLHEDQVRSDAAREWLLPNYQRPNLSVLTGQYVGKVLLSQNATTPRAVGVEFGTHKGNFHNVTAKHEVLLAAGSAVSPTILEYSGIGMKSILEPLGIKTVVDLPVGLNLQDQTTSTVRSRITPAGAGQGQAAWFATFNETFGDYTPKAHELLNTKLEQWAEEAVARGGFHNTTALLIQYENYRDWIVKDNVAYSELFLDTAGEISFDVWDLLPFTRGYVHILDKDPYLRHFAYDPQYFLNELDLLGQAAATQLARNISNSGAMQTYFAGETIPGDNLAYDADLRAWVEYIPYHFRPNYHGVGTCSMMPKEMGGVVDNAARVYGVQGLRVIDGSIPPTQMSSHVMTVFYAMALKIADAVLADYASMQ

SEQ ID NO: 858 - protein, 581 aa, Synthetic construct
GIEDSLLTDPKEVAGRTVDYIIAGGGLTGLVVAARLTENPDITVLVIESGSYESDRGPIIEDLNAYGKIFGSSVDHAYETVCLATNNRTALIRAGNGLGGSTLVNGGTWTRPHKAQVDSWETVFGNEGWNWDSVAAYSLQAERARAPNAKQIAAGHYFNASCHGINGTVHAGPRDTGDDYSPIVKALMSAVEDRGVPTKKDLGCGDPHGVSMFPNTLHEDQVRSDAAREWLLPNYQRPNLQVLTGQYVGKVLLSQNATTPRAVGVEFGTHKGNFHNVTAKHEVLLAAGSAVSPTILEYSGIGMKSILEPLGIKTVVDLPVGLNLQDQTTSTVRSRITSAGAGQGQAAWFATFNETFGDYTPKAHELLNTKLEQWAEEAVARGGFHNTTALLIQYENYRDWIVKDNVAYSELFLDTAGEISFDVWDLLPFTRGYVHILDKDPYLRHFAYDPQYFLNELDLLGQAAATQLAREISNSGAMQTYFAGETIPGDNLAYDADLRAWVEYIPYHFRPNYHGVGTCSMMPKEMGGVVDNAARVYGVQGLRVIDGSIPPTQMSSHVMTVFYAMALKIADAVLADYASMQ

SEQ ID NO: 859 - protein, 581 aa, Synthetic construct
GIEASLLTDPKEVAGRTVDYIIAGGGLTGLVVAARLTENPDITVLVIESGSYESDRGPIIEDLNAYGKIFGSSVDHAYETVCLATNNRTALIRAGNGLGGSTLVNGGTWTRPHKAQVDSWETVFGNEGWNWDSVAAYSLQAERARAPNAKQIAAGHYFNASCHGINGTVHAGPRDTGDDYSPIVKALMSAVEDRGVPTKKDLCCGDPHGVSMFPNTLHEDQVRSDAAREWLLPNYQRPNLSVLTGQYVGKVLLSQNATTPRAVGVEFGTHKGNFHNVTAKHEVLLAAGSAVSPTILEYSGIGMKSILEPLGIKTVVDLPVGLNLQDQTTSTVRSRITSAGAGQGQAAWFATFNETFGDYTPKAHELLNTKLEQWAEEAVARGGFHNTTALLIQYENYRDWIVKDNVAYSELFLDTAGEISFDVWDLLPFTRGYVHILDKDPYLRHFAYDPQYFLNELDLLGQAAATQLARNISNSGAMQTYFAGETIPGDNLAYDADLRAWVEYIPYHFRPNYHGVGTCSMMPKEMGGVVDNAARVYGVQGLRVIDGSIPPTQMSSHVMTVFYAMALKIADAVLADYASMQ

SEQ ID NO: 860 - protein, 581 aa, Synthetic construct
GIEASLLTDPKEVAGRTVDYIIAGGGLTGLVVAARLTENPDITVLVIESGSYESDRGPIIEDLNAYGKIFGSSVDHAYETVCLATNNRTALIRAGNGLGGSTLVNGGTWTRPHKAQVDSWETVFGNEGWNWDSVAAYSLQAERARAPNAKQIAAGHYFNASCHGINGTVHAGPRDTGDDYSPIVKALMSAVENRGVPTKKDLGCGDPHGVSMFPNTLHEDQVRSDAAREWLLPNYQRPNLSVLTGQYVGKVLLSQNATTPRAVGVEFGTHKGNFHNVTAKHEVLLAAGSAVSPTILEYSGIGMKSILEPLGIKTVVDLPVGLNLQDQTTSTVRSRITSAGAGQGQAAWFATFNETFGDYTPKAHELLNTKLEQWAEEAVARGGFHNTTALLIQYENYRDWIVKDNVAYSELFLDTAGEISFDVWDLLPFTRGYVHILDKDPYLRHFAYDPQYFLNELDLLGQAAATQLARNISNSGAMQTYFAGETIPGDNLAYDANLRAWVEYIPYHFRPNYHGVGTCSMMPKEMGGVVDNAARVYGVQGLRVIDGSIPPTQMSSHVMTVFYAMALKIADAVLADYASMQ

SEQ ID NO: 861 - protein, 581 aa, Synthetic construct
GIEDSLLTDPKEVAGRTVDYIIAGGGLTGLVVAARLTENPDITVLVIESGSYESDRGPIIEDLNAYGKIFGSSVDHAYETVCLATNNRTALIRAGNGLGGSTLVNGGTWTRPHKAQVDSWETVFGNEGWNWDSVAAYSLQAERARAPNAKQIAAGHYFNASCHGINGTVHAGPRDTGDDYSPIVKALMSAVEDRGVPTKKDLGCGDPHGVSMFPNTLHEDQVRSDAAREWLLPNYQRPNLSVLTGQYVGKVLLSQNATTPRAVGVEFGTHKGNFHNVTAKHEVLLAAGSAVSPTILEYSGIGMKSILEPLGIKTVVDLPVGLNLQDQTTSTVRSRITSAGAGQGQAAWFATFNETFGDYTPKAHELLNTKLEQWAEEAVARGGFHNTTALLIQYENYRDWIVKDNVAYSELFLDTAGEISFDVWDLLPFTRGYVHILDKDPYLRHFAYDPQYFLNELDLLGQAAATQLAREISNSGAMQTYFAGETIPGDNLAYDADLRAWVEYIPYHFRPNYHGVGTCSMMPKEMGGVVDNAARVYGVQGLRVIDGSIPPTQMSSHVMTVFYAMALKIADAVLADYASMQ

SEQ ID NO: 862 - protein, 587 aa, Aspergillus niger
HHHHHHGIEASLLTDPKEVAGRTVDYIIAGGGLTGLVVAARLTENPDITVLVIESGSYESDRGPIIEDLNAYGKIFGSSVDHAYETVCLATNNRTALIRAGNGLGGSTLVNGGTWTRPHKAQVDSWETVFGNEGWNWDSVAAYSLQAERARAPNAKQIAAGHYFNASCHGINGTVHAGPRDTGDDYSPIVKALMSAVEDRGVPTKKDLGCGDPHGVSMFPNTLHEDQVRSDAAREWLLPNYQRPNLQVLTGQYVGKVLLSQNATTPRAVGVEFGTHKGNFHNVTAKHEVLLAAGSAVSPTILEYSGIGMKSILEPLGIKTVVDLPVGLNLQDQTTSTVRSRITSAGAGQGQAAWFATFNETFGDYTEKAHELLNTKLEQWAEEAVARGGFHNTTALLIQYENYRDWIFKDNVAYSELFLDTAGEASFDVWDLLPFTRGYVHILDKDPYLRHFAYDPQYFLNELDLLGQAAATQLARNISNSGAMQTYFAGETIPGDNLAYDADLRAWVEYIPYHFRPNYHGVGTCSMMPKEMGGVVDNAARVYGVQGLRVIDGSIPPTQMSSHVMTVFYAMALKIADAVLADYASMQ

SEQ ID NO: 863 - protein, 581 aa, Synthetic construct
GIEDSLLTDPKEVAGRTVDYIIAGGGLTGLVVAARLTENPDITVLVIESGSYESDRGPIIEDLNAYGKIFGSSVDHAYETVCLATNNRTALIRAGNGLGGSTLVNGGTWTRPHKAQVDSWETVFGNEGWNWDSVAAYSLQAERARAPNAKQIAAGHYFNASCHGINGTVHAGPRDTGDDYSPIVKALMSAVENRGVPTKKDLGCGDPHGVSMFPNTLHEDQVRSDAAREWLLPNYQRPNLQVLTGQYVGKVLLSQNATTPRAVGVEFGTHKGNFHNVTAKHEVLLAAGSAVSPTILEYSGIGMKSILEPLGIKTVVDLPVGLNLQDQTTSTVRSRITSAGAGQGQAAWFATFNETFGDYTPKAHELLNTKLEQWAEEAVARGGFHNTTALLIQYENYRDWIVKDNVAYSELFLDTAGEISFDVWDLLPFTRGYVHILDKDPYLRHFAYDPQYFLNELDLLGQAAATQLARNISNSGAMQTYFAGETIPGDELAYDANLRAWVEYIPYHFRPNYHGVGTCSMMPKEMGGVVDNAARVYGVQGLRVIDGSIPPTQMSSHVMTVFYAMALKIADAVLADYASMQ

SEQ ID NO: 864 - protein, 581 aa, Synthetic construct
GIEDSLLTDPKEVAGRTVDYIIAGGGLTGLVVAARLTENPDITVLVIESGSYESDRGPIIEDLNAYGKIFGSSVDHAYETVCLATNNRTALIRAGNGLGGSTLVNGGTWTRPHKAQVDSWETVFGNEGWNWDSVAAYSLQAERARAPNAKQIAAGHYFNASCHGINGTVHAGPRDTGDDYSPIVKALMSAVENRGVPTKKDLGCGDPHGVSMFPNTLHEDQVRSDAAREWLLPNYQRPNLSVLTGQYVGKVLLSQNATTPRAVGVEFGTHKGNFHNVTAKHEVLLAAGSAVSPTILEYSGIGMKSILEPLGIKTVVDLPVGLNLQDQTTSTVRSRITSAGAGQGQAAWFATFNETFGDYTPKAHELLNTKLEQWAEEAVARGGFHNTTALLIQYENYRDWIVKDNVAYSELFLDTAGEISFDVWDLLPFTRGYVHILDKDPYLRHFAYDPQYFLNELDLLGQAAATQLAREISNSGAMQTYFAGETIPGDNLAYDANLRAWVEYIPYHFRPNYHGVGTCSMMPKEMGGVVDNAARVYGVQGLRVIDGSIPPTQMSSHVMTVFYAMALKIADAVLADYASMQ

SEQ ID NO: 865 - protein, 583 aa, Aspergillus niger
SNGIEASLLKDPKLVAGRTYDYIIAGGGLAGLTVAEKLTENPDITVLVIESGSYESDRGPIIEDLNAYGEIFGTSVDHAYETVELATQNRTALIRSGNGLGGSTLINGGTWTRPHKAQVDSWETVFGNEGWNWDSVAAYSLQAERARAPNAKQIAAGHYFNASCHGLNGTVHVGPRDTGDDYSPLMRALMSAVEDRGVPTKKDLGCGDPHGVSMFPNTLHEDQVRADAAREWLLPNYQRPNLQVLTGQYVGKVLLSQNATTPRAVGVEFGTHKSNTHNVYAKHEVLLSAGSTVSPTILEYSGIGMKSILEPLGIDTVVDLPVGLNLQDQTTSTVRSRITSAGAGQGQAAWFATFNETFGDYTEKAHELLNTKLEQWAEEAVARGGFHNTTALLIQYENYRDWIVKDNVAYSELFLDTGGVASFDVWDLLPFTRGYVHILDKDPYLRHFAYDPQYFLNELDLLGQAAATQLARNISNSGAMQTYFAGETIPGDNLAYDADLSAWVEYIPEHFRPNYHGVGTCSMMPKEMGGVVDNAARVYGVQGLRVIDGSIPPTQLSSHVMTVFYAMALKIADAVLADYASMQ

SEQ ID NO: 866 - protein, 583 aa, Aspergillus niger
SNGIEASLLKDFKLVNGRTYDYIIAGGGLAGLTVAEKLTENPNITVLVIESGSYESDRGPIIEDLNAYGEIFGTSVDHAYETVELATDNRTALIRSGNGLGGSTLINGGTWTRPHKAQVDSWETVFGNEGWNWDSVAAYSLQAERARAPNAKQIAAGHYFNASCHGLNGTVHVGPRDTGDDYSPLMRALMSAVEDRGVPTKKDLGCGDPHGVSMFPNTLHEDQVRADAAREWLLPNYQRPNLQVLTGQYVGKVLLSQNATTPRAVGVEFGTHKSNTHNVYAKHEVLLSAGSTVSPTILEYSGIGMKSILEPLGIDTVVDLPVGLNLQDQTTSTVRSRITSAGAGQGQAAWFATFNETFGDYTEKAHELLNTKLEQWAEEAVARGGFHNTTALLIQYENYRDWIVKDNVAYSELFLDTGGVASFDVWDLLPFTRGYVHILDKDPYLRHFAYDPQYFLNELDLLGQAAATQLARNISNSGAMQTYFAGETIPGDNLAYDADLSAWVEYIPEHFRPNYHGVGTCSMMPKEMGGVVDNAARVYGVQGLRVIDGSIPPTQLSSHVMTVFYAMALKIADAVLADYASMQ

SEQ ID NO: 867 - protein, 583 aa, Aspergillus niger
SNGIEASLLKDPKGVAGRTYDYIIAGGGLAGLTVAEKLTENPNITVLVIESGSYESDRGPIIEDLNAYGEIFGTSVDHAYETVELATQNRTALIRSGNGLGGSTLINGGTWTRPHKAQVDSWETVFGNEGWNWDSVAAYSLQAERARAPNAKQIAAGHYFNASCHGLNGTVHVGPRDTGDDYSPLMRALMSAVEDRGVPTKKDLGCGDPHGVSMFPNTLHEDQVRADAAREWLLPNYQRPNLQVLTGQYVGKVLLSQNATTPRAVGVEFGTHKSNTHNVYAKHEVLLSAGSTVSPTILEYSGIGMKSILEPLGIDTVVDLPVGLNLQDQTTSTVRSRITSAGNGQGQAAWFATFNETFGDYTEKAHELLNTKLEQWAEEAVARGGFHNTTALLIQYENYRDWIVKDNVAYSELFLDTGGVASFDVWDLLPFTRGYVHILDKDPYLRHFAYDPQYFLNELDLLGQAAATQLARNISNSGAMQTYFAGETIPGDNLAYDADLSAWVEYIPEHFRPNYHGVGTCSMMPKEMGGVVDNAARVYGVQGLRVIDGSIPPTQLSSHVMTVFYAMALKIADAVLADYASMQ

SEQ ID NO: 868 - protein, 583 aa, Aspergillus niger
SNGIEASLLKDPKAVAGRTYDYIIAGGGLAGLTVAEKLTENPNITVLVIESGSYESDRGPIIEDLNAYGEIFGTSVDHAYETVELAVDNRTALIRSGNGLGGSTLINGGTWTRPHKAQVDSWETVFGNEGWNWDSVAAYSLQAERARAPNAKQIAAGHYFNASCHGLNGTVHVGPRDTGDDYSPLMRALMSAVEDRGVPTKKDLGCGDPHGVSMFPNTLHEDQVRADAAREWLLPNYQRPNLQVLTGQYVGKVLLSQNATTPRAVGVEFGTHKSNTHNVYAKHEVLLSAGSTVSPTILEYSGIGMKSILEPLGIDTVVDLPVGLNLQDQTTSTVRSRITSAGAGQGQAAWFATFNETFGDYTEKAHELLNTKLEQWAEEAVARGGFHNTTALLIQYENYRDWIVKDNVAYSELFLDTGGVASFDVWDLLPFTRGYVHILDKDPYLRHFAYDPQYFLNELDLLGQAAATQLARNISNSGAMQTYFAGETIPGDNLAYDADLSAWVEYIPEHFRPNYHGVGTCSMMPKEMGGVVDNAARVYGVQGLRVIDGSIPPTQLSSHVMTVFYAMALKIADAVLADYASMQ

SEQ ID NO: 869 - protein, 583 aa, Aspergillus niger
SNGIEASLLKDPKLVNGRTYDYIIAGGGLAGLTVAEKLTENPDITVLVIESGSYESDRGPIIEDLNAYGEIFGTSVDHAYETVELAADNRTALIRSGNGLGGSTLINGGTWTRPHKAQVDSWETVFGNEGWNWDSVAAYSLQAERARAPNAKQIAAGHYFNASCHGLNGTVHVGPRDTGDDYSPLMRALMSAVEDRGVPTKKDLGCGDPHGVSMFPNTLHEDQVRADAAREWLLPNYQRPNLQVLTGQYVGKVLLSQNATTPRAVGVEFGTHKSNTHNVYAKHEVLLSAGSTVSPTILEYSGIGMKSILEPLGIDTVVDLPVGLNLQDQTTSTVRSRITSAGAGQGQAAWFATFNETFGDYTEKAHELLNTKLEQWAEEAVARGGFHNTTALLIQYENYRDWIVKDNVAYSELFLDTGGVASFDVWDLLPFTRGYVHILDKDPYLRHFAYDPQYFLNELDLLGQAAATQLARNISNSGAMQTYFAGETIPGDNLAYDADLSAWVEYIPEHFRPNYHGVGTCSMMPKEMGGVVDNAARVYGVQGLRVIDGSIPPTQLSSHVMTVFYAMALKIADAVLADYASMQ

SEQ ID NO: 870 - protein, 583 aa, Aspergillus niger
SNGIEASLLKDPKLVAGRTYDYIIAGGGLAGLTVAEKLTENPNITVLVIEWGSYESDRGPIIEDLNAYGEIFGTSVDHAYETVELATNNRTALIRSGNGLGGSTLINGGTWTRPHKAQVDSWETVFGNEGWNWDSVAAYSLQAERARAPNAKQIAAGHYFNAACHGLNGTVHVGPRDTGDDYSPLMRALMSAVEDRGVPTKKDLGCGDPHGVSMFPNTLHEDQVRADAAREWLLPNYQRPNLQVLTGQYVGKVLLSQNATTPRAVGVEFGTHKSNTHNVYAKHEVLLSAGSTVSPTILEYSGIGMKSILEPLGIDTVVDLPVGLNLQDQTTSTVRSRITSAGNGQGQAAWFATFNETFGDYTEKAHELLNTKLEQWAEEAVARGGFHNTTALLIQYENYRDWIVKDNVAYSELFLDTGGVASFDVWDLLPFTRGYVHILDKDPYLRHFAYDPQYFLNELDLLGQAAATQLARNISNSGAMQTYFAGETIPGDNLAYMADLSAWVEYIPEHFRPNYHGVGTCSMMPKEMGGVVDNAARVYGVQGLRVIDGSIPPTQLSSHVMTVFYAMALKIADAVLADYASMQ

SEQ ID NO: 871 - protein, 583 aa, Aspergillus niger
SNGIEASLLKNPKLVAGRTYDYIIAGGGLAGLTVAEKLTENPNITVLVIEGGSYESDRGPIIEDLNAYGEIFGTSVDHAYETVELATNNRTALIRSGNGLGGSTLINGGTWTRPHKAQVDSWETVFGNEGWNWDSVAAYSLQAERARAPNAKQIAAGHYFNASCHGLNGTVHVGPRDTGDDYSPLMRALMSAVEDRGVPTKKDLGCGDPHGVSMFPNTLHEDQVRADAAREWLLPNYQRPNLQVLTGQYVGKVLLSQNATTPRAVGVEFGTHKSNTHNVYAKHEVLLSAGSTVSPTILEYSGIGMKSILEPLGIDTVVDLPVGLNLQDQTTSTVRSRITSAGAGQGQAAWFATFNETFGHYTEKAHELLNTKLEQWAEEAVARGGFHNTTALLIQYENYRDWIVKDNVAYSELFLDTGGVASFDVWDLLPFTRGYVHILDKDPYLRHFAYDPQYFLNELDLLGQAAATQLARNISNSGAMQTYFAGETIPGDNLAYEADLSAWVEYIPEHFRPNYHGVGTCSMMPKEMGGVVDNAARVYGVQGLRVIDGSIPPTQLSSHVMTVFYAMALKIADAVLADYASMQ

SEQ ID NO: 872 - protein, 583 aa, Aspergillus niger
SNGIEASLLKDPKLQAGRTYDYIIAGGGLAGLTVAEKLTENPNITVLVIESGSYESDRGPIIEDLNAYGEIFGTSVDHAYETVELATNNRTALIRSGNGLGGSTLINGGTWTRPHKAQVDSWETVFGNEGWNWDSVAAYSLQAERARAPNAKQIAAGHYFNASCHGLNGTVHVGPRDTGDDYSPLMRALMSAVEDRGVPTKKDLGCGDPHGVSMFPNTLHEDQVRADAAREWLLPNYQRPHLQVLTGQYVGKVLLSQNATTPRAVGVEFGTHKSNTHNVYAKHEVLLSAGSTVSPTILEYSGIGMKSILEPLGIDTVVDLPVGLNLQDQTTSTVRSRITSAGAGQGQAAWFATFNETFGKYTEKAHELLNTKLEQWAEEAVARGGFHNTTALLIQYENYRDWIVKDNVAYSELFLDTGGVASFDVWDLLPFTRGYVHILDKDPYLRHFAYDPQYFLNELDLLGQAAATQLARNISNSGAMQTYFAGETIPGENLAYDADLSAWVEYIPEHFRPNYHGVGTCSMMPKEMGGVVDNAARVYGVQGLRVIDGSIPPTQLSSHVMTVFYAMALKIADAVLADYASMQ

SEQ ID NO: 873 - protein, 583 aa, Aspergillus niger
SNGIEASLLKDPKLVAGRTYDYIIAGGGLAGLTVAEKLTENPNITVLVIESGSYESDRGPIIEDLNAYGEIFGTSVDHAYETVELATNNRTALIRSGNGLGGSTLINGGTWTRPHKAQVDSWETVFGNEGWNWDSVAAYSLQAERARAPNAKQIAAGHYFNAACHGLNGTVHVGPRDTGDDYSPLMRALMSAVEDRGVPTKKDLGCGDPHGVSMFPNTLHEDQVRADAAREWLLPNYQRPNLRVLTGQYVGKVLLSQNATTPRAVGVEFGTHKSNTHNVYAKHEVLLSAGSTVSPTILEYSGIGMKSILEPLGIDTVVDLPVGLNLQDQTTSTVRSRITSAGAGQGQAAWFATFNETFGKYTEKAHELLNTKLEQWAEEAVARGGFHNTTALLIQYENYRDWIVKDNVAYSELFLDTGGVASFDVWDLLPFTRGYVHILDKDPYLRHFAYDPQYFLNELDLLGQAAATQLARNISNSGAMQTYFAGETIPGNNLAYDADLSAWVEYIPEHFRPNYHGVGTCSMMPKEMGGVVDNAARVYGVQGLRVIDGSIPPTQLSSHVMTVFYAMALKIADAVLADYASMQ

SEQ ID NO: 874 - protein, 583 aa, Aspergillus niger
SNGIEASLLKDPKLVNGDTYDYIIAGGGLAGLTVAEKLTENPDITVLVIESGSYESDRGPIIEDLNAYGEIFGTSVDHAYETVELAVDNRTALIRSGNGLGGSTLINGGTWTRPHKAQVDSWETVFGNEGWNWDSVAAYSLQAERARAPNAKQIAAGHYFNASCHGLNGTVHVGPRDTGDDYSPLMRALMSAVEDRGVPTKKDLGCGDPHGVSMFPNTLHEDQVRADAAREWLLPNYQRPNLQVLTGQYVGKVLLSQNATTPRAVGVEFGTHKSNTHNVYAKHEVLLSAGSTVSPTILEYSGIGMKSILEPLGIDTVVDLPVGLNLQDQTTSTVRSRITSAGAGQGQAAWFATFNETFGDYTEKAHELLNTKLEQWAEEAVARGGFHNTTALLIQYENYRDWIVKDNVAYSELFLDTGGVASFDVWDLLPFTRGYVHILDKDPYLRHFAYDPQYFLNELDLLGQAAATQLARNISNSGAMQTYFAGETIPGDNLAYDADLSAWVEYIPEHFRPNYHGVGTCSMMPKEMGGVVDNAARVYGVQGLRVIDGSIPPTQLSSHVMTVFYAMALKIADAVLADYASMQ

SEQ ID NO: 875 - protein, 583 aa, Aspergillus niger
SNGIEASLLKDPKLVAGDTYDYIIAGGGLAGLTVAEKLTENPNITVLVIEGGSYESDRGPIIEDLNAYGEIFGTSVDHAYETVELATNDRTALIRSGNGLGGSTLINGGTWTRPHKAQVDSWETVFGNEGWNWDSVAAYSLQAERARAPNAKQIAAGHYFNASCHGLNGTVHVGPRDTGDDYSPLMRALMSAVEDRGVPTKKDLGCGDPHGVSMFPNTLHEDQVRADAAREWLLPNYQRPHLQVLTGQYVGKVLLSQNATTPRAVGVEFGTHKSNTHNVYAKHEVLLSAGSTVSPTILEYSGIGMKSILEPLGIDTVVDLPVGLNLQDQTTSTVRSRITSAGGGQGQAAWFATFNETFGDYTEKAHELLNTKLEQWAEEAVARGGFHNTTALLIQYENYRDWIVKDNVAYSELFLDTGGVASFDVWDLLPFTRGYVHILDKDPYLRHFAYDPQYFLNELDLLGQAAATQLARNISNSGAMQTYFAGETIPGDNLAYDADLSAWVEYIPEHFRPNYHGVGTCSMMPKEMGGVVDNAARVYGVQGLRVIDGSIPPTQLSSHVMTVFYAMALKIADAVLADYASMQ

SEQ ID NO: 876 - protein, 583 aa, Aspergillus niger
SNGIEASLLKDPKLVAGDTYDYIIAGGGLAGLTVAEKLTENPNITVLVIESGSYESDRGPIIEDLNAYGEIFGTSVDHAYETVELAANDRTALIRSGNGLGGSTLINGGTWTRPHKAQVDSWETVFGNEGWNWDSVAAYSLQAERARAPNAKQIAAGHYFNAGCHGLNGTVHVGPRDTGDDYSPLMRALMSAVEDRGVPTKKDLGCGDPHGVSMFPNTLHEDQVRADAAREWLLPNYQRPHLQVLTGQYVGKVLLSQNATTPRAVGVEFGTHKSNTHNVYAKHEVLLSAGSTVSPTILEYSGIGMKSILEPLGIDTVVDLPVGLNLQDQTTSTVRSRITSAGDGQGQAAWFATFNETFGDYTEKAHELLNTKLEQWAEEAVARGGFHNTTALLIQYENYRDWIVKDNVAYSELFLDTGGVASFDVWDLLPFTRGYVHILDKDPYLRHFAYDPQYFLNELDLLGQAAATQLARNISNSGAMQTYFAGETIPGDNLAYNADLSAWVEYIPEHFRPNYHGVGTCSMMPKEMGGVVDNAARVYGVQGLRVIDGSIPPTQLSSHVMTVFYAMALKIADAVLADYASMQ

SEQ ID NO: 877 - protein, 607 aa, Aspergillus chevalieri; identical to SEQ ID NO: 2

SEQ ID NO: 878 - protein, 593 aa, Aspergillus terreus
ALPKFPRDHLGVEPQLLTDPTVLANTTVDYIIAGGGLTGLTVAARLTEDPNIKVLVIESGYFESNRGPIIEDLNRYGEIFGTEVDHAFETVQLAVNNRTEIIRSGNGLGGSTLINGGTWTRPHKVQVDSWETVFGNQGWNWDDLLPYMLKIEKARPPNQRQIEAGHYFNPQCHGFNGSVHAGPRDTGEPYSPIMRALMDTVSAEGVPVRKDLCCGDPHGVSMFLNTLYPSQIRADAAREYLVPNYHRPNFQVLTGQRVGKVLLDKTVPGSPKAIGVEFGTHRTRKYEAYARREVLLAAGSTISPTILEYSGIGMKSVLDSVGIEQVVELPVGVNLQDQTTLHVESRITPAGAGQGQAAYFATFNETFGDFAPQAHELLNTKLDQWAEEVVARGGFHNATALRIQYENYRNWLVNNNVAFSELFLDTAGKISFDVWDLIPFTRGYVHIADKDPYLRRLYNNPQYFLNELDVLGEAAASKLARELSSKGAMAQYYAGETVPGFDQLPADASLRDWAKYVKDRFRPNYHAVSTCAMMSKELGGVVDSAARVYDVERLRVVDGSIPPTQVSSHVMTVFYGMAEKIAEAILQDYHARK

SEQ ID NO: 879 - protein, 592 aa, Aspergillus cristatus
LPKFPRDHLGVEPQLLTDPTVLANTTVDYIIAGGGLTGLTVAARLTEDPNIKVLVIESGYFESNRGPIIEDLNRYGEIFGTEVDHAFETVQLAVNNRTEIIRSGNGLGGSTLINGGTWTRPHKVQVDSWETVFGNQGWNWDDLLPYMLKIEKARPPNQRQIEAGHYFNPQCHGFNGSVHAGPRDTGEPYSPIMRALMDTVSAEGVPVRKDLCCGDPHGVSMFLNTLYPSQIRADAAREYLVPNYHRPNFQVLTGQRVGKVLLDKTVPGSPKAIGVEFGTHRTRKYEAYARREVLLAAGSTISPTILEYSGIGMKSVLDSVGIEQVVELPVGVNLQDQTTLHVESRITPAGAGQGQAAYFATFNETFGDFAPQAHELLNTKLDQWAEEVVARGGFHNATALRIQYENYRNWLVNNNVAFSELFLDTAGKISFDVWDLIPFTRGYVHIADKDPYLRRLYNNPQYFLNELDVLGEAAASKLARELSSKGAMAQYYAGETVPGFDQLPADASLRDWAKYVKDRFRPNYHAVSTCAMMSKELGGVVDSAARVYDVERLRVVDGSIPPTQVSSHVMTVFYGMAEKIAEAILQDYHARK

SEQ ID NO: 880 - protein, 587 aa, Penicillium sp.
QGFTPAEQIDVQASLISDPNKVAGQTFDYIIAGGGLTGLTVAAKLSENPNITVLVIEKGFYESNNGPIIENPNDYGLIFGSSVDQNYLTVPMAINNRTLEVKSGKGLGGSTLINGDSWTGPDKVQIDSWETVLGNTGWNYDALKGYMKEAELARYPTASQIAAGIYFNETCHGFNGTVNAGPRDDGTPYSPLMKALMNTTSAKGVPTQLDFLCGRPRGVSMIYNNLLPDQTRADAAREWLLPNYKRPNLSILTGQVVGKVLFTQTATGPKATGVNFGTNKAINFNVLAKHEVLLAAGSAISPLILEHSGIGLKSVLDQFNITQLVELPVGLNMQDQTTTTVRARAKASSAGQGQAVYFANFTEVFGDYSARATDLLNTKLSQWANETVARGGFNNATALLIQYENYRNWLLNEDVAYVELFLDTNGKMNFDLWDLIPFTRGSTHIAHADPYLQSFSNNPMFLLNELDLLGQAAGSMLAREIQNSGELANYFDGEDIPGANLLPYNATLDGWVGYVKQNFRANWHAVGTCSMMSRELGGVVDPTAKVYGTQGLRVIDGSIPPTQVSSHVMTVFYGMALKIADAVLADY

SEQ ID NO: 881 - protein, 593 aa, Aspergillus terreus
ALPKFPRDHLGVEPQLLTDPTVLANTTVDYIIAGGGLTGLVVAARLTEDPNIKVLVIESGYFESNRGPIIEDLNRYGEIFGTEVDHAFETVQLAVNNRTEIIRSGNGLGGSTLINGGTWTRPHKVCVDSWETVFGNQGWNWDDLLPYMLKIEKARPPNQRQIEAGHYFNPQCHGFNGSVHAGPRDTGEPYSPIMRALMDTVSAEGVPVRKDLCCGDPHGVSMFLNTLYPSQIRADAAREYLVPNYHRPNFQVLTGQRVGKVLLDKTVPGSPKAIGVEFGTHRTRKYEAYARREVLLAAGSTISPTILEYSGIGMKSVLDSVGIEQVVELPVGVNLQDQTTLHVESRITPAGAGQGQAAYFATFNETFGDFAPQAHELLNTKLDQWAEEVVARGGFHNATALRIQYENYRNWLVNNNVAFSELFLDTAGKISFDVWDLIPFTRGYVHIADKDPYLRRLYNNPQYFLNELDVLGEAAASKLARELSSKGAMAQYYAGETVPGFDQLPADASLRDWAKYVKDHFRPNYHAVSTCAMMSKELGGVVDSAARVYDVERLRVVDGSIPPTQVSSHVMTVFYGMAEKIAEAILQDYHARK

SEQ ID NO: 882 - protein, 603 aa, Penicillium sp.
MKSIILASALASLAAAQGFTPAEQIDVQASLISDPNKVAGQTFDYIIAGGGLTGLTVAAKLSENPNITVLVIEKGFYESNNGPIIENPNDYGLIFGSSVDQNYLTVPMAINNRTLEVKSGKGLGGSTLINGDSWTGPDKVQIDSWETVLGNTGWNYDALKGYMKEAELARYPTASQIAAGIYFNETCHGFNGTVNAGPRDDGTPYSPLMKALMNTTSAKGVPTQLDFLCGRPRGVSMIYNNLLPDQTRADAAREWLLPNYKRPNLSILTGQVVGKVLFTQTATGPKATGVNFGTNKAINFNVLAKHEVLLAAGSAISPLILEHSGIGLKSVLDQFNITQLVELPVGLNMQDQTTTTVRARAKASSAGQGQAVYFANFTEVFGDYSARATDLLNTKLSQWANETVARGGFNNATALLIQYENYRNWLLNEDVAYVELFLDTNGKMNFDLWDLIPFTRGSTHIAHADPYLQSFSNNPMFLLNELDLLGQAAGSMLAREIQNSGELANYFDGEDIPGANLLPYNATLDGWVGYVKQNFRANWHAVGTCSMMSRELGGVVDPTAKVYGTQGLRVIDGSIPPTQVSSHVMTVFYGMALKIADAVLADY

SEQ ID NO: 883 - protein, 586 aa, Penicillium expansum
LPQADFDLQSSLLTDPTKVAGTTFDYIIAGGGLTGLTVAARLTENPNITVLVIERGFYESNIGPIIENLNHYGDIFGTSVDQAFETIPLAIHNRTEIVRSGKGLGGSTLVNGGSWTRPHKAQVDSWESVFGMEGWNWDSLLPYMKKIEAARAPNAEQIAAGHYYDPSCHGTDGIVHVGPRDTGESFSPMIKSLMKNANNSGIPVQKDLGCGVPHGISMILNDVHEDQTRSDAAREWLLPNYQRSNLKILTGQMVGKVLFDTTTTTPKAVGVNFGTHAKVNFDVHARHEVLLASGSAVSPQILEHSGVGLKAVLDNVGVEQLVDLPVGLNLQDQTTTTVRSNINSIGAGQGQAAYFATFNETFGDQAPRAHQLLNTKLEEWAKDVVSRGGFHNETALLVQYENYRDWLVNEDVSFAEIFIDTAGKLNLDLWDLIPFTRGYVHILDSDPYLRRFAYDPQFFLNELDVLGQAAASKLAREISNTGEMTQYFNGEAIPGNNLAYNATLDDWVDHVKQNFRANYHGVGTCSMMSKELGGVVDAAARVYGVESLRVIDGSIPPTQLSSHVMTVFYGMAQKVSEAILADYNAT

SEQ ID NO: 884 - protein, 603 aa, Talaromyces sp.
MRSIILASALASVAAAQAYTPAEQFDVQSSLISDPKLVAGKTADYIIAGGGLTGLTVAAKLSENPNITVLVIEKGFYESNDGPIIENPNDYGLIFGSTVDQNYLTVPMAINNRTLDVKSGKGLGGSTLINGDSWTRPDKVQLDSWETVLGNPGWNWDNLVKYMNKAELARYPTAKQIAAGHYFNASCHGFNGTVHAGQRDDGRPYSPLMKALMNTTAAMGVPTQVDFLCGHPRGVSMIMNNLLEDQTRADAAREWLLPNYQRPNLHILTGQIVGKVLFKQTTTGPKAVGVNFGTNKAVNFNVWARHEVLLAAGSAISPLILEHSGVGLKSVLDQFNITQVVELPVGLNMQDQTTTTVRARAKSSAAGQGQAVFFANFTETFGDYAPKAIELLNTKLDQWANETVANGGFHNATALKIQYENYRNWLLNEDVAYSELFMDTNGKINMDLWDLIPFTRGSVHIAYADPYLQSYANDPKFLLNELDLLGQAAASMLARKLQNAGVMADYFDGEDIPGADTLPYNATLDGWVGYVKQNFRANWHAVSTCSMMAKELGGVVDPTAKVYGTQGLRVIDGSVPPTQVSSHVMTIFYGMALKIADAILADY

SEQ ID NO: 885 - protein, 604 aa, Aspergillus niger
MKTILSSSLVVSMAAACTLHRSSGIEASLLTDPKAVAGRTVDDIIAGGGLTGLTTAARLTENPNITVLVIESGFYESDRGPLVEDLNAYGEIFGSEVDHAYQTVELATNNLTELIRSGNGLGGSTLVNGGTWTRPHKVQVDSWETVFGNEGWNWENVAAYSLEAERARAPNAKQVAAGHYFDPSCHGTNGTVHVGPRDTGDDYTPIIDALMTTVENMGVPTKKDLGCGDPHGVSMFPNTLHEDQVRSDAAREWLLPNYQRPNLQVLTGQLVGKVLLDQNNTVPKAVGVEFGTHKANTFNVYAKHEVLLAAGSAVSPQILEHSGIGMKSILDTVGIDTVVDLPVGLNLQDQTIVLVSSRITSAGAGQGQVAIFATFNETFGDYAPQAHALLDAKLEQWAEEGVARGGFHNATALRIQYENYRDWLVNHNVAYSELFLDTAGAVSFTIWDLIPFTRGYVHITDADPYLRLVSYDPQYFLNELDLYGQAAASQLARNLSNTDAMQTYFAGETTPGDNPAYDASLSDWAEYIKYNFRPNYHGVGTCSMMKKELGGVVDSSARVYGVDSLRVIDGSIPPTQVSSHVMTVFYAMALKISAAILADYASSQ

SEQ ID NO: 886 - protein, 604 aa, Aspergillus niger
MKTILSSSLVVSMAAACTLHRSSGIEASLLTDPKAVAGRTVDDIIAGGGLTGLTTAARLTENPNITVLVIESGFYESDRGPLVEDLNAYGEIFGSEVDHAYQTVELATNNLTELIRSGNGLGGSTLVNGGXWTRPHKVQVDSWETVFGNEGWNWENVAAYSLEAERARAPNAKQVAAGHYFDPSCHGTNGTVHVGPRDTGDDYTPIIDALMTTVENMGVPTKKDLGCGDPHGVSMFPNTLHEDQVRSDAAREWLLPNYQRPNLQVLTGQLVGKVLLDQNNTVPKAVGVEFGTHKANTFNVYAKHEVLLAAGSAVSPQILEHSGIGMKSILDTVGIDTVVDLPVGLNLQDQTIVLVSSRITSAGAGQGQVAIXATFNETFGDYAPQAHALLDAKLEQWAEEGVARGGFHNATALRIQYENYRDWLVNHNVAYSELFLDTAGAVSFTIWDLIPFTRGYVHITDADPYLRLVSYDPQYFLNELDLYGQAAASQLARNLSNTDAMQTYFAGETTPGDNPAYDASLSDWAEYIKYNFRPNYHGVGTCSMMKKELGGVVDSSARVYGVDSLRVIDGSIPPTQVSSHVMTVFYAMALKISAAILADYASSQ

SEQ ID NO: 887 - protein, 603 aa, Aspergillus nomiae
MKSVILASTIASVAVAQAYTAAEQANVQANLIFDPKTVAGKTVDYIIAGGGLTGLTVAAKLTENPNINVLVIEKGFYESNDGPVIENPNDYGLIFGSSVDHNYLTVSQDINNRTLDIKAGKGLGGSTLVNGDSWTRPDKVQIDSWETVFGNPGWNWDNLNDYMKKAELARYPTQAEIAAGHYFNASCHGFNGTVHSGPRNDGRPYSVLMKALMNTTAAMGVPTQKDFLCGHPRGVSMIYNNLLPDQTRADAAREWLLPNYQRPNLHVLTGQIVGKVLFNQTSAGPKAVGVNFGTNKAVNFNVYAKYEVLLAAGSLVSPLILEHSGIGIKSVLDQFNITQLIELPVGLNMQDQTTTTVRARAKSVAAGQGQAVYFANFTEVFGDYTPMAVGLLNNNLDQWANETVARGGFHNATALKIQYENYRNWLLNEDVAYAELFMDTNGKINFDLWDLIPFTRGSTHITYADPYLQSFSNNPRFLLNELDLLGQAAASMLARKLQNSGEMSNYFDGEDIPGADLLSYNATLDDWVGYVKQNFRANWHAVSTCSMMSKELGGVVDPTAKVYGTLGLRVIDGSVSPTQVSSHVMTIFYGMALKIADAILADY

SEQ ID NO: 888 - protein, 608 aa, Komagataella pastoris
MQDTLVSSLVVLLAAPLHYIRYNGIEASLLTDNDKDVSGRVDYAIQAGGGLTILTTADRLTENVNISVALVIESPSESDRGPINESDLNAFADIFGSSVDHWDYETVLATNHNQRALIRSGINGGGSTLINGGRTWTVPKAQDVNSWETVFGNEAWSNDNVADYSLAQAEIARAPFNAKQLAGHYFNEPSCHGTNGAVHTAPRDTVDIYSPVKALMSASEDRGVPTKKAFGNCDPHGDSMFPPNNLHEDVRSDAARGNWLLPYQRPNLQVWTGMQYVGKLLAQNYGTTPRAVGVEFTKGKGNTHNVVAEHVHLLAAGHAVSPTIRLESGIVMKSIEPLGIADTVVDIPVGLNLQIQTTIATRSRVTSAGAGSGQGAWFATFNETFIDYSEAHPELLNTKLEQAAEAVARVGGFHNTAALIQYYENYRDNIVNHVNVAYSELLDTAGVASMFAVWDLPFTRGNVHILDWDPPLHHFAYDPVYFLEPLDLLGQHAATQLARISNNSGAIQTYFAGETIPGDLAYFVADLSAWTEYHYHFRPNIYHVKTCSMMPKEFMGIVVNAARVYGDTQLRVIDGSIPPQDMSSHVMTVFIAALQKISDAILEAYSMQ

SEQ ID NO: 889 - protein, 603 aa, Aspergillus terreus
MKGTFLVSALAFTAITQAFTPAEQIDVQSSLISDPKEVAGKEVDYIIAGGGLTGLTVAAKLTEDPDIRVLVIEKGFYESNNGPIIEDLNAYGDIFGSTVDQNYLTVPMGINNRTLDIKSGKGLGGSTLVNGGXWTSPDKVQLDSWETVLGNPGWNWETIFEYKKKAERARYPTAEEIMAGQHIDAACHGFNGTVHAGVRNTGEPYSPMIRALMNTTEAMGIPTQVDLHCGHPRGVSMILNSLHEDQTRSDAAREWLLPNYERPNLQVLTGQIVGKVLFESTGNGPKAVGVNYGTNKDVNFNVYAKHEVLLAAGSAVSPLILEHSGIGLKSVLGPLGIAQLVELPVGLNMQDQTTTTVQSRAKGTGAGQGQAVYXANFTETFGDHAPHAMKLLNTKLDQWATETVARGGFHNVTALKVQYENYRKWLLEDDVAFVEFFFDSNGMINFDLWDLIPFTRGSTHIADPDPYLQSFLNNPMFFLNEFDLLGQAAASKLARELQNMGEMRDYFAGENIPGAELLAYDASLEEWVEYVKQNFRANWHAVSTCAMMSKELGGVVDPTAKVYGTQGLRVIDGSIVPTQISAHVMTTFYAMALKISDSILEDY

SEQ ID NO: 890 - protein, 601 aa, Talaromyces variabilis
MVSVFLSSLLLSVATAQVYSPAQQIDVQSSLLSDPNKVAGKTYDYIIAGGGLTGLTVAAKLSENPKIKVLVIEKGFYESNDGAIIEDANAYGQIFGTTVDQNYLTVPLINNRTSSIKSGKGLGGSTLINGDXWTRPDKVQIDSWEKVFGMEGWNWDTMFEYMKKAELARAPTDAQIAAGHYFNATCHGFNGTIHSGPRDNGQPWSPIMKALMNTTSALGIPTQQDFLCGHPRGVSMIYNNLDENQVRADAGRAWVLPNYQRPNLKIMTGQTVGKVLFNQTASGPKAVGVNFGTNKAVNFDVYAKHEVLLAAGSAISPLILEYSGIGLKSVLDAANVTQLVDLPVGLNMQDQTTTTVSSRTNAAGTGQGQAVFXANFTEVFGDYTPQARELLNTKLDQWAEETVARGGHNNVTALKIQYENYRDWLLEEDVAYAELFMDTSGKINFDLWDLIPFTRGSVHILSSDPYLWQYANDPKFFLNELDLLGQAAASKLARELSTKGAMAQYFAGETIPGNNLAADANLSQWSDYVIQNFRPNWHAVSSCSMMAKELGGVVDATAKVYGTQGLRVVDGSIPPTQVSSHVMTIFYGMALKVADAILADY

SEQ ID NO: 891 - protein, 583 aa, Penicillium decumbens
YLPAQQIDVQSSLLSDPSKVAGKTYDYIIAGGGLTGLTVAAKLTENPKIKVLVIEKGFYESNDGAIIEDPNAYGQIFGTTVDQNYLTVPLINNRTNNIKAGKGLGGSTLINGDSWTRPDKVQIDSWEKVFGMEGWNWDNMFEYMKKAEAARTPTAAQVAAGHSFNATCHGTNGTVQSGARDNGQPWSPIMKALMNTVSALGVPVQQDFLCGHPRGVSMIMNNLDENQVRVDAARAWLLPNYQRPNLEILTGQMVGKVLFKQTASGPQAVGVNFGTNKAVNFDVFAKHEVLLAAGSAISPLILEYSGIGLKSVLDQANVTQLLDLPVGINMQDQTTTTVSSRASAAGAGQGQAVFFANFTETFGDYAPQARDLLNTKLDQWAEETVARGGFHNVTALKVQYENYRNWLLDEDVAFAELFMDTEGKINFDLWDLIPFTRGSVHILSSDPYLWQFANDPKFFLNEFDLLGQAAASKLARDLTSQGAMKEYFAGETLPGYNLVQNATLSQWSDYVLQNFRPNWHAVSSCSMMSRELGGVVDATAKVYGTQGLRVIDGSIPPTQVSSHVMTIFYGMALKVADAILDDY

SEQ ID NO: 892 - protein, 583 aa, Penicillium decumbens
YLPAQQIDVQSSLLSDPSKVAGKTYDYIIAGGGLTGLTVAAKLTENPKIKVLVIEKGFYESNDGAIIEDPNAYGQIFGTTVDQNYLTVPLINNRTNNIKAGKGLGGSTLINGDSWTRPDKVQIDSWEKVFGMEGWNWDNMFEYMKKAEAARTPTAAQVAAGHSFNATCHGTRGTVQSGARDNGQPWSPIMKALMNTVSALGVPVQQDFLCGHPRGVSMIMNNLDENQVRVDAARAWLLPNYQRPNLEILTGQMVGKVLFKQTASGPQAVGVNFGTNKAVNFDVFAKHEVLLAAGSAISPLILEYSGIGLKSVLDQANVTQLLDLPVGINMQDQTTTTVSSRASAAGAGQGQAVFFANFTETFGDYAPQARDLLNTKLDQWAEETVARGGFHNVTALKVQYENYRNWLLDEDVAFAELFMDTEGKINFDLWDLIPFTRGSVHILSSDPYLWQFANDPKFFLNEFDLLGQAAASKLARDLTSQGAMKEYFAGETLPGYNLVQNATLSQWSDYVLQNFRPNWHAVSSNSMMSRELGGVVDATAKVYGTQGLRVIDGSIPPTQVSSHVMTIFYGMALKVADAILDDY

SEQ ID NO: 893 - protein, 583 aa, Penicillium amagasakiense
YLPAQQIDVQSSLLSDPSKVAGKTYDYIIAGGGLTGLTVAAKLTENPKIKVLVIEKGFYESNDGAIIEDPNAYGQIFGTTVDQNYLTVPLINNRTNNIKAGKGLGGSTLINGDSWTRPDKVQIDSWEKVFGMEGWNWDNMFEYMKKAEAARTPTAAQLAAGHSFNATCHGTNGTVQSGARDNGQPWSPIMKALMNTVSALGVPVQQDFLCGHPRGVSMIMNNLDENQVRVDAARAWLLPNYQRSNLEILTGQMVGKVLFKQTASGPQAVGVNFGTNKAVNFDVFAKHEVLLAAGSAISPLILEYSGIGLKSVLDQANVTQLLDLPVGINMQDQTTTTVSSRASSAGAGQGQAVFFANFTETFGDYAPQARDLLNTKLDQWAEETVARGGFHNVTALKVQYENYRNWLLDEDVAFAELFMDTEGKINFDLWDLIPFTRGSVHILSSDPYLWQFANDPKFFLNEFDLLGQAAASKLARDLTSQGAMKEYFAGETLPGYNLVQNATLSQWSDYVLQNFRPNWHAVSSCSMMSRELGGVVDATAKVYGTQGLRVIDGSIPPTQVSSHVMTIFYGMALKVADAILDDY

SEQ ID NO: 894 - protein, 576 aa, Aspergillus niger
IEASLLTDPKAVAGRTVDDIIAGGGLTGLTTAARLTENPNITVLVIESGFYESDRGPLVEDLNAYGEIFGSEVDHAYQTVELATNNLTELIRSGNGLGGSTLVNGGTWTRPHKVQVDSWETVFGNEGWNWENVAAYSLEAERARAPNAKQVAAGHYFDPSCHGTNGTVHVGPRDTGDDYTPIIDALMTTVENMGVPTKKDLGCGDPHGVSMFPNTLHEDQVRSDAAREWLLPNYQRPNLQVLTGQLVGKVLLDQNNTVPKAVGVEFGTHKANTFNVYAKHEVLLAAGSAVSPQILEHSGIGMKSILDTVGIDTVVDLPVGLNLQDQTIVLVSSRITSAGAGQGQVAIFATFNETFGDYAPQAHALLDAKLEQWAEEGVARGGFHNATALRIQYENYRDWLVNHNVAYSELFLDTAGAVSFTIWDLIPFTRGYVHITDADPYLRLVSYDPQYFLNELDLYGQAAASQLARNLSNTDAMQTYFAGETTPGDNPAYDASLSDWAEYIKYNFRPNYHGVGTCSMMKKELGGVVDSSARVYGVDSLRVIDGSIPPTQVSSHVMTVFYAMALKISAAILADY

SEQ ID NO: 895 - protein, 587 aa, Synthetic construct
GGGSYLPAQQIDVQSSLLSDPSKVAGKTYDYIIAGGGLTGLTVAAKLTENPKIKVLVIEKGFYESNDGAIIEDPNAYGQIFGTTVDQNYLTVPLINNRTNNIKAGKGLGGSTLINGDSWTRPDKVQIDSWEKVFGMEGWNWDNMFEYMKKAEAARTPTAAQLAAGHSFNATCHGTNGTVQSGARDNGQPWSPIMKALMNTVSALGVPVQQDFLCGHPRGVSMIMNNLDENQVRVDAARAWLLPNYQRSNLEILTGQMVGKVLFKQTASGPQAVGVNFGTNKAVNFDVFAKHEVLLAAGSAISPLILEYSGIGLKSVLDQANVTQLLDLPVGINMQDQTTTTVSSRASSAGAGQGQAVFFANFTETFGDYAPQARDLLNTKLDQWAEETVARGGFHNVTALKVQYENYRNWLLDEDVAFAELFMDTEGKINFDLWDLIPFTRGSVHILSSDPYLWQFANDPKFFLNEFDLLGQAAASKLARDLTSQGAMKEYFAGETLPGYNLVQNATLSQWSDYVLQNFRPNWHAVSSCSMMSRELGGVVDATAKVYGTQGLRVIDGSIPPTQVSSHVMTIFYGMALKVADAILDDY

SEQ ID NO: 896 - protein, 582 aa, Penicillium chrysogenum
YSPAEQIDVQSHLLSDPTKVEGKTYDYVIAGGGLTGLTVASKLSENPKIKVLVIEKGFYESNDGPIIEDPNAYGEIFGTSVDQNYLTVPLINNRTGEIKSGLGLGGSTLINGDSWTRPDKVQIDSWEKVFGMEGWNWDNVFQYMQKAERSRPPTAAQIEAGHFYDPACHGTDGTVHAGPRDNGKPWSPLMRALMNTVSAFGVPVQKDFHCGHPRGVSMIPNNLHENQIRADAAREWLLPNYQRDNLQILTGQKVGKVLFNQTASGPKAVGVNFGTNKAVNFNVYAKQEVLLAAGSAISPLILEYSGIGIKSVLDKAGVKQLLELPVGLNMQDQTTTTVRSRANNAPGQGQAAYFANFTEVLGDHAAQGINLLDTKLDQWAEETVARGGFHNVTALKIQYENYRNWLLDEDVAFAELFFDTEGKINFDIWNLIPFTRGSVHILSSDPYLWQYANDPKFFMNELDLLGQAAATKLGRELSSAGEMKKYYAGETIPGDNLPQDATVEQWEDYVMMNFRPNWHAVSTCSMMSRELGGVVDATAKVYGTQGLRVIDGSIPPTQVSSHVMTVFYGMALRIAESVLEDY

SEQ ID NO: 897 - protein, 582 aa, Penicillium chrysogenum
YSPAEQIDVQSHLLSDPTKVEGETYDYVIAGGGLTGLTVAAKLSENPKIKVLVIEKGFYESNDGPIIEDPNAYGEIFGTSVDQNYLTVPLINNRTGEIKSGLGLGGSTLINGDSWTRPDKVQIDSWEKVFGMEGWNWDNVFQYMQKAERSRPPTAAQIEAGHFYDPACHGTDGTVHAGPRDNGKPWSPLMRALMNTVSAFGVPVQKDFHCGHPRGVSMIPNNLHENQIRADAAREWLLPNYQRDNLQILTGQKVGKVLFNQTASGPKAVGVNFGTNKAVNFNVYAKQEVLLAAGSAISPLILEYSGIGIKSVLDKAGVKQLLELPVGLNMQDQTTTTVRSRANNAPGQGQAAYFANFTEVLGDHAAQGIKLLDTKLDQWAEETVARGGFHNVTALKIQYENYRNWLLDEDVAFAELFFDTEGKINFDIWNLIPFTRGSVHILSSDPYLWQYANDPKFFMNELDLLGQAAATKLGRELSSAGEMKKYYAGETIPGDNLPQDATVEQWEDYVMMNFRPNWHAVSTCSMMSRELGGVVDATAKVYGTQGLRVIDGSIPPTQVSSHVMTVFYGMALRIAESVLEDY

SEQ ID NO: 898 - protein, 578 aa, Aspergillus niger
YGIEASLLTDPKEVAGRTYDYIIAGGGLTGLTVAARLTENPDITVLVIESGSYESDRGPIIEDLNAYGQIFGSSVDHAYETVELATNNRTALIRSGNGLGGSTLINGGTWTRPHKAQVDSWETVFGNEGWNWDSVAAYSLQAERARAPNAKQIAAGHYFNASCHGINGTVHAGPRDTGDDYSPIVKALMSAVEDRGVPTKKDLGCGDPHGVSMFPNTLHEDQVRSDAAREWLLPNYQRPNLQVLTGQYVGKVLLSQNATTPRAVGVEFGTHKGNTHNVYAKHEVLLAAGSAVSPTILEYSGIGLKSILEPLGIDTVVDLPVGLNLQDQTTSTVRSRITSAGAGQGQAAWFATFNETFGDYAEKAHELLNTKLEQWAEEAVARGGFHNTTALLIQYENYRDWIVKDNVAYSELFLDTAGVASFDVWDLLPFTRGYVHILDKDPYLRHFAYDPQYFLNELDLLGQAAATQLARNISNSGAMQTYFAGETIPGDNLAYDADLSAWVEYIPYNFRPNYHGVGTCSMMPKEMGGVVDNAARVYGVQGLRVIDGSIPPTQMSSHVMTVFYAMALKIADAILADY

SEQ ID NO: 899 - protein, 576 aa, Aspergillus niger
IEASLLTDPKAVAGRTVDDIIAGGGLTGLTTAARLTENPNITVLVIESGFYESDRGPLVEDLNAYGEIFGSEVDHAYQTVELATNNLTELIRSGNGLGGSTLVNGGXWTRPHKVQVDSWETVFGNEGWNWENVAAYSLEAERARAPNAKQVAAGHYFDPSCHGTNGTVHVGPRDTGDDYTPIIDALMTTVENMGVPTKKDLGCGDPHGVSMFPNTLHEDQVRSDAAREWLLPNYQRPNLQVLTGQLVGKVLLDQNNTVPKAVGVEFGTHKANTFNVYAKHEVLLAAGSAVSPQILEHSGIGMKSILDTVGIDTVVDLPVGLNLQDQTIVLVSSRITSAGAGQGQVAIXATFNETFGDYAPQAHALLDAKLEQWAEEGVARGGFHNATALRIQYENYRDWLVNHNVAYSELFLDTAGAVSFTIWDLIPFTRGYVHITDADPYLRLVSYDPQYFLNELDLYGQAAASQLARNLSNTDAMQTYFAGETTPGDNPAYDASLSDWAEYIKYNFRPNYHGVGTCSMMKKELGGVVDSSARVYGVDSLRVIDGSIPPTQVSSHVMTVFYAMALKISAAILADY

SEQ ID NO: 900 - protein, 582 aa, Synthetic construct
YSPAEQIDVQSHLLSDPTKVEGKTYDYVIAGGGLTGLTVASKLSENPKIKVLVIEKGFYESNDGPIIEDPNAYGEIFGTSVDQNYLTVPLINNRTGEIKAGLGLGGSTLINGDSWTRPDKVQIDSWEKVFGMEGWNWDNVFQYMQKAERSRPPTAAQIEAGHFYDPACHGTDGTVHAGPRDNGKPWSPLMRALMNTVSAFGVPVQKDFHCGHPRGVSMIPNNLHENQIRADAAREWLLPNYQRDNLQILTGQKVGKVLFNQTASGPKAVGVNFGTNKAVNFNVYAKQEVLLAAGSAISPLILEYSGIGIKSVLDKAGVKQLLELPVGLNMQDQTTTTVRSRANNAPGQGQAAYFANFTEVLGDHAAQGINLLDTKLDQWAEETVARGGFHNVTALKIQYENYRNWLLDEDVAFAELFFDTEGKINFDIWNLIPFTRGSVHILSSDPYLWQYANDPKFFMNELDLLGQAAATKLGRELSSAGEMKKYYAGETIPGDNLPQDATVEQWEDYVMMNFRPNWHAVSTCSMMSRELGGVVDATAKVYGTQGLRVIDGSIPPTQVSSHVMTVFYGMALRIAESVLEDY

SEQ ID NO: 901 - protein, 583 aa, Penicillium amagasakiense
YLPAQQIDVQSSLLSDPSKVAGKTYDYIIAGGGLTGLTVAAKLTENPKIKVLVIEKGFYESNDGAIIEDPNAYGQIFGTTVDQNYLTVPLINNPTNNIKAGKGLGGSTLINGDSWTRPDKVQIDSWEKVFGMEGWNWDNMFEYMKKAEAARTPTAAQLAAGHSFNPTCHGTNPTVQSGARDNGQPWSPIMKALMNTVSALGVPVQQDFLCGHPRGVSMIMNNLDENQVRVDAARAWLLPNYQRSNLEILTGQMVGKVLFKQTASGPQAVGVNFGTNKAVNFDVFAKHEVLLAAGSAISPLILEYSGIGLKSVLDQANPTQLLDLPVGINMQDQTTTTVSSRASSAGAGQGQAVFFANPTETFGDYAPQARDLLNTKLDQWAEETVARGGFHNPTALKVQYENYRNWLLDEDVAFAELFMDTEGKINFDLWDLIPFTRGSVHILSSDPYLWQFANDPKFFLNEFDLLGQAAASKLARDLTSQGAMKEYFAGETLPGYNLVQNPTLSQWSDYVLQNFRPNWHAVSSCSMMSRELGGVVDATAKVYGTQGLRVIDGSIPPTQVSSHVMTIFYGMALKVADAILDDY

SEQ ID NO: 902 - protein, 583 aa, Penicillium amagasakiense
YLPAQHIDVQSSLLSDPSKVAGKTYDYIIAGGGLTGLTVAAKLTENPKIKVLVIEKGFYEHNDGAIIEDPNAYGQIFGTTVDQNYLTVPLINNRTNNIKAGKGLGGSHLINGDSWTRPDKVQIDSWEKVFGMEGWNWDNMFEYMKKAEAARTPTAAQLAAGHSFNATCHGTNGTVQSGARDNGQPWSPIMKALMNTVSALGVPVQQDFLCGHPRGVSMIMNNLDENQVRVHAARAWLLPNYQRSNLEILTGQMVGKVLFKQTASGPQAVGVNFGTNKAVNFDVFAKHEVLLAAGSAISPLILEYSGIGLKSVLDQANVTQLLDLPVGINMQDQTTTTVSSRASSAGAGQGQAVFFANFTETFGDYAPQARDLLNTKLDQWAEETVARGGFHNVTALKVQYENYRNWLLDEDVAFAELFMDTEGKINFDLWDLIPFTRGSVHILSSDPYLWQFANDPKFFLNEFDLLGQAAASKLARDLTSQGAMKEYFAGETLPGYNLVQNATLSQWSDYVLQNFRPNWHAVSSCSMMSRELGGVVDATAKVYGTQGLRVIDGSIPPTQVSSHVMTIFYGMALKVADAILDDY

SEQ ID NO: 903 - protein, 583 aa, Penicillium amagasakiense
YLPAQQIDVQSSLLSDPSKVAGKTYDYIIAGGGLTGLTVAAKLTENPKIKVLVIEKGFYESNDGAIIEDPNAYGQIFGTTVDQNYLTVPLINNPTNNIKAGKGLGGSTLINGDSWTRPDKVQIDSWEKVFGMEGWNWDNMFEYMKKAEAARTPTAAQLAAGHSFNPTCHGTNPTVQSGARDNGQPWSPIMKALMNTVSALGVPVQQDFLCGHPRGVSMIMNNLDENQVRVDAARAWLLPNYQRSNLEILTGQMVGKVLFKQTASGPQAVGVNFGTNKAVNFDVFAKHEVLLAAGSAISPLILEYSGIGLKSVLDQANPTQLLDLPVGINMQDQTTTTVSSRASSAGAGQGQAVFFANPTETFGDYAPQARDLLNTKLDQWAEETVARGGFHNPTALKVQYENYRNWLLDEDVAFAELFMDTEGKINFDLWDLIPFTRGSVHILSSDPYLWQFANDPKFFLNEFDLLGQAAASKLARDLTSQGAMKEYFAGETLPGYNLVQNPTLSQWSDYVLQNFRPNWHAVSSCSMMSRELGGVVDATAKVYGTQGLRVIDGSIPPTQVSSHSMTIFYGMALKVADAILDDY

SEQ ID NO: 904 - protein, 583 aa, Penicillium amagasakiense
YLPAQQIDVQSSLLSDPSKVAGKTYDYIIAGGGLTGLTVAAKLTENPKIKVLVIEKGFYESNDGAIIEDPNAYGQIFGTTVDQNYLTVPLINNPTNNIKAGKGLGGSTLINGDSWTRPDKVQIDSWEKVFGMEGWNWDNMFEYMKKAEAARTPTAAQLAAGHSFNPTCHGTNPTVQSGARDNGQPWSPIMKALMNTVSALGVPVQQDFLCGHPRGVSMIMNNLDENQVRVDAARAWLLPNYQRSNLEILTGQMVGKVLFKQTASGPQAVGVNFGTNKAVNFDVFAKHEVLLAAGSAISPLILEYSGIGLKSVLDQANPTQLLDLPVGINMQDQTTTTVSSRASSAGAGQGQAVFFANPTETFGDYAPQARDLLNTKLDQWAEETVARGGFHNPTALKVQYENYRNWLLDEDVAFAELFMDTEGKINFDLWDLIPFTRGSVHILSSDPYLWQFANDPKFFLNEFDLLGQAAASKLARDLTSQGAMKEYFAGETLPGYNLVQNPTLSQWSDYVLQNFRPNWHAVSSCSMMSRELGGVVDATAKVYGTQGLRVIDGSIPPTQVSSHIMTIFYGMALKVADAILDDY

SEQ ID NO: 905 - protein, 583 aa, Penicillium amagasakiense
YLPAQQIDVQSSLLSDPSKVAGKTYDYIIAGGGLTGLTVAAKLTENPKIKVLVIEKGFYESNDGAIIEDPNAYGQIFGTTVDQNYLTVPLINNPTNNIKAGKGLGGSTLINGDSWTRPDKVQIDSWEKVFGMEGWNWDNMFEYMKKAEAARTPTAAQLAAGHSFNPTCHGTNPTVQSGARDNGQPWSPIMKALMNTVSALGVPVQQDFLCGHPRGVSMIMNNLDENQVRVDAARAWLLPNYQRSNLEILTGQMVGKVLFKQTASGPQAVGVNFGTNKAVNFDVFAKHEVLLAAGSAISPLILEYSGIGLKSVLDQANPTQLLDLPVGINMQDQTTTTVSSRASSAGAGQGQAVFFANPTETFGDYAPQARDLLNTKLDQWAEETVARGGFHNPTALKVQYENYRNWLLDEDVAFAELFMDTEGKINFDLWDLIPFTRGSVHILSSDPYLWQFANDPKFFLNEFDLLGQAAASKLARDLTSQGAMKEYFAGETLPGYNLVQNPTLSQWSDYVLQNFRPNWHAVSSCSMMSRELGGVVDATAKVYGTQGLRVIDGSIPPTQVSSHTMTIFYGMALKVADAILDDY

SEQ ID NO: 906 - protein, 578 aa, Aspergillus niger
YGIEASLLKDPKEVAGRTYDYIIAGGGLTGLTVAARLTENPDITVLVIESGSYESDRGPIIEDLNAYGQIFGSSVDHAYETVELATNNQTALIRSGNGLGGSTLINGGNWTRPHKAQVDSWETVFGNEGWNWDSVAAYSLQAERARAPNAKQIAAGHYFNASCHGINGTVHAGPRDTGDDYSPIVKALMSAVEDRGVPTKKDLGCGDPHGVSMFPNTLHEDQVRSDAAREWLLPNYQRPNLQVLTGQYVGKVLLSQNATTPRAVGVEFGTHKGNTHNVYAKHEVLLAAGSAVSPTILEYSGIGLKSILEPLGIDTVVDLPVGLNLQDQTTSTVRSRITSAGAGQGQAAWFATFNETFGDYAEKAHELLNTKLEQWAEEAVARGGFHNTTALLIQYENYRDWIVKDNVAYSELFLDTAGVASFDVWDLLPFTRGYVHILDKDPYLRHFAYDPQYFLNELDLLGQAAATQLARNISNSGAMQTYFAGETIPGDNLAYDADLSAWVEYIPENFRPNYHGVGTCSMMPKEMGGVVDNAARVYGVQGLRVIDGSIPPTQMSSHVMTVFYAMALKIADAILADY

SEQ ID NO: 907 - protein, 585 aa, Aspergillus niger
LPHYIRSNGIEASLLTDPKEVAGRTVDYIIAGGGLTGLTTAARLTENPDITVLVIESGSYESDRGPIIEDLNAYGDIFGSSVDHAYETVELATNNQTALIRSGNGLGGSTLVNGGTWTRPHKAQVDSWETVFGNEGWNWDSVAAYSLQAERARAPNAKQIAAGHYFNASCHGINGTVHAGPRDTGDDYSPIVKALMSAVEDRGVPTKKDLGCGDPHGVSMFPNTLHEDQVRSDAAREWLLPNYQRPNLQVLTGQYVGKVLLSQNATTPRAVGVEFGTHKGNTHNVYAKHEVLLAAGSAVSPTILEYSGIGMKSILEPLGIDTVVDLPVGLNLQDQTTSTVRSRITSAGAGQGQAAWFATFNETFGDYAEKAHELLNTKLEQWAEEAVARGGFHNTTALLIQYENYRDWIVKDNVAYSELFLDTAGVASFDVWDLLPFTRGYVHILDKDPYLRHFAYDPQYFLNELDLLGQAAATQLARNISNSGAMQTYFAGETIPGDNLAYDADLSAWVEYIPYNFRPNYHGVGTCSMMPKEMGGVVDNAARVYGVQGLRVIDGSIPPTQMSSHVMTVFYAMALKIADAILADY

SEQ ID NO: 908 - protein, 576 aa, Aspergillus niger
IEASLLTDPKEIAGCTVDYIIAGGGLTGLTTAARLTENPDITVLVIESGSYESDRGPIIEDLNAYGDIFGSSVDHAYETVELATNNQTALIRSGNGLGGSSLVNGGTWTRPHKAQVDSWETVFGNEGWNWDSVAAYSLQAERARAPNAKQIAAGHYFNASCHGINGTVHAGPRDTGDDYSPIVKALMSAVEDRGVPTKKDLGCGDPHGVSMFPNTLHEDQVRSDAAREWLLPNYQRPNLQVLTGQYVGKVLLSQNATTPRAIGVEFGTHKGNTHNVYAKHEVLLAAGSAVSPTILEYSGIGMKSILEPLGIDTVVDLPVGLNLQDQTTSTVRSRITSAGAGQGQAAWFATFNETLGDYAEKAHELLNTKLEQWAEEAVARGGFHNTTALLIQYENYRDWIVKDNVAYSELFLDTAGVASFGVWDLLPFTRGYVHILDKAPYLRHFAYDPQYFLNELDLLGQAAATQLARNISNSGAMQTYFAGETIPGDNLAYDADLSAWVEYIPYNFRPNYHGVGTCSMMPKEMGGVVDNAARVYGVQGQRVIDGSIPPTQMSSHVMTVFYAMALKIADAILADY

SEQ ID NO: 909 - protein, 583 aa, Penicillium amagasakiense
YLPAQQIDVQSSLLSDPSKVAGKTYDYIIAGGGLTGLTVAAKLTENPKIKVLVIEKGFYESNDGAIIEDPNAYGQIFGTTVDQNYLTVPLINNPTNNIKAGKGLGGSTLINGDSWTRPDKVQIDSWEKVFGMEGWNWDNMFEYMKKAEAARTPTAAQLAAGHSFNPTCHGTNPTVQSGARDNGQPWSPIMKALMNTVSALGVPVQQDFLCGHPRGVSMIMNNLDENQVRVDAARAWLLPNYQRSNLEILTGQMVGKVLFKQTASGPQAVGVNFGTNKAVNFDVFAKHEVLLAAGSAISPLILEYSGIGLKSVLDQANPTQLLDLPVGINMQDQTTTTVSSRASSAGAGQGQAVFFANPTETFGDYAPQARDLLNTKLDQWAEETVARGGFHNPTALKVQYENYRNWLLDEDVAFAELFMDTEGEINFDLWDLIPFTRGSVHILSSDPYLWQFANDPKFFLNEFDLLGQAAASKLARDLTSQGAMKEYFAGETLPGYNLVQNPTLSQWSDYVLQNFRPNWHAVSSCSMMSRELGGVVDATAKVYGTQGLRVIDGSIPPTQVSSHSMTIFYGMALKVADAILDDY

SEQ ID NO: 910 - protein, 589 aa, Beauveria bassiana
LATTGAYLVSEQVDIQASLLIDPKDVADKTFDYIIAGGGLTGLTVAAKLTENPNIEVLVIEAGFYESNSGPVIENPNRYGEVFGTTVDHNYLTVPLINNRTDNIKAGKGLGGSTLINGNSWTRPDKVQIDSWEKVFGNEGWTWDNIFPYMNRAERARAPTAVQVAAGHSFDPACHGFNGTVHSGPRDNGQPWSPLMKALMNTTSALGAPTQVDFNCGHPRGVSMIPNNLLEDQVRADAAREWLLPNYRRKNLKVLTGHAVGKVLFDQKAPILKAIGVNFGTNKAVNFNAYTKHEVLLAAGSSISPLILEYSGIGLKSVLDKANVTQLVELPVGINMQDQTTTTVRARSTSAGAGQGQAIYFANFTETFGEDIAYATELLETKMDQWAEETVARGGFHNVTALKVQYENCRDWLLHEDVAYAELFLDTSGQINFDLWDLIPFTRGSTHILSSEPYRWQFANDPKFFFNELDLLGQAAATRLARKLQNSGAMASYFDGEVIPGAEVPEDATLGQWAEYVKDNFRANWHAVGTCSMMSRELGGVVDAAAKVYDTQGLRVIDGSIPPTQVSSHVMTIFYGMALRIAESILEDY

SEQ ID NO: 911 - protein, 600 aa, unidentified
MKSTIITSILFSVATVQAYSPAEQIDVQSHLLSDPTKVEGETYDYVIAGGGLTGLTVAAKLSENPKIKVLVIEKGFYESNDGPIIEDPNAYGEIFGTSVDQNYLTVPLINNRTGQIKSGLGLGGSTLINGDSWTRPDKVQIDSWEKVFGMEGWNWDNVFQYMQKAERSRPPTAAQIEAGHFYDPACHGTDGTVHAGPRDNGKPWSPLMRALMNTVSAFGVPVQKDFHCGHPRGVSMIPNNLHENQIRADAAREWLLPNYQRDNLQILTGQKVGKVLFNQTASGPKAVGVNFGTNKAVNFNVYAKQEVLLAAGSAISPLILEYSGIGIKSVLDKAGVKQLLELPVGLNMQDQTTTTVRSRANNAPGQGQAAYFANFTEVLGDHAAQGIKLLDTKLDQWAEETVARGGFHNVTALKIQYENYRNWLLDEDVAFAELFFDTEGKINFDIWNLIPFTRGSVHILSSDPYLWQYANDPKFFMNELDLLGQAAATKLGRELSSAGEMKKYYAGETIPGDNLPQDATVEQWEDYVMMNFRPNWHAVSTCSMMSRELGGVVDATAKVYGTQGLRVIDGSIPPTQVSSHVMTVFYGMALRIAESVLEDY

SEQ ID NO: 912 - protein, 600 aa, Penicillium chrysogenum
MKSTIITSILFSVATVQAYSPAEQIDVQSHLLSDPTKVEGKTYDYVIAGGGLTGLTVASKLSENPKIKVLVIEKGFYESNDGPIIEDPNAYGEIFGTSVDQNYLTVPLINNRTGEIKSGLGLGGSTLINGDSWTRPDKVQIDSWEKVFGMEGWNWDNVFQYMQKAERSRPPTAAQIEAGHFYDPACHGTDGTVHAGPRDNGKPWSPLMRALMNTVSAFGVPVQKDFHCGHPRGVSMIPNNLHENQIRADAAREWLLPNYQRDNLQILTGQKVGKVLFNQTASGPKAVGVNFGTNKAVNFNVYAKQEVLLAAGSAISPLILEYSGIGIKSVLDKAGVKQLLELPVGLNMQDQTTTTVRSRANNAPGQGQAAYFANFTEVLGDHAAQGINLLDTKLDQWAEETVARGGFHNVTALKIQYENYRNWLLDEDVAFAELFFDTEGKINFDIWNLIPFTRGSVHILSSDPYLWQYANDPKFFMNELDLLGQAAATKLGRELSSAGEMKKYYAGETIPGDNLPQDATVEQWEDYVMMNFRPNWHAVSTCSMMSRELGGVVDATAKVYGTQGLRVIDGSIPPTQVSSHVMTVFYGMALRIAESVLEDY

SEQ ID NO: 913 - protein, 600 aa, Penicillium chrysogenum
MKSTIITSILFSVAAVQAYSPAEQIDVQSHLLSDPTKVEGETYDYVIAGGGLTGLTVAAKLSENPKIKVLVIEKGFYESNDGPIIEDPNAYGEIFGTSVDQNYLTVPLINNRTGEIKSGLGLGGSTLINGDSWTRPDKVQIDSWEKVFGMEGWNWDNVFQYMQKAERSRPPTAAQIEAGHFYDPACHGTDGTVHAGPRDNGKPWSPLMRALMNTVSAFGVPVQKDFHCGHPRGVSMIPNNLHENQIRADAAREWLLPNYQRDNLQILTGQKVGKVLFNQTASGPKAVGVNFGTNKAVNFNVYAKQEVLLAAGSAISPLILEYSGIGIKSVLDKAGVKQLLELPVGLNMQDQTTTTVRSRANNAPGQGQAAYFANFTEVLGDHAAQGIKLLDTKLDQWAEETVARGGFHNVTALKIQYENYRNWLLDEDVAFAELFFDTEGKINFDIWNLIPFTRGSVHILSSDPYLWQYANDPKFFMNELDLLGQAAATKLGRELSSAGEMKKYYAGETIPGDNLPQDATVEQWEDYVMMNFRPNWHAVSTCSMMSRELGGVVDATAKVYGTQGLRVIDGSIPPTQVSSHVMTVFYGMALRIAESVLEDY

SEQ ID NO: 914 - protein, 599 aa, Penicillium chrysogenum
MVKSILASVFFAATALAYSPAEQIDVQSHLLSDPTKVEGETYDYVIAGGGLTGLTVAAKLSENPKIKVLVIEKGFYESNDGPIIEDPNAYGEIFGTSVDQNYLTVPLINNRTGEIKSGLGLGGSTLINGDSWTRPDKVQIDSWEKVFGMEGWNWDNVFQYMQKAERSRPPTAAQIEAGHFYDPACHGTDGTVHAGPRDNGKPWSPLMRALMNTVSAFGVPVQKDFHCGHPRGVSMIPNNLHENQIRADAAREWLLPNYQRDNLQILTGQKVGKVLFNQTASGPKAVGVNFGTNKAVNFNVYAKQEVLLAAGSAISPLILEYSGIGIKSVLDKAGVKQLLELPVGLNMQDQTTTTVRSRANNAPGQGQAAYFANFTEVLGDHAAQGIKLLDTKLDQWAEETVARGGFHNVTALKIQYENYRNWLLDEDVAFAELFFDTEGKINFDIWNLIPFTRGSVHILSSDPYLWQYANDPKFFMNELDLLGQAAATKLGRELSSAGEMKKYYAGETIPGDNLPQDATVEQWEDYVMMNFRPNWHAVSTCSMMSRELGGVVDATAKVYGTQGLRVIDGSIPPTQVSSHVMTVFYGMALRIAESVLEDY

SEQ ID NO: 915 - protein, 577 aa, Aspergillus niger
GIEASLLKDPKEVAGRTYDYIIAGGGLTGLTVAARLTENPNITVLVIESGSYESDRGPIIEDLNAYGDIFGSSVDHAYETVELATNNRTALIRSGNGLGGSTLINGGTWTRPHKAQVDSWETVFGNEGWNWDSVAAYSLQAERARAPNAKQIAAGHYFNPSCHGLNGTVHAGPRDTGDDYSPIVKALMSAVEDRGVPTKKDLGCGDPHGVSMFPNTLHPDQVRSDAAREWLLPNYQRPNLQVLTGQYVGKVLLSQNATTPRAVGVEFGTHKGNTHNVYAKHEVLLAAGSAVSPTILEYSGIGMKSILEPLGIDTVVDLPVGLNLQDQTTSTVRSRITPAGAGQGQAAWFATFNETFGDYAEKAHELLNTKLEQWAEEAVARGGFHNTTALLIQYENYRDWIVKDNVAYSELFLDTAGVASFDVWDLLPFTRGYVHILDKDPYLRHFAYDPQYFLNELDLLGQAAATQLARNISNSGAMQTYFAGETIPGDNLAYDADLSAWVEYIPENFRPNYHGVGTCSMMPKEMGGVVDNAARVYGVQGLRVIDGSIPPTQMSSHVMTVFYAMALKIADAILADY

SEQ ID NO: 916 - protein, 577 aa, Aspergillus niger
GIEASLLKDPKEVAGRTYDYIIAGGGLTGLTVAARLTENPNITVLVIESGSYESDRGPIIEDLNAYGDIFGSSVDHAYETVELATNNQTALIRSGNGLGGSTLINGGTWTRPHKAQVDSWETVFGNEGWNWDSVAAYSLQAERARAPNAKQIAAGHYFNPSCHGINGTVHAGPRDTGDDYSPIVKALMSAVEDRGVPTKKDLGCGDPHGVSMFPNTLHPDQVRSDAAREWLLPNYQRPNLQVLTGQYVGKVLLSQNATTPRAVGVEFGTHKGNTHNVYAKHEVLLAAGSAVSPTILEYSGIGMKSILEPLGIDTVVDLPVGLNLQDQTTSTVRSRITPAGAGQGQAAWFATFNETFGDYAEKAHELLNTKLEQWAEEAVARGGFHNTTALLIQYENYRDWIVKDNVAYSELFLDTAGVASFDVWDLLPFTRGYVHILDKDPYLRHFAYDPQYFLNELDLLGQAAATQLARNISNSGAMQTYFAGETIPGDNLAYDADLRAWVEYIPENFRPNYHGVGTCSMMPKEMGGVVDNAARVYGVQGLRVIDGSIPPTQLSSHVMTVFYAMALKIADAILADY

SEQ ID NO: 917 - protein, 576 aa, Aspergillus niger
IEASLLKDPKAVAGRTYDYIIAGGGLAGLTVAEKLTENPNITVLVIESGSYESDRGPIIEDLNAYGEIFGTSVDHAYETVELAVDNRTALIRSGNGLGGSTLINGGTWTRPHKAQVDSWETVFGNEGWNWDSVAAYSLQAERARAPNAKQIAAGHYFNASCHGLNGTVHVGPRDTGDDYSPLMRALMSAVEDRGVPTKKDLGCGDPHGVSMFPNTLHEDQVRADAAREWLLPNYQRPNLQVLTGQYVGKVLLSQNATTPRAVGVEFGTHKSNTHNVYAKHEVLLSAGSTVSPTILEYSGIGMKSILEPLGIDTVVDLPVGLNLQDQTTSTVRSRITSAGAGQGQAAWFATFNETFGDYTEKAHELLNTKLEQWAEEAVARGGFHNTTALLIQYENYRDWIVKDNVAYSELFLDTGGVASFDVWDLLPFTRGYVHILDKDPYLRHFAYDPQYFLNELDLLGQAAATQLARNISNSGAMQTYFAGETIPGDNLAYDADLSAWVEYIPEHFRPNYHGVGTCSMMPKEMGGVVDNAARVYGVQGLRVIDGSIPPTQLSSHVMTVFYAMALKIADAVLADY

SEQ ID NO: 918 - protein, 502 aa, Talaromyces flavus
MVSVFLSTLLLAAATVQAYLPAQQIDVQSSLLSDPSKVAGKTYDYIIAGGGLTGLTVAAKLTENPKIKVLVIEKGFYESNDGAIIEDPNAYGQIFGTTVDQNYLTVPLINNRTNNIKAGKGLGGSTLINGDSWTRPDKVQIDSWEKVFGMEGWNWDSMFEYMKKAEAARAPTAAQLAAGHYFNATCHGTNGTVQSGARDNGQPWSPIMKALMNTVSALGVPVQQDFLCGHPRGVSMIMNNVDENQVRVDAARAWLLPSYQRPNLEILTGQMVGKVLFKQTASGPQAVGVNFGTNKAVNFDVFAKHEVLLAAGSAISPLILEYSGIGLKSVLDQANVTQLLDLPVGINMQDQTTTTVSSRASAAGAGQGQAVFFANFTETFGDYAPQARELLNTKLDQWAEETVARGGFHNVTALKVQYENYRNWLLDEDVAFAELFMDTEGKINFDLWDLIPFTRGSVHILSSDPYLWQFANDPKFFLNEFDLLGQAAASKLARDLTSQGAM

SEQ ID NO: 919 - protein, 579 aa, Aspergillus niger
HHGIEASLLTDPKEVAGRTVDYIIAGGGLTGLVVAARLTENPDITVLVIESGSYESDRGPIIEDLNAYGKIFGSSVDHAYETVCLATNNRTALIRAGNGLGGSTLVNGGTWTRPHKAQVDSWETVFGNEGWNWDSVAAYSLQAERARAPNAKQIAAGHYFNASCHGINGTVHAGPRDTGDDYSPIVKALMSAVEDRGVPTKKDLGCGDPHGVSMFPNTLHEDQVRSDAAREWLLPNYQRPNLQVLTGQYVGKVLLSQNATTPRAVGVEFGTHKGNFHNVTAKHEVLLAAGSAVSPTILEYSGIGMKSILEPLGIKTVVDLPVGLNLQDQTTSTVRSRITSAGAGQGQAAWFATFNETFGDYTEKAHELLNTKLEQWAEEAVARGGFHNTTALLIQYENYRDWIFKDNVAYSELFLDTAGEASFDVWDLLPFTRGYVHILDKDPYLRHFAYDPQYFLNELDLLGQAAATQLARNISNSGAMQTYFAGETIPGDNLAYDADLRAWVEYIPYHFRPNYHGVGTCSMMPKEMGGVVDNAARVYGVQGLRVIDGSIPPTQMSSHVMTVFYAMALKIADAVLADY

SEQ ID NO: 920 - protein, 601 aa, Penicillium amagasakiense
MVSVFLSTLLLSAAAVQAYLPAQQIDVQSSLLSDPSKVAGKTYDYIIAGGGLTGLTVAAKLTENPKIKVLVIEKGFYESNDGAIIEDPNAYGQIFGTTVDQNYLTVPLINNRTNNIKAGKGLGGSTLINGDSWTRPDKVQIDSWEKVFGMEGWNWDNMFEYMKKAEAARTPTAAQLAAGHSFNATCHGTNGTVQSGARDNGQPWSPIMKALMNTVSALGVPVQQDFLCGHPRGVSMIMNNLDENQVRVDAARAWLLPNYQRSNLEILTGQMVGKVLFKQTASGPQAVGVNFGTNKAVNFDVFAKHEVLLAAGSAISPLILEYSGIGLKSVLDQANVTQLLDLPVGINMQDQTTTTVSSRASSAGAGQGQAVFFANFTETFGDYAPQARDLLNTKLDQWAEETVARGGFHNVTALKVQYENYRNWLLDEDVAFAELFMDTEGKINFDLWDLIPFTRGSVHILSSDPYLWQFANDPKFFLNEFDLLGQAAASKLARDLTSQGAMKEYFAGETLPGYNLVQNATLSQWSDYVLQNFRPNWHAVSSCSMMSRELGGVVDATAKVYGTQGLRVIDGSIPPTQVSSHVMTIFYGMALKVADAILDDY

SEQ ID NO: 921 - protein, 601 aa, Penicillium adametzii
MVSVFLSTLLLSAATVQAYLPAQQIDVQSSLLSDPSKVAGKTYDYIIAGGGLTGLTVAAKLTENPKIKVLVIEKGFYESNDGAIIEDPNAYGQIFGTTVDQNYLTVPLINNRTNNIKAGKGLGGSTLINGDXWTRPDKVQIDSWEKVFGMEGWNWDNMFEYMKKAEAARTPTAAQVAAGHSFNATCHGTNGTVQSGARDNGQPWSPIMKALMNTVSALGVPVQQDFLCGHPRGVSMIMNNLDENQVRVDAARAWLLPNYQRPNLEILTGQMVGKVLFKQTASGPQAVGVNFGTNKAVNFDVFAKHEVLLAAGSAISPLILEYSGIGLKSVLDQANVTQLLDLPVGINMQDQTTTTVSSRASAAGAGQGQAVFXANFTETFGDYAPQARDLLNTKLDQWAEETVARGGFHNVTALKVQYENYRNWLLDEDVAFAELFMDTEGKINFDLWDLIPFTRGSVHILSSDPYLWQFANDPKFFLNEFDLLGQAAASKLARDLTSQGAMKEYFAGETLPGYNLVQNATLSQWSDYVLQNFRPNWHAVSSCSMMSRELGGVVDATAKVYGTQGLRVIDGSIPPTQVSSHVMTIFYGMALKVADAILDDY

SEQ ID NO: 922 - protein, 593 aa, Aspergillus niger
LVVSLAAALPHYIRSNGIEASLLTDPKEVAGRTVDYIIAGGGLTGLTTAARLTENPDITVLVIESGSYESDRGPIIEDLNAYGDIFGSSVDHAYETVELATNNQTALIRSGNGLGGSTLVNGGTWTRPHKAQVDSWETVFGNEGWNWDSVAAYSLQAERARAPNAKQIAAGHYFNASCHGINGTVHAGPRDTGDDYSPIVKALMSAVEDRGVPTKKDLGCGDPHGVSMFPNTLHEDQVRSDAAREWLLPNYQRPNLQVLTGQYVGKVLLSQNATTPRAVGVEFGTHKGNTHNVYAKHEVLLAAGSAVSPTILEYSGIGMKSILEPLGIDTVVDLPVGLNLQDQTTSTVRSRITSAGAGQGQAAWFATFNETFGDYAEKAHELLNTKLEQWAEEAVARGGFHNTTALLIQYENYRDWIVKDNVAYSELFLDTAGVASFDVWDLLPFTRGYVHILDKDPYLRHFAYDPQYFLNELDLLGQAAATQLARNISNSGAMQTYFAGETIPGDNLAYDADLSAWVEYIPYNFRPNYHGVGTCSMMPKEMGGVVDNAARVYGVQGLRVIDGSIPPTQMSSHVMTVFYAMALKIADAILADY

SEQ ID NO: 923 - protein, 592 aa, Aspergillus terreus
LLPLATVSAYLVSEQVNVQASLLTNPEDVADKKFDYIIAGGGLTGLTVAAKLTENPNIEVLVIEKGFYESNDGTIIEDPNAYGQIFGTTVDQNYLTVPLINNRTDNIKSGKGLGGSTLINGDXWTRPDKVQIDSWEKVFGNEGWNWDNVFKYMNQAERARAPNAAQVAAGHHFDPTCHGFNGTVHAGPRDNGQPWSPLMKALMNTTSALGVPTQVDFHCGHPRGVSMIPNNLLEDQVRADAAREWLLPNYRRKNLKVLTGQVVGKVIFDQDAPSLKAIGVNFGTNKAVNFNVYANHEVLLAAGSAISPLILEYSGIGLKSVLDKANVPQLLELPVGINMQDQTTTTVRARSTPAGFGQGQAVYXANFTETFGEDAPYAAELLNTKLDQWAEETVARGGSHNVTALKVQYENYRDWLLNEDVAYAELFLDTSGQINFDLWDLIPFTRGSTHILSSDPYLWQFANDPKFFFNELDLLGQAAASRLARTLQNSGAMANYFNGEIIPGSELPYEASLEQWAEYVKDNFRANWHAVGTCSMMSRDLGGVVDATAKVYDTQGLRVIDGSIPPTQVSSHVMTIFYGMALRIAESILEDY

SEQ ID NO: 924 - protein, 577 aa, Aspergillus niger
GIEASLLKDPKEVAGRTYDYIIAGGGLTGLTVAARLTENPNITVLVIESGSYESDRGPIIEDLNAYGDIFGSSVDHAYETVELPTNNRTALIRSGNGLGGSTLINGGTWTRPHKAQVDSWETVFGNEGWNWDSVAAYSLQAERARAPNAKQIAAGHYFNPSCHGLNGTVHAGPRDTGDDYSPIVKALMSAVEDRGVPTKKDLGCGDPHGVSMFPNTLHPDQVRSDAAREWLLPNYQRPNLQVLTGRYVGKVLLSQNATTPRAVGVEFGTHKGNTHNVYAKHEVLLAAGSAVSPTILEYSGIGMKSILEPLGIDTVVDLPVGLNLQDQTTSTVRSRITPAGAGQGQAAWFATFNETFGDYAEKAHELLNTKLEQWAEEAVARGGFHNTTALLIQYENYRDWIVKDNVAYSELFLDTAGVASFDVWDLLPFTRGYVHILDKDPYLRHFAYDPQYFLNELDLLGQAAATQLARNISNSGAMQTYFAGETIPGDNLAYDADLRAWVEYIPENFRPNYHGVGTCSMMPKEMGGVVDNAARVYGVQGLRVIDGSIPPTQLSSHVMTVFYAMALKIADAILADY

SEQ ID NO: 925 - protein, 577 aa, Aspergillus niger
GIEASLLKDPKEVAGRTYDYIIAGGGLTGLTVAARLTENPNITVLVIESGSYESDRGPIIEDLNAYGDIFGSSVDHAYETVELATNNQTALIRSGNGLGGSTLINGGTWTRPHKAQVDSWETVFGNEGWNWDSVAAYSLQAERARAPNAKQIAAGHYFNPSCHGINGTVHAGPRDTGDDYSPIVKALMSAVEDRGVPTKKDLGCGDPHGVSMFPNTLHPDQVRSDAAREWLLPNYQRPNLQVLTGQYVGKVLLSQNATTPRAVGVEFGTHKGNTHNVYAKHEVLLAAGSAVSPTILEYSGIGMKSILEPLGIDTVVDLPVGLNLQDQTTSTVRSRITSAGAGQGQAAWFATFNETFGDYAEKAHELLNTKLEQWAEEAVARGGFHNTTALLIQYENYRDWIVKDNVAYSELFLDTAGVASFDVWDLLPFTRGYVHILDKDPYLRHFAYDPQYFLNELDLLGQAAATQLARNISNSGAMQTYFAGETIPGDNLAYDADLRAWVEYIPENFRPNYHGVGTCSMMPKEMGGVVDNAARVYGVQGLRVIDGSIPPTQMSSHVMTVFYAMALKIADAILADY

SEQ ID NO: 926 - protein, 576 aa, Aspergillus niger
IEASLLTDPKEIAGCTVDYIIAGGGLTGLTTAARLTENPDITVLVIESGSYESDRGPIIEDLNAYGDIFGSSVDHAYETVELATNNQTALIRSGNGLGGSSLVNGGXWTRPHKAQVDSWETVFGNEGWNWDSVAAYSLQAERARAPNAKQIAAGHYFNASCHGINGTVHAGPRDTGDDYSPIVKALMSAVEDRGVPTKKDLGCGDPHGVSMFPNTLHEDQVRSDAAREWLLPNYQRPNLQVLTGQYVGKVLLSQNATTPRAIGVEFGTHKGNTHNVYAKHEVLLAAGSAVSPTILEYSGIGMKSILEPLGIDTVVDLPVGLNLQDQTTSTVRSRITSAGAGQGQAAWXATFNETLGDYAEKAHELLNTKLEQWAEEAVARGGFHNTTALLIQYENYRDWIVKDNVAYSELFLDTAGVASFGVWDLLPFTRGYVHILDKAPYLRHFAYDPQYFLNELDLLGQAAATQLARNISNSGAMQTYFAGETIPGDNLAYDADLSAWVEYIPYNFRPNYHGVGTCSMMPKEMGGVVDNAARVYGVQGQRVIDGSIPPTQMSSHVMTVFYAMALKIADAILADY

SEQ ID NO: 927 - protein, 576 aa, Aspergillus niger
IEASLLKDPKLVNGDTYDYIIAGGGLAGLTVAEKLTENPDITVLVIESGSYESDRGPIIEDLNAYGEIFGTSVDHAYETVELAVDNRTALIRSGNGLGGSTLINGGTWTRPHKAQVDSWETVFGNEGWNWDSVAAYSLQAERARAPNAKQIAAGHYFNASCHGLNGTVHVGPRDTGDDYSPLMRALMSAVEDRGVPTKKDLGCGDPHGVSMFPNTLHEDQVRADAAREWLLPNYQRPNLQVLTGQYVGKVLLSQNATTPRAVGVEFGTHKSNTHNVYAKHEVLLSAGSTVSPTILEYSGIGMKSILEPLGIDTVVDLPVGLNLQDQTTSTVRSRITSAGAGQGQAAWFATFNETFGDYTEKAHELLNTKLEQWAEEAVARGGFHNTTALLIQYENYRDWIVKDNVAYSELFLDTGGVASFDVWDLLPFTRGYVHILDKDPYLRHFAYDPQYFLNELDLLGQAAATQLARNISNSGAMQTYFAGETIPGDNLAYDADLSAWVEYIPEHFRPNYHGVGTCSMMPKEMGGVVDNAARVYGVQGLRVIDGSIPPTQLSSHVMTVFYAMALKIADAVLADY

SEQ ID NO: 928 - protein, 601 aa, Penicillium amagasakiense
MVSVFLSTLLLSAAAVQAYLPAQQIDVQSSLLSDPSKVAGKTYDYIIAGGGLTGLTVAAKLTENPKIKVLVIEKGFYESNDGAIIEDPNAYGQIFGTTVDQNYLTVPLINNRTNNIKAGKGLGGSTLINGDSWTRPDKVQIDSWEKVFGMEGWNWDNMFGYMKKAEAARTPTAAQLAAGHSFNATCHGTNGTVQSGARDNGQPWSPIMKALMNTVSALGVPVQQDFLCGHPRGVSMIMNNLDENQVRVDAARAWLLPNYQRSNLEILTGQMVGKVLFKQTASGPQAVGVNFGTNKAVNFDVFAKHEVLLAAGSAISPLILEYSGIGLKSVLDQANVTQLLDLPVGINMQDQTTTTVSSRASSAGAGQGQAVFFANFTETFGDYAPQARDLLNTKLDQWAEETVARGGFHNVTALKVQYENYRNWLLDEDVAFAELFMDTEGKINFDLWDLIPFTRGSVHILSSDPYLWQFANDPKFFLNEFDLLGQAAASKLARDLTSQGAMKEYFAGETLPGYNLVQNATLSQWSDYVLQNFRPNWHAVSSCSMMSRELGGVVDATAKVYGTQGLRVIDGSIPPTQVSSHVMTIFYGMALKVADAILDDY

SEQ ID NO: 929 - protein, 597 aa, Aspergillus niger
LVSSLVVSLAAALPHYIRSNGIEASLLTDPKEVAGRTVDYIIAGGGLTGLTTAARLTENPDITVLVIESGSCESDRGPIIEDLNAYGDIFGSSVDHAYETVELATNNQTALIRSGNGLGGSTLVNGGTWTRPHKAQVDSWETVFGNEGWNWDSVAAYSLQAERARAPNAKQIAAGHYFNASCHGINGTVHAGPRDTGDDYSPIVKALMSAVEDRGVPTKKDLGCGDPHGVSMFPNTLHEDQVRSDAAREWLLPNYQRPNLQVLTGQYVGKVLLSKNATTPRAVGVEFGTHKGNTHNVYAKHEVLLAAGSAVSPTILEYSGIGMKSILEPLGIDTVVDLPVGLNLQDQTTSTVRSRITSAGAGQGQAAWFATFNETFGDYAEKAHELLNTKLEQWAEEAVARGGFHNTTALLIQYENYRDWIVKDNVAYSELFLDTAGVASFDVWDLLPFTRGYVHILDKDPYLRHFAYDPQYFLNELDLLGQAAATQLARNISNSGAMQTYFAGETIPGDNLAYDADLSAWVEYIPYNFRPNYHGVGTCSMMPKEMGGVVDNAARVYGVQGLRVIDGSIPPTQMSSHVMTVFYAMALKIADAILADY

SEQ ID NO: 930 - protein, 600 aa, Penicillium chrysogenum
MKSTIITSILFSVAAVQAYSPAEQIDVQSHLLSDPTKVEGETYDYVIAGGGLTGLTVAAKLSENPKIKVLVIEKGFYESNDGPIIEDPNAYGEIFGTSVDQNYLTVPLINNRTGEIKSGLGLGGSTLINGDXWTRPDKVQIDSWEKVFGMEGWNWDNVFQYMQKAERSRPPTAAQIEAGHFYDPACHGTDGTVHAGPRDNGKPWSPLMRALMNTVSAFGVPVQKDFHCGHPRGVSMIPNNLHENQIRADAAREWLLPNYQRDNLQILTGQKVGKVLFNQTASGPKAVGVNFGTNKAVNFNVYAKQEVLLAAGSAISPLILEYSGIGIKSVLDKAGVKQLLELPVGLNMQDQTTTTVRSRANNAPGQGQAAYXANFTEVLGDHAAQGIKLLDTKLDQWAEETVARGGFHNVTALKIQYENYRNWLLDEDVAFAELFFDTEGKINFDIWNLIPFTRGSVHILSSDPYLWQYANDPKFFMNELDLLGQAAATKLGRELSSAGEMKKYYAGETIPGDNLPQDATVEQWEDYVMMNFRPNWHAVSTCSMMSRELGGVVDATAKVYGTQGLRVIDGSIPPTQVSSHVMTVFYGMALRIAESVLEDY

SEQ ID NO: 931 - protein, 592 aa, Aspergillus terreus
LLPLATVCAYLVSEQVDVQASLLTNPEEVADKNFDYIIAGGGLTGLTVAAKLTENPNIEVLVIEKGFYESNDGPIIEDPNAYGQIFGTTVDQNYLTVPLINNRTDNIKSGKGLGGSTLINGDXWTRPDKVQIDSWETVFGNEGWNWDNVFKYMNQAERARAPNATQIAAGHHFDPACHGFNGTVHAGPRDNGQRWSPLMKALMNTTSALGVPTQVDFHCGHPRGVSMIPNNLLEDQVRADAAHEWLLPNYRRKNLKVLTGQLVGKVIFDQDAPGLKAIGVNFGTNKAVNFNVYANHEVLLAAGSAISPLILEYSGIGLRSVLEKANVPQLLELPVGINMQDQTTTTVRARSTPAGFGQGQAVYXANFTETFEEDAPYAAELLKTQLDQWAEETVARGGFHNVTALKVQYENYRDWLLNEDVAYAELFLDTSGQINFDLWDLIPFTRGSTHILSSDPYLWQFANDPKFFFNELDLLGQAAASRLARKLQNSGAMANYFDGEIIPGSELPNEASLEQWAEYVKDNFRANWHAVGTCSMMSKDLGGVVDASAKVYDTQRLRVIDGSIPPTQVSSHVMTIFYGMALRIAESILEDY

SEQ ID NO: 932 - protein, 577 aa, Aspergillus niger
GIEASLLKDPKEVAGRTYDYIIAGGGLTGLTVAAKLTENPNITVLVIESGSYESDRGPIIEDLNAYGDIFGSSVDHAYETVELATNNRTALIRSGNGLGGSTLINGGTWTRPHKAQVDSWETVFGNEGWNWDSVAAYSLQAERARAPNAKQIAAGHYFNPSCHGLNGTVHAGPRDTGDDYSPIVKALMSAVEDRGVPTKKDLGCGDPHGVSMFPNTLHPDQVRSDAAREWLLPNYQRPNLQVLTGQYVGKVLLSQNATTPRAVGVEFGTHKGNTHNVYAKHEVLLAAGSAVSPTILEYSGIGMKSILEPLGIDTVVDLPVGLNLQDQTTSTVRSRITSAGAGQGQAAWFATFNETFGDYAEKAHELLNTKLEQWAEEAVARGGFHNTTALLIQYENYRDWIVKDNVAYSELFLDTAGVASFDVWDLLPFTRGYVHILDKDPYLRHFAYDPQYFLNELDLLGQAAATQLARNISNSGAMQTYFAGETIPGDNLAYDADLSAWVEYIPENFRPNYHGVGTCSMMPKEMGGVVDNAARVYGVQGLRVIDGSIPPTQMSSHVMTVFYAMALKIADAILADY

SEQ ID NO: 933 - protein, 577 aa, Aspergillus niger
GIEASLLKDPKEVAGRTYDYIIAGGGLTGLTVAARLTENPNITVLVIESGSYESDRGPIIEDLNAYGDIFGSSVDHAYETVELATNNRTALIRSGNGLGGSTLINGGTWTRPHKAQVDSWETVFGNEGWNWDSVAAYSLQAERARAPNAKQIAAGHYFNPSCHGLNGTVHAGPRDTGDDYSPIVKALMSAVEDRGVPTKKDLGCGDPHGVSMFPNTLHEDQVRSDAAREWLLPNYQRPNLQVLTGQYVGKVLLSQNATTPRAVGVEFGTHKGNTHNVYAKHEVLLAAGSAVSPTILEYSGIGMKSILEPLGIDTVVDLPVGLNLQDQTTSTVRSRITSAGAGQGQAAWFATFNETFGDYAEKAHELLNTKLEQWAEEAVARGGFHNTTALLIQYENYRDWIVKDNVAYSELFLDTAGVASFDVWDLLPFTRGYVHILDKDPYLRHFAYDPQYFLNELDLLGQAAATQLARNISNSGAMQTYFAGETIPGDNLAYDADLSAWVEYIPENFRPNYHGVGTCSMMPKEMGGVVDNAARVYGVQGLRVIDGSIPPTQMSSHVMTVFYAMALKIADAILADY

SEQ ID NO: 934 - protein, 577 aa, Aspergillus niger
GIEASLLKDPKEVAGRTYDYIIAGGGLTGLTVAARLTENPNITVLVIESGSYESDRGPIIEDLNAYGDIFGSSVDHAYETVELATNNRTALIRSGNGLGGSTLINGGTWTRPHKAQVDSWETVFGNEGWNWDSVAAYSLQAERARAPNAKQIAAGHYFNASCHGINGTVHAGPRDTGDDYSPIVKALMSAVEDRGVPTKKDLGCGDPHGVSMFPNTLHPDQVRSDAAREWLLPNYQRPNLQVLTGQYVGKVLLSQNATTPRAVGVEFGTHKGNTHNVYAKHEVLLAAGSAVSPTILEYSGIGMKSILEPLGIDTVVDLPVGLNLQDQTTSTVRSRITSAGAGQGQAAWFATFNETFGDYAEKAHELLNTKLEQWAEEAVARGGFHNTTALLIQYENYRDWIVKDNVAYSELFLDTAGVASFDVWDLLPFTRGYVHILDKDPYLRHFAYDPQYFLNELDLLGQAAATQLARNISNSGAMQTYFAGETIPGDNLAYDADLSAWVEYIPENFRPNYHGVGTCSMMPKEMGGVVDNAARVYGVQGLRVIDGSIPPTQMSSHVMTVFYAMALKIADAILADY

SEQ ID NO: 935 - protein, 577 aa, Aspergillus niger
GIEASLLKDPKEVAGRTYDYIIAGGGLTGLTVAARLTENPNITVLVIESGSYESDRGPIIEDLNAYGDIFGSSVDHAYETVELATNNQTALIRSGNGLGGSTLINGGTWTRPHKAQVDSWETVFGNEGWNWDSVAAYSLQAERARAPNAKQIAAGHYFNPSCHGLNGTVHAGPRDTGDDYSPIVKALMSAVEDRGVPTKKDLGCGDPHGVSMFPNTLHPDQVRSDAAREWLLPNYQRPNLQVLTGRYVGKVLLSQNATTPRAVGVEFGTHKGNTHNVYAKHEVLLAAGSAVSPTILEYSGIGMKSILEPLGIDTVVDLPVGLNLQDQTTSTVRSRITPAGAGQGQAAWFATFNETFGDYAEKAHELLNTKLEQWAEEAVARGGFHNTTALLIQYENYRDWIVKDNVAYSELFLDTAGVASFDVWDLLPFTRGYVHILDKDPYLRHFAYDPQYFLNELDLLGQAAATQLARNISNSGAMQTYFAGETIPGDNLAYDADLSAWVEYIPENFRPNYHGVGTCSMMPKEMGGVVDNAARVYGVQGLRVIDGSIPPTQMSSHVMTVFYAMALKIADAILADY

SEQ ID NO: 936 - protein, 577 aa, Aspergillus niger
GIEASLLKDPKEVAGRTYDYIIAGGGLTGLTVAARLTENPNITVLVIESGSYESDRGPIIEDLNAYGDIFGSSVDHAYETVELATNNQTALIRSGNGLGGSTLINGGTWTRPHKAQVDSWETVFGNEGWNWDSVAAYSLQAERARAPNAKQIAAGHYFNASCHGINGTVHAGPRDTGDDYSPIVKALMSAVEDRGVPTKKDLGCGDPHGVSMFPNTLHPDQVRSDAAREWLLPNYQRPNLQVLTGQYVGKVLLSQNATTPRAVGVEFGTHKGNTHNVYAKHEVLLAAGSAVSPTILEYSGIGMKSILEPLGIDTVVDLPVGLNLQDQTTSTVRSRITSAGAGQGQAAWFATFNETFGDYAEKAHELLNTKLEQWAEEAVARGGFHNTTALLIQYENYRDWIVKDNVAYSELFLDTAGVASFDVWDLLPFTRGYVHILDKDPYLRHFAYDPQYFLNELDLLGQAAATQLARNISNSGAMQTYFAGETIPGDNLAYDADLRAWVEYIPENFRPNYHGVGTCSMMPKEMGGVVDNAARVYGVQGLRVIDGSIPPTQMSSHVMTVFYAMALKIADAILADY

SEQ ID NO: 937 - protein, 577 aa, Aspergillus niger
GIEASLLKDPKEVAGRTYDYIIAGGGLTGLTVAARLTENPNITVLVIESGSYESDRGPIIEDLNAYGDIFGSSVDHAYETVELATNNQTALIRSGNGLGGSTLINGGTWTRPHKAQVDSWETVFGNEGWNWDSVAAYSLQAERARAPNAKQIAAGHYFNASCHGINGTVHAGPRDTGDDYSPIVKALMSAVEDRGVPTKKDLGCGDPHGVSMFPNTLHEDQVRSDAAREWLLPNYQRPNLQVLTGQYVGKVLLSQNATTPRAVGVEFGTHKGNTHNVYAKHEVLLAAGSAVSPTILEYSGIGMKSILEPLGIDTVVDLPVGLNLQDQTTSTVRSRITPAGAGQGQAAWFATFNETFGDYAEKAHELLNTKLEQWAEEAVARGGFHNTTALLIQYENYRDWIVKDNVAYSELFLDTAGVASFDVWDLLPFTRGYVHILDKDPYLRHFAYDPQYFLNELDLLGQAAATQLARNISNSGAMQTYFAGETIPGDNLAYDADLRAWVEYIPENFRPNYHGVGTCSMMPKEMGGVVDNAARVYGVQGLRVIDGSIPPTQMSSHVMTVFYAMALKIADAILADY

SEQ ID NO: 938 - protein, 577 aa, Aspergillus niger
GIEASLLKDPKEVAGRTYDYIIAGGGLTGLTVAARLTENPNITVLVIESGSYESDRGPIIEDLNAYGDIFGSSVDHAYETVELATNNRTALIRSGNGLGGSTLINGGTWTRPHKAQVDSWETVFGNEGWNWDSVAAYSLQAERARAPNAKQIAAGHYFNASCHGINGTVHAGPRDTGDDYSPIVKALMSAVEDRGVPTKKDLGCGDPHGVSMFPNTLHEDQVRSDAAREWLLPNYQRPNLQVLTGQYVGKVLLSQNATTPRAVGVEFGTHKGNTHNVYAKHEVLLAAGSAVSPTILEYSGIGMKSILEPLGIDTVVDLPVGLNLQDQTTSTVRSRITPAGAGQGQAAWFATFNETFGDYAEKAHELLNTKLEQWAEEAVARGGFHNTTALLIQYENYRDWIVKDNVAYSELFLDTAGVASFDVWDLLPFTRGYVHILDKDPYLRHFAYDPQYFLNELDLLGQAAATQLARNISNSGAMQTYFAGETIPGDNLAYDADLSAWVEYIPENFRPNYHGVGTCSMMPKEMGGVVDNAARVYGVQGLRVIDGSIPPTQMSSHVMTVFYAMALKIADAILADY

SEQ ID NO: 939 - protein, 577 aa, Aspergillus niger
GIEASLLKDPKEVAGRTYDYIIAGGGLTGLTVAARLTENPNITVLVIESGSYESDRGPIIEDLNAYGDIFGSSVDHAYETVELATNNQTALIRSGNGLGGSTLINGGTWTRPHKAQVDSWETVFGNEGWNWDSVAAYSLQAERARAPNAKQIAAGHYFNASCHGINGTVHAGPRDTGDDYSPIVKALMSAVEDRGVPTKKDLGCGDPHGVSMFPNTLHPDQVRSDAAREWLLPNYQRPNLQVLTGQYVGKVLLSQNATTPRAVGVEFGTHKGNTHNVYAKHEVLLAAGSAVSPTILEYSGIGMKSILEPLGIDTVVDLPVGLNLQDQTTSTVRSRITPAGAGQGQAAWFATFNETFGDYAEKAHELLNTKLEQWAEEAVARGGFHNTTALLIQYENYRDWIVKDNVAYSELFLDTAGVASFDVWDLLPFTRGYVHILDKDPYLRHFAYDPQYFLNELDLLGQAAATQLARNISNSGAMQTYFAGETIPGDNLAYDADLSAWVEYIPENFRPNYHGVGTCSMMPKEMGGVVDNAARVYGVQGLRVIDGSIPPTQMSSHVMTVFYAMALKIADAILADY

SEQ ID NO: 940 - protein, 577 aa, Aspergillus niger
GIEASLLKDPKEVAGRTYDYIIAGGGLTGLTVAARLTENPNITVLVIESGSYESDRGPIIEDLNAYGDIFGSSVDHAYETVELATNNRTALIRSGNGLGGSTLINGGTWTRPHKAQVDSWETVFGNEGWNWDSVAAYSLQAERARAPNAKQIAAGHYFNPSCHGINGTVHAGPRDTGDDYSPIVKALMSAVEDRGVPTKKDLGCGDPHGVSMFPNTLHEDQVRSDAAREWLLPNYQRPNLQVLTGQYVGKVLLSQNATTPRAVGVEFGTHKGNTHNVYAKHEVLLAAGSAVSPTILEYSGIGMKSILEPLGIDTVVDLPVGLNLQDQTTSTVRSRITSAGAGQGQAAWFATFNETFGDYAEKAHELLNTKLEQWAEEAVARGGFHNTTALLIQYENYRDWIVKDNVAYSELFLDTAGVASFDVWDLLPFTRGYVHILDKDPYLRHFAYDPQYFLNELDLLGQAAATQLARNISNSGAMQTYFAGETIPGDNLAYDADLSAWVEYIPENFRPNYHGVGTCSMMPKEMGGVVDNAARVYGVQGLRVIDGSIPPTQMSSHVMTVFYAMALKIADAILADY

SEQ ID NO: 941 - protein, 577 aa, Aspergillus niger
GIEASLLKDPKEVAGRTYDYIIAGGGLTGLTVAARLTENPNITVLVIESGSYESDRGPIIEDLNAYGDIFGSSVDHAYETVELATNNQTALIRSGNGLGGSTLINGGTWTRPHKAQVDSWETVFGNEGWNWDSVAAYSLQAERARAPNAKQIAAGHYFNPSCHGINGTVHAGPRDTGDDYSPIVKALMSAVEDRGVPTKKDLGCGDPHGVSMFPNTLHPDQVRSDAAREWLLPNYQRPNLQVLTGQYVGKVLLSQNATTPRAVGVEFGTHKGNTHNVYAKHEVLLAAGSAVSPTILEYSGIGMKSILEPLGIDTVVDLPVGLNLQDQTTSTVRSRITSAGAGQGQAAWFATFNETFGDYAEKAHELLNTKLEQWAEEAVARGGFHNTTALLIQYENYRDWIVKDNVAYSELFLDTAGVASFDVWDLLPFTRGYVHILDKDPYLRHFAYDPQYFLNELDLLGQAAATQLARNISNSGAMQTYFAGETIPGDNLAYDADLSAWVEYIPENFRPNYHGVGTCSMMPKEMGGVVDNAARVYGVQGLRVIDGSIPPTQMSSHVMTVFYAMALKIADAILADY

SEQ ID NO: 942 - protein, 577 aa, Aspergillus niger
GIEASLLKDPKEVAGRTYDYIIAGGGLTGLTVAARLTENPNITVLVIESGSYESDRGPIIEDLNAYGDIFGSSVDHAYETVELATNNQTALIRSGNGLGGSTLINGGTWTRPHKAQVDSWETVFGNEGWNWDSVAAYSLQAERARAPNAKQIAAGHYFNPSCHGLNGTVHAGPRDTGDDYSPIVKALMSAVEDRGVPTKKDLGCGDPHGVSMFPNTLHPDQVRSDAAREWLLPNYQRPNLQVLTGQYVGKVLLSQNATTPRAVGVEFGTHKGNTHNVYAKHEVLLAAGSAVSPTILEYSGIGMKSILEPLGIDTVVDLPVGLNLQDQTTSTVRSRITSAGAGQGQAAWFATFNETFGDYTEKAHELLNTKLEQWAEEAVARGGFHNTTALLIQYENYRDWIVKDNVAYSELFLDTAGVASFDVWDLLPFTRGYVHILDKDPYLRHFAYDPQYFLNELDLLGQAAATQLARNISNSGAMQTYFAGETIPGDNLAYDADLRAWVEYIPENFRPNYHGVGTCSMMPKEMGGVVDNAARVYGVQGLRVIDGSIPPTQMSSHVMTVFYAMALKIADAILADY

SEQ ID NO: 943 - protein, 577 aa, Aspergillus niger
GIEASLLKDPKEVAGRTYDYIIAGGGLTGLTVAARLTENPNITVLVIESGSYESDRGPIIEDLNAYGDIFGSSVDHAYETVELATNNRTALIRSGNGLGGSTLINGGTWTRPHKAQVDSWETVFGNEGWNWDSVAAYSLQAERARAPNAKQIAAGHYFNPSCHGLNGTVHAGPRDTGDDYSPIVKALMSAVEDRGVPTKKDLGCGDPHGVSMFPNTLHEDQVRSDAAREWLLPNYQRPNLQVLTGQYVGKVLLSQNATTPRAVGVEFGTHKGNTHNVYAKHEVLLAAGSAVSPTILEYSGIGMKSILEPLGIDTVVDLPVGLNLQDQTTSTVRSRITPAGAGQGQAAWFATFNETFGDYAEKAHELLNTKLEQWAEEAVARGGFHNTTALLIQYENYRDWIVKDNVAYSELFLDTAGVASFDVWDLLPFTRGYVHILDKDPYLRHFAYDPQYFLNELDLLGQAAATQLARNISNSGAMQTYFAGETIPGDNLAYDADLSAWVEYIPENFRPNYHGVGTCSMMPKEMGGVVDNAARVYGVQGLRVIDGSIPPTQMSSHVMTVFYAMALKIADAVLADY

SEQ ID NO: 944 - protein, 577 aa, Aspergillus niger
GIEASLLKDPKEVAGRTYDYIIAGGGLTGLTVAARLTENPNITVLVIESGSYESDRGPIIEDLNAYGDIFGSSVDHAYETVELATNNRTALIRSGNGLGGSTLINGGTWTRPHKAQVDSWETVFGNEGWNWDSVAAYSLQAERARAPNAKQIAAGHYFNASCHGINGTVHAGPRDTGDDYSPIVKALMSAVEDRGVPTKKDLGCGDPHGVSMFPNTLHEDQVRSDAAREWLLPNYQRPNLQVLTGQYVGKVLLSQNATTPRAVGVEFGTHKGNTHNVYAKHEVLLAAGSAVSPTILEYSGIGMKSILEPLGIDTVVDLPVGLNLQDQTTSTVRSRITSAGAGQGQAAWFATFNETFGDYAEKAHELLNTKLEQWAEEAVARGGFHNTTALLIQYENYRDWIVKDNVAYSELFLDTAGVASFDVWDLLPFTRGYVHILDKDPYLRHFAYDPQYFLNELDLLGQAAATQLARNISNSGAMQTYFAGETIPGDNLAYDADLRAWVEYIPENFRPNYHGVGTCSMMPKEMGGVVDNAARVYGVQGLRVIDGSIPPTQMSSHVMTVFYAMALKIADAILADY

SEQ ID NO: 945 - protein, 577 aa, Aspergillus niger
GIEASLLKDPKEVAGRTYDYIIAGGGLTGLTVAARLTENPNITVLVIESGSYESDRGPIIEDLNAYGDIFGSSVDHAYETVELPTNNRTALIRSGNGLGGSTLINGGTWTRPHKAQVDSWETVFGNEGWNWDSVAAYSLQAERARAPNAKQIAAGHYFNPSCHGLNGTVHAGPRDTGDDYSPIVKALMSAVEDRGVPTKKDLGCGDPHGVSMFPNTLHEDQVRSDAAREWLLPNYQRPNLQVLTGQYVGKVLLSQNATTPRAVGVEFGTHKGNTHNVYAKHEVLLAAGSAVSPTILEYSGIGMKSILEPLGIDTVVDLPVGLNLQDQTTSTVRSRITPAGAGQGQAAWFATFNETFGDYAEKAHELLNTKLEQWAEEAVARGGFHNTTALLIQYENYRDWIVKDNVAYSELFLDTAGVASFDVWDLLPFTRGYVHILDKDPYLRHFAYDPQYFLNELDLLGQAAATQLARNISNSGAMQTYFAGETIPGDNLAYDADLSAWVEYIPENFRPNYHGVGTCSMMPKEMGGVVDNAARVYGVQGLRVIDGSIPPTQMSSHVMTVFYAMALKIADAILADY

SEQ ID NO: 946 - protein, 577 aa, Aspergillus niger
GIEASLLKDPKEVAGRTYDYIIAGGGLTGLTVAARLTENPNITVLVIESGSYESDRGPIIEDLNAYGDIFGSSVDHAYETVELATNNQTALIRSGNGLGGSTLINGGTWTRPHKAQVDSWETVFGNEGWNWDSVAAYSLQAERARAPNAKQIAAGHYFNPSCHGINGTVHAGPRDTGDDYSPIVKALMSAVEDRGVPTKKDLGCGDPHGVSMFPNTLHEDQVRSDAAREWLLPNYQRPNLQVLTGQYVGKVLLSQNATTPRAVGVEFGTHKGNTHNVYAKHEVLLAAGSAVSPTILEYSGIGMKSILEPLGIDTVVDLPVGLNLQDQTTSTVRSRITPAGAGQGQAAWFATFNETFGDYAEKAHELLNTKLEQWAEEAVARGGFHNTTALLIQYENYRDWIVKDNVAYSELFLDTAGVASFDVWDLLPFTRGYVHILDKDPYLRHFAYDPQYFLNELDLLGQAAATQLARNISNSGAMQTYFAGETIPGDNLAYDADLSAWVEYIPENFRPNYHGVGTCSMMPKEMGGVVDNAARVYGVQGLRVIDGSIPPTQMSSHVMTVFYAMALKIADAILADY

SEQ ID NO: 947 - protein, 577 aa, Aspergillus niger
GIEASLLKDPKEVAGRTYDYIIAGGGLTGLTVAARLTENPNITVLVIESGSYESDRGPIIEDLNAYGDIFGSSVDHAYETVELATNNQTALIRSGNGLGGSTLINGGTWTRPHKAQVDSWETVFGNEGWNWDSVAAYSLQAERARAPNAKQIAAGHYFNPSCHGLNGTVHAGPRDTGDDYSPIVKALMSAVEDRGVPTKKDLGCGDPHGVSMFPNTLHEDQVRSDAAREWLLPNYQRPNLQVLTGQYVGKVLLSQNATTPRAVGVEFGTHKGNTHNVYAKHEVLLAAGSAVSPTILEYSGIGMKSILEPLGIDTVVDLPVGLNLQDQTTSTVRSRITPAGAGQGQAAWFATFNETFGDYAEKAHELLNTKLEQWAEEAVARGGFHNTTALLIQYENYRDWIVKDNVAYSELFLDTAGVASFDVWDLLPFTRGYVHILDKDPYLRHFAYDPQYFLNELDLLGQAAATQLARNISNSGAMQTYFAGETIPGDNLAYDADLRAWVEYIPENFRPNYHGVGTCSMMPKEMGGVVDNAARVYGVQGLRVIDGSIPPTQLSSHVMTVFYAMALKIADAVLADY

SEQ ID NO: 948 - protein, 577 aa, Aspergillus niger
GIEASLLKDPKEVAGRTYDYIIAGGGLTGLTVAARLTENPNITVLVIESGSYESDRGPIIEDLNAYGDIFGSSVDHAYETVELPTNNRTALIRSGNGLGGSTLINGGTWTRPHKAQVDSWETVFGNEGWNWDSVAAYSLQAERARAPNAKQIAAGHYFNASCHGLNGTVHAGPRDTGDDYSPIVKALMSAVEDRGVPTKKDLGCGDPHGVSMFPNTLHEDQVRSDAAREWLLPNYQRPNLQVLTGQYVGKVLLSQNATTPRAVGVEFGTHKGNTHNVYAKHEVLLAAGSAVSPTILEYSGIGMKSILEPLGIDTVVDLPVGLNLQDQTTSTVRSRITPAGAGQGQAAWFATFNETFGDYAEKAHELLNTKLEQWAEEAVARGGFHNTTALLIQYENYRDWIVKDNVAYSELFLDTAGVASFDVWDLLPFTRGYVHILDKDPYLRHFAYDPQYFLNELDLLGQAAATQLARNISNSGAMQTYFAGETIPGDNLAYDADLRAWVEYIPENFRPNYHGVGTCSMMPKEMGGVVDNAARVYGVQGLRVIDGSIPPTQLSSHVMTVFYAMALKIADAILADY

SEQ ID NO: 949 - protein, 577 aa, Aspergillus niger
GIEASLLKDPKEVAGRTYDYIIAGGGLTGLTVAAKLTENPNITVLVIESGSYESDRGPIIEDLNAYGDIFGSSVDHAYETVELATNNRTALIRSGNGLGGSTLINGGTWTRPHKAQVDSWETVFGNEGWNWDSVAAYSLQAERARAPNAKQIAAGHYFNPSCHGLNGTVHAGPRDTGDDYSPIVKALMSAVEDRGVPTKKDLGCGDPHGVSMFPNTLHPDQVRSDAAREWLLPNYQRPNLQVLTGRYVGKVLLSQNATTPRAVGVEFGTHKGNTHNVYAKHEVLLAAGSAVSPTILEYSGIGMKSILEPLGIDTVVDLPVGLNLQDQTTSTVRSRITPAGAGQGQAAWFATFNETFGDYAEKAHELLNTKLEQWAEEAVARGGFHNTTALLIQYENYRDWIVKDNVAYSELFLDTAGVASFDVWDLLPFTRGYVHILDKDPYLRHFAYDPQYFLNELDLLGQAAATQLARNISNSGAMQTYFAGETIPGDNLAYDADLSAWVEYIPENFRPNYHGVGTCSMMPKEMGGVVDNAARVYGVQGLRVIDGSIPPTQMSSHVMTVFYAMALKIADAILADY

SEQ ID NO: 950 - protein, 577 aa, Aspergillus niger
GIEASLLKDPKEVAGRTYDYIIAGGGLTGLTVAARLTENPNITVLVIESGSYESDRGPIIEDLNAYGDIFGSSVDHAYETVELATNNQTALIRSGNGLGGSTLINGGTWTRPHKAQVDSWETVFGNEGWNWDSVAAYSLQAERARAPNAKQIAAGHYFNPSCHGINGTVHAGPRDTGDDYSPIVKALMSAVEDRGVPTKKDLGCGDPHGVSMFPNTLHPDQVRSDAAREWLLPNYQRPNLQVLTGQYVGKVLLSQNATTPRAVGVEFGTHKGNTHNVYAKHEVLLAAGSAVSPTILEYSGIGMKSILEPLGIDTVVDLPVGLNLQDQTTSTVRSRITSAGAGQGQAAWFATFNETFGDYTEKAHELLNTKLEQWAEEAVARGGFHNTTALLIQYENYRDWIVKDNVAYSELFLDTAGVASFDVWDLLPFTRGYVHILDKDPYLRHFAYDPQYFLNELDLLGQAAATQLARNISNSGAMQTYFAGETIPGDNLAYDADLRAWVEYIPENFRPNYHGVGTCSMMPKEMGGVVDNAARVYGVQGLRVIDGSIPPTQLSSHVMTVFYAMALKIADAILADY

SEQ ID NO: 951 - protein, 577 aa, Aspergillus niger
GIEASLLKDPKEVAGRTYDYIIAGGGLTGLTVAARLTENPNITVLVIESGSYESDRGPIIEDLNAYGDIFGSSVDHAYETVELATNNQTALIRSGNGLGGSTLINGGTWTRPHKAQVDSWETVFGNEGWNWDSVAAYSLQAERARAPNAKQIAAGHYFNPSCHGINGTVHAGPRDTGDDYSPIVKALMSAVEDRGVPTKKDLGCGDPHGVSMFPNTLHEDQVRSDAAREWLLPNYQRPNLQVLTGQYVGKVLLSQNATTPRAVGVEFGTHKGNTHNVYAKHEVLLAAGSAVSPTILEYSGIGMKSILEPLGIDTVVDLPVGLNLQDQTTSTVRSRITSAGAGQGQAAWFATFNETFGDYAEKAHELLNTKLEQWAEEAVARGGFHNTTALLIQYENYRDWIVKDNVAYSELFLDTAGVASFDVWDLLPFTRGYVHILDKDPYLRHFAYDPQYFLNELDLLGQAAATQLARNISNSGAMQTYFAGETIPGDNLAYDADLRAWVEYIPENFRPNYHGVGTCSMMPKEMGGVVDNAARVYGVQGLRVIDGSIPPTQMSSHVMTVFYAMALKIADAILADY

SEQ ID NO: 952 - protein, 577 aa, Aspergillus niger
GIEASLLKDPKEVAGRTYDYIIAGGGLTGLTVAARLTENPNITVLVIESGSYESDRGPIIEDLNAYGDIFGSSVDHAYETVELATNNRTALIRSGNGLGGSTLINGGTWTRPHKAQVDSWETVFGNEGWNWDSVAAYSLQAERARAPNAKQIAAGHYFNPSCHGINGTVHAGPRDTGDDYSPIVKALMSAVEDRGVPTKKDLGCGDPHGVSMFPNTLHPDQVRSDAAREWLLPNYQRPNLQVLTGRYVGKVLLSQNATTPRAVGVEFGTHKGNTHNVYAKHEVLLAAGSAVSPTILEYSGIGMKSILEPLGIDTVVDLPVGLNLQDQTTSTVRSRITSAGAGQGQAAWFATFNETFGDYTEKAHELLNTKLEQWAEEAVARGGFHNTTALLIQYENYRDWIVKDNVAYSELFLDTAGVASFDVWDLLPFTRGYVHILDKDPYLRHFAYDPQYFLNELDLLGQAAATQLARNISNSGAMQTYFAGETIPGDNLAYDADLRAWVEYIPENFRPNYHGVGTCSMMPKEMGGVVDNAARVYGVQGLRVIDGSIPPTQLSSHVMTVFYAMALKIADAILADY

SEQ ID NO: 953 - protein, 577 aa, Aspergillus niger
GIEASLLKDPKEVAGRTYDYIIAGGGLTGLTVAARLTENPNITVLVIESGSYESDRGPIIEDLNAYGDIFGSSVDHAYETVELATNNQTALIRSGNGLGGSTLINGGTWTRPHKAQVDSWETVFGNEGWNWDSVAAYSLQAERARAPNAKQIAAGHYFNPSCHGLNGTVHAGPRDTGDDYSPIVKALMSAVEDRGVPTKKDLGCGDPHGVSMFPNTLHEDQVRSDAAREWLLPNYQRPNLQVLTGRYVGKVLLSQNATTPRAVGVEFGTHKGNTHNVYAKHEVLLAAGSAVSPTILEYSGIGMKSILEPLGIDTVVDLPVGLNLQDQTTSTVRSRITPAGAGQGQAAWFATFNETFGDYAEKAHELLNTKLEQWAEEAVARGGFHNTTALLIQYENYRDWIVKDNVAYSELFLDTAGVASFDVWDLLPFTRGYVHILDKDPYLRHFAYDPQYFLNELDLLGQAAATQLARNISNSGAMQTYFAGETIPGDNLAYDADLRAWVEYIPENFRPNYHGVGTCSMMPKEMGGVVDNAARVYGVQGLRVIDGSIPPTQLSSHVMTVFYAMALKIADAILADY

SEQ ID NO: 954 - protein, 577 aa, Aspergillus niger
GIEASLLKDPKEVAGRTYDYIIAGGGLTGLTVAARLTENPNITVLVIESGSYESDRGPIIEDLNAYGDIFGSSVDHAYETVELATNNRTALIRSGNGLGGSTLINGGTWTRPHKAQVDSWETVFGNEGWNWDSVAAYSLQAERARAPNAKQIAAGHYFNASCHGLNGTVHAGPRDTGDDYSPIVKALMSAVEDRGVPTKKDLGCGDPHGVSMFPNTLHPDQVRSDAAREWLLPNYQRPNLQVLTGRYVGKVLLSQNATTPRAVGVEFGTHKGNTHNVYAKHEVLLAAGSAVSPTILEYSGIGMKSILEPLGIDTVVDLPVGLNLQDQTTSTVRSRITPAGAGQGQAAWFATFNETFGDYTEKAHELLNTKLEQWAEEAVARGGFHNTTALLIQYENYRDWIVKDNVAYSELFLDTAGVASFDVWDLLPFTRGYVHILDKDPYLRHFAYDPQYFLNELDLLGQAAATQLARNISNSGAMQTYFAGETIPGDNLAYDADLRAWVEYIPENFRPNYHGVGTCSMMPKEMGGVVDNAARVYGVQGLRVIDGSIPPTQMSSHVMTVFYAMALKIADAILADY

SEQ ID NO: 955 - protein, 577 aa, Aspergillus niger
GIEASLLKDPKEVAGRTYDYIIAGGGLTGLTVAARLTENPNITVLVIESGSYESDRGPIIEDLNAYGDIFGSSVDHAYETVELATNNQTALIRSGNGLGGSTLINGGTWTRPHKAQVDSWETVFGNEGWNWDSVAAYSLQAERARAPNAKQIAAGHYFNPSCHGLNGTVHAGPRDTGDDYSPIVKALMSAVEDRGVPTKKDLGCGDPHGVSMFPNTLHPDQVRSDAAREWLLPNYQRPNLQVLTGRYVGKVLLSQNATTPRAVGVEFGTHKGNTHNVYAKHEVLLAAGSAVSPTILEYSGIGMKSILEPLGIDTVVDLPVGLNLQDQTTSTVRSRITPAGAGQGQAAWFATFNETFGDYTEKAHELLNTKLEQWAEEAVARGGFHNTTALLIQYENYRDWIVKDNVAYSELFLDTAGVASFDVWDLLPFTRGYVHILDKDPYLRHFAYDPQYFLNELDLLGQAAATQLARNISNSGAMQTYFAGETIPGDNLAYDADLRAWVEYIPENFRPNYHGVGTCSMMPKEMGGVVDNAARVYGVQGLRVIDGSIPPTQMSSHVMTVFYAMALKIADAILADY

SEQ ID NO: 956 - protein, 577 aa, Aspergillus niger
GIEASLLKDPKEVAGRTYDYIIAGGGLTGLTVAARLTENPNITVLVIESGSYESDRGPIIEDLNAYGDIFGSSVDHAYETVELATNNRTALIRSGNGLGGSTLINGGTWTRPHKAQVDSWETVFGNEGWNWDSVAAYSLQAERARAPNAKQIAAGHYFNPSCHGINGTVHAGPRDTGDDYSPIVKALMSAVEDRGVPTKKDLGCGDPHGVSMFPNTLHPDQVRSDAAREWLLPNYQRPNLQVLTGRYVGKVLLSQNATTPRAVGVEFGTHKGNTHNVYAKHEVLLAAGSAVSPTILEYSGIGMKSILEPLGIDTVVDLPVGLNLQDQTTSTVRSRITSAGAGQGQAAWFATFNETFGDYAEKAHELLNTKLEQWAEEAVARGGFHNTTALLIQYENYRDWIVKDNVAYSELFLDTAGVASFDVWDLLPFTRGYVHILDKDPYLRHFAYDPQYFLNELDLLGQAAATQLARNISNSGAMQTYFAGETIPGDNLAYDADLSAWVEYIPENFRPNYHGVGTCSMMPKEMGGVVDNAARVYGVQGLRVIDGSIPPTQMSSHVMTVFYAMALKIADAILADY

SEQ ID NO: 957 - protein, 598 aa, Talaromyces stipitatus
LAIPTLLFSAATVQAYLPAEQIDVQSSLLSEPSKVAGKTYDYIIAGGGLTGLTVAAKLTENPKIKVLVIEKGFYESNDGAIIEDPNAYGQIFGTTVDQNYLTVPLINNRTNNIKAGKGLGGSTLINGDXWTRPDKIQIDSWEKVFGMEGWNWDNMFEYMKKAEAARPPTDAQLAAGHYFDATCHGTNGTVRSGARDNGKPWSPLMKALMNTVSALGVPVQQDFLCGHPRGVSMIMNNVDENQVRADAARAWLLPNYQRSNLEILTGQMVGKVLFKQTASGPKAVGVNFGTNKVVNFDVFAKHEVLLAAGSAISPLILEYSGIGLKSVLDQANITQLLDLPVGINMQDQTTTTVSSRASVAGAGQGQAVFXANFTETFGDYAPQARELLNTKLDQWAEETVARGGFHNVTALKVQYENYRNWLLDEDVAFAELFMDTEGKINFDLWDLIPFTRGSVHILSSDPYLWQFANDPKFFLNEFDLLGQAAASKLAHDLSSQGAMKEYFAGETLPGYNLAENATLSQWSAYVLQNFRPNWHAVSSCSMMSRELGGVVDATAKVYGTQGLRVIDGSIPPTQVSSHVMTIFYGMALKVADAILDDY

SEQ ID NO: 958 - protein, 576 aa, Aspergillus niger
IEASLLKDPKGVAGRTYDYIIAGGGLAGLTVAEKLTENPNITVLVIESGSYESDRGPIIEDLNAYGEIFGTSVDHAYETVELATQNRTALIRSGNGLGGSTLINGGTWTRPHKAQVDSWETVFGNEGWNWDSVAAYSLQAERARAPNAKQIAAGHYFNASCHGLNGTVHVGPRDTGDDYSPLMRALMSAVEDRGVPTKKDLGCGDPHGVSMFPNTLHEDQVRADAAREWLLPNYQRPNLQVLTGQYVGKVLLSQNATTPRAVGVEFGTHKSNTHNVYAKHEVLLSAGSTVSPTILEYSGIGMKSILEPLGIDTVVDLPVGLNLQDQTTSTVRSRITSAGNGQGQAAWFATFNETFGDYTEKAHELLNTKLEQWAEEAVARGGFHNTTALLIQYENYRDWIVKDNVAYSELFLDTGGVASFDVWDLLPFTRGYVHILDKDPYLRHFAYDPQYFLNELDLLGQAAATQLARNISNSGAMQTYFAGETIPGDNLAYDADLSAWVEYIPEHFRPNYHGVGTCSMMPKEMGGVVDNAARVYGVQGLRVIDGSIPPTQLSSHVMTVFYAMALKIADAVLADY

SEQ ID NO: 959 - protein, 576 aa, Aspergillus niger
IEASLLKDPKLVNGRTYDYIIAGGGLAGLTVAEKLTENPDITVLVIESGSYESDRGPIIEDLNAYGEIFGTSVDHAYETVELAADNRTALIRSGNGLGGSTLINGGTWTRPHKAQVDSWETVFGNEGWNWDSVAAYSLQAERARAPNAKQIAAGHYFNASCHGLNGTVHVGPRDTGDDYSPLMRALMSAVEDRGVPTKKDLGCGDPHGVSMFPNTLHEDQVRADAAREWLLPNYQRPNLQVLTGQYVGKVLLSQNATTPRAVGVEFGTHKSNTHNVYAKHEVLLSAGSTVSPTILEYSGIGMKSILEPLGIDTVVDLPVGLNLQDQTTSTVRSRITSAGAGQGQAAWFATFNETFGDYTEKAHELLNTKLEQWAEEAVARGGFHNTTALLIQYENYRDWIVKDNVAYSELFLDTGGVASFDVWDLLPFTRGYVHILDKDPYLRHFAYDPQYFLNELDLLGQAAATQLARNISNSGAMQTYFAGETIPGDNLAYDADLSAWVEYIPEHFRPNYHGVGTCSMMPKEMGGVVDNAARVYGVQGLRVIDGSIPPTQLSSHVMTVFYAMALKIADAVLADY

SEQ ID NO: 960 - protein, 601 aa, Talaromyces flavus
MVSVFLSTLLLAAATVQAYLPAQQIDVQSSLLSDPSKVAGKTYDYIIAGGGLTGLTVAAKLTENPKIKVLVIEKGFYESNDGAIIEDPNAYGQIFGTTVDQNYLTVPLINNRTNNIKAGKGLGGSTLINGDXWTRPDKVQIDSWEKVFGMEGWNWDSMFEYMKKAEAARAPTAAQLAAGHYFNATCHGTNGTVQSGARDNGQPWSPIMKALMNTVSALGVPVQQDFLCGHPRGVSMIMNNVDENQVRVDAARAWLLPSYQRPNLEILTGQMVGKVLFKQTASGPQAVGVNFGTNKAVNFDVFAKHEVLLAAGSAISPLILEYSGIGLKSVLDQANVTQLLDLPVGINMQDQTTTTVSSRASAAGAGQGQAVFXANFTETFGDYAPQARELLNTKLDQWAEETVARGGFHNVTALKVQYENYRNWLLDEDVAFAELFMDTEGKINFDLWDLIPFTRGSVHILSSDPYLWQFANDPKFFLNEFDLLGQAAASKLARDLTSQGAMKEYFAGETLPGYNLVENATLSQWSDYVLQNFRPNWHAVSSCSMMSRELGGVVDATAKVYGTQGLRVIDGSIPPTQVSSHVMTIFYGMALKVADAILDDY

SEQ ID NO: 961 - protein, 601 aa, Penicillium amagasakiense
MVSVFLSTLLLSAAAVQAYLPAQQIDVQSSLLSDPSKVAGKTYDYIIAGGGLTGLTVAAKLTENPKIKVLVIEKGFYESNDGAIIEDPNAYGQIFGTTVDQNYLTVPLINNRTNNIKAGKGLGGSTLINGDSWTRPDKVQIDSWEKVFGMEGWNWDNMFEYMKKAEAARTPTAAQLAAGHSFNATCHGTNGTVQSGARDNGQPWSPIMKALMNTVSALGVPVQQDFLCGHPRGVSMIMNNLDENQVRVDAARAWLLPNYQRSNLEILTGQMVGKVLFKQTASGPQAVGVNFGTNKAVNFDVFAKHEVLLAAGSAISPLILEYSGIGLKSVLDQANVTQLLDLPVGINMQDQTTTTVSSRASSAGAGQGQAVFFANFTETFGDYAPQARDLLNTKLDQWAEETVARGGFHNVTALKVQYENYRNWLLDEDVAFAELFMDTEGKIRFDLWDLIPFTRGSVHILSSDPYLWQFANDPKFFLNEFDLLGQAAASKLARDLTSQGAMKEYFAGETLPGYNLVQNATLSQWSDYVLQNFRPNWHAVSSCSMMSRELGGVVDATAKVYGTQGLRVIDGSIPPTQVSSHPMTIFYGMALKVADAILDDY

SEQ ID NO: 962 - protein, 601 aa, Penicillium amagasakiense
MVSVFLSTLLLSAAAVQAYLPAQQIDVQSSLLSDPSKVAGKTYDYIIAGGGLTGLTVAAKLTENPKIKVLVIEKGFYESNDGAIIEDPNAYGQIFGTTVDQNYLTVPLINNRTNNIKAGKGLGGSTLINGDXWTRPDKVQIDSWEKVFGMEGWNWDNMFEYMKKAEAARTPTAAQLAAGHSFNATCHGTNGTVQSGARDNGQPWSPIMKALMNTVSALGVPVQQDFLCGHPRGVSMIMNNLDENQVRVDAARAWLLPNYQRSNLEILTGQMVGKVLFKQTASGPQAVGVNFGTNKAVNFDVFAKHEVLLAAGSAISPLILEYSGIGLKSVLDQANVTQLLDLPVGINMQDQTTTTVSSRASSAGAGQGQAVFXANFTETFGDYAPQARDLLNTKLDQWAEETVARGGFHNVTALKVQYENYRNWLLDEDVAFAELFMDTEGKINFDLWDLIPFTRGSVHILSSDPYLWQFANDPKFFLNEFDLLGQAAASKLARDLTSQGAMKEYFAGETLPGYNLVQNATLSQWSDYVLQNFRPNWHAVSSCSMMSRELGGVVDATAKVYGTQGLRVIDGSIPPTQVSSHVMTIFYGMALKVADAILDDY

SEQ ID NO: 963 - protein, 578 aa, Aspergillus niger
YGIEASLLTDPEDVSGRTVDYIIAGGGLVGLTTAARLTENPNISVLVIESGSYESDRGPIIEDLNAYGDIFGSSVDHAYETVELATNNQTALVRSGNGLGGSTLVNGGTWTRPHKAQVDSWETVFGNEGWNWDNVAAYSLQAERARAPNARQIAAGHYFNASCHGVNGTVHAGPRDTGDDYSPIVKALMSAVEDRGVPTKKDFGCGDPHGVSMFPNTLHEDQVRSDAAREWLLPNYQRPNLQVLTGQYVGKVLLSQNGTTPRAVGVEFGTHKGNTHNVYAKHEVLLAAGSAVSPTILEYSGIGMKSILEPLGIDTVVDLPVGLNLQDQTTATVRSRITSAGAGQGQAAWFATFNETFGDYSEKAHELLNTKLEQWAEEAVARGGFHNTTALLIQYENYRDWIVNHNVAYSELFLDTAGVASFDVWDLLPFTRGYVHILDKDPYLHHFAYDPQYFLNELDLLGQAAATQLARNISNSGAMQTYFAGETIPGDNLAYDADLSAWTEYIPYHFRPNYHGVGTCSMMPKEMGGVVDNAARVYGVQGLRVIDGSIPPTQMSSHVMTVFYAMALKISDAILEDY

SEQ ID NO: 964 - protein, 585 aa, Aspergillus niger
LPHYIRSNGIEASLLTDPKDVSGRTVDYIIAGGGLTGLTTAARLTENPNISVLVIESGSYESDRGPIIEDLNAYGDIFGSSVDHAYETVELAPNNQTALIRSGNGLGGSTLINGGTWTRPHKAQVDSWETVFGNEGWNWDNVAAYSLQAERARAPNAKQIAAGHYFNASCHGVNGTVHAGPRDTGDDYSPIVKALMSAVEDRGVPTKKDFGCGDPHGVSMFPNTLHEDQVRSDAAREWLLPNYQRPNLQVLTGQYVGKVLLSQNGTTPRAVGVEFGTHKGNTHNVYAKHEVLLAAGSAVSPTILEYSGIGMKSILEPLGIDTVVDLPVGLNLQDQTTATVRSRITSAGAGQGQAAWFATFNETFGDYSEKAHELLNTKLEQWAEEAVARGGFHNTTALLIQYENYRDWIVNHNVAYSELFLDTAGVASFDVWDLLPFTRGYVHILDKDPYLHHFAYDPQYFLNELDLLGQAAATQLARNISNSGAMQTYFAGETIPGDNLAYDADLSAWTEYIPYHFRPNYHGVGTCSMMPKEMGGVVDNAARVYGVQGLRVIDGSIPPTQMSSHVMTVFYAMALKISDAILEDY

SEQ ID NO: 965 - protein, 585 aa, Aspergillus niger
LPHYIRSNGIEASLLTDPKDVSGRTVDYIIAGGGLTGLTTAARLTENPNISVLVIESGSYESDRGPIIEDLNAYGDIFGSSVDHAYETVELATNNQTALIRSGNGLGGSTLINGGTWTRPHKAQVDSWETVFGNEGWNWDNVAAYSLQAERARAPNAKQIAAGHYFNASCHGVNGTVHAGPRDTGDDYSPIVKALMSAVEDRGVPTKKDFGCGDPHGVSMFPNTLHEDQVRSDAAREWLLPNYQRPNLQVLTGQYVGKVLLSQNGTTPRAVGVEFGTHKGNTHNVYAKHEVLLAAGSAVSPTILEYSGIGMKSILEPLGIDTVVDLPVGLNLQDQTTATVRSRITSAGAGQGQAAWFATFNETFGDYSEKAHELLNTKLEQWAEEAVARGGFHNTTALLIQYENYRDWIVNHNVAYSELFLDTAGVASFDVWDLLPFTRGYVHILDKDPYLHHFAYDPQYFLNELDLLGQAAATQLARNISNSGAMQTYFAGETIPGDNLAYDADLSAWTEYIPYHFRPNYHGVGTCSMMPKEMGGVVDNAARVYGVQGLRVIDGSIPPTQMSSHVMTVFYAMALKISDAILEDY

SEQ ID NO: 966 - protein, 577 aa, Aspergillus niger
GIEASLLKDPKEVAGRTYDYIIAGGGLTGLTVAARLTENPNITVLVIESGSYESDRGPIIEDLNAYGDIFGSSVDHAYETVELPTNNRTALIRSGNGLGGSTLINGGTWTRPHKAQVDSWETVFGNEGWNWDSVAAYSLQAERARAPNAKQIAAGHYFNASCHGLNGTVHAGPRDTGDDYSPIVKALMSAVEDRGVPTKKDLGCGDPHGVSMFPNTLHEDQVRSDAAREWLLPNYQRPNLQVLTGQYVGKVLLSQNATTPRAVGVEFGTHKGNTHNVYAKHEVLLAAGSAVSPTILEYSGIGMKSILEPLGIDTVVDLPVGLNLQDQTTSTVRSRITPAGAGQGQAAWFATFNETFGDYAEKAHELLNTKLEQWAEEAVARGGFHNTTALLIQYENYRDWIVKDNVAYSELFLDTAGVASFDVWDLLPFTRGYVHILDKDPYLRHFAYDPQYFLNELDLLGQAAATQLARNISNSGAMQTYFAGETIPGDNLAYDADLRAWVEYIPENFRPNYHGVGTCSMMPKEMGGVVDNAARVYGVQGLRVIDGSIPPTQLSSHVMTVFYAMALKIADAVLADY

SEQ ID NO: 967 - protein, 577 aa, Aspergillus niger
GIEASLLKDPKEVAGRTYDYIIAGGGLTGLTVAARLTENPNITVLVIESGSYESDRGPIIEDLNAYGDIFGSSVDHAYETVELATNNQTALIRSGNGLGGSTLINGGTWTRPHKAQVDSWETVFGNEGWNWDSVAAYSLQAERARAPNAKQIAAGHYFNASCHGINGTVHAGPRDTGDDYSPIVKALMSAVEDRGVPTKKDLGCGDPHGVSMFPNTLHPDQVRSDAAREWLLPNYQRPNLQVLTGQYVGKVLLSQNATTPRAVGVEFGTHKGNTHNVYAKHEVLLAAGSAVSPTILEYSGIGMKSILEPLGIDTVVDLPVGLNLQDQTTSTVRSRITPAGAGQGQAAWFATFNETFGDYAEKAHELLNTKLEQWAEEAVARGGFHNTTALLIQYENYRDWIVKDNVAYSELFLDTAGVASFDVWDLLPFTRGYVHILDKDPYLRHFAYDPQYFLNELDLLGQAAATQLARNISNSGAMQTYFAGETIPGDNLAYDADLSAWVEYIPENFRPNYHGVGTCSMMPKEMGGVVDNAARVYGVQGLRVIDGSIPPTQMSSHVMTVFYAMALKIADAVLADY

SEQ ID NO: 968 - protein, 577 aa, Aspergillus niger
GIEASLLKDPKEVAGRTYDYIIAGGGLTGLTVAARLTENPNITVLVIESGSYESDRGPIIEDLNAYGDIFGSSVDHAYETVELATNNRTALIRSGNGLGGSTLINGGTWTRPHKAQVDSWETVFGNEGWNWDSVAAYSLQAERARAPNAKQIAAGHYFNASCHGINGTVHAGPRDTGDDYSPIVKALMSAVEDRGVPTKKDLGCGDPHGVSMFPNTLHPDQVRSDAAREWLLPNYQRPNLQVLTGQYVGKVLLSQNATTPRAVGVEFGTHKGNTHNVYAKHEVLLAAGSAVSPTILEYSGIGMKSILEPLGIDTVVDLPVGLNLQDQTTSTVRSRITSAGAGQGQAAWFATFNETFGDYTEKAHELLNTKLEQWAEEAVARGGFHNTTALLIQYENYRDWIVKDNVAYSELFLDTAGVASFDVWDLLPFTRGYVHILDKDPYLRHFAYDPQYFLNELDLLGQAAATQLARNISNSGAMQTYFAGETIPGDNLAYDADLSAWVEYIPENFRPNYHGVGTCSMMPKEMGGVVDNAARVYGVQGLRVIDGSIPPTQMSSHVMTVFYAMALKIADAILADY

SEQ ID NO: 969 - protein, 577 aa, Aspergillus niger
GIEASLLKDPKEVAGRTYDYIIAGGGLTGLTVAARLTENPNITVLVIESGSYESDRGPIIEDLNAYGDIFGSSVDHAYETVELATNNQTALIRSGNGLGGSTLINGGTWTRPHKAQVDSWETVFGNEGWNWDSVAAYSLQAERARAPNAKQIAAGHYFNPSCHGINGTVHAGPRDTGDDYSPIVKALMSAVEDRGVPTKKDLGCGDPHGVSMFPNTLHEDQVRSDAAREWLLPNYQRPNLQVLTGQYVGKVLLSQNATTPRAVGVEFGTHKGNTHNVYAKHEVLLAAGSAVSPTILEYSGIGMKSILEPLGIDTVVDLPVGLNLQDQTTSTVRSRITSAGAGQGQAAWFATFNETFGDYAEKAHELLNTKLEQWAEEAVARGGFHNTTALLIQYENYRDWIVKDNVAYSELFLDTAGVASFDVWDLLPFTRGYVHILDKDPYLRHFAYDPQYFLNELDLLGQAAATQLARNISNSGAMQTYFAGETIPGDNLAYDADLSAWVEYIPENFRPNYHGVGTCSMMPKEMGGVVDNAARVYGVQGLRVIDGSIPPTQMSSHVMTVFYAMALKIADAILADY

SEQ ID NO: 970 - protein, 577 aa, Aspergillus niger
GIEASLLKDPKEVAGRTYDYIIAGGGLTGLTVAARLTENPNITVLVIESGSYESDRGPIIEDLNAYGDIFGSSVDHAYETVELATNNRTALIRSGNGLGGSTLINGGTWTRPHKAQVDSWETVFGNEGWNWDSVAAYSLQAERARAPNAKQIAAGHYFNPSCHGLNGTVHAGPRDTGDDYSPIVKALMSAVEDRGVPTKKDLGCGDPHGVSMFPNTLHEDQVRSDAAREWLLPNYQRPNLQVLTGRYVGKVLLSQNATTPRAVGVEFGTHKGNTHNVYAKHEVLLAAGSAVSPTILEYSGIGMKSILEPLGIDTVVDLPVGLNLQDQTTSTVRSRITSAGAGQGQAAWFATFNETFGDYAEKAHELLNTKLEQWAEEAVARGGFHNTTALLIQYENYRDWIVKDNVAYSELFLDTAGVASFDVWDLLPFTRGYVHILDKDPYLRHFAYDPQYFLNELDLLGQAAATQLARNISNSGAMQTYFAGETIPGDNLAYDADLSAWVEYIPENFRPNYHGVGTCSMMPKEMGGVVDNAARVYGVQGLRVIDGSIPPTQMSSHVMTVFYAMALKIADAILADY

SEQ ID NO: 971 - protein, 577 aa, Aspergillus niger
GIEASLLKDPKEVAGRTYDYIIAGGGLTGLTVAARLTENPNITVLVIESGSYESDRGPIIEDLNAYGDIFGSSVDHAYETVELATNNQTALIRSGNGLGGSTLINGGTWTRPHKAQVDSWETVFGNEGWNWDSVAAYSLQAERARAPNAKQIAAGHYFNASCHGINGTVHAGPRDTGDDYSPIVKALMSAVEDRGVPTKKDLGCGDPHGVSMFPNTLHEDQVRSDAAREWLLPNYQRPNLQVLTGQYVGKVLLSQNATTPRAVGVEFGTHKGNTHNVYAKHEVLLAAGSAVSPTILEYSGIGMKSILEPLGIDTVVDLPVGLNLQDQTTSTVRSRITSAGAGQGQAAWFATFNETFGDYAEKAHELLNTKLEQWAEEAVARGGFHNTTALLIQYENYRDWIVKDNVAYSELFLDTAGVASFDVWDLLPFTRGYVHILDKDPYLRHFAYDPQYFLNELDLLGQAAATQLARNISNSGAMQTYFAGETIPGDNLAYDADLRAWVEYIPENFRPNYHGVGTCSMMPKEMGGVVDNAARVYGVQGLRVIDGSIPPTQLSSHVMTVFYAMALKIADAILADY

SEQ ID NO: 972 - protein, 577 aa, Aspergillus niger
GIEASLLKDPKEVAGRTYDYIIAGGGLTGLTVAARLTENPNITVLVIESGSYESDRGPIIEDLNAYGDIFGSSVDHAYETVELATNNRTALIRSGNGLGGSTLINGGTWTRPHKAQVDSWETVFGNEGWNWDSVAAYSLQAERARAPNAKQIAAGHYFNASCHGINGTVHAGPRDTGDDYSPIVKALMSAVEDRGVPTKKDLGCGDPHGVSMFPNTLHEDQVRSDAAREWLLPNYQRPNLQVLTGQYVGKVLLSQNATTPRAVGVEFGTHKGNTHNVYAKHEVLLAAGSAVSPTILEYSGIGMKSILEPLGIDTVVDLPVGLNLQDQTTSTVRSRITSAGAGQGQAAWFATFNETFGDYTEKAHELLNTKLEQWAEEAVARGGFHNTTALLIQYENYRDWIVKDNVAYSELFLDTAGVASFDVWDLLPFTRGYVHILDKDPYLRHFAYDPQYFLNELDLLGQAAATQLARNISNSGAMQTYFAGETIPGDNLAYDADLRAWVEYIPENFRPNYHGVGTCSMMPKEMGGVVDNAARVYGVQGLRVIDGSIPPTQLSSHVMTVFYAMALKIADAILADY

SEQ ID NO: 973 - protein, 577 aa, Aspergillus niger
GIEASLLKDPKEVAGRTYDYIIAGGGLTGLTVAARLTENPNITVLVIESGSYESDRGPIIEDLNAYGDIFGSSVDHAYETVELATNNQTALIRSGNGLGGSTLINGGTWTRPHKAQVDSWETVFGNEGWNWDSVAAYSLQAERARAPNAKQIAAGHYFNASCHGINGTVHAGPRDTGDDYSPIVKALMSAVEDRGVPTKKDLGCGDPHGVSMFPNTLHPDQVRSDAAREWLLPNYQRPNLQVLTGQYVGKVLLSQNATTPRAVGVEFGTHKGNTHNVYAKHEVLLAAGSAVSPTILEYSGIGMKSILEPLGIDTVVDLPVGLNLQDQTTSTVRSRITPAGAGQGQAAWFATFNETFGDYAEKAHELLNTKLEQWAEEAVARGGFHNTTALLIQYENYRDWIVKDNVAYSELFLDTAGVASFDVWDLLPFTRGYVHILDKDPYLRHFAYDPQYFLNELDLLGQAAATQLARNISNSGAMQTYFAGETIPGDNLAYDADLSAWVEYIPENFRPNYHGVGTCSMMPKEMGGVVDNAARVYGVQGLRVIDGSIPPTQLSSHVMTVFYAMALKIADAVLADY

SEQ ID NO: 974 - protein, 577 aa, Aspergillus niger
GIEASLLKDPKEVAGRTYDYIIAGGGLTGLTVAARLTENPNITVLVIESGSYESDRGPIIEDLNAYGDIFGSSVDHAYETVELATNNRTALIRSGNGLGGSTLINGGTWTRPHKAQVDSWETVFGNEGWNWDSVAAYSLQAERARAPNAKQIAAGHYFNASCHGLNGTVHAGPRDTGDDYSPIVKALMSAVEDRGVPTKKDLGCGDPHGVSMFPNTLHEDQVRSDAAREWLLPNYQRPNLQVLTGQYVGKVLLSQNATTPRAVGVEFGTHKGNTHNVYAKHEVLLAAGSAVSPTILEYSGIGMKSILEPLGIDTVVDLPVGLNLQDQTTSTVRSRITSAGAGQGQAAWFATFNETFGDYAEKAHELLNTKLEQWAEEAVARGGFHNTTALLIQYENYRDWIVKDNVAYSELFLDTAGVASFDVWDLLPFTRGYVHILDKDPYLRHFAYDPQYFLNELDLLGQAAATQLARNISNSGAMQTYFAGETIPGDNLAYDADLSAWVEYIPENFRPNYHGVGTCSMMPKEMGGVVDNAARVYGVQGLRVIDGSIPPTQMSSHVMTVFYAMALKIADAILADY

SEQ ID NO: 975 - protein, 577 aa, Aspergillus niger
GIEASLLKDPKEVAGRTYDYIIAGGGLTGLTVAARLTENPNITVLVIESGSYESDRGPIIEDLNAYGDIFGSSVDHAYETVELATNNQTALIRSGNGLGGSTLINGGTWTRPHKAQVDSWETVFGNEGWNWDSVAAYSLQAERARAPNAKQIAAGHYFNASCHGINGTVHAGPRDTGDDYSPIVKALMSAVEDRGVPTKKDLGCGDPHGVSMFPNTLHEDQVRSDAAREWLLPNYQRPNLQVLTGQYVGKVLLSQNATTPRAVGVEFGTHKGNTHNVYAKHEVLLAAGSAVSPTILEYSGIGMKSILEPLGIDTVVDLPVGLNLQDQTTSTVRSRITPAGAGQGQAAWFATFNETFGDYTEKAHELLNTKLEQWAEEAVARGGFHNTTALLIQYENYRDWIVKDNVAYSELFLDTAGVASFDVWDLLPFTRGYVHILDKDPYLRHFAYDPQYFLNELDLLGQAAATQLARNISNSGAMQTYFAGETIPGDNLAYDADLRAWVEYIPENFRPNYHGVGTCSMMPKEMGGVVDNAARVYGVQGLRVIDGSIPPTQMSSHVMTVFYAMALKIADAILADY

SEQ ID NO: 976 - protein, 577 aa, Aspergillus niger
GIEASLLKDPKEVAGRTYDYIIAGGGLTGLTVAARLTENPNITVLVIESGSYESDRGPIIEDLNAYGDIFGSSVDHAYETVELPTNNQTALIRSGNGLGGSTLINGGTWTRPHKAQVDSWETVFGNEGWNWDSVAAYSLQAERARAPNAKQIAAGHYFNPSCHGINGTVHAGPRDTGDDYSPIVKALMSAVEDRGVPTKKDLGCGDPHGVSMFPNTLHPDQVRSDAAREWLLPNYQRPNLQVLTGQYVGKVLLSQNATTPRAVGVEFGTHKGNTHNVYAKHEVLLAAGSAVSPTILEYSGIGMKSILEPLGIDTVVDLPVGLNLQDQTTSTVRSRITSAGAGQGQAAWFATFNETFGDYAEKAHELLNTKLEQWAEEAVARGGFHNTTALLIQYENYRDWIVKDNVAYSELFLDTAGVASFDVWDLLPFTRGYVHILDKDPYLRHFAYDPQYFLNELDLLGQAAATQLARNISNSGAMQTYFAGETIPGDNLAYDADLSAWVEYIPENFRPNYHGVGTCSMMPKEMGGVVDNAARVYGVQGLRVIDGSIPPTQMSSHVMTVFYAMALKIADAILADY

SEQ ID NO: 977 - protein, 577 aa, Aspergillus niger
GIEASLLKDPKEVAGRTYDYIIAGGGLTGLTVAARLTENPNITVLVIESGSYESDRGPIIEDLNAYGDIFGSSVDHAYETVELATNNQTALIRSGNGLGGSTLINGGTWTRPHKAQVDSWETVFGNEGWNWDSVAAYSLQAERARAPNAKQIAAGHYFNASCHGINGTVHAGPRDTGDDYSPIVKALMSAVEDRGVPTKKDLGCGDPHGVSMFPNTLHPDQVRSDAAREWLLPNYQRPNLQVLTGQYVGKVLLSQNATTPRAVGVEFGTHKGNTHNVYAKHEVLLAAGSAVSPTILEYSGIGMKSILEPLGIDTVVDLPVGLNLQDQTTSTVRSRITSAGAGQGQAAWFATFNETFGDYAEKAHELLNTKLEQWAEEAVARGGFHNTTALLIQYENYRDWIVKDNVAYSELFLDTAGVASFDVWDLLPFTRGYVHILDKDPYLRHFAYDPQYFLNELDLLGQAAATQLARNISNSGAMQTYFAGETIPGDNLAYDADLSAWVEYIPENFRPNYHGVGTCSMMPKEMGGVVDNAARVYGVQGLRVIDGSIPPTQLSSHVMTVFYAMALKIADAILADY

SEQ ID NO: 978 - protein, 577 aa, Aspergillus niger
GIEASLLTDPKEVAGRTVDYIIAGGGLTGLTTAARLTENPDITVLVIESGSYESDRGPIIEDLNAYGDIFGSSVDHAYETVELATNNQTALIRSGNGLGGSTLVNGGTWTRPHKAQVDSWETVFGNEGWNWDSVAAYSLQAERARAPNAKQIAAGHYFNASCHGINGTVHAGPRDTGDDYSPIVKALMSAVEDRGVPTKKDLGCGDPHGVSMFPNTLHEDQVRSDAAREWLLPNYQRPNLQVLTGQYVGKVLLSQNATTPRAIGVEFGTHKGNTHNVYAKHEVLLAAGSAVSPTILEYSGIGMKSILEPLGIDTVVDLPVGLNLQDQTTSTVRSRITSAGAGQGQAAWFATFNETFGDYAEKAHELLNTKLEQWAEEAVARGGFHNTTALLIQYENYRDWIVKDNVAYSELFLDTAGVASFDVWDLLPFTRGYVHILDKDPYLRHFAYDPQYFLNELDLLGQAAATQLARNISNSGAMQTYFAGETIPGDNLAYDADLSAWVEYIPYNFRPNYHGVGTCSMMPKEMGGVVDNAARVYGVQGLRVIDGSIPPTQMSSHVMTVFYAMALKIADAILADY

SEQ ID NO: 979 - protein, 577 aa, Aspergillus niger
GIEASLLKDPKEVAGRTYDYIIAGGGLTGLTVAARLTENPNITVLVIESGSYESDRGPIIEDLNAYGDIFGSSVDHAYETVELATNNRTALIRSGNGLGGSTLINGGTWTRPHKAQVDSWETVFGNEGWNWDSVAAYSLQAERARAPNAKQIAAGHYFNASCHGINGTVHAGPRDTGDDYSPIVKALMSAVEDRGVPTKKDLGCGDPHGVSMFPNTLHEDQVRSDAAREWLLPNYQRPNLQVLTGQYVGKVLLSQNATTPRAVGVEFGTHKGNTHNVYAKHEVLLAAGSAVSPTILEYSGIGMKSILEPLGIDTVVDLPVGLNLQDQTTSTVRSRITSAGAGQGQAAWFATFNETFGDYTEKAHELLNTKLEQWAEEAVARGGFHNTTALLIQYENYRDWIVKDNVAYSELFLDTAGVASFDVWDLLPFTRGYVHILDKDPYLRHFAYDPQYFLNELDLLGQAAATQLARNISNSGAMQTYFAGETIPGDNLAYDADLRAWVEYIPENFRPNYHGVGTCSMMPKEMGGVVDNAARVYGVQGLRVIDGSIPPTQMSSHVMTVFYAMALKIADAILADY

SEQ ID NO: 980 - protein, 577 aa, Aspergillus niger
GIEASLLKDPKEVAGRTYDYIIAGGGLTGLTVAARLTENPNITVLVIESGSYESDRGPIIEDLNAYGDIFGSSVDHAYETVELATNNQTALIRSGNGLGGSTLINGGTWTRPHKAQVDSWETVFGNEGWNWDSVAAYSLQAERARAPNAKQIAAGHYFNPSCHGINGTVHAGPRDTGDDYSPIVKALMSAVEDRGVPTKKDLGCGDPHGVSMFPNTLHPDQVRSDAAREWLLPNYQRPNLQVLTGRYVGKVLLSQNATTPRAVGVEFGTHKGNTHNVYAKHEVLLAAGSAVSPTILEYSGIGMKSILEPLGIDTVVDLPVGLNLQDQTTSTVRSRITSAGAGQGQAAWFATFNETFGDYTEKAHELLNTKLEQWAEEAVARGGFHNTTALLIQYENYRDWIVKDNVAYSELFLDTAGVASFDVWDLLPFTRGYVHILDKDPYLRHFAYDPQYFLNELDLLGQAAATQLARNISNSGAMQTYFAGETIPGDNLAYDADLRAWVEYIPENFRPNYHGVGTCSMMPKEMGGVVDNAARVYGVQGLRVIDGSIPPTQLSSHVMTVFYAMALKIADAILADY

SEQ ID NO: 981 - protein, 577 aa, Aspergillus niger
GIEASLLKDPKEVAGRTYDYIIAGGGLTGLTVAARLTENPNITVLVIESGSYESDRGPIIEDLNAYGDIFGSSVDHAYETVELPTNNQTALIRSGNGLGGSTLINGGTWTRPHKAQVDSWETVFGNEGWNWDSVAAYSLQAERARAPNAKQIAAGHYFNASCHGINGTVHAGPRDTGDDYSPIVKALMSAVEDRGVPTKKDLGCGDPHGVSMFPNTLHPDQVRSDAAREWLLPNYQRPNLQVLTGQYVGKVLLSQNATTPRAVGVEFGTHKGNTHNVYAKHEVLLAAGSAVSPTILEYSGIGMKSILEPLGIDTVVDLPVGLNLQDQTTSTVRSRITPAGAGQGQAAWFATFNETFGDYAEKAHELLNTKLEQWAEEAVARGGFHNTTALLIQYENYRDWIVKDNVAYSELFLDTAGVASFDVWDLLPFTRGYVHILDKDPYLRHFAYDPQYFLNELDLLGQAAATQLARNISNSGAMQTYFAGETIPGDNLAYDADLSAWVEYIPENFRPNYHGVGTCSMMPKEMGGVVDNAARVYGVQGLRVIDGSIPPTQMSSHVMTVFYAMALKIADAILADY

SEQ ID NO: 982 - protein, 577 aa, Aspergillus niger
GIEASLLKDPKEVAGRTYDYIIAGGGLTGLTVAAKLTENPNITVLVIESGSYESDRGPIIEDLNAYGDIFGSSVDHAYETVELATNNRTALIRSGNGLGGSTLINGGTWTRPHKAQVDSWETVFGNEGWNWDSVAAYSLQAERARAPNAKQIAAGHYFNPSCHGINGTVHAGPRDTGDDYSPIVKALMSAVEDRGVPTKKDLGCGDPHGVSMFPNTLHPDQVRSDAAREWLLPNYQRPNLQVLTGRYVGKVLLSQNATTPRAVGVEFGTHKGNTHNVYAKHEVLLAAGSAVSPTILEYSGIGMKSILEPLGIDTVVDLPVGLNLQDQTTSTVRSRITSAGAGQGQAAWFATFNETFGDYTEKAHELLNTKLEQWAEEAVARGGFHNTTALLIQYENYRDWIVKDNVAYSELFLDTAGVASFDVWDLLPFTRGYVHILDKDPYLRHFAYDPQYFLNELDLLGQAAATQLARNISNSGAMQTYFAGETIPGDNLAYDADLRAWVEYIPENFRPNYHGVGTCSMMPKEMGGVVDNAARVYGVQGLRVIDGSIPPTQLSSHVMTVFYAMALKIADAILADY

SEQ ID NO: 983 - protein, 577 aa, Aspergillus niger
GIEASLLKDPKEVAGRTYDYIIAGGGLTGLTVAARLTENPNITVLVIESGSYESDRGPIIEDLNAYGDIFGSSVDHAYETVELATNNQTALIRSGNGLGGSTLINGGTWTRPHKAQVDSWETVFGNEGWNWDSVAAYSLQAERARAPNAKQIAAGHYFNPSCHGINGTVHAGPRDTGDDYSPIVKALMSAVEDRGVPTKKDLGCGDPHGVSMFPNTLHEDQVRSDAAREWLLPNYQRPNLQVLTGRYVGKVLLSQNATTPRAVGVEFGTHKGNTHNVYAKHEVLLAAGSAVSPTILEYSGIGMKSILEPLGIDTVVDLPVGLNLQDQTTSTVRSRITPAGAGQGQAAWFATFNETFGDYAEKAHELLNTKLEQWAEEAVARGGFHNTTALLIQYENYRDWIVKDNVAYSELFLDTAGVASFDVWDLLPFTRGYVHILDKDPYLRHFAYDPQYFLNELDLLGQAAATQLARNISNSGAMQTYFAGETIPGDNLAYDADLSAWVEYIPENFRPNYHGVGTCSMMPKEMGGVVDNAARVYGVQGLRVIDGSIPPTQMSSHVMTVFYAMALKIADAILADY

SEQ ID NO: 984 - protein, 577 aa, Aspergillus niger
GIEASLLKDPKEVAGRTYDYIIAGGGLTGLTVAAKLTENPNITVLVIESGSYESDRGPIIEDLNAYGDIFGSSVDHAYETVELATNNQTALIRSGNGLGGSTLINGGTWTRPHKAQVDSWETVFGNEGWNWDSVAAYSLQAERARAPNAKQIAAGHYFNPSCHGLNGTVHAGPRDTGDDYSPIVKALMSAVEDRGVPTKKDLGCGDPHGVSMFPNTLHPDQVRSDAAREWLLPNYQRPNLQVLTGQYVGKVLLSQNATTPRAVGVEFGTHKGNTHNVYAKHEVLLAAGSAVSPTILEYSGIGMKSILEPLGIDTVVDLPVGLNLQDQTTSTVRSRITSAGAGQGQAAWFATFNETFGDYTEKAHELLNTKLEQWAEEAVARGGFHNTTALLIQYENYRDWIVKDNVAYSELFLDTAGVASFDVWDLLPFTRGYVHILDKDPYLRHFAYDPQYFLNELDLLGQAAATQLARNISNSGAMQTYFAGETIPGDNLAYDADLRAWVEYIPENFRPNYHGVGTCSMMPKEMGGVVDNAARVYGVQGLRVIDGSIPPTQMSSHVMTVFYAMALKIADAILADY

SEQ ID NO: 985 - protein, 577 aa, Aspergillus niger
GIEASLLKDPKEVAGRTYDYIIAGGGLTGLTVAARLTENPNITVLVIESGSYESDRGPIIEDLNAYGDIFGSSVDHAYETVELATNNQTALIRSGNGLGGSTLINGGTWTRPHKAQVDSWETVFGNEGWNWDSVAAYSLQAERARAPNAKQIAAGHYFNASCHGINGTVHAGPRDTGDDYSPIVKALMSAVEDRGVPTKKDLGCGDPHGVSMFPNTLHEDQVRSDAAREWLLPNYQRPNLQVLTGQYVGKVLLSQNATTPRAVGVEFGTHKGNTHNVYAKHEVLLAAGSAVSPTILEYSGIGMKSILEPLGIDTVVDLPVGLNLQDQTTSTVRSRITPAGAGQGQAAWFATFNETFGDYTEKAHELLNTKLEQWAEEAVARGGFHNTTALLIQYENYRDWIVKDNVAYSELFLDTAGVASFDVWDLLPFTRGYVHILDKDPYLRHFAYDPQYFLNELDLLGQAAATQLARNISNSGAMQTYFAGETIPGDNLAYDADLRAWVEYIPENFRPNYHGVGTCSMMPKEMGGVVDNAARVYGVQGLRVIDGSIPPTQLSSHVMTVFYAMALKIADAILADY

SEQ ID NO: 986 - protein, 577 aa, Aspergillus niger
GIEASLLKDPKEVAGRTYDYIIAGGGLTGLTVAARLTENPNITVLVIESGSYESDRGPIIEDLNAYGDIFGSSVDHAYETVELATNNQTALIRSGNGLGGSTLINGGTWTRPHKAQVDSWETVFGNEGWNWDSVAAYSLQAERARAPNAKQIAAGHYFNASCHGINGTVHAGPRDTGDDYSPIVKALMSAVEDRGVPTKKDLGCGDPHGVSMFPNTLHEDQVRSDAAREWLLPNYQRPNLQVLTGQYVGKVLLSQNATTPRAVGVEFGTHKGNTHNVYAKHEVLLAAGSAVSPTILEYSGIGMKSILEPLGIDTVVDLPVGLNLQDQTTSTVRSRITSAGAGQGQAAWFATFNETFGDYAEKAHELLNTKLEQWAEEAVARGGFHNTTALLIQYENYRDWIVKDNVAYSELFLDTAGVASFDVWDLLPFTRGYVHILDKDPYLRHFAYDPQYFLNELDLLGQAAATQLARNISNSGAMQTYFAGETIPGDNLAYDADLRAWVEYIPENFRPNYHGVGTCSMMPKEMGGVVDNAARVYGVQGLRVIDGSIPPTQMSSHVMTVFYAMALKIADAILADY

SEQ ID NO: 987 - protein, 577 aa, Aspergillus niger
GIEASLLKDPKEVAGRTYDYIIAGGGLTGLTVAARLTENPNITVLVIESGSYESDRGPIIEDLNAYGDIFGSSVDHAYETVELATNNQTALIRSGNGLGGSTLINGGTWTRPHKAQVDSWETVFGNEGWNWDSVAAYSLQAERARAPNAKQIAAGHYFNASCHGINGTVHAGPRDTGDDYSPIVKALMSAVEDRGVPTKKDLGCGDPHGVSMFPNTLHPDQVRSDAAREWLLPNYQRPNLQVLTGQYVGKVLLSQNATTPRAVGVEFGTHKGNTHNVYAKHEVLLAAGSAVSPTILEYSGIGMKSILEPLGIDTVVDLPVGLNLQDQTTSTVRSRITPAGAGQGQAAWFATFNETFGDYTEKAHELLNTKLEQWAEEAVARGGFHNTTALLIQYENYRDWIVKDNVAYSELFLDTAGVASFDVWDLLPFTRGYVHILDKDPYLRHFAYDPQYFLNELDLLGQAAATQLARNISNSGAMQTYFAGETIPGDNLAYDADLSAWVEYIPENFRPNYHGVGTCSMMPKEMGGVVDNAARVYGVQGLRVIDGSIPPTQMSSHVMTVFYAMALKIADAILADY

SEQ ID NO: 988 - protein, 577 aa, Aspergillus niger
GIEASLLKDPKEVAGRTYDYIIAGGGLTGLTVAARLTENPNITVLVIESGSYESDRGPIIEDLNAYGDIFGSSVDHAYETVELATNNQTALIRSGNGLGGSTLINGGTWTRPHKAQVDSWETVFGNEGWNWDSVAAYSLQAERARAPNAKQIAAGHYFNPSCHGINGTVHAGPRDTGDDYSPIVKALMSAVEDRGVPTKKDLGCGDPHGVSMFPNTLHPDQVRSDAAREWLLPNYQRPNLQVLTGRYVGKVLLSQNATTPRAVGVEFGTHKGNTHNVYAKHEVLLAAGSAVSPTILEYSGIGMKSILEPLGIDTVVDLPVGLNLQDQTTSTVRSRITPAGAGQGQAAWFATFNETFGDYTEKAHELLNTKLEQWAEEAVARGGFHNTTALLIQYENYRDWIVKDNVAYSELFLDTAGVASFDVWDLLPFTRGYVHILDKDPYLRHFAYDPQYFLNELDLLGQAAATQLARNISNSGAMQTYFAGETIPGDNLAYDADLRAWVEYIPENFRPNYHGVGTCSMMPKEMGGVVDNAARVYGVQGLRVIDGSIPPTQLSSHVMTVFYAMALKIADAVLADY

SEQ ID NO: 989 - protein, 577 aa, Aspergillus niger
GIEASLLKDPKEVAGRTYDYIIAGGGLTGLTVAARLTENPNITVLVIESGSYESDRGPIIEDLNAYGDIFGSSVDHAYETVELATNNQTALIRSGNGLGGSTLINGGTWTRPHKAQVDSWETVFGNEGWNWDSVAAYSLQAERARAPNAKQIAAGHYFNASCHGINGTVHAGPRDTGDDYSPIVKALMSAVEDRGVPTKKDLGCGDPHGVSMFPNTLHPDQVRSDAAREWLLPNYQRPNLQVLTGRYVGKVLLSQNATTPRAVGVEFGTHKGNTHNVYAKHEVLLAAGSAVSPTILEYSGIGMKSILEPLGIDTVVDLPVGLNLQDQTTSTVRSRITPAGAGQGQAAWFATFNETFGDYTEKAHELLNTKLEQWAEEAVARGGFHNTTALLIQYENYRDWIVKDNVAYSELFLDTAGVASFDVWDLLPFTRGYVHILDKDPYLRHFAYDPQYFLNELDLLGQAAATQLARNISNSGAMQTYFAGETIPGDNLAYDADLRAWVEYIPENFRPNYHGVGTCSMMPKEMGGVVDNAARVYGVQGLRVIDGSIPPTQMSSHVMTVFYAMALKIADAILADY

SEQ ID NO: 990 - protein, 577 aa, Aspergillus niger
GIEASLLKDPKEVAGRTYDYIIAGGGLTGLTVAARLTENPNITVLVIESGSYESDRGPIIEDLNAYGDIFGSSVDHAYETVELATNNQTALIRSGNGLGGSTLINGGTWTRPHKAQVDSWETVFGNEGWNWDSVAAYSLQAERARAPNAKQIAAGHYFNASCHGLNGTVHAGPRDTGDDYSPIVKALMSAVEDRGVPTKKDLGCGDPHGVSMFPNTLHPDQVRSDAAREWLLPNYQRPNLQVLTGRYVGKVLLSQNATTPRAVGVEFGTHKGNTHNVYAKHEVLLAAGSAVSPTILEYSGIGMKSILEPLGIDTVVDLPVGLNLQDQTTSTVRSRITPAGAGQGQAAWFATFNETFGDYTEKAHELLNTKLEQWAEEAVARGGFHNTTALLIQYENYRDWIVKDNVAYSELFLDTAGVASFDVWDLLPFTRGYVHILDKDPYLRHFAYDPQYFLNELDLLGQAAATQLARNISNSGAMQTYFAGETIPGDNLAYDADLRAWVEYIPENFRPNYHGVGTCSMMPKEMGGVVDNAARVYGVQGLRVIDGSIPPTQMSSHVMTVFYAMALKIADAILADY

SEQ ID NO: 991 - protein, 577 aa, Aspergillus niger
GIEASLLKDPKEVAGRTYDYIIAGGGLTGLTVAARLTENPNITVLVIESGSYESDRGPIIEDLNAYGDIFGSSVDHAYETVELATNNQTALIRSGNGLGGSTLINGGTWTRPHKAQVDSWETVFGNEGWNWDSVAAYSLQAERARAPNAKQIAAGHYFNASCHGINGTVHAGPRDTGDDYSPIVKALMSAVEDRGVPTKKDLGCGDPHGVSMFPNTLHEDQVRSDAAREWLLPNYQRPNLQVLTGQYVGKVLLSQNATTPRAVGVEFGTHKGNTHNVYAKHEVLLAAGSAVSPTILEYSGIGMKSILEPLGIDTVVDLPVGLNLQDQTTSTVRSRITPAGAGQGQAAWFATFNETFGDYAEKAHELLNTKLEQWAEEAVARGGFHNTTALLIQYENYRDWIVKDNVAYSELFLDTAGVASFDVWDLLPFTRGYVHILDKDPYLRHFAYDPQYFLNELDLLGQAAATQLARNISNSGAMQTYFAGETIPGDNLAYDADLSAWVEYIPENFRPNYHGVGTCSMMPKEMGGVVDNAARVYGVQGLRVIDGSIPPTQLSSHVMTVFYAMALKIADAILADY

SEQ ID NO: 992 - protein, 577 aa, Aspergillus niger
GIEASLLKDPKEVAGRTYDYIIAGGGLTGLTVAAKLTENPNITVLVIESGSYESDRGPIIEDLNAYGDIFGSSVDHAYETVELATNNQTALIRSGNGLGGSTLINGGTWTRPHKAQVDSWETVFGNEGWNWDSVAAYSLQAERARAPNAKQIAAGHYFNPSCHGLNGTVHAGPRDTGDDYSPIVKALMSAVEDRGVPTKKDLGCGDPHGVSMFPNTLHPDQVRSDAAREWLLPNYQRPNLQVLTGRYVGKVLLSQNATTPRAVGVEFGTHKGNTHNVYAKHEVLLAAGSAVSPTILEYSGIGMKSILEPLGIDTVVDLPVGLNLQDQTTSTVRSRITPAGAGQGQAAWFATFNETFGDYTEKAHELLNTKLEQWAEEAVARGGFHNTTALLIQYENYRDWIVKDNVAYSELFLDTAGVASFDVWDLLPFTRGYVHILDKDPYLRHFAYDPQYFLNELDLLGQAAATQLARNISNSGAMQTYFAGETIPGDNLAYDADLRAWVEYIPENFRPNYHGVGTCSMMPKEMGGVVDNAARVYGVQGLRVIDGSIPPTQMSSHVMTVFYAMALKIADAILADY

SEQ ID NO: 993 - protein, 577 aa, Aspergillus niger
GIEASLLKDPKEVAGRTYDYIIAGGGLTGLTVAARLTENPNITVLVIESGSYESDRGPIIEDLNAYGDIFGSSVDHAYETVELPTNNQTALIRSGNGLGGSTLINGGTWTRPHKAQVDSWETVFGNEGWNWDSVAAYSLQAERARAPNAKQIAAGHYFNPSCHGLNGTVHAGPRDTGDDYSPIVKALMSAVEDRGVPTKKDLGCGDPHGVSMFPNTLHEDQVRSDAAREWLLPNYQRPNLQVLTGRYVGKVLLSQNATTPRAVGVEFGTHKGNTHNVYAKHEVLLAAGSAVSPTILEYSGIGMKSILEPLGIDTVVDLPVGLNLQDQTTSTVRSRITPAGAGQGQAAWFATFNETFGDYAEKAHELLNTKLEQWAEEAVARGGFHNTTALLIQYENYRDWIVKDNVAYSELFLDTAGVASFDVWDLLPFTRGYVHILDKDPYLRHFAYDPQYFLNELDLLGQAAATQLARNISNSGAMQTYFAGETIPGDNLAYDADLRAWVEYIPENFRPNYHGVGTCSMMPKEMGGVVDNAARVYGVQGLRVIDGSIPPTQLSSHVMTVFYAMALKIADAILADY

SEQ ID NO: 994 - protein, 577 aa, Aspergillus niger
GIEASLLKDPKEVAGRTYDYIIAGGGLTGLTVAARLTENPNITVLVIESGSYESDRGPIIEDLNAYGDIFGSSVDHAYETVELPTNNRTALIRSGNGLGGSTLINGGTWTRPHKAQVDSWETVFGNEGWNWDSVAAYSLQAERARAPNAKQIAAGHYFNASCHGLNGTVHAGPRDTGDDYSPIVKALMSAVEDRGVPTKKDLGCGDPHGVSMFPNTLHEDQVRSDAAREWLLPNYQRPNLQVLTGQYVGKVLLSQNATTPRAVGVEFGTHKGNTHNVYAKHEVLLAAGSAVSPTILEYSGIGMKSILEPLGIDTVVDLPVGLNLQDQTTSTVRSRITPAGAGQGQAAWFATFNETFGDYAEKAHELLNTKLEQWAEEAVARGGFHNTTALLIQYENYRDWIVKDNVAYSELFLDTAGVASFDVWDLLPFTRGYVHILDKDPYLRHFAYDPQYFLNELDLLGQAAATQLARNISNSGAMQTYFAGETIPGDNLAYDADLSAWVEYIPENFRPNYHGVGTCSMMPKEMGGVVDNAARVYGVQGLRVIDGSIPPTQMSSHVMTVFYAMALKIADAILADY

SEQ ID NO: 995 - protein, 577 aa, Aspergillus niger
GIEASLLKDPKEVAGRTYDYIIAGGGLTGLTVAAKLTENPNITVLVIESGSYESDRGPIIEDLNAYGDIFGSSVDHAYETVELPTNNRTALIRSGNGLGGSTLINGGTWTRPHKAQVDSWETVFGNEGWNWDSVAAYSLQAERARAPNAKQIAAGHYFNPSCHGLNGTVHAGPRDTGDDYSPIVKALMSAVEDRGVPTKKDLGCGDPHGVSMFPNTLHPDQVRSDAAREWLLPNYQRPNLQVLTGRYVGKVLLSQNATTPRAVGVEFGTHKGNTHNVYAKHEVLLAAGSAVSPTILEYSGIGMKSILEPLGIDTVVDLPVGLNLQDQTTSTVRSRITPAGAGQGQAAWFATFNETFGDYAEKAHELLNTKLEQWAEEAVARGGFHNTTALLIQYENYRDWIVKDNVAYSELFLDTAGVASFDVWDLLPFTRGYVHILDKDPYLRHFAYDPQYFLNELDLLGQAAATQLARNISNSGAMQTYFAGETIPGDNLAYDADLSAWVEYIPENFRPNYHGVGTCSMMPKEMGGVVDNAARVYGVQGLRVIDGSIPPTQLSSHVMTVFYAMALKIADAILADY

SEQ ID NO: 996 - protein, 577 aa, Aspergillus niger
GIEASLLKDPKEVAGRTYDYIIAGGGLTGLTVAARLTENPNITVLVIESGSYESDRGPIIEDLNAYGDIFGSSVDHAYETVELATNNRTALIRSGNGLGGSTLINGGTWTRPHKAQVDSWETVFGNEGWNWDSVAAYSLQAERARAPNAKQIAAGHYFNASCHGINGTVHAGPRDTGDDYSPIVKALMSAVEDRGVPTKKDLGCGDPHGVSMFPNTLHEDQVRSDAAREWLLPNYQRPNLQVLTGRYVGKVLLSQNATTPRAVGVEFGTHKGNTHNVYAKHEVLLAAGSAVSPTILEYSGIGMKSILEPLGIDTVVDLPVGLNLQDQTTSTVRSRITPAGAGQGQAAWFATFNETFGDYAEKAHELLNTKLEQWAEEAVARGGFHNTTALLIQYENYRDWIVKDNVAYSELFLDTAGVASFDVWDLLPFTRGYVHILDKDPYLRHFAYDPQYFLNELDLLGQAAATQLARNISNSGAMQTYFAGETIPGDNLAYDADLRAWVEYIPENFRPNYHGVGTCSMMPKEMGGVVDNAARVYGVQGLRVIDGSIPPTQLSSHVMTVFYAMALKIADAVLADY

SEQ ID NO: 997 - protein, 577 aa, Aspergillus niger
GIEASLLKDPKEVAGRTYDYIIAGGGLTGLTVAAKLTENPNITVLVIESGSYESDRGPIIEDLNAYGDIFGSSVDHAYETVELPTNNRTALIRSGNGLGGSTLINGGTWTRPHKAQVDSWETVFGNEGWNWDSVAAYSLQAERARAPNAKQIAAGHYFNPSCHGLNGTVHAGPRDTGDDYSPIVKALMSAVEDRGVPTKKDLGCGDPHGVSMFPNTLHPDQVRSDAAREWLLPNYQRPNLQVLTGRYVGKVLLSQNATTPRAVGVEFGTHKGNTHNVYAKHEVLLAAGSAVSPTILEYSGIGMKSILEPLGIDTVVDLPVGLNLQDQTTSTVRSRITPAGAGQGQAAWFATFNETFGDYTEKAHELLNTKLEQWAEEAVARGGFHNTTALLIQYENYRDWIVKDNVAYSELFLDTAGVASFDVWDLLPFTRGYVHILDKDPYLRHFAYDPQYFLNELDLLGQAAATQLARNISNSGAMQTYFAGETIPGDNLAYDADLRAWVEYIPENFRPNYHGVGTCSMMPKEMGGVVDNAARVYGVQGLRVIDGSIPPTQMSSHVMTVFYAMALKIADAILADY

SEQ ID NO: 998 - protein, 577 aa, Aspergillus niger
GIEASLLKDPKEVAGRTYDYIIAGGGLTGLTVAARLTENPNITVLVIESGSYESDRGPIIEDLNAYGDIFGSSVDHAYETVELATNNQTALIRSGNGLGGSTLINGGTWTRPHKAQVDSWETVFGNEGWNWDSVAAYSLQAERARAPNAKQIAAGHYFNASCHGLNGTVHAGPRDTGDDYSPIVKALMSAVEDRGVPTKKDLGCGDPHGVSMFPNTLHEDQVRSDAAREWLLPNYQRPNLQVLTGQYVGKVLLSQNATTPRAVGVEFGTHKGNTHNVYAKHEVLLAAGSAVSPTILEYSGIGMKSILEPLGIDTVVDLPVGLNLQDQTTSTVRSRITPAGAGQGQAAWFATFNETFGDYAEKAHELLNTKLEQWAEEAVARGGFHNTTALLIQYENYRDWIVKDNVAYSELFLDTAGVASFDVWDLLPFTRGYVHILDKDPYLRHFAYDPQYFLNELDLLGQAAATQLARNISNSGAMQTYFAGETIPGDNLAYDADLRAWVEYIPENFRPNYHGVGTCSMMPKEMGGVVDNAARVYGVQGLRVIDGSIPPTQLSSHVMTVFYAMALKIADAVLADY

SEQ ID NO: 999 - protein, 577 aa, Aspergillus niger
GIEASLLKDPKEVAGRTYDYIIAGGGLTGLTVAARLTENPNITVLVIESGSYESDRGPIIEDLNAYGDIFGSSVDHAYETVELATNNQTALIRSGNGLGGSTLINGGTWTRPHKAQVDSWETVFGNEGWNWDSVAAYSLQAERARAPNAKQIAAGHYFNASCHGINGTVHAGPRDTGDDYSPIVKALMSAVEDRGVPTKKDLGCGDPHGVSMFPNTLHPDQVRSDAAREWLLPNYQRPNLQVLTGQYVGKVLLSQNATTPRAVGVEFGTHKGNTHNVYAKHEVLLAAGSAVSPTILEYSGIGMKSILEPLGIDTVVDLPVGLNLQDQTTSTVRSRITSAGAGQGQAAWFATFNETFGDYTEKAHELLNTKLEQWAEEAVARGGFHNTTALLIQYENYRDWIVKDNVAYSELFLDTAGVASFDVWDLLPFTRGYVHILDKDPYLRHFAYDPQYFLNELDLLGQAAATQLARNISNSGAMQTYFAGETIPGDNLAYDADLRAWVEYIPENFRPNYHGVGTCSMMPKEMGGVVDNAARVYGVQGLRVIDGSIPPTQMSSHVMTVFYAMALKIADAILADY

SEQ ID NO: 1000 - protein, 577 aa, Aspergillus niger
GIEASLLKDPKEVAGRTYDYIIAGGGLTGLTVAARLTENPNITVLVIESGSYESDRGPIIEDLNAYGDIFGSSVDHAYETVELATNNQTALIRSGNGLGGSTLINGGTWTRPHKAQVDSWETVFGNEGWNWDSVAAYSLQAERARAPNAKQIAAGHYFNPSCHGINGTVHAGPRDTGDDYSPIVKALMSAVEDRGVPTKKDLGCGDPHGVSMFPNTLHPDQVRSDAAREWLLPNYQRPNLQVLTGQYVGKVLLSQNATTPRAVGVEFGTHKGNTHNVYAKHEVLLAAGSAVSPTILEYSGIGMKSILEPLGIDTVVDLPVGLNLQDQTTSTVRSRITSAGAGQGQAAWFATFNETFGDYTEKAHELLNTKLEQWAEEAVARGGFHNTTALLIQYENYRDWIVKDNVAYSELFLDTAGVASFDVWDLLPFTRGYVHILDKDPYLRHFAYDPQYFLNELDLLGQAAATQLARNISNSGAMQTYFAGETIPGDNLAYDADLSAWVEYIPENFRPNYHGVGTCSMMPKEMGGVVDNAARVYGVQGLRVIDGSIPPTQMSSHVMTVFYAMALKIADAILADY

SEQ ID NO: 1001 - protein, 577 aa, Aspergillus niger
GIEASLLTDPKEVAGRTYDYIIAGGGLTGLTVAARLTENPDITVLVIESGSYESDRGPIIEDLNAYGQIFGSSVDHAYETVELATNNQTALIRSGNGLGGSTLINGGNWTRPHKAQVDSWETVFGNEGWNWDSVAAYSLQAERARAPNAKQIAAGHYFNASCHGINGTVHAGPRDTGDDYSPIVKALMSAVEDRGVPTKKDLGCGDPHGVSMFPNTLHEDQVRSDAAREWLLPNYQRPNLQVLTGQYVGKVLLSKNATTPRAVGVEFGTHKGNTHNVYAKHEVLLAAGSAVSPTILEYSGIGMKSILEPLGIDTVVDLPVGLNLQDQTTSTVRSRITSAGAGQGQAAWFATFNETFGDYAEKAHELLNTKLEQWAEEAVARGGFHNTTALLIQYENYRDWIVKDNVAYSELFLDTAGVASFDVWDLLPFTRGYVHILDKDPYLRHFAYDPQYFLNELDLLGQAAATQLARNISNSGAMQTYFAGETIPGDNLAYDADLSAWVEYIPYNFRPNYHAVGTCSMMPKEMGGVVDNAARVYGVQGLRVIDGSIPPTQMSSHVMTVFYAMALKIADAILADY

SEQ ID NO: 1002 - protein, 577 aa, Aspergillus niger
GIEASLLKDPKEVAGRTYDYIIAGGGLTGLTVAARLTENPNITVLVIESGSYESDRGPIIEDLNAYGDIFGSSVDHAYETVELPTNNRTALIRSGNGLGGSTLINGGTWTRPHKAQVDSWETVFGNEGWNWDSVAAYSLQAERARAPNAKQIAAGHYFNPSCHGLNGTVHAGPRDTGDDYSPIVKALMSAVEDRGVPTKKDLGCGDPHGVSMFPNTLHPDQVRSDAAREWLLPNYQRPNLQVLTGRYVGKVLLSQNATTPRAVGVEFGTHKGNTHNVYAKHEVLLAAGSAVSPTILEYSGIGMKSILEPLGIDTVVDLPVGLNLQDQTTSTVRSRITPAGAGQGQAAWFATFNETFGDYTEKAHELLNTKLEQWAEEAVARGGFHNTTALLIQYENYRDWIVKDNVAYSELFLDTAGVASFDVWDLLPFTRGYVHILDKDPYLRHFAYDPQYFLNELDLLGQAAATQLARNISNSGAMQTYFAGETIPGDNLAYDADLRAWVEYIPENFRPNYHGVGTCSMMPKEMGGVVDNAARVYGVQGLRVIDGSIPPTQLSSHVMTVFYAMALKIADAVLADY

SEQ ID NO: 1003 - protein, 577 aa, Aspergillus niger
GIEASLLKDPKEVAGRTYDYIIAGGGLTGLTVAARLTENPNITVLVIESGSYESDRGPIIEDLNAYGDIFGSSVDHAYETVELPTNNRTALIRSGNGLGGSTLINGGTWTRPHKAQVDSWETVFGNEGWNWDSVAAYSLQAERARAPNAKQIAAGHYFNASCHGLNGTVHAGPRDTGDDYSPIVKALMSAVEDRGVPTKKDLGCGDPHGVSMFPNTLHEDQVRSDAAREWLLPNYQRPNLQVLTGQYVGKVLLSQNATTPRAVGVEFGTHKGNTHNVYAKHEVLLAAGSAVSPTILEYSGIGMKSILEPLGIDTVVDLPVGLNLQDQTTSTVRSRITSAGAGQGQAAWFATFNETFGDYAEKAHELLNTKLEQWAEEAVARGGFHNTTALLIQYENYRDWIVKDNVAYSELFLDTAGVASFDVWDLLPFTRGYVHILDKDPYLRHFAYDPQYFLNELDLLGQAAATQLARNISNSGAMQTYFAGETIPGDNLAYDADLRAWVEYIPENFRPNYHGVGTCSMMPKEMGGVVDNAARVYGVQGLRVIDGSIPPTQLSSHVMTVFYAMALKIADAILADY

SEQ ID NO: 1004 - protein, 577 aa, Aspergillus niger
GIEASLLKDPKEVAGRTYDYIIAGGGLTGLTVAAKLTENPNITVLVIESGSYESDRGPIIEDLNAYGDIFGSSVDHAYETVELPTNNRTALIRSGNGLGGSTLINGGTWTRPHKAQVDSWETVFGNEGWNWDSVAAYSLQAERARAPNAKQIAAGHYFNASCHGLNGTVHAGPRDTGDDYSPIVKALMSAVEDRGVPTKKDLGCGDPHGVSMFPNTLHEDQVRSDAAREWLLPNYQRPNLQVLTGQYVGKVLLSQNATTPRAVGVEFGTHKGNTHNVYAKHEVLLAAGSAVSPTILEYSGIGMKSILEPLGIDTVVDLPVGLNLQDQTTSTVRSRITPAGAGQGQAAWFATFNETFGDYAEKAHELLNTKLEQWAEEAVARGGFHNTTALLIQYENYRDWIVKDNVAYSELFLDTAGVASFDVWDLLPFTRGYVHILDKDPYLRHFAYDPQYFLNELDLLGQAAATQLARNISNSGAMQTYFAGETIPGDNLAYDADLRAWVEYIPENFRPNYHGVGTCSMMPKEMGGVVDNAARVYGVQGLRVIDGSIPPTQLSSHVMTVFYAMALKIADAILADY

SEQ ID NO: 1005 - protein, 577 aa, Aspergillus niger
GIEASLLKDPKEVAGRTYDYIIAGGGLTGLTVAARLTENPNITVLVIESGSYESDRGPIIEDLNAYGDIFGSSVDHAYETVELATNNRTALIRSGNGLGGSTLINGGTWTRPHKAQVDSWETVFGNEGWNWDSVAAYSLQAERARAPNAKQIAAGHYFNASCHGLNGTVHAGPRDTGDDYSPIVKALMSAVEDRGVPTKKDLGCGDPHGVSMFPNTLHEDQVRSDAAREWLLPNYQRPNLQVLTGRYVGKVLLSQNATTPRAVGVEFGTHKGNTHNVYAKHEVLLAAGSAVSPTILEYSGIGMKSILEPLGIDTVVDLPVGLNLQDQTTSTVRSRITSAGAGQGQAAWFATFNETFGDYAEKAHELLNTKLEQWAEEAVARGGFHNTTALLIQYENYRDWIVKDNVAYSELFLDTAGVASFDVWDLLPFTRGYVHILDKDPYLRHFAYDPQYFLNELDLLGQAAATQLARNISNSGAMQTYFAGETIPGDNLAYDADLRAWVEYIPENFRPNYHGVGTCSMMPKEMGGVVDNAARVYGVQGLRVIDGSIPPTQLSSHVMTVFYAMALKIADAILADY

SEQ ID NO: 1006 - protein, 577 aa, Aspergillus niger
GIEASLLTDPKEVAGRTYDYIIAGGGLTGLTVAARLTENPDITVLVIESGSYESDRGPIIEDLNAYGQIFGSSVDHAYETVELATNNQTALIRSGNGLGGSTLINGGTWTRPHKAQVDSWETVFGNEGWNWDSVAAYSLQAERARAPNAKQIAAGHYFNASCHGLNGTVHAGPRDTGDDYSPIVKALMSAVEDRGVPTKKDLGCGDPHGVSMFPNTLHEDQVRSDAAREWLLPNYQRPNLQVLTGQYVGKVLLSKNATTPRAVGVEFGTHKGNTHNVYAKHEVLLAAGSAVSPTILEYSGIGMKSILEPLGIDTVVDLPVGLNLQDQTTSTVRSRITSAGAGQGQAAWFATFNETFGDYTEKAHELLNTKLEQWAEEAVARGGFHNTTALLIQYENYRDWIVKDNVAYSELFLDTAGVASFDVWDLLPFTRGYVHILDKDPYLRHFAYDPQYFLNELDLLGQAAATQLARNISNSGAMQTYFAGETIPGDNLAYDADLSAWVEYIPYNFRPNYHAVGTCSMMPKEMGGVVDNAARVYGVQGLRVIDGSIPPTQMSSHVMTVFYAMALKIADAILADY

SEQ ID NO: 1007 - protein, 577 aa, Aspergillus niger
GIEASLLKDPKEVAGRTYDYIIAGGGLTGLTVAAKLTENPNITVLVIESGSYESDRGPIIEDLNAYGDIFGSSVDHAYETVELATNNRTALIRSGNGLGGSTLINGGTWTRPHKAQVDSWETVFGNEGWNWDSVAAYSLQAERARAPNAKQIAAGHYFNPSCHGLNGTVHAGPRDTGDDYSPIVKALMSAVEDRGVPTKKDLGCGDPHGVSMFPNTLHPDQVRSDAAREWLLPNYQRPNLQVLTGRYVGKVLLSQNATTPRAVGVEFGTHKGNTHNVYAKHEVLLAAGSAVSPTILEYSGIGMKSILEPLGIDTVVDLPVGLNLQDQTTSTVRSRITSAGAGQGQAAWFATFNETFGDYAEKAHELLNTKLEQWAEEAVARGGFHNTTALLIQYENYRDWIVKDNVAYSELFLDTAGVASFDVWDLLPFTRGYVHILDKDPYLRHFAYDPQYFLNELDLLGQAAATQLARNISNSGAMQTYFAGETIPGDNLAYDADLSAWVEYIPENFRPNYHGVGTCSMMPKEMGGVVDNAARVYGVQGLRVIDGSIPPTQMSSHVMTVFYAMALKIADAILADY

SEQ ID NO: 1008 - protein, 577 aa, Aspergillus niger
GIEASLLKDPKEVAGRTYDYIIAGGGLTGLTVAARLTENPNITVLVIESGSYESDRGPIIEDLNAYGDIFGSSVDHAYETVELATNNQTALIRSGNGLGGSTLINGGTWTRPHKAQVDSWETVFGNEGWNWDSVAAYSLQAERARAPNAKQIAAGHYFNASCHGINGTVHAGPRDTGDDYSPIVKALMSAVEDRGVPTKKDLGCGDPHGVSMFPNTLHPDQVRSDAAREWLLPNYQRPNLQVLTGQYVGKVLLSQNATTPRAVGVEFGTHKGNTHNVYAKHEVLLAAGSAVSPTILEYSGIGMKSILEPLGIDTVVDLPVGLNLQDQTTSTVRSRITSAGAGQGQAAWFATFNETFGDYAEKAHELLNTKLEQWAEEAVARGGFHNTTALLIQYENYRDWIVKDNVAYSELFLDTAGVASFDVWDLLPFTRGYVHILDKDPYLRHFAYDPQYFLNELDLLGQAAATQLARNISNSGAMQTYFAGETIPGDNLAYDADLSAWVEYIPENFRPNYHGVGTCSMMPKEMGGVVDNAARVYGVQGLRVIDGSIPPTQMSSHVMTVFYAMALKIADAILADY

SEQ ID NO: 1009 - protein, 577 aa, Aspergillus niger
GIEASLLKDPKEVAGRTYDYIIAGGGLTGLTVAAKLTENPNITVLVIESGSYESDRGPIIEDLNAYGDIFGSSVDHAYETVELPTNNRTALIRSGNGLGGSTLINGGTWTRPHKAQVDSWETVFGNEGWNWDSVAAYSLQAERARAPNAKQIAAGHYFNPSCHGLNGTVHAGPRDTGDDYSPIVKALMSAVEDRGVPTKKDLGCGDPHGVSMFPNTLHEDQVRSDAAREWLLPNYQRPNLQVLTGQYVGKVLLSQNATTPRAVGVEFGTHKGNTHNVYAKHEVLLAAGSAVSPTILEYSGIGMKSILEPLGIDTVVDLPVGLNLQDQTTSTVRSRITPAGAGQGQAAWFATFNETFGDYAEKAHELLNTKLEQWAEEAVARGGFHNTTALLIQYENYRDWIVKDNVAYSELFLDTAGVASFDVWDLLPFTRGYVHILDKDPYLRHFAYDPQYFLNELDLLGQAAATQLARNISNSGAMQTYFAGETIPGDNLAYDADLSAWVEYIPENFRPNYHGVGTCSMMPKEMGGVVDNAARVYGVQGLRVIDGSIPPTQMSSHVMTVFYAMALKIADAILADY

SEQ ID NO: 1010 - protein, 577 aa, Aspergillus niger
GIEASLLKDPKEVAGRTYDYIIAGGGLTGLTVAARLTENPNITVLVIESGSYESDRGPIIEDLNAYGDIFGSSVDHAYETVELATNNRTALIRSGNGLGGSTLINGGTWTRPHKAQVDSWETVFGNEGWNWDSVAAYSLQAERARAPNAKQIAAGHYFNPSCHGLNGTVHAGPRDTGDDYSPIVKALMSAVEDRGVPTKKDLGCGDPHGVSMFPNTLHPDQVRSDAAREWLLPNYQRPNLQVLTGRYVGKVLLSQNATTPRAVGVEFGTHKGNTHNVYAKHEVLLAAGSAVSPTILEYSGIGMKSILEPLGIDTVVDLPVGLNLQDQTTSTVRSRITSAGAGQGQAAWFATFNETFGDYTEKAHELLNTKLEQWAEEAVARGGFHNTTALLIQYENYRDWIVKDNVAYSELFLDTAGVASFDVWDLLPFTRGYVHILDKDPYLRHFAYDPQYFLNELDLLGQAAATQLARNISNSGAMQTYFAGETIPGDNLAYDADLSAWVEYIPENFRPNYHGVGTCSMMPKEMGGVVDNAARVYGVQGLRVIDGSIPPTQMSSHVMTVFYAMALKIADAILADY

SEQ ID NO: 1011 - protein, 577 aa, Aspergillus niger
GIEASLLKDPKEVAGRTYDYIIAGGGLTGLTVAARLTENPNITVLVIESGSYESDRGPIIEDLNAYGDIFGSSVDHAYETVELATNNRTALIRSGNGLGGSTLINGGTWTRPHKAQVDSWETVFGNEGWNWDSVAAYSLQAERARAPNAKQIAAGHYFNASCHGINGTVHAGPRDTGDDYSPIVKALMSAVEDRGVPTKKDLGCGDPHGVSMFPNTLHEDQVRSDAAREWLLPNYQRPNLQVLTGQYVGKVLLSQNATTPRAVGVEFGTHKGNTHNVYAKHEVLLAAGSAVSPTILEYSGIGMKSILEPLGIDTVVDLPVGLNLQDQTTSTVRSRITSAGAGQGQAAWFATFNETFGDYAEKAHELLNTKLEQWAEEAVARGGFHNTTALLIQYENYRDWIVKDNVAYSELFLDTAGVASFDVWDLLPFTRGYVHILDKDPYLRHFAYDPQYFLNELDLLGQAAATQLARNISNSGAMQTYFAGETIPGDNLAYDADLSAWVEYIPENFRPNYHGVGTCSMMPKEMGGVVDNAARVYGVQGLRVIDGSIPPTQLSSHVMTVFYAMALKIADAILADY

SEQ ID NO: 1012 - protein, 577 aa, Aspergillus niger
GIEASLLKDPKEVAGRTYDYIIAGGGLTGLTVAARLTENPNITVLVIESGSYESDRGPIIEDLNAYGDIFGSSVDHAYETVELATNNQTALIRSGNGLGGSTLINGGTWTRPHKAQVDSWETVFGNEGWNWDSVAAYSLQAERARAPNAKQIAAGHYFNPSCHGLNGTVHAGPRDTGDDYSPIVKALMSAVEDRGVPTKKDLGCGDPHGVSMFPNTLHPDQVRSDAAREWLLPNYQRPNLQVLTGRYVGKVLLSQNATTPRAVGVEFGTHKGNTHNVYAKHEVLLAAGSAVSPTILEYSGIGMKSILEPLGIDTVVDLPVGLNLQDQTTSTVRSRITPAGAGQGQAAWFATFNETFGDYTEKAHELLNTKLEQWAEEAVARGGFHNTTALLIQYENYRDWIVKDNVAYSELFLDTAGVASFDVWDLLPFTRGYVHILDKDPYLRHFAYDPQYFLNELDLLGQAAATQLARNISNSGAMQTYFAGETIPGDNLAYDADLRAWVEYIPENFRPNYHGVGTCSMMPKEMGGVVDNAARVYGVQGLRVIDGSIPPTQMSSHVMTVFYAMALKIADAVLADY

SEQ ID NO: 1013 - protein, 577 aa, Aspergillus niger
GIEASLLKDPKEVAGRTYDYIIAGGGLTGLTVAARLTENPNITVLVIESGSYESDRGPIIEDLNAYGDIFGSSVDHAYETVELATNNQTALIRSGNGLGGSTLINGGTWTRPHKAQVDSWETVFGNEGWNWDSVAAYSLQAERARAPNAKQIAAGHYFNPSCHGINGTVHAGPRDTGDDYSPIVKALMSAVEDRGVPTKKDLGCGDPHGVSMFPNTLHEDQVRSDAAREWLLPNYQRPNLQVLTGQYVGKVLLSQNATTPRAVGVEFGTHKGNTHNVYAKHEVLLAAGSAVSPTILEYSGIGMKSILEPLGIDTVVDLPVGLNLQDQTTSTVRSRITSAGAGQGQAAWFATFNETFGDYAEKAHELLNTKLEQWAEEAVARGGFHNTTALLIQYENYRDWIVKDNVAYSELFLDTAGVASFDVWDLLPFTRGYVHILDKDPYLRHFAYDPQYFLNELDLLGQAAATQLARNISNSGAMQTYFAGETIPGDNLAYDADLSAWVEYIPENFRPNYHGVGTCSMMPKEMGGVVDNAARVYGVQGLRVIDGSIPPTQLSSHVMTVFYAMALKIADAILADY

SEQ ID NO: 1014 - protein, 577 aa, Aspergillus niger
GIEASLLKDPKEVAGRTYDYIIAGGGLTGLTVAARLTENPNITVLVIESGSYESDRGPIIEDLNAYGDIFGSSVDHAYETVELPTNNQTALIRSGNGLGGSTLINGGTWTRPHKAQVDSWETVFGNEGWNWDSVAAYSLQAERARAPNAKQIAAGHYFNPSCHGLNGTVHAGPRDTGDDYSPIVKALMSAVEDRGVPTKKDLGCGDPHGVSMFPNTLHPDQVRSDAAREWLLPNYQRPNLQVLTGRYVGKVLLSQNATTPRAVGVEFGTHKGNTHNVYAKHEVLLAAGSAVSPTILEYSGIGMKSILEPLGIDTVVDLPVGLNLQDQTTSTVRSRITPAGAGQGQAAWFATFNETFGDYAEKAHELLNTKLEQWAEEAVARGGFHNTTALLIQYENYRDWIVKDNVAYSELFLDTAGVASFDVWDLLPFTRGYVHILDKDPYLRHFAYDPQYFLNELDLLGQAAATQLARNISNSGAMQTYFAGETIPGDNLAYDADLSAWVEYIPENFRPNYHGVGTCSMMPKEMGGVVDNAARVYGVQGLRVIDGSIPPTQMSSHVMTVFYAMALKIADAILADY

SEQ ID NO: 1015 - protein, 577 aa, Aspergillus niger
GIEASLLKDPKEVAGRTYDYIIAGGGLTGLTVAARLTENPNITVLVIESGSYESDRGPIIEDLNAYGDIFGSSVDHAYETVELPTNNRTALIRSGNGLGGSTLINGGTWTRPHKAQVDSWETVFGNEGWNWDSVAAYSLQAERARAPNAKQIAAGHYFNPSCHGLNGTVHAGPRDTGDDYSPIVKALMSAVEDRGVPTKKDLGCGDPHGVSMFPNTLHEDQVRSDAAREWLLPNYQRPNLQVLTGQYVGKVLLSQNATTPRAVGVEFGTHKGNTHNVYAKHEVLLAAGSAVSPTILEYSGIGMKSILEPLGIDTVVDLPVGLNLQDQTTSTVRSRITSAGAGQGQAAWFATFNETFGDYAEKAHELLNTKLEQWAEEAVARGGFHNTTALLIQYENYRDWIVKDNVAYSELFLDTAGVASFDVWDLLPFTRGYVHILDKDPYLRHFAYDPQYFLNELDLLGQAAATQLARNISNSGAMQTYFAGETIPGDNLAYDADLSAWVEYIPENFRPNYHGVGTCSMMPKEMGGVVDNAARVYGVQGLRVIDGSIPPTQMSSHVMTVFYAMALKIADAILADY

SEQ ID NO: 1016 - protein, 577 aa, Aspergillus niger
GIEASLLKDPKEVAGRTYDYIIAGGGLTGLTVAAKLTENPNITVLVIESGSYESDRGPIIEDLNAYGDIFGSSVDHAYETVELATNNQTALIRSGNGLGGSTLINGGTWTRPHKAQVDSWETVFGNEGWNWDSVAAYSLQAERARAPNAKQIAAGHYFNPSCHGINGTVHAGPRDTGDDYSPIVKALMSAVEDRGVPTKKDLGCGDPHGVSMFPNTLHPDQVRSDAAREWLLPNYQRPNLQVLTGQYVGKVLLSQNATTPRAVGVEFGTHKGNTHNVYAKHEVLLAAGSAVSPTILEYSGIGMKSILEPLGIDTVVDLPVGLNLQDQTTSTVRSRITSAGAGQGQAAWFATFNETFGDYAEKAHELLNTKLEQWAEEAVARGGFHNTTALLIQYENYRDWIVKDNVAYSELFLDTAGVASFDVWDLLPFTRGYVHILDKDPYLRHFAYDPQYFLNELDLLGQAAATQLARNISNSGAMQTYFAGETIPGDNLAYDADLSAWVEYIPENFRPNYHGVGTCSMMPKEMGGVVDNAARVYGVQGLRVIDGSIPPTQMSSHVMTVFYAMALKIADAILADY

SEQ ID NO: 1017 - protein, 577 aa, Aspergillus niger
GIEASLLKDPKEVAGRTYDYIIAGGGLTGLTVAARLTENPNITVLVIESGSYESDRGPIIEDLNAYGDIFGSSVDHAYETVELATNNQTALIRSGNGLGGSTLINGGTWTRPHKAQVDSWETVFGNEGWNWDSVAAYSLQAERARAPNAKQIAAGHYFNASCHGINGTVHAGPRDTGDDYSPIVKALMSAVEDRGVPTKKDLGCGDPHGVSMFPNTLHPDQVRSDAAREWLLPNYQRPNLQVLTGRYVGKVLLSQNATTPRAVGVEFGTHKGNTHNVYAKHEVLLAAGSAVSPTILEYSGIGMKSILEPLGIDTVVDLPVGLNLQDQTTSTVRSRITSAGAGQGQAAWFATFNETFGDYAEKAHELLNTKLEQWAEEAVARGGFHNTTALLIQYENYRDWIVKDNVAYSELFLDTAGVASFDVWDLLPFTRGYVHILDKDPYLRHFAYDPQYFLNELDLLGQAAATQLARNISNSGAMQTYFAGETIPGDNLAYDADLRAWVEYIPENFRPNYHGVGTCSMMPKEMGGVVDNAARVYGVQGLRVIDGSIPPTQLSSHVMTVFYAMALKIADAILADY

SEQ ID NO: 1018 - protein, 577 aa, Aspergillus niger
GIEASLLKDPKEVAGRTYDYIIAGGGLTGLTVAAKLTENPNITVLVIESGSYESDRGPIIEDLNAYGDIFGSSVDHAYETVELATNNRTALIRSGNGLGGSTLINGGTWTRPHKAQVDSWETVFGNEGWNWDSVAAYSLQAERARAPNAKQIAAGHYFNPSCHGINGTVHAGPRDTGDDYSPIVKALMSAVEDRGVPTKKDLGCGDPHGVSMFPNTLHEDQVRSDAAREWLLPNYQRPNLQVLTGQYVGKVLLSQNATTPRAVGVEFGTHKGNTHNVYAKHEVLLAAGSAVSPTILEYSGIGMKSILEPLGIDTVVDLPVGLNLQDQTTSTVRSRITSAGAGQGQAAWFATFNETFGDYAEKAHELLNTKLEQWAEEAVARGGFHNTTALLIQYENYRDWIVKDNVAYSELFLDTAGVASFDVWDLLPFTRGYVHILDKDPYLRHFAYDPQYFLNELDLLGQAAATQLARNISNSGAMQTYFAGETIPGDNLAYDADLSAWVEYIPENFRPNYHGVGTCSMMPKEMGGVVDNAARVYGVQGLRVIDGSIPPTQMSSHVMTVFYAMALKIADAILADY

SEQ ID NO: 1019 - protein, 577 aa, Aspergillus niger
GIEASLLKDPKEVAGRTYDYIIAGGGLTGLTVAARLTENPNITVLVIESGSYESDRGPIIEDLNAYGDIFGSSVDHAYETVELATNNQTALIRSGNGLGGSTLINGGTWTRPHKAQVDSWETVFGNEGWNWDSVAAYSLQAERARAPNAKQIAAGHYFNASCHGINGTVHAGPRDTGDDYSPIVKALMSAVEDRGVPTKKDLGCGDPHGVSMFPNTLHPDQVRSDAAREWLLPNYQRPNLQVLTGQYVGKVLLSQNATTPRAVGVEFGTHKGNTHNVYAKHEVLLAAGSAVSPTILEYSGIGMKSILEPLGIDTVVDLPVGLNLQDQTTSTVRSRITSAGAGQGQAAWFATFNETFGDYTEKAHELLNTKLEQWAEEAVARGGFHNTTALLIQYENYRDWIVKDNVAYSELFLDTAGVASFDVWDLLPFTRGYVHILDKDPYLRHFAYDPQYFLNELDLLGQAAATQLARNISNSGAMQTYFAGETIPGDNLAYDADLRAWVEYIPENFRPNYHGVGTCSMMPKEMGGVVDNAARVYGVQGLRVIDGSIPPTQLSSHVMTVFYAMALKIADAILADY

SEQ ID NO: 1020 - protein, 577 aa, Aspergillus niger
GIEASLLKDPKEVAGRTYDYIIAGGGLTGLTVAARLTENPNITVLVIESGSYESDRGPIIEDLNAYGDIFGSSVDHAYETVELATNNQTALIRSGNGLGGSTLINGGTWTRPHKAQVDSWETVFGNEGWNWDSVAAYSLQAERARAPNAKQIAAGHYFNASCHGINGTVHAGPRDTGDDYSPIVKALMSAVEDRGVPTKKDLGCGDPHGVSMFPNTLHEDQVRSDAAREWLLPNYQRPNLQVLTGQYVGKVLLSQNATTPRAVGVEFGTHKGNTHNVYAKHEVLLAAGSAVSPTILEYSGIGMKSILEPLGIDTVVDLPVGLNLQDQTTSTVRSRITPAGAGQGQAAWFATFNETFGDYAEKAHELLNTKLEQWAEEAVARGGFHNTTALLIQYENYRDWIVKDNVAYSELFLDTAGVASFDVWDLLPFTRGYVHILDKDPYLRHFAYDPQYFLNELDLLGQAAATQLARNISNSGAMQTYFAGETIPGDNLAYDADLRAWVEYIPENFRPNYHGVGTCSMMPKEMGGVVDNAARVYGVQGLRVIDGSIPPTQLSSHVMTVFYAMALKIADAVLADY

SEQ ID NO: 1021 - protein, 577 aa, Aspergillus niger
GIEASLLKDPKEVAGRTYDYIIAGGGLTGLTVAARLTENPNITVLVIESGSYESDRGPIIEDLNAYGDIFGSSVDHAYETVELATNNRTALIRSGNGLGGSTLINGGTWTRPHKAQVDSWETVFGNEGWNWDSVAAYSLQAERARAPNAKQIAAGHYFNASCHGLNGTVHAGPRDTGDDYSPIVKALMSAVEDRGVPTKKDLGCGDPHGVSMFPNTLHEDQVRSDAAREWLLPNYQRPNLQVLTGQYVGKVLLSQNATTPRAVGVEFGTHKGNTHNVYAKHEVLLAAGSAVSPTILEYSGIGMKSILEPLGIDTVVDLPVGLNLQDQTTSTVRSRITPAGAGQGQAAWFATFNETFGDYTEKAHELLNTKLEQWAEEAVARGGFHNTTALLIQYENYRDWIVKDNVAYSELFLDTAGVASFDVWDLLPFTRGYVHILDKDPYLRHFAYDPQYFLNELDLLGQAAATQLARNISNSGAMQTYFAGETIPGDNLAYDADLSAWVEYIPENFRPNYHGVGTCSMMPKEMGGVVDNAARVYGVQGLRVIDGSIPPTQMSSHVMTVFYAMALKIADAILADY

SEQ ID NO: 1022 - protein, 577 aa, Aspergillus niger
GIEASLLKDPKEVAGRTYDYIIAGGGLTGLTVAARLTENPNITVLVIESGSYESDRGPIIEDLNAYGDIFGSSVDHAYETVELATNNQTALIRSGNGLGGSTLINGGTWTRPHKAQVDSWETVFGNEGWNWDSVAAYSLQAERARAPNAKQIAAGHYFNPSCHGLNGTVHAGPRDTGDDYSPIVKALMSAVEDRGVPTKKDLGCGDPHGVSMFPNTLHEDQVRSDAAREWLLPNYQRPNLQVLTGQYVGKVLLSQNATTPRAVGVEFGTHKGNTHNVYAKHEVLLAAGSAVSPTILEYSGIGMKSILEPLGIDTVVDLPVGLNLQDQTTSTVRSRITSAGAGQGQAAWFATFNETFGDYAEKAHELLNTKLEQWAEEAVARGGFHNTTALLIQYENYRDWIVKDNVAYSELFLDTAGVASFDVWDLLPFTRGYVHILDKDPYLRHFAYDPQYFLNELDLLGQAAATQLARNISNSGAMQTYFAGETIPGDNLAYDADLSAWVEYIPENFRPNYHGVGTCSMMPKEMGGVVDNAARVYGVQGLRVIDGSIPPTQMSSHVMTVFYAMALKIADAILADY

SEQ ID NO: 1023 - protein, 577 aa, Aspergillus niger
GIEASLLKDPKEVAGRTYDYIIAGGGLTGLTVAARLTENPNITVLVIESGSYESDRGPIIEDLNAYGDIFGSSVDHAYETVELATNNQTALIRSGNGLGGSTLINGGTWTRPHKAQVDSWETVFGNEGWNWDSVAAYSLQAERARAPNAKQIAAGHYFNASCHGINGTVHAGPRDTGDDYSPIVKALMSAVEDRGVPTKKDLGCGDPHGVSMFPNTLHPDQVRSDAAREWLLPNYQRPNLQVLTGRYVGKVLLSQNATTPRAVGVEFGTHKGNTHNVYAKHEVLLAAGSAVSPTILEYSGIGMKSILEPLGIDTVVDLPVGLNLQDQTTSTVRSRITPAGAGQGQAAWFATFNETFGDYAEKAHELLNTKLEQWAEEAVARGGFHNTTALLIQYENYRDWIVKDNVAYSELFLDTAGVASFDVWDLLPFTRGYVHILDKDPYLRHFAYDPQYFLNELDLLGQAAATQLARNISNSGAMQTYFAGETIPGDNLAYDADLRAWVEYIPENFRPNYHGVGTCSMMPKEMGGVVDNAARVYGVQGLRVIDGSIPPTQLSSHVMTVFYAMALKIADAVLADY

SEQ ID NO: 1024 - protein, 577 aa, Aspergillus niger
GIEASLLKDPKEVAGRTYDYIIAGGGLTGLTVAARLTENPNITVLVIESGSYESDRGPIIEDLNAYGDIFGSSVDHAYETVELATNNQTALIRSGNGLGGSTLINGGTWTRPHKAQVDSWETVFGNEGWNWDSVAAYSLQAERARAPNAKQIAAGHYFNASCHGINGTVHAGPRDTGDDYSPIVKALMSAVEDRGVPTKKDLGCGDPHGVSMFPNTLHEDQVRSDAAREWLLPNYQRPNLQVLTGQYVGKVLLSQNATTPRAVGVEFGTHKGNTHNVYAKHEVLLAAGSAVSPTILEYSGIGMKSILEPLGIDTVVDLPVGLNLQDQTTSTVRSRITPAGAGQGQAAWFATFNETFGDYAEKAHELLNTKLEQWAEEAVARGGFHNTTALLIQYENYRDWIVKDNVAYSELFLDTAGVASFDVWDLLPFTRGYVHILDKDPYLRHFAYDPQYFLNELDLLGQAAATQLARNISNSGAMQTYFAGETIPGDNLAYDADLSAWVEYIPENFRPNYHGVGTCSMMPKEMGGVVDNAARVYGVQGLRVIDGSIPPTQMSSHVMTVFYAMALKIADAILADY

SEQ ID NO: 1025 - protein, 577 aa, Aspergillus niger
GIEASLLKDPKEVAGRTYDYIIAGGGLTGLTVAARLTENPNITVLVIESGSYESDRGPIIEDLNAYGDIFGSSVDHAYETVELATNNQTALIRSGNGLGGSTLINGGTWTRPHKAQVDSWETVFGNEGWNWDSVAAYSLQAERARAPNAKQIAAGHYFNPSCHGINGTVHAGPRDTGDDYSPIVKALMSAVEDRGVPTKKDLGCGDPHGVSMFPNTLHEDQVRSDAAREWLLPNYQRPNLQVLTGRYVGKVLLSQNATTPRAVGVEFGTHKGNTHNVYAKHEVLLAAGSAVSPTILEYSGIGMKSILEPLGIDTVVDLPVGLNLQDQTTSTVRSRITPAGAGQGQAAWFATFNETFGDYAEKAHELLNTKLEQWAEEAVARGGFHNTTALLIQYENYRDWIVKDNVAYSELFLDTAGVASFDVWDLLPFTRGYVHILDKDPYLRHFAYDPQYFLNELDLLGQAAATQLARNISNSGAMQTYFAGETIPGDNLAYDADLRAWVEYIPENFRPNYHGVGTCSMMPKEMGGVVDNAARVYGVQGLRVIDGSIPPTQMSSHVMTVFYAMALKIADAVLADY

SEQ ID NO: 1026 - protein, 577 aa, Aspergillus niger
GIEASLLKDPKEVAGRTYDYIIAGGGLTGLTVAAKLTENPNITVLVIESGSYESDRGPIIEDLNAYGDIFGSSVDHAYETVELATNNRTALIRSGNGLGGSTLINGGTWTRPHKAQVDSWETVFGNEGWNWDSVAAYSLQAERARAPNAKQIAAGHYFNPSCHGLNGTVHAGPRDTGDDYSPIVKALMSAVEDRGVPTKKDLGCGDPHGVSMFPNTLHEDQVRSDAAREWLLPNYQRPNLQVLTGQYVGKVLLSQNATTPRAVGVEFGTHKGNTHNVYAKHEVLLAAGSAVSPTILEYSGIGMKSILEPLGIDTVVDLPVGLNLQDQTTSTVRSRITSAGAGQGQAAWFATFNETFGDYAEKAHELLNTKLEQWAEEAVARGGFHNTTALLIQYENYRDWIVKDNVAYSELFLDTAGVASFDVWDLLPFTRGYVHILDKDPYLRHFAYDPQYFLNELDLLGQAAATQLARNISNSGAMQTYFAGETIPGDNLAYDADLSAWVEYIPENFRPNYHGVGTCSMMPKEMGGVVDNAARVYGVQGLRVIDGSIPPTQMSSHVMTVFYAMALKIADAILADY

SEQ ID NO: 1027 - protein, 577 aa, Aspergillus niger
GIEASLLKDPKEVAGRTYDYIIAGGGLTGLTVAARLTENPNITVLVIESGSYESDRGPIIEDLNAYGDIFGSSVDHAYETVELATNNRTALIRSGNGLGGSTLINGGTWTRPHKAQVDSWETVFGNEGWNWDSVAAYSLQAERARAPNAKQIAAGHYFNASCHGINGTVHAGPRDTGDDYSPIVKALMSAVEDRGVPTKKDLGCGDPHGVSMFPNTLHEDQVRSDAAREWLLPNYQRPNLQVLTGQYVGKVLLSQNATTPRAVGVEFGTHKGNTHNVYAKHEVLLAAGSAVSPTILEYSGIGMKSILEPLGIDTVVDLPVGLNLQDQTTSTVRSRITPAGAGQGQAAWFATFNETFGDYAEKAHELLNTKLEQWAEEAVARGGFHNTTALLIQYENYRDWIVKDNVAYSELFLDTAGVASFDVWDLLPFTRGYVHILDKDPYLRHFAYDPQYFLNELDLLGQAAATQLARNISNSGAMQTYFAGETIPGDNLAYDADLSAWVEYIPENFRPNYHGVGTCSMMPKEMGGVVDNAARVYGVQGLRVIDGSIPPTQLSSHVMTVFYAMALKIADAVLADY

SEQ ID NO: 1028 - protein, 577 aa, Aspergillus niger
GIEASLLKDPKEVAGRTYDYIIAGGGLTGLTVAARLTENPNITVLVIESGSYESDRGPIIEDLNAYGDIFGSSVDHAYETVELATNNQTALIRSGNGLGGSTLINGGTWTRPHKAQVDSWETVFGNEGWNWDSVAAYSLQAERARAPNAKQIAAGHYFNASCHGLNGTVHAGPRDTGDDYSPIVKALMSAVEDRGVPTKKDLGCGDPHGVSMFPNTLHPDQVRSDAAREWLLPNYQRPNLQVLTGRYVGKVLLSQNATTPRAVGVEFGTHKGNTHNVYAKHEVLLAAGSAVSPTILEYSGIGMKSILEPLGIDTVVDLPVGLNLQDQTTSTVRSRITPAGAGQGQAAWFATFNETFGDYAEKAHELLNTKLEQWAEEAVARGGFHNTTALLIQYENYRDWIVKDNVAYSELFLDTAGVASFDVWDLLPFTRGYVHILDKDPYLRHFAYDPQYFLNELDLLGQAAATQLARNISNSGAMQTYFAGETIPGDNLAYDADLSAWVEYIPENFRPNYHGVGTCSMMPKEMGGVVDNAARVYGVQGLRVIDGSIPPTQMSSHVMTVFYAMALKIADAILADY

SEQ ID NO: 1029 - protein, 577 aa, Aspergillus niger
GIEASLLKDPKEVAGRTYDYIIAGGGLTGLTVAARLTENPNITVLVIESGSYESDRGPIIEDLNAYGDIFGSSVDHAYETVELATNNRTALIRSGNGLGGSTLINGGTWTRPHKAQVDSWETVFGNEGWNWDSVAAYSLQAERARAPNAKQIAAGHYFNASCHGINGTVHAGPRDTGDDYSPIVKALMSAVEDRGVPTKKDLGCGDPHGVSMFPNTLHPDQVRSDAAREWLLPNYQRPNLQVLTGRYVGKVLLSQNATTPRAVGVEFGTHKGNTHNVYAKHEVLLAAGSAVSPTILEYSGIGMKSILEPLGIDTVVDLPVGLNLQDQTTSTVRSRITPAGAGQGQAAWFATFNETFGDYTEKAHELLNTKLEQWAEEAVARGGFHNTTALLIQYENYRDWIVKDNVAYSELFLDTAGVASFDVWDLLPFTRGYVHILDKDPYLRHFAYDPQYFLNELDLLGQAAATQLARNISNSGAMQTYFAGETIPGDNLAYDADLRAWVEYIPENFRPNYHGVGTCSMMPKEMGGVVDNAARVYGVQGLRVIDGSIPPTQMSSHVMTVFYAMALKIADAVLADY

SEQ ID NO: 1030 - protein, 577 aa, Aspergillus niger
GIEASLLKDPKEVAGRTYDYIIAGGGLTGLTVAARLTENPNITVLVIESGSYESDRGPIIEDLNAYGDIFGSSVDHAYETVELPTNNRTALIRSGNGLGGSTLINGGTWTRPHKAQVDSWETVFGNEGWNWDSVAAYSLQAERARAPNAKQIAAGHYFNPSCHGINGTVHAGPRDTGDDYSPIVKALMSAVEDRGVPTKKDLGCGDPHGVSMFPNTLHEDQVRSDAAREWLLPNYQRPNLQVLTGQYVGKVLLSQNATTPRAVGVEFGTHKGNTHNVYAKHEVLLAAGSAVSPTILEYSGIGMKSILEPLGIDTVVDLPVGLNLQDQTTSTVRSRITSAGAGQGQAAWFATFNETFGDYAEKAHELLNTKLEQWAEEAVARGGFHNTTALLIQYENYRDWIVKDNVAYSELFLDTAGVASFDVWDLLPFTRGYVHILDKDPYLRHFAYDPQYFLNELDLLGQAAATQLARNISNSGAMQTYFAGETIPGDNLAYDADLSAWVEYIPENFRPNYHGVGTCSMMPKEMGGVVDNAARVYGVQGLRVIDGSIPPTQMSSHVMTVFYAMALKIADAILADY

SEQ ID NO: 1031 - protein, 577 aa, Aspergillus niger
GIEASLLKDPKEVAGRTYDYIIAGGGLTGLTVAAKLTENPNITVLVIESGSYESDRGPIIEDLNAYGDIFGSSVDHAYETVELPTNNRTALIRSGNGLGGSTLINGGTWTRPHKAQVDSWETVFGNEGWNWDSVAAYSLQAERARAPNAKQIAAGHYFNPSCHGLNGTVHAGPRDTGDDYSPIVKALMSAVEDRGVPTKKDLGCGDPHGVSMFPNTLHPDQVRSDAAREWLLPNYQRPNLQVLTGRYVGKVLLSQNATTPRAVGVEFGTHKGNTHNVYAKHEVLLAAGSAVSPTILEYSGIGMKSILEPLGIDTVVDLPVGLNLQDQTTSTVRSRITPAGAGQGQAAWFATFNETFGDYTEKAHELLNTKLEQWAEEAVARGGFHNTTALLIQYENYRDWIVKDNVAYSELFLDTAGVASFDVWDLLPFTRGYVHILDKDPYLRHFAYDPQYFLNELDLLGQAAATQLARNISNSGAMQTYFAGETIPGDNLAYDADLRAWVEYIPENFRPNYHGVGTCSMMPKEMGGVVDNAARVYGVQGLRVIDGSIPPTQLSSHVMTVFYAMALKIADAILADY

SEQ ID NO: 1032 - protein, 577 aa, Aspergillus niger
GIEASLLKDPKEVAGRTYDYIIAGGGLTGLTVAAKLTENPNITVLVIESGSYESDRGPIIEDLNAYGDIFGSSVDHAYETVELATNNQTALIRSGNGLGGSTLINGGTWTRPHKAQVDSWETVFGNEGWNWDSVAAYSLQAERARAPNAKQIAAGHYFNPSCHGLNGTVHAGPRDTGDDYSPIVKALMSAVEDRGVPTKKDLGCGDPHGVSMFPNTLHPDQVRSDAAREWLLPNYQRPNLQVLTGQYVGKVLLSQNATTPRAVGVEFGTHKGNTHNVYAKHEVLLAAGSAVSPTILEYSGIGMKSILEPLGIDTVVDLPVGLNLQDQTTSTVRSRITSAGAGQGQAAWFATFNETFGDYTEKAHELLNTKLEQWAEEAVARGGFHNTTALLIQYENYRDWIVKDNVAYSELFLDTAGVASFDVWDLLPFTRGYVHILDKDPYLRHFAYDPQYFLNELDLLGQAAATQLARNISNSGAMQTYFAGETIPGDNLAYDADLRAWVEYIPENFRPNYHGVGTCSMMPKEMGGVVDNAARVYGVQGLRVIDGSIPPTQLSSHVMTVFYAMALKIADAILADY

SEQ ID NO: 1033 - protein, 576 aa, Aspergillus niger
IEASLLKDFKLVNGRTYDYIIAGGGLAGLTVAEKLTENPNITVLVIESGSYESDRGPIIEDLNAYGEIFGTSVDHAYETVELATDNRTALIRSGNGLGGSTLINGGTWTRPHKAQVDSWETVFGNEGWNWDSVAAYSLQAERARAPNAKQIAAGHYFNASCHGLNGTVHVGPRDTGDDYSPLMRALMSAVEDRGVPTKKDLGCGDPHGVSMFPNTLHEDQVRADAAREWLLPNYQRPNLQVLTGQYVGKVLLSQNATTPRAVGVEFGTHKSNTHNVYAKHEVLLSAGSTVSPTILEYSGIGMKSILEPLGIDTVVDLPVGLNLQDQTTSTVRSRITSAGAGQGQAAWFATFNETFGDYTEKAHELLNTKLEQWAEEAVARGGFHNTTALLIQYENYRDWIVKDNVAYSELFLDTGGVASFDVWDLLPFTRGYVHILDKDPYLRHFAYDPQYFLNELDLLGQAAATQLARNISNSGAMQTYFAGETIPGDNLAYDADLSAWVEYIPEHFRPNYHGVGTCSMMPKEMGGVVDNAARVYGVQGLRVIDGSIPPTQLSSHVMTVFYAMALKIADAVLADY

SEQ ID NO: 1034 - protein, 576 aa, Aspergillus niger
IEASLLKDPKLQAGRTYDYIIAGGGLAGLTVAEKLTENPNITVLVIESGSYESDRGPIIEDLNAYGEIFGTSVDHAYETVELATNNRTALIRSGNGLGGSTLINGGTWTRPHKAQVDSWETVFGNEGWNWDSVAAYSLQAERARAPNAKQIAAGHYFNASCHGLNGTVHVGPRDTGDDYSPLMRALMSAVEDRGVPTKKDLGCGDPHGVSMFPNTLHEDQVRADAAREWLLPNYQRPHLQVLTGQYVGKVLLSQNATTPRAVGVEFGTHKSNTHNVYAKHEVLLSAGSTVSPTILEYSGIGMKSILEPLGIDTVVDLPVGLNLQDQTTSTVRSRITSAGAGQGQAAWFATFNETFGKYTEKAHELLNTKLEQWAEEAVARGGFHNTTALLIQYENYRDWIVKDNVAYSELFLDTGGVASFDVWDLLPFTRGYVHILDKDPYLRHFAYDPQYFLNELDLLGQAAATQLARNISNSGAMQTYFAGETIPGENLAYDADLSAWVEYIPEHFRPNYHGVGTCSMMPKEMGGVVDNAARVYGVQGLRVIDGSIPPTQLSSHVMTVFYAMALKIADAVLADY

SEQ ID NO: 1035 - protein, 576 aa, Aspergillus niger
IEASLLKDPKLVAGRTYDYIIAGGGLAGLTVAEKLTENPNITVLVIEWGSYESDRGPIIEDLNAYGEIFGTSVDHAYETVELATNNRTALIRSGNGLGGSTLINGGTWTRPHKAQVDSWETVFGNEGWNWDSVAAYSLQAERARAPNAKQIAAGHYFNAACHGLNGTVHVGPRDTGDDYSPLMRALMSAVEDRGVPTKKDLGCGDPHGVSMFPNTLHEDQVRADAAREWLLPNYQRPNLQVLTGQYVGKVLLSQNATTPRAVGVEFGTHKSNTHNVYAKHEVLLSAGSTVSPTILEYSGIGMKSILEPLGIDTVVDLPVGLNLQDQTTSTVRSRITSAGNGQGQAAWFATFNETFGDYTEKAHELLNTKLEQWAEEAVARGGFHNTTALLIQYENYRDWIVKDNVAYSELFLDTGGVASFDVWDLLPFTRGYVHILDKDPYLRHFAYDPQYFLNELDLLGQAAATQLARNISNSGAMQTYFAGETIPGDNLAYMADLSAWVEYIPEHFRPNYHGVGTCSMMPKEMGGVVDNAARVYGVQGLRVIDGSIPPTQLSSHVMTVFYAMALKIADAVLADY

SEQ ID NO: 1036 - protein, 585 aa, Aspergillus niger
LPHYIRSNGIEASLLTDPKDVSGRTVDYIIAGGGLTGLTTAARLTENPNISVLVIESGSYESDRGPIIEDLNAYGDIFGSSVDHAYETVELATNNQTALIRSGNGLGGSTLVNGGTWTRPHKAQVDSWETVFGNEGWNWDNVAAYSLQAERARAPNAKQIAAGHYFNASCHGVNGTVHAGPRDTGDDYSPIVKALMSAVEDRGVPTKKDFGCGDPHGVSMFPNTLHEDQVRSDAAREWLLPNYQRPNLQVLTGQYVGKVLLSQNGTTPRAVGVEFGTHKGNTHNVYAEHEVLLAAGSAVSPTILEYSGIGMKSILEPLGIDTVVDLPVGLNLQDQTTATVRSRITSAGAGQGQAAWFATFNETFGDYSEKAHELLNTKLEQWAEEAVARGGFHNTTALLIQYENYRDWIVNHNVAYSELFLDTAGVASFDVWDLLPFTRGYVHILDKDPYLHHFAYDPQYFLNELDLLGQAAATQLARNISNSGAMQTYFAGETIPGDNLAYDADLSAWTEYIPYHFRPNYHGVGTCSMMPKEMGGVVDNAARVYGVQGLRVIDGSIPPTQMSSHVMTVFYAMALKISDAILEDY

SEQ ID NO: 1037 - protein, 585 aa, Aspergillus niger
LPHYIRSNGIEASLLTDPKDVSGRTVDYIIAGGGLTGLTTAARLTENPNISVLVIESGSYESDRGPIIEDLNAYGDIFGSSVDHAYETVELATNNQTALIRSGNGLGGSTLVNGGTWTRPHKAQVDSWETVFGNEGWNWDNVAAYSLQAERARAPNAKQIAAGHYFNASCHGTNGTVHAGPRDTGDDYSPIVKALMSAVEDRGVPTKKDFGCGDPHGVSMFPNTLHEDQVRSDAAREWLLPNYQRPNLQVLTGQYVGKVLLSQNGTTPRAVGVEFGTHKGNTHNVYAEHEVLLAAGSAVSPTILEYSGIGMKSILEPLGIDTVVDLPVGLNLQDQTTATVRSRITSAGAGQGQAAWFATFNETFGDYSEKAHELLNTKLEQWAEEAVARGGFHNTTALLIQYENYRDWIVNHNVAYSELFLDTAGVASFDVWDLLPFTRGYVHILDKDPYLHHFAYDPQYFLNELDLLGQAAATQLARNISNSGAMQTYFAGETIPGDNLAYDADLSAWTEYIPYHFRPNYHGVGTCSMMPKEMGGVVDNAARVYGVQGLRVIDGSIPPTQMSSHVMTVFYAMALKISDAILEDY

SEQ ID NO: 1038 - protein, 585 aa, Aspergillus niger
LPHYIRSNGIEASLLTDPKDVSGRTVDYIIAGGGLTGLTTAARLTENPNISVLVIESGSYESDRGPIIEDLNAYGDIFGSSVDHAYETVELATNNQTALIRSGNGLGGSTLVNGGTWTRPHKAQVDSWETVFGNEGWNWDNVAAYSLQAERARAPNAKQIAAGHYFNASCHGVNGTVHAGPRDTGDDYSPIVKALMSAVEDRGVPTQKDFGCGDPHGVSMFPNTLHEDQVRSDAAREWLLPNYQRPNLQVLTGQYVGKVLLSQNGTTPRAVGVEFGTHKGNTHNVYAKHEVLLAAGSAVSPTILEYSGIGMKSILEPLGIDTVVDLPVGLNLQDQTTATVRSRITSAGAGQGQAAWFATFNETFGDYSEKAHELLNTKLEQWAEEAVARGGFHNTTALLIQYENYRDWIVNHNVAYSELFLDTAGVASFDVWDLLPFTRGYVHILDKDPYLHHFAYDPQYFLNELDLLGQAAATQLARNISNSGAMQTYFAGETIPGDNLAYDADLSAWTEYIPYHFRPNYHGVGTCSMMPKEMGGVVDNAARVYGVQGLRVIDGSIPPTQMSSHVMTVFYAMALKISDAILEDY

SEQ ID NO: 1039 - protein, 585 aa, Aspergillus niger
LPHYIRSNGIEASLLTDPKDVSGRTVDYIIAGGGLTGLTTAARLTENPNISVLVIESGSYESDRGPIIEDLNAYGDIFGSSVDHAYETVELATNNQTALIRSGNGLGGSTLVNGGTWTRPHKAQVDSWETVFGNEGWNWDNVAAYSLQAERARAPNAKQIAAGHYFNASCHGTNGTVHAGPRDTGDDYSPIVKALMSAVEDRGVPTKKDFGCGDPHGVSMFPNTLHEDQVRSDAAREWLLPNYQRPNLQVLTGQYVGKVLLSQNGTTPRAVGVEFGTHKGNTHNVYAKHEVLLAAGSAVSPTILEYSGIGMKSILEPLGIDTVVDLPVGLNLQDQTTATVRSRITSAGAGQGQAAWFATFNETFGDYSEKAHELLNTKLEQWAEEAVARGGFHNTTALLIQYENYRDWIVNHNVAYSELFLDTAGVASFDVWDLLPFTRGYVHILDKDPYLHHFAYDPQYFLNELDLLGQAAATQLARNISNSGAMQTYFAGETIPGDNLAYDADLSAWTEYIPYHFRPNYHGVGTCSMMPKEMGGVVDNAARVYGVQGLRVIDGSIPPTQMSSHVMTVFYAMALKISDAILEDY

SEQ ID NO: 1040 - protein, 585 aa, Aspergillus niger
LPHYIRSNGIEASLLTDPKDVSGRTVDYIIAGGGLTGLTTAARLTENPNISVLVIESGSYESDRGPIIEDLNAYGDIFGSSVDHAYETVELATNNQTALIRSGNGLGGSTLVNGGTWTRPHKAQVDSWETVFGNEGWNWDNVAAYSLQAERARAPNAKQIAAGHYFNASCHGTNGTVHAGPRDTGDDYSPIVKALMSAVEDRGVPTQKDFGCGDPHGVSMFPNTLHEDQVRSDAAREWLLPNYQRPNLQVLTGQYVGKVLLSQNGTTPRAVGVEFGTHKGNTHNVYAKHEVLLAAGSAVSPTILEYSGIGMKSILEPLGIDTVVDLPVGLNLQDQTTATVRSRITSAGAGQGQAAWFATFNETFGDYSEKAHELLNTKLEQWAEEAVARGGFHNTTALLIQYENYRDWIVNHNVAYSELFLDTAGVASFDVWDLLPFTRGYVHILDKDPYLHHFAYDPQYFLNELDLLGQAAATQLARNISNSGAMQTYFAGETIPGDNLAYDADLSAWTEYIPYHFRPNYHGVGTCSMMPKEMGGVVDNAARVYGVQGLRVIDGSIPPTQMSSHVMTVFYAMALKISDAILEDY

SEQ ID NO: 1041 - protein, 585 aa, Aspergillus niger
LPHYIRSNGIEASLLTDPKDVSGRTVDYIIAGGGLTGLTTAARLTENPNISVLVIESGSYESDRGPIIEDLNAYGDIFGSSVDHAYETVELATNNQTALIRSGNGLGGSTLINGGTWTRPHKAQVDSWETVFGNEGWNWDNVAAYSLQAERARAPNAKQIAAGHYFNASCHGVNGTVHAGPRDTGDDYSPIVKALMSAVEDRGVPTKKDFGCGDPHGVSMFPNTLHEDQVRSDAAREWLLPNYQRPNLQVLTGQYVGKVLLSQNGTTPRAVGVEFGTHNGNTHNVYAKHEVLLTAGSAVSPTILEYSGIGMKSILEPLGIDTVVDLPVGLNLQDQTTATVRSRITSAGAGQGQAAWFATFNETFGDYSEKAHELLNTKLEQWAEEAVARGGFHNTTALLIQYENYRDWIVNHNVAYSELFLDTAGVASFDVWDLLPFTRGYVHILDKDPYLHHFAYDPQYFLNELDLLGQAAATQLARNISNSGAMQTYFAGETIPGDNLAYDADLSAWTEYIPYHFRPNYHGVGTCSMMPKEMGGVVDNAARVYGVQGLRVIDGSIPPTQMSSHVMTVFYAMALKISDAILEDY

SEQ ID NO: 1042 - protein, 585 aa, Aspergillus niger
LPHYIRSNGIEASLLTDPKDVSGRTVDYIIAGGGLTGLKTAARLTENPNISVLVIESGSYESDRGPIIEDLNAYGDIFGSSVDHAYETVELATNNQTALIRSGNGLGGSTLINGGTWTRPHKAQVDSWETVFGNEGWNWDNVAAYSLQAERARAPNAKQIAAGHYFNASCHGVNGTVHAGPRDTGDDYSPIVKALMSAVEDRGVPTKKDFGCGDPHGVSMFPNTLHEDQVRSDAAREWLLPNYQRPNLQVLTGQYVGKVLLSQNGTTPRAVGVEFGTHKGNTHNVYAKHEVLLAAGSAVSPTILEYSGIGMKSILEPLGIDTVVDLPVGLNLQDQTTATVRSRITSAGAGQGQAAWFATFNETFGDYSEKAHELLNTKLEQWAEEAVARGGFHNTTALLIQYENYRDWIVNHNVAYSELFLDTAGVASFDVWDLLPFTRGYVHILDKDPYLHHFAYDPQYFLNELDLLGQAAATQLARNISNSGAMQTYFAGETIPGDNLAYDADLSAWTEYIPYHFRPNYHGVGTCSMMPKEMGGVVDNAARVYGVQGLRVIDGSIPPTQMSSHVMTVFYAMALKISDAILEDY

SEQ ID NO: 1043 - protein, 585 aa, Aspergillus niger
LPHYIRSNGIEASLLTDPKDVSGRTVDYIIAGGGLTGLTTAARLTENPNISVLVIESGSYESDRGPIIEDLNAYGDIFGSSVDHAYETVELATNNQTALIRSGNGLGGSTLVNGGTWTRPHKAQVDSWETVFGNEGWNWDNVAAYSLQAERARAPNAKQIAAGHYFNASCHGVNGTVHAGPRDTGDDYSPIVKALMSAVEDRGVPTKKDFGCGDPHGVSMFPNTLHEDQVRSDAAREWLLPNYQRPNLQVLTGQYVGKVLLSQNGTTPRAVGVEFGTHKGNTHNVYAKHEVLLAAGSAVSPTILEYSGIGMKSILEPLGIDTVVDLPVGLNLQDQTTATVRSRITSAGAGQGQAAWFATFNETFGDYSEKAHELLNTKLEQWAEEAVARGGFHNTTALLIQYENYRDWIVNHNVAYSELFLDTAGVASFDVWDLLPFTRGYVHILDKDPYLHHFAYDPQYFLNELDLLGQAAATQLARNISNSGAMQTYFAGETIPGDNLAYDADLSAWTEYIPYHFRPNYHGVGTCSMMPKEMGGVVDNAARVYGVQGLRVIDGSIPPTQMSSHVMTVFYAMALKISDAILEDY

SEQ ID NO: 1044 - protein, 577 aa, Synthetic construct
GIEASLLTDPKEVAGRTVDYIIAGGGLTGLVVAARLTENPDITVLVIESGSYESDRGPIIEDLNAYGKIFGSSVDHAYETVCLATNNRTALIRAGNGLGGSTLVNGGTWTRPHKAQVDSWETVFGNEGWNWDSVAAYSLQAERARAPNAKQIAAGHYFNASCHGINGTVHAGPRDTGDDYSPIVKALMSAVEDRGVPTKKDLGCGDPHGVSMFPNTLHEDQVRSDAAREWLLPNYQRPNLQVLTGQYVGKVLLSQNATTPRAVGVEFGTHKGNFHNVTAKHEVLLAAGSAVSPTILEYSGIGMKSILEPLGIKTVVDLPVGLNLQDQTTSTVRSRITPAGAGQGQAAWFATFNETFGDYTPKAHELLNTKLEQWAEEAVARGGFHNTTALLIQYENYRDWIVKDNVAYSELFLDTAGEISFDVWDLLPFTRGYVHILDKDPYLRHFAYDPQYFLNELDLLGQAAATQLARNISNSGAMQTYFAGETIPGDNLAYDADLRAWVEYIPYHFRPNYHGVGTCSMMPKEMGGVVDNAARVYGVQGLRVIDGSIPPTQMSSHVMTVFYAMALKIADAVLADY

SEQ ID NO: 1045 - protein, 577 aa, Aspergillus niger
GIEASLLTDPKEVAGRTVDYIIAGGGLTGLTTAARLTENPDITVLVIESGSYESDRGPIIEDLNAYGDIFGSSVDHAYETVELATNNQTALIRSGNGLGGSTLVNGGTWTRPHKAQVDSWETVFGNEGWNWDSVAAYSLQAERARAPNAKQIAAGHYFNPSCHGINGTVHAGPRDTGDDYSPIVKALMSAVEDRGVPTKKDLGCGDPHGVSMFPNTLHEDQVRSDAAREWLLPNYQRPNLQVLTGQYVGKVLLSQNATTPRAVGVEFGTHKGNTHNVYAKHEVLLAAGSAVSPTILEYSGIGMKSILEPLGIDTVVDLPVGLNLQDQTTSTVRSRITSAGAGQGQAAWFATFNETFGDYTEKAHELLNTKLEQWAEEAVARGGFHNTTALLIQYENYRDWIVKDNVAYSELFLDTAGEASFDVWDLLPFTRGYVHILDKDPYLRHFAYDPQYFLNELDLLGQAAATQLARNISNSGAMQTYFAGETIPGDNLAYDADLRAWVEYIPYNFRPNYHGVGTCSMMPKEMGGVVDNAARVYGVQGLRVIDGSIPPTQMSSHVMTVFYAMALKIADAVLADY

SEQ ID NO: 1046 - protein, 577 aa, Synthetic construct
GIEASLLTDPKEVAGRTVDYIIAGGGLTGLVVAARLTENPDITVLVIESGSYESDRGPIIEDLNAYGKIFGSSVDHAYETVCLATNNRTALIRAGNGLGGSTLVNGGTWTRPHKAQVDSWETVFGNEGWNWDSVAAYSLQAERARAPNAKQIAAGHYFNASCHGINGTVHAGPRDTGDDYSPIVKALMSAVEDRGVPTKKDLCCGDPHGVSMFPNTLHEDQVRSDAAREWLLPNYQRPNLQVLTGQYVGKVLLSQNATTPRAVGVEFGTHKGNFHNVTAKHEVLLAAGSAVSPTILEYSGIGMKSILEPLGIKTVVDLPVGLNLQDQTTSTVRSRITSAGAGQGQAAWFATFNETFGDYTPKAHELLNTKLEQWAEEAVARGGFHNTTALLIQYENYRDWIVKDNVAYSELFLDTAGEISFDVWDLLPFTRGYVHILDKDPYLRHFAYDPQYFLNELDLLGQAAATQLARNISNSGAMQTYFAGETIPGDNLAYDADLRAWVEYIPYHFRPNYHGVGTCSMMPKEMGGVVDNAARVYGVQGLRVIDGSIPPTQMSSHVMTVFYAMALKIADAVLADY

SEQ ID NO: 1047 - protein, 577 aa, Synthetic construct
GIEDSLLTDPKEVAGRTVDYIIAGGGLTGLVVAARLTENPDITVLVIESGSYESDRGPIIEDLNAYGKIFGSSVDHAYETVCLATNNRTALIRAGNGLGGSTLVNGGTWTRPHKAQVDSWETVFGNEGWNWDSVAAYSLQAERARAPNAKQIAAGHYFNASCHGINGTVHAGPRDTGDDYSPIVKALMSAVEDRGVPTKKDLGCGDPHGVSMFPNTLHEDQVRSDAAREWLLPNYQRPNLQVLTGQYVGKVLLSQNATTPRAVGVEFGTHKGNFHNVTAKHEVLLAAGSAVSPTILEYSGIGMKSILEPLGIKTVVDLPVGLNLQDQTTSTVRSRITSAGAGQGQAAWFATFNETFGDYTPKAHELLNTKLEQWAEEAVARGGFHNTTALLIQYENYRDWIVKDNVAYSELFLDTAGEISFDVWDLLPFTRGYVHILDKDPYLRHFAYDPQYFLNELDLLGQAAATQLAREISNSGAMQTYFAGETIPGDNLAYDADLRAWVEYIPYHFRPNYHGVGTCSMMPKEMGGVVDNAARVYGVQGLRVIDGSIPPTQMSSHVMTVFYAMALKIADAVLADY

SEQ ID NO: 1048 - protein, 577 aa, Aspergillus niger
GIEASLLTDPKEVAGRTVDYIIAGGGLTGLTTAARLTENPDITVLVIESGSYESDRGPIIEDLNAYGDIFGSSVDHAYETVELATNNQTALIRSGNGLGGSTLVNGGTWTRPHKAQVDSWETVFGNEGWNWDSVAAYSLQAERARAPNAKQIAAGHYFNASCHGINGTVHAGPRDTGDDYSPIVKALMSAVEDRGVPTKKDLGCGDPHGVSMFPNTLHEDQVRSDAAREWLLPNYQRPNLQVLTGQYVGKVLLSQNATTPRAVGVEFGTHKGNTHNVYAKHEVLLAAGSAVSPTILEYSGIGMKSILEPLGIDTVVDLPVGLNLQDQTTSTVRSRITSAGAGQGQAAWFATFNETFGDYAEKAHELLNTKLEQWAEEAVARGGFHNTTALLIQYENYRDWIVKDNVAYSELFLDTAGVASFDVWDLLPFTRGYVHILDKDPYLRHFAYDPQYFLNELDLLGQAAATQLARNISNSGAMQTYFAGETIPGDNLAYDADLSAWVEYIHYNFRPNYHGVGTCSMMPKEMGGVVDNAARVYGVQGLRVIDGSIPPTQMSSHVMTVFYAMALKIADAILADY

SEQ ID NO: 1049 - protein, 577 aa, Aspergillus niger
GIEASLLKDPKEVAGRTYDYIIAGGGLTGLTVAARLTENPNITVLVIESGSYESDRGPIIEDLNAYGDIFGSSVDHAYETVELPTNNQTALIRSGNGLGGSTLINGGTWTRPHKAQVDSWETVFGNEGWNWDSVAAYSLQAERARAPNAKQIAAGHYFNASCHGINGTVHAGPRDTGDDYSPIVKALMSAVEDRGVPTKKDLGCGDPHGVSMFPNTLHEDQVRSDAAREWLLPNYQRPNLQVLTGQYVGKVLLSQNATTPRAVGVEFGTHKGNTHNVYAKHEVLLAAGSAVSPTILEYSGIGMKSILEPLGIDTVVDLPVGLNLQDQTTSTVRSRITPAGAGQGQAAWFATFNETFGDYAEKAHELLNTKLEQWAEEAVARGGFHNTTALLIQYENYRDWIVKDNVAYSELFLDTAGVASFDVWDLLPFTRGYVHILDKDPYLRHFAYDPQYFLNELDLLGQAAATQLARNISNSGAMQTYFAGETIPGDNLAYDADLSAWVEYIPENFRPNYHGVGTCSMMPKEMGGVVDNAARVYGVQGLRVIDGSIPPTQMSSHVMTVFYAMALKIADAILADY

SEQ ID NO: 1050 - protein, 577 aa, Aspergillus niger
GIEASLLKDPKEVAGRTYDYIIAGGGLTGLTVAARLTENPNITVLVIESGSYESDRGPIIEDLNAYGDIFGSSVDHAYETVELATNNQTALIRSGNGLGGSTLINGGTWTRPHKAQVDSWETVFGNEGWNWDSVAAYSLQAERARAPNAKQIAAGHYFNPSCHGLNGTVHAGPRDTGDDYSPIVKALMSAVEDRGVPTKKDLGCGDPHGVSMFPNTLHEDQVRSDAAREWLLPNYQRPNLQVLTGQYVGKVLLSQNATTPRAVGVEFGTHKGNTHNVYAKHEVLLAAGSAVSPTILEYSGIGMKSILEPLGIDTVVDLPVGLNLQDQTTSTVRSRITSAGAGQGQAAWFATFNETFGDYTEKAHELLNTKLEQWAEEAVARGGFHNTTALLIQYENYRDWIVKDNVAYSELFLDTAGVASFDVWDLLPFTRGYVHILDKDPYLRHFAYDPQYFLNELDLLGQAAATQLARNISNSGAMQTYFAGETIPGDNLAYDADLSAWVEYIPENFRPNYHGVGTCSMMPKEMGGVVDNAARVYGVQGLRVIDGSIPPTQMSSHVMTVFYAMALKIADAILADY

SEQ ID NO: 1051 - protein, 577 aa, Aspergillus niger
GIEASLLKDPKEVAGRTYDYIIAGGGLTGLTVAARLTENPNITVLVIESGSYESDRGPIIEDLNAYGDIFGSSVDHAYETVELATNNQTALIRSGNGLGGSTLINGGTWTRPHKAQVDSWETVFGNEGWNWDSVAAYSLQAERARAPNAKQIAAGHYFNASCHGINGTVHAGPRDTGDDYSPIVKALMSAVEDRGVPTKKDLGCGDPHGVSMFPNTLHEDQVRSDAAREWLLPNYQRPNLQVLTGQYVGKVLLSQNATTPRAVGVEFGTHKGNTHNVYAKHEVLLAAGSAVSPTILEYSGIGMKSILEPLGIDTVVDLPVGLNLQDQTTSTVRSRITPAGAGQGQAAWFATFNETFGDYTEKAHELLNTKLEQWAEEAVARGGFHNTTALLIQYENYRDWIVKDNVAYSELFLDTAGVASFDVWDLLPFTRGYVHILDKDPYLRHFAYDPQYFLNELDLLGQAAATQLARNISNSGAMQTYFAGETIPGDNLAYDADLRAWVEYIPENFRPNYHGVGTCSMMPKEMGGVVDNAARVYGVQGLRVIDGSIPPTQLSSHVMTVFYAMALKIADAVLADY

SEQ ID NO: 1052 - protein, 577 aa, Aspergillus niger
GIEASLLKDPKEVAGRTYDYIIAGGGLTGLTVAARLTENPNITVLVIESGSYESDRGPIIEDLNAYGDIFGSSVDHAYETVELPTNNRTALIRSGNGLGGSTLINGGTWTRPHKAQVDSWETVFGNEGWNWDSVAAYSLQAERARAPNAKQIAAGHYFNASCHGLNGTVHAGPRDTGDDYSPIVKALMSAVEDRGVPTKKDLGCGDPHGVSMFPNTLHEDQVRSDAAREWLLPNYQRPNLQVLTGQYVGKVLLSQNATTPRAVGVEFGTHKGNTHNVYAKHEVLLAAGSAVSPTILEYSGIGMKSILEPLGIDTVVDLPVGLNLQDQTTSTVRSRITSAGAGQGQAAWFATFNETFGDYTEKAHELLNTKLEQWAEEAVARGGFHNTTALLIQYENYRDWIVKDNVAYSELFLDTAGVASFDVWDLLPFTRGYVHILDKDPYLRHFAYDPQYFLNELDLLGQAAATQLARNISNSGAMQTYFAGETIPGDNLAYDADLRAWVEYIPENFRPNYHGVGTCSMMPKEMGGVVDNAARVYGVQGLRVIDGSIPPTQMSSHVMTVFYAMALKIADAILADY

SEQ ID NO: 1053 - protein, 577 aa, Aspergillus niger
GIEASLLKDPKEVAGRTYDYIIAGGGLTGLTVAARLTENPNITVLVIESGSYESDRGPIIEDLNAYGDIFGSSVDHAYETVELPTNNQTALIRSGNGLGGSTLINGGTWTRPHKAQVDSWETVFGNEGWNWDSVAAYSLQAERARAPNAKQIAAGHYFNASCHGINGTVHAGPRDTGDDYSPIVKALMSAVEDRGVPTKKDLGCGDPHGVSMFPNTLHEDQVRSDAAREWLLPNYQRPNLQVLTGQYVGKVLLSQNATTPRAVGVEFGTHKGNTHNVYAKHEVLLAAGSAVSPTILEYSGIGMKSILEPLGIDTVVDLPVGLNLQDQTTSTVRSRITSAGAGQGQAAWFATFNETFGDYAEKAHELLNTKLEQWAEEAVARGGFHNTTALLIQYENYRDWIVKDNVAYSELFLDTAGVASFDVWDLLPFTRGYVHILDKDPYLRHFAYDPQYFLNELDLLGQAAATQLARNISNSGAMQTYFAGETIPGDNLAYDADLRAWVEYIPENFRPNYHGVGTCSMMPKEMGGVVDNAARVYGVQGLRVIDGSIPPTQMSSHVMTVFYAMALKIADAILADY

SEQ ID NO: 1054 - protein, 577 aa, Aspergillus niger
GIEASLLKDPKEVAGRTYDYIIAGGGLTGLTVAARLTENPNITVLVIESGSYESDRGPIIEDLNAYGDIFGSSVDHAYETVELPTNNQTALIRSGNGLGGSTLINGGTWTRPHKAQVDSWETVFGNEGWNWDSVAAYSLQAERARAPNAKQIAAGHYFNPSCHGLNGTVHAGPRDTGDDYSPIVKALMSAVEDRGVPTKKDLGCGDPHGVSMFPNTLHPDQVRSDAAREWLLPNYQRPNLQVLTGRYVGKVLLSQNATTPRAVGVEFGTHKGNTHNVYAKHEVLLAAGSAVSPTILEYSGIGMKSILEPLGIDTVVDLPVGLNLQDQTTSTVRSRITSAGAGQGQAAWFATFNETFGDYAEKAHELLNTKLEQWAEEAVARGGFHNTTALLIQYENYRDWIVKDNVAYSELFLDTAGVASFDVWDLLPFTRGYVHILDKDPYLRHFAYDPQYFLNELDLLGQAAATQLARNISNSGAMQTYFAGETIPGDNLAYDADLSAWVEYIPENFRPNYHGVGTCSMMPKEMGGVVDNAARVYGVQGLRVIDGSIPPTQMSSHVMTVFYAMALKIADAILADY

SEQ ID NO: 1055 - protein, 577 aa, Aspergillus niger
GIEASLLTDPKEVAGRTVDYIIAGGGLTGLTTAARLTENPDITVLVIESGSYESDRGPIIEDLNAYGDIFGSSVDHAYETVELATNNQTALIRSGNGLGGSTLVNGGTWTRPHKAQVDSWETVFGNEGWNWDSVAAYSLQAERARAPNAKQIAAGHYFNASCHGINGTVHAGPRDTGDDYSPIVKALMSAVEDRGVPTKKDLGCGDPHGVSMFPNTLHEDQVRSDAAREWLLPNYQRPNLQVLTGQYVGKVLLSQNATTPRAVGVEFGTHKSNTHNVYAKHEVLLAAGSAVSPTILEYSGIGMKSILEPLGIDTVVDLPVGLNLQDQTTSTVRSRITSAGAGQGQAAWFATFNETFGDYAEKAHELLNTKLEQWAEEAVARGGFHNTTALLIQYENYRDWIVKDNVAYSELFLDTAGVASFDVWDLLPFTRGYVHILDKDPYLRHFAYDPQYFLNELDLLGQAAATQLARNISNSGAMQTYFAGETIPGDNLAYDADLSAWVEYIPYNFRPNYHGVGTCSMMPKEMGGVVDNAARVYGVQGLRVIDGSIPPTQMSSHVMTVFYAMALKIADAILADY

SEQ ID NO: 1056 - protein, 577 aa, Aspergillus niger
GIEASLLKDPKEVAGRTYDYIIAGGGLTGLTVAARLTENPNITVLVIESGSYESDRGPIIEDLNAYGDIFGSSVDHAYETVELATNNQTALIRSGNGLGGSTLINGGTWTRPHKAQVDSWETVFGNEGWNWDSVAAYSLQAERARAPNAKQIAAGHYFNASCHGINGTVHAGPRDTGDDYSPIVKALMSAVEDRGVPTKKDLGCGDPHGVSMFPNTLHPDQVRSDAAREWLLPNYQRPNLQVLTGRYVGKVLLSQNATTPRAVGVEFGTHKGNTHNVYAKHEVLLAAGSAVSPTILEYSGIGMKSILEPLGIDTVVDLPVGLNLQDQTTSTVRSRITPAGAGQGQAAWFATFNETFGDYTEKAHELLNTKLEQWAEEAVARGGFHNTTALLIQYENYRDWIVKDNVAYSELFLDTAGVASFDVWDLLPFTRGYVHILDKDPYLRHFAYDPQYFLNELDLLGQAAATQLARNISNSGAMQTYFAGETIPGDNLAYDADLRAWVEYIPENFRPNYHGVGTCSMMPKEMGGVVDNAARVYGVQGLRVIDGSIPPTQLSSHVMTVFYAMALKIADAVLADY

SEQ ID NO: 1057 - protein, 577 aa, Aspergillus niger
GIEASLLTDPKEVAGRTVDYIIAGGGLTGLTTAARLTENPDITVLVIESGSYESDRGPIIEDLNAYGDIFGSSVDHAYETVELATNNQTALIRSGNGLGGSTLVNGGTWTRPHKAQVDSWETVFGNEGWNWDSVAAYSLQAERARAPNAKQIAAGHYFNASCHGINGTVHAGPRDTGDDYSPIVKALMSAVEDRGVPTKKDLGCGDPHGVSMFPNTLHEDQVRSDAAREWLLPNYQRPNLQVLTGQYVGKVLLSQNATTPRAVGVEFGTHKGNTHNVYAKHEVLLAAGSAVSPTILEYSGIGMKSILEPLGIDTVVDLPVGLNLQDQTTSTVRSRITSAGAGQGQAAWFATFNETFGDYAEKAHELLNTKLEQWAEEAVARGGFHNTTALLIQYENYRDWIVKDNVAYSELFLDTAGVASFDVWDLLPFTRGYVHILDKDPYLRHFAYDPQYFLNELDLLGQAAATQLARNISNSGAMQTYFAGETIPGDNLAYDADLSAWVEYIPYNFRPNYHGVGTCSMMPKEMGGVVDNAARVYGVQGLRVIDGSIPPTQMSSHVMTVFYAMALKIADAILADY

SEQ ID NO: 1058 - protein, 577 aa, Aspergillus niger
GIEASLLTDPKEVAGRTVDYIIAGGGLTGLTTAARLTENPDITVLVIESGSYESDRGPIIEDLNAYGQIFGSSVDHAYETVELATNNQTALIRSGNGLGGSTLVNGGTWTRPHKAQVDSWETVFGNEGWNWDSVAAYSLQAERARAPNAKQIAAGHYFNASCHGINGTVHAGPRDTGDDYSPIVKALMSAVEDRGVPTKKDLGCGDPHGVSMFPNTLHEDQVRSDAAREWLLPNYQRPNLQVLTGQYVGKVLLSQNATTPRAVGVEFGTHKGNTHNVYAKHEVLLAAGSAVSPTILEYSGIGMKSILEPLGIDTVVDLPVGLNLQDQTTSTVRSRITSAGAGQGQAAWFATFNETFGDYAEKAHELLNTKLEQWAEEAVARGGFHNTTALLIQYENYRDWIVKDNVAYSELFLDTAGVASFDVWDLLPFTRGYVHILDKDPYLRHFAYDPQYFLNELDLLGQAAATQLARNISNSGAMQTYFAGETIPGDNLAYDADLSAWVEYIPYNFRPNYHGVGTCSMMPKEMGGVVDNAARVYGVQGLRVIDGSIPPTQMSSHVMTVFYAMALKIADAILADY

SEQ ID NO: 1059 - protein, 577 aa, Aspergillus niger
GIEASLLKDPKEVAGRTYDYIIAGGGLTGLTVAARLTENPNITVLVIESGSYESDRGPIIEDLNAYGDIFGSSVDHAYETVELPTNNQTALIRSGNGLGGSTLINGGTWTRPHKAQVDSWETVFGNEGWNWDSVAAYSLQAERARAPNAKQIAAGHYFNPSCHGINGTVHAGPRDTGDDYSPIVKALMSAVEDRGVPTKKDLGCGDPHGVSMFPNTLHPDQVRSDAAREWLLPNYQRPNLQVLTGRYVGKVLLSQNATTPRAVGVEFGTHKGNTHNVYAKHEVLLAAGSAVSPTILEYSGIGMKSILEPLGIDTVVDLPVGLNLQDQTTSTVRSRITSAGAGQGQAAWFATFNETFGDYTEKAHELLNTKLEQWAEEAVARGGFHNTTALLIQYENYRDWIVKDNVAYSELFLDTAGVASFDVWDLLPFTRGYVHILDKDPYLRHFAYDPQYFLNELDLLGQAAATQLARNISNSGAMQTYFAGETIPGDNLAYDADLRAWVEYIPENFRPNYHGVGTCSMMPKEMGGVVDNAARVYGVQGLRVIDGSIPPTQLSSHVMTVFYAMALKIADAILADY

SEQ ID NO: 1060 - protein, 577 aa, Aspergillus niger
GIEASLLKDPKEVAGRTYDYIIAGGGLTGLTVAARLTENPNITVLVIESGSYESDRGPIIEDLNAYGDIFGSSVDHAYETVELATNNRTALIRSGNGLGGSTLINGGTWTRPHKAQVDSWETVFGNEGWNWDSVAAYSLQAERARAPNAKQIAAGHYFNASCHGLNGTVHAGPRDTGDDYSPIVKALMSAVEDRGVPTKKDLGCGDPHGVSMFPNTLHEDQVRSDAAREWLLPNYQRPNLQVLTGQYVGKVLLSQNATTPRAVGVEFGTHKGNTHNVYAKHEVLLAAGSAVSPTILEYSGIGMKSILEPLGIDTVVDLPVGLNLQDQTTSTVRSRITSAGAGQGQAAWFATFNETFGDYTEKAHELLNTKLEQWAEEAVARGGFHNTTALLIQYENYRDWIVKDNVAYSELFLDTAGVASFDVWDLLPFTRGYVHILDKDPYLRHFAYDPQYFLNELDLLGQAAATQLARNISNSGAMQTYFAGETIPGDNLAYDADLRAWVEYIPENFRPNYHGVGTCSMMPKEMGGVVDNAARVYGVQGLRVIDGSIPPTQMSSHVMTVFYAMALKIADAVLADY

SEQ ID NO: 1061 - protein, 577 aa, Aspergillus niger
GIEASLLKDPKEVAGRTYDYIIAGGGLTGLTVAAKLTENPNITVLVIESGSYESDRGPIIEDLNAYGDIFGSSVDHAYETVELPTNNRTALIRSGNGLGGSTLINGGTWTRPHKAQVDSWETVFGNEGWNWDSVAAYSLQAERARAPNAKQIAAGHYFNASCHGLNGTVHAGPRDTGDDYSPIVKALMSAVEDRGVPTKKDLGCGDPHGVSMFPNTLHEDQVRSDAAREWLLPNYQRPNLQVLTGQYVGKVLLSQNATTPRAVGVEFGTHKGNTHNVYAKHEVLLAAGSAVSPTILEYSGIGMKSILEPLGIDTVVDLPVGLNLQDQTTSTVRSRITSAGAGQGQAAWFATFNETFGDYAEKAHELLNTKLEQWAEEAVARGGFHNTTALLIQYENYRDWIVKDNVAYSELFLDTAGVASFDVWDLLPFTRGYVHILDKDPYLRHFAYDPQYFLNELDLLGQAAATQLARNISNSGAMQTYFAGETIPGDNLAYDADLRAWVEYIPENFRPNYHGVGTCSMMPKEMGGVVDNAARVYGVQGLRVIDGSIPPTQLSSHVMTVFYAMALKIADAILADY

SEQ ID NO: 1062 - protein, 577 aa, Aspergillus niger
GIEASLLKDPKEVAGRTYDYIIAGGGLTGLTVAARLTENPNITVLVIESGSYESDRGPIIEDLNAYGDIFGSSVDHAYETVELATNNRTALIRSGNGLGGSTLINGGTWTRPHKAQVDSWETVFGNEGWNWDSVAAYSLQAERARAPNAKQIAAGHYFNASCHGINGTVHAGPRDTGDDYSPIVKALMSAVEDRGVPTKKDLGCGDPHGVSMFPNTLHEDQVRSDAAREWLLPNYQRPNLQVLTGRYVGKVLLSQNATTPRAVGVEFGTHKGNTHNVYAKHEVLLAAGSAVSPTILEYSGIGMKSILEPLGIDTVVDLPVGLNLQDQTTSTVRSRITSAGAGQGQAAWFATFNETFGDYTEKAHELLNTKLEQWAEEAVARGGFHNTTALLIQYENYRDWIVKDNVAYSELFLDTAGVASFDVWDLLPFTRGYVHILDKDPYLRHFAYDPQYFLNELDLLGQAAATQLARNISNSGAMQTYFAGETIPGDNLAYDADLRAWVEYIPENFRPNYHGVGTCSMMPKEMGGVVDNAARVYGVQGLRVIDGSIPPTQMSSHVMTVFYAMALKIADAILADY

SEQ ID NO: 1063 - protein, 577 aa, Aspergillus niger
GIEASLLKDPKEVAGRTYDYIIAGGGLTGLTVAARLTENPNITVLVIESGSYESDRGPIIEDLNAYGDIFGSSVDHAYETVELATNNQTALIRSGNGLGGSTLINGGTWTRPHKAQVDSWETVFGNEGWNWDSVAAYSLQAERARAPNAKQIAAGHYFNASCHGINGTVHAGPRDTGDDYSPIVKALMSAVEDRGVPTKKDLGCGDPHGVSMFPNTLHPDQVRSDAAREWLLPNYQRPNLQVLTGRYVGKVLLSQNATTPRAVGVEFGTHKGNTHNVYAKHEVLLAAGSAVSPTILEYSGIGMKSILEPLGIDTVVDLPVGLNLQDQTTSTVRSRITSAGAGQGQAAWFATFNETFGDYTEKAHELLNTKLEQWAEEAVARGGFHNTTALLIQYENYRDWIVKDNVAYSELFLDTAGVASFDVWDLLPFTRGYVHILDKDPYLRHFAYDPQYFLNELDLLGQAAATQLARNISNSGAMQTYFAGETIPGDNLAYDADLRAWVEYIPENFRPNYHGVGTCSMMPKEMGGVVDNAARVYGVQGLRVIDGSIPPTQMSSHVMTVFYAMALKIADAILADY

SEQ ID NO: 1064 - protein, 577 aa, Aspergillus niger
GIEASLLKDPKEVAGRTYDYIIAGGGLTGLTVAARLTENPNITVLVIESGSYESDRGPIIEDLNAYGDIFGSSVDHAYETVELATNNRTALIRSGNGLGGSTLINGGTWTRPHKAQVDSWETVFGNEGWNWDSVAAYSLQAERARAPNAKQIAAGHYFNASCHGINGTVHAGPRDTGDDYSPIVKALMSAVEDRGVPTKKDLGCGDPHGVSMFPNTLHEDQVRSDAAREWLLPNYQRPNLQVLTGQYVGKVLLSQNATTPRAVGVEFGTHKGNTHNVYAKHEVLLAAGSAVSPTILEYSGIGMKSILEPLGIDTVVDLPVGLNLQDQTTSTVRSRITSAGAGQGQAAWFATFNETFGDYAEKAHELLNTKLEQWAEEAVARGGFHNTTALLIQYENYRDWIVKDNVAYSELFLDTAGVASFDVWDLLPFTRGYVHILDKDPYLRHFAYDPQYFLNELDLLGQAAATQLARNISNSGAMQTYFAGETIPGDNLAYDADLSAWVEYIPENFRPNYHGVGTCSMMPKEMGGVVDNAARVYGVQGLRVIDGSIPPTQMSSHVMTVFYAMALKIADAVLADY

SEQ ID NO: 1065 - protein, 577 aa, Aspergillus niger
GIEASLLKDPKEVAGRTYDYIIAGGGLTGLTVAARLTENPNITVLVIESGSYESDRGPIIEDLNAYGDIFGSSVDHAYETVELATNNQTALIRSGNGLGGSTLINGGTWTRPHKAQVDSWETVFGNEGWNWDSVAAYSLQAERARAPNAKQIAAGHYFNPSCHGINGTVHAGPRDTGDDYSPIVKALMSAVEDRGVPTKKDLGCGDPHGVSMFPNTLHEDQVRSDAAREWLLPNYQRPNLQVLTGQYVGKVLLSQNATTPRAVGVEFGTHKGNTHNVYAKHEVLLAAGSAVSPTILEYSGIGMKSILEPLGIDTVVDLPVGLNLQDQTTSTVRSRITSAGAGQGQAAWFATFNETFGDYAEKAHELLNTKLEQWAEEAVARGGFHNTTALLIQYENYRDWIVKDNVAYSELFLDTAGVASFDVWDLLPFTRGYVHILDKDPYLRHFAYDPQYFLNELDLLGQAAATQLARNISNSGAMQTYFAGETIPGDNLAYDADLSAWVEYIPENFRPNYHGVGTCSMMPKEMGGVVDNAARVYGVQGLRVIDGSIPPTQMSSHVMTVFYAMALKIADAVLADY

SEQ ID NO: 1066 - protein, 577 aa, Aspergillus niger
GIEASLLTDPKEVAGRTYDYIIAGGGLTGLTVAARLTENPDITVLVIESGSYESDRGPIIEDLNAYGQIFGSSVDHAYETVELATNNRTALIRSGNGLGGSTLINGGTWTRPHKAQVDSWETVFGNEGWNWDSVAAYSLQAERARAPNAKQIAAGHYFNASCHGLNGTVHAGPRDTGDDYSPIVKALMSAVEDRGVPTKKDLGCGDPHGVSMFPNTLHEDQVRSDAAREWLLPNYQRPNLQVLTGQYVGKVLLSQNATTPRAVGVEFGTHKGNTHNVYAKHEVLLAAGSAVSPTILEYSGIGLKSILEPLGIDTVVDLPVGLNLQDQTTSTVRSRITSAGAGQGQAAWFATFNETFGDYAEKAHELLNTKLEQWAEEAVARGGFHNTTALLIQYENYRDWIVKDNVAYSELFLDTAGVASFDVWDLLPFTRGYVHILDKDPYLRHFAYDPQYFLNELDLLGQAAATQLARNISNSGAMQTYFAGETIPGDNLAYDADLSAWVEYIPYNFRPNYHGVGTCSMMPKEMGGVVDNAARVYGVQGLRVIDGSIPPTQMSSHVMTVFYAMALKIADAILADY

SEQ ID NO: 1067 - protein, 577 aa, Aspergillus niger
GIEASLLKDPKEVAGRTYDYIIAGGGLTGLTVAARLTENPNITVLVIESGSYESDRGPIIEDLNAYGDIFGSSVDHAYETVELATNNQTALIRSGNGLGGSTLINGGTWTRPHKAQVDSWETVFGNEGWNWDSVAAYSLQAERARAPNAKQIAAGHYFNASCHGINGTVHAGPRDTGDDYSPIVKALMSAVEDRGVPTKKDLGCGDPHGVSMFPNTLHPDQVRSDAAREWLLPNYQRPNLQVLTGRYVGKVLLSQNATTPRAVGVEFGTHKGNTHNVYAKHEVLLAAGSAVSPTILEYSGIGMKSILEPLGIDTVVDLPVGLNLQDQTTSTVRSRITSAGAGQGQAAWFATFNETFGDYTEKAHELLNTKLEQWAEEAVARGGFHNTTALLIQYENYRDWIVKDNVAYSELFLDTAGVASFDVWDLLPFTRGYVHILDKDPYLRHFAYDPQYFLNELDLLGQAAATQLARNISNSGAMQTYFAGETIPGDNLAYDADLRAWVEYIPENFRPNYHGVGTCSMMPKEMGGVVDNAARVYGVQGLRVIDGSIPPTQLSSHVMTVFYAMALKIADAILADY

SEQ ID NO: 1068 - protein, 577 aa, Aspergillus niger
GIEASLLKDPKEVAGRTYDYIIAGGGLTGLTVAARLTENPNITVLVIESGSYESDRGPIIEDLNAYGDIFGSSVDHAYETVELPTNNQTALIRSGNGLGGSTLINGGTWTRPHKAQVDSWETVFGNEGWNWDSVAAYSLQAERARAPNAKQIAAGHYFNPSCHGINGTVHAGPRDTGDDYSPIVKALMSAVEDRGVPTKKDLGCGDPHGVSMFPNTLHPDQVRSDAAREWLLPNYQRPNLQVLTGRYVGKVLLSQNATTPRAVGVEFGTHKGNTHNVYAKHEVLLAAGSAVSPTILEYSGIGMKSILEPLGIDTVVDLPVGLNLQDQTTSTVRSRITSAGAGQGQAAWFATFNETFGDYAEKAHELLNTKLEQWAEEAVARGGFHNTTALLIQYENYRDWIVKDNVAYSELFLDTAGVASFDVWDLLPFTRGYVHILDKDPYLRHFAYDPQYFLNELDLLGQAAATQLARNISNSGAMQTYFAGETIPGDNLAYDADLSAWVEYIPENFRPNYHGVGTCSMMPKEMGGVVDNAARVYGVQGLRVIDGSIPPTQMSSHVMTVFYAMALKIADAILADY

SEQ ID NO: 1069 - protein, 577 aa, Aspergillus niger
GIEASLLKDPKEVAGRTYDYIIAGGGLTGLTVAARLTENPNITVLVIESGSYESDRGPIIEDLNAYGDIFGSSVDHAYETVELATNNQTALIRSGNGLGGSTLINGGTWTRPHKAQVDSWETVFGNEGWNWDSVAAYSLQAERARAPNAKQIAAGHYFNPSCHGINGTVHAGPRDTGDDYSPIVKALMSAVEDRGVPTKKDLGCGDPHGVSMFPNTLHEDQVRSDAAREWLLPNYQRPNLQVLTGRYVGKVLLSQNATTPRAVGVEFGTHKGNTHNVYAKHEVLLAAGSAVSPTILEYSGIGMKSILEPLGIDTVVDLPVGLNLQDQTTSTVRSRITPAGAGQGQAAWFATFNETFGDYTEKAHELLNTKLEQWAEEAVARGGFHNTTALLIQYENYRDWIVKDNVAYSELFLDTAGVASFDVWDLLPFTRGYVHILDKDPYLRHFAYDPQYFLNELDLLGQAAATQLARNISNSGAMQTYFAGETIPGDNLAYDADLRAWVEYIPENFRPNYHGVGTCSMMPKEMGGVVDNAARVYGVQGLRVIDGSIPPTQMSSHVMTVFYAMALKIADAVLADY

SEQ ID NO: 1070 - protein, 577 aa, Aspergillus niger
GIEASLLTDPKEVAGRTVDYIIAGGGLTGLTTAARLTENPDITVLVIESGSYESDRGPIIEDLNAYGKIFGSSVDHAYETVELATNNQTALIRSGNGLGGSTLVNGGTWTRPHKAQVDSWETVFGNEGWNWDSVAAYSLQAERARAPNAKQIAAGHYFNASCHGINGTVHAGPRDTGDDYSPIVKALMSAVEDRGVPTKKDLGCGDPHGVSMFPNTLHEDQVRSDAAREWLLPNYQRPNLQVLTGQYVGKVLLSQNATTPRAVGVEFGTHKGNTHNVYAKHEVLLAAGSAVSPTILEYSGIGMKSILEPLGIDTVVDLPVGLNLQDQTTSTVRSRITSAGAGQGQAAWFATFNETFGDYAEKAHELLNTKLEQWAEEAVARGGFHNTTALLIQYENYRDWIVKDNVAYSELFLDTAGVASFDVWDLLPFTRGYVHILDKDPYLRHFAYDPQYFLNELDLLGQAAATQLARNISNSGAMQTYFAGETIPGDNLAYDADLSAWVEYIPYNFRPNYHGVGTCSMMPKEMGGVVDNAARVYGVQGLRVIDGSIPPTQMSSHVMTVFYAMALKIADAILADY

SEQ ID NO: 1071 - protein, 577 aa, Aspergillus niger
GIEASLLKDPKEVAGRTYDYIIAGGGLTGLTVAARLTENPNITVLVIESGSYESDRGPIIEDLNAYGDIFGSSVDHAYETVELATNNQTALIRSGNGLGGSTLINGGTWTRPHKAQVDSWETVFGNEGWNWDSVAAYSLQAERARAPNAKQIAAGHYFNASCHGLNGTVHAGPRDTGDDYSPIVKALMSAVEDRGVPTKKDLGCGDPHGVSMFPNTLHPDQVRSDAAREWLLPNYQRPNLQVLTGRYVGKVLLSQNATTPRAVGVEFGTHKGNTHNVYAKHEVLLAAGSAVSPTILEYSGIGMKSILEPLGIDTVVDLPVGLNLQDQTTSTVRSRITPAGAGQGQAAWFATFNETFGDYTEKAHELLNTKLEQWAEEAVARGGFHNTTALLIQYENYRDWIVKDNVAYSELFLDTAGVASFDVWDLLPFTRGYVHILDKDPYLRHFAYDPQYFLNELDLLGQAAATQLARNISNSGAMQTYFAGETIPGDNLAYDADLRAWVEYIPENFRPNYHGVGTCSMMPKEMGGVVDNAARVYGVQGLRVIDGSIPPTQMSSHVMTVFYAMALKIADAVLADY

SEQ ID NO: 1072 - protein, 577 aa, Aspergillus niger
GIEASLLKDPKEVAGRTYDYIIAGGGLTGLTVAAKLTENPNITVLVIESGSYESDRGPIIEDLNAYGDIFGSSVDHAYETVELPTNNRTALIRSGNGLGGSTLINGGTWTRPHKAQVDSWETVFGNEGWNWDSVAAYSLQAERARAPNAKQIAAGHYFNPSCHGLNGTVHAGPRDTGDDYSPIVKALMSAVEDRGVPTKKDLGCGDPHGVSMFPNTLHPDQVRSDAAREWLLPNYQRPNLQVLTGRYVGKVLLSQNATTPRAVGVEFGTHKGNTHNVYAKHEVLLAAGSAVSPTILEYSGIGMKSILEPLGIDTVVDLPVGLNLQDQTTSTVRSRITPAGAGQGQAAWFATFNETFGDYTEKAHELLNTKLEQWAEEAVARGGFHNTTALLIQYENYRDWIVKDNVAYSELFLDTAGVASFDVWDLLPFTRGYVHILDKDPYLRHFAYDPQYFLNELDLLGQAAATQLARNISNSGAMQTYFAGETIPGDNLAYDADLRAWVEYIPENFRPNYHGVGTCSMMPKEMGGVVDNAARVYGVQGLRVIDGSIPPTQLSSHVMTVFYAMALKIADAVLADY

SEQ ID NO: 1073 - protein, 577 aa, Aspergillus niger
GIEASLLKDPKEVAGRTYDYIIAGGGLTGLTVAARLTENPNITVLVIESGSYESDRGPIIEDLNAYGDIFGSSVDHAYETVELATNNQTALIRSGNGLGGSTLINGGTWTRPHKAQVDSWETVFGNEGWNWDSVAAYSLQAERARAPNAKQIAAGHYFNASCHGINGTVHAGPRDTGDDYSPIVKALMSAVEDRGVPTKKDLGCGDPHGVSMFPNTLHEDQVRSDAAREWLLPNYQRPNLQVLTGQYVGKVLLSQNATTPRAVGVEFGTHKGNTHNVYAKHEVLLAAGSAVSPTILEYSGIGMKSILEPLGIDTVVDLPVGLNLQDQTTSTVRSRITSAGAGQGQAAWFATFNETFGDYAEKAHELLNTKLEQWAEEAVARGGFHNTTALLIQYENYRDWIVKDNVAYSELFLDTAGVASFDVWDLLPFTRGYVHILDKDPYLRHFAYDPQYFLNELDLLGQAAATQLARNISNSGAMQTYFAGETIPGDNLAYDADLRAWVEYIPENFRPNYHGVGTCSMMPKEMGGVVDNAARVYGVQGLRVIDGSIPPTQLSSHVMTVFYAMALKIADAVLADY

SEQ ID NO: 1074 - protein, 577 aa, Aspergillus niger
GIEASLLKDPKEVAGRTYDYIIAGGGLTGLTVAARLTENPNITVLVIESGSYESDRGPIIEDLNAYGDIFGSSVDHAYETVELPTNNQTALIRSGNGLGGSTLINGGTWTRPHKAQVDSWETVFGNEGWNWDSVAAYSLQAERARAPNAKQIAAGHYFNASCHGLNGTVHAGPRDTGDDYSPIVKALMSAVEDRGVPTKKDLGCGDPHGVSMFPNTLHPDQVRSDAAREWLLPNYQRPNLQVLTGQYVGKVLLSQNATTPRAVGVEFGTHKGNTHNVYAKHEVLLAAGSAVSPTILEYSGIGMKSILEPLGIDTVVDLPVGLNLQDQTTSTVRSRITSAGAGQGQAAWFATFNETFGDYTEKAHELLNTKLEQWAEEAVARGGFHNTTALLIQYENYRDWIVKDNVAYSELFLDTAGVASFDVWDLLPFTRGYVHILDKDPYLRHFAYDPQYFLNELDLLGQAAATQLARNISNSGAMQTYFAGETIPGDNLAYDADLRAWVEYIPENFRPNYHGVGTCSMMPKEMGGVVDNAARVYGVQGLRVIDGSIPPTQLSSHVMTVFYAMALKIADAILADY

SEQ ID NO: 1075 - protein, 577 aa, Aspergillus niger
GIEASLLKDPKEVAGRTYDYIIAGGGLTGLTVAAKLTENPNITVLVIESGSYESDRGPIIEDLNAYGDIFGSSVDHAYETVELPTNNQTALIRSGNGLGGSTLINGGTWTRPHKAQVDSWETVFGNEGWNWDSVAAYSLQAERARAPNAKQIAAGHYFNPSCHGINGTVHAGPRDTGDDYSPIVKALMSAVEDRGVPTKKDLGCGDPHGVSMFPNTLHPDQVRSDAAREWLLPNYQRPNLQVLTGRYVGKVLLSQNATTPRAVGVEFGTHKGNTHNVYAKHEVLLAAGSAVSPTILEYSGIGMKSILEPLGIDTVVDLPVGLNLQDQTTSTVRSRITPAGAGQGQAAWFATFNETFGDYAEKAHELLNTKLEQWAEEAVARGGFHNTTALLIQYENYRDWIVKDNVAYSELFLDTAGVASFDVWDLLPFTRGYVHILDKDPYLRHFAYDPQYFLNELDLLGQAAATQLARNISNSGAMQTYFAGETIPGDNLAYDADLRAWVEYIPENFRPNYHGVGTCSMMPKEMGGVVDNAARVYGVQGLRVIDGSIPPTQLSSHVMTVFYAMALKIADAVLADY

SEQ ID NO: 1076 - protein, 577 aa, Aspergillus niger
GIEASLLKDPKEVAGRTYDYIIAGGGLTGLTVAARLTENPNITVLVIESGSYESDRGPIIEDLNAYGDIFGSSVDHAYETVELATNNQTALIRSGNGLGGSTLINGGTWTRPHKAQVDSWETVFGNEGWNWDSVAAYSLQAERARAPNAKQIAAGHYFNASCHGINGTVHAGPRDTGDDYSPIVKALMSAVEDRGVPTKKDLGCGDPHGVSMFPNTLHEDQVRSDAAREWLLPNYQRPNLQVLTGQYVGKVLLSQNATTPRAVGVEFGTHKGNTHNVYAKHEVLLAAGSAVSPTILEYSGIGMKSILEPLGIDTVVDLPVGLNLQDQTTSTVRSRITSAGAGQGQAAWFATFNETFGDYTEKAHELLNTKLEQWAEEAVARGGFHNTTALLIQYENYRDWIVKDNVAYSELFLDTAGVASFDVWDLLPFTRGYVHILDKDPYLRHFAYDPQYFLNELDLLGQAAATQLARNISNSGAMQTYFAGETIPGDNLAYDADLRAWVEYIPENFRPNYHGVGTCSMMPKEMGGVVDNAARVYGVQGLRVIDGSIPPTQLSSHVMTVFYAMALKIADAILADY

SEQ ID NO: 1077 - protein, 577 aa, Aspergillus niger
GIEASLLKDPKEVAGRTYDYIIAGGGLTGLTVAARLTENPNITVLVIESGSYESDRGPIIEDLNAYGDIFGSSVDHAYETVELATNNQTALIRSGNGLGGSTLINGGTWTRPHKAQVDSWETVFGNEGWNWDSVAAYSLQAERARAPNAKQIAAGHYFNASCHGINGTVHAGPRDTGDDYSPIVKALMSAVEDRGVPTKKDLGCGDPHGVSMFPNTLHEDQVRSDAAREWLLPNYQRPNLQVLTGQYVGKVLLSQNATTPRAVGVEFGTHKGNTHNVYAKHEVLLAAGSAVSPTILEYSGIGMKSILEPLGIDTVVDLPVGLNLQDQTTSTVRSRITSAGAGQGQAAWFATFNETFGDYAEKAHELLNTKLEQWAEEAVARGGFHNTTALLIQYENYRDWIVKDNVAYSELFLDTAGVASFDVWDLLPFTRGYVHILDKDPYLRHFAYDPQYFLNELDLLGQAAATQLARNISNSGAMQTYFAGETIPGDNLAYDADLSAWVEYIPENFRPNYHGVGTCSMMPKEMGGVVDNAARVYGVQGLRVIDGSIPPTQLSSHVMTVFYAMALKIADAILADY

SEQ ID NO: 1078 - protein, 577 aa, Aspergillus niger
GIEASLLTDPKEVAGRTVDYIIAGGGLTGLTTAARLTENPDITVLVIESGSYESDRGPIIEDLNAYGDIFGSSVDHAYETVELATNNQTALIRSGNGLGGSTLVNGGTWTRPHKAQVDSWETVFGNEGWNWDSVAAYSLQAERARAPNAKQIAAGHYFNASCHGINGTVHAGPRDTGDDYSPIVKALMSAVEDRGVPTKKDLGCGDPHGVSMFPNTLHEDQVRSDAAREWLLPNYQRPNLQVLTGQYVGKVLLSQNATTPRAVGVEFGTHKHNTHNVYAKHEVLLAAGSAVSPTILEYSGIGMKSILEPLGIDTVVDLPVGLNLQDQTTSTVRSRITSAGAGQGQAAWFATFNETFGDYAEKAHELLNTKLEQWAEEAVARGGFHNTTALLIQYENYRDWIVKDNVAYSELFLDTAGVASFDVWDLLPFTRGYVHILDKDPYLRHFAYDPQYFLNELDLLGQAAATQLARNISNSGAMQTYFAGETIPGDNLAYDADLSAWVEYIPYNFRPNYHGVGTCSMMPKEMGGVVDNAARVYGVQGLRVIDGSIPPTQMSSHVMTVFYAMALKIADAILADY

SEQ ID NO: 1079 - protein, 577 aa, Aspergillus niger
GIEASLLKDPKEVAGRTYDYIIAGGGLTGLTVAARLTENPNITVLVIESGSYESDRGPIIEDLNAYGDIFGSSVDHAYETVELPTNNRTALIRSGNGLGGSTLINGGTWTRPHKAQVDSWETVFGNEGWNWDSVAAYSLQAERARAPNAKQIAAGHYFNASCHGLNGTVHAGPRDTGDDYSPIVKALMSAVEDRGVPTKKDLGCGDPHGVSMFPNTLHEDQVRSDAAREWLLPNYQRPNLQVLTGQYVGKVLLSQNATTPRAVGVEFGTHKGNTHNVYAKHEVLLAAGSAVSPTILEYSGIGMKSILEPLGIDTVVDLPVGLNLQDQTTSTVRSRITSAGAGQGQAAWFATFNETFGDYAEKAHELLNTKLEQWAEEAVARGGFHNTTALLIQYENYRDWIVKDNVAYSELFLDTAGVASFDVWDLLPFTRGYVHILDKDPYLRHFAYDPQYFLNELDLLGQAAATQLARNISNSGAMQTYFAGETIPGDNLAYDADLSAWVEYIPENFRPNYHGVGTCSMMPKEMGGVVDNAARVYGVQGLRVIDGSIPPTQMSSHVMTVFYAMALKIADAILADY

SEQ ID NO: 1080 - protein, 577 aa, Aspergillus niger
GIEASLLTDPKEVAGRTYDYIIAGGGLTGLTVAARLTENPDITVLVIESGSYESDRGPIIEDLNAYGQIFGSSVDHAYETVELATNNRTALIRSGNGLGGSTLINGGTWTRPHKAQVDSWETVFGNEGWNWDSVAAYSLQAERARAPNAKQIAAGHYFNASCHGVNGTVHAGPRDTGDDYSPIVKALMSAVEDRGVPTKKDLGCGDPHGVSMFPNTLHEDQVRSDAAREWLLPNYQRPNLQVLTGQYVGKVLLSQNATTPRAVGVEFGTHKGNTHNVYAKHEVLLAAGSAVSPTILEYSGIGLKSILEPLGIDTVVDLPVGLNLQDQTTSTVRSRITSAGAGQGQAAWFATFNETFGDYAEKAHELLNTKLEQWAEEAVARGGFHNTTALLIQYENYRDWIVKDNVAYSELFLDTAGVASFDVWDLLPFTRGYVHILDKDPYLRHFAYDPQYFLNELDLLGQAAATQLARNISNSGAMQTYFAGETIPGDNLAYDADLSAWVEYIPYNFRPNYHGVGTCSMMPKEMGGVVDNAARVYGVQGLRVIDGSIPPTQMSSHVMTVFYAMALKIADAILADY

SEQ ID NO: 1081 - protein, 577 aa, Aspergillus niger
GPEASLLTDPKEVAGRTVDYIIAGGGLTGLTTAARLTENPDITVLVIESGSYESDRGPIIEDLNAYGDIFGSSVDHAYETVELATNNQTALIRSGNGLGGSTLVNGGTWTRPHKAQVDSWETVFGNEGWNWDSVAAYSLQAERARAPNAKQIAAGHYFNASCHGINGTVHAGPRDTGDDYSPIVKALMSAVEDRGVPTKKDLGCGDPHGVSMFPNTLHEDQVRSDAAREWLLPNYQRPNLQVLTGQYVGKVLLSQNATTPRAVGVEFGTHKGNTHNVYAKHEVLLAAGSAVSPTILEYSGIGMKSILEPLGIDTVVDLPVGLNLQDQTTSTVRSRITSAGAGQGQAAWFATFNETFGDYAEKAHELLNTKLEQWAEEAVARGGFHNTTALLIQYENYRDWIVKDNVAYSELFLDTAGVASFDVWDLLPFTRGYVHILDKDPYLRHFAYDPQYFLNELDLLGQAAATQLARNISNSGAMQTYFAGETIPGDNLAYDADLSAWVEYIPYNFRPNYHGVGTCSMMPKEMGGVVDNAARVYGVQGLRVIDGSIPPTQMSSHVMTVFYAMALKIADAILADY

SEQ ID NO: 1082 - protein, 577 aa, Aspergillus niger
GIEASLLKDPKEVAGRTYDYIIAGGGLTGLTVAARLTENPNITVLVIESGSYESDRGPIIEDLNAYGDIFGSSVDHAYETVELATNNQTALIRSGNGLGGSTLINGGTWTRPHKAQVDSWETVFGNEGWNWDSVAAYSLQAERARAPNAKQIAAGHYFNASCHGINGTVHAGPRDTGDDYSPIVKALMSAVEDRGVPTKKDLGCGDPHGVSMFPNTLHEDQVRSDAAREWLLPNYQRPNLQVLTGQYVGKVLLSQNATTPRAVGVEFGTHKGNTHNVYAKHEVLLAAGSAVSPTILEYSGIGMKSILEPLGIDTVVDLPVGLNLQDQTTSTVRSRITSAGAGQGQAAWFATFNETFGDYAEKAHELLNTKLEQWAEEAVARGGFHNTTALLIQYENYRDWIVKDNVAYSELFLDTAGVASFDVWDLLPFTRGYVHILDKDPYLRHFAYDPQYFLNELDLLGQAAATQLARNISNSGAMQTYFAGETIPGDNLAYDADLSAWVEYIPENFRPNYHGVGTCSMMPKEMGGVVDNAARVYGVQGLRVIDGSIPPTQMSSHVMTVFYAMALKIADAILADY

SEQ ID NO: 1083 - protein, 577 aa, Aspergillus niger
GIEASLLKDPKEVAGRTYDYIIAGGGLTGLTVAARLTENPNITVLVIESGSYESDRGPIIEDLNAYGDIFGSSVDHAYETVELATNNQTALIRSGNGLGGSTLINGGTWTRPHKAQVDSWETVFGNEGWNWDSVAAYSLQAERARAPNAKQIAAGHYFNASCHGINGTVHAGPRDTGDDYSPIVKALMSAVEDRGVPTKKDLGCGDPHGVSMFPNTLHEDQVRSDAAREWLLPNYQRPNLQVLTGQYVGKVLLSQNATTPRAVGVEFGTHKGNTHNVYAKHEVLLAAGSAVSPTILEYSGIGMKSILEPLGIDTVVDLPVGLNLQDQTTSTVRSRITPAGAGQGQAAWFATFNETFGDYAEKAHELLNTKLEQWAEEAVARGGFHNTTALLIQYENYRDWIVKDNVAYSELFLDTAGVASFDVWDLLPFTRGYVHILDKDPYLRHFAYDPQYFLNELDLLGQAAATQLARNISNSGAMQTYFAGETIPGDNLAYDADLSAWVEYIPENFRPNYHGVGTCSMMPKEMGGVVDNAARVYGVQGLRVIDGSIPPTQMSSHVMTVFYAMALKIADAVLADY

SEQ ID NO: 1084 - protein, 577 aa, Aspergillus niger
GIEASLLKDPKEVAGRTYDYIIAGGGLTGLTVAARLTENPNITVLVIESGSYESDRGPIIEDLNAYGDIFGSSVDHAYETVELATNNQTALIRSGNGLGGSTLINGGTWTRPHKAQVDSWETVFGNEGWNWDSVAAYSLQAERARAPNAKQIAAGHYFNASCHGINGTVHAGPRDTGDDYSPIVKALMSAVEDRGVPTKKDLGCGDPHGVSMFPNTLHEDQVRSDAAREWLLPNYQRPNLQVLTGQYVGKVLLSQNATTPRAVGVEFGTHKGNTHNVYAKHEVLLAAGSAVSPTILEYSGIGMKSILEPLGIDTVVDLPVGLNLQDQTTSTVRSRITPAGAGQGQAAWFATFNETFGDYTEKAHELLNTKLEQWAEEAVARGGFHNTTALLIQYENYRDWIVKDNVAYSELFLDTAGVASFDVWDLLPFTRGYVHILDKDPYLRHFAYDPQYFLNELDLLGQAAATQLARNISNSGAMQTYFAGETIPGDNLAYDADLSAWVEYIPENFRPNYHGVGTCSMMPKEMGGVVDNAARVYGVQGLRVIDGSIPPTQMSSHVMTVFYAMALKIADAILADY

SEQ ID NO: 1085 - protein, 577 aa, Aspergillus niger
GIEASLLKDPKEVAGRTYDYIIAGGGLTGLTVAARLTENPNITVLVIESGSYESDRGPIIEDLNAYGDIFGSSVDHAYETVELATNNQTALIRSGNGLGGSTLINGGTWTRPHKAQVDSWETVFGNEGWNWDSVAAYSLQAERARAPNAKQIAAGHYFNASCHGLNGTVHAGPRDTGDDYSPIVKALMSAVEDRGVPTKKDLGCGDPHGVSMFPNTLHEDQVRSDAAREWLLPNYQRPNLQVLTGQYVGKVLLSQNATTPRAVGVEFGTHKGNTHNVYAKHEVLLAAGSAVSPTILEYSGIGMKSILEPLGIDTVVDLPVGLNLQDQTTSTVRSRITSAGAGQGQAAWFATFNETFGDYAEKAHELLNTKLEQWAEEAVARGGFHNTTALLIQYENYRDWIVKDNVAYSELFLDTAGVASFDVWDLLPFTRGYVHILDKDPYLRHFAYDPQYFLNELDLLGQAAATQLARNISNSGAMQTYFAGETIPGDNLAYDADLSAWVEYIPENFRPNYHGVGTCSMMPKEMGGVVDNAARVYGVQGLRVIDGSIPPTQMSSHVMTVFYAMALKIADAILADY

SEQ ID NO: 1086 - protein, 577 aa, Aspergillus niger
GIEASLLKDPKEVAGRTYDYIIAGGGLTGLTVAAKLTENPNITVLVIESGSYESDRGPIIEDLNAYGDIFGSSVDHAYETVELPTNNQTALIRSGNGLGGSTLINGGTWTRPHKAQVDSWETVFGNEGWNWDSVAAYSLQAERARAPNAKQIAAGHYFNPSCHGLNGTVHAGPRDTGDDYSPIVKALMSAVEDRGVPTKKDLGCGDPHGVSMFPNTLHEDQVRSDAAREWLLPNYQRPNLQVLTGRYVGKVLLSQNATTPRAVGVEFGTHKGNTHNVYAKHEVLLAAGSAVSPTILEYSGIGMKSILEPLGIDTVVDLPVGLNLQDQTTSTVRSRITPAGAGQGQAAWFATFNETFGDYAEKAHELLNTKLEQWAEEAVARGGFHNTTALLIQYENYRDWIVKDNVAYSELFLDTAGVASFDVWDLLPFTRGYVHILDKDPYLRHFAYDPQYFLNELDLLGQAAATQLARNISNSGAMQTYFAGETIPGDNLAYDADLRAWVEYIPENFRPNYHGVGTCSMMPKEMGGVVDNAARVYGVQGLRVIDGSIPPTQLSSHVMTVFYAMALKIADAILADY

SEQ ID NO: 1087 - protein, 577 aa, Aspergillus niger
GIEASLLKDPKEVAGRTYDYIIAGGGLTGLTVAARLTENPNITVLVIESGSYESDRGPIIEDLNAYGDIFGSSVDHAYETVELPTNNQTALIRSGNGLGGSTLINGGTWTRPHKAQVDSWETVFGNEGWNWDSVAAYSLQAERARAPNAKQIAAGHYFNPSCHGINGTVHAGPRDTGDDYSPIVKALMSAVEDRGVPTKKDLGCGDPHGVSMFPNTLHEDQVRSDAAREWLLPNYQRPNLQVLTGQYVGKVLLSQNATTPRAVGVEFGTHKGNTHNVYAKHEVLLAAGSAVSPTILEYSGIGMKSILEPLGIDTVVDLPVGLNLQDQTTSTVRSRITSAGAGQGQAAWFATFNETFGDYAEKAHELLNTKLEQWAEEAVARGGFHNTTALLIQYENYRDWIVKDNVAYSELFLDTAGVASFDVWDLLPFTRGYVHILDKDPYLRHFAYDPQYFLNELDLLGQAAATQLARNISNSGAMQTYFAGETIPGDNLAYDADLSAWVEYIPENFRPNYHGVGTCSMMPKEMGGVVDNAARVYGVQGLRVIDGSIPPTQMSSHVMTVFYAMALKIADAILADY

SEQ ID NO: 1088 - protein, 577 aa, Aspergillus niger
GAEASLLTDPKEVAGRTVDYIIAGGGLTGLTTAARLTENPDITVLVIESGSYESDRGPIIEDLNAYGDIFGSSVDHAYETVELATNNQTALIRSGNGLGGSTLVNGGTWTRPHKAQVDSWETVFGNEGWNWDSVAAYSLQAERARAPNAKQIAAGHYFNASCHGINGTVHAGPRDTGDDYSPIVKALMSAVEDRGVPTKKDLGCGDPHGVSMFPNTLHEDQVRSDAAREWLLPNYQRPNLQVLTGQYVGKVLLSQNATTPRAVGVEFGTHKGNTHNVYAKHEVLLAAGSAVSPTILEYSGIGMKSILEPLGIDTVVDLPVGLNLQDQTTSTVRSRITSAGAGQGQAAWFATFNETFGDYAEKAHELLNTKLEQWAEEAVARGGFHNTTALLIQYENYRDWIVKDNVAYSELFLDTAGVASFDVWDLLPFTRGYVHILDKDPYLRHFAYDPQYFLNELDLLGQAAATQLARNISNSGAMQTYFAGETIPGDNLAYDADLSAWVEYIPYNFRPNYHGVGTCSMMPKEMGGVVDNAARVYGVQGLRVIDGSIPPTQMSSHVMTVFYAMALKIADAILADY

SEQ ID NO: 1089 - protein, 577 aa, Aspergillus niger
GIEASLLKDPKEVAGRTYDYIIAGGGLTGLTVAARLTENPNITVLVIESGSYESDRGPIIEDLNAYGDIFGSSVDHAYETVELATNNRTALIRSGNGLGGSTLINGGTWTRPHKAQVDSWETVFGNEGWNWDSVAAYSLQAERARAPNAKQIAAGHYFNASCHGINGTVHAGPRDTGDDYSPIVKALMSAVEDRGVPTKKDLGCGDPHGVSMFPNTLHEDQVRSDAAREWLLPNYQRPNLQVLTGQYVGKVLLSQNATTPRAVGVEFGTHKGNTHNVYAKHEVLLAAGSAVSPTILEYSGIGMKSILEPLGIDTVVDLPVGLNLQDQTTSTVRSRITSAGAGQGQAAWFATFNETFGDYTEKAHELLNTKLEQWAEEAVARGGFHNTTALLIQYENYRDWIVKDNVAYSELFLDTAGVASFDVWDLLPFTRGYVHILDKDPYLRHFAYDPQYFLNELDLLGQAAATQLARNISNSGAMQTYFAGETIPGDNLAYDADLSAWVEYIPENFRPNYHGVGTCSMMPKEMGGVVDNAARVYGVQGLRVIDGSIPPTQMSSHVMTVFYAMALKIADAILADY

SEQ ID NO: 1090 - protein, 577 aa, Aspergillus niger
GIEASLLKDPKEVAGRTYDYIIAGGGLTGLTVAARLTENPNITVLVIESGSYESDRGPIIEDLNAYGDIFGSSVDHAYETVELPTNNQTALIRSGNGLGGSTLINGGTWTRPHKAQVDSWETVFGNEGWNWDSVAAYSLQAERARAPNAKQIAAGHYFNASCHGINGTVHAGPRDTGDDYSPIVKALMSAVEDRGVPTKKDLGCGDPHGVSMFPNTLHPDQVRSDAAREWLLPNYQRPNLQVLTGQYVGKVLLSQNATTPRAVGVEFGTHKGNTHNVYAKHEVLLAAGSAVSPTILEYSGIGMKSILEPLGIDTVVDLPVGLNLQDQTTSTVRSRITSAGAGQGQAAWFATFNETFGDYAEKAHELLNTKLEQWAEEAVARGGFHNTTALLIQYENYRDWIVKDNVAYSELFLDTAGVASFDVWDLLPFTRGYVHILDKDPYLRHFAYDPQYFLNELDLLGQAAATQLARNISNSGAMQTYFAGETIPGDNLAYDADLSAWVEYIPENFRPNYHGVGTCSMMPKEMGGVVDNAARVYGVQGLRVIDGSIPPTQMSSHVMTVFYAMALKIADAILADY

SEQ ID NO: 1091 - protein, 577 aa, Aspergillus niger
GIEASLLKDPKEVAGRTYDYIIAGGGLTGLTVAAKLTENPNITVLVIESGSYESDRGPIIEDLNAYGDIFGSSVDHAYETVELATNNQTALIRSGNGLGGSTLINGGTWTRPHKAQVDSWETVFGNEGWNWDSVAAYSLQAERARAPNAKQIAAGHYFNPSCHGINGTVHAGPRDTGDDYSPIVKALMSAVEDRGVPTKKDLGCGDPHGVSMFPNTLHEDQVRSDAAREWLLPNYQRPNLQVLTGQYVGKVLLSQNATTPRAVGVEFGTHKGNTHNVYAKHEVLLAAGSAVSPTILEYSGIGMKSILEPLGIDTVVDLPVGLNLQDQTTSTVRSRITSAGAGQGQAAWFATFNETFGDYAEKAHELLNTKLEQWAEEAVARGGFHNTTALLIQYENYRDWIVKDNVAYSELFLDTAGVASFDVWDLLPFTRGYVHILDKDPYLRHFAYDPQYFLNELDLLGQAAATQLARNISNSGAMQTYFAGETIPGDNLAYDADLSAWVEYIPENFRPNYHGVGTCSMMPKEMGGVVDNAARVYGVQGLRVIDGSIPPTQMSSHVMTVFYAMALKIADAILADY

SEQ ID NO: 1092 - protein, 577 aa, Aspergillus niger
GIEASLLKDPKEVAGRTYDYIIAGGGLTGLTVAAKLTENPNITVLVIESGSYESDRGPIIEDLNAYGDIFGSSVDHAYETVELATNNRTALIRSGNGLGGSTLINGGTWTRPHKAQVDSWETVFGNEGWNWDSVAAYSLQAERARAPNAKQIAAGHYFNASCHGLNGTVHAGPRDTGDDYSPIVKALMSAVEDRGVPTKKDLGCGDPHGVSMFPNTLHEDQVRSDAAREWLLPNYQRPNLQVLTGRYVGKVLLSQNATTPRAVGVEFGTHKGNTHNVYAKHEVLLAAGSAVSPTILEYSGIGMKSILEPLGIDTVVDLPVGLNLQDQTTSTVRSRITPAGAGQGQAAWFATFNETFGDYAEKAHELLNTKLEQWAEEAVARGGFHNTTALLIQYENYRDWIVKDNVAYSELFLDTAGVASFDVWDLLPFTRGYVHILDKDPYLRHFAYDPQYFLNELDLLGQAAATQLARNISNSGAMQTYFAGETIPGDNLAYDADLSAWVEYIPENFRPNYHGVGTCSMMPKEMGGVVDNAARVYGVQGLRVIDGSIPPTQMSSHVMTVFYAMALKIADAILADY

SEQ ID NO: 1093 - protein, 577 aa, Aspergillus niger
GIEASLLKDPKEVAGRTYDYIIAGGGLTGLTVAARLTENPNITVLVIESGSYESDRGPIIEDLNAYGDIFGSSVDHAYETVELATNNQTALIRSGNGLGGSTLINGGTWTRPHKAQVDSWETVFGNEGWNWDSVAAYSLQAERARAPNAKQIAAGHYFNASCHGINGTVHAGPRDTGDDYSPIVKALMSAVEDRGVPTKKDLGCGDPHGVSMFPNTLHEDQVRSDAAREWLLPNYQRPNLQVLTGQYVGKVLLSQNATTPRAVGVEFGTHKGNTHNVYAKHEVLLAAGSAVSPTILEYSGIGMKSILEPLGIDTVVDLPVGLNLQDQTTSTVRSRITPAGAGQGQAAWFATFNETFGDYAEKAHELLNTKLEQWAEEAVARGGFHNTTALLIQYENYRDWIVKDNVAYSELFLDTAGVASFDVWDLLPFTRGYVHILDKDPYLRHFAYDPQYFLNELDLLGQAAATQLARNISNSGAMQTYFAGETIPGDNLAYDADLSAWVEYIPENFRPNYHGVGTCSMMPKEMGGVVDNAARVYGVQGLRVIDGSIPPTQLSSHVMTVFYAMALKIADAVLADY

SEQ ID NO: 1094 - protein, 577 aa, Aspergillus niger
GIEASLLTDPKEVAGRTVDYIIAGGGLTGLTTAARLTENPDITVLVIESGSYESDRGPIIEDLNAYGDIFGSSVDHAYETVELATNNQTALIRSGNGLGGSTLVNGGTWTRPHKAQVDSWETVFGNEGWNWDSVAAYSLQAERARAPNAKQIAAGHYFNASCHGINGTVHAGPRDTGDDYSPIVKALMSAVEDRGVPTKKDLGCGDPHGVSMFPNTLHEDQVRSDAAREWLLPNYQRPNLQVLTGQYVGKVLLSQNATTPRAVGVEFGTHKGNTHNVYAKHEVLLAAGSAVSPTILEYSGIGMKSILEPLGIDTVVDLPVGLNLQDQTTSTVRSRITSAGAGQGQAAWFATFNETFGDYAEKAHELLNTKLEQWAEEAVARGGFHNTTALLIQYENYRDWIVKDNVAYSELFLDTAGVASFDVWDLLPFTRGYVHILDKDPYLRHFAYDPQYFLNELDLLGQAAATQLARNISNSGAMQTYFAGETIPGDNLAYDADLSAWVEYICYNFRPNYHGVGTCSMMPKEMGGVVDNAARVYGVQGLRVIDGSIPPTQMSSHVMTVFYAMALKIADAILADY

SEQ ID NO: 1095 - protein, 577 aa, Aspergillus niger
GIEASLLKDPKEVAGRTYDYIIAGGGLTGLTVAARLTENPNITVLVIESGSYESDRGPIIEDLNAYGDIFGSSVDHAYETVELPTNNQTALIRSGNGLGGSTLINGGTWTRPHKAQVDSWETVFGNEGWNWDSVAAYSLQAERARAPNAKQIAAGHYFNASCHGLNGTVHAGPRDTGDDYSPIVKALMSAVEDRGVPTKKDLGCGDPHGVSMFPNTLHPDQVRSDAAREWLLPNYQRPNLQVLTGRYVGKVLLSQNATTPRAVGVEFGTHKGNTHNVYAKHEVLLAAGSAVSPTILEYSGIGMKSILEPLGIDTVVDLPVGLNLQDQTTSTVRSRITPAGAGQGQAAWFATFNETFGDYTEKAHELLNTKLEQWAEEAVARGGFHNTTALLIQYENYRDWIVKDNVAYSELFLDTAGVASFDVWDLLPFTRGYVHILDKDPYLRHFAYDPQYFLNELDLLGQAAATQLARNISNSGAMQTYFAGETIPGDNLAYDADLRAWVEYIPENFRPNYHGVGTCSMMPKEMGGVVDNAARVYGVQGLRVIDGSIPPTQMSSHVMTVFYAMALKIADAILADY

SEQ ID NO: 1096 - protein, 577 aa, Aspergillus niger
GIEASLLTDPKEVAGRTVDYIIAGGGLTGLTTAARLTENPDITVLVIESGSYESDRGPIIEDLNAYGDIFGSSVDHAYETVELATNNQTALIRSGNGLGGSTLVNGGTWTRPHKAQVDSWETVFGNEGWNWDSVAAYSLQAERARAPNAKQIAAGHYFNASCHGINGTVHAGPRDTGDDYSPIVKALMSAVEDRGVPTKKDLGCGDPHGVSMFPNTLHEDQVRSDAAREWLLPNYQRPNLQVLTGQYVGKVLLSQNATTPRAVGVEFGTHKGNTHNVYAKHEVLLAAGSAVSPTILEYSGIGMKSILEPLGIDTVVDLPVGLNLQDQTTSTVRSRITSAGAGQGQAAWFATFNETFGDYAEKAHELLNTKLEQWAEEAVARGGFHNTTALLIQYENYRDWIVKDNVAYSELFLDTAGVASFDVWDLLPFTRGYVHILDKDPYLRHFAYDPQYFLNELDLLGQAAATQLARNISNSGAMQTYFAGETIPGDNLAYDADLSAWVEYIAYNFRPNYHGVGTCSMMPKEMGGVVDNAARVYGVQGLRVIDGSIPPTQMSSHVMTVFYAMALKIADAILADY

SEQ ID NO: 1097 - protein, 577 aa, Aspergillus niger
GIEASLLKDPKEVAGRTYDYIIAGGGLTGLTVAAKLTENPNITVLVIESGSYESDRGPIIEDLNAYGDIFGSSVDHAYETVELATNNQTALIRSGNGLGGSTLINGGTWTRPHKAQVDSWETVFGNEGWNWDSVAAYSLQAERARAPNAKQIAAGHYFNASCHGINGTVHAGPRDTGDDYSPIVKALMSAVEDRGVPTKKDLGCGDPHGVSMFPNTLHPDQVRSDAAREWLLPNYQRPNLQVLTGQYVGKVLLSQNATTPRAVGVEFGTHKGNTHNVYAKHEVLLAAGSAVSPTILEYSGIGMKSILEPLGIDTVVDLPVGLNLQDQTTSTVRSRITSAGAGQGQAAWFATFNETFGDYAEKAHELLNTKLEQWAEEAVARGGFHNTTALLIQYENYRDWIVKDNVAYSELFLDTAGVASFDVWDLLPFTRGYVHILDKDPYLRHFAYDPQYFLNELDLLGQAAATQLARNISNSGAMQTYFAGETIPGDNLAYDADLSAWVEYIPENFRPNYHGVGTCSMMPKEMGGVVDNAARVYGVQGLRVIDGSIPPTQMSSHVMTVFYAMALKIADAILADY

SEQ ID NO: 1098 - protein, 577 aa, Aspergillus niger
GIEASLLKDPKEVAGRTYDYIIAGGGLTGLTVAARLTENPNITVLVIESGSYESDRGPIIEDLNAYGDIFGSSVDHAYETVELATNNQTALIRSGNGLGGSTLINGGTWTRPHKAQVDSWETVFGNEGWNWDSVAAYSLQAERARAPNAKQIAAGHYFNPSCHGINGTVHAGPRDTGDDYSPIVKALMSAVEDRGVPTKKDLGCGDPHGVSMFPNTLHEDQVRSDAAREWLLPNYQRPNLQVLTGQYVGKVLLSQNATTPRAVGVEFGTHKGNTHNVYAKHEVLLAAGSAVSPTILEYSGIGMKSILEPLGIDTVVDLPVGLNLQDQTTSTVRSRITSAGAGQGQAAWFATFNETFGDYTEKAHELLNTKLEQWAEEAVARGGFHNTTALLIQYENYRDWIVKDNVAYSELFLDTAGVASFDVWDLLPFTRGYVHILDKDPYLRHFAYDPQYFLNELDLLGQAAATQLARNISNSGAMQTYFAGETIPGDNLAYDADLSAWVEYIPENFRPNYHGVGTCSMMPKEMGGVVDNAARVYGVQGLRVIDGSIPPTQMSSHVMTVFYAMALKIADAILADY

SEQ ID NO: 1099 - protein, 577 aa, Aspergillus niger
GIEASLLKDPKEVAGRTYDYIIAGGGLTGLTVAARLTENPNITVLVIESGSYESDRGPIIEDLNAYGDIFGSSVDHAYETVELATNNRTALIRSGNGLGGSTLINGGTWTRPHKAQVDSWETVFGNEGWNWDSVAAYSLQAERARAPNAKQIAAGHYFNASCHGINGTVHAGPRDTGDDYSPIVKALMSAVEDRGVPTKKDLGCGDPHGVSMFPNTLHEDQVRSDAAREWLLPNYQRPNLQVLTGRYVGKVLLSQNATTPRAVGVEFGTHKGNTHNVYAKHEVLLAAGSAVSPTILEYSGIGMKSILEPLGIDTVVDLPVGLNLQDQTTSTVRSRITSAGAGQGQAAWFATFNETFGDYAEKAHELLNTKLEQWAEEAVARGGFHNTTALLIQYENYRDWIVKDNVAYSELFLDTAGVASFDVWDLLPFTRGYVHILDKDPYLRHFAYDPQYFLNELDLLGQAAATQLARNISNSGAMQTYFAGETIPGDNLAYDADLSAWVEYIPENFRPNYHGVGTCSMMPKEMGGVVDNAARVYGVQGLRVIDGSIPPTQMSSHVMTVFYAMALKIADAILADY

SEQ ID NO: 1100 - protein, 577 aa, Aspergillus niger
GIEASLLKDPKEVAGRTYDYIIAGGGLTGLTVAARLTENPNITVLVIESGSYESDRGPIIEDLNAYGDIFGSSVDHAYETVELATNNQTALIRSGNGLGGSTLINGGTWTRPHKAQVDSWETVFGNEGWNWDSVAAYSLQAERARAPNAKQIAAGHYFNASCHGINGTVHAGPRDTGDDYSPIVKALMSAVEDRGVPTKKDLGCGDPHGVSMFPNTLHPDQVRSDAAREWLLPNYQRPNLQVLTGQYVGKVLLSQNATTPRAVGVEFGTHKGNTHNVYAKHEVLLAAGSAVSPTILEYSGIGMKSILEPLGIDTVVDLPVGLNLQDQTTSTVRSRITSAGAGQGQAAWFATFNETFGDYTEKAHELLNTKLEQWAEEAVARGGFHNTTALLIQYENYRDWIVKDNVAYSELFLDTAGVASFDVWDLLPFTRGYVHILDKDPYLRHFAYDPQYFLNELDLLGQAAATQLARNISNSGAMQTYFAGETIPGDNLAYDADLRAWVEYIPENFRPNYHGVGTCSMMPKEMGGVVDNAARVYGVQGLRVIDGSIPPTQMSSHVMTVFYAMALKIADAVLADY

SEQ ID NO: 1101 - protein, 577 aa, Aspergillus niger
GIEASLLKDPKEVAGRTYDYIIAGGGLTGLTVAARLTENPNITVLVIESGSYESDRGPIIEDLNAYGDIFGSSVDHAYETVELPTNNRTALIRSGNGLGGSTLINGGTWTRPHKAQVDSWETVFGNEGWNWDSVAAYSLQAERARAPNAKQIAAGHYFNASCHGINGTVHAGPRDTGDDYSPIVKALMSAVEDRGVPTKKDLGCGDPHGVSMFPNTLHEDQVRSDAAREWLLPNYQRPNLQVLTGQYVGKVLLSQNATTPRAVGVEFGTHKGNTHNVYAKHEVLLAAGSAVSPTILEYSGIGMKSILEPLGIDTVVDLPVGLNLQDQTTSTVRSRITSAGAGQGQAAWFATFNETFGDYAEKAHELLNTKLEQWAEEAVARGGFHNTTALLIQYENYRDWIVKDNVAYSELFLDTAGVASFDVWDLLPFTRGYVHILDKDPYLRHFAYDPQYFLNELDLLGQAAATQLARNISNSGAMQTYFAGETIPGDNLAYDADLSAWVEYIPENFRPNYHGVGTCSMMPKEMGGVVDNAARVYGVQGLRVIDGSIPPTQMSSHVMTVFYAMALKIADAILADY

SEQ ID NO: 1102 - protein, 577 aa, Aspergillus niger
GIEASLLKDPKEVAGRTYDYIIAGGGLTGLTVAAKLTENPNITVLVIESGSYESDRGPIIEDLNAYGDIFGSSVDHAYETVELPTNNRTALIRSGNGLGGSTLINGGTWTRPHKAQVDSWETVFGNEGWNWDSVAAYSLQAERARAPNAKQIAAGHYFNASCHGLNGTVHAGPRDTGDDYSPIVKALMSAVEDRGVPTKKDLGCGDPHGVSMFPNTLHEDQVRSDAAREWLLPNYQRPNLQVLTGQYVGKVLLSQNATTPRAVGVEFGTHKGNTHNVYAKHEVLLAAGSAVSPTILEYSGIGMKSILEPLGIDTVVDLPVGLNLQDQTTSTVRSRITPAGAGQGQAAWFATFNETFGDYAEKAHELLNTKLEQWAEEAVARGGFHNTTALLIQYENYRDWIVKDNVAYSELFLDTAGVASFDVWDLLPFTRGYVHILDKDPYLRHFAYDPQYFLNELDLLGQAAATQLARNISNSGAMQTYFAGETIPGDNLAYDADLRAWVEYIPENFRPNYHGVGTCSMMPKEMGGVVDNAARVYGVQGLRVIDGSIPPTQLSSHVMTVFYAMALKIADAVLADY

SEQ ID NO: 1103 - protein, 577 aa, Aspergillus niger
GIEASLLKDPKEVAGRTYDYIIAGGGLTGLTVAAKLTENPNITVLVIESGSYESDRGPIIEDLNAYGDIFGSSVDHAYETVELATNNQTALIRSGNGLGGSTLINGGTWTRPHKAQVDSWETVFGNEGWNWDSVAAYSLQAERARAPNAKQIAAGHYFNASCHGINGTVHAGPRDTGDDYSPIVKALMSAVEDRGVPTKKDLGCGDPHGVSMFPNTLHEDQVRSDAAREWLLPNYQRPNLQVLTGQYVGKVLLSQNATTPRAVGVEFGTHKGNTHNVYAKHEVLLAAGSAVSPTILEYSGIGMKSILEPLGIDTVVDLPVGLNLQDQTTSTVRSRITPAGAGQGQAAWFATFNETFGDYAEKAHELLNTKLEQWAEEAVARGGFHNTTALLIQYENYRDWIVKDNVAYSELFLDTAGVASFDVWDLLPFTRGYVHILDKDPYLRHFAYDPQYFLNELDLLGQAAATQLARNISNSGAMQTYFAGETIPGDNLAYDADLSAWVEYIPENFRPNYHGVGTCSMMPKEMGGVVDNAARVYGVQGLRVIDGSIPPTQMSSHVMTVFYAMALKIADAILADY

SEQ ID NO: 1104 - protein, 577 aa, Aspergillus niger
GIEASLLKDPKEVAGRTYDYIIAGGGLTGLTVAARLTENPNITVLVIESGSYESDRGPIIEDLNAYGDIFGSSVDHAYETVELATNNQTALIRSGNGLGGSTLINGGTWTRPHKAQVDSWETVFGNEGWNWDSVAAYSLQAERARAPNAKQIAAGHYFNPSCHGINGTVHAGPRDTGDDYSPIVKALMSAVEDRGVPTKKDLGCGDPHGVSMFPNTLHEDQVRSDAAREWLLPNYQRPNLQVLTGRYVGKVLLSQNATTPRAVGVEFGTHKGNTHNVYAKHEVLLAAGSAVSPTILEYSGIGMKSILEPLGIDTVVDLPVGLNLQDQTTSTVRSRITSAGAGQGQAAWFATFNETFGDYAEKAHELLNTKLEQWAEEAVARGGFHNTTALLIQYENYRDWIVKDNVAYSELFLDTAGVASFDVWDLLPFTRGYVHILDKDPYLRHFAYDPQYFLNELDLLGQAAATQLARNISNSGAMQTYFAGETIPGDNLAYDADLSAWVEYIPENFRPNYHGVGTCSMMPKEMGGVVDNAARVYGVQGLRVIDGSIPPTQMSSHVMTVFYAMALKIADAILADY

SEQ ID NO: 1105 - protein, 577 aa, Aspergillus niger
GIEASLLKDPKEVAGRTYDYIIAGGGLTGLTVAAKLTENPNITVLVIESGSYESDRGPIIEDLNAYGDIFGSSVDHAYETVELPTNNQTALIRSGNGLGGSTLINGGTWTRPHKAQVDSWETVFGNEGWNWDSVAAYSLQAERARAPNAKQIAAGHYFNPSCHGLNGTVHAGPRDTGDDYSPIVKALMSAVEDRGVPTKKDLGCGDPHGVSMFPNTLHPDQVRSDAAREWLLPNYQRPNLQVLTGRYVGKVLLSQNATTPRAVGVEFGTHKGNTHNVYAKHEVLLAAGSAVSPTILEYSGIGMKSILEPLGIDTVVDLPVGLNLQDQTTSTVRSRITPAGAGQGQAAWFATFNETFGDYAEKAHELLNTKLEQWAEEAVARGGFHNTTALLIQYENYRDWIVKDNVAYSELFLDTAGVASFDVWDLLPFTRGYVHILDKDPYLRHFAYDPQYFLNELDLLGQAAATQLARNISNSGAMQTYFAGETIPGDNLAYDADLRAWVEYIPENFRPNYHGVGTCSMMPKEMGGVVDNAARVYGVQGLRVIDGSIPPTQLSSHVMTVFYAMALKIADAVLADY

SEQ ID NO: 1106 - protein, 577 aa, Aspergillus niger
GIEASLLKDPKEVAGRTYDYIIAGGGLTGLTVAARLTENPNITVLVIESGSYESDRGPIIEDLNAYGDIFGSSVDHAYETVELATNNRTALIRSGNGLGGSTLINGGTWTRPHKAQVDSWETVFGNEGWNWDSVAAYSLQAERARAPNAKQIAAGHYFNASCHGINGTVHAGPRDTGDDYSPIVKALMSAVEDRGVPTKKDLGCGDPHGVSMFPNTLHEDQVRSDAAREWLLPNYQRPNLQVLTGQYVGKVLLSQNATTPRAVGVEFGTHKGNTHNVYAKHEVLLAAGSAVSPTILEYSGIGMKSILEPLGIDTVVDLPVGLNLQDQTTSTVRSRITSAGAGQGQAAWFATFNETFGDYAEKAHELLNTKLEQWAEEAVARGGFHNTTALLIQYENYRDWIVKDNVAYSELFLDTAGVASFDVWDLLPFTRGYVHILDKDPYLRHFAYDPQYFLNELDLLGQAAATQLARNISNSGAMQTYFAGETIPGDNLAYDADLSAWVEYIPENFRPNYHGVGTCSMMPKEMGGVVDNAARVYGVQGLRVIDGSIPPTQLSSHVMTVFYAMALKIADAVLADY

SEQ ID NO: 1107 - protein, 577 aa, Aspergillus niger
GIEASLLKDPKEVAGRTYDYIIAGGGLTGLTVAARLTENPNITVLVIESGSYESDRGPIIEDLNAYGDIFGSSVDHAYETVELATNNRTALIRSGNGLGGSTLINGGTWTRPHKAQVDSWETVFGNEGWNWDSVAAYSLQAERARAPNAKQIAAGHYFNASCHGLNGTVHAGPRDTGDDYSPIVKALMSAVEDRGVPTKKDLGCGDPHGVSMFPNTLHEDQVRSDAAREWLLPNYQRPNLQVLTGRYVGKVLLSQNATTPRAVGVEFGTHKGNTHNVYAKHEVLLAAGSAVSPTILEYSGIGMKSILEPLGIDTVVDLPVGLNLQDQTTSTVRSRITSAGAGQGQAAWFATFNETFGDYAEKAHELLNTKLEQWAEEAVARGGFHNTTALLIQYENYRDWIVKDNVAYSELFLDTAGVASFDVWDLLPFTRGYVHILDKDPYLRHFAYDPQYFLNELDLLGQAAATQLARNISNSGAMQTYFAGETIPGDNLAYDADLSAWVEYIPENFRPNYHGVGTCSMMPKEMGGVVDNAARVYGVQGLRVIDGSIPPTQMSSHVMTVFYAMALKIADAILADY

SEQ ID NO: 1108 - protein, 577 aa, Aspergillus niger
GIEASLLKDPKEVAGRTYDYIIAGGGLTGLTVAAKLTENPNITVLVIESGSYESDRGPIIEDLNAYGDIFGSSVDHAYETVELATNNRTALIRSGNGLGGSTLINGGTWTRPHKAQVDSWETVFGNEGWNWDSVAAYSLQAERARAPNAKQIAAGHYFNASCHGLNGTVHAGPRDTGDDYSPIVKALMSAVEDRGVPTKKDLGCGDPHGVSMFPNTLHEDQVRSDAAREWLLPNYQRPNLQVLTGQYVGKVLLSQNATTPRAVGVEFGTHKGNTHNVYAKHEVLLAAGSAVSPTILEYSGIGMKSILEPLGIDTVVDLPVGLNLQDQTTSTVRSRITSAGAGQGQAAWFATFNETFGDYAEKAHELLNTKLEQWAEEAVARGGFHNTTALLIQYENYRDWIVKDNVAYSELFLDTAGVASFDVWDLLPFTRGYVHILDKDPYLRHFAYDPQYFLNELDLLGQAAATQLARNISNSGAMQTYFAGETIPGDNLAYDADLSAWVEYIPENFRPNYHGVGTCSMMPKEMGGVVDNAARVYGVQGLRVIDGSIPPTQMSSHVMTVFYAMALKIADAILADY

SEQ ID NO: 1109 - protein, 577 aa, Aspergillus niger
GIEASLLKDPKEVAGRTYDYIIAGGGLTGLTVAARLTENPNITVLVIESGSYESDRGPIIEDLNAYGDIFGSSVDHAYETVELATNNQTALIRSGNGLGGSTLINGGTWTRPHKAQVDSWETVFGNEGWNWDSVAAYSLQAERARAPNAKQIAAGHYFNASCHGINGTVHAGPRDTGDDYSPIVKALMSAVEDRGVPTKKDLGCGDPHGVSMFPNTLHEDQVRSDAAREWLLPNYQRPNLQVLTGRYVGKVLLSQNATTPRAVGVEFGTHKGNTHNVYAKHEVLLAAGSAVSPTILEYSGIGMKSILEPLGIDTVVDLPVGLNLQDQTTSTVRSRITPAGAGQGQAAWFATFNETFGDYTEKAHELLNTKLEQWAEEAVARGGFHNTTALLIQYENYRDWIVKDNVAYSELFLDTAGVASFDVWDLLPFTRGYVHILDKDPYLRHFAYDPQYFLNELDLLGQAAATQLARNISNSGAMQTYFAGETIPGDNLAYDADLRAWVEYIPENFRPNYHGVGTCSMMPKEMGGVVDNAARVYGVQGLRVIDGSIPPTQLSSHVMTVFYAMALKIADAILADY

SEQ ID NO: 1110 - protein, 577 aa, Aspergillus niger
GIEASLLKDPKEVAGRTYDYIIAGGGLTGLTVAARLTENPNITVLVIESGSYESDRGPIIEDLNAYGDIFGSSVDHAYETVELATNNQTALIRSGNGLGGSTLINGGTWTRPHKAQVDSWETVFGNEGWNWDSVAAYSLQAERARAPNAKQIAAGHYFNASCHGINGTVHAGPRDTGDDYSPIVKALMSAVEDRGVPTKKDLGCGDPHGVSMFPNTLHEDQVRSDAAREWLLPNYQRPNLQVLTGQYVGKVLLSQNATTPRAVGVEFGTHKGNTHNVYAKHEVLLAAGSAVSPTILEYSGIGMKSILEPLGIDTVVDLPVGLNLQDQTTSTVRSRITSAGAGQGQAAWFATFNETFGDYAEKAHELLNTKLEQWAEEAVARGGFHNTTALLIQYENYRDWIVKDNVAYSELFLDTAGVASFDVWDLLPFTRGYVHILDKDPYLRHFAYDPQYFLNELDLLGQAAATQLARNISNSGAMQTYFAGETIPGDNLAYDADLRAWVEYIPENFRPNYHGVGTCSMMPKEMGGVVDNAARVYGVQGLRVIDGSIPPTQMSSHVMTVFYAMALKIADAVLADY

SEQ ID NO: 1111 - protein, 577 aa, Aspergillus niger
GIEASLLKDPKEVAGRTYDYIIAGGGLTGLTVAARLTENPNITVLVIESGSYESDRGPIIEDLNAYGDIFGSSVDHAYETVELATNNRTALIRSGNGLGGSTLINGGTWTRPHKAQVDSWETVFGNEGWNWDSVAAYSLQAERARAPNAKQIAAGHYFNASCHGLNGTVHAGPRDTGDDYSPIVKALMSAVEDRGVPTKKDLGCGDPHGVSMFPNTLHEDQVRSDAAREWLLPNYQRPNLQVLTGQYVGKVLLSQNATTPRAVGVEFGTHKGNTHNVYAKHEVLLAAGSAVSPTILEYSGIGMKSILEPLGIDTVVDLPVGLNLQDQTTSTVRSRITSAGAGQGQAAWFATFNETFGDYTEKAHELLNTKLEQWAEEAVARGGFHNTTALLIQYENYRDWIVKDNVAYSELFLDTAGVASFDVWDLLPFTRGYVHILDKDPYLRHFAYDPQYFLNELDLLGQAAATQLARNISNSGAMQTYFAGETIPGDNLAYDADLSAWVEYIPENFRPNYHGVGTCSMMPKEMGGVVDNAARVYGVQGLRVIDGSIPPTQMSSHVMTVFYAMALKIADAILADY

SEQ ID NO: 1112 - protein, 577 aa, Aspergillus niger
GIEASLLKDPKEVAGRTYDYIIAGGGLTGLTVAAKLTENPNITVLVIESGSYESDRGPIIEDLNAYGDIFGSSVDHAYETVELPTNNRTALIRSGNGLGGSTLINGGTWTRPHKAQVDSWETVFGNEGWNWDSVAAYSLQAERARAPNAKQIAAGHYFNPSCHGINGTVHAGPRDTGDDYSPIVKALMSAVEDRGVPTKKDLGCGDPHGVSMFPNTLHEDQVRSDAAREWLLPNYQRPNLQVLTGQYVGKVLLSQNATTPRAVGVEFGTHKGNTHNVYAKHEVLLAAGSAVSPTILEYSGIGMKSILEPLGIDTVVDLPVGLNLQDQTTSTVRSRITSAGAGQGQAAWFATFNETFGDYAEKAHELLNTKLEQWAEEAVARGGFHNTTALLIQYENYRDWIVKDNVAYSELFLDTAGVASFDVWDLLPFTRGYVHILDKDPYLRHFAYDPQYFLNELDLLGQAAATQLARNISNSGAMQTYFAGETIPGDNLAYDADLSAWVEYIPENFRPNYHGVGTCSMMPKEMGGVVDNAARVYGVQGLRVIDGSIPPTQMSSHVMTVFYAMALKIADAILADY

SEQ ID NO: 1113 - protein, 577 aa, Aspergillus niger
GIEASLLKDPKEVAGRTYDYIIAGGGLTGLTVAARLTENPNITVLVIESGSYESDRGPIIEDLNAYGDIFGSSVDHAYETVELATNNQTALIRSGNGLGGSTLINGGTWTRPHKAQVDSWETVFGNEGWNWDSVAAYSLQAERARAPNAKQIAAGHYFNASCHGINGTVHAGPRDTGDDYSPIVKALMSAVEDRGVPTKKDLGCGDPHGVSMFPNTLHPDQVRSDAAREWLLPNYQRPNLQVLTGRYVGKVLLSQNATTPRAVGVEFGTHKGNTHNVYAKHEVLLAAGSAVSPTILEYSGIGMKSILEPLGIDTVVDLPVGLNLQDQTTSTVRSRITPAGAGQGQAAWFATFNETFGDYTEKAHELLNTKLEQWAEEAVARGGFHNTTALLIQYENYRDWIVKDNVAYSELFLDTAGVASFDVWDLLPFTRGYVHILDKDPYLRHFAYDPQYFLNELDLLGQAAATQLARNISNSGAMQTYFAGETIPGDNLAYDADLRAWVEYIPENFRPNYHGVGTCSMMPKEMGGVVDNAARVYGVQGLRVIDGSIPPTQMSSHVMTVFYAMALKIADAVLADY

SEQ ID NO: 1114 - protein, 577 aa, Aspergillus niger
GYEASLLTDPKEVAGRTVDYIIAGGGLTGLTTAARLTENPDITVLVIESGSYESDRGPIIEDLNAYGDIFGSSVDHAYETVELATNNQTALIRSGNGLGGSTLVNGGTWTRPHKAQVDSWETVFGNEGWNWDSVAAYSLQAERARAPNAKQIAAGHYFNASCHGINGTVHAGPRDTGDDYSPIVKALMSAVEDRGVPTKKDLGCGDPHGVSMFPNTLHEDQVRSDAAREWLLPNYQRPNLQVLTGQYVGKVLLSQNATTPRAVGVEFGTHKGNTHNVYAKHEVLLAAGSAVSPTILEYSGIGMKSILEPLGIDTVVDLPVGLNLQDQTTSTVRSRITSAGAGQGQAAWFATFNETFGDYAEKAHELLNTKLEQWAEEAVARGGFHNTTALLIQYENYRDWIVKDNVAYSELFLDTAGVASFDVWDLLPFTRGYVHILDKDPYLRHFAYDPQYFLNELDLLGQAAATQLARNISNSGAMQTYFAGETIPGDNLAYDADLSAWVEYIPYNFRPNYHGVGTCSMMPKEMGGVVDNAARVYGVQGLRVIDGSIPPTQMSSHVMTVFYAMALKIADAILADY

SEQ ID NO: 1115 - protein, 577 aa, Aspergillus niger
GIEASLLKDPKEVAGRTYDYIIAGGGLTGLTVAAKLTENPNITVLVIESGSYESDRGPIIEDLNAYGDIFGSSVDHAYETVELATNNQTALIRSGNGLGGSTLINGGTWTRPHKAQVDSWETVFGNEGWNWDSVAAYSLQAERARAPNAKQIAAGHYFNASCHGINGTVHAGPRDTGDDYSPIVKALMSAVEDRGVPTKKDLGCGDPHGVSMFPNTLHEDQVRSDAAREWLLPNYQRPNLQVLTGQYVGKVLLSQNATTPRAVGVEFGTHKGNTHNVYAKHEVLLAAGSAVSPTILEYSGIGMKSILEPLGIDTVVDLPVGLNLQDQTTSTVRSRITSAGAGQGQAAWFATFNETFGDYAEKAHELLNTKLEQWAEEAVARGGFHNTTALLIQYENYRDWIVKDNVAYSELFLDTAGVASFDVWDLLPFTRGYVHILDKDPYLRHFAYDPQYFLNELDLLGQAAATQLARNISNSGAMQTYFAGETIPGDNLAYDADLRAWVEYIPENFRPNYHGVGTCSMMPKEMGGVVDNAARVYGVQGLRVIDGSIPPTQMSSHVMTVFYAMALKIADAILADY

SEQ ID NO: 1116 - protein, 577 aa, Aspergillus niger
GIEASLLTDPKEVAGRTYDYIIAGGGLTGLTVAARLTENPDITVLVIESGSYESDRGPIIEDLNAYGQIFGSSVDHAYETVELATNNRTALIRSGNGLGGSTLINGGTWTRPHKAQVDSWETVFGNEGWNWDSVAAYSLQAERARAPNAKQIAAGHYFNASCHGINGTVHAGPRDTGDDYSPIVKALMSAVEDRGVPTKKDLGCGDPHGVSMFPNTLHEDQVRSDAAREWLLPNYQRPNLQVLTGQYVGKVLLSQNATTPRAVGVEFGTHKGNTHNVYAKHEVLLAAGSAVSPTILEYSGIGLKSILEPLGIDTVVDLPVGLNLQDQTTSTVRSRITSAGAGQGQAAWFATFNETFGDYAEKAHELLNTKLEQWAEEAVARGGFHNTTALLIQYENYRDWIVKDNVAYSELFLDTAGVASFDVWDLLPFTRGYVHILDKDPYLRHFAYDPQYFLNELDLLGQAAATQLARNISNSGAMQTYFAGETIPGDNLAYDADLSAWVEYIPYNFRPNYHGVGTCSMMPKEMGGVVDNAARVYGVQGLRVIDGSIPPTQMSSHVMTVFYAMALKIADAILADY

SEQ ID NO: 1117 - protein, 577 aa, Aspergillus niger
GIEASLLKDPKEVAGRTYDYIIAGGGLTGLTVAAKLTENPNITVLVIESGSYESDRGPIIEDLNAYGDIFGSSVDHAYETVELATNNRTALIRSGNGLGGSTLINGGTWTRPHKAQVDSWETVFGNEGWNWDSVAAYSLQAERARAPNAKQIAAGHYFNASCHGINGTVHAGPRDTGDDYSPIVKALMSAVEDRGVPTKKDLGCGDPHGVSMFPNTLHEDQVRSDAAREWLLPNYQRPNLQVLTGQYVGKVLLSQNATTPRAVGVEFGTHKGNTHNVYAKHEVLLAAGSAVSPTILEYSGIGMKSILEPLGIDTVVDLPVGLNLQDQTTSTVRSRITSAGAGQGQAAWFATFNETFGDYAEKAHELLNTKLEQWAEEAVARGGFHNTTALLIQYENYRDWIVKDNVAYSELFLDTAGVASFDVWDLLPFTRGYVHILDKDPYLRHFAYDPQYFLNELDLLGQAAATQLARNISNSGAMQTYFAGETIPGDNLAYDADLSAWVEYIPENFRPNYHGVGTCSMMPKEMGGVVDNAARVYGVQGLRVIDGSIPPTQMSSHVMTVFYAMALKIADAILADY

SEQ ID NO: 1118 - protein, 577 aa, Aspergillus niger
GIEASLLKDPKEVAGRTYDYIIAGGGLTGLTVAARLTENPDITVLVIESGSYESDRGPIIEDLNAYGQIFGSSVDHAYETVELATNNQTALIRSGNGLGGSTLINGGTWTRPHKAQVDSWETVFGNEGWNWDSVAAYSLQAERARAPNAKQIAAGHYFNASCHGINGTVHAGPRDTGDDYSPIVKALMSAVEDRGVPTKKDLGCGDPHGVSMFPNTLHEDQVRSDAAREWLLPNYQRPNLQVLTGQYVGKVLLSKNATTPRAVGVEFGTHKGNTHNVYAKHEVLLAAGSAVSPTILEYSGIGLKSILEPLGIDTVVDLPVGLNLQDQTTSTVRSRITSAGAGQGQAAWFATFNETFGDYAEKAHELLNTKLEQWAEEAVARGGFHNTTALLIQYENYRDWIVKDNVAYSELFLDTAGVASFDVWDLLPFTRGYVHILDKDPYLRHFAYDPQYFLNELDLLGQAAATQLARNISNSGAMQTYFAGETIPGDNLAYDADLSAWVEYIPYNFRPNYHAVGTCSMMPKEMGGVVDNAARVYGVQGLRVIDGSIPPTQMSSHVMTVFYAMALKIADAILADY

SEQ ID NO: 1119 - protein, 577 aa, Aspergillus niger
GIEASLLKDPKEVAGRTYDYIIAGGGLTGLTVAARLTENPNITVLVIESGSYESDRGPIIEDLNAYGDIFGSSVDHAYETVELATNNQTALIRSGNGLGGSTLINGGTWTRPHKAQVDSWETVFGNEGWNWDSVAAYSLQAERARAPNAKQIAAGHYFNASCHGINGTVHAGPRDTGDDYSPIVKALMSAVEDRGVPTKKDLGCGDPHGVSMFPNTLHPDQVRSDAAREWLLPNYQRPNLQVLTGQYVGKVLLSQNATTPRAVGVEFGTHKGNTHNVYAKHEVLLAAGSAVSPTILEYSGIGMKSILEPLGIDTVVDLPVGLNLQDQTTSTVRSRITSAGAGQGQAAWFATFNETFGDYAEKAHELLNTKLEQWAEEAVARGGFHNTTALLIQYENYRDWIVKDNVAYSELFLDTAGVASFDVWDLLPFTRGYVHILDKDPYLRHFAYDPQYFLNELDLLGQAAATQLARNISNSGAMQTYFAGETIPGDNLAYDADLSAWVEYIPENFRPNYHGVGTCSMMPKEMGGVVDNAARVYGVQGLRVIDGSIPPTQLSSHVMTVFYAMALKIADAVLADY

SEQ ID NO: 1120 - protein, 577 aa, Aspergillus niger
GIEASLLKDPKEVAGRTYDYIIAGGGLTGLTVAARLTENPNITVLVIESGSYESDRGPIIEDLNAYGDIFGSSVDHAYETVELATNNQTALIRSGNGLGGSTLINGGTWTRPHKAQVDSWETVFGNEGWNWDSVAAYSLQAERARAPNAKQIAAGHYFNASCHGINGTVHAGPRDTGDDYSPIVKALMSAVEDRGVPTKKDLGCGDPHGVSMFPNTLHPDQVRSDAAREWLLPNYQRPNLQVLTGQYVGKVLLSQNATTPRAVGVEFGTHKGNTHNVYAKHEVLLAAGSAVSPTILEYSGIGMKSILEPLGIDTVVDLPVGLNLQDQTTSTVRSRITSAGAGQGQAAWFATFNETFGDYAEKAHELLNTKLEQWAEEAVARGGFHNTTALLIQYENYRDWIVKDNVAYSELFLDTAGVASFDVWDLLPFTRGYVHILDKDPYLRHFAYDPQYFLNELDLLGQAAATQLARNISNSGAMQTYFAGETIPGDNLAYDADLSAWVEYIPENFRPNYHGVGTCSMMPKEMGGVVDNAARVYGVQGLRVIDGSIPPTQMSSHVMTVFYAMALKIADAVLADY

SEQ ID NO: 1121 - protein, 577 aa, Aspergillus niger
GIEASLLKDPKEVAGRTYDYIIAGGGLTGLTVAARLTENPNITVLVIESGSYESDRGPIIEDLNAYGDIFGSSVDHAYETVELATNNQTALIRSGNGLGGSTLINGGTWTRPHKAQVDSWETVFGNEGWNWDSVAAYSLQAERARAPNAKQIAAGHYFNPSCHGINGTVHAGPRDTGDDYSPIVKALMSAVEDRGVPTKKDLGCGDPHGVSMFPNTLHEDQVRSDAAREWLLPNYQRPNLQVLTGQYVGKVLLSQNATTPRAVGVEFGTHKGNTHNVYAKHEVLLAAGSAVSPTILEYSGIGMKSILEPLGIDTVVDLPVGLNLQDQTTSTVRSRITSAGAGQGQAAWFATFNETFGDYAEKAHELLNTKLEQWAEEAVARGGFHNTTALLIQYENYRDWIVKDNVAYSELFLDTAGVASFDVWDLLPFTRGYVHILDKDPYLRHFAYDPQYFLNELDLLGQAAATQLARNISNSGAMQTYFAGETIPGDNLAYDADLSAWVEYIPENFRPNYHGVGTCSMMPKEMGGVVDNAARVYGVQGLRVIDGSIPPTQLSSHVMTVFYAMALKIADAVLADY

SEQ ID NO: 1122 - protein, 577 aa, Aspergillus niger
GIEASLLKDPKEVAGRTYDYIIAGGGLTGLTVAARLTENPNITVLVIESGSYESDRGPIIEDLNAYGDIFGSSVDHAYETVELATNNQTALIRSGNGLGGSTLINGGTWTRPHKAQVDSWETVFGNEGWNWDSVAAYSLQAERARAPNAKQIAAGHYFNASCHGINGTVHAGPRDTGDDYSPIVKALMSAVEDRGVPTKKDLGCGDPHGVSMFPNTLHEDQVRSDAAREWLLPNYQRPNLQVLTGQYVGKVLLSQNATTPRAVGVEFGTHKGNTHNVYAKHEVLLAAGSAVSPTILEYSGIGMKSILEPLGIDTVVDLPVGLNLQDQTTSTVRSRITPAGAGQGQAAWFATFNETFGDYTEKAHELLNTKLEQWAEEAVARGGFHNTTALLIQYENYRDWIVKDNVAYSELFLDTAGVASFDVWDLLPFTRGYVHILDKDPYLRHFAYDPQYFLNELDLLGQAAATQLARNISNSGAMQTYFAGETIPGDNLAYDADLRAWVEYIPENFRPNYHGVGTCSMMPKEMGGVVDNAARVYGVQGLRVIDGSIPPTQMSSHVMTVFYAMALKIADAVLADY

SEQ ID NO: 1123 - protein, 577 aa, Aspergillus niger
GIEASLLKDPKEVAGRTYDYIIAGGGLTGLTVAARLTENPNITVLVIESGSYESDRGPIIEDLNAYGDIFGSSVDHAYETVELATNNQTALIRSGNGLGGSTLINGGTWTRPHKAQVDSWETVFGNEGWNWDSVAAYSLQAERARAPNAKQIAAGHYFNASCHGINGTVHAGPRDTGDDYSPIVKALMSAVEDRGVPTKKDLGCGDPHGVSMFPNTLHPDQVRSDAAREWLLPNYQRPNLQVLTGRYVGKVLLSQNATTPRAVGVEFGTHKGNTHNVYAKHEVLLAAGSAVSPTILEYSGIGMKSILEPLGIDTVVDLPVGLNLQDQTTSTVRSRITSAGAGQGQAAWFATFNETFGDYAEKAHELLNTKLEQWAEEAVARGGFHNTTALLIQYENYRDWIVKDNVAYSELFLDTAGVASFDVWDLLPFTRGYVHILDKDPYLRHFAYDPQYFLNELDLLGQAAATQLARNISNSGAMQTYFAGETIPGDNLAYDADLSAWVEYIPENFRPNYHGVGTCSMMPKEMGGVVDNAARVYGVQGLRVIDGSIPPTQMSSHVMTVFYAMALKIADAILADY

SEQ ID NO: 1124 - protein, 577 aa, Aspergillus niger
GIEASLLKDPKEVAGRTYDYIIAGGGLTGLTVAARLTENPNITVLVIESGSYESDRGPIIEDLNAYGDIFGSSVDHAYETVELPTNNQTALIRSGNGLGGSTLINGGTWTRPHKAQVDSWETVFGNEGWNWDSVAAYSLQAERARAPNAKQIAAGHYFNPSCHGLNGTVHAGPRDTGDDYSPIVKALMSAVEDRGVPTKKDLGCGDPHGVSMFPNTLHEDQVRSDAAREWLLPNYQRPNLQVLTGQYVGKVLLSQNATTPRAVGVEFGTHKGNTHNVYAKHEVLLAAGSAVSPTILEYSGIGMKSILEPLGIDTVVDLPVGLNLQDQTTSTVRSRITSAGAGQGQAAWFATFNETFGDYAEKAHELLNTKLEQWAEEAVARGGFHNTTALLIQYENYRDWIVKDNVAYSELFLDTAGVASFDVWDLLPFTRGYVHILDKDPYLRHFAYDPQYFLNELDLLGQAAATQLARNISNSGAMQTYFAGETIPGDNLAYDADLSAWVEYIPENFRPNYHGVGTCSMMPKEMGGVVDNAARVYGVQGLRVIDGSIPPTQMSSHVMTVFYAMALKIADAILADY

SEQ ID NO: 1125 - protein, 577 aa, Aspergillus niger
GIEASLLKDPKEVAGRTYDYIIAGGGLTGLTVAARLTENPNITVLVIESGSYESDRGPIIEDLNAYGDIFGSSVDHAYETVELATNNQTALIRSGNGLGGSTLINGGTWTRPHKAQVDSWETVFGNEGWNWDSVAAYSLQAERARAPNAKQIAAGHYFNASCHGINGTVHAGPRDTGDDYSPIVKALMSAVEDRGVPTKKDLGCGDPHGVSMFPNTLHPDQVRSDAAREWLLPNYQRPNLQVLTGQYVGKVLLSQNATTPRAVGVEFGTHKGNTHNVYAKHEVLLAAGSAVSPTILEYSGIGMKSILEPLGIDTVVDLPVGLNLQDQTTSTVRSRITSAGAGQGQAAWFATFNETFGDYTEKAHELLNTKLEQWAEEAVARGGFHNTTALLIQYENYRDWIVKDNVAYSELFLDTAGVASFDVWDLLPFTRGYVHILDKDPYLRHFAYDPQYFLNELDLLGQAAATQLARNISNSGAMQTYFAGETIPGDNLAYDADLSAWVEYIPENFRPNYHGVGTCSMMPKEMGGVVDNAARVYGVQGLRVIDGSIPPTQMSSHVMTVFYAMALKIADAILADY

SEQ ID NO: 1126 - protein, 577 aa, Aspergillus niger
GIEASLLTDPKEVAGRTVDYIIAGGGLTGLTTAARLTENPDITVLVIESGSYESDRGPIIEDLNAYGDIFGSSVDHAYETVELATNNQTALIRSGNGLGGSTLVNGGTWTRPHKAQVDSWETVFGNEGWNWDSVAAYSLQAERARAPNAKQIAAGHYFNASCHGINGTVHAGPRDTGDDYSPIVKALMSAVEDRGVPTKKDLGCGDPHGVSMFPNTLHEDQVRSDAAREWLLPNYQRPNLQVLTGQYVGKVLLSQNATTPRAVGVEFGTHKQNTHNVYAKHEVLLAAGSAVSPTILEYSGIGMKSILEPLGIDTVVDLPVGLNLQDQTTSTVRSRITSAGAGQGQAAWFATFNETFGDYAEKAHELLNTKLEQWAEEAVARGGFHNTTALLIQYENYRDWIVKDNVAYSELFLDTAGVASFDVWDLLPFTRGYVHILDKDPYLRHFAYDPQYFLNELDLLGQAAATQLARNISNSGAMQTYFAGETIPGDNLAYDADLSAWVEYIPYNFRPNYHGVGTCSMMPKEMGGVVDNAARVYGVQGLRVIDGSIPPTQMSSHVMTVFYAMALKIADAILADY

SEQ ID NO: 1127 - protein, 576 aa, Aspergillus niger
GIEASLLTDPKEVAGRTVDYIIAGGGLTGLTTAARLTENPDITVLVIESGSYESDRGPIIEDLNAYGDIFGSSVDHAYETVELTNNQTALIRSGNGLGGSTLVNGGTWTRPHKAQVDSWETVFGNEGWNWDSVAAYSLQAERARAPNAKQIAAGHYFNASCHGINGTVHAGPRDTGDDYSPIVKALMSAVEDRGVPTKKDLGCGDPHGVSMFPNTLHEDQVRSDAAREWLLPNYQRPNLQVLTGQYVGKVLLSQNATTPRAVGVEFGTHKGNTHNVYAKHEVLLAAGSAVSPTILEYSGIGMKSILEPLGIDTVVDLPVGLNLQDQTTSTVRSRITSAGAGQGQAAWFATFNETFGDYAEKAHELLNTKLEQWAEEAVARGGFHNTTALLIQYENYRDWIVKDNVAYSELFLDTAGVASFDVWDLLPFTRGYVHILDKDPYLRHFAYDPQYFLNELDLLGQAAATQLARNISNSGAMQTYFAGETIPGDNLAYDADLSAWVEYIPYNFRPNYHGVGTCSMMPKEMGGVVDNAARVYGVQGLRVIDGSIPPTQMSSHVMTVFYAMALKIADAILADY

SEQ ID NO: 1128 - protein, 576 aa, Aspergillus niger
IEASLLKNPKLVAGRTYDYIIAGGGLAGLTVAEKLTENPNITVLVIEGGSYESDRGPIIEDLNAYGEIFGTSVDHAYETVELATNNRTALIRSGNGLGGSTLINGGTWTRPHKAQVDSWETVFGNEGWNWDSVAAYSLQAERARAPNAKQIAAGHYFNASCHGLNGTVHVGPRDTGDDYSPLMRALMSAVEDRGVPTKKDLGCGDPHGVSMFPNTLHEDQVRADAAREWLLPNYQRPNLQVLTGQYVGKVLLSQNATTPRAVGVEFGTHKSNTHNVYAKHEVLLSAGSTVSPTILEYSGIGMKSILEPLGIDTVVDLPVGLNLQDQTTSTVRSRITSAGAGQGQAAWFATFNETFGHYTEKAHELLNTKLEQWAEEAVARGGFHNTTALLIQYENYRDWIVKDNVAYSELFLDTGGVASFDVWDLLPFTRGYVHILDKDPYLRHFAYDPQYFLNELDLLGQAAATQLARNISNSGAMQTYFAGETIPGDNLAYEADLSAWVEYIPEHFRPNYHGVGTCSMMPKEMGGVVDNAARVYGVQGLRVIDGSIPPTQLSSHVMTVFYAMALKIADAVLADY

SEQ ID NO: 1129 - protein, 576 aa, Aspergillus niger
IEASLLKDPKLVAGDTYDYIIAGGGLAGLTVAEKLTENPNITVLVIESGSYESDRGPIIEDLNAYGEIFGTSVDHAYETVELAANDRTALIRSGNGLGGSTLINGGTWTRPHKAQVDSWETVFGNEGWNWDSVAAYSLQAERARAPNAKQIAAGHYFNAGCHGLNGTVHVGPRDTGDDYSPLMRALMSAVEDRGVPTKKDLGCGDPHGVSMFPNTLHEDQVRADAAREWLLPNYQRPHLQVLTGQYVGKVLLSQNATTPRAVGVEFGTHKSNTHNVYAKHEVLLSAGSTVSPTILEYSGIGMKSILEPLGIDTVVDLPVGLNLQDQTTSTVRSRITSAGDGQGQAAWFATFNETFGDYTEKAHELLNTKLEQWAEEAVARGGFHNTTALLIQYENYRDWIVKDNVAYSELFLDTGGVASFDVWDLLPFTRGYVHILDKDPYLRHFAYDPQYFLNELDLLGQAAATQLARNISNSGAMQTYFAGETIPGDNLAYNADLSAWVEYIPEHFRPNYHGVGTCSMMPKEMGGVVDNAARVYGVQGLRVIDGSIPPTQLSSHVMTVFYAMALKIADAVLADY

SEQ ID NO: 1130 - protein, 576 aa, Aspergillus niger
IEASLLKDPKLVAGDTYDYIIAGGGLAGLTVAEKLTENPNITVLVIEGGSYESDRGPIIEDLNAYGEIFGTSVDHAYETVELATNDRTALIRSGNGLGGSTLINGGTWTRPHKAQVDSWETVFGNEGWNWDSVAAYSLQAERARAPNAKQIAAGHYFNASCHGLNGTVHVGPRDTGDDYSPLMRALMSAVEDRGVPTKKDLGCGDPHGVSMFPNTLHEDQVRADAAREWLLPNYQRPHLQVLTGQYVGKVLLSQNATTPRAVGVEFGTHKSNTHNVYAKHEVLLSAGSTVSPTILEYSGIGMKSILEPLGIDTVVDLPVGLNLQDQTTSTVRSRITSAGGGQGQAAWFATFNETFGDYTEKAHELLNTKLEQWAEEAVARGGFHNTTALLIQYENYRDWIVKDNVAYSELFLDTGGVASFDVWDLLPFTRGYVHILDKDPYLRHFAYDPQYFLNELDLLGQAAATQLARNISNSGAMQTYFAGETIPGDNLAYDADLSAWVEYIPEHFRPNYHGVGTCSMMPKEMGGVVDNAARVYGVQGLRVIDGSIPPTQLSSHVMTVFYAMALKIADAVLADY

SEQ ID NO: 1131 - protein, 597 aa, Aspergillus niger
LVSSLVVSLAAALPHYIRSNGIEASLLTDPKEVAGRTVDYIIAGGGLTGLTTAARLTENPDITVLVIESGSYESDRGPIIEDLNAYGDIFGSSVDHAYETVELATNNQTALIRSGNGLGGSTLVNGGXWTRPHKAQVDSWETVFGNEGWNWDSVAAYSLQAERARAPNAKQIAAGHYFNASCHGINGTVHAGPRDTGDDYSPIVKALMSAVEDRGVPTKKDLGCGDPHGVSMFPNTLHEDQVRSDAAREWLLPNYQRPNLQVLTGQYVGKVLLSQNATTPRAVGVEFGTHKGNTHNVYAKHEVLLAAGSAVSPTILEYSGIGMKSILEPLGIDTVVDLPVGLNLQDQTTSTVRSRITSAGAGQGQAAWXATFNETFGDYAEKAHELLNTKLEQWAEEAVARGGFHNTTALLIQYENYRDWIVKDNVAYSELFLDTAGVASFDVWDLLPFTRGYVHILDKDPYLRHFAYDPQYFLNELDLLGQAAATQLARNISNSGAMQTYFAGETIPGDNLAYDADLSAWVEYIPYNFRPNYHGVGTCSMMPKEMGGVVDNAARVYGVQGLRVIDGSIPPTQMSSHVMTVFYAMALKIADAILADY

SEQ ID NO: 1132 - protein, 597 aa, Aspergillus niger
LVSSLVVSLAAALPHYIRSNGIEASLLTDPKEVAGRTVDYIIAGGGLTGLTTAARLTENPDITVLVIESGSYESDRGPIIEDLNAYGDIFGSSVDHAYETVELATNNQTALIRSGNGLGGSTLVNGGTWTRPHKAQVDSWETVFGNEGWNWDSVAAYSLQAERARAPNAKQIAAGHYFNASCHGINGTVHAGPRDTGDDYSPIVKALMSAVEDRGVPTKKDLGCGDPHGVSMFPNTLHEDQVRSDAAREWLLPNYQRPNLQVLTGRYVGKVLLSQNATTPRAVGVEFGTHKGNTHNVYAKHEVLLAAGSAVSPTILEYSGIGMKSILEPLGIDTVVDLPVGLNLQDQTTSTVRSRITSAGAGQGQAAWFATFNETFGDYAEKAHELLNTKLEQWAEEAVARGGFHNTTALLIQYENYRDWIVKDNVAYSELFLDTAGVASFDVWDLLPFTRGYVHILDKDPYLRHFAYDPQYFLNELDLLGQAAATQLARNISNSGAMQTYFAGETIPGDNLAYDADLSAWVEYIPYNFRPNYHGVGTCSMMPKEMGGVVDNAARVYGVQGLRVIDGSIPPTQMSSHVMTVFYAMALKVADAILADY

SEQ ID NO: 1133 - protein, 591 aa, Aspergillus oryzae
AVAHPSFPIHKRSNGIEASLLTDPKDVSGRTVDYIIAGGGLTGLTTAARLTENPNISVLVIESGSYESDRGPIIEDLNAYGDIFGSSVDHAYETVELATNNQTALIRSGNGLGGSTLVNGGTWTRPHKAQVDSWETVFGNEGWNWDNVAAYSLQAERARAPNAKQIAAGHYFNASCHGVNGTVHAGPRDTGDDYSPIVKALMSAVEDRGVPTKKDFGCGDPHGVSMFPNTLHEDQVRSDAAREWLLPNYQRPNLQVLTGQYVGKVLLSQNGTTPRAVGVEFGTHKGNTHNVYAKHEVLLAAGSAVSPTILEYSGIGMKSILEPLGIDTVVDLPVGLNLQDQTTATVRSRITSAGAGQGQAAWFATFNETFGDYSEKAHELLNTKLEQWAEEAVARGGFHNTTALLIQYENYRDWIVNHNVAYSELFLDTAGVASFDVWDLLPFTRGYVHILDKDPYLHHFAYDPQYFLNELDLLGQAAATQLARNISNSGAMQTYFAGETIPGDNLAYDADLSAWTEYIPYHFRPNYHGVGTCSMMPKEMGGVVDNAARVYGVQGLRVIDGSIPPTQMSSHVMTVFYAMALKISDAILEDY

SEQ ID NO: 1134 - protein, 585 aa, Aspergillus niger
LPHYIRSNGIEASLLTDPKDVSGRTVDYIIAGGGLTGLTTAARLTENPNISVLVIESGSYESDRGPIIEDLNAYGDIFGSSVDHAYETVELATNNQTALIRSGNGLGGSTLVNGGTWTRPHNAQVDSWETVFGNEGWNWDNVAAYSLQAERARAPNAKQIAAGHYFNASCHGTNGTVHAGPRDTGDDYSPIVKALMSAVEDRGVPTKKDFGCGDPHGVSMFPNTLHEDQVRSDAAREWLLPNYQRPNLQVLTGQYVGKVLLSQNGTTPRAVGVEFGTHKGNTHNVYAEHEVLLAAGSAVSPTILEYSGIGMKSILEPLGIDTVVDLPVGLNLQDQTTATVRSRITSAGAGQGQAAWFATFNETFGDYSEKAHELLNTKLEQWAEEAVARGGFHNTTALLIQYENYRDWIVNHNVAYSELFLDTAGVASFDVWDLLPFTRGYVHILDKDPYLHHFAYDPQYFLNELDLLGQAAATQLARNISNSGAMQTYFAEETIPGDNLAYDADLSAWTEYIPYHFRPNYHGVGTCSMMPKEMGGVVDNAARVYGVQGLRVIDGSIPPTQMSSHVMTVFYAMALKISDAILEDY

SEQ ID NO: 1135 - protein, 585 aa, Aspergillus niger
LPHYIRSNGIEASLLTDPKDVSGRTVDYIIAGGGLTGLTTAARLTENPNISVLVIESGSYESDRGPIIEDLNAYGDIFGSSVDHAYETVELATNNQTALIRSGNGLGGSTLVNGGTWTRPHKAQVDSWETVFGNEGWNWDNVPAYSLQAERARAPNAKQIAAGHYFNASCHGTNGTVHAGPRDTGDDYSPIVKALMSAVEDRGVPTKKDFGCGDPHGVSMFPNTLHEDQVRSDAAREWLLPNYQRPNLQVLTGQYVGKVLLSQNGTTPRAVGVEFGTHKGNTHNVYAEHEVLLAAGSAVSPTILEYSGIGMKSILEPLGIDTVVDLPVGLNLQDQTTATVRSRITSAGAGQGQAAWFATFNETFGDYSEKAHELLNTKLEQWAEEAVARGGFHNTTALLIQYENYRDWIVNHNVAYSELFLDTAGVASFDVWDLLPFTRGYVHILDKDPYLHHFAYDPQYILNELDLLGQAAATQLARNISNSGAMQTYFAGETIPGDNLAYDADLSAWTEYIPYHFRPNYHGVGTCSMMPKEMGGVVDNAARVYGVQGLRVIDGSIPPTQMSSHVMTVFYAMALKISDAILEDY

SEQ ID NO: 1136 - protein, 585 aa, Aspergillus niger
LPHYIRSNGIEASLLTDPKDVSGRTVDYIIAGGGLTGLTTAARLTENPNISVLVIESGSYESDRGPIIEDLNAYGDIFGSSVDHAYETVELATNNQTALIRSGNGLGGSTLVNGGTWTRPHNAQVDSWETVFGNEGWNWDNVAAYSLQAERARAPNAKQIAAGHYFNASCHGTNGTVHAGPRDTGDDYSPIVKALMSAVEDRGVPTKKDFGCGDPHGVSMFPNTLHEDQVRSDAAREWLLPNYQRPNLQVLTGQYVGKVLLSPNGTTPRAVGVEFGTHKGNTHNVYAEHEVLLAAGSAVSPTILEYSGIGMKSILEPLGIDTVVDLPVGLNLQDQTTATVSSRITSAGAGQGQAAWFATFNETFGDYSEKAHELLNTKLEQWAEEAVARGGFHNTTALLIQYENYRDWIVNHNVAYSELFLDTAGVASFDVWDLLPFTRGYVHILDKDPYLHHFAYDPQYFLNELDLLGQAAATQLARNISNSGAMQTYFAEETIPGDNLAYDADLSAWTEYIPYHFRPNYHGVGTCSMMPKEMGGVVDNAARVYGVQGLRVIDGSIPPTQMSSHVMTVFYAMALKISDAILEDY

SEQ ID NO: 1137 - protein, 585 aa, Aspergillus niger
LPHYIRSNGIEASLLTDPKDVSGRTVDYIIAGGGLTGLTTAARLTENPNISVLVIESGSYESDRGPIIEDLNAYGDIFGSSVDHAYETVELATNNQTALIRSGNGLGGSTLINGGTWTRPHKAQVDSWETVFGNEGWNWDNVAAYSLQAERARAPNAKQIAAGHYFNASCHGVNGTVHAGPRDTGDDYSPIVKALMSAVEDRGVPTKKDFDCGDPHGVSMFPNTLHEDQVRSDAAREWLLPNYQRPNLQVLTGQYVGKVLLSQNGTTPRAVGVEFGTHKGNTHNVYAKHEVLLAAGSAVSPTILEYSGIGMKSILEPLGIDTVVDLPVGLNLQDQTTATVRSRITSAGAGQGQAAWFATFNETFGDYSEKAHELLNTKLEQWAEEAVARGGFHNTTALLIQYENYRDWIVNHNVAYSELFLDTAGVASFDVWDLLPFTRGYVHILDKDPYLHHFAYDPQYFLNELDLLGQAAATQLARNISNSGAMQTYFAGETIPGDNLAYDADLSAWTEWIPYHFRPNYHGVGTCSMMPKEMGGVVDNAARVYGVQGLRVIDGSIPPTQMSSHVMTVFYAMALKISDAILEDY

SEQ ID NO: 1138 - protein, 577 aa, Synthetic construct
GIEDSLLTDPKEVAGRTVDYIIAGGGLTGLVVAARLTENPDITVLVIESGSYESDRGPIIEDLNAYGKIFGSSVDHAYETVCLATNNRTALIRAGNGLGGSTLVNGGTWTRPHKAQVDSWETVFGNEGWNWDSVAAYSLQAERARAPNAKQIAAGHYFNASCHGINGTVHAGPRDTGDDYSPIVKALMSAVENRGVPTKKDLGCGDPHGVSMFPNTLHEDQVRSDAAREWLLPNYQRPNLQVLTGQYVGKVLLSQNATTPRAVGVEFGTHKGNFHNVTAKHEVLLAAGSAVSPTILEYSGIGMKSILEPLGIKTVVDLPVGLNLQDQTTSTVRSRITSAGAGQGQAAWFATFNETFGDYTPKAHELLNTKLEQWAEEAVARGGFHNTTALLIQYENYRDWIVKDNVAYSELFLDTAGEISFDVWDLLPFTRGYVHILDKDPYLRHFAYDPQYFLNELDLLGQAAATQLARNISNSGAMQTYFAGETIPGDELAYDANLRAWVEYIPYHFRPNYHGVGTCSMMPKEMGGVVDNAARVYGVQGLRVIDGSIPPTQMSSHVMTVFYAMALKIADAVLADY

SEQ ID NO: 1139 - protein, 577 aa, Aspergillus niger
GIEASLLTDPKEVAGRTVDYIIAGGGLTGLTTAARLTENPDITVLVIESGSYESDRGPIIEDLNAYGDIFGSSVDHAYETVELATNNQTALIRSGNGLGGSTLVNGGTWTRPHKAQVDSWETVFGNEGWNWDSVAAYSLQAERARAPNAKQIAAGHYFDPSCHGINGTVHAGPRDTGDDYSPIVKALMSAVEDRGVPTKKDLGCGDPHGVSMFPNTLHEDQVRSDAAREWLLPNYQRPNLQVLTGQYVGKVLLSQNATTPRAVGVEFGTHKGNTHNVYAKHEVLLAAGSAVSPTILEYSGIGMKSILEPLGIDTVVDLPVGLNLQDQTTSTVRSRITSAGAGQGQAAWFATFNETFGDYTEKAHELLNTKLEQWAEEAVARGGFHNTTALLIQYENYRDWIVKDNVAYSELFLDTAGVASFDVWDLLPFTRGYVHILDKDPYLRHFAYDPQYFLNELDLLGQAAATQLARNISNSGAMQTYFAGETIPGDNLAYDADLRAWVEYIPYNFRPNYHGVGTCSMMPKEMGGVVDNAARVYGVQGLRVIDGSIPPTQMSSHVMTVFYAMALKIADAVLADY

SEQ ID NO: 1140 - protein, 577 aa, Aspergillus niger
GIEASLLTDPKEVAGRTVDYIIAGGGLTGLTVAARLTENPDITVLVIESGSYESDRGPIIEDLNAYGDIFGSSVDHAYETVCLATNNQTALIRSGNGLGGSTLVNGGTWTRPHKAQVDSWETVFGNEGWNWDSVAAYSLQAERARAPNAKQIAAGHYFNASCHGINGTVHAGPRDTGDDYSPIVKALMSAVEDRGVPTKKDLGCGDPHGVSMFPNTLHEDQVRSDAAREWLLPNYQRPNLQVLTGQYVGKVLLSQNATTPRAVGVEFGTHKGNTHNVYAKHEVLLAAGSAVSPTILEYSGIGMKSILEPLGIDTVVDLPVGLNLQDQTTSTVRSRITSAGAGQGQAAWFATFNETFGDYTEKAHELLNTKLEQWAEEAVARGGFHNTTALLIQYENYRDWIVKDNVAYSELFLDTAGEASFDVWDLLPFTRGYVHILDKDPYLRHFAYDPQYFLNELDLLGQAAATQLARNISNSGAMQTYFAGETIPGDNLAYDADLRAWVEYIPYHFRPNYHGVGTCSMMPKEMGGVVDNAARVYGVQGLRVIDGSIPPTQMSSHVMTVFYAMALKIADAVLADY

SEQ ID NO: 1141 - protein, 577 aa, Synthetic construct
GIEASLLTDPKEVAGRTVDYIIAGGGLTGLVVAARLTENPDITVLVIESGSYESDRGPIIEDLNAYGKIFGSSVDHAYETVCLATNNRTALIRAGNGLGGSTLVNGGTWTRPHKAQVDSWETVFGNEGWNWDSVAAYSLQAERARAPNAKQIAAGHYFNASCHGINGTVHAGPRDTGDDYSPIVKALMSAVEDRGVPTKKDLGCGDPHGVSMFPNTLHEDQVRSDAAREWLLPNYQRPNLQVLTGQYVGKVLLSQNATTPRAVGVEFGTHKGNFHNVTAKHEVLLAAGSAVSPTILEYSGIGMKSILEPLGIKTVVDLPVGLNLQDQTTSTVRSRITPAGAGQGQAAWFATFNETFGDYTPKAHELLNTKLEQWAEEAVARGGFHNTTALLIQYENYRDWIVKDNVAYSELFLDTAGEASFDVWDLLPFTRGYVHILDKDPYLRHFAYDPQYFLNELDLLGQAAATQLARNISNSGAMQTYFAGETIPGDNLAYDADLRAWVEYIPYHFRPNYHGVGTCSMMPKEMGGVVDNAARVYGVQGLRVIDGSIPPTQMSSHVMTVFYAMALKIADAVLADY

SEQ ID NO: 1142 - protein, 577 aa, Aspergillus niger
GIEASLLTDPKEVAGRTVDYIIAGGGLTGLTTAARLTENPDITVLVIESGSYESDRGPIIEDLNAYGDIFGSSVDHAYETVCLATNNQTALIRSGNGLGGSTLVNGGTWTRPHKAQVDSWETVFGNEGWNWDSVAAYSLQAERARAPNAKQIAAGHYFNASCHGINGTVHAGPRDTGDDYSPIVKALMSAVEDRGVPTKKDLGCGDPHGVSMFPNTLHEDQVRSDAAREWLLPNYQRPNLQVLTGQYVGKVLLSQNATTPRAVGVEFGTHKGNTHNVYAKHEVLLAAGSAVSPTILEYSGIGMKSILEPLGIDTVVDLPVGLNLQDQTTSTVRSRITSAGAGQGQAAWFATFNETFGDYTEKAHELLNTKLEQWAEEAVARGGFHNTTALLIQYENYRDWIVKDNVAYSELFLDTAGEASFDVWDLLPFTRGYVHILDKDPYLRHFAYDPQYFLNELDLLGQAAATQLARNISNSGAMQTYFAGETIPGDNLAYDADLRAWVEYIPYHFRPNYHGVGTCSMMPKEMGGVVDNAARVYGVQGLRVIDGSIPPTQMSSHVMTVFYAMALKIADAVLADY

SEQ ID NO: 1143 - protein, 577 aa, Synthetic construct
GIEASLLTDPKEVAGRTVDYIIAGGGLTGLVVAARLTENPDITVLVIESGSYESDRGPIIEDLNAYGKIFGSSVDHAYETVCLATNNRTALIRAGNGLGGSTLVNGGTWTRPHKAQVDSWETVFGNEGWNWDSVAAYSLQAERARAPNAKQIAAGHYFNASCHGINGTVHAGPRDTGDDYSPIVKALMSAVENRGVPTKKDLGCGDPHGVSMFPNTLHEDQVRSDAAREWLLPNYQRPNLQVLTGQYVGKVLLSQNATTPRAVGVEFGTHKGNFHNVTAKHEVLLAAGSAVSPTILEYSGIGMKSILEPLGIKTVVDLPVGLNLQDQTTSTVRSRITSAGAGQGQAAWFATFNETFGDYTPKAHELLNTKLEQWAEEAVARGGFHNTTALLIQYENYRDWIVKDNVAYSELFLDTAGEISFDVWDLLPFTRGYVHILDKDPYLRHFAYDPQYFLNELDLLGQAAATQLARNISNSGAMQTYFAGETIPGDNLAYDANLRAWVEYIPYHFRPNYHGVGTCSMMPKEMGGVVDNAARVYGVQGLRVIDGSIPPTQMSSHVMTVFYAMALKIADAVLADY

SEQ ID NO: 1144 - protein, 577 aa, Synthetic construct
GIEASLLTDPKEVAGRTVDYIIAGGGLTGLVVAARLTENPDITVLVIESGSYESDRGPIIEDLNAYGKIFGSSVDHAYETVCLATNNRTALIRAGNGLGGSTLVNGGTWTRPHKAQVDSWETVFGNEGWNWDSVAAYSLQAERARAPNAKQIAAGHYFNASCHGINGTVHAGPRDTGDDYSPIVKALMSAVEDRGVPTKKDLCCGDPHGVSMFPNTLHEDQVRSDAAREWLLPNYQRPNLQVLTGQYVGKVLLSQNATTPRAVGVEFGTHKGNFHNVTAKHEVLLAAGSAVSPTILEYSGIGMKSILEPLGIKTVVDLPVGLNLQDQTTSTVRSRITSAGAGQGQAAWFATFNETFGDYTPKAHELLNTKLEQWAEEAVARGGFHNTTALLIQYENYRDWIVKDNVAYSELFLDTAGEASFDVWDLLPFTRGYVHILDKDPYLRHFAYDPQYFLNELDLLGQAAATQLARNISNSGAMQTYFAGETIPGDNLAYDADLRAWVEYIPYHFRPNYHGVGTCSMMPKEMGGVVDNAARVYGVQGLRVIDGSIPPTQMSSHVMTVFYAMALKIADAVLADY

SEQ ID NO: 1145 - protein, 577 aa, Synthetic construct
GIEDSLLTDPKEVAGRTVDYIIAGGGLTGLVVAARLTENPDITVLVIESGSYESDRGPIIEDLNAYGKIFGSSVDHAYETVCLATNNRTALIRAGNGLGGSTLVNGGTWTRPHKAQVDSWETVFGNEGWNWDSVAAYSLQAERARAPNAKQIAAGHYFNASCHGINGTVHAGPRDTGDDYSPIVKALMSAVENRGVPTKKDLGCGDPHGVSMFPNTLHEDQVRSDAAREWLLPNYQRPNLSVLTGQYVGKVLLSQNATTPRAVGVEFGTHKGNFHNVTAKHEVLLAAGSAVSPTILEYSGIGMKSILEPLGIKTVVDLPVGLNLQDQTTSTVRSRITSAGAGQGQAAWFATFNETFGDYTPKAHELLNTKLEQWAEEAVARGGFHNTTALLIQYENYRDWIVKDNVAYSELFLDTAGEISFDVWDLLPFTRGYVHILDKDPYLRHFAYDPQYFLNELDLLGQAAATQLAREISNSGAMQTYFAGETIPGDNLAYDANLRAWVEYIPYHFRPNYHGVGTCSMMPKEMGGVVDNAARVYGVQGLRVIDGSIPPTQMSSHVMTVFYAMALKIADAVLADY

SEQ ID NO: 1146 - protein, 577 aa, Synthetic construct
GIEASLLTDPKEVAGRTVDYIIAGGGLTGLVVAARLTENPDITVLVIESGSYESDRGPIIEDLNAYGKIFGSSVDHAYETVCLATNNRTALIRAGNGLGGSTLVNGGTWTRPHKAQVDSWETVFGNEGWNWDSVAAYSLQAERARAPNAKQIAAGHYFNASCHGINGTVHAGPRDTGDDYSPIVKALMSAVEDRGVPTKKDLGCGDPHGVSMFPNTLHEDQVRSDAAREWLLPNYQRPNLQVLTGQYVGKVLLSQNATTPRAVGVEFGTHKGNFHNVTAKHEVLLAAGSAVSPTILEYSGIGMKSILEPLGIKTVVDLPVGLNLQDQTTSTVRSRITSAGAGQGQAAWFATFNETFGDYTPKAHELLNTKLEQWAEEAVARGGFHNTTALLIQYENYRDWIVKDNVAYSELFLDTAGEISFDVWDLLPFTRGYVHILDKDPYLRHFAYDPQYFLNELDLLGQAAATQLARNISNSGAMQTYFAGETIPGDNLAYDADLRAWVEYIPYHFRPNYHGVGTCSMMPKEMGGVVDNAARVYGVQGLRVIDGSIPPTQMSSHVMTVFYAMALKIADAVLADY

SEQ ID NO: 1147 - protein, 577 aa, Aspergillus niger
GIEASLLTDPKEVAGRTVDYIIAGGGLTGLTTAARLTENPDITVLVIESGSYESDRGPIIEDLNAYGDIFGSSVDHAYETVELATNNQTALIRSGNGLGGSTLVNGGTWTRPHKAQVDSWETVFGNEGWNWDSVAAYSLQAERARAPNAKQIAAGHYFNASCHGINGTVHAGPRDTGDDYSPIVKALMSAVEDRGVPTKKDLGCGDPHGVSMFPNTLHEDQVRSDAAREWLLPNYQRPNLQVLTGQYVGKVLLSQNATTPRAVGVEFGTHKGNTHNVYAKHEVLLAAGSAVSPTILEYSGIGMKSILEPLGIDTVVDLPVGLNLQDQTTSTVRSRITSAGAGQGQAAWFATFNETFGDYTEKAHELLNTKLEQWAEEAVARGGFHNTTALLIQYENYRDWIVKDNVAYSELFLDTAGVASFDVWDLLPFTRGYVHILDKDPYLRHFAYDPQYFLNELDLLGQAAATQLARNISNSGAMQTYFAGETIPGDNLAYDADLRAWVEYIPYNFRPNYHGVGTCSMMPKEMGGVVDNAARVYGVQGLRVIDGSIPPTQMSSHVMTVFYAMALKIADAVLADY

SEQ ID NO: 1148 - protein, 577 aa, Synthetic construct
GIEDSLLTDPKEVAGRTVDYIIAGGGLTGLVVAARLTENPDITVLVIESGSYESDRGPIIEDLNAYGKIFGSSVDHAYETVCLATNNRTALIRAGNGLGGSTLVNGGTWTRPHKAQVDSWETVFGNEGWNWDSVAAYSLQAERARAPNAKQIAAGHYFNASCHGINGTVHAGPRDTGDDYSPIVKALMSAVEDRGVPTKKDLGCGDPHGVSMFPNTLHEDQVRSDAAREWLLPNYQRPNLSVLTGQYVGKVLLSQNATTPRAVGVEFGTHKGNFHNVTAKHEVLLAAGSAVSPTILEYSGIGMKSILEPLGIKTVVDLPVGLNLQDQTTSTVRSRITSAGAGQGQAAWFATFNETFGDYTPKAHELLNTKLEQWAEEAVARGGFHNTTALLIQYENYRDWIVKDNVAYSELFLDTAGEISFDVWDLLPFTRGYVHILDKDPYLRHFAYDPQYFLNELDLLGQAAATQLAREISNSGAMQTYFAGETIPGDNLAYDADLRAWVEYIPYHFRPNYHGVGTCSMMPKEMGGVVDNAARVYGVQGLRVIDGSIPPTQMSSHVMTVFYAMALKIADAVLADY

SEQ ID NO: 1149 - protein, 577 aa, Synthetic construct
GIEASLLTDPKEVAGRTVDYIIAGGGLTGLVVAARLTENPDITVLVIESGSYESDRGPIIEDLNAYGKIFGSSVDHAYETVCLATNNRTALIRAGNGLGGSTLVNGGTWTRPHKAQVDSWETVFGNEGWNWDSVAAYSLQAERARAPNAKQIAAGHYFNASCHGINGTVHAGPRDTGDDYSPIVKALMSAVEDRGVPTKKDLCCGDPHGVSMFPNTLHEDQVRSDAAREWLLPNYQRPNLSVLTGQYVGKVLLSQNATTPRAVGVEFGTHKGNFHNVTAKHEVLLAAGSAVSPTILEYSGIGMKSILEPLGIKTVVDLPVGLNLQDQTTSTVRSRITSAGAGQGQAAWFATFNETFGDYTPKAHELLNTKLEQWAEEAVARGGFHNTTALLIQYENYRDWIVKDNVAYSELFLDTAGEISFDVWDLLPFTRGYVHILDKDPYLRHFAYDPQYFLNELDLLGQAAATQLARNISNSGAMQTYFAGETIPGDNLAYDADLRAWVEYIPYHFRPNYHGVGTCSMMPKEMGGVVDNAARVYGVQGLRVIDGSIPPTQMSSHVMTVFYAMALKIADAVLADY

SEQ ID NO: 1150 - protein, 577 aa, Aspergillus niger
GIEASLLTDPKEVAGRTVDYIIAGGGLTGLTTAARLTENPDITVLVIESGSYESDRGPIIEDLNAYGDIFGSSVDHAYETVELATNNQTALIRSGNGLGGSTLVNGGTWTRPHKAQVDSWETVFGNEGWNWDSVAAYSLQAERARAPNAKQIAAGHYFDPSCHGINGTVHAGPRDTGDDYSPIVKALMSAVEDRGVPTKKDLGCGDPHGVSMFPNTLHEDQVRSDAAREWLLPNYQRPNLQVLTGQYVGKVLLSQNATTPRAVGVEFGTHKGNTHNVYAKHEVLLAAGSAVSPTILEYSGIGMKSILEPLGIDTVVDLPVGLNLQDQTTSTVRSRITSAGAGQGQAAWFATFNETFGDYTEKAHELLNTKLEQWAEEAVARGGFHNTTALLIQYENYRDWIVKDNVAYSELFLDTAGEASFDVWDLLPFTRGYVHILDKDPYLRHFAYDPQYFLNELDLLGQAAATQLARNISNSGAMQTYFAGETIPGDNLAYDADLRAWVEYIPYNFRPNYHGVGTCSMMPKEMGGVVDNAARVYGVQGLRVIDGSIPPTQMSSHVMTVFYAMALKIADAVLADY

SEQ ID NO: 1151 - protein, 577 aa, Aspergillus niger
GIEASLLTDPKEVAGRTVDYIIAGGGLTGLTTAARLTENPDITVLVIESGSYESDRGPIIEDLNAYGDIFGSSVDHAYETVCLATNNQTALIRSGNGLGGSTLVNGGTWTRPHKAQVDSWETVFGNEGWNWDSVAAYSLQAERARAPNAKQIAAGHYFNASCHGINGTVHAGPRDTGDDYSPIVKALMSAVEDRGVPTKKDLGCGDPHGVSMFPNTLHEDQVRSDAAREWLLPNYQRPNLQVLTGQYVGKVLLSQNATTPRAVGVEFGTHKGNTHNVYAKHEVLLAAGSAVSPTILEYSGIGMKSILEPLGIDTVVDLPVGLNLQDQTTSTVRSRITSAGAGQGQAAWFATFNETFGDYTEKAHELLNTKLEQWAEEAVARGGFHNTTALLIQYENYRDWIVKDNVAYSELFLDTAGVASFDVWDLLPFTRGYVHILDKDPYLRHFAYDPQYFLNELDLLGQAAATQLARNISNSGAMQTYFAGETIPGDNLAYDADLRAWVEYIPYNFRPNYHGVGTCSMMPKEMGGVVDNAARVYGVQGLRVIDGSIPPTQMSSHVMTVFYAMALKIADAVLADY

SEQ ID NO: 1152 - protein, 577 aa, Aspergillus niger
GIEASLLTDPKEVAGRTVDYIIAGGGLTGLTTAARLTENPDITVLVIESGSYESDRGPIIEDLNAYGDIFGSSVDHAYETVCLATNNQTALIRSGNGLGGSTLVNGGTWTRPHKAQVDSWETVFGNEGWNWDSVAAYSLQAERARAPNAKQIAAGHYFNASCHGINGTVHAGPRDTGDDYSPIVKALMSAVEDRGVPTKKDLGCGDPHGVSMFPNTLHEDQVRSDAAREWLLPNYQRPNLQVLTGQYVGKVLLSQNATTPRAVGVEFGTHKGNTHNVYAKHEVLLAAGSAVSPTILEYSGIGMKSILEPLGIDTVVDLPVGLNLQDQTTSTVRSRITSAGAGQGQAAWFATFNETFGDYTEKAHELLNTKLEQWAEEAVARGGFHNTTALLIQYENYRDWIVKDNVAYSELFLDTAGEASFDVWDLLPFTRGYVHILDKDPYLRHFAYDPQYFLNELDLLGQAAATQLARNISNSGAMQTYFAGETIPGDNLAYDADLRAWVEYIPYNFRPNYHGVGTCSMMPKEMGGVVDNAARVYGVQGLRVIDGSIPPTQMSSHVMTVFYAMALKIADAVLADY

SEQ ID NO: 1153 - protein, 577 aa, Synthetic construct
GIEASLLTDPKEVAGRTVDYIIAGGGLTGLVVAARLTENPDITVLVIESGSYESDRGPIIEDLNAYGKIFGSSVDHAYETVCLATNNRTALIRAGNGLGGSTLVNGGTWTRPHKAQVDSWETVFGNEGWNWDSVAAYSLQAERARAPNAKQIAAGHYFNASCHGINGTVHAGPRDTGDDYSPIVKALMSAVEDRGVPTKKDLGCGDPHGVSMFPNTLHPDQVRSDAAREWLLPNYQRPNLQVLTGQYVGKVLLSQNATTPRAVGVEFGTHKGNFHNVTAKHEVLLAAGSAVSPTILEYSGIGMKSILEPLGIKTVVDLPVGLNLQDQTTSTVRSRITSAGAGQGQAAWFATFNETFGDYTPKAHELLNTKLEQWAEEAVARGGFHNTTALLIQYENYRDWIVKDNVAYSELFLDTAGEASFDVWDLLPFTRGYVHILDKDPYLRHFAYDPQYFLNELDLLGQAAATQLARNISNSGAMQTYFAGETIPGDNLAYDADLRAWVEYIPYHFRPNYHGVGTCSMMPKEMGGVVDNAARVYGVQGLRVIDGSIPPTQMSSHVMTVFYAMALKIADAVLADY

SEQ ID NO: 1154 - protein, 577 aa, Synthetic construct
GIEASLLTDPKEVAGRTVDYIIAGGGLTGLVVAARLTENPDITVLVIESGSYESDRGPIIEDLNAYGKIFGSSVDHAYETVCLATNNRTALIRAGNGLGGSTLVNGGTWTRPHKAQVDSWETVFGNEGWNWDSVAAYSLQAERARAPNAKQIAAGHYFNASCHGINGTVHAGPRDTGDDYSPIVKALMSAVEDRGVPTKKDLGCGDPHGVSMFPNTLHEDQVRSDAAREWLLPNYQRPNLSVLTGQYVGKVLLSQNATTPRAVGVEFGTHKGNFHNVTAKHEVLLAAGSAVSPTILEYSGIGMKSILEPLGIKTVVDLPVGLNLQDQTTSTVRSRITPAGAGQGQAAWFATFNETFGDYTPKAHELLNTKLEQWAEEAVARGGFHNTTALLIQYENYRDWIVKDNVAYSELFLDTAGEISFDVWDLLPFTRGYVHILDKDPYLRHFAYDPQYFLNELDLLGQAAATQLARNISNSGAMQTYFAGETIPGDNLAYDADLRAWVEYIPYHFRPNYHGVGTCSMMPKEMGGVVDNAARVYGVQGLRVIDGSIPPTQMSSHVMTVFYAMALKIADAVLADY

SEQ ID NO: 1155 - protein, 577 aa, Aspergillus niger
GIEASLLKDPKEVAGRTYDYIIAGGGLTGLTVAARLTENPNITVLVIESGSYESDRGPIIEDLNAYGDIFGSSVDHAYETVELPTNNQTALIRSGNGLGGSTLINGGTWTRPHKAQVDSWETVFGNEGWNWDSVAAYSLQAERARAPNAKQIAAGHYFNASCHGINGTVHAGPRDTGDDYSPIVKALMSAVEDRGVPTKKDLGCGDPHGVSMFPNTLHEDQVRSDAAREWLLPNYQRPNLQVLTGQYVGKVLLSQNATTPRAVGVEFGTHKGNTHNVYAKHEVLLAAGSAVSPTILEYSGIGMKSILEPLGIDTVVDLPVGLNLQDQTTSTVRSRITSAGAGQGQAAWFATFNETFGDYAEKAHELLNTKLEQWAEEAVARGGFHNTTALLIQYENYRDWIVKDNVAYSELFLDTAGVASFDVWDLLPFTRGYVHILDKDPYLRHFAYDPQYFLNELDLLGQAAATQLARNISNSGAMQTYFAGETIPGDNLAYDADLRAWVEYIPENFRPNYHGVGTCSMMPKEMGGVVDNAARVYGVQGLRVIDGSIPPTQMSSHVMTVFYAMALKIADAVLADY

SEQ ID NO: 1156 - protein, 577 aa, Aspergillus niger
GIEASLLKDPKEVAGRTYDYIIAGGGLTGLTVAARLTENPNITVLVIESGSYESDRGPIIEDLNAYGDIFGSSVDHAYETVELATNNQTALIRSGNGLGGSTLINGGTWTRPHKAQVDSWETVFGNEGWNWDSVAAYSLQAERARAPNAKQIAAGHYFNASCHGINGTVHAGPRDTGDDYSPIVKALMSAVEDRGVPTKKDLGCGDPHGVSMFPNTLHEDQVRSDAAREWLLPNYQRPNLQVLTGQYVGKVLLSQNATTPRAVGVEFGTHKGNTHNVYAKHEVLLAAGSAVSPTILEYSGIGMKSILEPLGIDTVVDLPVGLNLQDQTTSTVRSRITSAGAGQGQAAWFATFNETFGDYAEKAHELLNTKLEQWAEEAVARGGFHNTTALLIQYENYRDWIVKDNVAYSELFLDTAGVASFDVWDLLPFTRGYVHILDKDPYLRHFAYDPQYFLNELDLLGQAAATQLARNISNSGAMQTYFAGETIPGDNLAYDADLSAWVEYIPENFRPNYHGVGTCSMMPKEMGGVVDNAARVYGVQGLRVIDGSIPPTQMSSHVMTVFYAMALKIADAVLADY

SEQ ID NO: 1157 - protein, 577 aa, Aspergillus niger
GIEASLLKDPKEVAGRTYDYIIAGGGLTGLTVAARLTENPNITVLVIESGSYESDRGPIIEDLNAYGDIFGSSVDHAYETVELPTNNQTALIRSGNGLGGSTLINGGTWTRPHKAQVDSWETVFGNEGWNWDSVAAYSLQAERARAPNAKQIAAGHYFNASCHGINGTVHAGPRDTGDDYSPIVKALMSAVEDRGVPTKKDLGCGDPHGVSMFPNTLHPDQVRSDAAREWLLPNYQRPNLQVLTGRYVGKVLLSQNATTPRAVGVEFGTHKGNTHNVYAKHEVLLAAGSAVSPTILEYSGIGMKSILEPLGIDTVVDLPVGLNLQDQTTSTVRSRITSAGAGQGQAAWFATFNETFGDYAEKAHELLNTKLEQWAEEAVARGGFHNTTALLIQYENYRDWIVKDNVAYSELFLDTAGVASFDVWDLLPFTRGYVHILDKDPYLRHFAYDPQYFLNELDLLGQAAATQLARNISNSGAMQTYFAGETIPGDNLAYDADLSAWVEYIPENFRPNYHGVGTCSMMPKEMGGVVDNAARVYGVQGLRVIDGSIPPTQMSSHVMTVFYAMALKIADAILADY

SEQ ID NO: 1158 - protein, 577 aa, Aspergillus niger
GIEASLLKDPKEVAGRTYDYIIAGGGLTGLTVAARLTENPNITVLVIESGSYESDRGPIIEDLNAYGDIFGSSVDHAYETVELPTNNQTALIRSGNGLGGSTLINGGTWTRPHKAQVDSWETVFGNEGWNWDSVAAYSLQAERARAPNAKQIAAGHYFNASCHGLNGTVHAGPRDTGDDYSPIVKALMSAVEDRGVPTKKDLGCGDPHGVSMFPNTLHEDQVRSDAAREWLLPNYQRPNLQVLTGQYVGKVLLSQNATTPRAVGVEFGTHKGNTHNVYAKHEVLLAAGSAVSPTILEYSGIGMKSILEPLGIDTVVDLPVGLNLQDQTTSTVRSRITSAGAGQGQAAWFATFNETFGDYAEKAHELLNTKLEQWAEEAVARGGFHNTTALLIQYENYRDWIVKDNVAYSELFLDTAGVASFDVWDLLPFTRGYVHILDKDPYLRHFAYDPQYFLNELDLLGQAAATQLARNISNSGAMQTYFAGETIPGDNLAYDADLSAWVEYIPENFRPNYHGVGTCSMMPKEMGGVVDNAARVYGVQGLRVIDGSIPPTQMSSHVMTVFYAMALKIADAILADY

SEQ ID NO: 1159 - protein, 577 aa, Aspergillus niger
GIEASLLTDPKEVAGRTVDYIIAGGGLTGLTTAARLTENPDITVLVIESGSYESDRGPIIEDLNAYGDIFGSSVDHAYETVELATNNQTALIRAGNGLGGSTLVNGGTWTRPHKAQVDSWETVFGNEGWNWDSVAAYSLQAERARAPNAKQIAAGHYFNASCHGINGTVHAGPRDTGDDYSPIVKALMSAVEDRGVPTKKDLGCGDPHGVSMFPNTLHEDQVRSDAAREWLLPNYQRPNLQVLTGQYVGKVLLSQNATTPRAVGVEFGTHKGNTHNVYAKHEVLLAAGSAVSPTILEYSGIGMKSILEPLGIDTVVDLPVGLNLQDQTTSTVRSRITSAGAGQGQAAWFATFNETFGDYAEKAHELLNTKLEQWAEEAVARGGFHNTTALLIQYENYRDWIVKDNVAYSELFLDTAGVASFDVWDLLPFTRGYVHILDKDPYLRHFAYDPQYFLNELDLLGQAAATQLARNISNSGAMQTYFAGETIPGDNLAYDADLSAWVEYIPYNFRPNYHGVGTCSMMPKEMGGVVDNAARVYGVQGLRVIDGSIPPTQMSSHVMTVFYAMALKIADAILADY

SEQ ID NO: 1160 - protein, 577 aa, Aspergillus niger
GIEASLLKDPKEVAGRTYDYIIAGGGLTGLTVAAKLTENPNITVLVIESGSYESDRGPIIEDLNAYGDIFGSSVDHAYETVELATNNQTALIRSGNGLGGSTLINGGTWTRPHKAQVDSWETVFGNEGWNWDSVAAYSLQAERARAPNAKQIAAGHYFNASCHGLNGTVHAGPRDTGDDYSPIVKALMSAVEDRGVPTKKDLGCGDPHGVSMFPNTLHEDQVRSDAAREWLLPNYQRPNLQVLTGQYVGKVLLSQNATTPRAVGVEFGTHKGNTHNVYAKHEVLLAAGSAVSPTILEYSGIGMKSILEPLGIDTVVDLPVGLNLQDQTTSTVRSRITSAGAGQGQAAWFATFNETFGDYAEKAHELLNTKLEQWAEEAVARGGFHNTTALLIQYENYRDWIVKDNVAYSELFLDTAGVASFDVWDLLPFTRGYVHILDKDPYLRHFAYDPQYFLNELDLLGQAAATQLARNISNSGAMQTYFAGETIPGDNLAYDADLSAWVEYIPENFRPNYHGVGTCSMMPKEMGGVVDNAARVYGVQGLRVIDGSIPPTQMSSHVMTVFYAMALKIADAILADY

SEQ ID NO: 1161 - protein, 577 aa, Aspergillus niger
GIEASLLKDPKEVAGRTYDYIIAGGGLTGLTVAAKLTENPNITVLVIESGSYESDRGPIIEDLNAYGDIFGSSVDHAYETVELATNNRTALIRSGNGLGGSTLINGGTWTRPHKAQVDSWETVFGNEGWNWDSVAAYSLQAERARAPNAKQIAAGHYFNASCHGLNGTVHAGPRDTGDDYSPIVKALMSAVEDRGVPTKKDLGCGDPHGVSMFPNTLHEDQVRSDAAREWLLPNYQRPNLQVLTGQYVGKVLLSQNATTPRAVGVEFGTHKGNTHNVYAKHEVLLAAGSAVSPTILEYSGIGMKSILEPLGIDTVVDLPVGLNLQDQTTSTVRSRITSAGAGQGQAAWFATFNETFGDYTEKAHELLNTKLEQWAEEAVARGGFHNTTALLIQYENYRDWIVKDNVAYSELFLDTAGVASFDVWDLLPFTRGYVHILDKDPYLRHFAYDPQYFLNELDLLGQAAATQLARNISNSGAMQTYFAGETIPGDNLAYDADLSAWVEYIPENFRPNYHGVGTCSMMPKEMGGVVDNAARVYGVQGLRVIDGSIPPTQMSSHVMTVFYAMALKIADAILADY

SEQ ID NO: 1162 - protein, 577 aa, Aspergillus niger
GIEASLLKDPKEVAGRTYDYIIAGGGLTGLTVAARLTENPDITVLVIESGSYESDRGPIIEDLNAYGQIFGSSVDHAYETVELATNNRTALIRSGNGLGGSTLINGGNWTRPHKAQVDSWETVFGNEGWNWDSVAAYSLQAERARAPNAKQIAAGHYFNASCHGINGTVHAGPRDTGDDYSPIVKALMSAVEDRGVPTKKDLGCGDPHGVSMFPNTLHEDQVRSDAAREWLLPNYQRPNLQVLTGQYVGKVLLSQNATTPRAVGVEFGTHKGNTHNVYAKHEVLLAAGSAVSPTILEYSGIGMKSILEPLGIDTVVDLPVGLNLQDQTTSTVRSRITSAGAGQGQAAWFATFNETFGDYAEKAHELLNTKLEQWAEEAVARGGFHNTTALLIQYENYRDWIVKDNVAYSELFLDTAGVASFDVWDLLPFTRGYVHILDKDPYLRHFAYDPQYFLNELDLLGQAAATQLARNISNSGAMQTYFAGETIPGDNLAYDADLSAWVEYIPENFRPNYHGVGTCSMMPKEMGGVVDNAARVYGVQGLRVIDGSIPPTQMSSHVMTVFYAMALKIADAILADY

SEQ ID NO: 1163 - protein, 577 aa, Aspergillus niger
GIEASLLKDPKEVAGRTYDYIIAGGGLTGLTVAARLTENPNITVLVIESGSYESDRGPIIEDLNAYGDIFGSSVDHAYETVELPTNNQTALIRSGNGLGGSTLINGGTWTRPHKAQVDSWETVFGNEGWNWDSVAAYSLQAERARAPNAKQIAAGHYFNASCHGINGTVHAGPRDTGDDYSPIVKALMSAVEDRGVPTKKDLGCGDPHGVSMFPNTLHEDQVRSDAAREWLLPNYQRPNLQVLTGQYVGKVLLSQNATTPRAVGVEFGTHKGNTHNVYAKHEVLLAAGSAVSPTILEYSGIGMKSILEPLGIDTVVDLPVGLNLQDQTTSTVRSRITPAGAGQGQAAWFATFNETFGDYAEKAHELLNTKLEQWAEEAVARGGFHNTTALLIQYENYRDWIVKDNVAYSELFLDTAGVASFDVWDLLPFTRGYVHILDKDPYLRHFAYDPQYFLNELDLLGQAAATQLARNISNSGAMQTYFAGETIPGDNLAYDADLSAWVEYIPENFRPNYHGVGTCSMMPKEMGGVVDNAARVYGVQGLRVIDGSIPPTQLSSHVMTVFYAMALKIADAVLADY

SEQ ID NO: 1164 - protein, 577 aa, Aspergillus niger
GIEASLLKDPKEVAGRTYDYIIAGGGLTGLTVAAKLTENPNITVLVIESGSYESDRGPIIEDLNAYGDIFGSSVDHAYETVELATNNRTALIRSGNGLGGSTLINGGTWTRPHKAQVDSWETVFGNEGWNWDSVAAYSLQAERARAPNAKQIAAGHYFNASCHGLNGTVHAGPRDTGDDYSPIVKALMSAVEDRGVPTKKDLGCGDPHGVSMFPNTLHEDQVRSDAAREWLLPNYQRPNLQVLTGQYVGKVLLSQNATTPRAVGVEFGTHKGNTHNVYAKHEVLLAAGSAVSPTILEYSGIGMKSILEPLGIDTVVDLPVGLNLQDQTTSTVRSRITSAGAGQGQAAWFATFNETFGDYTEKAHELLNTKLEQWAEEAVARGGFHNTTALLIQYENYRDWIVKDNVAYSELFLDTAGVASFDVWDLLPFTRGYVHILDKDPYLRHFAYDPQYFLNELDLLGQAAATQLARNISNSGAMQTYFAGETIPGDNLAYDADLSAWVEYIPENFRPNYHGVGTCSMMPKEMGGVVDNAARVYGVQGLRVIDGSIPPTQLSSHVMTVFYAMALKIADAILADY

SEQ ID NO: 1165 - protein, 577 aa, Aspergillus niger
GIEASLLKDPKEVAGRTYDYIIAGGGLTGLTVAAKLTENPNITVLVIESGSYESDRGPIIEDLNAYGDIFGSSVDHAYETVELATNNQTALIRSGNGLGGSTLINGGTWTRPHKAQVDSWETVFGNEGWNWDSVAAYSLQAERARAPNAKQIAAGHYFNASCHGINGTVHAGPRDTGDDYSPIVKALMSAVEDRGVPTKKDLGCGDPHGVSMFPNTLHEDQVRSDAAREWLLPNYQRPNLQVLTGRYVGKVLLSQNATTPRAVGVEFGTHKGNTHNVYAKHEVLLAAGSAVSPTILEYSGIGMKSILEPLGIDTVVDLPVGLNLQDQTTSTVRSRITPAGAGQGQAAWFATFNETFGDYAEKAHELLNTKLEQWAEEAVARGGFHNTTALLIQYENYRDWIVKDNVAYSELFLDTAGVASFDVWDLLPFTRGYVHILDKDPYLRHFAYDPQYFLNELDLLGQAAATQLARNISNSGAMQTYFAGETIPGDNLAYDADLSAWVEYIPENFRPNYHGVGTCSMMPKEMGGVVDNAARVYGVQGLRVIDGSIPPTQMSSHVMTVFYAMALKIADAILADY

SEQ ID NO: 1166 - protein, 577 aa, Aspergillus niger
GIEASLLKDPKEVAGRTYDYIIAGGGLTGLTVAARLTENPNITVLVIESGSYESDRGPIIEDLNAYGDIFGSSVDHAYETVELATNNQTALIRSGNGLGGSTLINGGTWTRPHKAQVDSWETVFGNEGWNWDSVAAYSLQAERARAPNAKQIAAGHYFNASCHGINGTVHAGPRDTGDDYSPIVKALMSAVEDRGVPTKKDLGCGDPHGVSMFPNTLHEDQVRSDAAREWLLPNYQRPNLQVLTGRYVGKVLLSQNATTPRAVGVEFGTHKGNTHNVYAKHEVLLAAGSAVSPTILEYSGIGMKSILEPLGIDTVVDLPVGLNLQDQTTSTVRSRITPAGAGQGQAAWFATFNETFGDYTEKAHELLNTKLEQWAEEAVARGGFHNTTALLIQYENYRDWIVKDNVAYSELFLDTAGVASFDVWDLLPFTRGYVHILDKDPYLRHFAYDPQYFLNELDLLGQAAATQLARNISNSGAMQTYFAGETIPGDNLAYDADLRAWVEYIPENFRPNYHGVGTCSMMPKEMGGVVDNAARVYGVQGLRVIDGSIPPTQLSSHVMTVFYAMALKIADAVLADY

SEQ ID NO: 1167 - protein, 577 aa, Aspergillus niger
GIEASLLKDPKEVAGRTYDYIIAGGGLTGLTVAAKLTENPNITVLVIESGSYESDRGPIIEDLNAYGDIFGSSVDHAYETVELPTNNRTALIRSGNGLGGSTLINGGTWTRPHKAQVDSWETVFGNEGWNWDSVAAYSLQAERARAPNAKQIAAGHYFNASCHGLNGTVHAGPRDTGDDYSPIVKALMSAVEDRGVPTKKDLGCGDPHGVSMFPNTLHEDQVRSDAAREWLLPNYQRPNLQVLTGQYVGKVLLSQNATTPRAVGVEFGTHKGNTHNVYAKHEVLLAAGSAVSPTILEYSGIGMKSILEPLGIDTVVDLPVGLNLQDQTTSTVRSRITSAGAGQGQAAWFATFNETFGDYTEKAHELLNTKLEQWAEEAVARGGFHNTTALLIQYENYRDWIVKDNVAYSELFLDTAGVASFDVWDLLPFTRGYVHILDKDPYLRHFAYDPQYFLNELDLLGQAAATQLARNISNSGAMQTYFAGETIPGDNLAYDADLRAWVEYIPENFRPNYHGVGTCSMMPKEMGGVVDNAARVYGVQGLRVIDGSIPPTQMSSHVMTVFYAMALKIADAILADY

SEQ ID NO: 1168 - protein, 577 aa, Aspergillus niger
GIEASLLKDPKEVAGRTYDYIIAGGGLTGLTVAARLTENPNITVLVIESGSYESDRGPIIEDLNAYGDIFGSSVDHAYETVELPTNNQTALIRSGNGLGGSTLINGGTWTRPHKAQVDSWETVFGNEGWNWDSVAAYSLQAERARAPNAKQIAAGHYFNASCHGINGTVHAGPRDTGDDYSPIVKALMSAVEDRGVPTKKDLGCGDPHGVSMFPNTLHEDQVRSDAAREWLLPNYQRPNLQVLTGRYVGKVLLSQNATTPRAVGVEFGTHKGNTHNVYAKHEVLLAAGSAVSPTILEYSGIGMKSILEPLGIDTVVDLPVGLNLQDQTTSTVRSRITPAGAGQGQAAWFATFNETFGDYAEKAHELLNTKLEQWAEEAVARGGFHNTTALLIQYENYRDWIVKDNVAYSELFLDTAGVASFDVWDLLPFTRGYVHILDKDPYLRHFAYDPQYFLNELDLLGQAAATQLARNISNSGAMQTYFAGETIPGDNLAYDADLRAWVEYIPENFRPNYHGVGTCSMMPKEMGGVVDNAARVYGVQGLRVIDGSIPPTQMSSHVMTVFYAMALKIADAVLADY

SEQ ID NO: 1169 - protein, 577 aa, Aspergillus niger
GIEASLLKDPKEVAGRTYDYIIAGGGLTGLTVAAKLTENPNITVLVIESGSYESDRGPIIEDLNAYGDIFGSSVDHAYETVELATNNQTALIRSGNGLGGSTLINGGTWTRPHKAQVDSWETVFGNEGWNWDSVAAYSLQAERARAPNAKQIAAGHYFNASCHGINGTVHAGPRDTGDDYSPIVKALMSAVEDRGVPTKKDLGCGDPHGVSMFPNTLHPDQVRSDAAREWLLPNYQRPNLQVLTGRYVGKVLLSQNATTPRAVGVEFGTHKGNTHNVYAKHEVLLAAGSAVSPTILEYSGIGMKSILEPLGIDTVVDLPVGLNLQDQTTSTVRSRITSAGAGQGQAAWFATFNETFGDYAEKAHELLNTKLEQWAEEAVARGGFHNTTALLIQYENYRDWIVKDNVAYSELFLDTAGVASFDVWDLLPFTRGYVHILDKDPYLRHFAYDPQYFLNELDLLGQAAATQLARNISNSGAMQTYFAGETIPGDNLAYDADLSAWVEYIPENFRPNYHGVGTCSMMPKEMGGVVDNAARVYGVQGLRVIDGSIPPTQMSSHVMTVFYAMALKIADAILADY

SEQ ID NO: 1170 - protein, 577 aa, Aspergillus niger
GIEASLLTDPKEVAGRTVDYIIAGGGLTGLTVAARLTENPDITVLVIESGSYESDRGPIIEDLNAYGDIFGSSVDHAYETVCLATNNQTALIRSGNGLGGSTLVNGGTWTRPHKAQVDSWETVFGNEGWNWDSVAAYSLQAERARAPNAKQIAAGHYFNASCHGINGTVHAGPRDTGDDYSPIVKALMSAVEDRGVPTKKDLGCGDPHGVSMFPNTLHEDQVRSDAAREWLLPNYQRPNLQVLTGQYVGKVLLSQNATTPRAVGVEFGTHKGNTHNVYAKHEVLLAAGSAVSPTILEYSGIGMKSILEPLGIKTVVDLPVGLNLQDQTTSTVRSRITSAGAGQGQAAWFATFNETFGDYTEKAHELLNTKLEQWAEEAVARGGFHNTTALLIQYENYRDWIVKDNVAYSELFLDTAGEASFDVWDLLPFTRGYVHILDKDPYLRHFAYDPQYFLNELDLLGQAAATQLARNISNSGAMQTYFAGETIPGDNLAYDADLRAWVEYIPYHFRPNYHGVGTCSMMPKEMGGVVDNAARVYGVQGLRVIDGSIPPTQMSSHVMTVFYAMALKIADAVLADY

SEQ ID NO: 1171 - protein, 577 aa, Aspergillus niger
GIEASLLKDPKEVAGRTYDYIIAGGGLTGLTVAARLTENPNITVLVIESGSYESDRGPIIEDLNAYGDIFGSSVDHAYETVELATNNQTALIRSGNGLGGSTLINGGTWTRPHKAQVDSWETVFGNEGWNWDSVAAYSLQAERARAPNAKQIAAGHYFNASCHGINGTVHAGPRDTGDDYSPIVKALMSAVEDRGVPTKKDLGCGDPHGVSMFPNTLHEDQVRSDAAREWLLPNYQRPNLQVLTGQYVGKVLLSQNATTPRAVGVEFGTHKGNTHNVYAKHEVLLAAGSAVSPTILEYSGIGMKSILEPLGIDTVVDLPVGLNLQDQTTSTVRSRITSAGAGQGQAAWFATFNETFGDYAEKAHELLNTKLEQWAEEAVARGGFHNTTALLIQYENYRDWIVKDNVAYSELFLDTAGVASFDVWDLLPFTRGYVHILDKDPYLRHFAYDPQYFLNELDLLGQAAATQLARNISNSGAMQTYFAGETIPGDNLAYDADLSAWVEYIPENFRPNYHGVGTCSMMPKEMGGVVDNAARVYGVQGLRVIDGSIPPTQLSSHVMTVFYAMALKIADAVLADY

SEQ ID NO: 1172 - protein, 577 aa, Aspergillus niger
GIEASLLKDPKEVAGRTYDYIIAGGGLTGLTVAARLTENPNITVLVIESGSYESDRGPIIEDLNAYGDIFGSSVDHAYETVELATNNQTALIRSGNGLGGSTLINGGTWTRPHKAQVDSWETVFGNEGWNWDSVAAYSLQAERARAPNAKQIAAGHYFNASCHGINGTVHAGPRDTGDDYSPIVKALMSAVEDRGVPTKKDLGCGDPHGVSMFPNTLHEDQVRSDAAREWLLPNYQRPNLQVLTGQYVGKVLLSQNATTPRAVGVEFGTHKGNTHNVYAKHEVLLAAGSAVSPTILEYSGIGMKSILEPLGIDTVVDLPVGLNLQDQTTSTVRSRITSAGAGQGQAAWFATFNETFGDYTEKAHELLNTKLEQWAEEAVARGGFHNTTALLIQYENYRDWIVKDNVAYSELFLDTAGVASFDVWDLLPFTRGYVHILDKDPYLRHFAYDPQYFLNELDLLGQAAATQLARNISNSGAMQTYFAGETIPGDNLAYDADLRAWVEYIPENFRPNYHGVGTCSMMPKEMGGVVDNAARVYGVQGLRVIDGSIPPTQMSSHVMTVFYAMALKIADAVLADY

SEQ ID NO: 1173 - protein, 577 aa, Aspergillus niger
GIEASLLKDPKEVAGRTYDYIIAGGGLTGLTVAAKLTENPNITVLVIESGSYESDRGPIIEDLNAYGDIFGSSVDHAYETVELATNNQTALIRSGNGLGGSTLINGGTWTRPHKAQVDSWETVFGNEGWNWDSVAAYSLQAERARAPNAKQIAAGHYFNASCHGINGTVHAGPRDTGDDYSPIVKALMSAVEDRGVPTKKDLGCGDPHGVSMFPNTLHEDQVRSDAAREWLLPNYQRPNLQVLTGQYVGKVLLSQNATTPRAVGVEFGTHKGNTHNVYAKHEVLLAAGSAVSPTILEYSGIGMKSILEPLGIDTVVDLPVGLNLQDQTTSTVRSRITSAGAGQGQAAWFATFNETFGDYAEKAHELLNTKLEQWAEEAVARGGFHNTTALLIQYENYRDWIVKDNVAYSELFLDTAGVASFDVWDLLPFTRGYVHILDKDPYLRHFAYDPQYFLNELDLLGQAAATQLARNISNSGAMQTYFAGETIPGDNLAYDADLSAWVEYIPENFRPNYHGVGTCSMMPKEMGGVVDNAARVYGVQGLRVIDGSIPPTQMSSHVMTVFYAMALKIADAILADY

SEQ ID NO: 1174 - protein, 577 aa, Aspergillus niger
GIEASLLTDPKEVAGRTVDYIIAGGGLTGLTTAARLTENPDITVLVIESGSYESDRGPIIEDLNAYGDIFGSSVDHAYETVELQTNNQTALIRSGNGLGGSTLVNGGTWTRPHKAQVDSWETVFGNEGWNWDSVAAYSLQAERARAPNAKQIAAGHYFNASCHGINGTVHAGPRDTGDDYSPIVKALMSAVEDRGVPTKKDLGCGDPHGVSMFPNTLHEDQVRSDAAREWLLPNYQRPNLQVLTGQYVGKVLLSQNATTPRAVGVEFGTHKGNTHNVYAKHEVLLAAGSAVSPTILEYSGIGMKSILEPLGIDTVVDLPVGLNLQDQTTSTVRSRITSAGAGQGQAAWFATFNETFGDYAEKAHELLNTKLEQWAEEAVARGGFHNTTALLIQYENYRDWIVKDNVAYSELFLDTAGVASFDVWDLLPFTRGYVHILDKDPYLRHFAYDPQYFLNELDLLGQAAATQLARNISNSGAMQTYFAGETIPGDNLAYDADLSAWVEYIPYNFRPNYHGVGTCSMMPKEMGGVVDNAARVYGVQGLRVIDGSIPPTQMSSHVMTVFYAMALKIADAILADY

SEQ ID NO: 1175 - protein, 577 aa, Aspergillus niger
GIEASLLKDPKEVAGRTYDYIIAGGGLTGLTVAARLTENPNITVLVIESGSYESDRGPIIEDLNAYGDIFGSSVDHAYETVELPTNNQTALIRSGNGLGGSTLINGGTWTRPHKAQVDSWETVFGNEGWNWDSVAAYSLQAERARAPNAKQIAAGHYFNASCHGINGTVHAGPRDTGDDYSPIVKALMSAVEDRGVPTKKDLGCGDPHGVSMFPNTLHEDQVRSDAAREWLLPNYQRPNLQVLTGQYVGKVLLSQNATTPRAVGVEFGTHKGNTHNVYAKHEVLLAAGSAVSPTILEYSGIGMKSILEPLGIDTVVDLPVGLNLQDQTTSTVRSRITSAGAGQGQAAWFATFNETFGDYAEKAHELLNTKLEQWAEEAVARGGFHNTTALLIQYENYRDWIVKDNVAYSELFLDTAGVASFDVWDLLPFTRGYVHILDKDPYLRHFAYDPQYFLNELDLLGQAAATQLARNISNSGAMQTYFAGETIPGDNLAYDADLSAWVEYIPENFRPNYHGVGTCSMMPKEMGGVVDNAARVYGVQGLRVIDGSIPPTQLSSHVMTVFYAMALKIADAILADY

SEQ ID NO: 1176 - protein, 577 aa, Aspergillus niger
GIEASLLKDPKEVAGRTYDYIIAGGGLTGLTVAARLTENPNITVLVIESGSYESDRGPIIEDLNAYGDIFGSSVDHAYETVELATNNQTALIRSGNGLGGSTLINGGTWTRPHKAQVDSWETVFGNEGWNWDSVAAYSLQAERARAPNAKQIAAGHYFNASCHGINGTVHAGPRDTGDDYSPIVKALMSAVEDRGVPTKKDLGCGDPHGVSMFPNTLHPDQVRSDAAREWLLPNYQRPNLQVLTGQYVGKVLLSQNATTPRAVGVEFGTHKGNTHNVYAKHEVLLAAGSAVSPTILEYSGIGMKSILEPLGIDTVVDLPVGLNLQDQTTSTVRSRITSAGAGQGQAAWFATFNETFGDYTEKAHELLNTKLEQWAEEAVARGGFHNTTALLIQYENYRDWIVKDNVAYSELFLDTAGVASFDVWDLLPFTRGYVHILDKDPYLRHFAYDPQYFLNELDLLGQAAATQLARNISNSGAMQTYFAGETIPGDNLAYDADLSAWVEYIPENFRPNYHGVGTCSMMPKEMGGVVDNAARVYGVQGLRVIDGSIPPTQLSSHVMTVFYAMALKIADAVLADY

SEQ ID NO: 1177 - protein, 577 aa, Aspergillus niger
GIEASLLKDPKEVAGRTYDYIIAGGGLTGLTVAARLTENPNITVLVIESGSYESDRGPIIEDLNAYGDIFGSSVDHAYETVELATNNRTALIRSGNGLGGSTLINGGTWTRPHKAQVDSWETVFGNEGWNWDSVAAYSLQAERARAPNAKQIAAGHYFNASCHGLNGTVHAGPRDTGDDYSPIVKALMSAVEDRGVPTKKDLGCGDPHGVSMFPNTLHEDQVRSDAAREWLLPNYQRPNLQVLTGQYVGKVLLSQNATTPRAVGVEFGTHKGNTHNVYAKHEVLLAAGSAVSPTILEYSGIGMKSILEPLGIDTVVDLPVGLNLQDQTTSTVRSRITSAGAGQGQAAWFATFNETFGDYTEKAHELLNTKLEQWAEEAVARGGFHNTTALLIQYENYRDWIVKDNVAYSELFLDTAGVASFDVWDLLPFTRGYVHILDKDPYLRHFAYDPQYFLNELDLLGQAAATQLARNISNSGAMQTYFAGETIPGDNLAYDADLSAWVEYIPENFRPNYHGVGTCSMMPKEMGGVVDNAARVYGVQGLRVIDGSIPPTQLSSHVMTVFYAMALKIADAVLADY

SEQ ID NO: 1178 - protein, 577 aa, Aspergillus niger
GIEASLLKDPKEVAGRTYDYIIAGGGLTGLTVAAKLTENPNITVLVIESGSYESDRGPIIEDLNAYGDIFGSSVDHAYETVELATNNQTALIRSGNGLGGSTLINGGTWTRPHKAQVDSWETVFGNEGWNWDSVAAYSLQAERARAPNAKQIAAGHYFNASCHGLNGTVHAGPRDTGDDYSPIVKALMSAVEDRGVPTKKDLGCGDPHGVSMFPNTLHEDQVRSDAAREWLLPNYQRPNLQVLTGRYVGKVLLSQNATTPRAVGVEFGTHKGNTHNVYAKHEVLLAAGSAVSPTILEYSGIGMKSILEPLGIDTVVDLPVGLNLQDQTTSTVRSRITPAGAGQGQAAWFATFNETFGDYAEKAHELLNTKLEQWAEEAVARGGFHNTTALLIQYENYRDWIVKDNVAYSELFLDTAGVASFDVWDLLPFTRGYVHILDKDPYLRHFAYDPQYFLNELDLLGQAAATQLARNISNSGAMQTYFAGETIPGDNLAYDADLRAWVEYIPENFRPNYHGVGTCSMMPKEMGGVVDNAARVYGVQGLRVIDGSIPPTQMSSHVMTVFYAMALKIADAVLADY

SEQ ID NO: 1179 - protein, 577 aa, Aspergillus niger
GIEASLLKDPKEVAGRTYDYIIAGGGLTGLTVAAKLTENPNITVLVIESGSYESDRGPIIEDLNAYGDIFGSSVDHAYETVELATNNQTALIRSGNGLGGSTLINGGTWTRPHKAQVDSWETVFGNEGWNWDSVAAYSLQAERARAPNAKQIAAGHYFNASCHGINGTVHAGPRDTGDDYSPIVKALMSAVEDRGVPTKKDLGCGDPHGVSMFPNTLHEDQVRSDAAREWLLPNYQRPNLQVLTGQYVGKVLLSQNATTPRAVGVEFGTHKGNTHNVYAKHEVLLAAGSAVSPTILEYSGIGMKSILEPLGIDTVVDLPVGLNLQDQTTSTVRSRITSAGAGQGQAAWFATFNETFGDYAEKAHELLNTKLEQWAEEAVARGGFHNTTALLIQYENYRDWIVKDNVAYSELFLDTAGVASFDVWDLLPFTRGYVHILDKDPYLRHFAYDPQYFLNELDLLGQAAATQLARNISNSGAMQTYFAGETIPGDNLAYDADLSAWVEYIPENFRPNYHGVGTCSMMPKEMGGVVDNAARVYGVQGLRVIDGSIPPTQLSSHVMTVFYAMALKIADAILADY

SEQ ID NO: 1180 - protein, 577 aa, Aspergillus niger
GIEASLLKDPKEVAGRTYDYIIAGGGLTGLTVAARLTENPNITVLVIESGSYESDRGPIIEDLNAYGDIFGSSVDHAYETVELPTNNQTALIRSGNGLGGSTLINGGTWTRPHKAQVDSWETVFGNEGWNWDSVAAYSLQAERARAPNAKQIAAGHYFNASCHGINGTVHAGPRDTGDDYSPIVKALMSAVEDRGVPTKKDLGCGDPHGVSMFPNTLHEDQVRSDAAREWLLPNYQRPNLQVLTGQYVGKVLLSQNATTPRAVGVEFGTHKGNTHNVYAKHEVLLAAGSAVSPTILEYSGIGMKSILEPLGIDTVVDLPVGLNLQDQTTSTVRSRITSAGAGQGQAAWFATFNETFGDYTEKAHELLNTKLEQWAEEAVARGGFHNTTALLIQYENYRDWIVKDNVAYSELFLDTAGVASFDVWDLLPFTRGYVHILDKDPYLRHFAYDPQYFLNELDLLGQAAATQLARNISNSGAMQTYFAGETIPGDNLAYDADLRAWVEYIPENFRPNYHGVGTCSMMPKEMGGVVDNAARVYGVQGLRVIDGSIPPTQMSSHVMTVFYAMALKIADAILADY

SEQ ID NO: 1181 - protein, 577 aa, Aspergillus niger
GIEASLLKDPKEVAGRTYDYIIAGGGLTGLTVAARLTENPNITVLVIESGSYESDRGPIIEDLNAYGDIFGSSVDHAYETVELATNNQTALIRSGNGLGGSTLINGGTWTRPHKAQVDSWETVFGNEGWNWDSVAAYSLQAERARAPNAKQIAAGHYFNASCHGINGTVHAGPRDTGDDYSPIVKALMSAVEDRGVPTKKDLGCGDPHGVSMFPNTLHEDQVRSDAAREWLLPNYQRPNLQVLTGRYVGKVLLSQNATTPRAVGVEFGTHKGNTHNVYAKHEVLLAAGSAVSPTILEYSGIGMKSILEPLGIDTVVDLPVGLNLQDQTTSTVRSRITPAGAGQGQAAWFATFNETFGDYTEKAHELLNTKLEQWAEEAVARGGFHNTTALLIQYENYRDWIVKDNVAYSELFLDTAGVASFDVWDLLPFTRGYVHILDKDPYLRHFAYDPQYFLNELDLLGQAAATQLARNISNSGAMQTYFAGETIPGDNLAYDADLRAWVEYIPENFRPNYHGVGTCSMMPKEMGGVVDNAARVYGVQGLRVIDGSIPPTQMSSHVMTVFYAMALKIADAVLADY

SEQ ID NO: 1182 - protein, 577 aa, Aspergillus niger
GIEASLLTDPKEVAGRTVDYIIAGGGLTGLTTAARLTENPDITVLVIESGSYESDRGPIIEDLNAYGDIFGSSVDHAYETVELFTNNQTALIRSGNGLGGSTLVNGGTWTRPHKAQVDSWETVFGNEGWNWDSVAAYSLQAERARAPNAKQIAAGHYFNASCHGINGTVHAGPRDTGDDYSPIVKALMSAVEDRGVPTKKDLGCGDPHGVSMFPNTLHEDQVRSDAAREWLLPNYQRPNLQVLTGQYVGKVLLSQNATTPRAVGVEFGTHKGNTHNVYAKHEVLLAAGSAVSPTILEYSGIGMKSILEPLGIDTVVDLPVGLNLQDQTTSTVRSRITSAGAGQGQAAWFATFNETFGDYAEKAHELLNTKLEQWAEEAVARGGFHNTTALLIQYENYRDWIVKDNVAYSELFLDTAGVASFDVWDLLPFTRGYVHILDKDPYLRHFAYDPQYFLNELDLLGQAAATQLARNISNSGAMQTYFAGETIPGDNLAYDADLSAWVEYIPYNFRPNYHGVGTCSMMPKEMGGVVDNAARVYGVQGLRVIDGSIPPTQMSSHVMTVFYAMALKIADAILADY

SEQ ID NO: 1183 - protein, 577 aa, Aspergillus niger
GIEASLLKDPKEVAGRTYDYIIAGGGLTGLTVAARLTENPNITVLVIESGSYESDRGPIIEDLNAYGDIFGSSVDHAYETVELPTNNQTALIRSGNGLGGSTLINGGTWTRPHKAQVDSWETVFGNEGWNWDSVAAYSLQAERARAPNAKQIAAGHYFNASCHGINGTVHAGPRDTGDDYSPIVKALMSAVEDRGVPTKKDLGCGDPHGVSMFPNTLHPDQVRSDAAREWLLPNYQRPNLQVLTGRYVGKVLLSQNATTPRAVGVEFGTHKGNTHNVYAKHEVLLAAGSAVSPTILEYSGIGMKSILEPLGIDTVVDLPVGLNLQDQTTSTVRSRITPAGAGQGQAAWFATFNETFGDYTEKAHELLNTKLEQWAEEAVARGGFHNTTALLIQYENYRDWIVKDNVAYSELFLDTAGVASFDVWDLLPFTRGYVHILDKDPYLRHFAYDPQYFLNELDLLGQAAATQLARNISNSGAMQTYFAGETIPGDNLAYDADLRAWVEYIPENFRPNYHGVGTCSMMPKEMGGVVDNAARVYGVQGLRVIDGSIPPTQMSSHVMTVFYAMALKIADAVLADY

SEQ ID NO: 1184 - protein, 577 aa, Aspergillus niger
GIEASLLKDPKEVAGRTYDYIIAGGGLTGLTVAAKLTENPNITVLVIESGSYESDRGPIIEDLNAYGDIFGSSVDHAYETVELPTNNRTALIRSGNGLGGSTLINGGTWTRPHKAQVDSWETVFGNEGWNWDSVAAYSLQAERARAPNAKQIAAGHYFNASCHGINGTVHAGPRDTGDDYSPIVKALMSAVEDRGVPTKKDLGCGDPHGVSMFPNTLHEDQVRSDAAREWLLPNYQRPNLQVLTGQYVGKVLLSQNATTPRAVGVEFGTHKGNTHNVYAKHEVLLAAGSAVSPTILEYSGIGMKSILEPLGIDTVVDLPVGLNLQDQTTSTVRSRITSAGAGQGQAAWFATFNETFGDYAEKAHELLNTKLEQWAEEAVARGGFHNTTALLIQYENYRDWIVKDNVAYSELFLDTAGVASFDVWDLLPFTRGYVHILDKDPYLRHFAYDPQYFLNELDLLGQAAATQLARNISNSGAMQTYFAGETIPGDNLAYDADLSAWVEYIPENFRPNYHGVGTCSMMPKEMGGVVDNAARVYGVQGLRVIDGSIPPTQMSSHVMTVFYAMALKIADAILADY

SEQ ID NO: 1185 - protein, 577 aa, Aspergillus niger
GIEASLLKDPKEVAGRTYDYIIAGGGLTGLTVAARLTENPNITVLVIESGSYESDRGPIIEDLNAYGDIFGSSVDHAYETVELATNNQTALIRSGNGLGGSTLINGGTWTRPHKAQVDSWETVFGNEGWNWDSVAAYSLQAERARAPNAKQIAAGHYFNASCHGINGTVHAGPRDTGDDYSPIVKALMSAVEDRGVPTKKDLGCGDPHGVSMFPNTLHEDQVRSDAAREWLLPNYQRPNLQVLTGQYVGKVLLSQNATTPRAVGVEFGTHKGNTHNVYAKHEVLLAAGSAVSPTILEYSGIGMKSILEPLGIDTVVDLPVGLNLQDQTTSTVRSRITSAGAGQGQAAWFATFNETFGDYTEKAHELLNTKLEQWAEEAVARGGFHNTTALLIQYENYRDWIVKDNVAYSELFLDTAGVASFDVWDLLPFTRGYVHILDKDPYLRHFAYDPQYFLNELDLLGQAAATQLARNISNSGAMQTYFAGETIPGDNLAYDADLRAWVEYIPENFRPNYHGVGTCSMMPKEMGGVVDNAARVYGVQGLRVIDGSIPPTQLSSHVMTVFYAMALKIADAVLADY

SEQ ID NO: 1186 - protein, 577 aa, Aspergillus niger
GIEASLLKDPKEVAGRTYDYIIAGGGLTGLTVAARLTENPNITVLVIESGSYESDRGPIIEDLNAYGDIFGSSVDHAYETVELATNNQTALIRSGNGLGGSTLINGGTWTRPHKAQVDSWETVFGNEGWNWDSVAAYSLQAERARAPNAKQIAAGHYFNASCHGINGTVHAGPRDTGDDYSPIVKALMSAVEDRGVPTKKDLGCGDPHGVSMFPNTLHEDQVRSDAAREWLLPNYQRPNLQVLTGQYVGKVLLSQNATTPRAVGVEFGTHKGNTHNVYAKHEVLLAAGSAVSPTILEYSGIGMKSILEPLGIDTVVDLPVGLNLQDQTTSTVRSRITSAGAGQGQAAWFATFNETFGDYTEKAHELLNTKLEQWAEEAVARGGFHNTTALLIQYENYRDWIVKDNVAYSELFLDTAGVASFDVWDLLPFTRGYVHILDKDPYLRHFAYDPQYFLNELDLLGQAAATQLARNISNSGAMQTYFAGETIPGDNLAYDADLSAWVEYIPENFRPNYHGVGTCSMMPKEMGGVVDNAARVYGVQGLRVIDGSIPPTQMSSHVMTVFYAMALKIADAILADY

SEQ ID NO: 1187 - protein, 577 aa, Aspergillus niger
GIEASLLKDPKEVAGRTYDYIIAGGGLTGLTVAARLTENPNITVLVIESGSYESDRGPIIEDLNAYGDIFGSSVDHAYETVELPTNNRTALIRSGNGLGGSTLINGGTWTRPHKAQVDSWETVFGNEGWNWDSVAAYSLQAERARAPNAKQIAAGHYFNASCHGINGTVHAGPRDTGDDYSPIVKALMSAVEDRGVPTKKDLGCGDPHGVSMFPNTLHEDQVRSDAAREWLLPNYQRPNLQVLTGQYVGKVLLSQNATTPRAVGVEFGTHKGNTHNVYAKHEVLLAAGSAVSPTILEYSGIGMKSILEPLGIDTVVDLPVGLNLQDQTTSTVRSRITSAGAGQGQAAWFATFNETFGDYTEKAHELLNTKLEQWAEEAVARGGFHNTTALLIQYENYRDWIVKDNVAYSELFLDTAGVASFDVWDLLPFTRGYVHILDKDPYLRHFAYDPQYFLNELDLLGQAAATQLARNISNSGAMQTYFAGETIPGDNLAYDADLSAWVEYIPENFRPNYHGVGTCSMMPKEMGGVVDNAARVYGVQGLRVIDGSIPPTQMSSHVMTVFYAMALKIADAILADY

SEQ ID NO: 1188 - protein, 577 aa, Aspergillus niger
GIEASLLKDPKEVAGRTYDYIIAGGGLTGLTVAARLTENPNITVLVIESGSYESDRGPIIEDLNAYGDIFGSSVDHAYETVELPTNNQTALIRSGNGLGGSTLINGGTWTRPHKAQVDSWETVFGNEGWNWDSVAAYSLQAERARAPNAKQIAAGHYFNPSCHGLNGTVHAGPRDTGDDYSPIVKALMSAVEDRGVPTKKDLGCGDPHGVSMFPNTLHEDQVRSDAAREWLLPNYQRPNLQVLTGRYVGKVLLSQNATTPRAVGVEFGTHKGNTHNVYAKHEVLLAAGSAVSPTILEYSGIGMKSILEPLGIDTVVDLPVGLNLQDQTTSTVRSRITSAGAGQGQAAWFATFNETFGDYAEKAHELLNTKLEQWAEEAVARGGFHNTTALLIQYENYRDWIVKDNVAYSELFLDTAGVASFDVWDLLPFTRGYVHILDKDPYLRHFAYDPQYFLNELDLLGQAAATQLARNISNSGAMQTYFAGETIPGDNLAYDADLSAWVEYIPENFRPNYHGVGTCSMMPKEMGGVVDNAARVYGVQGLRVIDGSIPPTQMSSHVMTVFYAMALKIADAILADY

SEQ ID NO: 1189 - protein, 577 aa, Aspergillus niger
GIEASLLKDPKEVAGRTYDYIIAGGGLTGLTVAAKLTENPNITVLVIESGSYESDRGPIIEDLNAYGDIFGSSVDHAYETVELPTNNQTALIRSGNGLGGSTLINGGTWTRPHKAQVDSWETVFGNEGWNWDSVAAYSLQAERARAPNAKQIAAGHYFNPSCHGLNGTVHAGPRDTGDDYSPIVKALMSAVEDRGVPTKKDLGCGDPHGVSMFPNTLHPDQVRSDAAREWLLPNYQRPNLQVLTGRYVGKVLLSQNATTPRAVGVEFGTHKGNTHNVYAKHEVLLAAGSAVSPTILEYSGIGMKSILEPLGIDTVVDLPVGLNLQDQTTSTVRSRITPAGAGQGQAAWFATFNETFGDYTEKAHELLNTKLEQWAEEAVARGGFHNTTALLIQYENYRDWIVKDNVAYSELFLDTAGVASFDVWDLLPFTRGYVHILDKDPYLRHFAYDPQYFLNELDLLGQAAATQLARNISNSGAMQTYFAGETIPGDNLAYDADLRAWVEYIPENFRPNYHGVGTCSMMPKEMGGVVDNAARVYGVQGLRVIDGSIPPTQLSSHVMTVFYAMALKIADAVLADY

SEQ ID NO: 1190 - protein, 577 aa, Aspergillus niger
GIEASLLKDPKEVAGRTYDYIIAGGGLTGLTVAAKLTENPNITVLVIESGSYESDRGPIIEDLNAYGDIFGSSVDHAYETVELATNNQTALIRSGNGLGGSTLINGGTWTRPHKAQVDSWETVFGNEGWNWDSVAAYSLQAERARAPNAKQIAAGHYFNASCHGINGTVHAGPRDTGDDYSPIVKALMSAVEDRGVPTKKDLGCGDPHGVSMFPNTLHPDQVRSDAAREWLLPNYQRPNLQVLTGRYVGKVLLSQNATTPRAVGVEFGTHKGNTHNVYAKHEVLLAAGSAVSPTILEYSGIGMKSILEPLGIDTVVDLPVGLNLQDQTTSTVRSRITPAGAGQGQAAWFATFNETFGDYTEKAHELLNTKLEQWAEEAVARGGFHNTTALLIQYENYRDWIVKDNVAYSELFLDTAGVASFDVWDLLPFTRGYVHILDKDPYLRHFAYDPQYFLNELDLLGQAAATQLARNISNSGAMQTYFAGETIPGDNLAYDADLRAWVEYIPENFRPNYHGVGTCSMMPKEMGGVVDNAARVYGVQGLRVIDGSIPPTQLSSHVMTVFYAMALKIADAVLADY

SEQ ID NO: 1191 - protein, 577 aa, Aspergillus niger
GIEASLLKDPKEVAGRTYDYIIAGGGLTGLTVAARLTENPNITVLVIESGSYESDRGPIIEDLNAYGDIFGSSVDHAYETVELPTNNQTALIRSGNGLGGSTLINGGTWTRPHKAQVDSWETVFGNEGWNWDSVAAYSLQAERARAPNAKQIAAGHYFNASCHGINGTVHAGPRDTGDDYSPIVKALMSAVEDRGVPTKKDLGCGDPHGVSMFPNTLHEDQVRSDAAREWLLPNYQRPNLQVLTGQYVGKVLLSQNATTPRAVGVEFGTHKGNTHNVYAKHEVLLAAGSAVSPTILEYSGIGMKSILEPLGIDTVVDLPVGLNLQDQTTSTVRSRITSAGAGQGQAAWFATFNETFGDYAEKAHELLNTKLEQWAEEAVARGGFHNTTALLIQYENYRDWIVKDNVAYSELFLDTAGVASFDVWDLLPFTRGYVHILDKDPYLRHFAYDPQYFLNELDLLGQAAATQLARNISNSGAMQTYFAGETIPGDNLAYDADLSAWVEYIPENFRPNYHGVGTCSMMPKEMGGVVDNAARVYGVQGLRVIDGSIPPTQMSSHVMTVFYAMALKIADAILADY

SEQ ID NO: 1192 - protein, 577 aa, Aspergillus niger
GIEASLLKDPKEVAGRTYDYIIAGGGLTGLTVAARLTENPNITVLVIESGSYESDRGPIIEDLNAYGDIFGSSVDHAYETVELATNNQTALIRSGNGLGGSTLINGGTWTRPHKAQVDSWETVFGNEGWNWDSVAAYSLQAERARAPNAKQIAAGHYFNASCHGLNGTVHAGPRDTGDDYSPIVKALMSAVEDRGVPTKKDLGCGDPHGVSMFPNTLHEDQVRSDAAREWLLPNYQRPNLQVLTGQYVGKVLLSQNATTPRAVGVEFGTHKGNTHNVYAKHEVLLAAGSAVSPTILEYSGIGMKSILEPLGIDTVVDLPVGLNLQDQTTSTVRSRITSAGAGQGQAAWFATFNETFGDYTEKAHELLNTKLEQWAEEAVARGGFHNTTALLIQYENYRDWIVKDNVAYSELFLDTAGVASFDVWDLLPFTRGYVHILDKDPYLRHFAYDPQYFLNELDLLGQAAATQLARNISNSGAMQTYFAGETIPGDNLAYDADLSAWVEYIPENFRPNYHGVGTCSMMPKEMGGVVDNAARVYGVQGLRVIDGSIPPTQMSSHVMTVFYAMALKIADAILADY

SEQ ID NO: 1193 - protein, 577 aa, Aspergillus niger
GIEASLLKDPKEVAGRTYDYIIAGGGLTGLTVAAKLTENPNITVLVIESGSYESDRGPIIEDLNAYGDIFGSSVDHAYETVELATNNQTALIRSGNGLGGSTLINGGTWTRPHKAQVDSWETVFGNEGWNWDSVAAYSLQAERARAPNAKQIAAGHYFNASCHGLNGTVHAGPRDTGDDYSPIVKALMSAVEDRGVPTKKDLGCGDPHGVSMFPNTLHPDQVRSDAAREWLLPNYQRPNLQVLTGRYVGKVLLSQNATTPRAVGVEFGTHKGNTHNVYAKHEVLLAAGSAVSPTILEYSGIGMKSILEPLGIDTVVDLPVGLNLQDQTTSTVRSRITPAGAGQGQAAWFATFNETFGDYTEKAHELLNTKLEQWAEEAVARGGFHNTTALLIQYENYRDWIVKDNVAYSELFLDTAGVASFDVWDLLPFTRGYVHILDKDPYLRHFAYDPQYFLNELDLLGQAAATQLARNISNSGAMQTYFAGETIPGDNLAYDADLRAWVEYIPENFRPNYHGVGTCSMMPKEMGGVVDNAARVYGVQGLRVIDGSIPPTQMSSHVMTVFYAMALKIADAVLADY

SEQ ID NO: 1194 - protein, 577 aa, Aspergillus niger
GIEASLLKDPKEVAGRTYDYIIAGGGLTGLTVAARLTENPNITVLVIESGSYESDRGPIIEDLNAYGDIFGSSVDHAYETVELPTNNQTALIRSGNGLGGSTLINGGTWTRPHKAQVDSWETVFGNEGWNWDSVAAYSLQAERARAPNAKQIAAGHYFNASCHGLNGTVHAGPRDTGDDYSPIVKALMSAVEDRGVPTKKDLGCGDPHGVSMFPNTLHEDQVRSDAAREWLLPNYQRPNLQVLTGQYVGKVLLSQNATTPRAVGVEFGTHKGNTHNVYAKHEVLLAAGSAVSPTILEYSGIGMKSILEPLGIDTVVDLPVGLNLQDQTTSTVRSRITPAGAGQGQAAWFATFNETFGDYTEKAHELLNTKLEQWAEEAVARGGFHNTTALLIQYENYRDWIVKDNVAYSELFLDTAGVASFDVWDLLPFTRGYVHILDKDPYLRHFAYDPQYFLNELDLLGQAAATQLARNISNSGAMQTYFAGETIPGDNLAYDADLSAWVEYIPENFRPNYHGVGTCSMMPKEMGGVVDNAARVYGVQGLRVIDGSIPPTQMSSHVMTVFYAMALKIADAILADY

SEQ ID NO: 1195 - protein, 577 aa, Aspergillus niger
GIEASLLKDPKEVAGRTYDYIIAGGGLTGLTVAARLTENPNITVLVIESGSYESDRGPIIEDLNAYGDIFGSSVDHAYETVELATNNQTALIRSGNGLGGSTLINGGTWTRPHKAQVDSWETVFGNEGWNWDSVAAYSLQAERARAPNAKQIAAGHYFNASCHGINGTVHAGPRDTGDDYSPIVKALMSAVEDRGVPTKKDLGCGDPHGVSMFPNTLHEDQVRSDAAREWLLPNYQRPNLQVLTGQYVGKVLLSQNATTPRAVGVEFGTHKGNTHNVYAKHEVLLAAGSAVSPTILEYSGIGMKSILEPLGIDTVVDLPVGLNLQDQTTSTVRSRITPAGAGQGQAAWFATFNETFGDYTEKAHELLNTKLEQWAEEAVARGGFHNTTALLIQYENYRDWIVKDNVAYSELFLDTAGVASFDVWDLLPFTRGYVHILDKDPYLRHFAYDPQYFLNELDLLGQAAATQLARNISNSGAMQTYFAGETIPGDNLAYDADLSAWVEYIPENFRPNYHGVGTCSMMPKEMGGVVDNAARVYGVQGLRVIDGSIPPTQLSSHVMTVFYAMALKIADAVLADY

SEQ ID NO: 1196 - protein, 577 aa, Aspergillus niger
GIEASLLKDPKEVAGRTYDYIIAGGGLTGLTVAAKLTENPNITVLVIESGSYESDRGPIIEDLNAYGDIFGSSVDHAYETVELATNNQTALIRSGNGLGGSTLINGGTWTRPHKAQVDSWETVFGNEGWNWDSVAAYSLQAERARAPNAKQIAAGHYFNASCHGINGTVHAGPRDTGDDYSPIVKALMSAVEDRGVPTKKDLGCGDPHGVSMFPNTLHEDQVRSDAAREWLLPNYQRPNLQVLTGQYVGKVLLSQNATTPRAVGVEFGTHKGNTHNVYAKHEVLLAAGSAVSPTILEYSGIGMKSILEPLGIDTVVDLPVGLNLQDQTTSTVRSRITSAGAGQGQAAWFATFNETFGDYTEKAHELLNTKLEQWAEEAVARGGFHNTTALLIQYENYRDWIVKDNVAYSELFLDTAGVASFDVWDLLPFTRGYVHILDKDPYLRHFAYDPQYFLNELDLLGQAAATQLARNISNSGAMQTYFAGETIPGDNLAYDADLRAWVEYIPENFRPNYHGVGTCSMMPKEMGGVVDNAARVYGVQGLRVIDGSIPPTQMSSHVMTVFYAMALKIADAILADY

SEQ ID NO: 1197 - protein, 577 aa, Aspergillus niger
GIEASLLKDPKEVAGRTYDYIIAGGGLTGLTVAAKLTENPNITVLVIESGSYESDRGPIIEDLNAYGDIFGSSVDHAYETVELATNNRTALIRSGNGLGGSTLINGGTWTRPHKAQVDSWETVFGNEGWNWDSVAAYSLQAERARAPNAKQIAAGHYFNASCHGINGTVHAGPRDTGDDYSPIVKALMSAVEDRGVPTKKDLGCGDPHGVSMFPNTLHEDQVRSDAAREWLLPNYQRPNLQVLTGQYVGKVLLSQNATTPRAVGVEFGTHKGNTHNVYAKHEVLLAAGSAVSPTILEYSGIGMKSILEPLGIDTVVDLPVGLNLQDQTTSTVRSRITSAGAGQGQAAWFATFNETFGDYTEKAHELLNTKLEQWAEEAVARGGFHNTTALLIQYENYRDWIVKDNVAYSELFLDTAGVASFDVWDLLPFTRGYVHILDKDPYLRHFAYDPQYFLNELDLLGQAAATQLARNISNSGAMQTYFAGETIPGDNLAYDADLSAWVEYIPENFRPNYHGVGTCSMMPKEMGGVVDNAARVYGVQGLRVIDGSIPPTQMSSHVMTVFYAMALKIADAILADY

SEQ ID NO: 1198 - protein, 577 aa, Aspergillus niger
GIEASLLKDPKEVAGRTYDYIIAGGGLTGLTVAARLTENPNITVLVIESGSYESDRGPIIEDLNAYGDIFGSSVDHAYETVELPTNNQTALIRSGNGLGGSTLINGGTWTRPHKAQVDSWETVFGNEGWNWDSVAAYSLQAERARAPNAKQIAAGHYFNASCHGINGTVHAGPRDTGDDYSPIVKALMSAVEDRGVPTKKDLGCGDPHGVSMFPNTLHEDQVRSDAAREWLLPNYQRPNLQVLTGQYVGKVLLSQNATTPRAVGVEFGTHKGNTHNVYAKHEVLLAAGSAVSPTILEYSGIGMKSILEPLGIDTVVDLPVGLNLQDQTTSTVRSRITSAGAGQGQAAWFATFNETFGDYTEKAHELLNTKLEQWAEEAVARGGFHNTTALLIQYENYRDWIVKDNVAYSELFLDTAGVASFDVWDLLPFTRGYVHILDKDPYLRHFAYDPQYFLNELDLLGQAAATQLARNISNSGAMQTYFAGETIPGDNLAYDADLRAWVEYIPENFRPNYHGVGTCSMMPKEMGGVVDNAARVYGVQGLRVIDGSIPPTQLSSHVMTVFYAMALKIADAILADY

SEQ ID NO: 1199 - protein, 577 aa, Aspergillus niger
GIEASLLKDPKEVAGRTYDYIIAGGGLTGLTVAAKLTENPNITVLVIESGSYESDRGPIIEDLNAYGDIFGSSVDHAYETVELATNNRTALIRSGNGLGGSTLINGGTWTRPHKAQVDSWETVFGNEGWNWDSVAAYSLQAERARAPNAKQIAAGHYFNASCHGLNGTVHAGPRDTGDDYSPIVKALMSAVEDRGVPTKKDLGCGDPHGVSMFPNTLHEDQVRSDAAREWLLPNYQRPNLQVLTGRYVGKVLLSQNATTPRAVGVEFGTHKGNTHNVYAKHEVLLAAGSAVSPTILEYSGIGMKSILEPLGIDTVVDLPVGLNLQDQTTSTVRSRITSAGAGQGQAAWFATFNETFGDYAEKAHELLNTKLEQWAEEAVARGGFHNTTALLIQYENYRDWIVKDNVAYSELFLDTAGVASFDVWDLLPFTRGYVHILDKDPYLRHFAYDPQYFLNELDLLGQAAATQLARNISNSGAMQTYFAGETIPGDNLAYDADLSAWVEYIPENFRPNYHGVGTCSMMPKEMGGVVDNAARVYGVQGLRVIDGSIPPTQMSSHVMTVFYAMALKIADAILADY

SEQ ID NO: 1200 - protein, 577 aa, Aspergillus niger
GIEASLLTDPKEVAGRTVDYIIAGGGLTGLTTAARLTENPDITVLVIESGSYESDRGPIIEDLNAYGDIFGSSVDHAYETVELATNNQTALIRNGNGLGGSTLVNGGTWTRPHKAQVDSWETVFGNEGWNWDSVAAYSLQAERARAPNAKQIAAGHYFNASCHGINGTVHAGPRDTGDDYSPIVKALMSAVEDRGVPTKKDLGCGDPHGVSMFPNTLHEDQVRSDAAREWLLPNYQRPNLQVLTGQYVGKVLLSQNATTPRAVGVEFGTHKGNTHNVYAKHEVLLAAGSAVSPTILEYSGIGMKSILEPLGIDTVVDLPVGLNLQDQTTSTVRSRITSAGAGQGQAAWFATFNETFGDYAEKAHELLNTKLEQWAEEAVARGGFHNTTALLIQYENYRDWIVKDNVAYSELFLDTAGVASFDVWDLLPFTRGYVHILDKDPYLRHFAYDPQYFLNELDLLGQAAATQLARNISNSGAMQTYFAGETIPGDNLAYDADLSAWVEYIPYNFRPNYHGVGTCSMMPKEMGGVVDNAARVYGVQGLRVIDGSIPPTQMSSHVMTVFYAMALKIADAILADY

SEQ ID NO: 1201 - protein, 577 aa, Aspergillus niger
GIEASLLTDPKEVAGRTVDYIIAGGGLTGLTTAARLTENPDITVLVIESGSYESDRGPIIEDLNAYGDIFGSSVDHAYETVELATNNQTALIRFGNGLGGSTLVNGGTWTRPHKAQVDSWETVFGNEGWNWDSVAAYSLQAERARAPNAKQIAAGHYFNASCHGINGTVHAGPRDTGDDYSPIVKALMSAVEDRGVPTKKDLGCGDPHGVSMFPNTLHEDQVRSDAAREWLLPNYQRPNLQVLTGQYVGKVLLSQNATTPRAVGVEFGTHKGNTHNVYAKHEVLLAAGSAVSPTILEYSGIGMKSILEPLGIDTVVDLPVGLNLQDQTTSTVRSRITSAGAGQGQAAWFATFNETFGDYAEKAHELLNTKLEQWAEEAVARGGFHNTTALLIQYENYRDWIVKDNVAYSELFLDTAGVASFDVWDLLPFTRGYVHILDKDPYLRHFAYDPQYFLNELDLLGQAAATQLARNISNSGAMQTYFAGETIPGDNLAYDADLSAWVEYIPYNFRPNYHGVGTCSMMPKEMGGVVDNAARVYGVQGLRVIDGSIPPTQMSSHVMTVFYAMALKIADAILADY

SEQ ID NO: 1202 - protein, 602 aa, Penicillium polonicum
LISVAASKRYLPSEQIDVQSSLLSDPTQVTGKTVDYIIAGGGLTGLTIAAKLTEDPSIEVLVIENGFYESTDGDIIEDLNDYGDIFGTTVDHAYEIVPHPINNRTENVRSGNGLGGSTLINGGSWTRPHKAQIDSWEKVFGNKGWNWDDMLPYMQKVEISRPPSDVEIAAGHYYNSTCHGTNGTVHAGPRNNGEPYSPIIKALMDTAKGRGVPTQLDFHCGVPRGVSMIPNGLHEDQIRSDAAREWLLPNYKRPNLQVLTGQFVGKVLINQTTTSGAVSGHKAVGVNFGTNKNVNFNVYAKHEVLLASGSVVSPRILEYSGIGLKSVLDTAGIQQIVDLPVGLNMQDQTTTTVASRIKSSGNGQGQAIYFATFNETFGDYAPQAHKLLNTKLHQWATETVARGGFHNVTALEIQYQNYRDWLVNEEVAYTELFLDTSGKINFDLWDLIPFTRGSVHIEGNDPYLRRFSYDPKFFMNDLDLLGQAAGSKLAREISNSGDMQTYFDGETTPGDNLEYDADLDQWVDYVKQNFRANWHAVGTCSMMAKELGGVVDSEARVYGVEGLRVVDGSIPPTQVSSHVMTIFYAMALKISDAVLTDFHAKS

SEQ ID NO: 1203 - protein, 576 aa, Aspergillus niger
GAEASLLTDPKEVAGRTVDYIIAGGGLTGLTTAARLTENPDITVLVIESGSYESDRGPIIEDLNAYGKIFGSSVDHAYETVELTNNQTALIRAGNGLGGSTLVNGGTWTRPHKAQVDSWETVFGNEGWNWDSVAAYSLQAERARAPNAKQIAAGHYFNASCHGINGTVHAGPRDTGDDYSPIVKALMSAVEDRGVPTKKDLGCGDPHGVSMFPNTLHEDQVRSDAAREWLLPNYQRPNLQVLTGQYVGKVLLSQNATTPRAVGVEFGTHKQNTHNVYAKHEVLLAAGSAVSPTILEYSGIGMKSILEPLGIDTVVDLPVGLNLQDQTTSTVRSRITSAGAGQGQAAWFATFNETFGDYAEKAHELLNTKLEQWAEEAVARGGFHNTTALLIQYENYRDWIVKDNVAYSELFLDTAGVASFDVWDLLPFTRGYVHILDKDPYLRHFAYDPQYFLNELDLLGQAAATQLARNISNSGAMQTYFAGETIPGDNLAYDADLSAWVEYIHYNFRPNYHGVGTCSMMPKEMGGVVDNAARVYGVQGLRVIDGSIPPTQMSSHVMTVFYAMALKIADAILADY

SEQ ID NO: 1204 - protein, 576 aa, Aspergillus niger
GPEASLLTDPKEVAGRTVDYIIAGGGLTGLTTAARLTENPDITVLVIESGSYESDRGPIIEDLNAYGKIFGSSVDHAYETVELTNNQTALIRAGNGLGGSTLVNGGTWTRPHKAQVDSWETVFGNEGWNWDSVAAYSLQAERARAPNAKQIAAGHYFNASCHGINGTVHAGPRDTGDDYSPIVKALMSAVEDRGVPTKKDLGCGDPHGVSMFPNTLHEDQVRSDAAREWLLPNYQRPNLQVLTGQYVGKVLLSQNATTPRAVGVEFGTHKSNTHNVYAKHEVLLAAGSAVSPTILEYSGIGMKSILEPLGIDTVVDLPVGLNLQDQTTSTVRSRITSAGAGQGQAAWFATFNETFGDYAEKAHELLNTKLEQWAEEAVARGGFHNTTALLIQYENYRDWIVKDNVAYSELFLDTAGVASFDVWDLLPFTRGYVHILDKDPYLRHFAYDPQYFLNELDLLGQAAATQLARNISNSGAMQTYFAGETIPGDNLAYDADLSAWVEYICYNFRPNYHGVGTCSMMPKEMGGVVDNAARVYGVQGLRVIDGSIPPTQMSSHVMTVFYAMALKIADAILADY

SEQ ID NO: 1205 - protein, 597 aa, Aspergillus niger
LVSSLVVSLAAALPHYIRSNGIEASLLTDPKEVAGRTVDYIIAGGGLTGLTTAARLTENPDITVLVIESGSYESDRGPIIEDLNAYGDIFGSSVDHAYETVELATNNQTALIRSGNGLGGSTLVNGGTWTRPHKAQVDSWETVFGNEGWNWDSVAAYSLQAERARAPNAKQIAAGHYFNASCHGINGTVHAGPRDTGDDYSPIVKALMSAVEDRGVPTKKDLGCGDPHGVSMFPNTLHEDQVRSDAAREWLLPNYQRPNLQVLTGRYVGKVLLSQNATTPRAVGVEFGTHKGNTHNVYAKHEVLLAAGSAVSPTILEYSGIGMKSILEPLGIDTVVDLPVGLNLQDQTTSTVRSRITSAGAGQGQAAWFATFNETFGDYAEKAHELLNTKLEQWAEEAVARGGFHNTTALLIQYENYRDWIVKDNVAYSELFLDTAGVASFDVWDLLPFTRGYVHILDKDPYLRHFAYDPQYFLNELDLLGQAAATQLARNISNSGAMQTYFAGETIPGDNLAYDADLSAWVEYIPYNFRPNYHGVGTCSMMPKEMGGVVDNAARVYGVQGLRVIDGSIPPTQMSSHQMTVFYAMALKVADAILADY

SEQ ID NO: 1206 - protein, 597 aa, Aspergillus niger
LVSSLVVSLAAALPHYIRSNGIEASLLTDPKEVAGRTVDYIIAGGGLTGLTTAARLTENPDITVLVIESGSYESDRGPIIEDLNAYGDIFGSSVDHAYETVELATNNQTALIRSGNGLGGSTLVNGGTWTRPHKAQVDSWETVFGNEGWNWDSVAAYSLQAERARAPNAKQIAAGHYFNASCHGINGTVHAGPRDTGDDYSPIVKALMSAVEDRGVPTKKDLGCGDPHGVSMFPNTLHEDQVRSDAAREWLLPNYQRPNLQVLTGRYVGKVLLSQNATTPRAVGVEFGTHKGNTHNVYAKHEVLLAAGSAVSPTILEYSGIGMKSILEPLGIDTVVDLPVGLNLQDQTTSTVRSRITSAGAGQGQAAWFATFNETFGDYAEKAHELLNTKLEQWAEEAVARGGFHNTTALLIQYENYRDWIVKDNVAYSELFLDTAGVAIFDVWDLLPFTRGYVHILDKDPYLRHFAYDPQYFLNELDLLGQAAATQLARNISNSGAMQTYFAGETIPGDNLAYDADLSAWVEYIPYNFRPNYHGVGTCSMMPKEMGGVVDNAARVYGVQGLRVIDGSIPPTQMSSHVMTVFYAMALKVADAILADY

SEQ ID NO: 1207 - protein, 597 aa, Aspergillus niger
LVSSLVVSLAAALPHYIRSNGIEASLLTDPKEVAGRTVDYIIAGGGLTGLTTAARLTENPDITVLVIESGSYESDRGPIIEDLNAYGDIFGSSVDHAYETVELATNNQTALIRSGNGLGGSTLVNGGTWTRPHKAQVDSWETVFGNEGWNWDSVAAYSLQAERARAPNAKQIAAGHYFNASCHGINGTVHAGPRDTGDDYSPIVKALMSAVEDRGVPTKKDLGCGDPHGVSMFPNTLHEDQVRSDAAREWLLPNYQRPNLQVLTGRYVGKVLLSQNATTPRAVGVEFGTHKGNTHNVYAKHEVLLAAGSAVSPTILEYSGIGMKSILEPLGIDTVVDLPVGLNLQDQTTSTVRSRITSAGAGQGQAAWFATFNETFGDYAEKAHELLNTKLEQWAEEAVARGGFHNTTALLIQYENYRDWIVKDNVAYSELFLDTAGVASFDVWDLLPFTRGYVHILDKDPYLRHFAYDPQYFLNELDLLGQAAATQLARNISNSGAMQTYFAGETIPGDNLAYDADLSAWVEYIPYNFRPNYHGVGTCSMMPKEMGGVVDNAARVYGVQGLRVIDGSIPPTQMSSHGMTVFYAMALKVADAILADY

SEQ ID NO: 1208 - protein, 597 aa, Aspergillus niger
LVSSLVVSLAAALPHYIRSNGIEASLLTDPKEVAGRTVDYIIAGGGLTGLTTAARLTENPDITVLVIESGSYESDRGPIIEDLNAYGDIFGSSVDHAYETVELATNNQTALIRSGNGLGGSTLVNGGTWTRPHKAQVDSWETVFGNEGWNWDSVAAYSLQAERARAPNAKQIAAGHYFNASCHGINGTVHAGPRDTGDDYSPIVKALMSAVEDRGVPTKKDLGCGDPHGVSMFPNTLHEDQVRSDAAREWLLPNYQRPNLQVLTGRYVGKVLLSQNATTPRAVGVEFGTHKGNTHNVYAKHEVLLAAGSAVSPTILEYSGIGMKSILEPLGIDTVVDLPVGLNLQDQTTSTVRSRITSAGAGQGQAAWFATFNETFGDYAEKAHELLNTKLEQWAEEAVARGGFHNTTALLIQYENYRDWIVKDNVAYSELFLDTAGVASFDVWDLLPFTRGYVHILDKDPYLRHFAYDPQYFLNELDLLGQAAATQLARNISNSGAMQTYFAGETIPGDNLAYDADLSAWVEYIPYNFRPNYHGVGTCSMMPKEMGGVVDNAARVYGVQGLRVIDGSIPPTQMSSHMMTVFYAMALKVADAILADY

SEQ ID NO: 1209 - protein, 597 aa, Aspergillus niger
LVSSLVVSLAAALPHYIRSNGIEASLLTDPKEVAGRTVDYIIAGGGLTGLTTAARLTENPDITVLVIESGSYESDRGPIIEDLNAYGDIFGSSVDHAYETVELATNNQTALIRSGNGLGGSTLVNGGTWTRPHKAQVDSWETVFGNEGWNWDSVAAYSLQAERARAPNAKQIAAGHYFNASCHGINGTVHAGPRDTGDDYSPIVKALMSAVEDRGVPTKKDLGCGDPHGVSMFPNTLHEDQVRSDAAREWLLPNYQRPNLQVLTGRYVGKVLLSQNATTPRAVGVEFGTHKGNTHNVYAKHEVLLAAGSAVSPTILEYSGIGMKSILEPLGIDTVVDLPVGLNLQDQTTSTVRSRITSAGAGQGQAAWFATFNETFGDYAEKAHELLNTKLEQWAEEAVARGGFHNTTALLIQYENYRDWIVKDNVAYSELFLDTAGVASFDVWDLLPFTRGYVHILDKDPYLRHFAYDPQYFLNELDLLGQAAATQLARNISNSGAMQTYFAGETIPGDNLAYDADLSAWVEYIPYNFRPNYHGVGTCSMMPKEMGGVVDNAARVYGVQGLRVIDGSIPPTQMSSHDMTVFYAMALKVADAILADY

SEQ ID NO: 1210 - protein, 597 aa, Aspergillus niger
LVSSLVVSLAAALPHYIRSNGIEASLLTDPKEVAGRTVDYIIAGGGLTGLTTAARLTENPDITVLVIESGSYESDRGPIIEDLNAYGDIFGSSVDHAYETVELATNNQTALIRSGNGLGGSTLVNGGTWTRPHKAQVDSWETVFGNEGWNWDSVAAYSLQAERARAPNAKQIAAGHYFNASCHGINGTVHAGPRDTGDDYSPIVKALMSAVEDRGVPTKKDLGCGDPHGVSMFPNTLHEDQVRSDAAREWLLPNYQRPNLQVLTGRYVGKVLLSQNATTPRAVGVEFGTHKGNTHNVYAKHEVLLAAGSAVSPTILEYSGIGMKSILEPLGIDTVVDLPVGLNLQDQTTSTVRSRITSAGAGQGQAAWFATFNETFGDYAEKAHELLNTKLEQWAEEAVARGGFHNTTALLIQYENYRDWIVKDNVAYSELFLDTAGVAEFDVWDLLPFTRGYVHILDKDPYLRHFAYDPQYFLNELDLLGQAAATQLARNISNSGAMQTYFAGETIPGDNLAYDADLSAWVEYIPYNFRPNYHGVGTCSMMPKEMGGVVDNAARVYGVQGLRVIDGSIPPTQMSSHVMTVFYAMALKVADAILADY

SEQ ID NO: 1211 - protein, 597 aa, Aspergillus niger
LVSSLVVSLAAALPHYIRSNGIEASLLTDPKEVAGRTVDYIIAGGGLTGLTTAARLTENPDITVLVIESGSYESDRGPIIEDLNAYGDIFGSSVDHAYETVELATNNQTALIRSGNGLGGSTLVNGGTWTRPHKAQVDSWETVFGNEGWNWDSVAAYSLQAERARAPNAKQIAAGHYFNASCHGINGTVHAGPRDTGDDYSPIVKALMSAVEDRGVPTKKDLGCGDPHGVSMFPNTLHEDQVRSDAAREWLLPNYQRPNLQVLTGRYVGKVLLSQNATTPRAVGVEFGTHKGNTHNVYAKHEVLLAAGSAVSPTILEYSGIGMKSILEPLGIDTVVDLPVGLNLQDQTTSTVRSRITSAGAGQGQAAWFATFNETFGDYAEKAHELLNTKLEQWAEEAVARGGFHNTTALLIQYENYRDWIVKDNVAYSELFLDTAGVASFHVWDLLPFTRGYVHILDKDPYLRHFAYDPQYFLNELDLLGQAAATQLARNISNSGAMQTYFAGETIPGDNLAYDADLSAWVEYIPYNFRPNYHGVGTCSMMPKEMGGVVDNAARVYGVQGLRVIDGSIPPTQMSSHVMTVFYAMALKVADAILADY

SEQ ID NO: 1212 - protein, 597 aa, Aspergillus niger
LVSSLVVSLAAALPHYIRSNGIEASLLTDPKEVAGRTVDYIIAGGGLTGLTTAARLTENPDITVLVIESGSYESDRGPIIEDLNAYGDIFGSSVDHAYETVELATNNQTALIRSGNGLGGSTLVNGGTWTRPHKAQVDSWETVFGNEGWNWDSVAAYSLQAERARAPNAKQIAAGHYFNASCHGINGTVHAGPRDTGDDYSPIVKALMSAVEDRGVPTKKDLGCGDPHGVSMFPNTLHEDQVRSDAAREWLLPNYQRPNLQVLTGRYVGKVLLSQNATTPRAVGVEFGTHKGNTHNVYAKHEVLLAAGSAVSPTILEYSGIGMKSILEPLGIDTVVDLPVGLNLQDQTTSTVRSRITSAGAGQGQAAWFATFNETFGDYAEKAHELLNTKLEQWAEEAVARGGFHNTTALLIQYENYRDWIVKDNVAYSELFLDTAGVACFDVWDLLPFTRGYVHILDKDPYLRHFAYDPQYFLNELDLLGQAAATQLARNISNSGAMQTYFAGETIPGDNLAYDADLSAWVEYIPYNFRPNYHGVGTCSMMPKEMGGVVDNAARVYGVQGLRVIDGSIPPTQMSSHVMTVFYAMALKVADAILADY

SEQ ID NO: 1213 - protein, 597 aa, Aspergillus niger
LVSSLVVSLAAALPHYIRSNGIEASLLTDPKEVAGRTVDYIIAGGGLTGLTTAARLTENPDITVLVIESGSYESDRGPIIEDLNAYGDIFGSSVDHAYETVELATNNQTALIRSGNGLGGSTLVNGGTWTRPHKAQVDSWETVFGNEGWNWDSVAAYSLQAERARAPNAKQIAAGHYFNASCHGINGTVHAGPRDTGDDYSPIVKALMSAVEDRGVPTKKDLGCGDPHGVSMFPNTLHEDQVRSDAAREWLLPNYQRPNLQVLTGRYVGKVLLSQNATTPRAVGVEFGTHKGNTHNVYAKHEVLLAAGSAVSPTILEYSGIGMKSILEPLGIDTVVDLPVGLNLQDQTTSTVRSRITSAGAGQGQAAWFATFNETFGDYAEKAHELLNTKLEQWAEEAVARGGFHNTTALLIQYENYRDWIVKDNVAYSELFLDTAGVASFDVWDLLPFTRGYVHILDKDPYLRHFAYDPQYFLNELDLLGQAAATQLARNISNSGAMQTYFAGETIPGDNLAYDADLSAWVEYIPYNFRPNYHGVGTCSMMPKEMGGVVDNAARVYGVQGLRVIDGSIPPTQMSSHLMTVFYAMALKVADAILADY

SEQ ID NO: 1214 - protein, 597 aa, Aspergillus niger
LVSSLVVSLAAALPHYIRSNGIEASLLTDPKEVAGRTVDYIIAGGGLTGLTTAARLTENPDITVLVIESGSYESDRGPIIEDLNAYGDIFGSSVDHAYETVELATNNQTALIRSGNGLGGSTLVNGGTWTRPHKAQVDSWETVFGNEGWNWDSVAAYSLQAERARAPNAKQIAAGHYFNASCHGINGTVHAGPRDTGDDYSPIVKALMSAVEDRGVPTKKDLGCGDPHGVSMFPNTLHEDQVRSDAAREWLLPNYQRPNLQVLTGRYVGKVLLSQNATTPRAVGVEFGTHKGNTHNVYAKHEVLLAAGSAVSPTILEYSGIGMKSILEPLGIDTVVDLPVGLNLQDQTTSTVRSRITSAGAGQGQAAWFATFNETFGDYAEKAHELLNTKLEQWAEEAVARGGFHNTTALLIQYENYRDWIVKDNVAYSELFLDTAGVASFDVWDLLPFTRGYVHILDKDPYLRHFAYDPQYFLNELDLLGQAAATQLARNISNSGAMQTYFAGETIPGDNLAYDADLSAWVEYIPYNFRPNYHGVGTCSMMPKEMGGVVDNAARVYGVQGLRVIDGSIPPTQMSSHFMTVFYAMALKVADAILADY

SEQ ID NO: 1215 - protein, 597 aa, Aspergillus niger
LVSSLVVSLAAALPHYIRSNGIEASLLTDPKEVAGRTVDYIIAGGGLTGLTTAARLTENPDITVLVIESGSYESDRGPIIEDLNAYGDIFGSSVDHAYETVELATNNQTALIRSGNGLGGSTLVNGGAWTRPHKAQVDSWETVFGNEGWNWDSVAAYSLQAERARAPNAKQIAAGHYFNASCHGINGTVHAGPRDTGDDYSPIVKALMSAVEDRGVPTKKDLGCGDPHGVSMFPNTLHEDQVRSDAAREWLLPNYQRPNLQVLTGRYVGKVLLSQNATTPRAVGVEFGTHKGNTHNVYAKHEVLLAAGSAVSPTILEYSGIGMKSILEPLGIDTVVDLPVGLNLQDQTTSTVRSRITSAGAGQGQAAWFATFNETFGDYAEKAHELLNTKLEQWAEEAVARGGFHNTTALLIQYENYRDWIVKDNVAYSELFLDTAGVASFDVWDLLPFTRGYVHILDKDPYLRHFAYDPQYFLNELDLLGQAAATQLARNISNSGAMQTYFAGETIPGDNLAYDADLSAWVEYIPYNFRPNYHGVGTCSMMPKEMGGVVDNAARVYGVQGLRVIDGSIPPTQMSSHVMTVFYAMALKVADAILADY

SEQ ID NO: 1216 - protein, 597 aa, Aspergillus niger
LVSSLVVSLAAALPHYIRSNGIEASLLTDPKEVAGRTVDYIIAGGGLTGLTTAARLTENPDITVLVIESGSYESDRGPIIEDLNAYGDIFGSSVDHAYETVELATNNQTALIRSGNGLGGSTLVNGGTWTRPHKAQVDSWETVFGNEGWNWDSVAAYSLQAERARAPNAKQIAAGHYFNASCHGINGTVHAGPRDTGDDYSPIVKALMSAVEDRGVPTKKDLGCGDPHGVSMFPNTLHEDQVRSDAAREWLLPNYQRPNLQVLTGRYVGKVLLSQNATTPRAVGVEFGTHKGNTHNVYAKHEVLLAAGSAVSPTILEYSGIGMKSILEPLGIDTVVDLPVGLNLQDQTTSTVRSRITSAGAGQGQAAWFATFNETFGDYAEKAHELLNTKLEQWAEEAVARGGFHNTTALLIQYENYRDWIVKDNVAYSELFLDTAGVASFDVWDLLPFTRGYVHILDKDPYLRHFAYDPQYFLNELDLLGQAAATQLARNISNSGAMQTYFAGETIPGDNLAYDADLSAWVEYIPYNFRPNYHGVGTCSMMPKEMGGVVDNAARVYGVQGLRVIDGSIPPTQMSSHKMTVFYAMALKVADAILADY

SEQ ID NO: 1217 - protein, 597 aa, Aspergillus niger
LVSSLVVSLAAALPHYIRSNGIEASLLTDPKEVAGRTVDYIIAGGGLTGLTTAARLTENPDITVLVIESGSYESDRGPIIEDLNAYGDIFGSSVDHAYETVELATNNQTALIRSGNGLGGSTLVNGGTWTRPHKAQVDSWETVFGNEGWNWDSVAAYSLQAERARAPNAKQIAAGHYFNASCHGINGTVHAGPRDTGDDYSPIVKALMSAVEDRGVPTKKDLGCGDPHGVSMFPNTLHEDQVRSDAAREWLLPNYQRPNLQVLTGRYVGKVLLSQNATTPRAVGVEFGTHKGNTHNVYAKHEVLLAAGSAVSPTILEYSGIGMKSILEPLGIDTVVDLPVGLNLQDQTTSTVRSRITSAGAGQGQAAWFATFNETFGDYAEKAHELLNTKLEQWAEEAVARGGFHNTTALLIQYENYRDWIVKDNVAYSELFLDTAGVAQFDVWDLLPFTRGYVHILDKDPYLRHFAYDPQYFLNELDLLGQAAATQLARNISNSGAMQTYFAGETIPGDNLAYDADLSAWVEYIPYNFRPNYHGVGTCSMMPKEMGGVVDNAARVYGVQGLRVIDGSIPPTQMSSHVMTVFYAMALKVADAILADY

SEQ ID NO: 1218 - protein, 597 aa, Aspergillus niger
LVSSLVVSLAAALPHYIRSNGIEASLLTDPKEVAGRTVDYIIAGGGLTGLTTAARLTENPDITVLVIESGSYESDRGPIIEDLNAYGDIFGSSVDHAYETVELATNNQTALIRSGNGLGGSTLVNGGTWTRPHKAQVDSWETVFGNEGWNWDSVAAYSLQAERARAPNAKQIAAGHYFNASCHGINGTVHAGPRDTGDDYSPIVKALMSAVEDRGVPTKKDLGCGDPHGVSMFPNTLHEDQVRSDAAREWLLPNYQRPNLQVLTGRYVGKVLLSQNATTPRAVGVEFGTHKGNTHNVYAKHEVLLAAGSAVSPTILEYSGIGMKSILEPLGIDTVVDLPVGLNLQDQTTSTVRSRITSAGAGQGQAAWFATFNETFGDYAEKAHELLNTKLEQWAEEAVARGGFHNTTALLIQYENYRDWIVKDNVAYSELFLDTAGVASFDVWDLLPFTRGYVHILDKDPYLRHFAYDPQYFLNELDLLGQAAATQLARNISNSGAMQTYFAGETIPGDNLAYDADLSAWVEYIPYNFRPNYHGVGTCSMMPKEMGGVVDNAARVYGVQGLRVIDGSIPPTQMSSHYMTVFYAMALKVADAILADY

SEQ ID NO: 1219 - protein, 597 aa, Aspergillus niger
LVSSLVVSLAAALPHYIRSNGIEASLLTDPKEVAGRTVDYIIAGGGLTGLTTAARLTENPDITVLVIESGSYESDRGPIIEDLNAYGDIFGSSVDHAYETVELATNNQTALIRSGNGLGGSTLVNGGTWTRPHKAQVDSWETVFGNEGWNWDSVAAYSLQAERARAPNAKQIAAGHYFNASCHGINGTVHAGPRDTGDDYSPIVKALMSAVEDRGVPTKKDLGCGDPHGVSMFPNTLHEDQVRSDAAREWLLPNYQRPNLQVLTGRYVGKVLLSQNATTPRAVGVEFGTHKGNTHNVYAKHEVLLAAGSAVSPTILEYSGIGMKSILEPLGIDTVVDLPVGLNLQDQTTSTVRSRITSAGAGQGQAAWFATFNETFGDYAEKAHELLNTKLEQWAEEAVARGGFHNTTALLIQYENYRDWIVKDNVAYSELFLDTAGVALFDVWDLLPFTRGYVHILDKDPYLRHFAYDPQYFLNELDLLGQAAATQLARNISNSGAMQTYFAGETIPGDNLAYDADLSAWVEYIPYNFRPNYHGVGTCSMMPKEMGGVVDNAARVYGVQGLRVIDGSIPPTQMSSHVMTVFYAMALKVADAILADY

SEQ ID NO: 1220 - protein, 597 aa, Aspergillus niger
LVSSLVVSLAAALPHYIRSNGIEASLLTDPKEVAGRTVDYIIAGGGLTGLTTAARLTENPDITVLVIESGSYESDRGPIIEDLNAYGDIFGSSVDHAYETVELATNNQTALIRSGNGLGGSTLVNGGTWTRPHKAQVDSWETVFGNEGWNWDSVAAYSLQAERARAPNAKQIAAGHYFNASCHGINGTVHAGPRDTGDDYSPIVKALMSAVEDRGVPTKKDLGCGDPHGVSMFPNTLHEDQVRSDAAREWLLPNYQRPNLQVLTGRYVGKVLLSQNATTPRAVGVEFGTHKGNTHNVYAKHEVLLAAGSAVSPTILEYSGIGMKSILEPLGIDTVVDLPVGLNLQDQTTSTVRSRITSAGAGQGQAAWFATFNETFGDYAEKAHELLNTKLEQWAEEAVARGGFHNTTALLIQYENYRDWIVKDNVAYSELFLDTAGVASFDVWDLLPFTRGYVHILDKDPYLRHFAYDPQYFLNELDLLGQAAATQLARNISNSGAMQTYFAGETIPGDNLAYDADLSAWVEYIPYNFRPNYHGVGTCSMMPKEMGGVVDNAARVYGVQGLRVIDGSIPPTQMSSHRMTVFYAMALKVADAILADY

SEQ ID NO: 1221 - protein, 597 aa, Aspergillus niger
LVSSLVVSLAAALPHYIRSNGIEASLLTDPKEVAGRTVDYIIAGGGLTGLTTAARLTENPDITVLVIESGSYESDRGPIIEDLNAYGDIFGSSVDHAYETVELATNNQTALIRSGNGLGGSTLVNGGTWTRPHKAQVDSWETVFGNEGWNWDSVAAYSLQAERARAPNAKQIAAGHYFNASCHGINGTVHAGPRDTGDDYSPIVKALMSAVEDRGVPTKKDLGCGDPHGVSMFPNTLHEDQVRSDAAREWLLPNYQRPNLQVLTGRYVGKVLLSQNATTPRAVGVEFGTHKGNTHNVYAKHEVLLAAGSAVSPTILEYSGIGMKSILEPLGIDTVVDLPVGLNLQDQTTSTVRSRITSAGAGQGQAAWFATFNETFGDYAEKAHELLNTKLEQWAEEAVARGGFHNTTALLIQYENYRDWIVKDNVAYSELFLDTAGVASFDVWDLLPFTRGYVHILDKDPYLRHFAYDPQYFLNELDLLGQAAATQLARNISNSGAMQTYFAGETIPGDNLAYDADLSAWVEYIPYNFRPNYHGVGTCSMMPKEMGGVVDNAARVYGVQGLRVIDGSIPPTQMSSHHMTVFYAMALKVADAILADY

SEQ ID NO: 1222 - protein, 597 aa, Aspergillus niger
LVSSLVVSLAAALPHYIRSNGIEASLLTDPKEVAGRTVDYIIAGGGLTGLTTAARLTENPDITVLVIESGSYESDRGPIIEDLNAYGDIFGSSVDHAYETVELATNNQTALIRSGNGLGGSTLVNGGTWTRPHKAQVDSWETVFGNEGWNWDSVAAYSLQAERARAPNAKQIAAGHYFNASCHGINGTVHAGPRDTGDDYSPIVKALMSAVEDRGVPTKKDLGCGDPHGVSMFPNTLHEDQVRSDAAREWLLPNYQRPNLQVLTGRYVGKVLLSQNATTPRAVGVEFGTHKGNTHNVYAKHEVLLAAGSAVSPTILEYSGIGMKSILEPLGIDTVVDLPVGLNLQDQTASTVRSRITSAGAGQGQAAWFATFNETFGDYAEKAHELLNTKLEQWAEEAVARGGFHNTTALLIQYENYRDWIVKDNVAYSELFLDTAGVASFDVWDLLPFTRGYVHILDKDPYLRHFAYDPQYFLNELDLLGQAAATQLARNISNSGAMQTYFAGETIPGDNLAYDADLSAWVEYIPYNFRPNYHGVGTCSMMPKEMGGVVDNAARVYGVQGLRVIDGSIPPTQMSSHVMTVFYAMALKVADAILADY

SEQ ID NO: 1223 - protein, 597 aa, Aspergillus niger
LVSSLVVSLAAALPHYIRSNGIEASLLTDPKEVAGRTVDYIIAGGGLTGLTTAARLTENPDITVLVIESGSYESDRGPIIEDLNAYGDIFGSSVDHAYETVELATNNQTALIRSGNGLGGSTLVNGGTWTRPHKAQVDSWETVFGNEGWNWDSVAAYSLQAERARAPNAKQIAAGHYFNASCHGINGTVHAGPRDTGDDYSPIVKALMSAVEDRGVPTKKDLGCGDPHGVSMFPNTLHEDQVRSDAAREWLLPNYQRPNLQVLTGRYVGKVLLSQNATTPRAVGVEFGTHKGNTHNVYAKHEVLLAAGSAVSPTILEYSGIGMKSILEPLGIDTVVDLPVGLNLQDQTTSTVRSRITSAGAGQGQAAWFATFNETFGDYAEKAHELLNTKLEQWAEEAVARGGFHNTTALLIQYENYRDWIVKDNVAYSELFLDTAGVAAFDVWDLLPFTRGYVHILDKDPYLRHFAYDPQYFLNELDLLGQAAATQLARNISNSGAMQTYFAGETIPGDNLAYDADLSAWVEYIPYNFRPNYHGVGTCSMMPKEMGGVVDNAARVYGVQGLRVIDGSIPPTQMSSHVMTVFYAMALKVADAILADY

SEQ ID NO: 1224 - protein, 597 aa, Aspergillus niger
LVSSLVVSLAAALPHYIRSNGIEASLLTDPKEVAGRTVDYIIAGGGLTGLTTAARLTENPDITVLVIESGSYESDRGPIIEDLNAYGDIFGSSVDHAYETVELATNNQTALIRSGNGLGGSTLVNGGTWTRPHKAQVDSWETVFGNEGWNWDSVAAYSLQAERARAPNAKQIAAGHYFNASCHGINGTVHAGPRDTGDDYSPIVKALMSAVEDRGVPTKKDLGCGDPHGVSMFPNTLHEDQVRSDAAREWLLPNYQRPNLQVLTGRYVGKVLLSQNATTPRAVGVEFGTHKGNTHNVYAKHEVLLAAGSAVSPTILEYSGIGMKSILEPLGIDTVVDLPVGLNLQDQTTSTVRSRITSAGAGQGQAAWFATFNETFGDYAEKAHELLNTKLEQWAEEAVARGGFHNTTALLIQYENYRDWIVKDNVAYSELFLDTAGVADFDVWDLLPFTRGYVHILDKDPYLRHFAYDPQYFLNELDLLGQAAATQLARNISNSGAMQTYFAGETIPGDNLAYDADLSAWVEYIPYNFRPNYHGVGTCSMMPKEMGGVVDNAARVYGVQGLRVIDGSIPPTQMSSHVMTVFYAMALKVADAILADY

SEQ ID NO: 1225 - protein, 597 aa, Aspergillus niger
LVSSLVVSLAAALPHYIRSNGIEASLLTDPKEVAGRTVDYIIAGGGLTGLTTAARLTENPDITVLVIESGSYESDRGPIIEDLNAYGDIFGSSVDHAYETVELATNNQTALIRSGNGLGGSTLVNGGTWTRPHKAQVDSWETVFGNEGWNWDSVAAYSLQAERARAPNAKQIAAGHYFNASCHGINGTVHAGPRDTGDDYSPIVKALMSAVEDRGVPTKKDLGCGDPHGVSMFPNTLHEDQVRSDAAREWLLPNYQRPNLQVLTGRYVGKVLLSQNATTPRAVGVEFGTHKGNTHNVYAKHEVLLAAGSAVSPTILEYSGIGMKSILEPLGIDTVVDLPVGLNLQDQTTSTVRSRITSAGAGQGQAAWFATFNETFGDYAEKAHELLNTKLEQWAEEAVARGGFHNTTALLIQYENYRDWIVKDNVAYSELFLDTAGVAHFDVWDLLPFTRGYVHILDKDPYLRHFAYDPQYFLNELDLLGQAAATQLARNISNSGAMQTYFAGETIPGDNLAYDADLSAWVEYIPYNFRPNYHGVGTCSMMPKEMGGVVDNAARVYGVQGLRVIDGSIPPTQMSSHVMTVFYAMALKVADAILADY

SEQ ID NO: 1226 - protein, 597 aa, Aspergillus niger
LVSSLVVSLAAALPHYIRSNGIEASLLTDPKEVAGRTVDYIIAGGGLTGLTTAARLTENPDITVLVIESGSYESDRGPIIEDLNAYGDIFGSSVDHAYETVELATNNQTALIRSGNGLGGSTLVNGGTWTRPHKAQVDSWETVFGNEGWNWDSVAAYSLQAERARAPNAKQIAAGHYFNASCHGINGTVHAGPRDTGDDYSPIVKALMSAVEDRGVPTKKDLGCGDPHGVSMFPNTLHEDQVRSDAAREWLLPNYQRPNLQVLTGRYVGKVLLSQNATTPRAVGVEFGTHKGNTHNVYAKHEVLLAAGSAVSPTILEYSGIGMKSILEPLGIDTVVDLPVGLNLQDQTTSTVRSRITSAGAGQGQAAWFATFNETFGDYAEKAHELLNTKLEQWAEEAVARGGFHNTTALLIQYENYRDWIVKDNVAYSELFLDTAGVASFDVWDLLPFTRGYVHILDKDPYLRHFAYDPQYFLNELDLLGQAAATQLARNISNSGAMQTYFAGETIPGDNLAYDADLSAWVEYIPYNFRPNYHGVGTCSMMPKEMGGVVDNAARVYGVQGLRVIDGSIPPTQMSSHSMTVFYAMALKVADAILADY

SEQ ID NO: 1227 - protein, 597 aa, Aspergillus niger
LVSSLVVSLAAALPHYIRSNGIEASLLTDPKEVAGRTVDYIIAGGGLTGLTTAARLTENPDITVLVIESGSYESDRGPIIEDLNAYGDIFGSSVDHAYETVELATNNQTALIRSGNGLGGSTLVNGGTWTRPHKAQVDSWETVFGNEGWNWDSVAAYSLQAERARAPNAKQIAAGHYFNASCHGINGTVHAGPRDTGDDYSPIVKALMSAVEDRGVPTKKDLGCGDPHGVSMFPNTLHEDQVRSDAAREWLLPNYQRPNLQVLTGRYVGKVLLSQNATTPRAVGVEFGTHKGNTHNVYAKHEVLLAAGSAVSPTILEYSGIGMKSILEPLGIDTVVDLPVGLNLQDQTTSTVRSRITSAGAGQGQAAWFATFNETFGDYAEKAHELLNTKLEQWAEEAVARGGFHNTTALLIQYENYRDWIVKDNVAYSELFLDTAGVAVFDVWDLLPFTRGYVHILDKDPYLRHFAYDPQYFLNELDLLGQAAATQLARNISNSGAMQTYFAGETIPGDNLAYDADLSAWVEYIPYNFRPNYHGVGTCSMMPKEMGGVVDNAARVYGVQGLRVIDGSIPPTQMSSHVMTVFYAMALKVADAILADY

SEQ ID NO: 1228 - protein, 597 aa, Aspergillus niger
LVSSLVVSLAAALPHYIRSNGIEASLLTDPKEVAGRTVDYIIAGGGLTGLTTAARLTENPDITVLVIESGSYESDRGPIIEDLNAYGDIFGSSVDHAYETVELATNNQTALIRSGNGLGGSTLVNGGTWTRPHKAQVDSWETVFGNEGWNWDSVAAYSLQAERARAPNAKQIAAGHYFNASCHGINGTVHAGPRDTGDDYSPIVKALMSAVEDRGVPTKKDLGCGDPHGVSMFPNTLHEDQVRSDAAREWLLPNYQRPNLQVLTGRYVGKVLLSQNATTPRAVGVEFGTHKGNTHNVYAKHEVLLAAGSAVSPTILEYSGIGMKSILEPLGIDTVVDLPVGLNLQDQTTSTVRSRITSAGAGQGQAAWFATFNETFGDYAEKAHELLNTKLEQWAEEAVARGGFHNTTALLIQYENYRDWIVKDNVAYSELFLDTAGVASFDVWDLLPFTRGYVHILDKDPYLRHFAYDPQYFLNELDLLGQAAATQLARNISNSGAMQTYFAGETIPGDNLAYDADLSAWVEYIPYNFRPNYHGVGTCSMMPKEMGGVVDNAARVYGVQGLRVIDGSIPPTQMSSHAMTVFYAMALKVADAILADY

SEQ ID NO: 1229 - protein, 597 aa, Aspergillus niger
LVSSLVVSLAAALPHYIRSNGIEASLLTDPKEVAGRTVDYIIAGGGLTGLTTAARLTENPDITVLVIESGSYESDRGPIIEDLNAYGDIFGSSVDHAYETVELATNNQTALIRSGNGLGGSTLVNGGTWTRPHKAQVDSWETVFGNEGWNWDSVAAYSLQAERARAPNAKQIAAGHYFNASCHGINGTVHAGPRDTGDDYSPIVKALMSAVEDRGVPTKKDLGCGDPHGVSMFPNTLHEDQVRSDAAREWLLPNYQRPNLQVLTGRYVGKVLLSQNATTPRAVGVEFGTHKGNTHNVYAKHEVLLAAGSAVSPTILEYSGIGMKSILEPLGIDTVVDLPVGLNLQDQTTSTVRSRITSAGAGQGQAAWFATFNETFGDYAEKAHELLNTKLEQWAEEAVARGGFHNTTALLIQYENYRDWIVKDNVAYSELFLDTAGVAYFDVWDLLPFTRGYVHILDKDPYLRHFAYDPQYFLNELDLLGQAAATQLARNISNSGAMQTYFAGETIPGDNLAYDADLSAWVEYIPYNFRPNYHGVGTCSMMPKEMGGVVDNAARVYGVQGLRVIDGSIPPTQMSSHVMTVFYAMALKVADAILADY

SEQ ID NO: 1230 - protein, 597 aa, Aspergillus niger
LVSSLVVSLAAALPHYIRSNGIEASLLTDPKEVAGRTVDYIIAGGGLTGLTTAARLTENPDITVLVIESGSYESDRGPIIEDLNAYGDIFGSSVDHAYETVELATNNQTALIRSGNGLGGSTLVNGGTWTRPHKAQVDSWETVFGNEGWNWDSVAAYSLQAERARAPNAKQIAAGHYFNASCHGINGTVHAGPRDTGDDYSPIVKALMSAVEDRGVPTKKDLGCGDPHGVSMFPNTLHEDQVRSDAAREWLLPNYQRPNLQVLTGRYVGKVLLSQNATTPRAVGVEFGTHKGNTHNVYAKHEVLLAAGSAVSPTILEYSGIGMKSILEPLGIDTVVDLPVGLNLQDQTTSTVRSRITSAGAGQGQAAWFATFNETFGDYAEKAHELLNTKLEQWAEEAVARGGFHNTTALLIQYENYRDWIVKDNVAYSELFLDTAGVASFDVWDLLPFTRGYVHILDKDPYLRHFAYDPQYFLNELDLLGQAAATQLARNISNSGAMQTYFAGETIPGDNLAYDADLSAWVEYIPYNFRPNYHGVGTCSMMPKEMGGVVDNAARVYGVQGLRVIDGSIPPTQMSSHNMTVFYAMALKVADAILADY

SEQ ID NO: 1231 - protein, 597 aa, Aspergillus niger
LVSSLVVSLAAALPHYIRSNGIEASLLTDPKEVAGRTVDYIIAGGGLTGLTTAARLTENPDITVLVIESGSYESDRGPIIEDLNAYGDIFGSSVDHAYETVELATNNQTALIRSGNGLGGSTLVNGGTWTRPHKAQVDSWETVFGNEGWNWDSVAAYSLQAERARAPNAKQIAAGHYFNASCHGINGTVHAGPRDTGDDYSPIVKALMSAVEDRGVPTKKDLGCGDPHGVSMFPNTLHEDQVRSDAAREWLLPNYQRPNLQVLTGRYVGKVLLSQNATTPRAVGVEFGTHKGNTHNVYAKHEVLLAAGSAVSPTILEYSGIGMKSILEPLGIDTVVDLPVGLNLQDQTHSTVRSRITSAGAGQGQAAWFATFNETFGDYAEKAHELLNTKLEQWAEEAVARGGFHNTTALLIQYENYRDWIVKDNVAYSELFLDTAGVASFDVWDLLPFTRGYVHILDKDPYLRHFAYDPQYFLNELDLLGQAAATQLARNISNSGAMQTYFAGETIPGDNLAYDADLSAWVEYIPYNFRPNYHGVGTCSMMPKEMGGVVDNAARVYGVQGLRVIDGSIPPTQMSSHVMTVFYAMALKVADAILADY

SEQ ID NO: 1232 - protein, 597 aa, Aspergillus niger
LVSSLVVSLAAALPHYIRSNGIEASLLTDPKEVAGRTVDYIIAGGGLTGLTTAARLTENPDITVLVIESGSYESDRGPIIEDLNAYGDIFGSSVDHAYETVELATNNQTALIRSGNGLGGSTLVNGGTWTRPHKAQVDSWETVFGNEGWNWDSVAAYSLQAERARAPNAKQIAAGHYFNASCHGINGTVHAGPRDTGDDYSPIVKALMSAVEDRGVPTKKDLGCGDPHGVSMFPNTLHEDQVRSDAAREWLLPNYQRPNLQVLTGRYVGKVLLSQNATTPRAVGVEFGTHKGNTHNVYAKHEVLLAAGSAVSPTILEYSGIGMKSILEPLGIDTVVDLPVGLNLQDQTTSTVRSRITSAGAGQGQAAWFATFNETFGDYAEKAHELLNTKLEQWAEEAVARGGFHNTTALLIQYENYRDWIVKDNVAYSELFLDTAGVAGFDVWDLLPFTRGYVHILDKDPYLRHFAYDPQYFLNELDLLGQAAATQLARNISNSGAMQTYFAGETIPGDNLAYDADLSAWVEYIPYNFRPNYHGVGTCSMMPKEMGGVVDNAARVYGVQGLRVIDGSIPPTQMSSHVMTVFYAMALKVADAILADY

SEQ ID NO: 1233 - protein, 597 aa, Aspergillus niger
LVSSLVVSLAAALPHYIRSNGIEASLLTDPKEVAGRTVDYIIAGGGLTGLTTAARLTENPDITVLVIESGSYESDRGPIIEDLNAYGDIFGSSVDHAYETVELATNNQTALIRSGNGLGGSTLVNGGTWTRPHKAQVDSWETVFGNEGWNWDSVAAYSLQAERARAPNAKQIAAGHYFNASCHGINGTVHAGPRDTGDDYSPIVKALMSAVEDRGVPTKKDLGCGDPHGVSMFPNTLHEDQVRSDAAREWLLPNYQRPNLQVLTGRYVGKVLLSQNATTPRAVGVEFGTHKGNTHNVYAKHEVLLAAGSAVSPTILEYSGIGMKSILEPLGIDTVVDLPVGLNLQDQTTSTVRSRITSAGAGQGQAAWFATFNETFGDYAEKAHELLNTKLEQWAEEAVARGGFHNTTALLIQYENYRDWIVKDNVAYSELFLDTAGVATFDVWDLLPFTRGYVHILDKDPYLRHFAYDPQYFLNELDLLGQAAATQLARNISNSGAMQTYFAGETIPGDNLAYDADLSAWVEYIPYNFRPNYHGVGTCSMMPKEMGGVVDNAARVYGVQGLRVIDGSIPPTQMSSHVMTVFYAMALKVADAILADY

SEQ ID NO: 1234 - protein, 597 aa, Aspergillus niger
LVSSLVVSLAAALPHYIRSNGIEASLLTDPKEVAGRTVDYIIAGGGLTGLTTAARLTENPDITVLVIESGSYESDRGPIIEDLNAYGDIFGSSVDHAYETVELATNNQTALIRSGNGLGGSTLVNGGTWTRPHKAQVDSWETVFGNEGWNWDSVAAYSLQAERARAPNAKQIAAGHYFNASCHGINGTVHAGPRDTGDDYSPIVKALMSAVEDRGVPTKKDLGCGDPHGVSMFPNTLHEDQVRSDAAREWLLPNYQRPNLQVLTGRYVGKVLLSQNATTPRAVGVEFGTHKGNTHNVYAKHEVLLAAGSAVSPTILEYSGIGMKSILEPLGIDTVVDLPVGLNLQDQTTSTVRSRITSAGAGQGQAAWFATFNETFGDYAEKAHELLNTKLEQWAEEAVARGGFHNTTALLIQYENYRDWIVKDNVAYSELFLDTAGVASFDVWDLLPFTRGYVHILDKDPYLRHFAYDPQYFLNELDLLGQAAATQLARNISNSGAMQTYFAGETIPGDNLAYDADLSAWVEYIPYNFRPNYHGVGTCSMMPKEMGGVVDNAARVYGVQGLRVIDGSIPPTQMSSHEMTVFYAMALKVADAILADY

SEQ ID NO: 1235 - protein, 597 aa, Aspergillus niger
LVSSLVVSLAAALPHYIRSNGIEASLLTDPKEVAGRTVDYIIAGGGLTGLTTAARLTENPDITVLVIESGSYESDRGPIIEDLNAYGDIFGSSVDHAYETVELATNNQTALIRSGNGLGGSTLVNGGTWTRPHKAQVDSWETVFGNEGWNWDSVAAYSLQAERARAPNAKQIAAGHYFNASCHGINGTVHAGPRDTGDDYSPIVKALMSAVEDRGVPTKKDLGCGDPHGVSMFPNTLHEDQVRSDAAREWLLPNYQRPNLQVLTGRYVGKVLLSQNATTPRAVGVEFGTHKGNTHNVYAKHEVLLAAGSAVSPTILEYSGIGMKSILEPLGIDTVVDLPVGLNLQDQTTSTVRSRITSAGAGQGQAAWFATFNETFGDYAEKAHELLNTKLEQWAEEAVARGGFHNTTALLIQYENYRDWIVKDNVAYSELFLDTAGVANFDVWDLLPFTRGYVHILDKDPYLRHFAYDPQYFLNELDLLGQAAATQLARNISNSGAMQTYFAGETIPGDNLAYDADLSAWVEYIPYNFRPNYHGVGTCSMMPKEMGGVVDNAARVYGVQGLRVIDGSIPPTQMSSHVMTVFYAMALKVADAILADY

SEQ ID NO: 1236 - protein, 597 aa, Aspergillus niger
LVSSLVVSLAAALPHYIRSNGIEASLLTDPKEVAGRTVDYIIAGGGLTGLTTAARLTENPDITVLVIESGSYESDRGPIIEDLNAYGDIFGSSVDHAYETVELATNNQTALIRSGNGLGGSTLVNGGTWTRPHKAQVDSWETVFGNEGWNWDSVAAYSLQAERARAPNAKQIAAGHYFNASCHGINGTVHAGPRDTGDDYSPIVKALMSAVEDRGVPTKKDLGCGDPHGVSMFPNTLHEDQVRSDAAREWLLPNYQRPNLQVLTGRYVGKVLLSQNATTPRAVGVEFGTHKGNTHNVYAKHEVLLAAGSAVSPTILEYSGIGMKSILEPLGIDTVVDLPVGLNLQDQTTSTVRSRITSAGAGQGQAAWFATFNETFGDYAEKAHELLNTKLEQWAEEAVARGGFHNTTALLIQYENYRDWIVKDNVAYSELFLDTAGVAMFDVWDLLPFTRGYVHILDKDPYLRHFAYDPQYFLNELDLLGQAAATQLARNISNSGAMQTYFAGETIPGDNLAYDADLSAWVEYIPYNFRPNYHGVGTCSMMPKEMGGVVDNAARVYGVQGLRVIDGSIPPTQMSSHVMTVFYAMALKVADAILADY

SEQ ID NO: 1237 - protein, 597 aa, Aspergillus niger
LVSSLVVSLAAALPHYIRSNGIEASLLTDPKEVAGRTVDYIIAGGGLTGLTTAARLTENPDITVLVIESGSYESDRGPIIEDLNAYGDIFGSSVDHAYETVELATNNQTALIRSGNGLGGSTLVNGGTWTRPHKAQVDSWETVFGNEGWNWDSVAAYSLQAERARAPNAKQIAAGHYFNASCHGINGTVHAGPRDTGDDYSPIVKALMSAVEDRGVPTKKDLGCGDPHGVSMFPNTLHEDQVRSDAAREWLLPNYQRPNLQVLTGRYVGKVLLSQNATTPRAVGVEFGTHKGNTHNVYAKHEVLLAAGSAVSPTILEYSGIGMKSILEPLGIDTVVDLPVGLNLQDQTTSTVRSRITSAGAGQGQAAWFATFNETFGDYAEKAHELLNTKLEQWAEEAVARGGFHNTTALLIQYENYRDWIVKDNVAYSELFLDTAGVASFDVWDLLPFTRGYVHILDKDPYLRHFAYDPQYFLNELDLLGQAAATQLARNISNSGAMQTYFAGETIPGDNLAYDADLSAWVEYIPYNFRPNYHGVGTCSMMPKEMGGVVDNAARVYGVQGLRVIDGSIPPTQMSSHPMTVFYAMALKVADAILADY

SEQ ID NO: 1238 - protein, 597 aa, Aspergillus niger
LVSSLVVSLAAALPHYIRSNGIEASLLTDPKEVAGRTVDYIIAGGGLTGLTTAARLTENPDITVLVIESGSYESDRGPIIEDLNAYGDIFGSSVDHAYETVELATNNQTALIRSGNGLGGSTLVNGGTWTRPHKAQVDSWETVFGNEGWNWDSVAAYSLQAERARAPNAKQIAAGHYFNASCHGINGTVHAGPRDTGDDYSPIVKALMSAVEDRGVPTKKDLGCGDPHGVSMFPNTLHEDQVRSDAAREWLLPNYQRPNLQVLTGRYVGKVLLSQNATTPRAVGVEFGTHKGNTHNVYAKHEVLLAAGSAVSPTILEYSGIGMKSILEPLGIDTVVDLPVGLNLQDQTTSTVRSRITSAGAGQGQAAWFATFNETFGDYAEKAHELLNTKLEQWAEEAVARGGFHNTTALLIQYENYRDWIVKDNVAYSELFLDTAGVAWFDVWDLLPFTRGYVHILDKDPYLRHFAYDPQYFLNELDLLGQAAATQLARNISNSGAMQTYFAGETIPGDNLAYDADLSAWVEYIPYNFRPNYHGVGTCSMMPKEMGGVVDNAARVYGVQGLRVIDGSIPPTQMSSHVMTVFYAMALKVADAILADY

SEQ ID NO: 1239 - protein, 597 aa, Aspergillus niger
LVSSLVVSLAAALPHYIRSNGIEASLLTDPKEVAGRTVDYIIAGGGLTGLTTAARLTENPDITVLVIESGSYESDRGPIIEDLNAYGDIFGSSVDHAYETVELATNNQTALIRSGNGLGGSTLVNGGTWTRPHKAQVDSWETVFGNEGWNWDSVAAYSLQAERARAPNAKQIAAGHYFNASCHGINGTVHAGPRDTGDDYSPIVKALMSAVEDRGVPTKKDLGCGDPHGVSMFPNTLHEDQVRSDAAREWLLPNYQRPNLQVLTGRYVGKVLLSQNATTPRAVGVEFGTHKGNTHNVYAKHEVLLAAGSAVSPTILEYSGIGMKSILEPLGIDTVVDLPVGLNLQDQTTSTVRSRITSAGAGQGQAAWFATFNETFGDYAEKAHELLNTKLEQWAEEAVARGGFHNTTALLIQYENYRDWIVKDNVAYSELFLDTAGVASFDVWDLLPFTRGYVHILDKDPYLRHFAYDPQYFLNELDLLGQAAATQLARNISNSGAMQTYFAGETIPGDNLAYDADLSAWVEYIPYNFRPNYHGVGTCSMMPKEMGGVVDNAARVYGVQGLRVIDGSIPPTQMSSHIMTVFYAMALKVADAILADY

SEQ ID NO: 1240 - protein, 597 aa, Aspergillus niger
LVSSLVVSLAAALPHYIRSNGIEASLLTDPKEVAGRTVDYIIAGGGLTGLTTAARLTENPDITVLVIESGSYESDRGPIIEDLNAYGDIFGSSVDHAYETVELATNNQTALIRSGNGLGGSTLVNGGTWTRPHKAQVDSWETVFGNEGWNWDSVAAYSLQAERARAPNAKQIAAGHYFNASCHGINGTVHAGPRDTGDDYSPIVKALMSAVEDRGVPTKKDLGCGDPHGVSMFPNTLHEDQVRSDAAREWLLPNYQRPNLQVLTGRYVGKVLLSQNATTPRAVGVEFGTHKGNTHNVYAKHEVLLAAGSAVSPTILEYSGIGMKSILEPLGIDTVVDLPVGLNLQDQTTSTVRSRITSAGAGQGQAAWFATFNETFGDYAEKAHELLNTKLEQWAEEAVARGGFHNTTALLIQYENYRDWIVKDNVAYSELFLDTAGVAPFDVWDLLPFTRGYVHILDKDPYLRHFAYDPQYFLNELDLLGQAAATQLARNISNSGAMQTYFAGETIPGDNLAYDADLSAWVEYIPYNFRPNYHGVGTCSMMPKEMGGVVDNAARVYGVQGLRVIDGSIPPTQMSSHVMTVFYAMALKVADAILADY

SEQ ID NO: 1241 - protein, 597 aa, Aspergillus niger
LVSSLVVSLAAALPHYIRSNGIEASLLTDPKEVAGRTVDYIIAGGGLTGLTTAARLTENPDITVLVIESGSYESDRGPIIEDLNAYGDIFGSSVDHAYETVELATNNQTALIRSGNGLGGSTLVNGGTWTRPHKAQVDSWETVFGNEGWNWDSVAAYSLQAERARAPNAKQIAAGHYFNASCHGINGTVHAGPRDTGDDYSPIVKALMSAVEDRGVPTKKDLGCGDPHGVSMFPNTLHEDQVRSDAAREWLLPNYQRPNLQVLTGRYVGKVLLSQNATTPRAVGVEFGTHKGNTHNVYAKHEVLLAAGSAVSPTILEYSGIGMKSILEPLGIDTVVDLPVGLNLQDQTTSTVRSRITSAGAGQGQAAWFATFNETFGDYAEKAHELLNTKLEQWAEEAVARGGFHNTTALLIQYENYRDWIVKDNVAYSELFLDTAGVARFDVWDLLPFTRGYVHILDKDPYLRHFAYDPQYFLNELDLLGQAAATQLARNISNSGAMQTYFAGETIPGDNLAYDADLSAWVEYIPYNFRPNYHGVGTCSMMPKEMGGVVDNAARVYGVQGLRVIDGSIPPTQMSSHVMTVFYAMALKVADAILADY

SEQ ID NO: 1242 - protein, 597 aa, Aspergillus niger
LVSSLVVSLAAALPHYIRSNGIEASLLTDPKEVAGRTVDYIIAGGGLTGLTTAARLTENPDITVLVIESGSYESDRGPIIEDLNAYGDIFGSSVDHAYETVELATNNQTALIRSGNGLGGSTLVNGGTWTRPHKAQVDSWETVFGNEGWNWDSVAAYSLQAERARAPNAKQIAAGHYFNASCHGINGTVHAGPRDTGDDYSPIVKALMSAVEDRGVPTKKDLGCGDPHGVSMFPNTLHEDQVRSDAAREWLLPNYQRPNLQVLTGRYVGKVLLSQNATTPRAVGVEFGTHKGNTHNVYAKHEVLLAAGSAVSPTILEYSGIGMKSILEPLGIDTVVDLPVGLNLQDQATSTVRSRITSAGAGQGQAAWFATFNETFGDYAEKAHELLNTKLEQWAEEAVARGGFHNTTALLIQYENYRDWIVKDNVAYSELFLDTAGVASFDVWDLLPFTRGYVHILDKDPYLRHFAYDPQYFLNELDLLGQAAATQLARNISNSGAMQTYFAGETIPGDNLAYDADLSAWVEYIPYNFRPNYHGVGTCSMMPKEMGGVVDNAARVYGVQGLRVIDGSIPPTQMSSHVMTVFYAMALKVADAILADY

SEQ ID NO: 1243 - protein, 597 aa, Aspergillus niger
LVSSLVVSLAAALPHYIRSNGIEASLLTDPKEVAGRTVDYIIAGGGLTGLTTAARLTENPDITVLVIESGSYESDRGPIIEDLNAYGDIFGSSVDHAYETVELATNNQTALIRSGNGLGGSTLVNGGTWTRPHKAQVDSWETVFGNEGWNWDSVAAYSLQAERARAPNAKQIAAGHYFNASCHGINGTVHAGPRDTGDDYSPIVKALMSAVEDRGVPTKKDLGCGDPHGVSMFPNTLHEDQVRSDAAREWLLPNYQRPNLQVLTGRYVGKVLLSQNATTPRAVGVEFGTHKGNTHNVYAKHEVLLAAGSAVSPTILEYSGIGMKSILEPLGIDTVVDLPVGLNLQDQTTSTVRSRITSAGAGQGQAAWFATFNETFGDYAEKAHELLNTKLEQWAEEAVARGGFHNTTALLIQYENYRDWIVKDNVAYSELFLDTAGVAFFDVWDLLPFTRGYVHILDKDPYLRHFAYDPQYFLNELDLLGQAAATQLARNISNSGAMQTYFAGETIPGDNLAYDADLSAWVEYIPYNFRPNYHGVGTCSMMPKEMGGVVDNAARVYGVQGLRVIDGSIPPTQMSSHVMTVFYAMALKVADAILADY

SEQ ID NO: 1244 - protein, 597 aa, Aspergillus niger
LVSSLVVSLAAALPHYIRSNGIEASLLTDPKEVAGRTVDYIIAGGGLTGLTTAARLTENPDITVLVIESGSYESDRGPIIEDLNAYGDIFGSSVDHAYETVELATNNQTALIRSGNGLGGSTLVNGGTWTRPHKAQVDSWETVFGNEGWNWDSVAAYSLQAERARAPNAKQIAAGHYFNASCHGINGTVHAGPRDTGDDYSPIVKALMSAVEDRGVPTKKDLGCGDPHGVSMFPNTLHEDQVRSDAAREWLLPNYQRPNLQVLTGRYVGKVLLSQNATTPRAVGVEFGTHKGNTHNVYAKHEVLLAAGSAVSPTILEYSGIGMKSILEPLGIDTVVDLPVGLNLQDQTTSTVRSRITSAGAGQGQAAWFATFNETFGDYAEKAHELLNTKLEQWAEEAVARGGFHNTTALLIQYENYRDWIVKDNVAYSELFLDTAGVASFDVWDLLPFTRGYVHILDKDPYLRHFAYDPQYFLNELDLLGQAAATQLARNISNSGAMQTYFAGETIPGDNLAYDADLSAWVEYIPYNFRPNYHGVGTCSMMPKEMGGVVDNAARVYGVQGLRVIDGSIPPTQMSSHWMTVFYAMALKVADAILADY

SEQ ID NO: 1245 - protein, 597 aa, Aspergillus niger
LVSSLVVSLAAALPHYIRSNGIEASLLTDPKEVAGRTVDYIIAGGGLTGLTTAARLTENPDITVLVIESGSYESDRGPIIEDLNAYGDIFGSSVDHAYETVELATNNQTALIRSGNGLGGSTLVNGGTWTRPHKAQVDSWETVFGNEGWNWDSVAAYSLQAERARAPNAKQIAAGHYFNASCHGINGTVHAGPRDTGDDYSPIVKALMSAVEDRGVPTKKDLGCGDPHGVSMFPNTLHEDQVRSDAAREWLLPNYQRPNLQVLTGRYVGKVLLSQNATTPRAVGVEFGTHKGNTHNVYAKHEVLLAAGSAVSPTILEYSGIGMKSILEPLGIDTVVDLPVGLNLQDQTTSTVRSRITSAGAGQGQAAWFATFNETFGDYAEKAHELLNTKLEQWAEEAVARGGFHNTTALLIQYENYRDWIVKDNVAYSELFLDTAGVASFDVWDLLPFTRGYVHILDKDPYLRHFAYDPQYFLNELDLLGQAAATQLARNISNSGAMQTYFAGETIPGDNLAYDADLSAWVEYIPYNFRPNYHGVGTCSMMPKEMGGVVDNAARVYGVQGLRVIDGSIPPTQMSSHTMTVFYAMALKVADAILADY

SEQ ID NO: 1246 - protein, 597 aa, Aspergillus niger
LVSSLVVSLAAALPHYIRSNGIEASLLTDPKEVAGRTVDYIIAGGGLTGLTTAARLTENPDITVLVIESGSYESDRGPIIEDLNAYGDIFGSSVDHAYETVELATNNQTALIRSGNGLGGSTLVNGGTWTRPHKAQVDSWETVFGNEGWNWDSVAAYSLQAERARAPNAKQIAAGHYFNASCHGINGTVHAGPRDTGDDYSPIVKALMSAVEDRGVPTKKDLGCGDPHGVSMFPNTLHEDQVRSDAAREWLLPNYQRPNLQVLTGRYVGKVLLSQNATTPRAVGVEFGTHKGNTHNVYAKHEVLLAAGSAVSPTILEYSGIGMKSILEPLGIDTVVDLPVGLNLQDQTTSTVRSRITSAGAGQGQAAWFATFNETFGDYAEKAHELLNTKLEQWAEEAVARGGFHNTTALLIQYENYRDWIVKDNVAYSELFLDTAGVAKFDVWDLLPFTRGYVHILDKDPYLRHFAYDPQYFLNELDLLGQAAATQLARNISNSGAMQTYFAGETIPGDNLAYDADLSAWVEYIPYNFRPNYHGVGTCSMMPKEMGGVVDNAARVYGVQGLRVIDGSIPPTQMSSHVMTVFYAMALKVADAILADY

SEQ ID NO: 1247 - protein, 597 aa, Aspergillus niger
LVSSLVVSLAAALPHYIRSNGIEASLLTDPKEVAGRTVDYIIAGGGLTGLTTAARLTENPDITVLVIESGSYESDRGPIIEDLNAYGDIFGSSVDHAYETVELATNNQTALIRSGNGLGGSTLVNGGTWTRPHKAQVDSWETVFGNEGWNWDSVAAYSLQAERARAPNAKQIAAGHYFNASCHGINGTVHAGPRDTGDDYSPIVKALMSAVEDRGVPTKKDLGCGDPHGVSMFPNTLHEDQVRSDAAREWLLPNYQRPNLQVLTGRYVGKVLLSQNATTPRAVGVEFGTHKGNTHNVYAKHEVLLAAGSAVSPTILEYSGIGMKSILEPLGIDTVVDLPVGLNLQDQTTSTVRSRITSAGAGQGQAAWFATFNETFGDYAEKAHELLNTKLEQWAEEAVARGGFHNTTALLIQYENYRDWIVKDNVAYSELFLDTAGVASFDVWDLLPFTRGYVHILDKDPYLRHFAYDPQYFLNELDLLGQAAATQLARNISNSGAMQTYFAGETIPGDNLAYDADLSAWVEYIPYNFRPNYHGVGTCSMMPKEMGGVVDNAARVYGVQGLRVIDGSIPPTQMSSHCMTVFYAMALKVADAILADY

SEQ ID NO: 1248 - protein, 576 aa, Synthetic construct
IEASLLTDPKEVAGRTVDYIIAGGGLTGLVVAARLTENPDITVLVIESGSYESDRGPIIEDLNAYGKIFGSSVDHAYETVCLATNNRTALIRAGNGLGGSTLVNGGTWTRPHKAQVDSWETVFGNEGWNWDSVAAYSLQAERARAPNAKQIAAGHYFNASCHGINGTVHAGPRDTGDDYSPIVKALMSAVEDRGVPTKKDLGCGDPHGVSMFPNTLHEDQVRSDAAREWLLPNYQRPNLQVLTGQYVGKVLLSQNATTPRAVGVEFGTHKGNFHNVTAKHEVLLAAGSAVSPTILEYSGIGMKSILEPLGIKTVVDLPVGLNLQDQTTSTVRSRITPAGAGQGQAAWFATFNETFGDYTPKAHELLNTKLEQWAEEAVARGGFHNTTALLIQYENYRDWIVKDNVAYSELFLDTAGEASFDVWDLLPFTRGYVHILDKDPYLRHFAYDPQYFLNELDLLGQAAATQLARNISNSGAMQTYFAGETIPGDNLAYDADLRAWVEYIPYHFRPNYHGVGTCSMMPKEMGGVVDNAARVYGVQGLRVIDGSIPPTQMSSHVMTVFYAMALKIADAVLADY

SEQ ID NO: 1249 - protein, 576 aa, Synthetic construct
IEDSLLTDPKEVAGRTVDYIIAGGGLTGLVVAARLTENPDITVLVIESGSYESDRGPIIEDLNAYGKIFGSSVDHAYETVCLATNNRTALIRAGNGLGGSTLVNGGTWTRPHKAQVDSWETVFGNEGWNWDSVAAYSLQAERARAPNAKQIAAGHYFNASCHGINGTVHAGPRDTGDDYSPIVKALMSAVENRGVPTKKDLGCGDPHGVSMFPNTLHEDQVRSDAAREWLLPNYQRPNLSVLTGQYVGKVLLSQNATTPRAVGVEFGTHKGNFHNVTAKHEVLLAAGSAVSPTILEYSGIGMKSILEPLGIKTVVDLPVGLNLQDQTTSTVRSRITSAGAGQGQAAWFATFNETFGDYTPKAHELLNTKLEQWAEEAVARGGFHNTTALLIQYENYRDWIVKDNVAYSELFLDTAGEISFDVWDLLPFTRGYVHILDKDPYLRHFAYDPQYFLNELDLLGQAAATQLAREISNSGAMQTYFAGETIPGDNLAYDANLRAWVEYIPYHFRPNYHGVGTCSMMPKEMGGVVDNAARVYGVQGLRVIDGSIPPTQMSSHVMTVFYAMALKIADAVLADY

SEQ ID NO: 1250 - protein, 576 aa, Synthetic construct
IEASLLTDPKEVAGRTVDYIIAGGGLTGLVVAARLTENPDITVLVIESGSYESDRGPIIEDLNAYGKIFGSSVDHAYETVCLATNNRTALIRAGNGLGGSTLVNGGTWTRPHKAQVDSWETVFGNEGWNWDSVAAYSLQAERARAPNAKQIAAGHYFNASCHGINGTVHAGPRDTGDDYSPIVKALMSAVEDRGVPTKKDLGCGDPHGVSMFPNTLHEDQVRSDAAREWLLPNYQRPNLSVLTGQYVGKVLLSQNATTPRAVGVEFGTHKGNFHNVTAKHEVLLAAGSAVSPTILEYSGIGMKSILEPLGIKTVVDLPVGLNLQDQTTSTVRSRITPAGAGQGQAAWFATFNETFGDYTPKAHELLNTKLEQWAEEAVARGGFHNTTALLIQYENYRDWIVKDNVAYSELFLDTAGEISFDVWDLLPFTRGYVHILDKDPYLRHFAYDPQYFLNELDLLGQAAATQLARNISNSGAMQTYFAGETIPGDNLAYDADLRAWVEYIPYHFRPNYHGVGTCSMMPKEMGGVVDNAARVYGVQGLRVIDGSIPPTQMSSHVMTVFYAMALKIADAVLADY

SEQ ID NO: 1251 - protein, 576 aa, Synthetic construct
IEASLLTDPKEVAGRTVDYIIAGGGLTGLVVAARLTENPDITVLVIESGSYESDRGPIIEDLNAYGKIFGSSVDHAYETVCLATNNRTALIRAGNGLGGSTLVNGGTWTRPHKAQVDSWETVFGNEGWNWDSVAAYSLQAERARAPNAKQIAAGHYFNASCHGINGTVHAGPRDTGDDYSPIVKALMSAVEDRGVPTKKDLGCGDPHGVSMFPNTLHEDQVRSDAAREWLLPNYQRPNLQVLTGQYVGKVLLSQNATTPRAVGVEFGTHKGNFHNVTAKHEVLLAAGSAVSPTILEYSGIGMKSILEPLGIKTVVDLPVGLNLQDQTTSTVRSRITPAGAGQGQAAWFATFNETFGDYTPKAHELLNTKLEQWAEEAVARGGFHNTTALLIQYENYRDWIVKDNVAYSELFLDTAGEISFDVWDLLPFTRGYVHILDKDPYLRHFAYDPQYFLNELDLLGQAAATQLARNISNSGAMQTYFAGETIPGDNLAYDADLRAWVEYIPYHFRPNYHGVGTCSMMPKEMGGVVDNAARVYGVQGLRVIDGSIPPTQMSSHVMTVFYAMALKIADAVLADY

SEQ ID NO: 1252 - protein, 576 aa, Synthetic construct
IEASLLTDPKEVAGRTVDYIIAGGGLTGLVVAARLTENPDITVLVIESGSYESDRGPIIEDLNAYGKIFGSSVDHAYETVCLATNNRTALIRAGNGLGGSTLVNGGTWTRPHKAQVDSWETVFGNEGWNWDSVAAYSLQAERARAPNAKQIAAGHYFNASCHGINGTVHAGPRDTGDDYSPIVKALMSAVEDRGVPTKKDLGCGDPHGVSMFPNTLHEDQVRSDAAREWLLPNYQRPNLSVLTGQYVGKVLLSQNATTPRAVGVEFGTHKGNFHNVTAKHEVLLAAGSAVSPTILEYSGIGMKSILEPLGIKTVVDLPVGLNLQDQTTSTVRSRITPAGAGQGQAAWFATFNETFGDYTPKAHELLNTKLEQWAEEAVARGGFHNTTALLIQYENYRDWIVKDNVAYSELFLDTAGEASFDVWDLLPFTRGYVHILDKDPYLRHFAYDPQYFLNELDLLGQAAATQLARNISNSGAMQTYFAGETIPGDNLAYDADLRAWVEYIPYHFRPNYHGVGTCSMMPKEMGGVVDNAARVYGVQGLRVIDGSIPPTQMSSHVMTVFYAMALKIADAVLADY

SEQ ID NO: 1253 - protein, 576 aa, Synthetic construct
IEDSLLTDPKEVAGRTVDYIIAGGGLTGLVVAARLTENPDITVLVIESGSYESDRGPIIEDLNAYGKIFGSSVDHAYETVCLATNNRTALIRAGNGLGGSTLVNGGTWTRPHKAQVDSWETVFGNEGWNWDSVAAYSLQAERARAPNAKQIAAGHYFNASCHGINGTVHAGPRDTGDDYSPIVKALMSAVEDRGVPTKKDLGCGDPHGVSMFPNTLHEDQVRSDAAREWLLPNYQRPNLSVLTGQYVGKVLLSQNATTPRAVGVEFGTHKGNFHNVTAKHEVLLAAGSAVSPTILEYSGIGMKSILEPLGIKTVVDLPVGLNLQDQTTSTVRSRITSAGAGQGQAAWFATFNETFGDYTPKAHELLNTKLEQWAEEAVARGGFHNTTALLIQYENYRDWIVKDNVAYSELFLDTAGEISFDVWDLLPFTRGYVHILDKDPYLRHFAYDPQYFLNELDLLGQAAATQLAREISNSGAMQTYFAGETIPGDNLAYDADLRAWVEYIPYHFRPNYHGVGTCSMMPKEMGGVVDNAARVYGVQGLRVIDGSIPPTQMSSHVMTVFYAMALKIADAVLADY

SEQ ID NO: 1254 - protein, 576 aa, Synthetic construct
IEDSLLTDPKEVAGRTVDYIIAGGGLTGLVVAARLTENPDITVLVIESGSYESDRGPIIEDLNAYGKIFGSSVDHAYETVCLATNNRTALIRAGNGLGGSTLVNGGTWTRPHKAQVDSWETVFGNEGWNWDSVAAYSLQAERARAPNAKQIAAGHYFNASCHGINGTVHAGPRDTGDDYSPIVKALMSAVEDRGVPTKKDLGCGDPHGVSMFPNTLHEDQVRSDAAREWLLPNYQRPNLQVLTGQYVGKVLLSQNATTPRAVGVEFGTHKGNFHNVTAKHEVLLAAGSAVSPTILEYSGIGMKSILEPLGIKTVVDLPVGLNLQDQTTSTVRSRITSAGAGQGQAAWFATFNETFGDYTPKAHELLNTKLEQWAEEAVARGGFHNTTALLIQYENYRDWIVKDNVAYSELFLDTAGEISFDVWDLLPFTRGYVHILDKDPYLRHFAYDPQYFLNELDLLGQAAATQLAREISNSGAMQTYFAGETIPGDNLAYDADLRAWVEYIPYHFRPNYHGVGTCSMMPKEMGGVVDNAARVYGVQGLRVIDGSIPPTQMSSHVMTVFYAMALKIADAVLADY

SEQ ID NO: 1255 - protein, 585 aa, Aspergillus niger
LPHYIRSNGIEASLLTDPKDVSGRTVDYIIAGGGLTGLTTAARLTENPNISVLVIESGSYESDRGPIIEQLNAYGDIFGSSVDHAYETVELATNNQTALIRSGNGLGGSTLVNGGTWTRPHNAQVDSWETVFGNEGWNWDNVAAYSLQAERARAPNAKQIAAGHYFNASCHGTNGTVHAGPRDTGDDYSPIVKALMSAVEDRGVPTKKDFGCGDPHGVSMFPNTLHEDQVRSDAAREWLLPNYQRPNLQVLTGQYVGKVLLSQNGTTPRAVGVEFGTHKGNTHNVYAEHEVLLAAGSAVSPTILEYSGIGMKSILEPLGIDTVVDLPVGLNLQDQTTATVRSRITSAGAGQGQAAWFATFNETFGDYSEKAHELLNTKLEQWAEEAVARGGFHNTTALLIQYENYRDWIVNHNVAYSELFLDTAGVASFDVWDLLPFTRGYVHILDKDPYLHHFAYDPQYFLNELDLLGQAAATQLARNISNSGAMQTYFAEETIPGDNLAYDADLSAWTEYIPYHFRPNYHGVGTCSMMPKEMGGVVDNAARVYGVQGLRVIDGSIPPTQMSSHVMTVFYAMALKISDAILEDY

SEQ ID NO: 1256 - protein, 577 aa, Synthetic construct
GIEASLLTDPKEVAGRTVDYIIAGGGLTGLVVAARLTENPDITVLVIESGSYESDRGPIIEDLNAYGKIFGSSVDHAYETVCLATNNRTALIRAGNGLGGSTLVNGGTWTRPHKAQVDSWETVFGNEGWNWDSVAAYSLQAERARAPNAKQIAAGHYFNASCHGINGTVHAGPRDTGDDYSPIVKALMSAVEDRGVPTKKDLGCGDPHGVSMFPNTLHPDQVRSDAAREWLLPNYQRPNLQVLTGQYVGKVLLSQNATTPRAVGVEFGTHKGNFHNVTAKHEVLLAAGSAVSPTILEYSGIGMKSILEPLGIKTVVDLPVGLNLQDQTTSTVRSRITSAGAGQGQAAWFATFNETFGDYTEKAHELLNTKLEQWAEEAVARGGFHNTTALLIQYENYRDWIVKDNVAYSELFLDTAGEASFDVWDLLPFTRGYVHILDKDPYLRHFAYDPQYFLNELDLLGQAAATQLARNISNSGAMQTYFAGETIPGDNLAYDADLRAWVEYIPYHFRPNYHGVGTCSMMPKEMGGVVDNAARVYGVQGLRVIDGSIPPTQMSSHVMTVFYAMALKIADAVLADY

SEQ ID NO: 1257 - protein, 577 aa, Synthetic construct
GIEASLLTDPKEVAGRTVDYIIAGGGLTGLVVAARLTENPDITVLVIESGSYESDRGPIIEDLNAYGKIFGSSVDHAYETVCLATNNRTALIRAGNGLGGSTLVNGGTWTRPHKAQVDSWETVFGNEGWNWDSVAAYSLQAERARAPNAKQIAAGHYFNASCHGINGTVHAGPRDTGDDYSPIVKALMSAVEDRGVPTKKDLGCGDPHGVSMFPNTLHEDQVRSDAAREWLLPNYQRPNLQVLTGQYVGKVLLSQNATTPRAVGVEFGTHKGNFHNVTAKHEVLLAAGSAVSPTILEYSGIGMKSILEPLGIKTVVDLPVGLNLQDQTTSTVRSRITPAGAGQGQAAWFATFNETFGDYTEKAHELLNTKLEQWAEEAVARGGFHNTTALLIQYENYRDWIVKDNVAYSELFLDTAGEASFDVWDLLPFTRGYVHILDKDPYLRHFAYDPQYFLNELDLLGQAAATQLARNISNSGAMQTYFAGETIPGDNLAYDADLRAWVEYIPYHFRPNYHGVGTCSMMPKEMGGVVDNAARVYGVQGLRVIDGSIPPTQMSSHVMTVFYAMALKIADAVLADY

SEQ ID NO: 1258 - protein, 577 aa, Synthetic construct
GIEASLLTDPKEVAGRTVDYIIAGGGLTGLVVAARLTENPDITVLVIESGSYESDRGPIIEDLNAYGKIFGSSVDHAYETVCLATNNRTALIRAGNGLGGSTLVNGGTWTRPHKAQVDSWETVFGNEGWNWDSVAAYSLQAERARAPNAKQIAAGHYFNASCHGINGTVHAGPRDTGDDYSPIVKALMSAVEDRGVPTKKDLGCGDPHGVSMFPNTLHPDQVRSDAAREWLLPNYQRPNLSVLTGQYVGKVLLSQNATTPRAVGVEFGTHKGNFHNVTAKHEVLLAAGSAVSPTILEYSGIGMKSILEPLGIKTVVDLPVGLNLQDQTTSTVRSRITSAGAGQGQAAWFATFNETFGDYTPKAHELLNTKLEQWAEEAVARGGFHNTTALLIQYENYRDWIVKDNVAYSELFLDTAGEASFDVWDLLPFTRGYVHILDKDPYLRHFAYDPQYFLNELDLLGQAAATQLARNISNSGAMQTYFAGETIPGDNLAYDADLRAWVEYIPYHFRPNYHGVGTCSMMPKEMGGVVDNAARVYGVQGLRVIDGSIPPTQMSSHVMTVFYAMALKIADAVLADY

SEQ ID NO: 1259 - protein, 577 aa, Synthetic construct
GIEASLLTDPKEVAGRTVDYIIAGGGLTGLVVAARLTENPDITVLVIESGSYESDRGPIIEDLNAYGKIFGSSVDHAYETVCLATNNRTALIRAGNGLGGSTLVNGGTWTRPHKAQVDSWETVFGNEGWNWDSVAAYSLQAERARAPNAKQIAAGHYFNASCHGINGTVHAGPRDTGDDYSPIVKALMSAVEDRGVPTKKDLGCGDPHGVSMFPNTLHEDQVRSDAAREWLLPNYQRPNLQVLTGQYVGKVLLSQNATTPRAVGVEFGTHKGNFHNVTAKHEVLLAAGSAVSPTILEYSGIGMKSILEPLGIKTVVDLPVGLNLQDQTTSTVRSRITSAGAGQGQAAWFATFNETFGDYTPKAHELLNTKLEQWAEEAVARGGFHNTTALLIQYENYRDWIVKDNVAYSELFLDTAGEASFDVWDLLPFTRGYVHILDKDPYLRHFAYDPQYFLNELDLLGQAAATQLARNISNSGAMQTYFAGETIPGDNLAYDADLRAWVEYIPYHFRPNYHGVGTCSMMPKEMGGVVDNAARVYGVQGLRVIDGSIPPTQMSSHVMTVFYAMALKIADAVLADY

SEQ ID NO: 1260 - protein, 577 aa, Synthetic construct
GIEASLLTDPKEVAGRTVDYIIAGGGLTGLVVAARLTENPDITVLVIESGSYESDRGPIIEDLNAYGKIFGSSVDHAYETVCLATNNRTALIRAGNGLGGSTLVNGGTWTRPHKAQVDSWETVFGNEGWNWDSVAAYSLQAERARAPNAKQIAAGHYFNASCHGINGTVHAGPRDTGDDYSPIVKALMSAVEDRGVPTKKDLCCGDPHGVSMFPNTLHEDQVRSDAAREWLLPNYQRPNLQVLTGQYVGKVLLSQNATTPRAVGVEFGTHKGNFHNVTAKHEVLLAAGSAVSPTILEYSGIGMKSILEPLGIKTVVDLPVGLNLQDQTTSTVRSRITSAGAGQGQAAWFATFNETFGDYTEKAHELLNTKLEQWAEEAVARGGFHNTTALLIQYENYRDWIVKDNVAYSELFLDTAGEASFDVWDLLPFTRGYVHILDKDPYLRHFAYDPQYFLNELDLLGQAAATQLARNISNSGAMQTYFAGETIPGDNLAYDADLRAWVEYIPYHFRPNYHGVGTCSMMPKEMGGVVDNAARVYGVQGLRVIDGSIPPTQMSSHVMTVFYAMALKIADAVLADY

SEQ ID NO: 1261 - protein, 577 aa, Synthetic construct
GIEASLLTDPKEVAGRTVDYIIAGGGLTGLVVAARLTENPDITVLVIESGSYESDRGPIIEDLNAYGKIFGSSVDHAYETVCLATNNRTALIRAGNGLGGSTLVNGGTWTRPHKAQVDSWETVFGNEGWNWDSVAAYSLQAERARAPNAKQIAAGHYFNASCHGINGTVHAGPRDTGDDYSPIVKALMSAVENRGVPTKKDLGCGDPHGVSMFPNTLHEDQVRSDAAREWLLPNYQRPNLSVLTGQYVGKVLLSQNATTPRAVGVEFGTHKGNFHNVTAKHEVLLAAGSAVSPTILEYSGIGMKSILEPLGIKTVVDLPVGLNLQDQTTSTVRSRITSAGAGQGQAAWFATFNETFGDYTPKAHELLNTKLEQWAEEAVARGGFHNTTALLIQYENYRDWIVKDNVAYSELFLDTAGEISFDVWDLLPFTRGYVHILDKDPYLRHFAYDPQYFLNELDLLGQAAATQLARNISNSGAMQTYFAGETIPGDNLAYDANLRAWVEYIPYHFRPNYHGVGTCSMMPKEMGGVVDNAARVYGVQGLRVIDGSIPPTQMSSHVMTVFYAMALKIADAVLADY

SEQ ID NO: 1262 - protein, 577 aa, Synthetic construct
GIEASLLTDPKEVAGRTVDYIIAGGGLTGLVVAARLTENPDITVLVIESGSYESDRGPIIEDLNAYGKIFGSSVDHAYETVCLATNNRTALIRAGNGLGGSTLVNGGTWTRPHKAQVDSWETVFGNEGWNWDSVAAYSLQAERARAPNAKQIAAGHYFNASCHGINGTVHAGPRDTGDDYSPIVKALMSAVEDRGVPTKKDLCCGDPHGVSMFPNTLHEDQVRSDAAREWLLPNYQRPNLSVLTGQYVGKVLLSQNATTPRAVGVEFGTHKGNFHNVTAKHEVLLAAGSAVSPTILEYSGIGMKSILEPLGIKTVVDLPVGLNLQDQTTSTVRSRITSAGAGQGQAAWFATFNETFGDYTPKAHELLNTKLEQWAEEAVARGGFHNTTALLIQYENYRDWIVKDNVAYSELFLDTAGEASFDVWDLLPFTRGYVHILDKDPYLRHFAYDPQYFLNELDLLGQAAATQLARNISNSGAMQTYFAGETIPGDNLAYDADLRAWVEYIPYHFRPNYHGVGTCSMMPKEMGGVVDNAARVYGVQGLRVIDGSIPPTQMSSHVMTVFYAMALKIADAVLADY

SEQ ID NO: 1263 - protein, 577 aa, Synthetic construct
GIEASLLTDPKEVAGRTVDYIIAGGGLTGLVVAARLTENPDITVLVIESGSYESDRGPIIEDLNAYGKIFGSSVDHAYETVCLATNNRTALIRAGNGLGGSTLVNGGTWTRPHKAQVDSWETVFGNEGWNWDSVAAYSLQAERARAPNAKQIAAGHYFNASCHGINGTVHAGPRDTGDDYSPIVKALMSAVEDRGVPTKKDLGCGDPHGVSMFPNTLHEDQVRSDAAREWLLPNYQRPNLSVLTGQYVGKVLLSQNATTPRAVGVEFGTHKGNFHNVTAKHEVLLAAGSAVSPTILEYSGIGMKSILEPLGIKTVVDLPVGLNLQDQTTSTVRSRITPAGAGQGQAAWFATFNETFGDYTPKAHELLNTKLEQWAEEAVARGGFHNTTALLIQYENYRDWIVKDNVAYSELFLDTAGEASFDVWDLLPFTRGYVHILDKDPYLRHFAYDPQYFLNELDLLGQAAATQLARNISNSGAMQTYFAGETIPGDNLAYDADLRAWVEYIPYHFRPNYHGVGTCSMMPKEMGGVVDNAARVYGVQGLRVIDGSIPPTQMSSHVMTVFYAMALKIADAVLADY

SEQ ID NO: 1264 - protein, 577 aa, Synthetic construct
GIEASLLTDPKEVAGRTVDYIIAGGGLTGLVVAARLTENPDITVLVIESGSYESDRGPIIEDLNAYGKIFGSSVDHAYETVCLATNNRTALIRAGNGLGGSTLVNGGTWTRPHKAQVDSWETVFGNEGWNWDSVAAYSLQAERARAPNAKQIAAGHYFNASCHGINGTVHAGPRDTGDDYSPIVKALMSAVEDRGVPTKKDLGCGDPHGVSMFPNTLHEDQVRSDAAREWLLPNYQRPNLSVLTGQYVGKVLLSQNATTPRAVGVEFGTHKGNFHNVTAKHEVLLAAGSAVSPTILEYSGIGMKSILEPLGIKTVVDLPVGLNLQDQTTSTVRSRITSAGAGQGQAAWFATFNETFGDYTPKAHELLNTKLEQWAEEAVARGGFHNTTALLIQYENYRDWIVKDNVAYSELFLDTAGEISFDVWDLLPFTRGYVHILDKDPYLRHFAYDPQYFLNELDLLGQAAATQLARNISNSGAMQTYFAGETIPGDNLAYDADLRAWVEYIPYHFRPNYHGVGTCSMMPKEMGGVVDNAARVYGVQGLRVIDGSIPPTQMSSHVMTVFYAMALKIADAVLADY

SEQ ID NO: 1265 - protein, 577 aa, Aspergillus niger
GIEASLLTDPKEVAGRTVDYIIAGGGLTGLVVAARLTENPDITVLVIESGSYESDRGPIIEDLNAYGKIFGSSVDHAYETVCLATNNRTALIRAGNGLGGSTLVNGGTWTRPHKAQVDSWETVFGNEGWNWDSVAAYSLQAERARAPNAKQIAAGHYFNASCHGINGTVHAGPRDTGDDYSPIVKALMSAVEDRGVPTKKDLGCGDPHGVSMFPNTLHEDQVRSDAAREWLLPNYQRPNLQVLTGQYVGKVLLSQNATTPRAVGVEFGTHKGNFHNVTAKHEVLLAAGSAVSPTILEYSGIGMKSILEPLGIKTVVDLPVGLNLQDQTTSTVRSRITSAGAGQGQAAWFATFNETFGDYTEQAHELLNTKLEQWAEEAVARGGFHNTTALLIQYENYRDWIVKDNVAYSELFLDTAGEASFDVWDLLPFTRGYVHILDKDPYLRHFAYDPQYFLNELDLLGQAAATQLARNISNSGAMQTYFAGETIPGDNLAYDADLRAWVEYIPYHFRPNYHGVGTCSMMPKEMGGVVDNAARVYGVQGLRVIDGSIPPTQMSSHVMTVFYAMALKIADAVLADY

SEQ ID NO: 1266 - protein, 577 aa, Aspergillus niger
GIEASLLTDPKEVAGRTVDYIIAGGGLTGLTTAARLTENPDITVLVIESGSYESDRGPIIEDLNAYGDIFGSSVDHAYETVELATNNQTALIRSGNGLGGSTLVNGGTWTRPHKAQVDSWETVFGNEGWNWDSVAAYSLQAERARAPNAKQIAAGHYFDASCHGINGTVHAGPRDTGDDYSPIVKALMSAVEDRGVPTKKDLGCGDPHGVSMFPNTLHEDQVRSDAAREWLLPNYQRPNLQVLTGQYVGKVLLSQNATTPRAVGVEFGTHKGNTHNVYAKHEVLLAAGSAVSPTILEYSGIGMKSILEPLGIDTVVDLPVGLNLQDQTTSTVRSRITSAGAGQGQAAWFATFNETFGDYTEKAHELLNTKLEQWAEEAVARGGFHNTTALLIQYENYRDWIVKDNVAYSELFLDTAGEASFDVWDLLPFTRGYVHILDKDPYLRHFAYDPQYFLNELDLLGQAAATQLARNISNSGAMQTYFAGETIPGDNLAYDADLRAWVEYIPYNFRPNYHGVGTCSMMPKEMGGVVDNAARVYGVQGLRVIDGSIPPTQMSSHVMTVFYAMALKIADAVLADY

SEQ ID NO: 1267 - protein, 577 aa, Synthetic construct
GIEASLLTDPKEVAGRTVDYIIAGGGLTGLVVAARLTENPDITVLVIESGSYESDRGPIIEDLNAYGKIFGSSVDHAYETVCLATNNRTALIRAGNGLGGSTLVNGGTWTRPHKAQVDSWETVFGNEGWNWDSVAAYSLQAERARAPNAKQIAAGHYFNASCHGINGTVHAGPRDTGDDYSPIVKALMSAVEDRGVPTKKDLGCGDPHGVSMFPNTLHEDQVRSDAAREWLLPNYQRPNLQVLTGQYVGKVLLSQNATTPRAVGVEFGTHKGNFHNVTAKHEVLLAAGSAVSPTILEYSGIGMKSILEPLGIKTVVDLPVGLNLQDQTTSTVRSRITSAGAGQGQAAWFATFNETFGDYTEKAHELLNTKLEQWAEEAVARGGFHNTTALLIQYENYRDWIVKDNVAYSELFLDTAGEISFDVWDLLPFTRGYVHILDKDPYLRHFAYDPQYFLNELDLLGQAAATQLARNISNSGAMQTYFAGETIPGDNLAYDADLRAWVEYIPYHFRPNYHGVGTCSMMPKEMGGVVDNAARVYGVQGLRVIDGSIPPTQMSSHVMTVFYAMALKIADAVLADY

SEQ ID NO: 1268 - protein, 577 aa, Aspergillus niger
GIEASLLTDPKEVAGRTVDYIIAGGGLTGLVVAARLTENPDITVLVIESGSYESDRGPIIEDLNAYGKIFGSSVDHAYETVCLATNNRTALIRAGNGLGGSTLVNGGTWTRPHKAQVDSWETVFGNEGWNWDSVAAYSLQAERARAPNAKQIAAGHYFNASCHGINGTVHAGPRDTGDDYSPIVKALMSAVEDRGVPTKKDLGCGDPHGVSMFPNTLHEDQVRSDAAREWLLPNYQRPNLQVLTGQYVGKVLLSQNATTPRAVGVEFGTHKGNFHNVTAKHEVLLAAGSAVSPTILEYSGIGMKSILEPLGIKTVVDLPVGLNLQDQTTSTVRSRITSAGAGQGQAAWFATFNETFGDYTEQAHELLNTKLEQWAEEAVARGGFHNTTALLIQYENYRDWIVKDNVAYSELFLDTAGEASFDVWDLLPFTRGYVHILDKDPYLRHFAYDPQYFLNELDLLGQAAATQLARNISNSGAMQTYFAGETIPGDNLAYDANLRAWVEYIPYHFRPNYHGVGTCSMMPKEMGGVVDNAARVYGVQGLRVIDGSIPPTQMSSHVMTVFYAMALKIADAVLADY

SEQ ID NO: 1269 - protein, 577 aa, Aspergillus niger
GIEASLLKDPKEVAGRTYDYIIAGGGLTGLTVAARLTENPDITVLVIESGSYESDRGPIIEDLNAYGQIFGSSVDHAYETVELATNNQTALIRSGNGLGGSTLINGGTWTRPHKAQVDSWETVFGNEGWNWDSVAAYSLQAERARAPNAKQIAAGHYFNASCHGINGTVHAGPRDTGDDYSPIVKALMSAVEDRGVPTKKDLGCGDPHGVSMFPNTLHEDQVRSDAAREWLLPNYQRPNLQVLTGQYVGKVLLSQNATTPRAVGVEFGTHKGNTHNVYAKHEVLLAAGSAVSPTILEYSGIGLKSILEPLGIDTVVDLPVGLNLQDQTTSTVRSRITSAGAGQGQAAWFATFNETFGDYAEKAHELLNTKLEQWAEEAVARGGFHNTTALLIQYENYRDWIVKDNVAYSELFLDTAGVASFDVWDLLPFTRGYVHILDKDPYLRHFAYDPQYFLNELDLLGQAAATQLARNISNSGAMQTYFAGETIPGDNLAYDADLSAWVEYIPENFRPNYHGVGTCSMMPKEMGGVVDNAARVYGVQGLRVIDGSIPPTQMSSHVMTVFYAMALKIADAILADY

SEQ ID NO: 1270 - protein, 577 aa, Aspergillus niger
GIEASLLKDPKEVAGRTYDYIIAGGGLTGLTVAARLTENPNITVLVIESGSYESDRGPIIEDLNAYGDIFGSSVDHAYETVELPTNNQTALIRSGNGLGGSTLINGGTWTRPHKAQVDSWETVFGNEGWNWDSVAAYSLQAERARAPNAKQIAAGHYFNASCHGLNGTVHAGPRDTGDDYSPIVKALMSAVEDRGVPTKKDLGCGDPHGVSMFPNTLHEDQVRSDAAREWLLPNYQRPNLQVLTGQYVGKVLLSQNATTPRAVGVEFGTHKGNTHNVYAKHEVLLAAGSAVSPTILEYSGIGMKSILEPLGIDTVVDLPVGLNLQDQTTSTVRSRITSAGAGQGQAAWFATFNETFGDYTEKAHELLNTKLEQWAEEAVARGGFHNTTALLIQYENYRDWIVKDNVAYSELFLDTAGVASFDVWDLLPFTRGYVHILDKDPYLRHFAYDPQYFLNELDLLGQAAATQLARNISNSGAMQTYFAGETIPGDNLAYDADLSAWVEYIPENFRPNYHGVGTCSMMPKEMGGVVDNAARVYGVQGLRVIDGSIPPTQMSSHVMTVFYAMALKIADAILADY

SEQ ID NO: 1271 - protein, 577 aa, Aspergillus niger
GIEASLLKDPKEVAGRTYDYIIAGGGLTGLTVAARLTENPNITVLVIESGSYESDRGPIIEDLNAYGDIFGSSVDHAYETVELPTNNQTALIRSGNGLGGSTLINGGTWTRPHKAQVDSWETVFGNEGWNWDSVAAYSLQAERARAPNAKQIAAGHYFNASCHGINGTVHAGPRDTGDDYSPIVKALMSAVEDRGVPTKKDLGCGDPHGVSMFPNTLHEDQVRSDAAREWLLPNYQRPNLQVLTGRYVGKVLLSQNATTPRAVGVEFGTHKGNTHNVYAKHEVLLAAGSAVSPTILEYSGIGMKSILEPLGIDTVVDLPVGLNLQDQTTSTVRSRITPAGAGQGQAAWFATFNETFGDYTEKAHELLNTKLEQWAEEAVARGGFHNTTALLIQYENYRDWIVKDNVAYSELFLDTAGVASFDVWDLLPFTRGYVHILDKDPYLRHFAYDPQYFLNELDLLGQAAATQLARNISNSGAMQTYFAGETIPGDNLAYDADLRAWVEYIPENFRPNYHGVGTCSMMPKEMGGVVDNAARVYGVQGLRVIDGSIPPTQMSSHVMTVFYAMALKIADAVLADY

SEQ ID NO: 1272 - protein, 577 aa, Aspergillus niger
GIEASLLKDPKEVAGRTYDYIIAGGGLTGLTVAAKLTENPNITVLVIESGSYESDRGPIIEDLNAYGDIFGSSVDHAYETVELATNNQTALIRSGNGLGGSTLINGGTWTRPHKAQVDSWETVFGNEGWNWDSVAAYSLQAERARAPNAKQIAAGHYFNASCHGLNGTVHAGPRDTGDDYSPIVKALMSAVEDRGVPTKKDLGCGDPHGVSMFPNTLHEDQVRSDAAREWLLPNYQRPNLQVLTGQYVGKVLLSQNATTPRAVGVEFGTHKGNTHNVYAKHEVLLAAGSAVSPTILEYSGIGMKSILEPLGIDTVVDLPVGLNLQDQTTSTVRSRITSAGAGQGQAAWFATFNETFGDYTEKAHELLNTKLEQWAEEAVARGGFHNTTALLIQYENYRDWIVKDNVAYSELFLDTAGVASFDVWDLLPFTRGYVHILDKDPYLRHFAYDPQYFLNELDLLGQAAATQLARNISNSGAMQTYFAGETIPGDNLAYDADLSAWVEYIPENFRPNYHGVGTCSMMPKEMGGVVDNAARVYGVQGLRVIDGSIPPTQMSSHVMTVFYAMALKIADAILADY

SEQ ID NO: 1273 - protein, 577 aa, Aspergillus niger
GIEASLLKDPKEVAGRTYDYIIAGGGLTGLTVAARLTENPNITVLVIESGSYESDRGPIIEDLNAYGDIFGSSVDHAYETVELPTNNQTALIRSGNGLGGSTLINGGTWTRPHKAQVDSWETVFGNEGWNWDSVAAYSLQAERARAPNAKQIAAGHYFNASCHGINGTVHAGPRDTGDDYSPIVKALMSAVEDRGVPTKKDLGCGDPHGVSMFPNTLHEDQVRSDAAREWLLPNYQRPNLQVLTGRYVGKVLLSQNATTPRAVGVEFGTHKGNTHNVYAKHEVLLAAGSAVSPTILEYSGIGMKSILEPLGIDTVVDLPVGLNLQDQTTSTVRSRITPAGAGQGQAAWFATFNETFGDYTEKAHELLNTKLEQWAEEAVARGGFHNTTALLIQYENYRDWIVKDNVAYSELFLDTAGVASFDVWDLLPFTRGYVHILDKDPYLRHFAYDPQYFLNELDLLGQAAATQLARNISNSGAMQTYFAGETIPGDNLAYDADLRAWVEYIPENFRPNYHGVGTCSMMPKEMGGVVDNAARVYGVQGLRVIDGSIPPTQLSSHVMTVFYAMALKIADAVLADY

SEQ ID NO: 1274 - protein, 577 aa, Aspergillus niger
GIEASLLKDPKAVAGRTYDYIIAGGGLAGLTVAEKLTENPNITVLVIESGSYESDRGPIIEDLNAYGEIFGTSVDHAYETVELAVDNRTALIRSGNGLGGSTLINGGTWTRPHKAQVDSWETVFGNEGWNWDSVAAYSLQAERARAPNAKQIAAGHYFNASCHGLNGTVHVGPRDTGDDYSPLMRALMSAVEDRGVPTKKDLGCGDPHGVSMFPNTLHEDQVRADAAREWLLPNYQRPNLQVLTGQYVGKVLLSQNATTPRAVGVEFGTHKSNTHNVYAKHEVLLSAGSTVSPTILEYSGIGMKSILEPLGIDTVVDLPVGLNLQDQTTSTVRSRITSAGAGQGQAAWFATFNETFGDYTEKAHELLNTKLEQWAEEAVARGGFHNTTALLIQYENYRDWIVKDNVAYSELFLDTGGVASFDVWDLLPFTRGYVHILDKDPYLRHFAYDPQYFLNELDLLGQAAATQLARNISNSGAMQTYFAGETIPGDNLAYDADLSAWVEYIPEHFRPNYHGVGTCSMMPKEMGGVVDNAARVYGVQGLRVIDGSIPPTQLSSHVMTVFYAMALKIADAVLADY

SEQ ID NO: 1275 - protein, 577 aa, Aspergillus niger
GIEASLLKDPKEVAGRTYDYIIAGGGLTGLTVAAKLTENPNITVLVIESGSYESDRGPIIEDLNAYGDIFGSSVDHAYETVELATNNRTALIRSGNGLGGSTLINGGTWTRPHKAQVDSWETVFGNEGWNWDSVAAYSLQAERARAPNAKQIAAGHYFNASCHGLNGTVHAGPRDTGDDYSPIVKALMSAVEDRGVPTKKDLGCGDPHGVSMFPNTLHEDQVRSDAAREWLLPNYQRPNLQVLTGQYVGKVLLSQNATTPRAVGVEFGTHKGNTHNVYAKHEVLLAAGSAVSPTILEYSGIGMKSILEPLGIDTVVDLPVGLNLQDQTTSTVRSRITSAGAGQGQAAWFATFNETFGDYTEKAHELLNTKLEQWAEEAVARGGFHNTTALLIQYENYRDWIVKDNVAYSELFLDTAGVASFDVWDLLPFTRGYVHILDKDPYLRHFAYDPQYFLNELDLLGQAAATQLARNISNSGAMQTYFAGETIPGDNLAYDADLSAWVEYIPENFRPNYHGVGTCSMMPKEMGGVVDNAARVYGVQGLRVIDGSIPPTQLSSHVMTVFYAMALKIADAVLADY

SEQ ID NO: 1276 - protein, 577 aa, Aspergillus niger
GIEASLLKDPKEVAGRTYDYIIAGGGLTGLTVAAKLTENPNITVLVIESGSYESDRGPIIEDLNAYGDIFGSSVDHAYETVELATNNQTALIRSGNGLGGSTLINGGTWTRPHKAQVDSWETVFGNEGWNWDSVAAYSLQAERARAPNAKQIAAGHYFNASCHGLNGTVHAGPRDTGDDYSPIVKALMSAVEDRGVPTKKDLGCGDPHGVSMFPNTLHEDQVRSDAAREWLLPNYQRPNLQVLTGQYVGKVLLSQNATTPRAVGVEFGTHKGNTHNVYAKHEVLLAAGSAVSPTILEYSGIGMKSILEPLGIDTVVDLPVGLNLQDQTTSTVRSRITSAGAGQGQAAWFATFNETFGDYTEKAHELLNTKLEQWAEEAVARGGFHNTTALLIQYENYRDWIVKDNVAYSELFLDTAGVASFDVWDLLPFTRGYVHILDKDPYLRHFAYDPQYFLNELDLLGQAAATQLARNISNSGAMQTYFAGETIPGDNLAYDADLSAWVEYIPENFRPNYHGVGTCSMMPKEMGGVVDNAARVYGVQGLRVIDGSIPPTQLSSHVMTVFYAMALKIADAILADY

SEQ ID NO: 1277 - protein, 577 aa, Aspergillus niger
GIEASLLKDPKEVAGRTYDYIIAGGGLTGLTVAAKLTENPNITVLVIESGSYESDRGPIIEDLNAYGDIFGSSVDHAYETVELATNNQTALIRSGNGLGGSTLINGGTWTRPHKAQVDSWETVFGNEGWNWDSVAAYSLQAERARAPNAKQIAAGHYFNASCHGINGTVHAGPRDTGDDYSPIVKALMSAVEDRGVPTKKDLGCGDPHGVSMFPNTLHEDQVRSDAAREWLLPNYQRPNLQVLTGQYVGKVLLSQNATTPRAVGVEFGTHKGNTHNVYAKHEVLLAAGSAVSPTILEYSGIGMKSILEPLGIDTVVDLPVGLNLQDQTTSTVRSRITSAGAGQGQAAWFATFNETFGDYTEKAHELLNTKLEQWAEEAVARGGFHNTTALLIQYENYRDWIVKDNVAYSELFLDTAGVASFDVWDLLPFTRGYVHILDKDPYLRHFAYDPQYFLNELDLLGQAAATQLARNISNSGAMQTYFAGETIPGDNLAYDADLSAWVEYIPENFRPNYHGVGTCSMMPKEMGGVVDNAARVYGVQGLRVIDGSIPPTQMSSHVMTVFYAMALKIADAILADY

SEQ ID NO: 1278 - protein, 577 aa, Aspergillus niger
GIEASLLKDPKEVAGRTYDYIIAGGGLTGLTVAAKLTENPNITVLVIESGSYESDRGPIIEDLNAYGDIFGSSVDHAYETVELATNNQTALIRSGNGLGGSTLINGGTWTRPHKAQVDSWETVFGNEGWNWDSVAAYSLQAERARAPNAKQIAAGHYFNASCHGINGTVHAGPRDTGDDYSPIVKALMSAVEDRGVPTKKDLGCGDPHGVSMFPNTLHEDQVRSDAAREWLLPNYQRPNLQVLTGQYVGKVLLSQNATTPRAVGVEFGTHKGNTHNVYAKHEVLLAAGSAVSPTILEYSGIGMKSILEPLGIDTVVDLPVGLNLQDQTTSTVRSRITSAGAGQGQAAWFATFNETFGDYAEKAHELLNTKLEQWAEEAVARGGFHNTTALLIQYENYRDWIVKDNVAYSELFLDTAGVASFDVWDLLPFTRGYVHILDKDPYLRHFAYDPQYFLNELDLLGQAAATQLARNISNSGAMQTYFAGETIPGDNLAYDADLSAWVEYIPENFRPNYHGVGTCSMMPKEMGGVVDNAARVYGVQGLRVIDGSIPPTQLSSHVMTVFYAMALKIADAVLADY

SEQ ID NO: 1279 - protein, 577 aa, Aspergillus niger
GPEASLLTDPKEVAGRTVDYIIAGGGLTGLTTAARLTENPDITVLVIESGSYESDRGPIIEDLNAYGKIFGSSVDHAYETVELFTNNQTALIRAGNGLGGSTLVNGGTWTRPHKAQVDSWETVFGNEGWNWDSVAAYSLQAERARAPNAKQIAAGHYFNASCHGINGTVHAGPRDTGDDYSPIVKALMSAVEDRGVPTKKDLGCGDPHGVSMFPNTLHEDQVRSDAAREWLLPNYQRPNLQVLTGQYVGKVLLSQNATTPRAVGVEFGTHKSNTHNVYAKHEVLLAAGSAVSPTILEYSGIGMKSILEPLGIDTVVDLPVGLNLQDQTTSTVRSRITSAGAGQGQAAWFATFNETFGDYAEKAHELLNTKLEQWAEEAVARGGFHNTTALLIQYENYRDWIVKDNVAYSELFLDTAGVASFDVWDLLPFTRGYVHILDKDPYLRHFAYDPQYFLNELDLLGQAAATQLARNISNSGAMQTYFAGETIPGDNLAYDADLSAWVEYIAYNFRPNYHGVGTCSMMPKEMGGVVDNAARVYGVQGLRVIDGSIPPTQMSSHVMTVFYAMALKIADAILADY

SEQ ID NO: 1280 - protein, 577 aa, Aspergillus niger
GYEASLLTDPKEVAGRTVDYIIAGGGLTGLTTAARLTENPDITVLVIESGSYESDRGPIIEDLNAYGQIFGSSVDHAYETVELQTNNQTALIRAGNGLGGSTLVNGGTWTRPHKAQVDSWETVFGNEGWNWDSVAAYSLQAERARAPNAKQIAAGHYFNASCHGINGTVHAGPRDTGDDYSPIVKALMSAVEDRGVPTKKDLGCGDPHGVSMFPNTLHEDQVRSDAAREWLLPNYQRPNLQVLTGQYVGKVLLSQNATTPRAVGVEFGTHKHNTHNVYAKHEVLLAAGSAVSPTILEYSGIGMKSILEPLGIDTVVDLPVGLNLQDQTTSTVRSRITSAGAGQGQAAWFATFNETFGDYAEKAHELLNTKLEQWAEEAVARGGFHNTTALLIQYENYRDWIVKDNVAYSELFLDTAGVASFDVWDLLPFTRGYVHILDKDPYLRHFAYDPQYFLNELDLLGQAAATQLARNISNSGAMQTYFAGETIPGDNLAYDADLSAWVEYICYNFRPNYHGVGTCSMMPKEMGGVVDNAARVYGVQGLRVIDGSIPPTQMSSHVMTVFYAMALKIADAILADY

SEQ ID NO: 1281 - protein, 577 aa, Aspergillus niger
GIEASLLKDPKEVAGRTYDYIIAGGGLTGLTVAARLTENPNITVLVIESGSYESDRGPIIEDLNAYGDIFGSSVDHAYETVELPTNNQTALIRSGNGLGGSTLINGGTWTRPHKAQVDSWETVFGNEGWNWDSVAAYSLQAERARAPNAKQIAAGHYFNASCHGINGTVHAGPRDTGDDYSPIVKALMSAVEDRGVPTKKDLGCGDPHGVSMFPNTLHEDQVRSDAAREWLLPNYQRPNLQVLTGRYVGKVLLSQNATTPRAVGVEFGTHKGNTHNVYAKHEVLLAAGSAVSPTILEYSGIGMKSILEPLGIDTVVDLPVGLNLQDQTTSTVRSRITSAGAGQGQAAWFATFNETFGDYAEKAHELLNTKLEQWAEEAVARGGFHNTTALLIQYENYRDWIVKDNVAYSELFLDTAGVASFDVWDLLPFTRGYVHILDKDPYLRHFAYDPQYFLNELDLLGQAAATQLARNISNSGAMQTYFAGETIPGDNLAYDADLSAWVEYIPENFRPNYHGVGTCSMMPKEMGGVVDNAARVYGVQGLRVIDGSIPPTQMSSHVMTVFYAMALKIADAILADY

SEQ ID NO: 1282 - protein, 577 aa, Aspergillus niger
GIEASLLKDPKEVAGRTYDYIIAGGGLTGLTVAARLTENPNITVLVIESGSYESDRGPIIEDLNAYGDIFGSSVDHAYETVELPTNNQTALIRSGNGLGGSTLINGGTWTRPHKAQVDSWETVFGNEGWNWDSVAAYSLQAERARAPNAKQIAAGHYFNASCHGINGTVHAGPRDTGDDYSPIVKALMSAVEDRGVPTKKDLGCGDPHGVSMFPNTLHEDQVRSDAAREWLLPNYQRPNLQVLTGQYVGKVLLSQNATTPRAVGVEFGTHKGNTHNVYAKHEVLLAAGSAVSPTILEYSGIGMKSILEPLGIDTVVDLPVGLNLQDQTTSTVRSRITSAGAGQGQAAWFATFNETFGDYAEKAHELLNTKLEQWAEEAVARGGFHNTTALLIQYENYRDWIVKDNVAYSELFLDTAGVASFDVWDLLPFTRGYVHILDKDPYLRHFAYDPQYFLNELDLLGQAAATQLARNISNSGAMQTYFAGETIPGDNLAYDADLSAWVEYIPENFRPNYHGVGTCSMMPKEMGGVVDNAARVYGVQGLRVIDGSIPPTQMSSHVMTVFYAMALKIADAVLADY

SEQ ID NO: 1283 - protein, 577 aa, Aspergillus niger
GIEASLLKDPKEVAGRTYDYIIAGGGLTGLTVAARLTENPNITVLVIESGSYESDRGPIIEDLNAYGDIFGSSVDHAYETVELPTNNQTALIRSGNGLGGSTLINGGTWTRPHKAQVDSWETVFGNEGWNWDSVAAYSLQAERARAPNAKQIAAGHYFNASCHGINGTVHAGPRDTGDDYSPIVKALMSAVEDRGVPTKKDLGCGDPHGVSMFPNTLHEDQVRSDAAREWLLPNYQRPNLQVLTGRYVGKVLLSQNATTPRAVGVEFGTHKGNTHNVYAKHEVLLAAGSAVSPTILEYSGIGMKSILEPLGIDTVVDLPVGLNLQDQTTSTVRSRITSAGAGQGQAAWFATFNETFGDYTEKAHELLNTKLEQWAEEAVARGGFHNTTALLIQYENYRDWIVKDNVAYSELFLDTAGVASFDVWDLLPFTRGYVHILDKDPYLRHFAYDPQYFLNELDLLGQAAATQLARNISNSGAMQTYFAGETIPGDNLAYDADLRAWVEYIPENFRPNYHGVGTCSMMPKEMGGVVDNAARVYGVQGLRVIDGSIPPTQMSSHVMTVFYAMALKIADAILADY

SEQ ID NO: 1284 - protein, 577 aa, Aspergillus niger
GIEASLLTDPKEVAGRTVDYIIAGGGLTGLTVAARLTENPDITVLVIESGCYESDRGPIIEDLNAYGDIFGSSVDHAYETVCLATNNQTALIRSGNGLGGSTLVNGGTWTRPHKAQVDSWETVFGNEGWNWDSVAAYSLQAERARAPNAKQIAAGHYFNASCHGINGTVHAGPRDTGDDYSPIVKALMSAVEDRGVPTKKDLGCGDPHGVSMFPNTLHEDQVRSDAAREWLLPNYQRPNLQVLCGQYVGKVLLSQNATTPRAVGVEFGTHKGNTHNVYAKHEVLLAAGSAVSPTILEYSGIGMKSILEPLGIKTVVDLPVGLNLQDQTTSTVRSRITSAGAGQGQAAWFATFNETFGDYTEKAHELLNTKLEQWAEEAVARGGFHNTTALLIQYENYRDWIVKDNVAYSELFLDTAGEASFDVWDLLPFTRGYVHILDKDPYLRHFAYDPQYFLNELDLLGQAAATQLARNISNSGAMQTYFAGETIPGDNLAYDADLRAWVEYIPYHFRPNYHGVGTCSMMPKEMGGVVDNAARVYGVQGLRVIDGSIPPTQMSSHVMTVFYAMALKIADAVLADY

SEQ ID NO: 1285 - protein, 577 aa, Aspergillus niger
GYEASLLTDPKEVAGRTVDYIIAGGGLTGLTTAARLTENPDITVLVIESGSYESDRGPIIEDLNAYGQIFGSSVDHAYETVELQTNNQTALIRNGNGLGGSTLVNGGTWTRPHKAQVDSWETVFGNEGWNWDSVAAYSLQAERARAPNAKQIAAGHYFNASCHGINGTVHAGPRDTGDDYSPIVKALMSAVEDRGVPTKKDLGCGDPHGVSMFPNTLHEDQVRSDAAREWLLPNYQRPNLQVLTGQYVGKVLLSQNATTPRAVGVEFGTHKQNTHNVYAKHEVLLAAGSAVSPTILEYSGIGMKSILEPLGIDTVVDLPVGLNLQDQTTSTVRSRITSAGAGQGQAAWFATFNETFGDYAEKAHELLNTKLEQWAEEAVARGGFHNTTALLIQYENYRDWIVKDNVAYSELFLDTAGVASFDVWDLLPFTRGYVHILDKDPYLRHFAYDPQYFLNELDLLGQAAATQLARNISNSGAMQTYFAGETIPGDNLAYDADLSAWVEYIAYNFRPNYHGVGTCSMMPKEMGGVVDNAARVYGVQGLRVIDGSIPPTQMSSHVMTVFYAMALKIADAILADY

SEQ ID NO: 1286 - protein, 577 aa, Aspergillus niger
GIEASLLKDPKEVAGRTYDYIIAGGGLTGLTVAAKLTENPNITVLVIESGSYESDRGPIIEDLNAYGDIFGSSVDHAYETVELATNNQTALIRSGNGLGGSTLINGGTWTRPHKAQVDSWETVFGNEGWNWDSVAAYSLQAERARAPNAKQIAAGHYFNASCHGLNGTVHAGPRDTGDDYSPIVKALMSAVEDRGVPTKKDLGCGDPHGVSMFPNTLHEDQVRSDAAREWLLPNYQRPNLQVLTGRYVGKVLLSQNATTPRAVGVEFGTHKGNTHNVYAKHEVLLAAGSAVSPTILEYSGIGMKSILEPLGIDTVVDLPVGLNLQDQTTSTVRSRITPAGAGQGQAAWFATFNETFGDYTEKAHELLNTKLEQWAEEAVARGGFHNTTALLIQYENYRDWIVKDNVAYSELFLDTAGVASFDVWDLLPFTRGYVHILDKDPYLRHFAYDPQYFLNELDLLGQAAATQLARNISNSGAMQTYFAGETIPGDNLAYDADLRAWVEYIPENFRPNYHGVGTCSMMPKEMGGVVDNAARVYGVQGLRVIDGSIPPTQMSSHVMTVFYAMALKIADAVLADY

SEQ ID NO: 1287 - protein, 577 aa, Aspergillus niger
GIEASLLKDPKEVAGRTYDYIIAGGGLTGLTVAAKLTENPNITVLVIESGSYESDRGPIIEDLNAYGDIFGSSVDHAYETVELPTNNRTALIRSGNGLGGSTLINGGTWTRPHKAQVDSWETVFGNEGWNWDSVAAYSLQAERARAPNAKQIAAGHYFNASCHGLNGTVHAGPRDTGDDYSPIVKALMSAVEDRGVPTKKDLGCGDPHGVSMFPNTLHEDQVRSDAAREWLLPNYQRPNLQVLTGQYVGKVLLSQNATTPRAVGVEFGTHKGNTHNVYAKHEVLLAAGSAVSPTILEYSGIGMKSILEPLGIDTVVDLPVGLNLQDQTTSTVRSRITSAGAGQGQAAWFATFNETFGDYTEKAHELLNTKLEQWAEEAVARGGFHNTTALLIQYENYRDWIVKDNVAYSELFLDTAGVASFDVWDLLPFTRGYVHILDKDPYLRHFAYDPQYFLNELDLLGQAAATQLARNISNSGAMQTYFAGETIPGDNLAYDADLSAWVEYIPENFRPNYHGVGTCSMMPKEMGGVVDNAARVYGVQGLRVIDGSIPPTQMSSHVMTVFYAMALKIADAILADY

SEQ ID NO: 1288 - protein, 577 aa, Aspergillus niger
GIEASLLKDPKEVAGRTYDYIIAGGGLTGLTVAAKLTENPNITVLVIESGSYESDRGPIIEDLNAYGDIFGSSVDHAYETVELATNNQTALIRSGNGLGGSTLINGGTWTRPHKAQVDSWETVFGNEGWNWDSVAAYSLQAERARAPNAKQIAAGHYFNASCHGINGTVHAGPRDTGDDYSPIVKALMSAVEDRGVPTKKDLGCGDPHGVSMFPNTLHEDQVRSDAAREWLLPNYQRPNLQVLTGRYVGKVLLSQNATTPRAVGVEFGTHKGNTHNVYAKHEVLLAAGSAVSPTILEYSGIGMKSILEPLGIDTVVDLPVGLNLQDQTTSTVRSRITSAGAGQGQAAWFATFNETFGDYAEKAHELLNTKLEQWAEEAVARGGFHNTTALLIQYENYRDWIVKDNVAYSELFLDTAGVASFDVWDLLPFTRGYVHILDKDPYLRHFAYDPQYFLNELDLLGQAAATQLARNISNSGAMQTYFAGETIPGDNLAYDADLSAWVEYIPENFRPNYHGVGTCSMMPKEMGGVVDNAARVYGVQGLRVIDGSIPPTQMSSHVMTVFYAMALKIADAILADY

SEQ ID NO: 1289 - protein, 577 aa, Aspergillus niger
GIEASLLKDPKEVAGRTYDYIIAGGGLTGLTVAARLTENPNITVLVIESGSYESDRGPIIEDLNAYGDIFGSSVDHAYETVELPTNNQTALIRSGNGLGGSTLINGGTWTRPHKAQVDSWETVFGNEGWNWDSVAAYSLQAERARAPNAKQIAAGHYFNASCHGINGTVHAGPRDTGDDYSPIVKALMSAVEDRGVPTKKDLGCGDPHGVSMFPNTLHEDQVRSDAAREWLLPNYQRPNLQVLTGQYVGKVLLSQNATTPRAVGVEFGTHKGNTHNVYAKHEVLLAAGSAVSPTILEYSGIGMKSILEPLGIDTVVDLPVGLNLQDQTTSTVRSRITSAGAGQGQAAWFATFNETFGDYTEKAHELLNTKLEQWAEEAVARGGFHNTTALLIQYENYRDWIVKDNVAYSELFLDTAGVASFDVWDLLPFTRGYVHILDKDPYLRHFAYDPQYFLNELDLLGQAAATQLARNISNSGAMQTYFAGETIPGDNLAYDADLSAWVEYIPENFRPNYHGVGTCSMMPKEMGGVVDNAARVYGVQGLRVIDGSIPPTQMSSHVMTVFYAMALKIADAILADY

SEQ ID NO: 1290 - protein, 577 aa, Aspergillus niger
GIEASLLKDPKEVAGRTYDYIIAGGGLTGLTVAAKLTENPNITVLVIESGSYESDRGPIIEDLNAYGDIFGSSVDHAYETVELATNNQTALIRSGNGLGGSTLINGGTWTRPHKAQVDSWETVFGNEGWNWDSVAAYSLQAERARAPNAKQIAAGHYFNASCHGINGTVHAGPRDTGDDYSPIVKALMSAVEDRGVPTKKDLGCGDPHGVSMFPNTLHEDQVRSDAAREWLLPNYQRPNLQVLTGQYVGKVLLSQNATTPRAVGVEFGTHKGNTHNVYAKHEVLLAAGSAVSPTILEYSGIGMKSILEPLGIDTVVDLPVGLNLQDQTTSTVRSRITSAGAGQGQAAWFATFNETFGDYAEKAHELLNTKLEQWAEEAVARGGFHNTTALLIQYENYRDWIVKDNVAYSELFLDTAGVASFDVWDLLPFTRGYVHILDKDPYLRHFAYDPQYFLNELDLLGQAAATQLARNISNSGAMQTYFAGETIPGDNLAYDADLSAWVEYIPENFRPNYHGVGTCSMMPKEMGGVVDNAARVYGVQGLRVIDGSIPPTQMSSHVMTVFYAMALKIADAVLADY

SEQ ID NO: 1291 - protein, 577 aa, Aspergillus niger
GAEASLLTDPKEVAGRTVDYIIAGGGLTGLTTAARLTENPDITVLVIESGSYESDRGPIIEDLNAYGDIFGSSVDHAYETVELQTNNQTALIRFGNGLGGSTLVNGGTWTRPHKAQVDSWETVFGNEGWNWDSVAAYSLQAERARAPNAKQIAAGHYFNASCHGINGTVHAGPRDTGDDYSPIVKALMSAVEDRGVPTKKDLGCGDPHGVSMFPNTLHEDQVRSDAAREWLLPNYQRPNLQVLTGQYVGKVLLSQNATTPRAVGVEFGTHKQNTHNVYAKHEVLLAAGSAVSPTILEYSGIGMKSILEPLGIDTVVDLPVGLNLQDQTTSTVRSRITSAGAGQGQAAWFATFNETFGDYAEKAHELLNTKLEQWAEEAVARGGFHNTTALLIQYENYRDWIVKDNVAYSELFLDTAGVASFDVWDLLPFTRGYVHILDKDPYLRHFAYDPQYFLNELDLLGQAAATQLARNISNSGAMQTYFAGETIPGDNLAYDADLSAWVEYIHYNFRPNYHGVGTCSMMPKEMGGVVDNAARVYGVQGLRVIDGSIPPTQMSSHVMTVFYAMALKIADAILADY

SEQ ID NO: 1292 - protein, 577 aa, Aspergillus niger
GIEASLLKDPKEVAGRTYDYIIAGGGLTGLTVAAKLTENPNITVLVIESGSYESDRGPIIEDLNAYGDIFGSSVDHAYETVELPTNNQTALIRSGNGLGGSTLINGGTWTRPHKAQVDSWETVFGNEGWNWDSVAAYSLQAERARAPNAKQIAAGHYFNASCHGINGTVHAGPRDTGDDYSPIVKALMSAVEDRGVPTKKDLGCGDPHGVSMFPNTLHEDQVRSDAAREWLLPNYQRPNLQVLTGQYVGKVLLSQNATTPRAVGVEFGTHKGNTHNVYAKHEVLLAAGSAVSPTILEYSGIGMKSILEPLGIDTVVDLPVGLNLQDQTTSTVRSRITSAGAGQGQAAWFATFNETFGDYAEKAHELLNTKLEQWAEEAVARGGFHNTTALLIQYENYRDWIVKDNVAYSELFLDTAGVASFDVWDLLPFTRGYVHILDKDPYLRHFAYDPQYFLNELDLLGQAAATQLARNISNSGAMQTYFAGETIPGDNLAYDADLSAWVEYIPENFRPNYHGVGTCSMMPKEMGGVVDNAARVYGVQGLRVIDGSIPPTQMSSHVMTVFYAMALKIADAILADY

SEQ ID NO: 1293 - protein, 597 aa, Aspergillus niger
LVSSLVVSLAAALPHYIRSNGIEASLLTDPKEVAGRTVDYIIAGGGLTGLTTAARLTENPDITVLVIESGSYESDRGPIIEDLNAYGDIFGSSVDHAYETVELATNNQTALIRSGNGLGGSTLVNGGAWTRPHKAQVDSWETVFGNEGWNWDSVAAYSLQAERARAPNAKQIAAGHYFNASCHGINGTVHAGPRDTGDDYSPIVKALMSAVEDRGVPTKKDLGCGDPHGVSMFPNTLHEDQVRSDAAREWLLPNYQRPNLQVLTGRYVGKVLLSQNATTPRAVGVEFGTHKGNTHNVYAKHEVLLAAGSAVSPTILEYSGIGMKSILEPLGIDTVVDLPVGLNLQDQTTSTVRSRITSAGAGQGQAAWFATFNETFGDYAEKAHELLNTKLEQWAEEAVARGGFHNTTALLIQYENYRDWIVKDNVAYSELFLDTAGVASFHVWDLLPFTRGYVHILDKDPYLRHFAYDPQYFLNELDLLGQAAATQLARNISNSGAMQTYFAGETIPGDNLAYDADLSAWVEYIPYNFRPNYHGVGTCSMMPKEMGGVVDNAARVYGVQGLRVIDGSIPPTQMSSHVMTVFYAMALKVADAILADY

SEQ ID NO: 1294 - protein, 597 aa, Aspergillus niger
LVSSLVVSLAAALPHYIRSNGIEASLLTDPKEVAGRTVDYIIAGGGLTGLTTAARLTENPDITVLVIESGSYESDRGPIIEDLNAYGDIFGSSVDHAYETVELATNNQTALIRSGNGLGGSTLVNGGTWTRPHKAQVDSWETVFGNEGWNWDSVAAYSLQAERARAPNAKQIAAGHYFNASCHGINGTVHAGPRDTGDDYSPIVKALMSAVEDRGVPTKKDLGCGDPHGVSMFPNTLHEDQVRSDAAREWLLPNYQRPNLQVLTGRYVGKVLLSQNATTPRAVGVEFGTHKGNTHNVYAKHEVLLAAGSAVSPTILEYSGIGMKSILEPLGIDTVVDLPVGLNLQDQTASTVRSRITSAGAGQGQAAWFATFNETFGDYAEKAHELLNTKLEQWAEEAVARGGFHNTTALLIQYENYRDWIVKDNVAYSELFLDTAGVASFDVWDLLPFTRGYVHILDKDPYLRHFAYDPQYFLNELDLLGQAAATQLARNISNSGAMQTYFAGETIPGDNLAYDADLSAWVEYIPYNFRPNYHGVGTCSMMPKEMGGVVDNAARVYGVQGLRVIDGSIPPTQMSSHSMTVFYAMALKVADAILADY

SEQ ID NO: 1295 - protein, 597 aa, Aspergillus niger
LVSSLVVSLAAALPHYIRSNGIEASLLTDPKEVAGRTVDYIIAGGGLTGLTTAARLTENPDITVLVIESGSYESDRGPIIEDLNAYGDIFGSSVDHAYETVELATNNQTALIRSGNGLGGSTLVNGGAWTRPHKAQVDSWETVFGNEGWNWDSVAAYSLQAERARAPNAKQIAAGHYFNASCHGINGTVHAGPRDTGDDYSPIVKALMSAVEDRGVPTKKDLGCGDPHGVSMFPNTLHEDQVRSDAAREWLLPNYQRPNLQVLTGRYVGKVLLSQNATTPRAVGVEFGTHKGNTHNVYAKHEVLLAAGSAVSPTILEYSGIGMKSILEPLGIDTVVDLPVGLNLQDQTASTVRSRITSAGAGQGQAAWFATFNETFGDYAEKAHELLNTKLEQWAEEAVARGGFHNTTALLIQYENYRDWIVKDNVAYSELFLDTAGVASFDVWDLLPFTRGYVHILDKDPYLRHFAYDPQYFLNELDLLGQAAATQLARNISNSGAMQTYFAGETIPGDNLAYDADLSAWVEYIPYNFRPNYHGVGTCSMMPKEMGGVVDNAARVYGVQGLRVIDGSIPPTQMSSHVMTVFYAMALKVADAILADY

SEQ ID NO: 1296 - protein, 597 aa, Aspergillus niger
LVSSLVVSLAAALPHYIRSNGIEASLLTDPKEVAGRTVDYIIAGGGLTGLTTAARLTENPDITVLVIESGSYESDRGPIIEDLNAYGDIFGSSVDHAYETVELATNNQTALIRSGNGLGGSTLVNGGAWTRPHKAQVDSWETVFGNEGWNWDSVAAYSLQAERARAPNAKQIAAGHYFNASCHGINGTVHAGPRDTGDDYSPIVKALMSAVEDRGVPTKKDLGCGDPHGVSMFPNTLHEDQVRSDAAREWLLPNYQRPNLQVLTGRYVGKVLLSQNATTPRAVGVEFGTHKGNTHNVYAKHEVLLAAGSAVSPTILEYSGIGMKSILEPLGIDTVVDLPVGLNLQDQTTSTVRSRITSAGAGQGQAAWFATFNETFGDYAEKAHELLNTKLEQWAEEAVARGGFHNTTALLIQYENYRDWIVKDNVAYSELFLDTAGVASFDVWDLLPFTRGYVHILDKDPYLRHFAYDPQYFLNELDLLGQAAATQLARNISNSGAMQTYFAGETIPGDNLAYDADLSAWVEYIPYNFRPNYHGVGTCSMMPKEMGGVVDNAARVYGVQGLRVIDGSIPPTQMSSHSMTVFYAMALKVADAILADY

SEQ ID NO: 1297 - protein, 597 aa, Aspergillus niger
LVSSLVVSLAAALPHYIRSNGIEASLLTDPKEVAGRTVDYIIAGGGLTGLTTAARLTENPDITVLVIESGSYESDRGPIIEDLNAYGDIFGSSVDHAYETVELATNNQTALIRSGNGLGGSTLVNGGTWTRPHKAQVDSWETVFGNEGWNWDSVAAYSLQAERARAPNAKQIAAGHYFNASCHGINGTVHAGPRDTGDDYSPIVKALMSAVEDRGVPTKKDLGCGDPHGVSMFPNTLHEDQVRSDAAREWLLPNYQRPNLQVLTGRYVGKVLLSQNATTPRAVGVEFGTHKGNTHNVYAKHEVLLAAGSAVSPTILEYSGIGMKSILEPLGIDTVVDLPVGLNLQDQATSTVRSRITSAGAGQGQAAWFATFNETFGDYAEKAHELLNTKLEQWAEEAVARGGFHNTTALLIQYENYRDWIVKDNVAYSELFLDTAGVASFHVWDLLPFTRGYVHILDKDPYLRHFAYDPQYFLNELDLLGQAAATQLARNISNSGAMQTYFAGETIPGDNLAYDADLSAWVEYIPYNFRPNYHGVGTCSMMPKEMGGVVDNAARVYGVQGLRVIDGSIPPTQMSSHVMTVFYAMALKVADAILADY

SEQ ID NO: 1298 - protein, 597 aa, Aspergillus niger
LVSSLVVSLAAALPHYIRSNGIEASLLTDPKEVAGRTVDYIIAGGGLTGLTTAARLTENPDITVLVIESGSYESDRGPIIEDLNAYGDIFGSSVDHAYETVELATNNQTALIRSGNGLGGSTLVNGGTWTRPHKAQVDSWETVFGNEGWNWDSVAAYSLQAERARAPNAKQIAAGHYFNASCHGINGTVHAGPRDTGDDYSPIVKALMSAVEDRGVPTKKDLGCGDPHGVSMFPNTLHEDQVRSDAAREWLLPNYQRPNLQVLTGRYVGKVLLSQNATTPRAVGVEFGTHKGNTHNVYAKHEVLLAAGSAVSPTILEYSGIGMKSILEPLGIDTVVDLPVGLNLQDQTTSTVRSRITSAGAGQGQAAWFATFNETFGDYAEKAHELLNTKLEQWAEEAVARGGFHNTTALLIQYENYRDWIVKDNVAYSELFLDTAGVASFHVWDLLPFTRGYVHILDKDPYLRHFAYDPQYFLNELDLLGQAAATQLARNISNSGAMQTYFAGETIPGDNLAYDADLSAWVEYIPYNFRPNYHGVGTCSMMPKEMGGVVDNAARVYGVQGLRVIDGSIPPTQMSSHLMTVFYAMALKVADAILADY

SEQ ID NO: 1299 - protein, 597 aa, Aspergillus niger
LVSSLVVSLAAALPHYIRSNGIEASLLTDPKEVAGRTVDYIIAGGGLTGLTTAARLTENPDITVLVIESGSYESDRGPIIEDLNAYGDIFGSSVDHAYETVELATNNQTALIRSGNGLGGSTLVNGGTWTRPHKAQVDSWETVFGNEGWNWDSVAAYSLQAERARAPNAKQIAAGHYFNASCHGINGTVHAGPRDTGDDYSPIVKALMSAVEDRGVPTKKDLGCGDPHGVSMFPNTLHEDQVRSDAAREWLLPNYQRPNLQVLTGRYVGKVLLSQNATTPRAVGVEFGTHKGNTHNVYAKHEVLLAAGSAVSPTILEYSGIGMKSILEPLGIDTVVDLPVGLNLQDQTTSTVRSRITSAGAGQGQAAWFATFNETFGDYAEKAHELLNTKLEQWAEEAVARGGFHNTTALLIQYENYRDWIVKDNVAYSELFLDTAGVASFHVWDLLPFTRGYVHILDKDPYLRHFAYDPQYFLNELDLLGQAAATQLARNISNSGAMQTYFAGETIPGDNLAYDADLSAWVEYIPYNFRPNYHGVGTCSMMPKEMGGVVDNAARVYGVQGLRVIDGSIPPTQMSSHPMTVFYAMALKVADAILADY

SEQ ID NO: 1300 - protein, 597 aa, Aspergillus niger
LVSSLVVSLAAALPHYIRSNGIEASLLTDPKEVAGRTVDYIIAGGGLTGLTTAARLTENPDITVLVIESGSYESDRGPIIEDLNAYGDIFGSSVDHAYETVELATNNQTALIRSGNGLGGSTLVNGGTWTRPHKAQVDSWETVFGNEGWNWDSVAAYSLQAERARAPNAKQIAAGHYFNASCHGINGTVHAGPRDTGDDYSPIVKALMSAVEDRGVPTKKDLGCGDPHGVSMFPNTLHEDQVRSDAAREWLLPNYQRPNLQVLTGRYVGKVLLSQNATTPRAVGVEFGTHKGNTHNVYAKHEVLLAAGSAVSPTILEYSGIGMKSILEPLGIDTVVDLPVGLNLQDQTTSTVRSRITSAGAGQGQAAWFATFNETFGDYAEKAHELLNTKLEQWAEEAVARGGFHNTTALLIQYENYRDWIVKDNVAYSELFLDTAGVASFHVWDLLPFTRGYVHILDKDPYLRHFAYDPQYFLNELDLLGQAAATQLARNISNSGAMQTYFAGETIPGDNLAYDADLSAWVEYIPYNFRPNYHGVGTCSMMPKEMGGVVDNAARVYGVQGLRVIDGSIPPTQMSSHRMTVFYAMALKVADAILADY

SEQ ID NO: 1301 - protein, 597 aa, Aspergillus niger
LVSSLVVSLAAALPHYIRSNGIEASLLTDPKEVAGRTVDYIIAGGGLTGLTTAARLTENPDITVLVIESGSYESDRGPIIEDLNAYGDIFGSSVDHAYETVELATNNQTALIRSGNGLGGSTLVNGGAWTRPHKAQVDSWETVFGNEGWNWDSVAAYSLQAERARAPNAKQIAAGHYFNASCHGINGTVHAGPRDTGDDYSPIVKALMSAVEDRGVPTKKDLGCGDPHGVSMFPNTLHEDQVRSDAAREWLLPNYQRPNLQVLTGRYVGKVLLSQNATTPRAVGVEFGTHKGNTHNVYAKHEVLLAAGSAVSPTILEYSGIGMKSILEPLGIDTVVDLPVGLNLQDQATSTVRSRITSAGAGQGQAAWFATFNETFGDYAEKAHELLNTKLEQWAEEAVARGGFHNTTALLIQYENYRDWIVKDNVAYSELFLDTAGVASFDVWDLLPFTRGYVHILDKDPYLRHFAYDPQYFLNELDLLGQAAATQLARNISNSGAMQTYFAGETIPGDNLAYDADLSAWVEYIPYNFRPNYHGVGTCSMMPKEMGGVVDNAARVYGVQGLRVIDGSIPPTQMSSHVMTVFYAMALKVADAILADY

SEQ ID NO: 1302 - protein, 597 aa, Aspergillus niger
LVSSLVVSLAAALPHYIRSNGIEASLLTDPKEVAGRTVDYIIAGGGLTGLTTAARLTENPDITVLVIESGSYESDRGPIIEDLNAYGDIFGSSVDHAYETVELATNNQTALIRSGNGLGGSTLVNGGTWTRPHKAQVDSWETVFGNEGWNWDSVAAYSLQAERARAPNAKQIAAGHYFNASCHGINGTVHAGPRDTGDDYSPIVKALMSAVEDRGVPTKKDLGCGDPHGVSMFPNTLHEDQVRSDAAREWLLPNYQRPNLQVLTGRYVGKVLLSQNATTPRAVGVEFGTHKGNTHNVYAKHEVLLAAGSAVSPTILEYSGIGMKSILEPLGIDTVVDLPVGLNLQDQTTSTVRSRITSAGAGQGQAAWFATFNETFGDYAEKAHELLNTKLEQWAEEAVARGGFHNTTALLIQYENYRDWIVKDNVAYSELFLDTAGVARFDVWDLLPFTRGYVHILDKDPYLRHFAYDPQYFLNELDLLGQAAATQLARNISNSGAMQTYFAGETIPGDNLAYDADLSAWVEYIPYNFRPNYHGVGTCSMMPKEMGGVVDNAARVYGVQGLRVIDGSIPPTQMSSHPMTVFYAMALKVADAILADY

SEQ ID NO: 1303 - protein, 597 aa, Aspergillus niger
LVSSLVVSLAAALPHYIRSNGIEASLLTDPKEVAGRTVDYIIAGGGLTGLTTAARLTENPDITVLVIESGSYESDRGPIIEDLNAYGDIFGSSVDHAYETVELATNNQTALIRSGNGLGGSTLVNGGTWTRPHKAQVDSWETVFGNEGWNWDSVAAYSLQAERARAPNAKQIAAGHYFNASCHGINGTVHAGPRDTGDDYSPIVKALMSAVEDRGVPTKKDLGCGDPHGVSMFPNTLHEDQVRSDAAREWLLPNYQRPNLQVLTGRYVGKVLLSQNATTPRAVGVEFGTHKGNTHNVYAKHEVLLAAGSAVSPTILEYSGIGMKSILEPLGIDTVVDLPVGLNLQDQATSTVRSRITSAGAGQGQAAWFATFNETFGDYAEKAHELLNTKLEQWAEEAVARGGFHNTTALLIQYENYRDWIVKDNVAYSELFLDTAGVASFDVWDLLPFTRGYVHILDKDPYLRHFAYDPQYFLNELDLLGQAAATQLARNISNSGAMQTYFAGETIPGDNLAYDADLSAWVEYIPYNFRPNYHGVGTCSMMPKEMGGVVDNAARVYGVQGLRVIDGSIPPTQMSSHSMTVFYAMALKVADAILADY

SEQ ID NO: 1304 - protein, 597 aa, Aspergillus niger
LVSSLVVSLAAALPHYIRSNGIEASLLTDPKEVAGRTVDYIIAGGGLTGLTTAARLTENPDITVLVIESGSYESDRGPIIEDLNAYGDIFGSSVDHAYETVELATNNQTALIRSGNGLGGSTLVNGGTWTRPHKAQVDSWETVFGNEGWNWDSVAAYSLQAERARAPNAKQIAAGHYFNASCHGINGTVHAGPRDTGDDYSPIVKALMSAVEDRGVPTKKDLGCGDPHGVSMFPNTLHEDQVRSDAAREWLLPNYQRPNLQVLTGRYVGKVLLSQNATTPRAVGVEFGTHKGNTHNVYAKHEVLLAAGSAVSPTILEYSGIGMKSILEPLGIDTVVDLPVGLNLQDQTASTVRSRITSAGAGQGQAAWFATFNETFGDYAEKAHELLNTKLEQWAEEAVARGGFHNTTALLIQYENYRDWIVKDNVAYSELFLDTAGVASFHVWDLLPFTRGYVHILDKDPYLRHFAYDPQYFLNELDLLGQAAATQLARNISNSGAMQTYFAGETIPGDNLAYDADLSAWVEYIPYNFRPNYHGVGTCSMMPKEMGGVVDNAARVYGVQGLRVIDGSIPPTQMSSHVMTVFYAMALKVADAILADY

SEQ ID NO: 1305 - protein, 597 aa, Aspergillus niger
LVSSLVVSLAAALPHYIRSNGIEASLLTDPKEVAGRTVDYIIAGGGLTGLTTAARLTENPDITVLVIESGSYESDRGPIIEDLNAYGDIFGSSVDHAYETVELATNNQTALIRSGNGLGGSTLVNGGTWTRPHKAQVDSWETVFGNEGWNWDSVAAYSLQAERARAPNAKQIAAGHYFNASCHGINGTVHAGPRDTGDDYSPIVKALMSAVEDRGVPTKKDLGCGDPHGVSMFPNTLHEDQVRSDAAREWLLPNYQRPNLQVLTGRYVGKVLLSQNATTPRAVGVEFGTHKGNTHNVYAKHEVLLAAGSAVSPTILEYSGIGMKSILEPLGIDTVVDLPVGLNLQDQTTSTVRSRITSAGAGQGQAAWFATFNETFGDYAEKAHELLNTKLEQWAEEAVARGGFHNTTALLIQYENYRDWIVKDNVAYSELFLDTAGVAEFDVWDLLPFTRGYVHILDKDPYLRHFAYDPQYFLNELDLLGQAAATQLARNISNSGAMQTYFAGETIPGDNLAYDADLSAWVEYIPYNFRPNYHGVGTCSMMPKEMGGVVDNAARVYGVQGLRVIDGSIPPTQMSSHPMTVFYAMALKVADAILADY

SEQ ID NO: 1306 - protein, 597 aa, Aspergillus niger
LVSSLVVSLAAALPHYIRSNGIEASLLTDPKEVAGRTVDYIIAGGGLTGLTTAARLTENPDITVLVIESGSYESDRGPIIEDLNAYGDIFGSSVDHAYETVELATNNQTALIRSGNGLGGSTLVNGGTWTRPHKAQVDSWETVFGNEGWNWDSVAAYSLQAERARAPNAKQIAAGHYFNASCHGINGTVHAGPRDTGDDYSPIVKALMSAVEDRGVPTKKDLGCGDPHGVSMFPNTLHEDQVRSDAAREWLLPNYQRPNLQVLTGRYVGKVLLSQNATTPRAVGVEFGTHKGNTHNVYAKHEVLLAAGSAVSPTILEYSGIGMKSILEPLGIDTVVDLPVGLNLQDQTTSTVRSRITSAGAGQGQAAWFATFNETFGDYAEKAHELLNTKLEQWAEEAVARGGFHNTTALLIQYENYRDWIVKDNVAYSELFLDTAGVAQFDVWDLLPFTRGYVHILDKDPYLRHFAYDPQYFLNELDLLGQAAATQLARNISNSGAMQTYFAGETIPGDNLAYDADLSAWVEYIPYNFRPNYHGVGTCSMMPKEMGGVVDNAARVYGVQGLRVIDGSIPPTQMSSHPMTVFYAMALKVADAILADY

SEQ ID NO: 1307 - protein, 597 aa, Aspergillus niger
LVSSLVVSLAAALPHYIRSNGIEASLLTDPKEVAGRTVDYIIAGGGLTGLTTAARLTENPDITVLVIESGSYESDRGPIIEDLNAYGDIFGSSVDHAYETVELATNNQTALIRSGNGLGGSTLVNGGTWTRPHKAQVDSWETVFGNEGWNWDSVAAYSLQAERARAPNAKQIAAGHYFNASCHGINGTVHAGPRDTGDDYSPIVKALMSAVEDRGVPTKKDLGCGDPHGVSMFPNTLHEDQVRSDAAREWLLPNYQRPNLQVLTGRYVGKVLLSQNATTPRAVGVEFGTHKGNTHNVYAKHEVLLAAGSAVSPTILEYSGIGMKSILEPLGIDTVVDLPVGLNLQDQTTSTVRSRITSAGAGQGQAAWFATFNETFGDYAEKAHELLNTKLEQWAEEAVARGGFHNTTALLIQYENYRDWIVKDNVAYSELFLDTAGVASFHVWDLLPFTRGYVHILDKDPYLRHFAYDPQYFLNELDLLGQAAATQLARNISNSGAMQTYFAGETIPGDNLAYDADLSAWVEYIPYNFRPNYHGVGTCSMMPKEMGGVVDNAARVYGVQGLRVIDGSIPPTQMSSHSMTVFYAMALKVADAILADY

SEQ ID NO: 1308 - protein, 576 aa, Synthetic construct
IEASLLTDPKEVAGRTVDYIIAGGGLTGLVVAARLTENPDITVLVIESGSYESDRGPIIEDLNAYGKIFGSSVDHAYETVCLATNNRTALIRAGNGLGGSTLVNGGTWTRPHKAQVDSWETVFGNEGWNWDSVAAYSLQAERARAPNAKQIAAGHYFNASCHGINGTVHAGPRDTGDDYSPIVKALMSAVEDRGVPTKKDLCCGDPHGVSMFPNTLHEDQVRSDAAREWLLPNYQRPNLQVLTGQYVGKVLLSQNATTPRAVGVEFGTHKGNFHNVTAKHEVLLAAGSAVSPTILEYSGIGMKSILEPLGIKTVVDLPVGLNLQDQTTSTVRSRITSAGAGQGQAAWFATFNETFGDYTPKAHELLNTKLEQWAEEAVARGGFHNTTALLIQYENYRDWIVKDNVAYSELFLDTAGEASFDVWDLLPFTRGYVHILDKDPYLRHFAYDPQYFLNELDLLGQAAATQLARNISNSGAMQTYFAGETIPGDNLAYDADLRAWVEYIPYHFRPNYHGVGTCSMMPKEMGGVVDNAARVYGVQGLRVIDGSIPPTQMSSHVMTVFYAMALKIADAVLADY

SEQ ID NO: 1309 - protein, 576 aa, Synthetic construct
IEASLLTDPKEVAGRTVDYIIAGGGLTGLVVAARLTENPDITVLVIESGSYESDRGPIIEDLNAYGKIFGSSVDHAYETVCLATNNRTALIRAGNGLGGSTLVNGGTWTRPHKAQVDSWETVFGNEGWNWDSVAAYSLQAERARAPNAKQIAAGHYFNASCHGINGTVHAGPRDTGDDYSPIVKALMSAVEDRGVPTKKDLGCGDPHGVSMFPNTLHEDQVRSDAAREWLLPNYQRPNLQVLTGQYVGKVLLSQNATTPRAVGVEFGTHKGNFHNVTAKHEVLLAAGSAVSPTILEYSGIGMKSILEPLGIKTVVDLPVGLNLQDQTTSTVRSRITSAGAGQGQAAWFATFNETFGDYTPKAHELLNTKLEQWAEEAVARGGFHNTTALLIQYENYRDWIVKDNVAYSELFLDTAGEASFDVWDLLPFTRGYVHILDKDPYLRHFAYDPQYFLNELDLLGQAAATQLARNISNSGAMQTYFAGETIPGDNLAYDADLRAWVEYIPYHFRPNYHGVGTCSMMPKEMGGVVDNAARVYGVQGLRVIDGSIPPTQMSSHVMTVFYAMALKIADAVLADY

SEQ ID NO: 1310 - protein, 576 aa, Synthetic construct
IEASLLTDPKEVAGRTVDYIIAGGGLTGLVVAARLTENPDITVLVIESGSYESDRGPIIEDLNAYGKIFGSSVDHAYETVCLATNNRTALIRAGNGLGGSTLVNGGTWTRPHKAQVDSWETVFGNEGWNWDSVAAYSLQAERARAPNAKQIAAGHYFNASCHGINGTVHAGPRDTGDDYSPIVKALMSAVEDRGVPTKKDLGCGDPHGVSMFPNTLHEDQVRSDAAREWLLPNYQRPNLSVLTGQYVGKVLLSQNATTPRAVGVEFGTHKGNFHNVTAKHEVLLAAGSAVSPTILEYSGIGMKSILEPLGIKTVVDLPVGLNLQDQTTSTVRSRITSAGAGQGQAAWFATFNETFGDYTPKAHELLNTKLEQWAEEAVARGGFHNTTALLIQYENYRDWIVKDNVAYSELFLDTAGEASFDVWDLLPFTRGYVHILDKDPYLRHFAYDPQYFLNELDLLGQAAATQLARNISNSGAMQTYFAGETIPGDNLAYDADLRAWVEYIPYHFRPNYHGVGTCSMMPKEMGGVVDNAARVYGVQGLRVIDGSIPPTQMSSHVMTVFYAMALKIADAVLADY

SEQ ID NO: 1311 - protein, 576 aa, Synthetic construct
IEASLLTDPKEVAGRTVDYIIAGGGLTGLVVAARLTENPDITVLVIESGSYESDRGPIIEDLNAYGKIFGSSVDHAYETVCLATNNRTALIRAGNGLGGSTLVNGGTWTRPHKAQVDSWETVFGNEGWNWDSVAAYSLQAERARAPNAKQIAAGHYFNASCHGINGTVHAGPRDTGDDYSPIVKALMSAVENRGVPTKKDLGCGDPHGVSMFPNTLHEDQVRSDAAREWLLPNYQRPNLSVLTGQYVGKVLLSQNATTPRAVGVEFGTHKGNFHNVTAKHEVLLAAGSAVSPTILEYSGIGMKSILEPLGIKTVVDLPVGLNLQDQTTSTVRSRITSAGAGQGQAAWFATFNETFGDYTPKAHELLNTKLEQWAEEAVARGGFHNTTALLIQYENYRDWIVKDNVAYSELFLDTAGEISFDVWDLLPFTRGYVHILDKDPYLRHFAYDPQYFLNELDLLGQAAATQLARNISNSGAMQTYFAGETIPGDNLAYDANLRAWVEYIPYHFRPNYHGVGTCSMMPKEMGGVVDNAARVYGVQGLRVIDGSIPPTQMSSHVMTVFYAMALKIADAVLADY

SEQ ID NO: 1312 - protein, 576 aa, Aspergillus niger
IEASLLTDPKEVAGRTVDYIIAGGGLTGLVVAARLTENPDITVLVIESGSYESDRGPIIEDLNAYGKIFGSSVDHAYETVCLATNNRTALIRAGNGLGGSTLVNGGTWTRPHKAQVDSWETVFGNEGWNWDSVAAYSLQAERARAPNAKQIAAGHYFNASCHGINGTVHAGPRDTGDDYSPIVKALMSAVEDRGVPTKKDLGCGDPHGVSMFPNTLHEDQVRSDAAREWLLPNYQRPNLSVLTGQYVGKVLLSQNATTPRAVGVEFGTHKGNFHNVTAKHEVLLAAGSAVSPTILEYSGIGMKSILEPLGIKTVVDLPVGLNLQDQTTSTVRSRITSAGAGQGQAAWFATFNETFGDYTEKAHELLNTKLEQWAEEAVARGGFHNTTALLIQYENYRDWIVKDNVAYSELFLDTAGEASFDVWDLLPFTRGYVHILDKDPYLRHFAYDPQYFLNELDLLGQAAATQLAREISNSGAMQTYFAGETIPGDNLAYDADLRAWVEYIPYHFRPNYHGVGTCSMMPKEMGGVVDNAARVYGVQGLRVIDGSIPPTQMSSHVMTVFYAMALKIADAVLADY

SEQ ID NO: 1313 - protein, 576 aa, Aspergillus niger
IEDSLLTDPKEVAGRTVDYIIAGGGLTGLVVAARLTENPDITVLVIESGSYESDRGPIIEDLNAYGKIFGSSVDHAYETVCLATNNRTALIRAGNGLGGSTLVNGGTWTRPHKAQVDSWETVFGNEGWNWDSVAAYSLQAERARAPNAKQIAAGHYFNASCHGINGTVHAGPRDTGDDYSPIVKALMSAVEDRGVPTKKDLGCGDPHGVSMFPNTLHEDQVRSDAAREWLLPNYQRPNLSVLTGQYVGKVLLSQNATTPRAVGVEFGTHKGNFHNVTAKHEVLLAAGSAVSPTILEYSGIGMKSILEPLGIKTVVDLPVGLNLQDQTTSTVRSRITSAGAGQGQAAWFATFNETFGDYTEKAHELLNTKLEQWAEEAVARGGFHNTTALLIQYENYRDWIVKDNVAYSELFLDTAGEASFDVWDLLPFTRGYVHILDKDPYLRHFAYDPQYFLNELDLLGQAAATQLAREISNSGAMQTYFAGETIPGDNLAYDADLRAWVEYIPYHFRPNYHGVGTCSMMPKEMGGVVDNAARVYGVQGLRVIDGSIPPTQMSSHVMTVFYAMALKIADAVLADY

SEQ ID NO: 1314 - protein, 576 aa, Synthetic construct
IEASLLTDPKEVAGRTVDYIIAGGGLTGLVVAARLTENPDITVLVIESGSYESDRGPIIEDLNAYGKIFGSSVDHAYETVCLATNNRTALIRAGNGLGGSTLVNGGTWTRPHKAQVDSWETVFGNEGWNWDSVAAYSLQAERARAPNAKQIAAGHYFNASCHGINGTVHAGPRDTGDDYSPIVKALMSAVEDRGVPTKKDLCCGDPHGVSMFPNTLHEDQVRSDAAREWLLPNYQRPNLSVLTGQYVGKVLLSQNATTPRAVGVEFGTHKGNFHNVTAKHEVLLAAGSAVSPTILEYSGIGMKSILEPLGIKTVVDLPVGLNLQDQTTSTVRSRITSAGAGQGQAAWFATFNETFGDYTPKAHELLNTKLEQWAEEAVARGGFHNTTALLIQYENYRDWIVKDNVAYSELFLDTAGEASFDVWDLLPFTRGYVHILDKDPYLRHFAYDPQYFLNELDLLGQAAATQLARNISNSGAMQTYFAGETIPGDNLAYDADLRAWVEYIPYHFRPNYHGVGTCSMMPKEMGGVVDNAARVYGVQGLRVIDGSIPPTQMSSHVMTVFYAMALKIADAVLADY

SEQ ID NO: 1315 - protein, 576 aa, Synthetic construct
IEASLLTDPKEVAGRTVDYIIAGGGLTGLVVAARLTENPDITVLVIESGSYESDRGPIIEDLNAYGKIFGSSVDHAYETVCLATNNRTALIRAGNGLGGSTLVNGGTWTRPHKAQVDSWETVFGNEGWNWDSVAAYSLQAERARAPNAKQIAAGHYFNASCHGINGTVHAGPRDTGDDYSPIVKALMSAVENRGVPTKKDLGCGDPHGVSMFPNTLHEDQVRSDAAREWLLPNYQRPNLQVLTGQYVGKVLLSQNATTPRAVGVEFGTHKGNFHNVTAKHEVLLAAGSAVSPTILEYSGIGMKSILEPLGIKTVVDLPVGLNLQDQTTSTVRSRITSAGAGQGQAAWFATFNETFGDYTPKAHELLNTKLEQWAEEAVARGGFHNTTALLIQYENYRDWIVKDNVAYSELFLDTAGEISFDVWDLLPFTRGYVHILDKDPYLRHFAYDPQYFLNELDLLGQAAATQLARNISNSGAMQTYFAGETIPGDNLAYDANLRAWVEYIPYHFRPNYHGVGTCSMMPKEMGGVVDNAARVYGVQGLRVIDGSIPPTQMSSHVMTVFYAMALKIADAVLADY

SEQ ID NO: 1316 - protein, 576 aa, Synthetic construct
IEASLLTDPKEVAGRTVDYIIAGGGLTGLVVAARLTENPDITVLVIESGSYESDRGPIIEDLNAYGKIFGSSVDHAYETVCLATNNRTALIRAGNGLGGSTLVNGGTWTRPHKAQVDSWETVFGNEGWNWDSVAAYSLQAERARAPNAKQIAAGHYFNASCHGINGTVHAGPRDTGDDYSPIVKALMSAVEDRGVPTKKDLCCGDPHGVSMFPNTLHEDQVRSDAAREWLLPNYQRPNLSVLTGQYVGKVLLSQNATTPRAVGVEFGTHKGNFHNVTAKHEVLLAAGSAVSPTILEYSGIGMKSILEPLGIKTVVDLPVGLNLQDQTTSTVRSRITSAGAGQGQAAWFATFNETFGDYTPKAHELLNTKLEQWAEEAVARGGFHNTTALLIQYENYRDWIVKDNVAYSELFLDTAGEISFDVWDLLPFTRGYVHILDKDPYLRHFAYDPQYFLNELDLLGQAAATQLARNISNSGAMQTYFAGETIPGDNLAYDADLRAWVEYIPYHFRPNYHGVGTCSMMPKEMGGVVDNAARVYGVQGLRVIDGSIPPTQMSSHVMTVFYAMALKIADAVLADY

SEQ ID NO: 1317 - protein, 576 aa, Synthetic construct
IEASLLTDPKEVAGRTVDYIIAGGGLTGLVVAARLTENPDITVLVIESGSYESDRGPIIEDLNAYGKIFGSSVDHAYETVCLATNNRTALIRAGNGLGGSTLVNGGTWTRPHKAQVDSWETVFGNEGWNWDSVAAYSLQAERARAPNAKQIAAGHYFNASCHGINGTVHAGPRDTGDDYSPIVKALMSAVEDRGVPTKKDLGCGDPHGVSMFPNTLHEDQVRSDAAREWLLPNYQRPNLSVLTGQYVGKVLLSQNATTPRAVGVEFGTHKGNFHNVTAKHEVLLAAGSAVSPTILEYSGIGMKSILEPLGIKTVVDLPVGLNLQDQTTSTVRSRITSAGAGQGQAAWFATFNETFGDYTPKAHELLNTKLEQWAEEAVARGGFHNTTALLIQYENYRDWIVKDNVAYSELFLDTAGEISFDVWDLLPFTRGYVHILDKDPYLRHFAYDPQYFLNELDLLGQAAATQLARNISNSGAMQTYFAGETIPGDNLAYDADLRAWVEYIPYHFRPNYHGVGTCSMMPKEMGGVVDNAARVYGVQGLRVIDGSIPPTQMSSHVMTVFYAMALKIADAVLADY

SEQ ID NO: 1318 - protein, 576 aa, Synthetic construct
IEASLLTDPKEVAGRTVDYIIAGGGLTGLVVAARLTENPDITVLVIESGSYESDRGPIIEDLNAYGKIFGSSVDHAYETVCLATNNRTALIRAGNGLGGSTLVNGGTWTRPHKAQVDSWETVFGNEGWNWDSVAAYSLQAERARAPNAKQIAAGHYFNASCHGINGTVHAGPRDTGDDYSPIVKALMSAVEDRGVPTKKDLGCGDPHGVSMFPNTLHEDQVRSDAAREWLLPNYQRPNLQVLTGQYVGKVLLSQNATTPRAVGVEFGTHKGNFHNVTAKHEVLLAAGSAVSPTILEYSGIGMKSILEPLGIKTVVDLPVGLNLQDQTTSTVRSRITSAGAGQGQAAWFATFNETFGDYTPKAHELLNTKLEQWAEEAVARGGFHNTTALLIQYENYRDWIVKDNVAYSELFLDTAGEISFDVWDLLPFTRGYVHILDKDPYLRHFAYDPQYFLNELDLLGQAAATQLARNISNSGAMQTYFAGETIPGDNLAYDADLRAWVEYIPYHFRPNYHGVGTCSMMPKEMGGVVDNAARVYGVQGLRVIDGSIPPTQMSSHVMTVFYAMALKIADAVLADY

SEQ ID NO: 1319 - protein, 576 aa, Synthetic construct
IEASLLTDPKEVAGRTVDYIIAGGGLTGLVVAARLTENPDITVLVIESGSYESDRGPIIEDLNAYGKIFGSSVDHAYETVCLATNNRTALIRAGNGLGGSTLVNGGTWTRPHKAQVDSWETVFGNEGWNWDSVAAYSLQAERARAPNAKQIAAGHYFNASCHGINGTVHAGPRDTGDDYSPIVKALMSAVEDRGVPTKKDLCCGDPHGVSMFPNTLHEDQVRSDAAREWLLPNYQRPNLQVLTGQYVGKVLLSQNATTPRAVGVEFGTHKGNFHNVTAKHEVLLAAGSAVSPTILEYSGIGMKSILEPLGIKTVVDLPVGLNLQDQTTSTVRSRITSAGAGQGQAAWFATFNETFGDYTPKAHELLNTKLEQWAEEAVARGGFHNTTALLIQYENYRDWIVKDNVAYSELFLDTAGEISFDVWDLLPFTRGYVHILDKDPYLRHFAYDPQYFLNELDLLGQAAATQLARNISNSGAMQTYFAGETIPGDNLAYDADLRAWVEYIPYHFRPNYHGVGTCSMMPKEMGGVVDNAARVYGVQGLRVIDGSIPPTQMSSHVMTVFYAMALKIADAVLADY

SEQ ID NO: 1320 - protein, 576 aa, Synthetic construct
IEASLLTDPKEVAGRTVDYIIAGGGLTGLVVAARLTENPDITVLVIESGSYESDRGPIIEDLNAYGKIFGSSVDHAYETVCLATNNRTALIRAGNGLGGSTLVNGGTWTRPHKAQVDSWETVFGNEGWNWDSVAAYSLQAERARAPNAKQIAAGHYFNASCHGINGTVHAGPRDTGDDYSPIVKALMSAVEDRGVPTKKDLGCGDPHGVSMFPNTLHEDQVRSDAAREWLLPNYQRPNLQVLTGQYVGKVLLSQNATTPRAVGVEFGTHKGNFHNVTAKHEVLLAAGSAVSPTILEYSGIGMKSILEPLGIKTVVDLPVGLNLQDQTTSTVRSRITPAGAGQGQAAWFATFNETFGDYTEKAHELLNTKLEQWAEEAVARGGFHNTTALLIQYENYRDWIVKDNVAYSELFLDTAGEASFDVWDLLPFTRGYVHILDKDPYLRHFAYDPQYFLNELDLLGQAAATQLARNISNSGAMQTYFAGETIPGDNLAYDADLRAWVEYIPYHFRPNYHGVGTCSMMPKEMGGVVDNAARVYGVQGLRVIDGSIPPTQMSSHVMTVFYAMALKIADAVLADY

SEQ ID NO: 1321 - protein, 585 aa, Aspergillus niger
LPHYIRSNGIEASLLTDPKDVSGRTVDYLIAGGGLTGLTTAARLTENPNISVLVIESGSYESDRGPIIEDLNAYGDIFGSSVDHAYETVELATNNQTALIRSGNGLGGSTLVNGGTWTRPHKAQVDSWETVFGNEGWNWDNVPAYSLQAERARAPNAKQIAAGHYFNASCHGTNGTVHAGPRDTGDDYSPIVKALMSAVEDRGVPTKKDFGCGDPHGVSMFPNTLHEDQVRSDAAREWLLPNYQRPNLQVLTGQYVGKVLLSQNGTTPRAVGVEFGTHKGNTHNVYAEHEVLLAAGSAVSPTILEYSGIGMKSILEPLGIDTVVDLPVGLNLQDQTTATVRSRITSAGAGQGQAAWFATFNETFGDYSEKAHELLNTKLEQWAEEAVARRGFHNTTALLIQYENYRDWIVNHNVAYSELFLDTAGVASFDVWDLLPFTRGYVHILDKDPYLHHFAYDPQYILNELDLLGQAAATQLARNISNSGAMQTYFAGETIPGDNLAYDADLSAWTEYIPYHFRPNYHGVGTCSMMPKEMGGVVDNAARVYGVQGLRVIDGSIPPTQMSSHVMTVFYAMALKISDAILEDY

SEQ ID NO: 1322 - protein, 585 aa, Aspergillus niger
LPHYIRSNGIEASLLTDPKDVSGRTVDYIIAGGGLTGLTTAARLTENPNISVLVIESGSYESDRGPIIEDLNAYGDIFGSSVDHAYETVELATNNQTALIRSGNGLGGSTLVNGGTWTRPHKAQVDSWETVFGNEGWNWDNVPAYSLQAERARAPNAKQIAAGHYFNASCHGTNGTVHAGPRDTGDDYSPIVKALMSAVEDRGVPTKKDFGCGDPHGVSMFPNTLHEDQVRSDAAREWLLDNYQRPNLQVLTGQYVGKVLLSQNGTTPRAVGVEFGTHKGNTHNVYAEHEVLLAAGSAVSPTILEYSGIGMKSILEPLGIDTVVDLPVGLNLQDQTTATVRSRITSAGAGQGQAAWFASFNETFGDYSEKAHELLNTKLEQWAEEAVARGGFHNTTALLIQYENYRDWIVNHNVAYSELFLDTAGVASFDVWDLLPFTRGYVHILDKDPYLHHFAYDPQYILNELDLLGQAAATQLARNISNSGAMQTYFAGETIPGDNLAYDADLSAWTEYIPYHFRPNYHGVGTCSMMPKEMGGVVDNAARVYGVQGLRVIDGSIPPTQMSSHVMTVFYAMALKISDAILEDY

SEQ ID NO: 1323 - protein, 577 aa, Aspergillus niger
GIEASLLTDPKEVAGRTVDYIIAGGGLTGLTTAARLTENPDITVLVIESGSYESDRGPIIEDLNAYGDIFGSSVDHAYETVELATNNQTALIRSGNGLGGSTLVNGGXWTRPHKAQVDSWETVFGNEGWNWDSVAAYSLQAERARAPNAKQIAAGHYFNASCHGINGTVHAGPRDTGDDYSPIVKALMSAVEDRGVPTKKDLGCGDPHGVSMFPNTLHEDQVRSDAAREWLLPNYQRPNLQVLTGQYVGKVLLSQNATTPRAVGVEFGTHKGNTHNVYAKHEVLLAAGSAVSPTILEYSDIGMKSILEPLGIDTVVDLPVGLNLQDQTTSTVRSRITSAGAGQGQAAWXATFNETFGDYAEKAHELLNTKLEQWAEEAVARGGFHNTTALLIQYENYRDWIVKDNVAYSELFLDTAGVASFDVWDLLPFTRGYVHILDKDPYLRHFAYDPQYFLNELDLLGQAAATQLARNISNSGAMQTYFAGETIPGDNLAYDADLSAWVEYIPYNFRPNYHGVGTCSMMPKEMGGVVDNAARVYGVQGLRVIDGSIPPTQMSSHVMTVFYAMALKIADAILADY

SEQ ID NO: 1324 - protein, 577 aa, Synthetic construct
GIEASLLTDPKEVAGRTVDYIIAGGGLTGLVVAARLTENPDITVLVIESGSYESDRGPIIEDLNAYGKIFGSSVDHAYETVCLATNNRTALIRAGNGLGGSTLVNGGTWTRPHKAQVDSWETVFGNEGWNWDSVAAYSLQAERARAPNAKQIAAGHYFNASCHGINGTVHAGPRDTGDDYSPIVKALMSAVEDRGVPTKKDLGCGDPHGVSMFPNTLHPDQVRSDAAREWLLPNYQRPNLSVLTGQYVGKVLLSQNATTPRAVGVEFGTHKGNFHNVTAKHEVLLAAGSAVSPTILEYSGIGMKSILEPLGIKTVVDLPVGLNLQDQTTSTVRSRITSAGAGQGQAAWFATFNETFGDYTEKAHELLNTKLEQWAEEAVARGGFHNTTALLIQYENYRDWIVKDNVAYSELFLDTAGEASFDVWDLLPFTRGYVHILDKDPYLRHFAYDPQYFLNELDLLGQAAATQLARNISNSGAMQTYFAGETIPGDNLAYDADLRAWVEYIPYHFRPNYHGVGTCSMMPKEMGGVVDNAARVYGVQGLRVIDGSIPPTQMSSHVMTVFYAMALKIADAVLADY

SEQ ID NO: 1325 - protein, 577 aa, Aspergillus niger
GIEASLLTDPKDVSGRTVDYIIAGGGLTGLTTAARLTENPNISVLVIESGSYESDRGPIIEDLNAYGDIFGSSVDHAYETVELATNNQTALIRSGNGLGGSTLVNGGTWTRPHKAQVDSWETVFGNEGWNWDNVAAYSLQAERARAPNAKQIAAGHYFNASCHGVNGTVHAGPRDTGDDYSPIVKALMSAVEDRGVPTKKDFGCGDPHGVSMFPNTLHEDQVRSDAAREWLLPNYQRPNLQVLTGQYVGKVLLSQNGTTPRAVGVEFGTHKGNTHNVYAKREVLLAAGSAVSPTILEYSGIGMKSILEPLGIDTVVDLPVGLNLQDQTTATVRSRITSAGAGQGQAAWFATFNETFGDYSEKAHELLNTKLEQWAEEAVARGGFHNTTALLIQYENYRDWIVNHNVAYSELFLDTAGVASFDVWDLLPFTRGYVHILDKDPYLHHFAYDPQYFLNELDLLGQAAATQLARNISNSGAMQTYFAGETIPGDNLAYDADLSAWTEYIPYHFRPNYHGVGTCSMMPKEMGGVVDNAARVYGVQGLRVIDGSIPPTQMSSHVMTVFYAMALKISDAILEDY

SEQ ID NO: 1326 - protein, 577 aa, Aspergillus niger
GIEASLLTDPKEVAGRTVDYIIAGGGLTGLVVAARLTENPDITVLVIESGSYESDRGPIIEDLNAYGKIFGSSVDHAYETVCLATNNRTALIRAGNGLGGSTLVNGGTWTRPHKAQVDSWETVFGNEGWNWDSVAAYSLQAERARAPNAKQIAAGHYFNASCHGINGTVHAGPRDTGDDYSPIVKALMSAVEDRGVPTKKDLGCGDPHGVSMFPNTLHEDQVRSDAAREWLLPNYQRPNLQVLTGQYVGKVLLSQNATTPRAVGVEFGTHKGNFHNVTAKHEVLLAAGSAVSPTILEYSGIGMKSILEPLGIKTVVDLPVGLNLQDQTTSTVRSRITSAGAGQGQAAWFATFNETFGDYTEKAHELLNTKLEQWAEEAVARGGFHNTTALLIQYENYRDWIVKDNVAYSELFLDTAGEASFDVWDLLPFTRGYVHILDKDPYLRHFAYDPQYFLNELDLLGQAAATQLARNISNSGAMQTYFAGETIPGDNLAYDADLRAWVEYIPYHFRPNYHGVGTCSMMPKEMGGVVDNAARVYGVQGLRVIDGSIPPTQMSSHVMTVFYAMALKIADAVLADY

SEQ ID NO: 1327 - protein, 577 aa, Aspergillus niger
GIEASLLTDPKDVSGRTVDYIIAGGGLTGLTIAARLTENPNISVLVIESGSYESDRGPIIEDLNAYGDIFGSSVDHAYETVELATNNQTALIRSGNGLGGSTLVNGGTWTRPHKAQVDSWETVFGNEGWNWDNVAAYSLQAERARAPNAKQIAAGHYFNASCHGVNGTVHAGPRDTGDDYSPIVKALMSAVEDRGVPTKKDFGCGDPHGVSMFPNTLHEDQVRSDAAREWLLPNYQRPNLQVLTGQYVGKVLLSQNGTTPRAVGVEFGTHKGNTHNVYAKHEVLLAAGSAVSPTILEYSGIGMKSILEPLGIDTVVDLPVGLNLQDQTTATVRSRITSAGAGQGQAAWFATFNETFGDYSEKAHELLNTKLEQWAEEAVARGGFHNTTALLIQYENYRDWIVNHNVAYSELFLDTAGVASFDVWDLLPFTRGYVHILDKDPYLHHFAYDPQYFLNELDLLGQAAATQLARNISNSGAMQTYFAGETIPGDNLAYDADLSAWTEYIPYHFRPNYHGVGTCSMMPKEMGGVVDNAARVYGVQGLRVIDGSIPPTQMSSHVMTVFYAMALKISDAILEDY

SEQ ID NO: 1328 - protein, 577 aa, Aspergillus niger
GIEASLLTDPKDVSGRTVDYIIAGGGLTGLTTAARLTENPNISVLVIESGSYESDRGPIIEDLNAYGDIFGSSVDHAYETVELATNNQTALIRSGNGLGGSTLVNGGTWTRPHKAQVDSWETVFGNEGWNWDNVAAYSLQAERARAPNAKQIAAGHYFNASCHGVNGTVHAGPRDTGDDYSPIVKALMSAVEDRGVPTKKDFGCGDPHGVSMFPNTLHEDQVRSDAAREWLLPNYQRPNLQVLTGQYVGKVLLSQNGTTPRAVGVEFGTHKGNTHNVYAKHEVLLAAGSAVSPTILEYSGIGMKSILEPLGIDTVVDLPVGLNLQDQTTATVRSRITSAGAGQGQAAWFATFNETFGDYSEKAHELLNTKLEQWAEEAVARGGFHNTTALLIQYENYRDWIVNHNVAYSELFLDTAGVASFDVWDLLPFTRGYVHILDKDPYLHHFAYDPQYFLNELDLLGQAAATQLAREISNSGAMQTYFAGETIPGDNLAYDADLSAWTEYIPYHFRPNYHGVGTCSMMPKEMGGVVDNAARVYGVQGLRVIDGSIPPTQMSSHVMTVFYAMALKISDAILEDY

SEQ ID NO: 1329 - protein, 577 aa, Aspergillus niger
GIEASLLTDPKDVSGRTVDYIIAGGGLTGLTTAARLTENPNISVLVIESGSYESDRGPIIEDLNAYGDIFGSSVDHAYETVELATNNQTALIRSGNGLGGSTLVNGGTWTRPHKAQVDSWETVFGNEGWNWDNVAAYSLQAERARAPNAKQIAAGHYFNASCHGVNGTVHAGPRDTGDDYSPIVKALMSAVEDRGVPTKKDFGCGDPHGVSMFPNTLHEDQVRSDAAREWLLPNYQRPNLQVLTGQYVGKVLLSQNGTTPRAVGVEFGTHKGNTHNVYAKHEVLLAAGSAVSPTILEYSGIGMKSILEPLGIDTVVDLPVGLNLQDQTTATVRSRITSAGAGQGQAAWFATFNETFGDYSEKAHELLNTKLEQWAEEAVARGGFHNTTALLIQYENYRDWIVNHNVAYSELFLDTAGVASFDVWDLLPFTRGYVHILDKDPYLHHFAYDPQYFLNELDLLGQAAATKLARNISNSGAMQTYFAGETIPGDNLAYDADLSAWTEYIPYHFRPNYHGVGTCSMMPKEMGGVVDNAARVYGVQGLRVIDGSIPPTQMSSHVMTVFYAMALKISDAILEDY

SEQ ID NO: 1330 - protein, 577 aa, Aspergillus niger
GIEASLLTDPKDVAGRTVDYIIAGGGLTGLTTAARLTENPNISVLVIESGSYESDRGPIIEDLNAYGDIFGSSVDHAYETVELATNNQTALIRSGNGLGGSTLVNGGTWTRPHKAQVDSWETVFGNEGWNWDNVAAYSLQAERARAPNAKQIAAGHYFNASCHGVNGTVHAGPRDTGDDYSPIVKALMSAVEDRGVPTKKDFGCGDPHGVSMFPNTLHEDQVRSDAAREWLLPNYQRPNLQVLTGQYVGKVLLSQNGTTPRAVGVEFGTHKGNTHNVYAKHEVLLAAGSAVSPTILEYSGIGMKSILEPLGIDTVVDLPVGLNLQDQTTATVRSRITSAGAGQGQAAWFATFNETFGDYSEKAHELLNTKLEQWAEEAVARGGFHNTTALLIQYENYRDWIVNHNVAYSELFLDTAGVASFDVWDLLPFTRGYVHILDKDPYLHHFAYDPQYFLNELDLLGQAAATQLARNISNSGAMQTYFAGETIPGDNLAYDADLSAWTEYIPYHFRPNYHGVGTCSMMPKEMGGVVDNAARVYGVQGLRVIDGSIPPTQMSSHVMTVFYAMALKISDAILEDY

SEQ ID NO: 1331 - protein, 577 aa, Aspergillus niger
GIEASLLTDPKDVSGRTVDYIIAGGGLTGLTTAARLTENPNISVLVIESGSYESDRGPIIEDLNRYGDIFGSSVDHAYETVELATNNQTALIRSGNGLGGSTLINGGTWTRPHKAQVDSWETVFGNEGWNWDNVAAYSLQAERARAPNAKQIAAGHYFNASCHGVNGTVHAGPRDTGDDYSPIVKALMSAVEDRGVPTKKDFGCGDPHGVSMFPNTLHEDQVRSDAAREWLLPNYQRPNLQVLTGQYVGKVLLSQNGTTPRAVGVEFGTHKGNTFNVYAKHEVLLAAGSAVSPTILEYSGIGMKSILEPLGIDTVVDLPVGLNLQDQTTATVRSRITSAGAGQGQAAWFATFNETFGDYSEKAHELLNTKLEQWAEEAVARGGFHNTTALLIQYENYRDWIVNHNVAYSELFLDTKGVASFDVWDLLPFTRGYVHILDKDPYLHHFAYDPQYFLNELDLLGQAAATQLARNISNSGAMQTYFAGETIPGDNLAYDADLSAWTEYIPYHFRPNYHGVGTCSMMPKEMGGVVDNAARVYGVQGLRVIDGSIPPTQMSSHVMTVFYAMALKISDAILEDY

SEQ ID NO: 1332 - protein, 577 aa, Aspergillus niger
GIEASLLTDPKDVSGRTVDYIIAGGGLTGLTLAARLTENPNISVLVIESGSYESDRGPIIEDLNRYGDIFGSSVDHAYETVELATNNQTALIRSGNGLGGSTLINGGTWTRPHKAQVDSWETVFGNEGWNWDNVAAYSLQAERARAPNAKQIAAGHYFNASCHGVNGTVHAGPRDTGDDYSPIVKALMSAVEDRGVPTKKDFGCGDPHGVSMFPNTLHEDQVRSDAAREWLLPNYQRPNLQVLTGQYVGKVLLSQNGTTPRAVGVEFGTHKGNTFNVYAKHEVLLAAGSAVSPTILEYSGIGMKSILEPLGIDTVVDLPVGLNLQDQTTATVRSRITSAGAGQGQAAWFATFNETFGDYSEKAHELLNTKLEQWAEEAVARGGFHNTTALLIQYENYRDWIVNHNVAYSELFLDTKGVASFDVWDLLPFTRGYVHILDKDPYLHHFAYDPQYFLNELDLLGQAAATQLARNISNSGAMQTYFAGETIPGDNLAYDADLSAWTEYIPYHFRPNYHGVGTCSMMPKEMGGVVDNAARVYGVQGLRVIDGSIPPTQMSSHVMTVFYAMALKISDAILEDY

SEQ ID NO: 1333 - protein, 577 aa, Aspergillus niger
GIEASLLTDPKDVSGRTVDYIIAGGGLTGLTTAARLTENPNISVLVIESGSYESDRGPIIEDLNAYGDIFGSSVDHAYETVELATNNQTALIRSGNGLGGSTLVNGGTWTRPHKAQVDSWETVFGNEGWNWDNVAAYSLQAERARAPNAKQIAAGHYFNASCHGVNGTVHAGPRDTGDDYSPIVKALMSAVEDRGVPTKKDFGCGDPHGVSMFPNTLHEDQVRSDAAREWLLPNYQRPNLQVLTGQYVGKVLLKQNGTTPRAVGVEFGTHKGNTHNVYAKHEVLLAAGSAVSPTILEYSGIGMKSILEPLGIDTVVDLPVGLNLQDQTTATVRSRITSAGAGQGQAAWFATFNETFGDYSEKAHELLNTKLEQWAEEAVARGGFHNTTALLIQYENYRDWIVNHNVAYSELFLDTAGVASFDVWDLLPFTRGYVHILDKDPYLHHFAYDPQYFLNELDLLGQAAATQLARNISNSGAMQTYFAGETIPGDNLAYDADLSAWTEYIPYHFRPNYHGVGTCSMMPKEMGGVVDNAARVYGVQGLRVIDGSIPPTQMSSHVMTVFYAMALKISDAILEDY

SEQ ID NO: 1334 - protein, 577 aa, Aspergillus niger
GIEASLLTDPKDVSGRTVDYIIAGGGLTGLTTAARLTENPNISVLVIESGSYESDRGPIIEDLNAYGDIFGSSVDHAYETVELATNNQTALIRSGNGLGGSTLVNGGTWTRPHKAQVDSWETVFGNEGWNWDNVAAYSLQAERARAPNAKQIAAGHYFNASCHGVNGTVHAGPRDTGDDYSPIVKALMSAVEDRGVPTKKDFGCGDPHGVSMFPNTLHEDQVRSDAAREWLLPNYQRPNLQVLTGQYVGKVLLDQNGTTPRAVGVEFGTHKGNTHNVYAKHEVLLAAGSAVSPTILEYSGIGMKSILEPLGIDTVVDLPVGLNLQDQTTATVRSRITSAGAGQGQAAWFATFNETFGDYSEKAHELLNTKLEQWAEEAVARGGFHNTTALLIQYENYRDWIVNHNVAYSELFLDTAGVASFDVWDLLPFTRGYVHILDKDPYLHHFAYDPQYFLNELDLLGQAAATQLARNISNSGAMQTYFAGETIPGDNLAYDADLSAWTEYIPYHFRPNYHGVGTCSMMPKEMGGVVDNAARVYGVQGLRVIDGSIPPTQMSSHVMTVFYAMALKISDAILEDY

SEQ ID NO: 1335 - protein, 577 aa, Aspergillus niger
GIEASLLTDPKDVSGRTVDYIIAGGGLTGLTTAARLTENPNISVLVIESGSYESDRGPIIEDLNAYGDIFGSSVDHAYETVELATNNQTALIRSGNGLGGSTLVNGGTWTRPHKAQVDSWETVFGNEGWNWDNVAAYSLQAERARAPNAKQIAAGHYFNASCHGVNGTVHAGPRDTGDDYSPIVKALMSAVEDRGVPTKKDFGCGDPHGVSMFPNTLHEDQVRSDAAREWLLPNYQRPNLQVLTGQYVGKVLLSQNGTTPRAVGVEFGTHKGNTHNVYAKHEVLLAAGSAVSPTILEYSGIGMKSILEPLGIDTVVDLPVGLNLQDQTTATVRSRITSAGAGQGQAAWFATFNETFGDYSEKAHELLNTKLEQWAEEAVARGGFHNTTALLIQYENYRDWIVNHNVAYSELFLDTAGVASFDVWDLLPFTRGYVHILDKDPYLHHFAYDPQYFLNELDLLGQAAATQLARNISNSGAMQTYFAGETIPGDNLPYDADLSAWTEYIPYHFRPNYHGVGTCSMMPKEMGGVVDNAARVYGVQGLRVIDGSIPPTQMSSHVMTVFYAMALKISDAILEDY

SEQ ID NO: 1336 - protein, 577 aa, Aspergillus niger
GIEASLLTDPKDVSGRTVDYIIAGGGLTGLTTAARLTENPNISVLVIESGSYESDRGPIIEDLNRYGDIFGSSVDHAYETVELATNNQTALIRSGNGLGGSTLVNGGTWTRPHKAQVDSWETVFGNEGWNWDNVAAYSLQAERARAPNAKQIAAGHYFNASCHGVNGTVHAGPRDTGDDYSPIVKALMSAVEDRGVPTKKDFGCGDPHGVSMFPNTLHEDQVRSDAAREWLLPNYQRPNLQVLTGQYVGKVLLSQNGTTPRAVGVEFGTHKGNTHNVYAKHEVLLAAGSAVSPTILEYSGIGMKSILEPLGIDTVVDLPVGLNLQDQTTATVRSRITSAGAGQGQAAWFATFNETFGDYSEKAHELLNTKLEQWAEEAVARGGFHNTTALLIQYENYRDWIVNHNVAYSELFLDTAGVASFDVWDLLPFTRGYVHILDKDPYLHHFAYDPQYFLNELDLLGQAAATQLARNISNSGAMQTYFAGETIPGDNLAYDADLSAWTEYIPYHFRPNYHGVGTCSMMPKEMGGVVDNAARVYGVQGLRVIDGSIPPTQMSSHVMTVFYAMALKISDAILEDY

SEQ ID NO: 1337 - protein, 577 aa, Aspergillus niger
GIEASLLTDPKEVAGRTVDYIIAGGGLTGLTTAARLTENPDITVLVIESGSYESDRGPIIEDLNAYGDIFGSSVDHAYETVELATNNQTALIRSGNGLGGSTLVNGGXWTRPHKAQVDSWETVFGNEGWNWDSVAAYSLQAERARAPNAKQIAAGHYFNASCHGINGTVHAGPRDTGDDYSPIVKALMSAVEDRGVPTKKDLGCGDPHGVSMFPNTLHEDQVRSDAAREWLLPNYQRPNLQVLTGQYVGKVLLSQNATTPRAVGVEFGTHKGNTHNVYAKHEVLLAAGSAVSPTILEYSGIGMKSILEPLGIDTVVDLPVGLNLQDQTTSTVRSRITSAGAGQGQAAWXATFNETFGDYTEKAHELLNTKLEQWAEEAVARGGFHNTTALLIQYENYRDWIVKDNVAYSELFLDTAGVASFDVWDLLPFTRGYVHILDKDPYLRHFAYDPQYFLNELDLLGQAAATQLARNISNSGAMQTYFAGETIPGDNLAYDADLRAWVEYIPYNFRPNYHGVGTCSMMPKEMGGVVDNAARVYGVQGLRVIDGSIPPTQMSSHVMTVFYAMALKIADAVLADY

SEQ ID NO: 1338 - protein, 577 aa, Aspergillus niger
GIEASLLTDPKDVSGRTVDYIIAGGGLTGLTTAARLTENPNISVLVIESGSYESDRGPIIEDLNAYGDIFGSSVDHAYETVELATNNQTALIRSGNGLGGSTLVNGGTWTRPHKAQVDSWETVFGNEGWNWDNVAAYSLQAERARAPNAKQIAAGHYFNASCHGVNGTVHAGPRDTGDDYSPIVKALMSAVEDRGVPTKKDFGCGDPHGVSMFPNTLHEDQVRSDAAREWLLPNYQRPNLQVLTGQYVGKVLLSQNGTTPRAVGVEFGTHKGNTHNVYAKHEVLLAAGSAVSPTILEYSGIGMKSILEPLGIDTVVDLPVGLNLQDQTTATVRSRITSAGAGQGQAAWFATFNETFGDYAEKAHELLNTKLEQWAEEAVARGGFHNTTALLIQYENYRDWIVNHNVAYSELFLDTAGVASFDVWDLLPFTRGYVHILDKDPYLHHFAYDPQYFLNELDLLGQAAATQLARNISNSGAMQTYFAGETIPGDNLAYDADLSAWTEYIPYHFRPNYHGVGTCSMMPKEMGGVVDNAARVYGVQGLRVIDGSIPPTQMSSHVMTVFYAMALKISDAILEDY

SEQ ID NO: 1339 - protein, 577 aa, Aspergillus niger
GIEASLLTDPKDVSGRTVDYIIAGGGLTGLTTAARLTENPNISVLVIESGSYESDRGPIIEDLNAYGDIFGSSVDHAYETVELATNNQTALIRSGNGLGGSTLVNGGTWTRPHKAQVDSWETVFGNEGWNWDNVLAYSLQAERARAPNAKQIAAGHYFNASCHGVNGTVHAGPRDTGDDYSPIVKALMSAVEDRGVPTKKDFGCGDPHGVSMFPNTLHEDQVRSDAAREWLLPNYQRPNLQVLTGQYVGKVLLSQNGTTPRAVGVEFGTHKGNTHNVYAKHEVLLAAGSAVSPTILEYSGIGMKSILEPLGIDTVVDLPVGLNLQDQTTATVRSRITSAGAGQGQAAWFATFNETFGDYSEKAHELLNTKLEQWAEEAVARGGFHNTTALLIQYENYRDWIVNHNVAYSELFLDTAGVASFDVWDLLPFTRGYVHILDKDPYLHHFAYDPQYFLNELDLLGQAAATQLARNISNSGAMQTYFAGETIPGDNLAYDADLSAWTEYIPYHFRPNYHGVGTCSMMPKEMGGVVDNAARVYGVQGLRVIDGSIPPTQMSSHVMTVFYAMALKISDAILEDY

SEQ ID NO: 1340 - protein, 577 aa, Aspergillus niger
GIEASLLTDPKDVSGRTVDYIIAGGGLTGLTTAARLTENPNISVLVIESGSYESDRGPIIEDLNAYGDIFGSSVDHAYETVELATNNQTALIRSGNGLGGSTLVNGGTWTRPHKAQVDSWETVFGNEGWNWDNVAAYSLQAERARAPNAKQIAAGHYFNASCHGVNGTVHAGPRDTGDDYSPIVKALMSAVEDRGVPTKKDFGCGDPHGVSMFPNTLHEDQVRSDAAREWLLPNYQRPNLQVLTGQYVGKVLLSQNGTTPRAVGVEFGTHKGNTHNVYAKHEVLLAAGSAVSPTILEYSGIGMKSILEPLGIDTVVDLPVGLNLQDQTTATVRSRITPAGAGQGQAAWFATFNETFGDYSEKAHELLNTKLEQWAEEAVARGGFHNTTALLIQYENYRDWIVNHNVAYSELFLDTAGVASFDVWDLLPFTRGYVHILDKDPYLHHFAYDPQYFLNELDLLGQAAATQLARNISNSGAMQTYFAGETIPGDNLAYDADLSAWTEYIPYHFRPNYHGVGTCSMMPKEMGGVVDNAARVYGVQGLRVIDGSIPPTQMSSHVMTVFYAMALKISDAILEDY

SEQ ID NO: 1341 - protein, 577 aa, Aspergillus niger
GIEASLLTDPKDVSGRTVDYIIAGGGLTGLTTAARLTENPNISVLVIESGSYESDRGPIIEDLNAYGDIFGSSVDHAYETVELATNNQTALIRSGNGLGGSTLVNGGTWTRPHKAQVDSWETVFGNEGWNWDNVAAYSLQAERARAPNAKQIAAGHYFNASCHGVNGTVHAGPRDTGDDYSPIVKALMSAVEDRGVPTKKDFGCGDPHGVSMFPNTLHEDQVRSDAAREWLLPNYQRPNLQVLTGQYVGKVLLSQNGTTPRAVGVEFGTHKGNTYNVYAKHEVLLAAGSAVSPTILEYSGIGMKSILEPLGIDTVVDLPVGLNLQDQTTATVRSRITSAGAGQGQAAWFATFNETFGDYSEKAHELLNTKLEQWAEEAVARGGFHNTTALLIQYENYRDWIVNHNVAYSELFLDTAGVASFDVWDLLPFTRGYVHILDKDPYLHHFAYDPQYFLNELDLLGQAAATQLARNISNSGAMQTYFAGETIPGDNLAYDADLSAWTEYIPYHFRPNYHGVGTCSMMPKEMGGVVDNAARVYGVQGLRVIDGSIPPTQMSSHVMTVFYAMALKISDAILEDY

SEQ ID NO: 1342 - protein, 577 aa, Aspergillus niger
GIEASLLTDPKDVSGRTVDYIIAGGGLTGLTTAARLTENPNISVLVIESGSYESDRGPIIEDLNAYGDIFGSSVDHAYETVELATNNQTALIRSGNGLGGSTLVNGGTWTRPHKAQVDSWETVFGNEGWNWDNVAAYSLQAERARAPNAKQIAAGHYFNASCHGVNGTVHAGPRDTGDDYSPIVKALMSAVEDRGVPTKKDFGCGDPHGVSMFPNTLHEDQVRSDAAREWLLPNYQRPNLQVLTGQYVGKVLLSQNGTTPRAVGVEFGTHKGNTHEVYAKHEVLLAAGSAVSPTILEYSGIGMKSILEPLGIDTVVDLPVGLNLQDQTTATVRSRITSAGAGQGQAAWFATFNETFGDYSEKAHELLNTKLEQWAEEAVARGGFHNTTALLIQYENYRDWIVNHNVAYSELFLDTAGVASFDVWDLLPFTRGYVHILDKDPYLHHFAYDPQYFLNELDLLGQAAATQLARNISNSGAMQTYFAGETIPGDNLAYDADLSAWTEYIPYHFRPNYHGVGTCSMMPKEMGGVVDNAARVYGVQGLRVIDGSIPPTQMSSHVMTVFYAMALKISDAILEDY

SEQ ID NO: 1343 - protein, 577 aa, Synthetic construct
GIEASLLTDPKEVAGRTVDYIIAGGGLTGLVVAARLTENPDITVLVIESGSYESDRGPIIEDLNAYGKIFGSSVDHAYETVCLATNNRTALIRAGNGLGGSTLVNGGTWTRPHKAQVDSWETVFGNEGWNWDSVAAYSLQAERARAPNAKQIAAGHYFNASCHGINGTVHAGPRDTGDDYSPIVKALMSAVEDRGVPTKKDLGCGDPHGVSMFPNTLHEDQVRSDAAREWLLPNYQRPNLSVLTGQYVGKVLLSQNATTPRAVGVEFGTHKGNFHNVTAKHEVLLAAGSAVSPTILEYSGIGMKSILEPLGIKTVVDLPVGLNLQDQTTSTVRSRITSAGAGQGQAAWFATFNETFGDYTPKAHELLNTKLEQWAEEAVARGGFHNTTALLIQYENYRDWIVKDNVAYSELFLDTAGEASFDVWDLLPFTRGYVHILDKDPYLRHFAYDPQYFLNELDLLGQAAATQLARNISNSGAMQTYFAGETIPGDNLAYDADLRAWVEYIPYHFRPNYHGVGTCSMMPKEMGGVVDNAARVYGVQGLRVIDGSIPPTQMSSHVMTVFYAMALKIADAVLADY

SEQ ID NO: 1344 - protein, 577 aa, Aspergillus niger
GIEASLLTDPKDVSGRTVDYIIAGGGLTGLTTAARLTENPNISVLVIESGSYESDRGPIIEDLNAYGDIFGSSVDHAYETVELATNNQTALIRSGNGLGGSTLVNGGTWTRPHKAQVDSWETVFGNEGWNWDNVAAYSLQAERARAPNAKQIAAGHYFNASCHGVNGTVHAGPRDTGDDYSPIVKALMSAVEDRGVPTKKDFGCGDPHGVSMFPNTLHEDQVRSDAAREWLLPNYQRPNLQVLTGQYVGKVLLSQNGTTPRAVGVEFGTHKGNTHNVYAKHEVLLAAGSAVSPTILEYSGIGMKSILEPLGIDTVVDLPVGLNLQDQTTATVRSRITSAGAGQGQAAWFATFNETFGDYSEKAHELLNTKLEQWAEEAVARGGFHNATALLIQYENYRDWIVNHNVAYSELFLDTAGVASFDVWDLLPFTRGYVHILDKDPYLHHFAYDPQYFLNELDLLGQAAATQLARNISNSGAMQTYFAGETIPGDNLAYDADLSAWTEYIPYHFRPNYHGVGTCSMMPKEMGGVVDNAARVYGVQGLRVIDGSIPPTQMSSHVMTVFYAMALKISDAILEDY

SEQ ID NO: 1345 - protein, 577 aa, Aspergillus niger
GIEASLLTDPKEVAGRTVDYIIAGGGLTGLVVAARLTENPDITVLVIESGSYESDRGPIIEDLNAYGKIFGSSVDHAYETVCLATNNRTALIRAGNGLGGSTLVNGGTWTRPHKAQVDSWETVFGNEGWNWDSVAAYSLQAERARAPNAKQIAAGHYFNASCHGINGTVHAGPRDTGDDYSPIVKALMSAVENRGVPTKKDLGCGDPHGVSMFPNTLHEDQVRSDAAREWLLPNYQRPNLQVLTGQYVGKVLLSQNATTPRAVGVEFGTHKGNFHNVTAKHEVLLAAGSAVSPTILEYSGIGMKSILEPLGIKTVVDLPVGLNLQDQTTSTVRSRITSAGAGQGQAAWFATFNETFGDYTEKAHELLNTKLEQWAEEAVARGGFHNTTALLIQYENYRDWIVKDNVAYSELFLDTAGEASFDVWDLLPFTRGYVHILDKDPYLRHFAYDPQYFLNELDLLGQAAATQLARNISNSGAMQTYFAGETIPGDNLAYDADLRAWVEYIPYHFRPNYHGVGTCSMMPKEMGGVVDNAARVYGVQGLRVIDGSIPPTQMSSHVMTVFYAMALKIADAVLADY

SEQ ID NO: 1346 - protein, 577 aa, Aspergillus niger
GIEASLLTDPKDVSGRTVDYIIAGGGLTGLTTAARLTENPNISVLVIESGSYESDRGPIIEDLNAYGDIFGSSVDHAYETVELATNNQTALIRSGNGLGGSTLVNGGTWTRPHKAQVDSWETVFGNEGWNWDNVAAYSLQAERARAPNAKQIAAGHYFNPSCHGVNGTVHAGPRDTGDDYSPIVKALMSAVEDRGVPTKKDFGCGDPHGVSMFPNTLHEDQVRSDAAREWLLPNYQRPNLQVLTGQYVGKVLLSQNGTTPRAVGVEFGTHKGNTHNVYAKHEVLLAAGSAVSPTILEYSGIGMKSILEPLGIDTVVDLPVGLNLQDQTTATVRSRITSAGAGQGQAAWFATFNETFGDYSEKAHELLNTKLEQWAEEAVARGGFHNTTALLIQYENYRDWIVNHNVAYSELFLDTAGVASFDVWDLLPFTRGYVHILDKDPYLHHFAYDPQYFLNELDLLGQAAATQLARNISNSGAMQTYFAGETIPGDNLAYDADLSAWTEYIPYHFRPNYHGVGTCSMMPKEMGGVVDNAARVYGVQGLRVIDGSIPPTQMSSHVMTVFYAMALKISDAILEDY

SEQ ID NO: 1347 - protein, 577 aa, Aspergillus niger
GIEASLLTDPKDVSGRTVDYIIAGGGLTGLTTAARLTENPNISVLVIESGSYESDRGPIIEDLNAYGDIFGSSVDHAYETVELATNNQTALIRSGNGLGGSTLVNGGTWTRPHKAQVDSWETVFGNEGWNWDNVAAYSLQAERARPPNAKQIAAGHYFNASCHGVNGTVHAGPRDTGDDYSPIVKALMSAVEDRGVPTKKDFGCGDPHGVSMFPNTLHEDQVRSDAAREWLLPNYQRPNLQVLTGQYVGKVLLSQNGTTPRAVGVEFGTHKGNTHNVYAKHEVLLAAGSAVSPTILEYSGIGMKSILEPLGIDTVVDLPVGLNLQDQTTATVRSRITSAGAGQGQAAWFATFNETFGDYSEKAHELLNTKLEQWAEEAVARGGFHNTTALLIQYENYRDWIVNHNVAYSELFLDTAGVASFDVWDLLPFTRGYVHILDKDPYLHHFAYDPQYFLNELDLLGQAAATQLARNISNSGAMQTYFAGETIPGDNLAYDADLSAWTEYIPYHFRPNYHGVGTCSMMPKEMGGVVDNAARVYGVQGLRVIDGSIPPTQMSSHVMTVFYAMALKISDAILEDY

SEQ ID NO: 1348 - protein, 577 aa, Aspergillus niger
GIEASLLTDPKDVSGRTVDYIIAGGGLTGLTLAARLTENPNISVLVIESGSYESDRGPIIEDLNRYGDIFGSSVDHAYETVELATNNQTALIRSGNGLGGSTLINGGTWTRPHKAQVDSWETVFGNEGWNWDNVAAYSLQAERARAPNAKQIAAGHYFNASCHGVNGTVHAGPRDTGDDYSPIVKALMSAVEDRGVPTKKDFGCGDPHGVSMFPNTLHEDQVRSDAAREWLLPNYQRPNLQVLTGQYVGKVLLSQNGTTPRAVGVEFGTHKGNTFNVYAKHEVLLAAGSLVSPTILEYSGIGMKSILEPLGIDTVVDLPVGLNLQDQTTATVRSRITSAGAGQGQAAWFATFNETFGDYSEKAHELLNTKLEQWAEEAVARGGFHNTTALLIQYENYRDWIVNHNVAYSELFLDTKGVASFDVWDLLPFTRGYVHILDKDPYLHHFAYDPQYFLNELDLLGQAAATQLARNISNSGAMQTYFAGETIPGDNLAYDADLSAWTEYIPYHFRPNYHGVGTCSMMPKEMGGVVDNAARVYGVQGLRVIDGSIPPTQMSSHVMTVFYAMALKISDAILEDY

SEQ ID NO: 1349 - protein, 577 aa, Aspergillus niger
GIEASLLTDPKDVSGRTVDYIIAGGGLTGLTTAARLTENPNISVLVIESGSFESDRGPIIEDLNAYGDIFGSSVDHAYETVELATNNQTALIRSGNGLGGSTLVNGGTWTRPHKAQVDSWETVFGNEGWNWDNVAAYSLQAERARAPNAKQIAAGHYFNASCHGVNGTVHAGPRDTGDDYSPIVKALMSAVEDRGVPTKKDFGCGDPHGVSMFPNTLHEDQVRSDAAREWLLPNYQRPNLQVLTGQYVGKVLLSQNGTTPRAVGVEFGTHKGNTHNVYAKHEVLLAAGSAVSPTILEYSGIGMKSILEPLGIDTVVDLPVGLNLQDQTTATVRSRITSAGAGQGQAAWFATFNETFGDYSEKAHELLNTKLEQWAEEAVARGGFHNTTALLIQYENYRDWIVNHNVAYSELFLDTAGVASFDVWDLLPFTRGYVHILDKDPYLHHFAYDPQYFLNELDLLGQAAATQLARNISNSGAMQTYFAGETIPGDNLAYDADLSAWTEYIPYHFRPNYHGVGTCSMMPKEMGGVVDNAARVYGVQGLRVIDGSIPPTQMSSHVMTVFYAMALKISDAILEDY

SEQ ID NO: 1350 - protein, 577 aa, Aspergillus niger
GIEASLLTDPKDVSGRTVDYIIAGGGLTGLTTAARLTENPNISVLVIESGSYESDRGPIIEDLNAYGDIFGSSVDHAYETVELATNNQTALIRSGNGLGGSTLVNGGTWTRPHKAQVDSWETVFGNEGWNWDNVAAYSLQAERARAPNAKQIAAGHYFNASCHGVNGTVHAGPRDTGDDYSPIVKALMSAVEDRGVPTKKDFGCGDPHGVSMFPNTLHPDQVRSDAAREWLLPNYQRPNLQVLTGQYVGKVLLSQNGTTPRAVGVEFGTHKGNTHNVYAKHEVLLAAGSAVSPTILEYSGIGMKSILEPLGIDTVVDLPVGLNLQDQTTATVRSRITSAGAGQGQAAWFATFNETFGDYSEKAHELLNTKLEQWAEEAVARGGFHNTTALLIQYENYRDWIVNHNVAYSELFLDTAGVASFDVWDLLPFTRGYVHILDKDPYLHHFAYDPQYFLNELDLLGQAAATQLARNISNSGAMQTYFAGETIPGDNLAYDADLSAWTEYIPYHFRPNYHGVGTCSMMPKEMGGVVDNAARVYGVQGLRVIDGSIPPTQMSSHVMTVFYAMALKISDAILEDY

SEQ ID NO: 1351 - protein, 577 aa, Aspergillus niger
GIEASLLTDPKEVAGRTVDYIIAGGGLTGLVVAARLTENPDITVLVIESGSYESDRGPIIEDLNAYGKIFGSSVDHAYETVCLATNNRTALIRAGNGLGGSTLVNGGTWTRPHKAQVDSWETVFGNEGWNWDSVAAYSLQAERARAPNAKQIAAGHYFNASCHGINGTVHAGPRDTGDDYSPIVKALMSAVEDRGVPTKKDLGCGDPHGVSMFPNTLHEDQVRSDAAREWLLPNYQRPNLQVLTGQYVGKVLLSQNATTPRAVGVEFGTHKGNFHNVTAKHEVLLAAGSAVSPTILEYSGIGMKSILEPLGIKTVVDLPVGLNLQDQTTSTVRSRITSAGAGQGQAAWFATFNETFGDYTEKAHELLNTKLEQWAEEAVARGGFHNTTALLIQYENYRDWIVKDNVAYSELFLDTAGEASFDVWDLLPFTRGYVHILDKDPYLRHFAYDPQYFLNELDLLGQAAATQLARNISNSGAMQTYFAGETIPGDNLAYDANLRAWVEYIPYHFRPNYHGVGTCSMMPKEMGGVVDNAARVYGVQGLRVIDGSIPPTQMSSHVMTVFYAMALKIADAVLADY

SEQ ID NO: 1352 - protein, 577 aa, Aspergillus niger
GIEASLLTDPKDVSGRTVDYIIAGGGLTGLTTAARLTENPNISVLVIESGSYESDRGPIIEDLNRYGDIFGSSVDHAYETVELATNNQTALIRSGNGLGGSTLINGGTWTRPHKAQVDSWETVFGNEGWNWDNVAAYSLQAERARAPNAKQIAAGHYFNASCHGVNGTVHAGPRDTGDDYSPIVKALMSAVEDRGVPTKKDFGCGDPHGVSMFPNTLHEDQVRSDAAREWLLPNYQRPNLQVLTGQYVGKVLLSQNGTTPRAVGVEFGTHKGNTFNVYAKHEVLLAAGSLVSPTILEYSGIGMKSILEPLGIDTVVDLPVGLNLQDQTTATVRSRITSAGAGQGQAAWFATFNETFGDYSEKAHELLNTKLEQWAEEAVARGGFHNTTALLIQYENYRDWIVNHNVAYSELFLDTKGVASFDVWDLLPFTRGYVHILDKDPYLHHFAYDPQYFLNELDLLGQAAATQLARNISNSGAMQTYFAGETIPGDNLAYDADLSAWTEYIPYHFRPNYHGVGTCSMMPKEMGGVVDNAARVYGVQGLRVIDGSIPPTQMSSHVMTVFYAMALKISDAILEDY

SEQ ID NO: 1353 - protein, 577 aa, Aspergillus niger
GIEDSLLTDPKEVAGRTVDYIIAGGGLTGLVVAARLTENPDITVLVIESGSYESDRGPIIEDLNAYGKIFGSSVDHAYETVCLATNNRTALIRAGNGLGGSTLVNGGTWTRPHKAQVDSWETVFGNEGWNWDSVAAYSLQAERARAPNAKQIAAGHYFNASCHGINGTVHAGPRDTGDDYSPIVKALMSAVEDRGVPTKKDLGCGDPHGVSMFPNTLHEDQVRSDAAREWLLPNYQRPNLSVLTGQYVGKVLLSQNATTPRAVGVEFGTHKGNFHNVTAKHEVLLAAGSAVSPTILEYSGIGMKSILEPLGIKTVVDLPVGLNLQDQTTSTVRSRITSAGAGQGQAAWFATFNETFGDYTEKAHELLNTKLEQWAEEAVARGGFHNTTALLIQYENYRDWIVKDNVAYSELFLDTAGEASFDVWDLLPFTRGYVHILDKDPYLRHFAYDPQYFLNELDLLGQAAATQLAREISNSGAMQTYFAGETIPGDNLAYDADLRAWVEYIPYHFRPNYHGVGTCSMMPKEMGGVVDNAARVYGVQGLRVIDGSIPPTQMSSHVMTVFYAMALKIADAVLADY

SEQ ID NO: 1354 - protein, 577 aa, Aspergillus niger
GIEASLLTDPKEVAGRTVDYIIAGGGLTGLVVAARLTENPDITVLVIESGSYESDRGPIIEDLNAYGKIFGSSVDHAYETVCLATNNRTALIRAGNGLGGSTLVNGGTWTRPHKAQVDSWETVFGNEGWNWDSVAAYSLQAERARAPNAKQIAAGHYFNASCHGINGTVHAGPRDTGDDYSPIVKALMSAVENRGVPTKKDLGCGDPHGVSMFPNTLHEDQVRSDAAREWLLPNYQRPNLQVLTGQYVGKVLLSQNATTPRAVGVEFGTHKGNFHNVTAKHEVLLAAGSAVSPTILEYSGIGMKSILEPLGIKTVVDLPVGLNLQDQTTSTVRSRITSAGAGQGQAAWFATFNETFGDYTEKAHELLNTKLEQWAEEAVARGGFHNTTALLIQYENYRDWIVKDNVAYSELFLDTAGEASFDVWDLLPFTRGYVHILDKDPYLRHFAYDPQYFLNELDLLGQAAATQLARNISNSGAMQTYFAGETIPGDNLAYDANLRAWVEYIPYHFRPNYHGVGTCSMMPKEMGGVVDNAARVYGVQGLRVIDGSIPPTQMSSHVMTVFYAMALKIADAVLADY

SEQ ID NO: 1355 - protein, 577 aa, Aspergillus niger
GIEASLLTDPKEVAGRTVDYIIAGGGLTGLVVAARLTENPDITVLVIESGSYESDRGPIIEDLNAYGKIFGSSVDHAYETVCLATNNRTALIRAGNGLGGSTLVNGGTWTRPHKAQVDSWETVFGNEGWNWDSVAAYSLQAERARAPNAKQIAAGHYFNASCHGINGTVHAGPRDTGDDYSPIVKALMSAVEDRGVPTKKDLGCGDPHGVSMFPNTLHEDQVRSDAAREWLLPNYQRPNLSVLTGQYVGKVLLSQNATTPRAVGVEFGTHKGNFHNVTAKHEVLLAAGSAVSPTILEYSGIGMKSILEPLGIKTVVDLPVGLNLQDQTTSTVRSRITSAGAGQGQAAWFATFNETFGDYTEKAHELLNTKLEQWAEEAVARGGFHNTTALLIQYENYRDWIVKDNVAYSELFLDTAGEASFDVWDLLPFTRGYVHILDKDPYLRHFAYDPQYFLNELDLLGQAAATQLAREISNSGAMQTYFAGETIPGDNLAYDADLRAWVEYIPYHFRPNYHGVGTCSMMPKEMGGVVDNAARVYGVQGLRVIDGSIPPTQMSSHVMTVFYAMALKIADAVLADY

SEQ ID NO: 1356 - protein, 577 aa, Synthetic construct
GIEASLLTDPKEVAGRTVDYIIAGGGLTGLVVAARLTENPDITVLVIESGSYESDRGPIIEDLNAYGKIFGSSVDHAYETVCLATNNRTALIRAGNGLGGSTLVNGGTWTRPHKAQVDSWETVFGNEGWNWDSVAAYSLQAERARAPNAKQIAAGHYFNASCHGINGTVHAGPRDTGDDYSPIVKALMSAVEDRGVPTKKDLCCGDPHGVSMFPNTLHEDQVRSDAAREWLLPNYQRPNLSVLTGQYVGKVLLSQNATTPRAVGVEFGTHKGNFHNVTAKHEVLLAAGSAVSPTILEYSGIGMKSILEPLGIKTVVDLPVGLNLQDQTTSTVRSRITSAGAGQGQAAWFATFNETFGDYTEKAHELLNTKLEQWAEEAVARGGFHNTTALLIQYENYRDWIVKDNVAYSELFLDTAGEASFDVWDLLPFTRGYVHILDKDPYLRHFAYDPQYFLNELDLLGQAAATQLARNISNSGAMQTYFAGETIPGDNLAYDADLRAWVEYIPYHFRPNYHGVGTCSMMPKEMGGVVDNAARVYGVQGLRVIDGSIPPTQMSSHVMTVFYAMALKIADAVLADY

SEQ ID NO: 1357 - protein, 577 aa, Aspergillus niger
GIEASLLTDPKEVAGRTVDYIIAGGGLTGLVVAARLTENPDITVLVIESGSYESDRGPIIEDLNAYGKIFGSSVDHAYETVCLATNNRTALIRAGNGLGGSTLVNGGTWTRPHKAQVDSWETVFGNEGWNWDSVAAYSLQAERARAPNAKQIAAGHYFNASCHGINGTVHAGPRDTGDDYSPIVKALMSAVEDRGVPTKKDLGCGDPHGVSMFPNTLHEDQVRSDAAREWLLPNYQRPNLSVLTGQYVGKVLLSQNATTPRAVGVEFGTHKGNFHNVTAKHEVLLAAGSAVSPTILEYSGIGMKSILEPLGIKTVVDLPVGLNLQDQTTSTVRSRITSAGAGQGQAAWFATFNETFGDYTEQAHELLNTKLEQWAEEAVARGGFHNTTALLIQYENYRDWIVKDNVAYSELFLDTAGEASFDVWDLLPFTRGYVHILDKDPYLRHFAYDPQYFLNELDLLGQAAATQLARNISNSGAMQTYFAGETIPGDNLAYDANLRAWVEYIPYHFRPNYHGVGTCSMMPKEMGGVVDNAARVYGVQGLRVIDGSIPPTQMSSHVMTVFYAMALKIADAVLADY

SEQ ID NO: 1358 - protein, 577 aa, Aspergillus niger
GIEASLLTDPKDVSGRTVDYIIAGGGLTGLTTAARLTENPNISVLVIESGSYESDRGPIIEDLNAYGDIFGSSVDHAYETVELATNNQTALIRSGNGLGGSTLVNGGTWTRPHKAQVDSWETVFGNEGWNWDNVAPYSLQAERARAPNAKQIAAGHYFNASCHGVNGTVHAGPRDTGDDYSPIVKALMSAVEDRGVPTKKDFGCGDPHGVSMFPNTLHEDQVRSDAAREWLLPNYQRPNLQVLTGQYVGKVLLSQNGTTPRAVGVEFGTHKGNTHNVYAKHEVLLAAGSAVSPTILEYSGIGMKSILEPLGIDTVVDLPVGLNLQDQTTATVRSRITSAGAGQGQAAWFATFNETFGDYSEKAHELLNTKLEQWAEEAVARGGFHNTTALLIQYENYRDWIVNHNVAYSELFLDTAGVASFDVWDLLPFTRGYVHILDKDPYLHHFAYDPQYFLNELDLLGQAAATQLARNISNSGAMQTYFAGETIPGDNLAYDADLSAWTEYIPYHFRPNYHGVGTCSMMPKEMGGVVDNAARVYGVQGLRVIDGSIPPTQMSSHVMTVFYAMALKISDAILEDY

SEQ ID NO: 1359 - protein, 577 aa, Synthetic construct
GIEASLLTDPKEVAGRTVDYIIAGGGLTGLVVAARLTENPDITVLVIESGSYESDRGPIIEDLNAYGKIFGSSVDHAYETVCLATNNRTALIRAGNGLGGSTLVNGGTWTRPHKAQVDSWETVFGNEGWNWDSVAAYSLQAERARAPNAKQIAAGHYFNASCHGINGTVHAGPRDTGDDYSPIVKALMSAVEDRGVPTKKDLGCGDPHGVSMFPNTLHEDQVRSDAAREWLLPNYQRPNLSVLTGQYVGKVLLSQNATTPRAVGVEFGTHKGNFHNVTAKHEVLLAAGSAVSPTILEYSGIGMKSILEPLGIKTVVDLPVGLNLQDQTTSTVRSRITSAGAGQGQAAWFATFNETFGDYTEKAHELLNTKLEQWAEEAVARGGFHNTTALLIQYENYRDWIVKDNVAYSELFLDTAGEISFDVWDLLPFTRGYVHILDKDPYLRHFAYDPQYFLNELDLLGQAAATQLARNISNSGAMQTYFAGETIPGDNLAYDADLRAWVEYIPYHFRPNYHGVGTCSMMPKEMGGVVDNAARVYGVQGLRVIDGSIPPTQMSSHVMTVFYAMALKIADAVLADY

SEQ ID NO: 1360 - protein, 577 aa, Aspergillus niger
GIEASLLTDPKDVSGRTVDYIIAGGGLTGLTTAARLTENPNISVLVIESGSYESDRGPIIEDLNAYGDIFGSSVDHAYETVELATNNQTALIRSGNGLGGSTLVNGGTWTRPHKAQVDSWETVFGNEGWNWDNVAAYSLQAERARAPNAKQIAAGHYFNASCHGVNGTVHAGPRDTGDDYSPIVKALMSAVEDRGVPTKKDFGCGDPHGVSMFPNTLHEDQVRSDAAREWLLPNYQRPNLQVLTGQYVGKVLLSKNGTTPRAVGVEFGTHKGNTHNVYAKHEVLLAAGSAVSPTILEYSGIGMKSILEPLGIDTVVDLPVGLNLQDQTTATVRSRITSAGAGQGQAAWFATFNETFGDYSEKAHELLNTKLEQWAEEAVARGGFHNTTALLIQYENYRDWIVNHNVAYSELFLDTAGVASFDVWDLLPFTRGYVHILDKDPYLHHFAYDPQYFLNELDLLGQAAATQLARNISNSGAMQTYFAGETIPGDNLAYDADLSAWTEYIPYHFRPNYHGVGTCSMMPKEMGGVVDNAARVYGVQGLRVIDGSIPPTQMSSHVMTVFYAMALKISDAILEDY

SEQ ID NO: 1361 - protein, 577 aa, Aspergillus niger
GIEASLLTDPKDVSGRTVDYIIAGGGLTGLTTAARLTENPNISVLVIESGSYESDRGPIIEDLNAYGDIFGSSVDHAYETVELATNNQTALIRSGNGLGGSTLVNGGTWTRPHKAQVDSWETVFGNEGWNWDNLAAYSLQAERARAPNAKQIAAGHYFNASCHGVNGTVHAGPRDTGDDYSPIVKALMSAVEDRGVPTKKDFGCGDPHGVSMFPNTLHEDQVRSDAAREWLLPNYQRPNLQVLTGQYVGKVLLSQNGTTPRAVGVEFGTHKGNTHNVYAKHEVLLAAGSAVSPTILEYSGIGMKSILEPLGIDTVVDLPVGLNLQDQTTATVRSRITSAGAGQGQAAWFATFNETFGDYSEKAHELLNTKLEQWAEEAVARGGFHNTTALLIQYENYRDWIVNHNVAYSELFLDTAGVASFDVWDLLPFTRGYVHILDKDPYLHHFAYDPQYFLNELDLLGQAAATQLARNISNSGAMQTYFAGETIPGDNLAYDADLSAWTEYIPYHFRPNYHGVGTCSMMPKEMGGVVDNAARVYGVQGLRVIDGSIPPTQMSSHVMTVFYAMALKISDAILEDY

SEQ ID NO: 1362 - protein, 577 aa, Aspergillus niger
GIEDSLLTDPKEVAGRTVDYIIAGGGLTGLVVAARLTENPDITVLVIESGSYESDRGPIIEDLNAYGKIFGSSVDHAYETVCLATNNRTALIRAGNGLGGSTLVNGGTWTRPHKAQVDSWETVFGNEGWNWDSVAAYSLQAERARAPNAKQIAAGHYFNASCHGINGTVHAGPRDTGDDYSPIVKALMSAVEDRGVPTKKDLGCGDPHGVSMFPNTLHEDQVRSDAAREWLLPNYQRPNLQVLTGQYVGKVLLSQNATTPRAVGVEFGTHKGNFHNVTAKHEVLLAAGSAVSPTILEYSGIGMKSILEPLGIKTVVDLPVGLNLQDQTTSTVRSRITSAGAGQGQAAWFATFNETFGDYTEKAHELLNTKLEQWAEEAVARGGFHNTTALLIQYENYRDWIVKDNVAYSELFLDTAGEASFDVWDLLPFTRGYVHILDKDPYLRHFAYDPQYFLNELDLLGQAAATQLARNISNSGAMQTYFAGETIPGDNLAYDADLRAWVEYIPYHFRPNYHGVGTCSMMPKEMGGVVDNAARVYGVQGLRVIDGSIPPTQMSSHVMTVFYAMALKIADAVLADY

SEQ ID NO: 1363 - protein, 577 aa, Aspergillus niger
GIEASLLTDPKEVAGRTVDYIIAGGGLTGLVVAARLTENPDITVLVIESGSYESDRGPIIEDLNAYGKIFGSSVDHAYETVCLATNNRTALIRAGNGLGGSTLVNGGTWTRPHKAQVDSWETVFGNEGWNWDSVAAYSLQAERARAPNAKQIAAGHYFNASCHGINGTVHAGPRDTGDDYSPIVKALMSAVEDRGVPTKKDLGCGDPHGVSMFPNTLHEDQVRSDAAREWLLPNYQRPNLSVLTGQYVGKVLLSQNATTPRAVGVEFGTHKGNFHNVTAKHEVLLAAGSAVSPTILEYSGIGMKSILEPLGIKTVVDLPVGLNLQDQTTSTVRSRITSAGAGQGQAAWFATFNETFGDYTEQAHELLNTKLEQWAEEAVARGGFHNTTALLIQYENYRDWIVKDNVAYSELFLDTAGEASFDVWDLLPFTRGYVHILDKDPYLRHFAYDPQYFLNELDLLGQAAATQLARNISNSGAMQTYFAGETIPGDNLAYDADLRAWVEYIPYHFRPNYHGVGTCSMMPKEMGGVVDNAARVYGVQGLRVIDGSIPPTQMSSHVMTVFYAMALKIADAVLADY

SEQ ID NO: 1364 - protein, 577 aa, Aspergillus niger
GIEASLLTDPKEVAGRTVDYIIAGGGLTGLVVAARLTENPDITVLVIESGSYESDRGPIIEDLNAYGKIFGSSVDHAYETVCLATNNRTALIRAGNGLGGSTLVNGGTWTRPHKAQVDSWETVFGNEGWNWDEVAAYSLQAERARAPNAKQIAAGHYFNASCHGINGTVHAGPRDTGDDYSPIVKALMSAVEDRGVPTKKDLGCGDPHGVSMFPNTLHEDQVRSDAAREWLLPNYQRPNLQVLTGQYVGKVLLSQNATTPRAVGVEFGTHKGNFHNVTAKHEVLLAAGSAVSPTILEYSGIGMKSILEPLGIKTVVDLPVGLNLQDQTTSTVRSRITSAGAGQGQAAWFATFNETFGDYTEKAHELLNTKLEQWAEEAVARGGFHNTTALLIQYENYRDWIVKDNVAYSELFLDTAGEASFDVWDLLPFTRGYVHILDKDPYLRHFAYDPQYFLNELDLLGQAAATQLARNISNSGAMQTYFAGETIPGDNLAYDADLRAWVEYIPYHFRPNYHGVGTCSMMPKEMGGVVDNAARVYGVQGLRVIDGSIPPTQMSSHVMTVFYAMALKIADAVLADY

SEQ ID NO: 1365 - protein, 577 aa, Aspergillus niger
GIEASLLTDPKEVAGRTVDYIICGGGLTGLTVAARLTENPDITVLVIESGSYESDRGPIIEDLNAYGDIFGSSVDHAYETVCLATNNQTALIRSGNGLGGSTLVNGGTWTRPHKAQVDSWETVFGNEGWNWDSVAAYSLQAERARAPNAKQIAAGHYFNASCHGINGTVHAGPRDTGDDYSPIVKALMSAVEDRGVPTKKDLGCGDPHGVSMFPNTLHEDQVRSDAAREWLLPNYQRPNLQVLTGQYCGKVLLSQNATTPRAVGVEFGTHKGNTHNVYAKHEVLLAAGSAVSPTILEYSGIGMKSILEPLGIKTVVDLPVGLNLQDQTTSTVRSRITSAGAGQGQAAWFATFNETFGDYTEKAHELLNTKLEQWAEEAVARGGFHNTTALLIQYENYRDWIVKDNVAYSELFLDTAGEASFDVWDLLPFTRGYVHILDKDPYLRHFAYDPQYFLNELDLLGQAAATQLARNISNSGAMQTYFAGETIPGDNLAYDADLRAWVEYIPYHFRPNYHGVGTCSMMPKEMGGVVDNAARVYGVQGLRVIDGSIPPTQMSSHVMTVFYAMALKIADAVLADY

SEQ ID NO: 1366 - protein, 577 aa, Aspergillus niger
GIEASLLKDPKEVAGRTYDYIIAGGGLTGLTVAARLTENPDITVLVIESGSYESDRGPIIEDLNAYGQIFGSSVDHAYETVELATNNQTALIRSGNGLGGSTLINGGNWTRPHKAQVDSWETVFGNEGWNWDSVAAYSLQAERARAPNAKQIAAGHYFNASCHGINGTVHAGPRDTGDDYSPIVKALMSAVEDRGVPTKKDLGCGDPHGVSMFPNTLHEDQVRSDAAREWLLPNYQRPNLQVLTGQYVGKVLLSQNATTPRAVGVEFGTHKGNTHNVYAKHEVLLAAGSAVSPTILEYSGIGLKSILEPLGIDTVVDLPVGLNLQDQTTSTVRSRITSAGAGQGQAAWFATFNETFGDYAEKAHELLNTKLEQWAEEAVARGGFHNTTALLIQYENYRDWIVKDNVAYSELFLDTAGVASFDVWDLLPFTRGYVHILDKDPYLRHFAYDPQYFLNELDLLGQAAATQLARNISNSGAMQTYFAGETIPGDNLAYDADLSAWVEYIPENFRPNYHGVGTCSMMPKEMGGVVDNAARVYGVQGLRVIDGSIPPTQMSSHVMTVFYAMALKIADAILADY

SEQ ID NO: 1367 - protein, 577 aa, Aspergillus niger
GIEASLLKDPKEVAGRTYDYIIAGGGLTGLTVAAKLTENPNITVLVIESGSYESDRGPIIEDLNAYGDIFGSSVDHAYETVELATNNQTALIRSGNGLGGSTLINGGTWTRPHKAQVDSWETVFGNEGWNWDSVAAYSLQAERARAPNAKQIAAGHYFNASCHGINGTVHAGPRDTGDDYSPIVKALMSAVEDRGVPTKKDLGCGDPHGVSMFPNTLHEDQVRSDAAREWLLPNYQRPNLQVLTGQYVGKVLLSQNATTPRAVGVEFGTHKGNTHNVYAKHEVLLAAGSAVSPTILEYSGIGMKSILEPLGIDTVVDLPVGLNLQDQTTSTVRSRITSAGAGQGQAAWFATFNETFGDYTEKAHELLNTKLEQWAEEAVARGGFHNTTALLIQYENYRDWIVKDNVAYSELFLDTAGVASFDVWDLLPFTRGYVHILDKDPYLRHFAYDPQYFLNELDLLGQAAATQLARNISNSGAMQTYFAGETIPGDNLAYDADLSAWVEYIPENFRPNYHGVGTCSMMPKEMGGVVDNAARVYGVQGLRVIDGSIPPTQLSSHVMTVFYAMALKIADAVLADY

SEQ ID NO: 1368 - protein, 577 aa, Aspergillus niger
GIEASLLTDPKDVSGRTVDYIIAGGGLTGLTTAARLTENPNISVLVIESGSYESDRGPIIEDLNAYGDIFGSSVDHAYETVELATNNQTALIRSGNGLGGSTLVNGGTWTRPHKAQVDSWETVFGNEGWNWDNVAAYSLQAERARAPNAKQIAAGHYFNASCHGVNGTVHAGPRDTGDDYSPIVKALMSAVEDRGVPTKKDFGCGDPHGVSMFPNTLHEDQVRSDAAREWLLPNYQRPNLQVLTGQYVGKVLLSQNGTTPRAVGVEFGTHKGNTHNVYAKHEVLLAAGSAVSPTILEYSGIGMKSILEPLGIDTVVDLPVGLNLQDQTTATVRSRITSAGAGQGQAAWFATFNETFGDYSEKAHELLNTKLEQWAEEAVARGGFHNTTALLIQYENYRDWIVNHNVAYSELFLDTAGVASFDVWDLLPFTRGYVHILDKDPYLHHFAYDPQYFLNELDLLGQAAATQLARNISNSGAMQTYFAGETIPGDNLAYDADLSAWTEYIPYHFRPNYHGVGTCSMMPKEMGGVVDNAARVYGVQGLRVIDGSIPPTQVSSHVMTVFYAMALKISDAILEDY

SEQ ID NO: 1369 - protein, 577 aa, Aspergillus niger
GIEASLLTDPKDVSGRTVDYIIAGGGLTGLTTAARLTENPNISVLVIESGSYESDRGPIIEDLNAYGDIFGSSVDHAYETVELATNNQTALIRSGNGLGGSTLINGGTWTRPHKAQVDSWETVFGNEGWNWDNVAAYSLQAERARAPNAKQIAAGHYFNASCHGVNGTVHAGPRDTGDDYSPIVKALMSAVEDRGVPTKKDFGCGDPHGVSMFPNTLHEDQVRSDAAREWLLPNYQRPNLQVLTGQYVGKVLLSQNGTTPRAVGVEFGTHKGNTHNVYAKHEVLLAAGSAVSPTILEYSGIGMKSILEPLGIDTVVDLPVGLNLQDQTTATVRSRITSAGAGQGQAAWFATFNETFGDYSEKAHELLNTKLEQWAEEAVARGGFHNTTALLIQYENYRDWIVNHNVAYSELFLDTAGVASFDVWDLLPFTRGYVHILDKDPYLHHFAYDPQYFLNELDLLGQAAATQLARNISNSGAMQTYFAGETIPGDNLAYDADLSAWTEYIPYHFRPNYHGVGTCSMMPKEMGGVVDNAARVYGVQGLRVIDGSIPPTQMSSHVMTVFYAMALKISDAILEDY

SEQ ID NO: 1370 - protein, 577 aa, Aspergillus niger
GIEASLLTDPKDVSGRTVDYIIAGGGLTGLTTAARLTENPNISVLVIESGSYESDRGPIIEDLNAYGDIFGSSVDHAYETVELATNNQTALIRSGNGLGGSTLVNGGTWTRPHKAQVDSWETVFGNEGWNWDNVAAYSLQAERARAPNAKQIAAGHYFNASCHGVNGTVHAGPRDTGDDYSPIVKALMSAVEDRGVPTKKDFGCGDPHGVSMFPNTLHEDQVRSDAAREWLLPNYQRPNLQVLTGQYVGKVLLSQNGTTPRAVGVEFGTHKGNTHNVYAKHEVLLAAGSAVSPTILEYSGIGMKSILEPLGIDTVVDLPVGLNLQDQTTATVRSRITSAGAGQGQAAWFATFNETFGDYSEKAHELLNTKLEQWAEEAVARGGFHNTTALLIQYENYRDWIVNHNVAYSELFLDTAGVASFDVWDLLPFTRGYVHILDKDPYLHHFAYDPQYFLNELDLLGQAAATQLARNISNSGAMQTYFAGETIPGDNLAYDADLSAWTEYIPYHFRPNYHGVGTCSMMPKEMGGVVDNAARVYGVQGLRVIDGSIPPTQMSSHVMTVFYAMALKIADAILEDY

SEQ ID NO: 1371 - protein, 577 aa, Aspergillus niger
GIEASLLKDPKEVAGRTYDYIIAGGGLTGLTVAAKLTENPNITVLVIESGSYESDRGPIIEDLNAYGDIFGSSVDHAYETVELATNNQTALIRSGNGLGGSTLINGGTWTRPHKAQVDSWETVFGNEGWNWDSVAAYSLQAERARAPNAKQIAAGHYFNASCHGLNGTVHAGPRDTGDDYSPIVKALMSAVEDRGVPTKKDLGCGDPHGVSMFPNTLHEDQVRSDAAREWLLPNYQRPNLQVLTGQYVGKVLLSQNATTPRAVGVEFGTHKGNTHNVYAKHEVLLAAGSAVSPTILEYSGIGMKSILEPLGIDTVVDLPVGLNLQDQTTSTVRSRITSAGAGQGQAAWFATFNETFGDYTEKAHELLNTKLEQWAEEAVARGGFHNTTALLIQYENYRDWIVKDNVAYSELFLDTAGVASFDVWDLLPFTRGYVHILDKDPYLRHFAYDPQYFLNELDLLGQAAATQLARNISNSGAMQTYFAGETIPGDNLAYDADLSAWVEYIPENFRPNYHGVGTCSMMPKEMGGVVDNAARVYGVQGLRVIDGSIPPTQLSSHVMTVFYAMALKIADAVLADY

SEQ ID NO: 1372 - protein, 577 aa, Aspergillus niger
GIEASLLTDPKDVSGRTVDYIIAGGGLTGLTTAARLTENPNISVLVIESGSYESDRGPIIEDLNAYGDIFGSSVDHAYETVELATNNQTALIRSGNGLGGSTLVNGGTWTRPHKAQVDSWETVFGNEGWNWDNVAAYSLQAERARAPNAKQIAAGHYFNASCHGVNGTVHAGPRDTGDDYSPIVKALMSAVEDRGVPTKKDFGCGDPHGVSMFPNTLHEDQVRSDAAREWLLPNYQRPNLQVLTGQYVGKVLLSQNGTTPRAVGVEFGTHKGNTHNVYAKHEVLLAAGSAISPTILEYSGIGMKSILEPLGIDTVVDLPVGLNLQDQTTATVRSRITSAGAGQGQAAWFATFNETFGDYSEKAHELLNTKLEQWAEEAVARGGFHNTTALLIQYENYRDWIVNHNVAYSELFLDTAGVASFDVWDLLPFTRGYVHILDKDPYLHHFAYDPQYFLNELDLLGQAAATQLARNISNSGAMQTYFAGETIPGDNLAYDADLSAWTEYIPYHFRPNYHGVGTCSMMPKEMGGVVDNAARVYGVQGLRVIDGSIPPTQMSSHVMTVFYAMALKISDAILEDY

SEQ ID NO: 1373 - protein, 577 aa, Aspergillus niger
GIEASLLTDPKEVAGRTVDYIIAGGGLTGLTVAARLTENPDITVLVIEGGSYESDRGAIIEDLNAYGDIFGSSVDHAYETVELATNNRTALIRSGNGLGGSTLFNGGTWTRPHKAQVDSWETVFGNEGWNWDSVAAYSLQAERARAPNAKQIAAGHYFNASCHGINGTVHAGPRDTGDDYSPIVKALMSAVEDRGVPTKKDLGCGDPHGVSMFPNTLHEDQVRSDAAREWLLPNYQRPNLHVLTGQYVGKVLLSQNATTPRAVGVEFGTHKGNTHNVYAKHEVLLAAGSAVSPTILEYSGIGMKSILEPLGIDTVVDLPVGLNLQDQTTSTVRSRITSAGAGQGQAAWFATFNETFGDYAEKAHELLNTKLEQWAEEAVARGGFHNTTALLIQYENYRDWIVKDNVAYSELFLDTAGVASFDVWDLLPFTRGYVHILDKDPYLRHFAYDPQYFLNELDLLGQAAATQLARNISNSGAMQTYFAGETIPGDNLAYDADLSAWVEYIPYNFRPNYHGVGTCSMMPKEMGGVVDNAARVYGVQGLRVIDGSIPPTQMSSHVSTVFYAMALKIADAILADY

SEQ ID NO: 1374 - protein, 577 aa, Aspergillus niger
GIEASLLTDPKDVSGRTVDYIIAGGGLTGLTTAARLTENPNISVLVIESGSYESDRGPIIEDLNAYGDIFGSSVDHAYETVELATNNQTALIRSGNGLGGSTLVNGGTWTRPHKAQVDSWETVFGNEGWNWDNVAAYSLQAERARAPNAKQIAAGHYFNASCHGVNGTVHAGPRDTGDDYSPIVKALMSAVEDRGVPTKKDFGCGDPHGVSMFPNTLHEDQVRSDAAREWLLPNYQRPNLQVLTGQYVGKVLLSQNGTTPRAVGVEFGTHKGNTHNVYAKHEVLLAAGSAVSPTILEYSGIGMKSILEPLGIDTVVDLPVGLNLQDQTTATVRSRITSAGAGQGQAAWFATFNETFGDYSEKAHELLNTKLEQWAEEAVARGGFHNTTALLIQYENYRDWIVNHNVAYSELFLDTAGVASFDVWDLLPFTRGYVHILDKDPYLHHFAYDPQYFLNELDLLGQAAATQLARNISNSGAMQTYFAGETIPGDNLAYDADLSAWTEYIPYHFRPNYHGVGTCSMMPKELGGVVDNAARVYGVQGLRVIDGSIPPTQMSSHVMTVFYAMALKISDAILEDY

SEQ ID NO: 1375 - protein, 577 aa, Aspergillus niger
GIEASLLKDPKEVAGRTYDYIIAGGGLTGLTVAARLTENPNITVLVIESGSYESDRGPIIEDLNAYGDIFGSSVDHAYETVELPTNNQTALIRSGNGLGGSTLINGGTWTRPHKAQVDSWETVFGNEGWNWDSVAAYSLQAERARAPNAKQIAAGHYFNASCHGLNGTVHAGPRDTGDDYSPIVKALMSAVEDRGVPTKKDLGCGDPHGVSMFPNTLHEDQVRSDAAREWLLPNYQRPNLQVLTGQYVGKVLLSQNATTPRAVGVEFGTHKGNTHNVYAKHEVLLAAGSAVSPTILEYSGIGMKSILEPLGIDTVVDLPVGLNLQDQTTSTVRSRITSAGAGQGQAAWFATFNETFGDYTEKAHELLNTKLEQWAEEAVARGGFHNTTALLIQYENYRDWIVKDNVAYSELFLDTAGVASFDVWDLLPFTRGYVHILDKDPYLRHFAYDPQYFLNELDLLGQAAATQLARNISNSGAMQTYFAGETIPGDNLAYDADLSAWVEYIPENFRPNYHGVGTCSMMPKEMGGVVDNAARVYGVQGLRVIDGSIPPTQLSSHVMTVFYAMALKIADAVLADY

SEQ ID NO: 1376 - protein, 577 aa, Aspergillus niger
GIEASLLTDPKDVSGRTVDYIIAGGGLTGLTTAARLTENPNISVLVIESGSYESDRGPIIEDLNAYGDIFGSSVDHAYETVELATNNQTALIRSGNGLGGSTLVNGGTWTRPHKAQVDSWETVFGNEGWNWDNVAAYSLQAERARAPNAKQIAAGHYFNASCHGVNGTVHAGPRDTGDDYSPIVKALMSAVEDRGVPTKKDFGCGDPHGVSMFPNTLHEDQVRSDAAREWLLPNYQRPNLQVLTGQYVGKVLLSQNGTTPRAVGVEFGTHKGNTHNVYAKHEVLLAAGSAVSPTILEYSGIGMKSILDPLGIDTVVDLPVGLNLQDQTTATVRSRITSAGAGQGQAAWFATFNETFGDYSEKAHELLNTKLEQWAEEAVARGGFHNTTALLIQYENYRDWIVNHNVAYSELFLDTAGVASFDVWDLLPFTRGYVHILDKDPYLHHFAYDPQYFLNELDLLGQAAATQLARNISNSGAMQTYFAGETIPGDNLAYDADLSAWTEYIPYHFRPNYHGVGTCSMMPKEMGGVVDNAARVYGVQGLRVIDGSIPPTQMSSHVMTVFYAMALKISDAILEDY

SEQ ID NO: 1377 - protein, 577 aa, Aspergillus niger
GIEASLLTDPKEVAGRTVDYIIAGGGLTGLTVAARLTENPDITVLVIEPGSYESDRGAIIEDLNAYGDIFGSSVDHAYETVELATNNRTALIRSGNGLGGSTLLNGGTWTRPHKAQVDSWETVFGNEGWNWDSVAAYSLQAERARAPNAKQIAAGHYFNASCHGINGTVHAGPRDTGDDYSPIVKALMSAVEDRGVPTKKDLGCGDPHGVSMFPNTLHEDQVRSDAAREWLLPNYQRPNLHVLTGQYVGKVLLSQNATTPRAVGVEFGTHKGNTHNVYAKHEVLLAAGSAVSPTILEYSGIGMKSILEPLGIDTVVDLPVGLNLQDQTTSTVRSRITSAGAGQGQAAWFATFNETFGDYAEKAHELLNTKLEQWAEEAVARGGFHNTTALLIQYENYRDWIVKDNVAYSELFLDTAGVASFDVWDLLPFTRGYVHILDKDPYLRHFAYDPQYFLNELDLLGQAAATQLARNISNSGAMQTYFAGETIPGDNLAYDADLSAWVEYIPYNFRPNYHGVGTCSMMPKEMGGVVDNAARVYGVQGLRVIDGSIPPTQMSSHVTTVFYAMALKIADAILADY

SEQ ID NO: 1378 - protein, 577 aa, Aspergillus niger
GIEASLLTDPKDVSGRTVDYIIAGGGLTGLTTAARLTENPNISVLVIESGSYESDRGPIIEDLNAYGDIFGSSVDHAYETVELATNNQTALIRSGNGLGGSTLVNGGTWTRPHKAQVDSWETVFGNEGWNWDNVAAYSLKAERARAPNAKQIAAGHYFNASCHGVNGTVHAGPRDTGDDYSPIVKALMSAVEDRGVPTKKDFGCGDPHGVSMFPNTLHEDQVRSDAAREWLLPNYQRPNLQVLTGQYVGKVLLSQNGTTPRAVGVEFGTHKGNTHNVYAKHEVLLAAGSAVSPTILEYSGIGMKSILEPLGIDTVVDLPVGLNLQDQTTATVRSRITSAGAGQGQAAWFATFNETFGDYSEKAHELLNTKLEQWAEEAVARGGFHNTTALLIQYENYRDWIVNHNVAYSELFLDTAGVASFDVWDLLPFTRGYVHILDKDPYLHHFAYDPQYFLNELDLLGQAAATQLARNISNSGAMQTYFAGETIPGDNLAYDADLSAWTEYIPYHFRPNYHGVGTCSMMPKEMGGVVDNAARVYGVQGLRVIDGSIPPTQMSSHVMTVFYAMALKISDAILEDY

SEQ ID NO: 1379 - protein, 595 aa, Escherichia coli BL21(DE3)
WSLFLYGLQVAAPALASNGIEASLLTDPRDVSGRTVDYIIAGGGLTGLTTAARLTENPNISVLVIESGSYESDRGPIIEDLNAYGDIFGSSVDHAYETVELATNNQTALIRSGNGLGGSTLVNGGTWTRPHKAQVDSWETVFGNEGWNWDNVAAYSLQAERARAPNAKQIAAGHYFNASCHGVNGTVHAGPRDTGDDYSPIVKALMSAVEDRGVPTKKDFGCGDPHGVSMFPNTLHEDQVRSDAAREWLLPNYQRPNLQVLTGQYVGKVLLSQNGTTPRAVGVEFGTHKGNTHNVYAKHEVLLAAGSAVSPTILEYSGIGMKSILEPLGIDTVVDLPVGLNLQDQTTATVRSRITSAGAGQGQAAWFATFNETFGDYSEKAHELLNTKLEQWAEEAVARGGFHNTTALLIQYENYRDWIVNHNVAYSELFLDTAGVASFDVWDLLPFTRGYVHILDKDPYLHHFAYDPQYFLNELDLLGQAAATQLARNISNSGAMQTYFAGETIPGDNLAYDADLSAWTEYIPYHFRPNYHGVGTCSMMPKEMGGVVDNAARVYGVQGLRVIDGSIPPTQMSSHVMTVFYAMALKISDAILEDY

SEQ ID NO: 1380 - protein, 600 aa, Aspergillus niveoglaucus
LIWPLFLSVATALPKFPREHFDVQPQLLTDPTVLANTTVDYIIAGGGLTGLTIAARLTEDPKIKVLVIESGFFESNRGPIIEDLNSYGEIFGTEVDHAFETVSLAVNNRTENIRSGNGLGGSTLINGGTWTRPHKVQIDSWERVFGNEGWNWDDLLPYMLGIEKARHPNQRQIEAGHYFNPQCHGSNGTVHAGPRDTGESYSPIMKALMDTVSADGVPVRKDLGCGDPHGVSMFPNSLYESQIRADAAREWLVPNYYRPNLQVLTGQSVGKVLLDKTVPGAPKAIGVEFGTHRTRKYETFASREVLLAAGSTISPTILEYSGIGIKSVLDSVGIEQVVDLPVGLNLQDQTTVNLQSRITPDGAGQGQAAYFATFNETFGDFAPQAHELLNTKLDQWAEEVVARGGFHNATALRIQYENYRDWLVNDNVAYSELFLDTAGKISFDVWDLIPFTRGYVHIADKDPYLRRLSNDPQYFLNELDVLGQAAASKLARELSSRGAMAQYFASETVPGYDRLPADASLQDWAKYVKDRFRANYHAVSTCSMMPKEMGGVVDSTARVYGVERLRVVDGSIPPTQVSSHVMTVFYGMAVKIAEAILQDH

SEQ ID NO: 1381 - protein, 597 aa, Aspergillus niger
LVSSLVVSLAAALPHYIRSNGIEASLLTDPKEVAGRTVDYIIAGGGLTGLTTAARLTENPDITVLVIESGSYESDRGPIIEDLNAYGDIFGSSVDHAYETVELATNNQTALIRSGNGLGGSTLVNGGAWTRPHKAQVDSWETVFGNEGWNWDSVAAYSLQAERARAPNAKQIAAGHYFNASCHGINGTVHAGPRDTGDDYSPIVKALMSAVEDRGVPTKKDLGCGDPHGVSMFPNTLHEDQVRSDAAREWLLPNYQRPNLQVLTGRYVGKVLLSQNATTPRAVGVEFGTHKGNTHNVYAKHEVLLAAGSAVSPTILEYSGIGMKSILEPLGIDTVVDLPVGLNLQDQATSTVRSRITSAGAGQGQAAWFATFNETFGDYAEKAHELLNTKLEQWAEEAVARGGFHNTTALLIQYENYRDWIVKDNVAYSELFLDTAGVASFDVWDLLPFTRGYVHILDKDPYLRHFAYDPQYFLNELDLLGQAAATQLARNISNSGAMQTYFAGETIPGDNLAYDADLSAWVEYIPYNFRPNYHGVGTCSMMPKEMGGVVDNAARVYGVQGLRVIDGSIPPTQMSSHSMTVFYAMALKVADAILADY

SEQ ID NO: 1382 - protein, 597 aa, Aspergillus niger
LVSSLVVSLAAALPHYIRSNGIEASLLTDPKDVSGRTVDYIIAGGGLTGLTTAARLTENPNISVLVIESGSYESDRGPIIEDLNAYGDIFGSSVDHAYETVELATNNQTALIRSGNGLGGSTLVNGGTWTRPHKAQVDSWETVFGNEGWNWDNVAAYSLQAERARAPNAKQIAAGHYFNASCHGTNGTVHAGPRDTGDDYSPIVKALMSAVEDRGVPTKKDFGCGDPHGVSMFPNTLHEDQVRSDAAREWLLPNYQRPNLQVLTGQYVGKVLLSQNGTTPRAVGVEFGTHKGNTHNVYAEHEVLLAAGSAVSPTILEYSGIGMKSILEPLGIDTVVDLPVGLNLQDQTTATVRSRITSAGAGQGQAAWFATFNETFGDYSEKAHELLNTKLEQWAEEAVARGGFHNTTALLIQYENYRDWIVNHNVAYSELFLDTAGVASFDVWDLLPFTRGYVHILDKDPYLHHFAYDPQYFLNELDLLGQAAATQLARNISNSGAMQTYFAGETIPGDNLAYDADLSAWTEYIPYHFRPNYHGVGTCSMMPKEMGGVVDNAARVYGVQGLRVIDGSIPPTQMSSHVMTVFYAMALKISDAILEDY

SEQ ID NO: 1383 - protein, 597 aa, Aspergillus niger
LVSSLVVSLAAALPHYIRSNGIEASLLTDPKDVSGRTVDYIIAGGGLTGLTTAARLTENPNISVLVIESGSYESDRGPIIEDLNAYGDIFGSSVDHAYETVELATNNQTALIRSGNGLGGSTLVNGGTWTRPHKAQVDSWETVFGNEGWNWDNVAAYSLQAERARAPNAKQIAAGHYFNASCHGVNGTVHAGPRDTGDDYSPIVKALMSAVEDRGVPTKKDFGCGDPHGVSMFPNTLHEDQVRSDAAREWLLPNYQRPNLQVLTGQYVGKVLLSQNGTTPRAVGVEFGTHKGNTHNVYAKHEVLLAAGSAVSPTILEYSGIGMKSILEPLGIDTVVDLPVGLNLQDQTTATVRSRITSAGAGQGQAAWFATFNETFGDYSEKAHELLNTKLEQWAEEAVARGGFHNTTALLIQYENYRDWIVNHNVAYSELFLDTAGVASFDVWDLLPFTRGYVHILDKDPYLHHFAYDPQYFLNELDLLGQAAATQLARNISNSGAMQTYFAGETIPGDNLAYDADLSAWTEYIPYHFRPNYHGVGTCSMMPKEMGGVVDNAARVYGVQGLRVIDGSIPPTQMSSHVMTVFYAMALKISDAILEDY

SEQ ID NO: 1384 - protein, 597 aa, Aspergillus niger
LVSSLVVSLAAALPHYIRSNGIEASLLTDPKEVAGRTVDYIIAGGGLTGLTTAARLTENPDITVLVIESGSYESDRGPIIEDLNAYGDIFGSSVDHAYETVELATNNQTALIRSGNGLGGSTLVNGGAWTRPHKAQVDSWETVFGNEGWNWDSVAAYSLQAERARAPNAKQIAAGHYFNASCHGINGTVHAGPRDTGDDYSPIVKALMSAVEDRGVPTKKDLGCGDPHGVSMFPNTLHEDQVRSDAAREWLLPNYQRPNLQVLTGRYVGKVLLSQNATTPRAVGVEFGTHKGNTHNVYAKHEVLLAAGSAVSPTILEYSGIGMKSILEPLGIDTVVDLPVGLNLQDQTASTVRSRITSAGAGQGQAAWFATFNETFGDYAEKAHELLNTKLEQWAEEAVARGGFHNTTALLIQYENYRDWIVKDNVAYSELFLDTAGVASFDVWDLLPFTRGYVHILDKDPYLRHFAYDPQYFLNELDLLGQAAATQLARNISNSGAMQTYFAGETIPGDNLAYDADLSAWVEYIPYNFRPNYHGVGTCSMMPKEMGGVVDNAARVYGVQGLRVIDGSIPPTQMSSHSMTVFYAMALKVADAILADY

SEQ ID NO: 1385 - protein, 597 aa, Aspergillus niger
LVSSLVVSLAAALPHYIRSNGIEASLLTDPKEVAGRTVDYIIAGGGLTGLTTAARLTENPDITVLVIESGSYESDRGPIIEDLNAYGDIFGSSVDHAYETVELATNNQTALIRSGNGLGGSTLVNGGAWTRPHKAQVDSWETVFGNEGWNWDSVAAYSLQAERARAPNAKQIAAGHYFNASCHGINGTVHAGPRDTGDDYSPIVKALMSAVEDRGVPTKKDLGCGDPHGVSMFPNTLHEDQVRSDAAREWLLPNYQRPNLQVLTGRYVGKVLLSQNATTPRAVGVEFGTHKGNTHNVYAKHEVLLAAGSAVSPTILEYSGIGMKSILEPLGIDTVVDLPVGLNLQDQTASTVRSRITSAGAGQGQAAWFATFNETFGDYAEKAHELLNTKLEQWAEEAVARGGFHNTTALLIQYENYRDWIVKDNVAYSELFLDTAGVASFHVWDLLPFTRGYVHILDKDPYLRHFAYDPQYFLNELDLLGQAAATQLARNISNSGAMQTYFAGETIPGDNLAYDADLSAWVEYIPYNFRPNYHGVGTCSMMPKEMGGVVDNAARVYGVQGLRVIDGSIPPTQMSSHVMTVFYAMALKVADAILADY

SEQ ID NO: 1386 - protein, 597 aa, Aspergillus niger
LVSSLVVSLAAALPHYIRSNGIEASLLTDPKEVAGRTVDYIIAGGGLTGLTTAARLTENPDITVLVIESGSYESDRGPIIEDLNAYGDIFGSSVDHAYETVELATNNQTALIRSGNGLGGSTLVNGGTWTRPHKAQVDSWETVFGNEGWNWDSVAAYSLQAERARAPNAKQIAAGHYFNASCHGINGTVHAGPRDTGDDYSPIVKALMSAVEDRGVPTKKDLGCGDPHGVSMFPNTLHEDQVRSDAAREWLLPNYQRPNLQVLTGRYVGKVLLSQNATTPRAVGVEFGTHKGNTHNVYAKHEVLLAAGSAVSPTILEYSGIGMKSILEPLGIDTVVDLPVGLNLQDQATSTVRSRITSAGAGQGQAAWFATFNETFGDYAEKAHELLNTKLEQWAEEAVARGGFHNTTALLIQYENYRDWIVKDNVAYSELFLDTAGVASFHVWDLLPFTRGYVHILDKDPYLRHFAYDPQYFLNELDLLGQAAATQLARNISNSGAMQTYFAGETIPGDNLAYDADLSAWVEYIPYNFRPNYHGVGTCSMMPKEMGGVVDNAARVYGVQGLRVIDGSIPPTQMSSHSMTVFYAMALKVADAILADY

SEQ ID NO: 1387 - protein, 597 aa, Aspergillus niger
LVSSLVVSLAAALPHYIRSNGIEASLLTDPKEVAGRTVDYIIAGGGLTGLTTAARLTENPDITVLVIESGSYESDRGPIIEDLNAYGDIFGSSVDHAYETVELATNNQTALIRSGNGLGGSTLVNGGTWTRPHKAQVDSWETVFGNEGWNWDSVAAYSLQAERARAPNAKQIAAGHYFNASCHGINGTVHAGPRDTGDDYSPIVKALMSAVEDRGVPTKKDLGCGDPHGVSMFPNTLHEDQVRSDAAREWLLPNYQRPNLQVLTGRYVGKVLLSQNATTPRAVGVEFGTHKGNTHNVYAKHEVLLAAGSAVSPTILEYSGIGMKSILEPLGIDTVVDLPVGLNLQDQTASTVRSRITSAGAGQGQAAWFATFNETFGDYAEKAHELLNTKLEQWAEEAVARGGFHNTTALLIQYENYRDWIVKDNVAYSELFLDTAGVASFHVWDLLPFTRGYVHILDKDPYLRHFAYDPQYFLNELDLLGQAAATQLARNISNSGAMQTYFAGETIPGDNLAYDADLSAWVEYIPYNFRPNYHGVGTCSMMPKEMGGVVDNAARVYGVQGLRVIDGSIPPTQMSSHSMTVFYAMALKVADAILADY

SEQ ID NO: 1388 - protein, 597 aa, Aspergillus niger
LVSSLVVSLAAALPHYIRSNGIEASLLTDPKDVSGRTVDYIIAGGGLTGLTTAARLTENPNISVLVIESGSYESDRGPIIEDLNTYGDIFGSSVDHAYETVELATNNQTALIRSGNGLGGSTLVNGGTWTRPHKAQVDSWETVFGNEGWNWDNVAAYSLQAERARAPNAKQIAAGHYFNASCHGVNGTVHAGPRDTGDDYSPIVKALMSAVEDRGVPTKKDFGCGDPHGVSMFPNTLHEDQVRSDAAREWLLPNYQRPNLQVLTGQYVGKVLLSQNGTTPRAVGVEFGTHKGNTHNVYAKHEVLLAAGSAVSPTILEYSGIGMKSILEPLGIDTVVDLPVGLNLQDQTTATVRSRITSAGAGQGQAAWFATFNETFGDYSEKAHELLNTKLEQWAEEAVARGGFHNTTALLIQYENYRDWIVNHNVAYSELFLDTAGVASFDVWDLLPFTRGYVHILDKDPYLHHFAYDPQYFLNELDLLGQAAATQLARNISNSGAMQTYFAGETIPGDNLAYDADLSAWTEYIPYHFRPNYHGVGTCSMMPKEMGGVVDNAARVYGVQGLRVIDGSIPPTQMSSHVMTVFYAMALKISDAILEDY

SEQ ID NO: 1389 - protein, 597 aa, Aspergillus niger
LVSSLVVSLAAALPHYIRSNGIEASLLTDPKEVAGRTVDYIIAGGGLTGLTTAARLTENPDITVLVIESGSYESDRGPIIEDLNAYGDIFGSSVDHAYETVELATNNQTALIRSGNGLGGSTLVNGGAWTRPHKAQVDSWETVFGNEGWNWDSVAAYSLQAERARAPNAKQIAAGHYFNASCHGINGTVHAGPRDTGDDYSPIVKALMSAVEDRGVPTKKDLGCGDPHGVSMFPNTLHEDQVRSDAAREWLLPNYQRPNLQVLTGRYVGKVLLSQNATTPRAVGVEFGTHKGNTHNVYAKHEVLLAAGSAVSPTILEYSGIGMKSILEPLGIDTVVDLPVGLNLQDQATSTVRSRITSAGAGQGQAAWFATFNETFGDYAEKAHELLNTKLEQWAEEAVARGGFHNTTALLIQYENYRDWIVKDNVAYSELFLDTAGVASFHVWDLLPFTRGYVHILDKDPYLRHFAYDPQYFLNELDLLGQAAATQLARNISNSGAMQTYFAGETIPGDNLAYDADLSAWVEYIPYNFRPNYHGVGTCSMMPKEMGGVVDNAARVYGVQGLRVIDGSIPPTQMSSHVMTVFYAMALKVADAILADY

SEQ ID NO: 1390 - protein, 597 aa, Aspergillus niger
LVSSLVVSLAAALPHYIRSNGIEASLLTDPKEVAGRTVDYIIAGGGLTGLTTAARLTENPDITVLVIESGSYESDRGPIIEDLNAYGDIFGSSVDHAYETVELATNNQTALIRSGNGLGGSTLVNGGAWTRPHKAQVDSWETVFGNEGWNWDSVAAYSLQAERARAPNAKQIAAGHYFNASCHGINGTVHAGPRDTGDDYSPIVKALMSAVEDRGVPTKKDLGCGDPHGVSMFPNTLHEDQVRSDAAREWLLPNYQRPNLQVLTGRYVGKVLLSQNATTPRAVGVEFGTHKGNTHNVYAKHEVLLAAGSAVSPTILEYSGIGMKSILEPLGIDTVVDLPVGLNLQDQTTSTVRSRITSAGAGQGQAAWFATFNETFGDYAEKAHELLNTKLEQWAEEAVARGGFHNTTALLIQYENYRDWIVKDNVAYSELFLDTAGVASFHVWDLLPFTRGYVHILDKDPYLRHFAYDPQYFLNELDLLGQAAATQLARNISNSGAMQTYFAGETIPGDNLAYDADLSAWVEYIPYNFRPNYHGVGTCSMMPKEMGGVVDNAARVYGVQGLRVIDGSIPPTQMSSHSMTVFYAMALKVADAILADY

SEQ ID NO: 1391 - protein, 576 aa, Aspergillus niger
IEASLLTDPKEVAGRTVDYIIAGGGLTGLVVAARLTENPDITVLVIESGSYESDRGPIIEDLNAYGKIFGSSVDHAYETVCLATNNRTALIRAGNGLGGSTLVNGGTWTRPHKAQVDSWETVFGNEGWNWDSVAAYSLQAERARAPNAKQIAAGHYFNASCHGINGTVHAGPRDTGDDYSPIVKALMSAVEDRGVPTKKDLGCGDPHGVSMFPNTLHEDQVRSDAAREWLLPNYQRPNLQVLTGQYVGKVLLSQNATTPRAVGVEFGTHKGNFHNVTAKHEVLLAAGSAVSPTILEYSGIGMKSILEPLGIKTVVDLPVGLNLQDQTTSTVRSRITSAGAGQGQAAWFATFNETFGDYTEQAHELLNTKLEQWAEEAVARGGFHNTTALLIQYENYRDWIVKDNVAYSELFLDTAGEASFDVWDLLPFTRGYVHILDKDPYLRHFAYDPQYFLNELDLLGQAAATQLARNISNSGAMQTYFAGETIPGDNLAYDANLRAWVEYIPYHFRPNYHGVGTCSMMPKEMGGVVDNAARVYGVQGLRVIDGSIPPTQMSSHVMTVFYAMALKIADAVLADY

SEQ ID NO: 1392 - protein, 576 aa, Aspergillus niger
IEASLLTDPKEVAGRTVDYIIAGGGLTGLVVAARLTENPDITVLVIESGSYESDRGPIIEDLNAYGKIFGSSVDHAYETVCLATNNRTALIRAGNGLGGSTLVNGGTWTRPHKAQVDSWETVFGNEGWNWDSVAAYSLQAERARAPNAKQIAAGHYFNASCHGINGTVHAGPRDTGDDYSPIVKALMSAVENRGVPTKKDLGCGDPHGVSMFPNTLHEDQVRSDAAREWLLPNYQRPNLQVLTGQYVGKVLLSQNATTPRAVGVEFGTHKGNFHNVTAKHEVLLAAGSAVSPTILEYSGIGMKSILEPLGIKTVVDLPVGLNLQDQTTSTVRSRITSAGAGQGQAAWFATFNETFGDYTEKAHELLNTKLEQWAEEAVARGGFHNTTALLIQYENYRDWIVKDNVAYSELFLDTAGEASFDVWDLLPFTRGYVHILDKDPYLRHFAYDPQYFLNELDLLGQAAATQLARNISNSGAMQTYFAGETIPGDNLAYDANLRAWVEYIPYHFRPNYHGVGTCSMMPKEMGGVVDNAARVYGVQGLRVIDGSIPPTQMSSHVMTVFYAMALKIADAVLADY

SEQ ID NO: 1393 - protein, 576 aa, Synthetic construct
IEASLLTDPKEVAGRTVDYIIAGGGLTGLVVAARLTENPDITVLVIESGSYESDRGPIIEDLNAYGKIFGSSVDHAYETVCLATNNRTALIRAGNGLGGSTLVNGGTWTRPHKAQVDSWETVFGNEGWNWDSVAAYSLQAERARAPNAKQIAAGHYFNASCHGINGTVHAGPRDTGDDYSPIVKALMSAVEDRGVPTKKDLGCGDPHGVSMFPNTLHPDQVRSDAAREWLLPNYQRPNLQVLTGQYVGKVLLSQNATTPRAVGVEFGTHKGNFHNVTAKHEVLLAAGSAVSPTILEYSGIGMKSILEPLGIKTVVDLPVGLNLQDQTTSTVRSRITSAGAGQGQAAWFATFNETFGDYTPKAHELLNTKLEQWAEEAVARGGFHNTTALLIQYENYRDWIVKDNVAYSELFLDTAGEASFDVWDLLPFTRGYVHILDKDPYLRHFAYDPQYFLNELDLLGQAAATQLARNISNSGAMQTYFAGETIPGDNLAYDADLRAWVEYIPYHFRPNYHGVGTCSMMPKEMGGVVDNAARVYGVQGLRVIDGSIPPTQMSSHVMTVFYAMALKIADAVLADY

SEQ ID NO: 1394 - protein, 576 aa, Aspergillus niger
IEASLLTDPKEVAGRTVDYIIAGGGLTGLVVAARLTENPDITVLVIESGSYESDRGPIIEDLNAYGKIFGSSVDHAYETVCLATNNRTALIRAGNGLGGSTLVNGGTWTRPHKAQVDSWETVFGNEGWNWDSVAAYSLQAERARAPNAKQIAAGHYFNASCHGINGTVHAGPRDTGDDYSPIVKALMSAVEDRGVPTKKDLGCGDPHGVSMFPNTLHEDQVRSDAAREWLLPNYQRPNLSVLTGQYVGKVLLSQNATTPRAVGVEFGTHKGNFHNVTAKHEVLLAAGSAVSPTILEYSGIGMKSILEPLGIKTVVDLPVGLNLQDQTTSTVRSRITSAGAGQGQAAWFATFNETFGDYTEKAHELLNTKLEQWAEEAVARGGFHNTTALLIQYENYRDWIVKDNVAYSELFLDTAGEASFDVWDLLPFTRGYVHILDKDPYLRHFAYDPQYFLNELDLLGQAAATQLARNISNSGAMQTYFAGETIPGDNLAYDADLRAWVEYIPYHFRPNYHGVGTCSMMPKEMGGVVDNAARVYGVQGLRVIDGSIPPTQMSSHVMTVFYAMALKIADAVLADY

SEQ ID NO: 1395 - protein, 576 aa, Synthetic construct
IEASLLTDPKEVAGRTVDYIIAGGGLTGLVVAARLTENPDITVLVIESGSYESDRGPIIEDLNAYGKIFGSSVDHAYETVCLATNNRTALIRAGNGLGGSTLVNGGTWTRPHKAQVDSWETVFGNEGWNWDSVAAYSLQAERARAPNAKQIAAGHYFNASCHGINGTVHAGPRDTGDDYSPIVKALMSAVEDRGVPTKKDLGCGDPHGVSMFPNTLHEDQVRSDAAREWLLPNYQRPNLSVLTGQYVGKVLLSQNATTPRAVGVEFGTHKGNFHNVTAKHEVLLAAGSAVSPTILEYSGIGMKSILEPLGIKTVVDLPVGLNLQDQTTSTVRSRITSAGAGQGQAAWFATFNETFGDYTEKAHELLNTKLEQWAEEAVARGGFHNTTALLIQYENYRDWIVKDNVAYSELFLDTAGEISFDVWDLLPFTRGYVHILDKDPYLRHFAYDPQYFLNELDLLGQAAATQLARNISNSGAMQTYFAGETIPGDNLAYDADLRAWVEYIPYHFRPNYHGVGTCSMMPKEMGGVVDNAARVYGVQGLRVIDGSIPPTQMSSHVMTVFYAMALKIADAVLADY

SEQ ID NO: 1396 - protein, 576 aa, Aspergillus niger
IEASLLTDPKEVAGRTVDYIIAGGGLTGLVVAARLTENPDITVLVIESGSYESDRGPIIEDLNAYGKIFGSSVDHAYETVCLATNNRTALIRAGNGLGGSTLVNGGTWTRPHKAQVDSWETVFGNEGWNWDSVAAYSLQAERARAPNAKQIAAGHYFNASCHGINGTVHAGPRDTGDDYSPIVKALMSAVENRGVPTKKDLGCGDPHGVSMFPNTLHEDQVRSDAAREWLLPNYQRPNLQVLTGQYVGKVLLSQNATTPRAVGVEFGTHKGNFHNVTAKHEVLLAAGSAVSPTILEYSGIGMKSILEPLGIKTVVDLPVGLNLQDQTTSTVRSRITSAGAGQGQAAWFATFNETFGDYTEKAHELLNTKLEQWAEEAVARGGFHNTTALLIQYENYRDWIVKDNVAYSELFLDTAGEASFDVWDLLPFTRGYVHILDKDPYLRHFAYDPQYFLNELDLLGQAAATQLARNISNSGAMQTYFAGETIPGDNLAYDADLRAWVEYIPYHFRPNYHGVGTCSMMPKEMGGVVDNAARVYGVQGLRVIDGSIPPTQMSSHVMTVFYAMALKIADAVLADY

SEQ ID NO: 1397 - protein, 576 aa, Aspergillus niger
IEASLLTDPKEVAGRTVDYIIAGGGLTGLVVAARLTENPDITVLVIESGSYESDRGPIIEDLNAYGKIFGSSVDHAYETVCLATNNRTALIRAGNGLGGSTLVNGGTWTRPHKAQVDSWETVFGNEGWNWDSVAAYSLQAERARAPNAKQIAAGHYFNASCHGINGTVHAGPRDTGDDYSPIVKALMSAVEDRGVPTKKDLGCGDPHGVSMFPNTLHEDQVRSDAAREWLLPNYQRPNLQVLTGQYVGKVLLSQNATTPRAVGVEFGTHKGNFHNVTAKHEVLLAAGSAVSPTILEYSGIGMKSILEPLGIKTVVDLPVGLNLQDQTTSTVRSRITSAGAGQGQAAWFATFNETFGDYTEQAHELLNTKLEQWAEEAVARGGFHNTTALLIQYENYRDWIVKDNVAYSELFLDTAGEASFDVWDLLPFTRGYVHILDKDPYLRHFAYDPQYFLNELDLLGQAAATQLARNISNSGAMQTYFAGETIPGDNLAYDADLRAWVEYIPYHFRPNYHGVGTCSMMPKEMGGVVDNAARVYGVQGLRVIDGSIPPTQMSSHVMTVFYAMALKIADAVLADY

SEQ ID NO: 1398 - protein, 576 aa, Synthetic construct
IEASLLTDPKEVAGRTVDYIIAGGGLTGLVVAARLTENPDITVLVIESGSYESDRGPIIEDLNAYGKIFGSSVDHAYETVCLATNNRTALIRAGNGLGGSTLVNGGTWTRPHKAQVDSWETVFGNEGWNWDSVAAYSLQAERARAPNAKQIAAGHYFNASCHGINGTVHAGPRDTGDDYSPIVKALMSAVEDRGVPTKKDLGCGDPHGVSMFPNTLHPDQVRSDAAREWLLPNYQRPNLSVLTGQYVGKVLLSQNATTPRAVGVEFGTHKGNFHNVTAKHEVLLAAGSAVSPTILEYSGIGMKSILEPLGIKTVVDLPVGLNLQDQTTSTVRSRITSAGAGQGQAAWFATFNETFGDYTPKAHELLNTKLEQWAEEAVARGGFHNTTALLIQYENYRDWIVKDNVAYSELFLDTAGEASFDVWDLLPFTRGYVHILDKDPYLRHFAYDPQYFLNELDLLGQAAATQLARNISNSGAMQTYFAGETIPGDNLAYDADLRAWVEYIPYHFRPNYHGVGTCSMMPKEMGGVVDNAARVYGVQGLRVIDGSIPPTQMSSHVMTVFYAMALKIADAVLADY

SEQ ID NO: 1399 - protein, 576 aa, Aspergillus niger
IEDSLLTDPKEVAGRTVDYIIAGGGLTGLVVAARLTENPDITVLVIESGSYESDRGPIIEDLNAYGKIFGSSVDHAYETVCLATNNRTALIRAGNGLGGSTLVNGGTWTRPHKAQVDSWETVFGNEGWNWDSVAAYSLQAERARAPNAKQIAAGHYFNASCHGINGTVHAGPRDTGDDYSPIVKALMSAVEDRGVPTKKDLGCGDPHGVSMFPNTLHEDQVRSDAAREWLLPNYQRPNLQVLTGQYVGKVLLSQNATTPRAVGVEFGTHKGNFHNVTAKHEVLLAAGSAVSPTILEYSGIGMKSILEPLGIKTVVDLPVGLNLQDQTTSTVRSRITSAGAGQGQAAWFATFNETFGDYTEKAHELLNTKLEQWAEEAVARGGFHNTTALLIQYENYRDWIVKDNVAYSELFLDTAGEASFDVWDLLPFTRGYVHILDKDPYLRHFAYDPQYFLNELDLLGQAAATQLARNISNSGAMQTYFAGETIPGDNLAYDADLRAWVEYIPYHFRPNYHGVGTCSMMPKEMGGVVDNAARVYGVQGLRVIDGSIPPTQMSSHVMTVFYAMALKIADAVLADY

SEQ ID NO: 1400 - protein, 576 aa, Aspergillus niger
IEASLLTDPKEVAGRTVDYIIAGGGLTGLVVAARLTENPDITVLVIESGSYESDRGPIIEDLNAYGKIFGSSVDHAYETVCLATNNRTALIRAGNGLGGSTLVNGGTWTRPHKAQVDSWETVFGNEGWNWDSVAAYSLQAERARAPNAKQIAAGHYFNASCHGINGTVHAGPRDTGDDYSPIVKALMSAVEDRGVPTKKDLGCGDPHGVSMFPNTLHEDQVRSDAAREWLLPNYQRPNLSVLTGQYVGKVLLSQNATTPRAVGVEFGTHKGNFHNVTAKHEVLLAAGSAVSPTILEYSGIGMKSILEPLGIKTVVDLPVGLNLQDQTTSTVRSRITSAGAGQGQAAWFATFNETFGDYTEQAHELLNTKLEQWAEEAVARGGFHNTTALLIQYENYRDWIVKDNVAYSELFLDTAGEASFDVWDLLPFTRGYVHILDKDPYLRHFAYDPQYFLNELDLLGQAAATQLARNISNSGAMQTYFAGETIPGDNLAYDANLRAWVEYIPYHFRPNYHGVGTCSMMPKEMGGVVDNAARVYGVQGLRVIDGSIPPTQMSSHVMTVFYAMALKIADAVLADY

SEQ ID NO: 1401 - protein, 576 aa, Synthetic construct
IEDSLLTDPKEVAGRTVDYIIAGGGLTGLVVAARLTENPDITVLVIESGSYESDRGPIIEDLNAYGKIFGSSVDHAYETVCLATNNRTALIRAGNGLGGSTLVNGGTWTRPHKAQVDSWETVFGNEGWNWDSVAAYSLQAERARAPNAKQIAAGHYFNASCHGINGTVHAGPRDTGDDYSPIVKALMSAVENRGVPTKKDLGCGDPHGVSMFPNTLHEDQVRSDAAREWLLPNYQRPNLQVLTGQYVGKVLLSQNATTPRAVGVEFGTHKGNFHNVTAKHEVLLAAGSAVSPTILEYSGIGMKSILEPLGIKTVVDLPVGLNLQDQTTSTVRSRITSAGAGQGQAAWFATFNETFGDYTPKAHELLNTKLEQWAEEAVARGGFHNTTALLIQYENYRDWIVKDNVAYSELFLDTAGEISFDVWDLLPFTRGYVHILDKDPYLRHFAYDPQYFLNELDLLGQAAATQLARNISNSGAMQTYFAGETIPGDELAYDANLRAWVEYIPYHFRPNYHGVGTCSMMPKEMGGVVDNAARVYGVQGLRVIDGSIPPTQMSSHVMTVFYAMALKIADAVLADY

SEQ ID NO: 1402 - protein, 576 aa, Aspergillus niger
IEASLLTDPKEVAGRTVDYIIAGGGLTGLVVAARLTENPDITVLVIESGSYESDRGPIIEDLNAYGKIFGSSVDHAYETVCLATNNRTALIRAGNGLGGSTLVNGGTWTRPHKAQVDSWETVFGNEGWNWDSVAAYSLQAERARAPNAKQIAAGHYFNASCHGINGTVHAGPRDTGDDYSPIVKALMSAVEDRGVPTKKDLGCGDPHGVSMFPNTLHEDQVRSDAAREWLLPNYQRPNLQVLTGQYVGKVLLSQNATTPRAVGVEFGTHKGNFHNVTAKHEVLLAAGSAVSPTILEYSGIGMKSILEPLGIKTVVDLPVGLNLQDQTTSTVRSRITSAGAGQGQAAWFATFNETFGDYTEKAHELLNTKLEQWAEEAVARGGFHNTTALLIQYENYRDWIVKDNVAYSELFLDTAGEASFDVWDLLPFTRGYVHILDKDPYLRHFAYDPQYFLNELDLLGQAAATQLARNISNSGAMQTYFAGETIPGDNLAYDANLRAWVEYIPYHFRPNYHGVGTCSMMPKEMGGVVDNAARVYGVQGLRVIDGSIPPTQMSSHVMTVFYAMALKIADAVLADY

SEQ ID NO: 1403 - protein, 576 aa, Synthetic construct
IEASLLTDPKEVAGRTVDYIIAGGGLTGLVVAARLTENPDITVLVIESGSYESDRGPIIEDLNAYGKIFGSSVDHAYETVCLATNNRTALIRAGNGLGGSTLVNGGTWTRPHKAQVDSWETVFGNEGWNWDSVAAYSLQAERARAPNAKQIAAGHYFNASCHGINGTVHAGPRDTGDDYSPIVKALMSAVEDRGVPTKKDLGCGDPHGVSMFPNTLHEDQVRSDAAREWLLPNYQRPNLEVLTGQYVGKVLLSQNATTPRAVGVEFGTHKGNFHNVTAKHEVLLAAGSAVSPTILEYSGIGMKSILEPLGIKTVVDLPVGLNLQDQTTSTVRSRITSAGAGQGQAAWFATFNETFGDYTEKAHELLNTKLEQWAEEAVARGGFHNTTALLIQYENYRDWIVKDNVAYSELFLDTAGEASFDVWDLLPFTRGYVHILDKDPYLRHFAYDPQYFLNELDLLGQAAATQLARNISNSGAMQTYFAGETIPGDNLAYDADLRAWVEYIPYHFRPNYHGVGTCSMMPKEMGGVVDNAARVYGVQGLRVIDGSIPPTQMSSHVMTVFYAMALKIADAVLADY

SEQ ID NO: 1404 - protein, 576 aa, Aspergillus niger
IEDSLLTDPKEVAGRTVDYIIAGGGLTGLVVAARLTENPDITVLVIESGSYESDRGPIIEDLNAYGKIFGSSVDHAYETVCLATNNRTALIRAGNGLGGSTLVNGGTWTRPHKAQVDSWETVFGNEGWNWDEVAAYSLQAERARAPNAKQIAAGHYFNASCHGINGTVHAGPRDTGDDYSPIVKALMSAVEDRGVPTKKDLGCGDPHGVSMFPNTLHEDQVRSDAAREWLLPNYQRPNLSVLTGQYVGKVLLSQNATTPRAVGVEFGTHKGNFHNVTAKHEVLLAAGSAVSPTILEYSGIGMKSILEPLGIKTVVDLPVGLNLQDQTTSTVRSRITSAGAGQGQAAWFATFNETFGDYTEKAHELLNTKLEQWAEEAVARGGFHNTTALLIQYENYRDWIVKDNVAYSELFLDTAGEASFDVWDLLPFTRGYVHILDKDPYLRHFAYDPQYFLNELDLLGQAAATQLARNISNSGAMQTYFAGETIPGDNLAYDADLRAWVEYIPYHFRPNYHGVGTCSMMPKEMGGVVDNAARVYGVQGLRVIDGSIPPTQMSSHVMTVFYAMALKIADAVLADY

SEQ ID NO: 1405 - protein, 576 aa, Aspergillus niger
IEDSLLTDPKEVAGRTVDYIIAGGGLTGLVVAARLTENPDITVLVIESGSYESDRGPIIEDLNAYGKIFGSSVDHAYETVCLATNNRTALIRAGNGLGGSTLVNGGTWTRPHKAQVDSWETVFGNEGWNWDSVAAYSLQAERARAPNAKQIAAGHYFNASCHGINGTVHAGPRDTGDDYSPIVKALMSAVEDRGVPTKKDLGCGDPHGVSMFPNTLHEDQVRSDAAREWLLPNYQRPNLSVLTGQYVGKVLLSQNATTPRAVGVEFGTHKGNFHNVTAKHEVLLAAGSAVSPTILEYSGIGMKSILEPLGIKTVVDLPVGLNLQDQTTSTVRSRITSAGAGQGQAAWFATFNETFGDYTEKAHELLNTKLEQWAEEAVARGGFHNTTALLIQYENYRDWIVKDNVAYSELFLDTAGEASFDVWDLLPFTRGYVHILDKDPYLRHFAYDPQYFLNELDLLGQAAATQLARNISNSGAMQTYFAGETIPGDNLAYDADLRAWVEYIPYHFRPNYHGVGTCSMMPKEMGGVVDNAARVYGVQGLRVIDGSIPPTQMSSHVMTVFYAMALKIADAVLADY

SEQ ID NO: 1406 - protein, 576 aa, Aspergillus niger
IEASLLTDPKEVAGRTVDYIIAGGGLTGLVVAARLTENPDITVLVIESGSYESDRGPIIEDLNAYGKIFGSSVDHAYETVCLATNNRTALIRAGNGLGGSTLVNGGTWTRPHKAQVDSWETVFGNEGWNWDSVAAYSLQAERARAPNAKQIAAGHYFNASCHGINGTVHAGPRDTGDDYSPIVKALMSAVENRGVPTKKDLGCGDPHGVSMFPNTLHEDQVRSDAAREWLLPNYQRPNLSVLTGQYVGKVLLSQNATTPRAVGVEFGTHKGNFHNVTAKHEVLLAAGSAVSPTILEYSGIGMKSILEPLGIKTVVDLPVGLNLQDQTTSTVRSRITSAGAGQGQAAWFATFNETFGDYTEKAHELLNTKLEQWAEEAVARGGFHNTTALLIQYENYRDWIVKDNVAYSELFLDTAGEASFDVWDLLPFTRGYVHILDKDPYLRHFAYDPQYFLNELDLLGQAAATQLARNISNSGAMQTYFAGETIPGDNLAYDANLRAWVEYIPYHFRPNYHGVGTCSMMPKEMGGVVDNAARVYGVQGLRVIDGSIPPTQMSSHVMTVFYAMALKIADAVLADY

SEQ ID NO: 1407 - protein, 576 aa, Synthetic construct
IEASLLTDPKEVAGRTVDYIIAGGGLTGLVVAARLTENPDITVLVIESGSYESDRGPIIEDLNAYGKIFGSSVDHAYETVCLATNNRTALIRAGNGLGGSTLVNGGTWTRPHKAQVDSWETVFGNEGWNWDSVAAYSLQAERARAPNAKQIAAGHYFNASCHGINGTVHAGPRDTGDDYSPIVKALMSAVEDRGVPTKKDLGCGDPHGVSMFPNTLHEDQVRSDAAREWLLPNYQRPNLQVLTGQYVGKVLLSQNATTPRAVGVEFGTHKGNFHNVTAKHEVLLAAGSAVSPTILEYSGIGMKSILEPLGIKTVVDLPVGLNLQDQTTSTVRSRITSAGAGQGQAAWFATFNETFGDYTEKAHELLNTKLEQWAEEAVARGGFHNTTALLIQYENYRDWIVKDNVAYSELFLDTAGEISFDVWDLLPFTRGYVHILDKDPYLRHFAYDPQYFLNELDLLGQAAATQLARNISNSGAMQTYFAGETIPGDNLAYDADLRAWVEYIPYHFRPNYHGVGTCSMMPKEMGGVVDNAARVYGVQGLRVIDGSIPPTQMSSHVMTVFYAMALKIADAVLADY

SEQ ID NO: 1408 - protein, 576 aa, Aspergillus niger
IEASLLTDPKEVAGRTVDYIIAGGGLTGLVVAARLTENPDITVLVIESGSYESDRGPIIEDLNAYGKIFGSSVDHAYETVCLATNNRTALIRAGNGLGGSTLVNGGTWTRPHKAQVDSWETVFGNEGWNWDSVAAYSLQAERARAPNAKQIAAGHYFNASCHGINGTVHAGPRDTGDDYSPIVKALMSAVEDRGVPTKKDLGCGDPHGVSMFPNTLHEDQVRSDAAREWLLPNYQRPNLSVLTGQYVGKVLLSQNATTPRAVGVEFGTHKGNFHNVTAKHEVLLAAGSAVSPTILEYSGIGMKSILEPLGIKTVVDLPVGLNLQDQTTSTVRSRITSAGAGQGQAAWFATFNETFGDYTEKAHELLNTKLEQWAEEAVARGGFHNTTALLIQYENYRDWIVKDNVAYSELFLDTAGEASFDVWDLLPFTRGYVHILDKDPYLRHFAYDPQYFLNELDLLGQAAATQLARNISNSGAMQTYFAGETIPGDNLAYDANLRAWVEYIPYHFRPNYHGVGTCSMMPKEMGGVVDNAARVYGVQGLRVIDGSIPPTQMSSHVMTVFYAMALKIADAVLADY

SEQ ID NO: 1409 - protein, 576 aa, Aspergillus niger
IEASLLTDPKEVAGRTVDYIIAGGGLTGLVVAARLTENPDITVLVIESGSYESDRGPIIEDLNAYGKIFGSSVDHAYETVCLATNNRTALIRAGNGLGGSTLVNGGTWTRPHKAQVDSWETVFGNEGWNWDSVAAYSLQAERARAPNAKQIAAGHYFNASCHGINGTVHAGPRDTGDDYSPIVKALMSAVEDRGVPTKKDLGCGDPHGVSMFPNTLHEDQVRSDAAREWLLPNYQRPNLSVLTGQYVGKVLLSQNATTPRAVGVEFGTHKGNFHNVTAKHEVLLAAGSAVSPTILEYSGIGMKSILEPLGIKTVVDLPVGLNLQDQTTSTVRSRITSAGAGQGQAAWFATFNETFGDYTEQAHELLNTKLEQWAEEAVARGGFHNTTALLIQYENYRDWIVKDNVAYSELFLDTAGEASFDVWDLLPFTRGYVHILDKDPYLRHFAYDPQYFLNELDLLGQAAATQLARNISNSGAMQTYFAGETIPGDNLAYDADLRAWVEYIPYHFRPNYHGVGTCSMMPKEMGGVVDNAARVYGVQGLRVIDGSIPPTQMSSHVMTVFYAMALKIADAVLADY

SEQ ID NO: 1410 - protein, 576 aa, Synthetic construct
IEASLLTDPKEVAGRTVDYIIAGGGLTGLVVAARLTENPDITVLVIESGSYESDRGPIIEDLNAYGKIFGSSVDHAYETVCLATNNRTALIRAGNGLGGSTLVNGGTWTRPHKAQVDSWETVFGNEGWNWDSVAAYSLQAERARAPNAKQIAAGHYFNASCHGINGTVHAGPRDTGDDYSPIVKALMSAVEDRGVPTKKDLCCGDPHGVSMFPNTLHEDQVRSDAAREWLLPNYQRPNLSVLTGQYVGKVLLSQNATTPRAVGVEFGTHKGNFHNVTAKHEVLLAAGSAVSPTILEYSGIGMKSILEPLGIKTVVDLPVGLNLQDQTTSTVRSRITSAGAGQGQAAWFATFNETFGDYTEKAHELLNTKLEQWAEEAVARGGFHNTTALLIQYENYRDWIVKDNVAYSELFLDTAGEASFDVWDLLPFTRGYVHILDKDPYLRHFAYDPQYFLNELDLLGQAAATQLARNISNSGAMQTYFAGETIPGDNLAYDADLRAWVEYIPYHFRPNYHGVGTCSMMPKEMGGVVDNAARVYGVQGLRVIDGSIPPTQMSSHVMTVFYAMALKIADAVLADY

SEQ ID NO: 1411 - protein, 576 aa, Synthetic construct
IEASLLTDPKEVAGRTVDYIIAGGGLTGLVVAARLTENPDITVLVIESGSYESDRGPIIEDLNAYGKIFGSSVDHAYETVCLATNNRTALIRAGNGLGGSTLVNGGTWTRPHKAQVDSWETVFGNEGWNWDSVAAYSLQAERARAPNAKQIAAGHYFNASCHGINGTVHAGPRDTGDDYSPIVKALMSAVEDRGVPTKKDLCCGDPHGVSMFPNTLHEDQVRSDAAREWLLPNYQRPNLQVLTGQYVGKVLLSQNATTPRAVGVEFGTHKGNFHNVTAKHEVLLAAGSAVSPTILEYSGIGMKSILEPLGIKTVVDLPVGLNLQDQTTSTVRSRITSAGAGQGQAAWFATFNETFGDYTEKAHELLNTKLEQWAEEAVARGGFHNTTALLIQYENYRDWIVKDNVAYSELFLDTAGEASFDVWDLLPFTRGYVHILDKDPYLRHFAYDPQYFLNELDLLGQAAATQLARNISNSGAMQTYFAGETIPGDNLAYDADLRAWVEYIPYHFRPNYHGVGTCSMMPKEMGGVVDNAARVYGVQGLRVIDGSIPPTQMSSHVMTVFYAMALKIADAVLADY

SEQ ID NO: 1412 - protein, 576 aa, Aspergillus niger
IEASLLTDPKEVAGRTVDYIIAGGGLTGLVVAARLTENPDITVLVIESGSYESDRGPIIEDLNAYGKIFGSSVDHAYETVCLATNNRTALIRAGNGLGGSTLVNGGTWTRPHKAQVDSWETVFGNEGWNWDSVAAYSLQAERARAPNAKQIAAGHYFNASCHGINGTVHAGPRDTGDDYSPIVKALMSAVENRGVPTKKDLGCGDPHGVSMFPNTLHEDQVRSDAAREWLLPNYQRPNLSVLTGQYVGKVLLSQNATTPRAVGVEFGTHKGNFHNVTAKHEVLLAAGSAVSPTILEYSGIGMKSILEPLGIKTVVDLPVGLNLQDQTTSTVRSRITSAGAGQGQAAWFATFNETFGDYTEKAHELLNTKLEQWAEEAVARGGFHNTTALLIQYENYRDWIVKDNVAYSELFLDTAGEASFDVWDLLPFTRGYVHILDKDPYLRHFAYDPQYFLNELDLLGQAAATQLARNISNSGAMQTYFAGETIPGDNLAYDADLRAWVEYIPYHFRPNYHGVGTCSMMPKEMGGVVDNAARVYGVQGLRVIDGSIPPTQMSSHVMTVFYAMALKIADAVLADY

SEQ ID NO: 1413 - protein, 576 aa, Synthetic construct
IEASLLTDPKEVAGRTVDYIIAGGGLTGLVVAARLTENPDITVLVIESGSYESDRGPIIEDLNAYGKIFGSSVDHAYETVCLATNNRTALIRAGNGLGGSTLVNGGTWTRPHKAQVDSWETVFGNEGWNWDSVAAYSLQAERARAPNAKQIAAGHYFNASCHGINGTVHAGPRDTGDDYSPIVKALMSAVEDRGVPTKKDLGCGDPHGVSMFPNTLHEDQVRSDAAREWLLPNYQRPNLEVLTGQYVGKVLLSQNATTPRAVGVEFGTHKGNFHNVTAKHEVLLAAGSAVSPTILEYSGIGMKSILEPLGIKTVVDLPVGLNLQDQTTSTVRSRITSAGAGQGQAAWFATFNETFGDYTEKAHELLNTKLEQWAEEAVARGGFHNTTALLIQYENYRDWIVKDNVAYSELFLDTAGEASFDVWDLLPFTRGYVHILDKDPYLRHFAYDPQYFLNELDLLGQAAATQLARNISNSGAMQTYFAGETIPGDNLAYDADLEAWVEYIPYHFRPNYHGVGTCSMMPKEMGGVVDNAARVYGVQGLRVIDGSIPPTQMSSHVMTVFYAMALKIADAVLADY

SEQ ID NO: 1414 - protein, 576 aa, Aspergillus niger
IEASLLTDPKEVAGRTVDYIIAGGGLTGLVVAARLTENPDITVLVIESGSYESDRGPIIEDLNAYGKIFGSSVDHAYETVCLATNNRTALIRAGNGLGGSTLVNGGTWTRPHKAQVDSWETVFGNEGWNWDSVAAYSLQAERARAPNAKQIAAGHYFNASCHGINGTVHAGPRDTGDDYSPIVKALMSAVEDRGVPTKKDLGCGDPHGVSMFPNTLHEDQVRSDAAREWLLPNYQRPNLQVLTGQYVGKVLLSQNATTPRAVGVEFGTHKGNFHNVTAKHEVLLAAGSAVSPTILEYSGIGMKSILEPLGIKTVVDLPVGLNLQDQTTSTVRSRITSAGAGQGQAAWFATFNETFGDYTEKAHELLNTKLEQWAEEAVARGGFHNTTALLIQYENYRDWIVKDNVAYSELFLDTAGEASFDVWDLLPFTRGYVHILDKDPYLRHFAYDPQYFLNELDLLGQAAATQLARNISNSGAMQTYFAGETIPGDNLAYDADLRAWVEYIPYHFRPNYHGVGTCSMMPKEMGGVVDNAARVYGVQGLRVIDGSIPPTQMSSHVMTVFYAMALKIADAVLADY

SEQ ID NO: 1415 - protein, 576 aa, Aspergillus niger
IEASLLTDPKEVAGRTVDYIIAGGGLTGLVVAARLTENPDITVLVIESGSYESDRGPIIEDLNAYGKIFGSSVDHAYETVCLATNNRTALIRAGNGLGGSTLVNGGTWTRPHKAQVDSWETVFGNEGWNWDEVAAYSLQAERARAPNAKQIAAGHYFNASCHGINGTVHAGPRDTGDDYSPIVKALMSAVEDRGVPTKKDLGCGDPHGVSMFPNTLHEDQVRSDAAREWLLPNYQRPNLQVLTGQYVGKVLLSQNATTPRAVGVEFGTHKGNFHNVTAKHEVLLAAGSAVSPTILEYSGIGMKSILEPLGIKTVVDLPVGLNLQDQTTSTVRSRITSAGAGQGQAAWFATFNETFGDYTEKAHELLNTKLEQWAEEAVARGGFHNTTALLIQYENYRDWIVKDNVAYSELFLDTAGEASFDVWDLLPFTRGYVHILDKDPYLRHFAYDPQYFLNELDLLGQAAATQLARNISNSGAMQTYFAGETIPGDNLAYDADLRAWVEYIPYHFRPNYHGVGTCSMMPKEMGGVVDNAARVYGVQGLRVIDGSIPPTQMSSHVMTVFYAMALKIADAVLADY

SEQ ID NO: 1416 - protein, 576 aa, unidentified
IEASLLTDPKDVSGRTVDYIIAGGGLTGLTTAARLTENPNISVLVIYSGSYESDRGPIIEDLNAYGDIFGSSVDHAYETVELATNNQTALIRSGNGLGGSTLVNGGTWTRPHKAQVDSWETVFGNEGWNWDNVAYSLQAERARAPNAKQIAAGHYFNASCHGVNGTVHAGPRDTGDDYSPIVKALMSAVEDRGVPTKKDFGCGDPHGVSMFPNTLHEDQVRSDAAREWLLPNYQRPNLQVLTGQTVGKVLLSQNGTTPRAVGVEFGTHKGNTHNVYALHEVLLAAGSAVSPTILEYSGIGMKSILEPLGIDTVVDLPVGLNLQDQTTATVRSRITSAGAGQGQAAWFATFNETFGDYSEKAHELLNTKLEQWAEEAVARGGFHNTTALLIQYENTRDWIVNHNVATSELFLDTAGVASFDVWDLLPFTRGYVHILDKDPTTLHHFAYDPQTFLNELDLLGQAAATQLARNISNSGAMQTTFAGETIPGDNLATDADLSAWTEYIPYHFRPNTHGVGTCSMMPKEMGGVVDNAARVYGVQVLRVIDGSIPPTQMSSTVMTVFYAMALKISDAILEDY

SEQ ID NO: 1417 - protein, 577 aa, Aspergillus niger
GIEASLLTDPKDVSGRTVDYIIAGGGLTGLTTAARLTENPNISVLVIESGSYESDRGPIIEDLNAYGDIFGSSVDHAYETVELATNNQTALIRSGNGLGGSTLVNGGTWTRPHKAQVDSWETVFGNEGWNWDNVAAYSLQAERARAPNAKQIAAGHYFNASCHGVNGTVHAGPRDTGDDYSPIVKALMSAVEDRGVPTKKDFGCGDPHGVSMFPNTLHEDQVRSDAAREWLLPNYQRPNLQVLTGQYVGKVLLSQNGTTPRAVGVEFGTHKGNTHNVYAKHEVLLAAGSAVSPTILEYSGIGMKSILEPLGIDTVVDLPVGLNLQDQTTATVRSRITSAGAGQGQAAWFATFNETFGDYSEKAHELLNTKLEQWAEEAVARGGFHNTTALLIQYENYRDWIVNHNVAYSELFLDTAGVASFDVWDLLPFTRGYVHILDKDPYLHHFAYDPQYFLNELDLLGQAAATQLARNISNSGAMQTYFAGETIPGDNLAYDADLSAWEEYIPYHFRPNYHGVGTCSMMPKEMGGVVDNAARVYGVQGLRVIDGSIPPTQMSSHVMTVFYAMALKISDAILEDY

SEQ ID NO: 1418 - protein, 577 aa, Aspergillus niger
GIEASLLTDPKDVSGRTVDYIIAGGGLTGLTTAARLTENPNISVLVIESGSYESDRGPIIEDLNAYGDIFGSSVDHAYETVELATNNQTALIRSGNGLGGSTLVNGGTWTRPHKAQVDSWETVFGNEGWNWDNVAAYSLQAERARAPNAKQIAAGHYFNASCHGRNGTVHAGPRDTGDDYSPIVKALMSAVEDRGVPTKKDFGCGDPHGVSMFPNTLHEDQVRSDAAREWLLPNYQRPNLQVLTGQYVGKVLLSQNGTTPRAVGVEFGTHKGNTHNVYAKHEVLLAAGSAVSPTILEYSGIGMKSILEPLGIDTVVDLPVGLNLQDQTTATVRSRITSAGAGQGQAAWFATFNETFGDYSEKAHELLNTKLEQWAEEAVARGGFHNTTALLIQYENYRDWIVNHNVAYSELFLDTAGVASFDVWDLLPFTRGYVHILDKDPYLHHFAYDPQYFLNELDLLGQAAATQLARNISNSGAMQTYFAGETIPGDNLAYDADLSAWTEYIPYHFRPNYHGVGTCSMMPKEMGGVVDNAARVYGVQGLRVIDGSIPPTQMSSHVMTVFYAMALKISDAILEDY

SEQ ID NO: 1419 - protein, 577 aa, Aspergillus niger
GIEASLLTDPKDVSGRTVDYIIAGGGLTGLTTAARLTENPNISVLVIESGSYESDRGPIIEDLNAYGDIFGSSVDHAYETVELATNNQTALIRSGNGLGGSTLVNGGTWTRPHKAQVDSWETVFGNEGWNWDNVAAYSLQAERARAPNAKQIAAGHYFNASCHGKNGTVHAGPRDTGDDYSPIVKALMSAVEDRGVPTKKDFGCGDPHGVSMFPNTLHEDQVRSDAAREWLLPNYQRPNLQVLTGQYVGKVLLSQNGTTPRAVGVEFGTHKGNTHNVYAKHEVLLAAGSAVSPTILEYSGIGMKSILEPLGIDTVVDLPVGLNLQDQTTATVRSRITSAGAGQGQAAWFATFNETFGDYSEKAHELLNTKLEQWAEEAVARGGFHNTTALLIQYENYRDWIVNHNVAYSELFLDTAGVASFDVWDLLPFTRGYVHILDKDPYLHHFAYDPQYFLNELDLLGQAAATQLARNISNSGAMQTYFAGETIPGDNLAYDADLSAWTEYIPYHFRPNYHGVGTCSMMPKEMGGVVDNAARVYGVQGLRVIDGSIPPTQMSSHVMTVFYAMALKISDAILEDY

SEQ ID NO: 1420 - protein, 577 aa, Aspergillus niger
GIEASLLTDPKDVSGRTVDYIIAGGGLTGLTTAARLTENPNISVLVIESGSYESDRGPIIEDLNAYGDIFGSSVDHAYETVELATNNQTALIRSGNGLGGSTLVNGGTWTRPHKAQVDSWETVFGNEGWNWDNVAAYSLQAERARAPNAKQIAAGHYFNASCHGVNGTVHAGPRDTGDDYSPIVKALMSAVEDRGVPTKKDFGCGDPHGVSMFPNTLHEDQVRSDAAREWLLPNYQRPNLQVLTGQYVGKVLLSQNGTTPRAVGVEFGTHKGNTHNVYAKHEVLLAAGSAVSPTILEYSGIGMKSILEPLGIDTVVDLPVGLNLQDQTTATVRSRITSAGAGQGQAAWFATFNETFGDYSEKAHELLNTKLEQWAEEAVARGGFHNTTALLIQYENYRDWIVNHNVAYSELFLDTAGVASFDVWDLLPFTRGYVHILDKDPYLHHFAYDPQYFLNELDLLGQAAATQLARNISNSGAMQTYFAGETIPGDNLAPDADLSAWTEYIPYHFRPNYHGVGTCSMMPKEMGGVVDNAARVYGVQGLRVIDGSIPPTQMSSHVMTVFYAMALKISDAILEDY

SEQ ID NO: 1421 - protein, 577 aa, Aspergillus niger
GIEASLLTDPKDVSGRTVDYIIAGGGLTGLTTAARLTENPNISVLVIESGSYESDRGPIIEDLNAYGDIFGSSVDHAYETVELATNNQTALIRSGNGLGGSTLVNGGTWTRPHKAQVDSWETVFGNEGWNWDNVAAYSLQAERARAPNAKQIAAGHYFNASCHGVNGTVHAGPRDTGDDYSPIVKALMSAVEDLGVPTKKDFGCGDPHGVSMFPNTLHEDQVRSDAAREWLLPNYQRPNLQVLTGQYVGKVLLSQNGTTPRAVGVEFGTHKGNTHNVYAKHEVLLAAGSAVSPTILEYSGIGMKSILEPLGIDTVVDLPVGLNLQDQTTATVRSRITSAGAGQGQAAWFATFNETFGDYSEKAHELLNTKLEQWAEEAVARGGFHNTTALLIQYENYRDWIVNHNVAYSELFLDTAGVASFDVWDLLPFTRGYVHILDKDPYLHHFAYDPQYFLNELDLLGQAAATQLARNISNSGAMQTYFAGETIPGDNLAYDADLSAWTEYIPYHFRPNYHGVGTCSMMPKEMGGVVDNAARVYGVQGLRVIDGSIPPTQMSSHVMTVFYAMALKISDAILEDY

SEQ ID NO: 1422 - protein, 577 aa, Aspergillus niger
GIEASLLTDPKDVSGRTVDYIIAGGGLTGLTTAARLTENPNISVLVIESGSYESDRGPIIEDLNAYGDIFGSSVDHAYETVELATNNQTALIRSGNGLGGSTLVNGGTWTRPHKAQVDSWETVFGNEGWNWDNVAAYSLQAERARAPNAKQIAAGHYFNASCHGVNGTVHAGPRDTGDDYSPIVKALMSAVEDRGVPTKKDFGCGDPHGVSMFPNTLHEDQVRSDAAREWLLPNYQRPNLQVLTGQYVGKVLLSQNGTTPRAVGVEFGTHKGNTHKVYAKHEVLLAAGSAVSPTILEYSGIGMKSILEPLGIDTVVDLPVGLNLQDQTTATVRSRITSAGAGQGQAAWFATFNETFGDYSEKAHELLNTKLEQWAEEAVARGGFHNTTALLIQYENYRDWIVNHNVAYSELFLDTAGVASFDVWDLLPFTRGYVHILDKDPYLHHFAYDPQYFLNELDLLGQAAATQLARNISNSGAMQTYFAGETIPGDNLAYDADLSAWTEYIPYHFRPNYHGVGTCSMMPKEMGGVVDNAARVYGVQGLRVIDGSIPPTQMSSHVMTVFYAMALKISDAILEDY

SEQ ID NO: 1423 - protein, 577 aa, Aspergillus niger
GIEASLLTDPEDVSGRTVDYIIAGGGLTGLTTAARLTENPNISVLVIESGSYESDRGPIIEDLNAYGDIFGSSVDHAYETVELATNNQTALIRSGNGLGGSTLVNGGTWTRPHKAQVDSWETVFGNEGWNWDNVAAYSLQAERARAPNAKQIAAGHYFNASCHGKNGTVHAGPRDTGDDYSPIVDALMSAVEDRGVPTKKDFGCGDPHGVSMFPNTLHEDQVRSDAAREWLLPNYQRPNLQVLTGQYVGKVLLSQNGTTPRAVGVEFGTHKGNTHNVYAKHEVLLAAGSAVSPTILEYSGIGMKSILEPLGIDTVVDLPVGLNLQDQTTATVRSRITSAGAGQGQAAWFATFNETFGDYTEKAHELPNTKLEQWAEEAVARGGFHNTTALLIQYENYRDWIVNHNVAYSELFLDTAGVASFDVWDLLPFTRGYVHILDKDPYLHHFAYDPQYFLNELDLLGQAAATQLARNISNSGAMQTYFAGETIPGDNLAYDADLSAWQEYIPYHFRPNYHGVGTCSMMPKEMGGVVDNAARVYGVQGLRVIDGSIPPTQMSSHVMTVFYAMALKIADAILEDY

SEQ ID NO: 1424 - protein, 577 aa, Synthetic construct
GIEASLLTDPKDVSGRTVDYIIAGGGLTGLTTAARLTENPNISVLVIESGSYESDRGPIIEDLNRYGDIFGSSVDHAYETVELATNNQTALIRSGNGLGGSTLVNGGTWTRPHKAQVDSWETVFGNEGWNWDNVAAYSLQAERARAPNAKQIAAGHYFNASCHGVNGTVHAGPRDTGDDYSPIVKALMSAVEDRGVPTKKDFGCGDPHGVSMFPNTLHEDQVRSDAAREWLLPNYQRPNLQVLTGQYVGKVLLSQNGTTPRAVGVEFGTHKGNTFNVYAKHEVLLAAGSAVSPTILEYSGIGMKSILEPLGIDTVVDLPVGLNLQDQTTATVRSRITSAGAGQGQAAWFATFNETFGDYSEKAHELLNTKLEQWAEEAVARGGFHNTTALLIQYENYRDWIVNHNVAYSELFLDTKGVASFDVWDLLPFTRGYVHILDKDPYLHHFAYDPQYFLNELDLLGQAAATQLARNISNSGAMQTYFAGETIPGDNLAYDADLSAWTEYIPYHFRPNYHGVGTCSMMPKEMGGVVDNAARVYGVQGLRVIDGSIPPTQMSSHVMTVFYAMALKISDAILEDY

SEQ ID NO: 1425 - protein, 577 aa, Aspergillus niger
GIEASLLTDPKDVSGRTVDYIIAGGGLTGLTTAARLTENPNISVLVIESGSYESDRGPIIEDLNAYGDIFGSSVDHAYETVELATNNQTALIRSGNGLGGSTLVNGGTWTRPHKAQVDSWETVFGNEGWNWDNVAAYSLQAERARAPNAKQIAAGHYFNASCHGVNGTVHAGPRDTGDDYSPIVKALMSAVEDRGVPTKKDFGCGDPHGVSMFPNTLHEDQVRSDAAREWLLPNYQRPNLQVLTGQYVGKVLLSQNGTTPRAVGVEFGTHKGNTHNVYAKHEVLLAAGSAVSPTILEYSGIGMKSILEPLGIDTVVDLPVGLNLQDQTTATVRSRITSAGAGQGQAAWFATFNETFGDYSEKAHELLNTKLEQWAEEAVARGGFHNTTALLIQYENYRDWIVNHNVAYSELFLDTAGVASFDVWDLLPFTRGYVHILDKDPYLHHFAYDPQYFLNELDLLGQAAATQLARNISNSGAMQTYFAGETIPGDNLAYDADLSAWKEYIPYHFRPNYHGVGTCSMMPKEMGGVVDNAARVYGVQGLRVIDGSIPPTQMSSHVMTVFYAMALKISDAILEDY

SEQ ID NO: 1426 - protein, 577 aa, Aspergillus niger
GIEASLLTDPKDVSGRTVDYIIAGGGLTGLTTAARLTENPNISVLVIESGSYESDRGPIIEDLNAYGDIFGSSVDHAYETVELATNNQTALIRSGNGLGGSTLVNGGTWTRPHKAQVDSWETVFGNEGWNWDNVAAYSLQAERARAPNAKQIAAGHYFNASCHGVNGTVHAGPRDTGDDYSPIVDALMSAVEDRGVPTKKDFGCGDPHGVSMFPNTLHEDQVRSDAAREWLLPNYQRPNLQVLTGQYVGKVLLSQNGTTPRAVGVEFGTHKGNTHNVYAKHEVLLAAGSAVSPTILEYSGIGMKSILEPLGIDTVVDLPVGLNLQDQTTATVRSRITSAGAGQGQAAWFATFNETFGDYSEKAHELLNTKLEQWAEEAVARGGFHNTTALLIQYENYRDWIVNHNVAYSELFLDTAGVASFDVWDLLPFTRGYVHILDKDPYLHHFAYDPQYFLNELDLLGQAAATQLARNISNSGAMQTYFAGETIPGDNLAYDADLSAWTEYIPYHFRPNYHGVGTCSMMPKEMGGVVDNAARVYGVQGLRVIDGSIPPTQMSSHVMTVFYAMALKISDAILEDY

SEQ ID NO: 1427 - protein, 577 aa, Aspergillus niger
GIEASLLTDPKDVSGRTVDYIIAGGGLTGLTMAARLTENPNISVLVIESGSYESDRGPIIEDLNAYGDIFGSSVDHAYETVELATNNQTALIRSGNGLGGSTLVNGGTWTRPHKAQVDSWETVFGNEGWNWDNVAAYSLQAERARAPNAKQIAAGHYFNASCHGVNGTVHAGPRDTGDDYSPIVKALMSAVEDRGVPTKKDFGCGDPHGVSMFPNTLHEDQVRSDAAREWLLPNYQRPNLQVLTGQYVGKVLLSQNGTTPRAVGVEFGTHKGNTHNVYAKHEVLLAAGSAVSPTILEYSGIGMKSILEPLGIDTVVDLPVGLNLQDQTTATVRSRITSAGAGQGQAAWFATFNETFGDYSEKAHELLNTKLEQWAEEAVARGGFHNTTALLIQYENYRDWIVNHNVAYSELFLDTAGVASFDVWDLLPFTRGYVHILDKDPYLHHFAYDPQYFLNELDLLGQAAATQLARNISNSGAMQTYFAGETIPGDNLAYDADLSAWTEYIPYHFRPNYHGVGTCSMMPKEMGGVVDNAARVYGVQGLRVIDGSIPPTQMSSHVMTVFYAMALKISDAILEDY

SEQ ID NO: 1428 - protein, 577 aa, Aspergillus niger
GIEASLLTDPKDVSGRTVDYIIAGGGLTGLTTAARLTENPNISVLVIESGSYESDRGPIIEDLNAYGDIFGSSVDHAYETVELATNNQTALIRSGNGLGGSTLVNGGTWTRPHKAQVDSWETVFGNPGWNWDNVAAYSLQAERARAPNAKQIAAGHYFNASCHGVNGTVHAGPRDTGDDYSPIVKALMSAVEDRGVPTKKDFGCGDPHGVSMFPNTLHEDQVRSDAAREWLLPNYQRPNLQVLTGQYVGKVLLSQNGTTPRAVGVEFGTHKGNTHNVYAKHEVLLAAGSAVSPTILEYSGIGMKSILEPLGIDTVVDLPVGLNLQDQTTATVRSRITSAGAGQGQAAWFATFNETFGDYSEKAHELLNTKLEQWAEEAVARGGFHNTTALLIQYENYRDWIVNHNVAYSELFLDTAGVASFDVWDLLPFTRGYVHILDKDPYLHHFAYDPQYFLNELDLLGQAAATQLARNISNSGAMQTYFAGETIPGDNLAYDADLSAWTEYIPYHFRPNYHGVGTCSMMPKEMGGVVDNAARVYGVQGLRVIDGSIPPTQMSSHVMTVFYAMALKISDAILEDY

SEQ ID NO: 1429 - protein, 577 aa, Aspergillus niger
GIEASLLTDPKDVSGRTVDYIIAGGGLTGLTTAARLTENPNISVLVIESGSYESDRGPIIEDLNAYGDIFGSSVDHAYETVELATNNQTALIRSGNGLGGSTLVNGGTWTRPHKAQVDSWETVFGNEGWNWDNVAAYSLQAERARAPNAKQIAAGHYFNASCHGVNGTVHAGPRDTGDDYSPIVKALMSAVEDRGVPTKKDFGCGDPHGVSMFPNTLHEDQVRSDAAREWLLPNYQRPNLQVLTGQYVGKVLLSQNGTTPRAVGVEFGTHKGNTHNVYAKHEVLLAAGSAVSPTILEYSGIGMKSILEPLGIDTVVDLPVGLNLQDQTTATVRSRITSAGAGQGQAAWFATFNETFGDYSEKAHELLNTKLEQWAEEAVARGGFHNTTALLIQYENYRDWIVNHNVAYSELFLDTAGVASFDVWDLLPFTRGYVHILDKDPYLHHFAYDPQYFLNELDLLGQAAATQLARNISNSGAMQDYFAGETIPGDNLAYDADLSAWTEYIPYHFRPNYHGVGTCSMMPKEMGGVVDNAARVYGVQGLRVIDGSIPPTQMSSHVMTVFYAMALKISDAILEDY

SEQ ID NO: 1430 - protein, 577 aa, Aspergillus niger
GIEASLLTDPKDVSGRTVDYIIAGGGLTGLTTAARLTENPNISVLVIESGSYESDRGPIIEDLNAYGDIFGSSVDHAYETVELATNNQTALIRSGNGLGGSTLVNGGTWTRPHKAQVDSWETVFGNEGWNWDNVAAYSLQAERARAPNAKQIAAGHYFNASCHGVNGTVHAGPRDTGDDYSPIVKALMSAVEDRGVPTKKDFGCGDPHGVSMFPNTLHEDQVRSDAAREWLLPNYQRPNLQVLTGQYVGKVLLSQNGTTPRAVGVEFGTHKGNTHNVYAKHEVLLAAGSAVSPTILEYSGIGMKSILEPLGIDTVVDLPVGLNLQDQTTATVRSRITSAGAGQGQAAWFATFNETFGDYSEKAHELLNTKLEQWAEEAVARGGFLNTTALLIQYENYRDWIVNHNVAYSELFLDTAGVASFDVWDLLPFTRGYVHILDKDPYLHHFAYDPQYFLNELDLLGQAAATQLARNISNSGAMQTYFAGETIPGDNLAYDADLSAWTEYIPYHFRPNYHGVGTCSMMPKEMGGVVDNAARVYGVQGLRVIDGSIPPTQMSSHVMTVFYAMALKISDAILEDY

SEQ ID NO: 1431 - protein, 577 aa, Aspergillus niger
GIEASLLTDPKDVSGRTVDYIIAGGGLTGLTTAARLTENPNISVLVIESGSYESDRGPIIEDLNAYGDIFGSSVDHAYETVELATNNQTALIRSGNGLGGSTLVNGGTWTRPHKAQVDSWETVFGNEGWNWDNVAAYSLQAERARAPNAKQIAAGHYFNASCHGVNGTVHAGPRDTGDDYSPIVKALMSAVEDRGVPTKKDFGCGDPHGVSMFPNTLHEDQVRSDAAREWLLPNYQRPNLQVLTGQYVGKVLLSQNGDTPRAVGVEFGTHKGNTHNVYAKHEVLLAAGSAVSPTILEYSGIGMKSILEPLGIDTVVDLPVGLNLQDQTTATVRSRITSAGAGQGQAAWFATFNETFGDYSEKAHELLNTKLEQWAEEAVARGGFHNTTALLIQYENYRDWIVNHNVAYSELFLDTAGVASFDVWDLLPFTRGYVHILDKDPYLHHFAYDPQYFLNELDLLGQAAATQLARNISNSGAMQTYFAGETIPGDNLAYDADLSAWTEYIPYHFRPNYHGVGTCSMMPKEMGGVVDNAARVYGVQGLRVIDGSIPPTQMSSHVMTVFYAMALKISDAILEDY

SEQ ID NO: 1432 - protein, 577 aa, Aspergillus niger
GIEASLLTDPKDVSGRTVDYIIAGGGLTGLTTAARLTENPNISVLVIESGSYESDRGPIIEDLNAYGDIFGSSVDHAYETVELATNNQTALIRSGNGLGGSTLVNGGTWTRPHKAQVDSWETVFGNEGWNWDNVAAYSLQAERARAPNAKQIAAGHYFNASCHGVNGTVHAGPRDTGDDYSPIVKALMSAVEDRGVPTKKDFGCGDPHGVSMFPNTLHEDQVRSDAAREWLLPNYQRPNLQVLTGQYVGKVLLSQNGTTPRAVGVEFGTHKGNTHNVYAKHEVLLAAGSAVSPTILEYSGIGMKSILEPLGIDTVVDLPVGLNLQDQTTATVRSRITSAGAGQGQAAWFATFNETFGDYSEKAHELLNTKLEQWAEEAVARGGFDNTTALLIQYENYRDWIVNHNVAYSELFLDTAGVASFDVWDLLPFTRGYVHILDKDPYLHHFAYDPQYFLNELDLLGQAAATQLARNISNSGAMQTYFAGETIPGDNLAYDADLSAWTEYIPYHFRPNYHGVGTCSMMPKEMGGVVDNAARVYGVQGLRVIDGSIPPTQMSSHVMTVFYAMALKISDAILEDY

SEQ ID NO: 1433 - protein, 577 aa, Aspergillus niger
GIEASLLTDPKDVSGRTVDYIIAGGGLTGLTTAARLTENPNISVLVIESGSYESDRGPIIEDLNAYGDIFGSSVDHAYETVELATNNQTALIRSGNGLGGSTLVNGGTWTRPHKAQVDSWETVFGNEGWNWDNVAAYSLQAERARAPNAKQIAAGHYFNASCHGVNGTVHAGPRDTGDDYSPIVKALMSAVEDRGVPTKKDFGCGDPHGVSMFPNTLHEDQVRSDAAREWLLPNYQRPNLQVLTGQYVGKVLLSQNGTTPRAVGVEFGTHKGNTHNVYAKHEVLLAAGSAVSPTILEYSGIGMKSILEPLGIDTVVDLPVGLNLQDQTTATVRSRITSAGAGQGQAAWFATFNETFGDYSEKAHELLNTKLEQWAEEAVARGGFHNTTALLIQYENYRDWIVNHNVAYSELFLDTAGVASFDVWDLLPFTRGYVHILDKDPYLHHFAYDPQYFLNELDLLGQAAATQLARNISNSGAMQTYFAGETIPGDNLAYDADLSAWREYIPYHFRPNYHGVGTCSMMPKEMGGVVDNAARVYGVQGLRVIDGSIPPTQMSSHVMTVFYAMALKISDAILEDY

SEQ ID NO: 1434 - protein, 577 aa, Aspergillus niger
GIEASLLTDPKDVSGRTVDYIIAGGGLTGLTTAARLTENPNISVLVIESGSYESDRGPIIEDLNRYGDIFGSSVDHAYETVELATNNQTALIRSGNGLGGSTLVNGGTWTRPHKAQVDSWETVFGNEGWNWDNVAAYSLQAERARAPNAKQIAAGHYFNASCHGVNGTVHAGPRDTGDDYSPIVKALMSAVEDRGVPTKKDFGCGDPHGVSMFPNTLHEDQVRSDAAREWLLPNYQRPNLQVLTGQYVGKVLLSQNGTTPRAVGVEFGTHKGNTHNVYAKHEVLLAAGSAVSPTILEYSGIGMKSILEPLGIDTVVDLPVGLNLQDQTTATVRSRITSAGAGQGQAAWFATFNETFGDYSEKAHELLNTKLEQWAEEAVARGGFHNTTALLIQYENYRDWIVNHNVAYSELFLDTKGVASFDVWDLLPFTRGYVHILDKDPYLHHFAYDPQYFLNELDLLGQAAATQLARNISNSGAMQTYFAGETIPGDNLAYDADLSAWTEYIPYHFRPNYHGVGTCSMMPKEMGGVVDNAARVYGVQGLRVIDGSIPPTQMSSHVMTVFYAMALKISDAILEDY

SEQ ID NO: 1435 - protein, 577 aa, Synthetic construct
GIEASLLTDPKEVAGRTVDYIIAGGGLTGLVVAARLTENPDITVLVIESGSYESDRGPIIEDLNAYGKIFGSSVDHAYETVCLATNNRTALIRAGNGLGGSTLVNGGTWTRPHKAQVDSWETVFGNEGWNWDSVAAYSLQAERARAPNAKQIAAGHYFNASCHGINGTVHAGPRDTGDDYSPIVKALMSAVEDRGVPTKKDLGCGDPHGVSMFPNTLHEDQVRSDAAREWLLPNYQRPNLQVLTGQYVGKVLLSQNATTPRAVGVEFGTHKGNFHNVTAKHEVLLAAGSAVSPTILEYSGIGMKSILEPLGIKTVVDLPVGLNLQDQTTSTVRSRITSAGAGQGQAAWFATFNETFGDYTEKAHELLNTKLEQWAEEAVARGGFHNTTALLIQYENYRDWIVKDNVAYSELFLDTAGEASFDVWDLLPFTRGYVHILDKDPYLEHFAYDPQYFLNELDLLGQAAATQLARNISNSGAMQTYFAGETIPGDNLAYDADLRAWVEYIPYHFRPNYHGVGTCSMMPKEMGGVVDNAARVYGVQGLRVIDGSIPPTQMSSHVMTVFYAMALKIADAVLADY

SEQ ID NO: 1436 - protein, 577 aa, Aspergillus niger
GIEASLLTDPKDVSGRTVDYIIAGGGLTGLTTAARLTENPNISVLVIESGSYESDRGPIIEDLNAYGDIFGSSVDHAYETVELATNNQTALIRSGNGLGGSTLVNGGTWTRPHKAQVDSWETVFGNEGWNWDNVAAYSLQAERARAPNAKQIAAGHYFNASCHGVNGTVHAGPRDTGDDYSPIVKALMSAVEDRGVPTKKDFGCGDPHGVSMFPNTLHEDQVRSDAAREWLLPNYQRPNLQVLTGQYVGKVLLSQNGTTPRAVGVEFGTHKGNTHYVYAKHEVLLAAGSAVSPTILEYSGIGMKSILEPLGIDTVVDLPVGLNLQDQTTATVRSRITSAGAGQGQAAWFATFNETFGDYSEKAHELLNTKLEQWAEEAVARGGFHNTTALLIQYENYRDWIVNHNVAYSELFLDTAGVASFDVWDLLPFTRGYVHILDKDPYLHHFAYDPQYFLNELDLLGQAAATQLARNISNSGAMQTYFAGETIPGDNLAYDADLSAWTEYIPYHFRPNYHGVGTCSMMPKEMGGVVDNAARVYGVQGLRVIDGSIPPTQMSSHVMTVFYAMALKISDAILEDY

SEQ ID NO: 1437 - protein, 577 aa, Aspergillus niger
GIEASLLTDPKEVAGRTVDYIIAGGGLTGLVVAARLTENPDITVLVIESGSYESDRGPIIEDLNAYGKIFGSSVDHAYETVCLATNNRTALIRAGNGLGGSTLVNGGTWTRPSKAQVDSWETVFGNEGWNWDSVAAYSLQAERARAPNAKQIAAGHYFNASCHGINGTVHAGPRDTGDDYSPIVKALMSAVEDRGVPTKKDLGCGDPHGVSMFPNTLHEDQVRSDAAREWLLPNYQRPNLQVLTGQYVGKVLLSQNATTPRAVGVEFGTHKGNFHNVTAKHEVLLAAGSAVSPTILEYSGIGMKSILEPLGIKTVVDLPVGLNLQDQTTSTVRSRITSAGAGQGQAAWFATFNETFGDYTEKAHELLNTKLEQWAEEAVARGGFHNTTALLIQYENYRDWIVKDNVAYSELFLDTAGEASFDVWDLLPFTRGYVHILDKDPYLRHFAYDPQYFLNELDLLGQAAATQLARNISNSGAMQTYFAGETIPGDNLAYDANLRAWVEYIPYHFRPNYHGVGTCSMMPKEMGGVVDNAARVYGVQGLRVIDGSIPPTQMSSHVMTVFYAMALKIADAVLADY

SEQ ID NO: 1438 - protein, 577 aa, Aspergillus niger
GIEASLLTDPKDVSGRTVDYIIAGGGLTGLTTAARLTENPNISVLVIESGSYESDRGPIIEDLNMYGDIFGSSVDHAYETVELATNNQTALIRSGNGLGGSTLVNGGTWTRPHKAQVDSWETVFGNEGWNWDNVAAYSLQAERARAPNAKQIAAGHYFNASCHGVNGTVHAGPRDTGDDYSPIVKALMSAVEDRGVPTKKDFGCGDPHGVSMFPNTLHEDQVRSDAAREWLLPNYQRPNLQVLTGQYVGKVLLSQNGTTPRAVGVEFGTHKGNTHNVYAKHEVLLAAGSAVSPTILEYSGIGMKSILEPLGIDTVVDLPVGLNLQDQTTATVRSRITSAGAGQGQAAWFATFNETFGDYSEKAHELLNTKLEQWAEEAVARGGFHNTTALLIQYENYRDWIVNHNVAYSELFLDTAGVASFDVWDLLPFTRGYVHILDKDPYLHHFAYDPQYFLNELDLLGQAAATQLARNISNSGAMQTYFAGETIPGDNLAYDADLSAWTEYIPYHFRPNYHGVGTCSMMPKEMGGVVDNAARVYGVQGLRVIDGSIPPTQMSSHVMTVFYAMALKISDAILEDY

SEQ ID NO: 1439 - protein, 577 aa, Aspergillus niger
GIEASLLTDPKDVSGRTVDYIIAGGGLTGLTTAARLTENPNISVLVIESGSYESDRGPIIEDLNAYGDIFGSSVDHAYETVELATNNQTALIRSGNGLGGSTLVNGGTWTRPHKAQVDSWETVFGNEGWNWDNVAAYSLQAERARAPNAKQIAAGHYFNASCHGVNGTVHAGPRDTGDDYSPIVKALMEAVEDRGVPTKKDFGCGDPHGVSMFPNTLHEDQVRSDAAREWLLPNYQRPNLQVLTGQYVGKVLLSQNGTTPRAVGVEFGTHKGNTHNVYAKHEVLLAAGSAVSPTILEYSGIGMKSILEPLGIDTVVDLPVGLNLQDQTTATVRSRITSAGAGQGQAAWFATFNETFGDYSEKAHELLNTKLEQWAEEAVARGGFHNTTALLIQYENYRDWIVNHNVAYSELFLDTAGVASFDVWDLLPFTRGYVHILDKDPYLHHFAYDPQYFLNELDLLGQAAATQLARNISNSGAMQTYFAGETIPGDNLAYDADLSAWTEYIPYHFRPNYHGVGTCSMMPKEMGGVVDNAARVYGVQGLRVIDGSIPPTQMSSHVMTVFYAMALKISDAILEDY

SEQ ID NO: 1440 - protein, 577 aa, Aspergillus niger
GIEASLLTDPKDVSGRTVDYIIAGGGLTGLTTAARLTENPNISVLVIESGSYESDRGPIIEDLNAYGDIFGSSVDHAYETVELATNNQTALIRSGNGLGGSTLVNGGTWTRPHKAQVDSWETVFGNEGWNWDNVAAYSLQAERARAPNAKQIAAGHYFNASCHGVNGTVHAGPRDTGDDYSPIVKALMSAVEDRGVPTKKDFGCGDPHGVSMFPNTLHEDQVRSDAAREWLLPNYQRPNLQVLTGQYVGKVLLSQNGTTPRAVGVEFGTHKGNTFNVYAKHEVLLAAGSAVSPTILEYSGIGMKSILEPLGIDTVVDLPVGLNLQDQTTATVRSRITSAGAGQGQAAWFATFNETFGDYSEKAHELLNTKLEQWAEEAVARGGFHNTTALLIQYENYRDWIVNHNVAYSELFLDTAGVASFDVWDLLPFTRGYVHILDKDPYLHHFAYDPQYFLNELDLLGQAAATQLARNISNSGAMQTYFAGETIPGDNLAYDADLSAWTEYIPYHFRPNYHGVGTCSMMPKEMGGVVDNAARVYGVQGLRVIDGSIPPTQMSSHVMTVFYAMALKISDAILEDY

SEQ ID NO: 1441 - protein, 577 aa, Aspergillus niger
GIEDSLLTDPKEVAGRTVDYIIAGGGLTGLVVAARLTENPDITVLVIESGSYESDRGPIIEDLNAYGKIFGSSVDHAYETVCLATNNRTALIRAGNGLGGSTLVNGGTWTRPHKAQVDSWETVFGNEGWNWDEVAAYSLQAERARAPNAKQIAAGHYFNASCHGINGTVHAGPRDTGDDYSPIVKALMSAVEDRGVPTKKDLGCGDPHGVSMFPNTLHEDQVRSDAAREWLLPNYQRPNLSVLTGQYVGKVLLSQNATTPRAVGVEFGTHKGNFHNVTAKHEVLLAAGSAVSPTILEYSGIGMKSILEPLGIKTVVDLPVGLNLQDQTTSTVRSRITSAGAGQGQAAWFATFNETFGDYTEKAHELLNTKLEQWAEEAVARGGFHNTTALLIQYENYRDWIVKDNVAYSELFLDTAGEASFDVWDLLPFTRGYVHILDKDPYLRHFAYDPQYFLNELDLLGQAAATQLARNISNSGAMQTYFAGETIPGDNLAYDADLRAWVEYIPYHFRPNYHGVGTCSMMPKEMGGVVDNAARVYGVQGLRVIDGSIPPTQMSSHVMTVFYAMALKIADAVLADY

SEQ ID NO: 1442 - protein, 577 aa, Aspergillus niger
GIEASLLTDPKDVSGRTVDYIIAGGGLTGLTTAARLTENPNISVLVIESGSYESDRGPIIEDLNAYGDIFGSSVDHAYETVELATNNQTALIRSGNGLGGSTLVNGGTWTRPHKAQVDSWETVFGNEGWNWDNVAAYSLQAERARAPNAKQIAAGHYFNASCHGVNGTVHAGPRDTGDDYSPIVKALMSAVEDRGVPTKKDFGCGDPHGVSMFPNTLHEDQVRSDAAREWLLPNYQRPNLQVLTGQYVGKVLLSQNGTTPRAVGVEFGTHKGNTHNVYAKHEVLLAAGSAVSPTILEYSGIGMKSILEPLGIDTVVDLPVGLNLQDQTTATVRSRITSAGAGQGQAAWFATFNETFGDYSEKAHELLNTKLEQWAEEAVARGGFHNPTALLIQYENYRDWIVNHNVAYSELFLDTAGVASFDVWDLLPFTRGYVHILDKDPYLHHFAYDPQYFLNELDLLGQAAATQLARNISNSGAMQTYFAGETIPGDNLAYDADLSAWTEYIPYHFRPNYHGVGTCSMMPKEMGGVVDNAARVYGVQGLRVIDGSIPPTQMSSHVMTVFYAMALKISDAILEDY

SEQ ID NO: 1443 - protein, 577 aa, Aspergillus niger
GIEASLLTDPKDVSGRTVDYIIAGGGLTGLTTAARLTENPNISVLVIESGSYESDRGPIIEDLNAYGDIFGSSVDHAYETVELATNNQTALIRSGNGLGGSTLVNGGTWTRPHKAQVDSWETVFGNEGWNWDNVAAYSLQAERARAPNAKQIAAGHYFNASCHGVNGTVHAGPRDTGDDYSPIVKALMSAVEDRGVPTKKDFGCGDPHGVSMFPNTLHEDQVRSDAAREWLLPNYQRPNLQVLTGQYVGKVLLSQNGTTPRAVGVEFGTHKGNTHNVYAKHEVLLAAGSAVSPTILEYSGIGMKSILEPLGIDTVVDLPVGLNLQDQTTATVRSRITSAGAGQGQAAWFATFNETFGDYSEKAHELLNTKLEQWAEEAVARGGFHNTTALLIQYENYRDWIVNHNVAYSELFLDTAGVASFDVWDLLPFTRGYVHILDKDPYLHHFAYDPQYFLNELDLLGQAAATQLARNISNSGAMQTYFAGETIPGDNLAYDADLSAWTEYIPYHFRPNYHGVGTCSMMPKEMGGVVDPAARVYGVQGLRVIDGSIPPTQMSSHVMTVFYAMALKISDAILEDY

SEQ ID NO: 1444 - protein, 577 aa, Aspergillus niger
GIEASLLTDPKDVSGRTVDYIIAGGGLTGLTTAARLTENPNISVLVIESGSYESDRGPIIEDLNLYGDIFGSSVDHAYETVELATNNQTALIRSGNGLGGSTLVNGGTWTRPHKAQVDSWETVFGNEGWNWDNVAAYSLQAERARAPNAKQIAAGHYFNASCHGVNGTVHAGPRDTGDDYSPIVKALMSAVEDRGVPTKKDFGCGDPHGVSMFPNTLHEDQVRSDAAREWLLPNYQRPNLQVLTGQYVGKVLLSQNGTTPRAVGVEFGTHKGNTHNVYAKHEVLLAAGSAVSPTILEYSGIGMKSILEPLGIDTVVDLPVGLNLQDQTTATVRSRITSAGAGQGQAAWFATFNETFGDYSEKAHELLNTKLEQWAEEAVARGGFHNTTALLIQYENYRDWIVNHNVAYSELFLDTAGVASFDVWDLLPFTRGYVHILDKDPYLHHFAYDPQYFLNELDLLGQAAATQLARNISNSGAMQTYFAGETIPGDNLAYDADLSAWTEYIPYHFRPNYHGVGTCSMMPKEMGGVVDNAARVYGVQGLRVIDGSIPPTQMSSHVMTVFYAMALKISDAILEDY

SEQ ID NO: 1445 - protein, 577 aa, Aspergillus niger
GIEASLLTDPKDVSGRTVDYIIAGGGLTGLTLAARLTENPNISVLVIESGSYESDRGPIIEDLNAYGDIFGSSVDHAYETVELATNNQTALIRSGNGLGGSTLVNGGTWTRPHKAQVDSWETVFGNEGWNWDNVAAYSLQAERARAPNAKQIAAGHYFNASCHGVNGTVHAGPRDTGDDYSPIVKALMSAVEDRGVPTKKDFGCGDPHGVSMFPNTLHEDQVRSDAAREWLLPNYQRPNLQVLTGQYVGKVLLSQNGTTPRAVGVEFGTHKGNTHNVYAKHEVLLAAGSAVSPTILEYSGIGMKSILEPLGIDTVVDLPVGLNLQDQTTATVRSRITSAGAGQGQAAWFATFNETFGDYSEKAHELLNTKLEQWAEEAVARGGFHNTTALLIQYENYRDWIVNHNVAYSELFLDTAGVASFDVWDLLPFTRGYVHILDKDPYLHHFAYDPQYFLNELDLLGQAAATQLARNISNSGAMQTYFAGETIPGDNLAYDADLSAWTEYIPYHFRPNYHGVGTCSMMPKEMGGVVDNAARVYGVQGLRVIDGSIPPTQMSSHVMTVFYAMALKISDAILEDY

SEQ ID NO: 1446 - protein, 577 aa, Aspergillus niger
GIEASLLTDPKDVSGRTVDYIIAGGGLTGLTTAARLTENPNISVLVIESGSYESDRGPIIEDLNAYGDIFGSSVDHAYETVELATNNQTALIRSGNGLGGSTLVNGGTWTRPHKAQVDSWETVFGNEGWNWDNVAAYSLQAERARAPNAKQIAAGHYFNASCHGVNGTVHAGPRDTGDDYSPIVKALMSAVEDRGVPTKKDFGCGDPHGVSMFPNTLHEDQVRSDAAREWLLPNYQRPNLQVLTGQYVGKVLLSQNGTTPRAVGVEFGTHKGNTHNVYAKHEVLLAAGSAVSPTILEYSGIGMKSILEPLGIDTVVDLPVGLNLQDQTTATVRSRITSAGAGQGQAAWFATFNETFGDYSEKAHELLNTKLEQWAEEAVARGGFHNTTALLIQYENYRDWIVNHNVAYSELFLDTAGVASFDVWDLLPFTRGYVHILDKDPYLHHFAYDPQYFLNELDLLGQAAATQLARNISNSGAMQTYFAGETIPGDNLAYDADLSAWTEYIPYHFRPNYHGVGTCSMMPKEMGGVVDFAARVYGVQGLRVIDGSIPPTQMSSHVMTVFYAMALKISDAILEDY

SEQ ID NO: 1447 - protein, 577 aa, Aspergillus niger
GIEASLLTDPKDVSGRTVDYIIAGGGLTGLTTAARLTENPNISVLVIESGSYESDRGPIIEDLNAYGDIFGSSVDHAYETVELATNNQTALIRSGNGLGGSTLVNGGTWTRPHKAQVDSWETVFGNEGWNWDNVAAYSLQAERARAPNAKQIAAGHYFNASCHGVNGTVHAGPRDTGDDYSPIVKALMSAVEDRGVPTKKDPGCGDPHGVSMFPNTLHEDQVRSDAAREWLLPNYQRPNLQVLTGQYVGKVLLSQNGTTPRAVGVEFGTHKGNTHNVYAKHEVLLAAGSAVSPTILEYSGIGMKSILEPLGIDTVVDLPVGLNLQDQTTATVRSRITSAGAGQGQAAWFATFNETFGDYSEKAHELLNTKLEQWAEEAVARGGFHNTTALLIQYENYRDWIVNHNVAYSELFLDTAGVASFDVWDLLPFTRGYVHILDKDPYLHHFAYDPQYFLNELDLLGQAAATQLARNISNSGAMQTYFAGETIPGDNLAYDADLSAWTEYIPYHFRPNYHGVGTCSMMPKEMGGVVDNAARVYGVQGLRVIDGSIPPTQMSSHVMTVFYAMALKISDAILEDY

SEQ ID NO: 1448 - protein, 577 aa, Aspergillus niger
GIEASLLTDPKDVSGRTVDYIIAGGGLTGLTTAARLTENPNISVLVIESGSYESDRGPIIEDLNAYGDIFGSSVDHAYETVELATNNQTALIRSGNGLGGSTLVNGGTWTRPHKAQVDSWETVFGNEGWNWDNVAAYSLQAERARAPNAKQIAAGHYFNASCHGVNGTVHAGPRDTGDDYSPIVKALMSAVEDRGVPTKKDFGCGDPHGVSMFPNTLHEDQVRSDAAREWLLPNYQRPNLQVLTGQYVGKVLLSQNGKTPRAVGVEFGTHKGNTHNVYAKHEVLLAAGSAVSPTILEYSGIGMKSILEPLGIDTVVDLPVGLNLQDQTTATVRSRITSAGAGQGQAAWFATFNETFGDYSEKAHELLNTKLEQWAEEAVARGGFHNTTALLIQYENYRDWIVNHNVAYSELFLDTAGVASFDVWDLLPFTRGYVHILDKDPYLHHFAYDPQYFLNELDLLGQAAATQLARNISNSGAMQTYFAGETIPGDNLAYDADLSAWTEYIPYHFRPNYHGVGTCSMMPKEMGGVVDNAARVYGVQGLRVIDGSIPPTQMSSHVMTVFYAMALKISDAILEDY

SEQ ID NO: 1449 - protein, 577 aa, Aspergillus niger
GIEASLLTDPKDVSGRTVDYIIAGGGLTGLTTAARLTENPNISVLVIESGSYESDRGPIIEDLNAYGDIFGSSVDHAYETVELATNNQTALIRSGNGLGGSTLVNGGTWTRPHKAQVDSWETVFGNEGWNWDNVAAYSLQAERARAPNAKQIAAGHYFNASCHGVNGTVHAGPRDTGDDYSPIVKALMSAVEDRGVPTKKDFGCGDPHGVSMFPNTLHEDQVRSDAAREWLLPNYQRPNLQVLTGQYVGKVLLSQNGTTPRAVGVEFGTHKGNTHTVYAKHEVLLAAGSAVSPTILEYSGIGMKSILEPLGIDTVVDLPVGLNLQDQTTATVRSRITSAGAGQGQAAWFATFNETFGDYSEKAHELLNTKLEQWAEEAVARGGFHNTTALLIQYENYRDWIVNHNVAYSELFLDTAGVASFDVWDLLPFTRGYVHILDKDPYLHHFAYDPQYFLNELDLLGQAAATQLARNISNSGAMQTYFAGETIPGDNLAYDADLSAWTEYIPYHFRPNYHGVGTCSMMPKEMGGVVDNAARVYGVQGLRVIDGSIPPTQMSSHVMTVFYAMALKISDAILEDY

SEQ ID NO: 1450 - protein, 577 aa, Aspergillus niger
GIEASLLTDPKEVAGRTVDYIIAGGGLTGLVVAARLTENPDITVLVIESGSYESDRGPIIEDLNAYGKIFGSSVDHAYETVCLATNNRTALIRAGNGLGGSTLVNGGTWTRPHKAQVDSWETVFGNEGWNWDSVAAYSLQAERARAPNAKQIAAGHYFNASCHGINGTVHAGPRDTGDDYSPIVKALMSAVEDRGVPTKKDLGCGDPHGVSMFPNTLHEDQVRSDAAREWLLPNYQRPNLQVLTGQYVGKVLLSQNATTPRAVGVEFGTHKGNFHNVTAKHEVLLAAGSAVSPTILEYSGIGMKSILEPLGIKTVVDLPVGLNLQDQTTSTVRSRITSAGAGQGQAAWFATFNETFGDYTEKAHELLNTKLEQWAEEAVARGGFHNTTALLIQYENYRDWIVKDNVAYSELFLDTAGEASFDVWDLLPFTRGYVHILDKDPYLRHFAYDPQYFLNELDLLGQAAATQLARNISNSGAMQTYFAGETIPGDNLAYDADLRAWVEYIPYHFRPNYHGVGTCSMMPKEMGGVVDNAANVYGVQGLRVIDGSIPPTQMSSHVMTVFYAMALKIADAVLADY

SEQ ID NO: 1451 - protein, 577 aa, Aspergillus niger
GIEASLLTDPKDVSGRTVDYIIAGGGLTGLTTAARLTENPNISVLVIESGSYESDRGPIIEDLNAYGDIFGSSVDHAYETVELATNNQTALIRSGNGLGGSTLVNGGTWTRPHKAQVDSWETVFGNEGWNWDNVAAYSLQAERARAPNAKQIAAGHYFNASCHGVNGTVHAGPRDTGDDYSPIVKALMSAVEDRGVPTKKDFGCGDPHGVSMFPNTLHEDQVRSDAAREWLLPNYQRPNLQVLTGQYVGKVLLSQNGTTPRAVGVEFGTHKGNTHNVYAKHEVLLAAGSAVSPTILEYSGIGMKSILEPLGIDTVVDLPVGLNLQDQTTATVRSRITSAGAGQGQAAWFATFNETFGDYSELAHELLNTKLEQWAEEAVARGGFHNTTALLIQYENYRDWIVNHNVAYSELFLDTAGVASFDVWDLLPFTRGYVHILDKDPYLHHFAYDPQYFLNELDLLGQAAATQLARNISNSGAMQTYFAGETIPGDNLAYDADLSAWTEYIPYHFRPNYHGVGTCSMMPKEMGGVVDNAARVYGVQGLRVIDGSIPPTQMSSHVMTVFYAMALKISDAILEDY

SEQ ID NO: 1452 - protein, 577 aa, Aspergillus niger
GIEASLLTDPKDVSGRTVDYIIAGGGLTGLTTAARLTENPNISVLVIESGSYESDRGPIIEDLNAYGDIFGSSVDHAYETVELATNNQTALIRSGNGLGGSTLVNGGTWTRPHKAQVDSWETVFGNEGWNWDNVAAYSLQAERARAPNDKQIAAGHYFNASCHGVNGTVHAGPRDTGDDYSPIVKALMSAVEDRGVPTKKDFGCGDPHGVSMFPNTLHEDQVRSDAAREWLLPNYQRPNLQVLTGQYVGKVLLSQNGTTPRAVGVEFGTHKGNTHNVYAKHEVLLAAGSAVSPTILEYSGIGMKSILEPLGIDTVVDLPVGLNLQDQTTATVRSRITSAGAGQGQAAWFATFNETFGDYSEKAHELLNTKLEQWAEEAVARGGFHNTTALLIQYENYRDWIVNHNVAYSELFLDTAGVASFDVWDLLPFTRGYVHILDKDPYLHHFAYDPQYFLNELDLLGQAAATQLARNISNSGAMQTYFAGETIPGDNLAYDADLSAWTEYIPYHFRPNYHGVGTCSMMPKEMGGVVDNAARVYGVQGLRVIDGSIPPTQMSSHVMTVFYAMALKISDAILEDY

SEQ ID NO: 1453 - protein, 577 aa, Aspergillus niger
GIEASLLTDPKDVSGRTVDYIIAGGGLTGLTTAARLTENPNISVLVIESGSYESDRGPIIEDLNQYGDIFGSSVDHAYETVELATNNQTALIRSGNGLGGSTLVNGGTWTRPHKAQVDSWETVFGNEGWNWDNVAAYSLQAERARAPNAKQIAAGHYFNASCHGVNGTVHAGPRDTGDDYSPIVKALMSAVEDRGVPTKKDFGCGDPHGVSMFPNTLHEDQVRSDAAREWLLPNYQRPNLQVLTGQYVGKVLLSQNGTTPRAVGVEFGTHKGNTHNVYAKHEVLLAAGSAVSPTILEYSGIGMKSILEPLGIDTVVDLPVGLNLQDQTTATVRSRITSAGAGQGQAAWFATFNETFGDYSEKAHELLNTKLEQWAEEAVARGGFHNTTALLIQYENYRDWIVNHNVAYSELFLDTAGVASFDVWDLLPFTRGYVHILDKDPYLHHFAYDPQYFLNELDLLGQAAATQLARNISNSGAMQTYFAGETIPGDNLAYDADLSAWTEYIPYHFRPNYHGVGTCSMMPKEMGGVVDNAARVYGVQGLRVIDGSIPPTQMSSHVMTVFYAMALKISDAILEDY

SEQ ID NO: 1454 - protein, 577 aa, Aspergillus niger
GIEASLLTDPKDVSGRTVDYIIAGGGLTGLTTAARLTENPNISVLVIESGSYESDRGPIIEDLNAYGDIFGSSVDHAYETVELATNNQTALIRSGNGLGGSTLVNGGTWTRPHKAQVDSWETVFGNEGWNWDNVAAYSLQAERARAPNAKQIAAGHYFNASCHGVNGTVHAGPRDTGDDYSPIVKALMSAVEDRGVPTKKDFGCGDPHGVSMFPNTLHEDQVRSDAAREWLLPNYQRPNLQVLTGQYVGKVLLSQNGTTPRAVGVEFGTHKGNTHNVYAKKEVLLAAGSAVSPTILEYSGIGMKSILEPLGIDTVVDLPVGLNLQDQTTATVRSRITSAGAGQGQAAWFATFNETFGDYSEKAHELLNTKLEQWAEEAVARGGFHNTTALLIQYENYRDWIVNHNVAYSELFLDTAGVASFDVWDLLPFTRGYVHILDKDPYLHHFAYDPQYFLNELDLLGQAAATQLARNISNSGAMQTYFAGETIPGDNLAYDADLSAWTEYIPYHFRPNYHGVGTCSMMPKEMGGVVDNAARVYGVQGLRVIDGSIPPTQMSSHVMTVFYAMALKISDAILEDY

SEQ ID NO: 1455 - protein, 577 aa, Aspergillus niger
GIEASLLTDPKDVSGDTVDYIIAGGGLTGLTTAARLTENPNISVLVIESGSYESDRGPIIEDLNAYGDIFGSSVDHAYETVELATNNQTALIRSGNGLGGSTLVNGGTWTRPHKAQVDSWETVFGNEGWNWDNVAAYSLQAERARAPNAKQIAAGHYFNASCHGVNGTVHAGPRDTGDDYSPIVKALMSAVEDRGVPTKKDFGCGDPHGVSMFPNTLHEDQVRSDAAREWLLPNYQRPNLQVLTGQYVGKVLLSQNGTTPRAVGVEFGTHKGNTHNVYAKHEVLLAAGSAVSPTILEYSGIGMKSILEPLGIDTVVDLPVGLNLQDQTTATVRSRITSAGAGQGQAAWFATFNETFGDYSEKAHELLNTKLEQWAEEAVARGGFHNTTALLIQYENYRDWIVNHNVAYSELFLDTAGVASFDVWDLLPFTRGYVHILDKDPYLHHFAYDPQYFLNELDLLGQAAATQLARNISNSGAMQTYFAGETIPGDNLAYDADLSAWTEYIPYHFRPNYHGVGTCSMMPKEMGGVVDNAARVYGVQGLRVIDGSIPPTQMSSHVMTVFYAMALKISDAILEDY

SEQ ID NO: 1456 - protein, 577 aa, Aspergillus niger
GIEASLLTDPKDVSGRTVDYIIAGGGLTGLTTAARLTENPNISVLVIESGSYESDRGPIIEDLNFYGDIFGSSVDHAYETVELATNNQTALIRSGNGLGGSTLVNGGTWTRPHKAQVDSWETVFGNEGWNWDNVAAYSLQAERARAPNAKQIAAGHYFNASCHGVNGTVHAGPRDTGDDYSPIVKALMSAVEDRGVPTKKDFGCGDPHGVSMFPNTLHEDQVRSDAAREWLLPNYQRPNLQVLTGQYVGKVLLSQNGTTPRAVGVEFGTHKGNTHNVYAKHEVLLAAGSAVSPTILEYSGIGMKSILEPLGIDTVVDLPVGLNLQDQTTATVRSRITSAGAGQGQAAWFATFNETFGDYSEKAHELLNTKLEQWAEEAVARGGFHNTTALLIQYENYRDWIVNHNVAYSELFLDTAGVASFDVWDLLPFTRGYVHILDKDPYLHHFAYDPQYFLNELDLLGQAAATQLARNISNSGAMQTYFAGETIPGDNLAYDADLSAWTEYIPYHFRPNYHGVGTCSMMPKEMGGVVDNAARVYGVQGLRVIDGSIPPTQMSSHVMTVFYAMALKISDAILEDY

SEQ ID NO: 1457 - protein, 577 aa, Aspergillus niger
GIEASLLTDPKDVSGRTVDYIIAGGGLTGLTTAARLTENPNISVLVIESGSYESDRGPIIEDLNAYGDIFGSSVDHAYETVELATNNQTALIRSGNGLGGSTLVNGGTWTRPHKAQVDSWETVFGNEGWNWDNVAAYSLQAERARAPNAKQIAAGHYFNASCHGVNGTVHAGPRDTGDDYSPIVKALMSAVEDRGVPTKKDFGCGDPHGVSMFPNTLHEDQVRSDAAREWLLPNYQRPNLQVLTGQYVGKVLLSQNGTTPRAVGVEFGTHKGNTHNVYAKHEVLLAAGSAVSPTILEYSGIGMKSILEPLGIDTVVDLPVGLNLQDQTTATVRSRITSAGAGQGQAAWFATFNETFGDYSEKAHELLNTKLEQWAEEAVARGGFHNETALLIQYENYRDWIVNHNVAYSELFLDTAGVASFDVWDLLPFTRGYVHILDKDPYLHHFAYDPQYFLNELDLLGQAAATQLARNISNSGAMQTYFAGETIPGDNLAYDADLSAWTEYIPYHFRPNYHGVGTCSMMPKEMGGVVDNAARVYGVQGLRVIDGSIPPTQMSSHVMTVFYAMALKISDAILEDY

SEQ ID NO: 1458 - protein, 577 aa, Aspergillus niger
GIEASLLTDPKDVDGRTVDYIIAGGGLTGLTTAARLTENPNISVLVIESGSYESDRGPIIEDLNAYGDIFGSSVDHAYETVELATNNQTALIRSGNGLGGSTLVNGGTWTRPHKAQVDSWETVFGNEGWNWDNVAAYSLQAERARAPNAKQIAAGHYFNASCHGVNGTVHAGPRDTGDDYSPIVKALMSAVEDRGVPTKKDFGCGDPHGVSMFPNTLHEDQVRSDAAREWLLPNYQRPNLQVLTGQYVGKVLLSQNGTTPRAVGVEFGTHKGNTHNVYAKHEVLLAAGSAVSPTILEYSGIGMKSILEPLGIDTVVDLPVGLNLQDQTTATVRSRITSAGAGQGQAAWFATFNETFGDYSEKAHELLNTKLEQWAEEAVARGGFHNTTALLIQYENYRDWIVNHNVAYSELFLDTAGVASFDVWDLLPFTRGYVHILDKDPYLHHFAYDPQYFLNELDLLGQAAATQLARNISNSGAMQTYFAGETIPGDNLAYDADLSAWTEYIPYHFRPNYHGVGTCSMMPKEMGGVVDNAARVYGVQGLRVIDGSIPPTQMSSHVMTVFYAMALKISDAILEDY

SEQ ID NO: 1459 - protein, 577 aa, Aspergillus niger
GIEASLLTDPKDVSGRTVDYIIAGGGLTGLTTAARLTENPNISVLVIESGSYESDRGPIIEDLNAYGDIFGSSVDHAYETVPLATNNQTALIRSGNGLGGSTLVNGGTWTRPHKAQVDSWETVFGNEGWNWDNVAAYSLQAERARAPNAKQIAAGHYFNASCHGVNGTVHAGPRDTGDDYSPIVKALMSAVEDRGVPTKKDFGCGDPHGVSMFPNTLHEDQVRSDAAREWLLPNYQRPNLQVLTGQYVGKVLLSQNGTTPRAVGVEFGTHKGNTHNVYAKHEVLLAAGSAVSPTILEYSGIGMKSILEPLGIDTVVDLPVGLNLQDQTTATVRSRITSAGAGQGQAAWFATFNETFGDYSEKAHELLNTKLEQWAEEAVARGGFHNTTALLIQYENYRDWIVNHNVAYSELFLDTAGVASFDVWDLLPFTRGYVHILDKDPYLHHFAYDPQYFLNELDLLGQAAATQLARNISNSGAMQTYFAGETIPGDNLAYDADLSAWTEYIPYHFRPNYHGVGTCSMMPKEMGGVVDNAARVYGVQGLRVIDGSIPPTQMSSHVMTVFYAMALKISDAILEDY

SEQ ID NO: 1460 - protein, 577 aa, Aspergillus niger
GIEASLLTDPKDVSGRTVDYIIAGGGLTGLTTAARLTENPNISVLVIESGSYESDRGPIIEDLNAYGDIFGSSVDHAYETVELATNNQTALIRSGNGLGGSTLVNGGTWTRPHKAQVDSWETVFGNEGWNWDNVAAYSLQAERARAPNAKQIAAGHYFNASCHGVNGTVHAGPRDTGDDYSPIVKALMSAVEDRGVPTKKDFGCGDPHGVSMFPNTLHEDQVRSDAAREWLLPNYQRPNLQVLTGQYVGKVLLSFNGTTPRAVGVEFGTHKGNTHNVYAKHEVLLAAGSAVSPTILEYSGIGMKSILEPLGIDTVVDLPVGLNLQDQTTATVRSRITSAGAGQGQAAWFATFNETFGDYSEKAHELLNTKLEQWAEEAVARGGFHNTTALLIQYENYRDWIVNHNVAYSELFLDTAGVASFDVWDLLPFTRGYVHILDKDPYLHHFAYDPQYFLNELDLLGQAAATQLARNISNSGAMQTYFAGETIPGDNLAYDADLSAWTEYIPYHFRPNYHGVGTCSMMPKEMGGVVDNAARVYGVQGLRVIDGSIPPTQMSSHVMTVFYAMALKISDAILEDY

SEQ ID NO: 1461 - protein, 577 aa, Aspergillus niger
GIEASLLTDPKDVSGRTVDYIIAGGGLTGLTTAARLTENPNISVLVIESGSYESDRGPIIEDLNAYGDIFGSSVDHAYETVELATNNQTALIRSGNGLGGSTLVNGGTWTRPHKAQVDSWETVFGNEGWNWDNVAAYSLQAERARAPNAKQIAAGHYFNASCHGVNGTVHAGPRDTGDDYSPIVKALMSAVEDRGVPTKKDFGCGDPHGVSMFPNTLHEDQVRSDAAREWLLPNYQRPNLQVLTGQYVGKVLLSQNGTTPRAVGVEFGTHKGNTHNVYAKHEVLLAAGSAVSPTILEYSGIGMKSILEPLGIPTVVDLPVGLNLQDQTTATVRSRITSAGAGQGQAAWFATFNETFGDYSEKAHELLNTKLEQWAEEAVARGGFHNTTALLIQYENYRDWIVNHNVAYSELFLDTAGVASFDVWDLLPFTRGYVHILDKDPYLHHFAYDPQYFLNELDLLGQAAATQLARNISNSGAMQTYFAGETIPGDNLAYDADLSAWTEYIPYHFRPNYHGVGTCSMMPKEMGGVVDNAARVYGVQGLRVIDGSIPPTQMSSHVMTVFYAMALKISDAILEDY

SEQ ID NO: 1462 - protein, 577 aa, Aspergillus niger
GIEASLLTDPKDVSGRTVDYIIAGGGLTGLTTAARLTENPNISVLVIESGSYESDRGPIIEDLNNYGDIFGSSVDHAYETVELATNNQTALIRSGNGLGGSTLVNGGTWTRPHKAQVDSWETVFGNEGWNWDNVAAYSLQAERARAPNAKQIAAGHYFNASCHGVNGTVHAGPRDTGDDYSPIVKALMSAVEDRGVPTKKDFGCGDPHGVSMFPNTLHEDQVRSDAAREWLLPNYQRPNLQVLTGQYVGKVLLSQNGTTPRAVGVEFGTHKGNTHNVYAKHEVLLAAGSAVSPTILEYSGIGMKSILEPLGIDTVVDLPVGLNLQDQTTATVRSRITSAGAGQGQAAWFATFNETFGDYSEKAHELLNTKLEQWAEEAVARGGFHNTTALLIQYENYRDWIVNHNVAYSELFLDTAGVASFDVWDLLPFTRGYVHILDKDPYLHHFAYDPQYFLNELDLLGQAAATQLARNISNSGAMQTYFAGETIPGDNLAYDADLSAWTEYIPYHFRPNYHGVGTCSMMPKEMGGVVDNAARVYGVQGLRVIDGSIPPTQMSSHVMTVFYAMALKISDAILEDY

SEQ ID NO: 1463 - protein, 577 aa, Aspergillus niger
GIEASLLTDPKDVSGRTVDYIIAGGGLTGLTVAARLTENPNISVLVIESGSYESDRGPIIEDLNAYGDIFGSSVDHAYETVELATNNQTALIRSGNGLGGSTLVNGGTWTRPHKAQVDSWETVFGNEGWNWDNVAAYSLQAERARAPNAKQIAAGHYFNASCHGVNGTVHAGPRDTGDDYSPIVKALMSAVEDRGVPTKKDFGCGDPHGVSMFPNTLHEDQVRSDAAREWLLPNYQRPNLQVLTGQYVGKVLLSQNGTTPRAVGVEFGTHKGNTHNVYAKHEVLLAAGSAVSPTILEYSGIGMKSILEPLGIDTVVDLPVGLNLQDQTTATVRSRITSAGAGQGQAAWFATFNETFGDYSEKAHELLNTKLEQWAEEAVARGGFHNTTALLIQYENYRDWIVNHNVAYSELFLDTAGVASFDVWDLLPFTRGYVHILDKDPYLHHFAYDPQYFLNELDLLGQAAATQLARNISNSGAMQTYFAGETIPGDNLAYDADLSAWTEYIPYHFRPNYHGVGTCSMMPKEMGGVVDNAARVYGVQGLRVIDGSIPPTQMSSHVMTVFYAMALKISDAILEDY

SEQ ID NO: 1464 - protein, 577 aa, Aspergillus niger
GIEASLLTDPKEVAGRTVDYIIAGGGLTGLVVAARLTENPDITVLVIESGSYESDRGPIIEDLNAYGKIFGSSVDHAYETVCLATNNRTALIRAGNGLGGSTLVNGGTWTRPHKAQVDSWETVFGNEGWNWDSVAAYSLQAERARAPNAKQIAAGHYFNASCHGINGTVHAGPRDTGDDYSPIVKALMSAVEDRGVPTKKDLGCGDPHGVSMFPNTLHEDQVRSDAAREWLLPNYQRPNLQVLTGQYVGKVLLSQNATTPRAVGVEFGTHKGNFHNVTAKHEVLLAAGSAVSPTILEYSGIGMKSILEPLGIKTVVDLPVGLNLQDQTTSTVRSRITSAGAGQGQAAWFATFNETFGDYTEKAHELLNTKLEQWAEEAVARGGFHNTTALLIQYENYRDWIVKDNVAYSELFLDTAGEASFDVWDLLPFTRGYVHILDKDPYLRHFAYDPQYFLNELDLLGQAAATQLARNISNSGAMQTYFAGETIPGDNLAYDANLRAWVEYIPYHFRPNYHGVGTCSMMPKEMGGVVDNAANVYGVQGLRVIDGSIPPTQMSSHVMTVFYAMALKIADAVLADY

SEQ ID NO: 1465 - protein, 577 aa, Aspergillus niger
GIEASLLTDPKEVAGRTVDYIIAGGGLTGLVVAARLTENPDITVLVIESGSYESDRGPIIEDLNAYGKIFGSSVDHAYETVCLATNNRTALIRAGNGLGGSTLVNGGTWTRPHKAQVDSWETVFGNEGWNWDSVAAYSLQAERARAPNAKQIAAGHYFNASCHGINGTVHAGPRDTGDDYSPIVKALMSAVENRGVPTKKDLGCGDPHGVSMFPNTLHEDQVRSDAAREWLLPNYQRPNLSVLTGQYVGKVLLSQNATTPRAVGVEFGTHKGNFHNVTAKHEVLLAAGSAVSPTILEYSGIGMKSILEPLGIKTVVDLPVGLNLQDQTTSTVRSRITSAGAGQGQAAWFATFNETFGDYTEKAHELLNTKLEQWAEEAVARGGFHNTTALLIQYENYRDWIVKDNVAYSELFLDTAGEASFDVWDLLPFTRGYVHILDKDPYLRHFAYDPQYFLNELDLLGQAAATQLARNISNSGAMQTYFAGETIPGDNLAYDADLRAWVEYIPYHFRPNYHGVGTCSMMPKEMGGVVDNAARVYGVQGLRVIDGSIPPTQMSSHVMTVFYAMALKIADAVLADY

SEQ ID NO: 1466 - protein, 577 aa, Aspergillus niger
GIEASLLTDPKDVSGRTVDYIIAGGGLTGLTTAARLTENPNISVLVIESGSYESDRGPIIEDLNAYGDIFGSSVDHAYETVELATNNQTALIRSGNGLGGSTLVNGGTWTRPHKAQVDSWETVFGNEGWNWDNVAAYSLQAERARAPNAKQIAAGHYFNASCHGVNGTVHAGPRDTGDDYSPIVKALMSAVEDRGVPTKKDFGCGDPHGVSMFPNTLHEDQVRSDAAREWLLPNYQRPNLQVLTGQYVGKVLLSQNGTTPRAVGVEFGTHKGNTHNVYAKHEVLLAAGSAVSPTILEYSGIGMKSILEPLGIDTVVDLPVGLNLQDQTTATVRSRITSAGAGQGQAAWFATFNETFGDYSEFAHELLNTKLEQWAEEAVARGGFHNTTALLIQYENYRDWIVNHNVAYSELFLDTAGVASFDVWDLLPFTRGYVHILDKDPYLHHFAYDPQYFLNELDLLGQAAATQLARNISNSGAMQTYFAGETIPGDNLAYDADLSAWTEYIPYHFRPNYHGVGTCSMMPKEMGGVVDNAARVYGVQGLRVIDGSIPPTQMSSHVMTVFYAMALKISDAILEDY

SEQ ID NO: 1467 - protein, 577 aa, Aspergillus niger
GIEASLLTDPKEVAGRTVDYIIAGGGLTGLVVAARLTENPDITVLVIESGSYESDRGPIIEDLNAYGKIFGSSVDHAYETVCLATNNRTALIRAGNGLGGSTLVNGGTWTRPHKAQVDSWETVFGNEGWNWDSVAAYSLQAERARAPNAKQIAAGHYFNASCHGINGTVHAGPRDTGDDYSPIVKALMSAVENRGVPTKKDLGCGDPHGVSMFPNTLHEDQVRSDAAREWLLPNYQRPNLSVLTGQYVGKVLLSQNATTPRAVGVEFGTHKGNFHNVTAKHEVLLAAGSAVSPTILEYSGIGMKSILEPLGIKTVVDLPVGLNLQDQTTSTVRSRITSAGAGQGQAAWFATFNETFGDYTEKAHELLNTKLEQWAEEAVARGGFHNTTALLIQYENYRDWIVKDNVAYSELFLDTAGEASFDVWDLLPFTRGYVHILDKDPYLRHFAYDPQYFLNELDLLGQAAATQLARNISNSGAMQTYFAGETIPGDNLAYDANLRAWVEYIPYHFRPNYHGVGTCSMMPKEMGGVVDNAARVYGVQGLRVIDGSIPPTQMSSHVMTVFYAMALKIADAVLADY

SEQ ID NO: 1468 - protein, 577 aa, Aspergillus niger
GIEASLLTDPKDVSGRTVDYIIAGGGLTGLTTAARLTENPNISVLVIESGSYESDRGPIIEDLNRYGDIFGSSVDHAYETVELATNNQTALIRSGNGLGGSTLVNGGTWTRPHKAQVDSWETVFGNEGWNWDNVAAYSLQAERARAPNAKQIAAGHYFNASCHGVNGTVHAGPRDTGDDYSPIVKALMSAVEDRGVPTKKDFGCGDPHGVSMFPNTLHEDQVRSDAAREWLLPNYQRPNLQVLTGQYVGKVLLSQNGTTPRAVGVEFGTHKGNTHNVYAKHEVLLAAGSAVSPTILEYSGIGMKSILEPLGIDTVVDLPVGLNLQDQTTATVRSRITSAGAGQGQAAWFATFNETFGDYSEKAHELLNTKLEQWAEEAVARGGFHNTTALLIQYENYRDWIVNHNVAYSELFLDTRGVASFDVWDLLPFTRGYVHILDKDPYLHHFAYDPQYFLNELDLLGQAAATQLARNISNSGAMQTYFAGETIPGDNLAYDADLSAWTEYIPYHFRPNYHGVGTCSMMPKEMGGVVDNAARVYGVQGLRVIDGSIPPTQMSSHVMTVFYAMALKISDAILEDY

SEQ ID NO: 1469 - protein, 577 aa, Aspergillus niger
GIEASLLTDPKEIAGCTVDYIIAGGGLTGLTTAARLTENPDITVLVIESGSYESDRGPIIEDLNAYGDIFGSSVDHAYETVELATNNQTALIRSGNGLGGSSLVNGGTWTRPHKAQVDSWETVFGNEGWNWDSVAAYSLQAERARAPNAKQIAAGHYFNASCHGINGTVHAGPRDTGDDYSPIVKALMSAVEDRGVPTKKDLGCGDPHGVSMFPNTLHEDQVRSDAAREWLLPNYQRPNLQVLTGQYVGKVLLSQNATTPRAIGVEFGTHKGNTHNVYAKHEVLLAAGSAVSPTILEYSGIGMKSILEPLGIDTVVDLPVGLNLQDQTTSTVRSRITSAGAGQGQAAWFATFNETLGDYAEKAHELLNTKLEQWAEEAVARGGFHNTTALLIQYENYRDWIVKDNVAYSELFLDTAGVASFGVWDLLPFTRGYVHILDKAPYLRHFAYDPQYFLNELDLLGQAAATQLARNISNSGAMQTYFAGETIPGDNLAYDADLSAWVEYIPYNFRPNYHGVGTCSMMPKEMGGVVDNAARVYGVQGQRVIDGSIPPTQMSSHVMTVFYAMALKIADAILADY

SEQ ID NO: 1470 - protein, 577 aa, Aspergillus niger
GIEASLLTDPKDVSGRTVDYIIAGGGLTGLTTAARLTENPNISVLVIESGSYESDRGPIIEDLNAYGDIFGSSVDHAYETVELATNNQTALIRSGNGLGGSTLVNGGTWTRPHKAQVDSWETVFGNEGWNWDNVAAYSLQAERARAPNAKQIAAGHYFNASCHGVNGPVHAGPRDTGDDYSPIVKALMSAVEDRGVPTKKDFGCGDPHGVSMFPNTLHEDQVRSDAAREWLLPNYQRPNLQVLTGQYVGKVLLSQNGTTPRAVGVEFGTHKGNTHNVYAKHEVLLAAGSAVSPTILEYSGIGMKSILEPLGIDTVVDLPVGLNLQDQTTATVRSRITSAGAGQGQAAWFATFNETFGDYSEKAHELLNTKLEQWAEEAVARGGFHNTTALLIQYENYRDWIVNHNVAYSELFLDTAGVASFDVWDLLPFTRGYVHILDKDPYLHHFAYDPQYFLNELDLLGQAAATQLARNISNSGAMQTYFAGETIPGDNLAYDADLSAWTEYIPYHFRPNYHGVGTCSMMPKEMGGVVDNAARVYGVQGLRVIDGSIPPTQMSSHVMTVFYAMALKISDAILEDY

SEQ ID NO: 1471 - protein, 577 aa, Aspergillus niger
GIEASLLTDPKEVAGRTVDYIIAGGGLTGLVVAARLTENPDITVLVIESGSYESDRGPIIEDLNAYGKIFGSSVDHAYETVCLATNNRTALIRAGNGLGGSTLVNGGTWTRPHKAQVDSWETVFGNEGWNWDSVAAYSLQAERARAPNAKQIAAGHYFNASCHGINGTVHAGPRDTGDDYSPIVKALMSAVEDRGVPTKKDLGCGDPHGVSMFPNTLHEDQVRSDAAREWLLPNYQRPNLSVLTGQYVGKVLLSQNATTPRAVGVEFGTHKGNFHNVTAKHEVLLAAGSAVSPTILEYSGIGMKSILEPLGIKTVVDLPVGLNLQDQTTSTVRSRITSAGAGQGQAAWFATFNETFGDYTEKAHELLNTKLEQWAEEAVARGGFHNTTALLIQYENYRDWIVKDNVAYSELFLDTAGEASFDVWDLLPFTRGYVHILDKDPYLRHFAYDPQYFLNELDLLGQAAATQLARNISNSGAMQTYFAGETIPGDNLAYDADLRAWVEYIPYHFRPNYHGVGTCSMMPKEMGGVVDNAARVYGVQGLRVIDGSIPPTQMSSHVMTVFYAMALKIADAVLADY

SEQ ID NO: 1472 - protein, 577 aa, Aspergillus niger
GIEASLLTDPKDVSGRTVDYIIAGGGLTGLTTAARLTENPNISVLVIESGSYESDRGPIIEDLNAYGDIFGSSVDHAYETVELATNNQTALIRSGNGLGGSTLVNGGTWTRPHKAQVDSWETVFGNEGWNWDNVAAYSLQAERARAPNAKQIAAGHYFNASCHGVNGTVHAGPRDTGDDYSPIVKALMRAVEDRGVPTKKDFGCGDPHGVSMFPNTLHEDQVRSDAAREWLLPNYQRPNLQVLTGQYVGKVLLSQNGTTPRAVGVEFGTHKGNTHNVYAKHEVLLAAGSAVSPTILEYSGIGMKSILEPLGIDTVVDLPVGLNLQDQTTATVRSRITSAGAGQGQAAWFATFNETFGDYSEKAHELLNTKLEQWAEEAVARGGFHNTTALLIQYENYRDWIVNHNVAYSELFLDTAGVASFDVWDLLPFTRGYVHILDKDPYLHHFAYDPQYFLNELDLLGQAAATQLARNISNSGAMQTYFAGETIPGDNLAYDADLSAWTEYIPYHFRPNYHGVGTCSMMPKEMGGVVDNAARVYGVQGLRVIDGSIPPTQMSSHVMTVFYAMALKISDAILEDY

SEQ ID NO: 1473 - protein, 577 aa, Aspergillus niger
GIEASLLTDPKDVSGRTVDYIIAGGGLTGLTTAARLTENPNISVLVIESGSYESDRGPIIEDLNAYGDIFGSSVDHAYETVELATNNQTALIRSGNGLGGSTLVNGGTWTRPHKAQVDSWETVFGNEGWNWDNVAAYSLQAERARAPNAKQIAAGHYFNASCHGVNGTVHAGPRDTGDDYSPIVKALMSAVEDRGVPTKKDFGCGDPHGVSMFPNTLHEDQVRSDAAREWLLPNYQRPNLQVLTGQYVGKVLLSQNGTTPRAVGVEFGTHKGNTHNVYAKHEVLLAAGSAVSPTILEYSGIGMKSILEPLGIDTVVDLPVGLNLQDQTTATVRSRITSAGAGQGQAAWFATFNETFGDYSEKAHELLNTKLEQWAEEAVARGGFHNTTALLIQYENYRDWIVNHNVAYSELFLDTAGVASFDVWDLLPFTRGYVHILDKDPYLHHFAYDPQYFLNELDLLGQAAATQLARNISNSGAMQTYFAGETIPGDNLAYDADLSAWYEYIPYHFRPNYHGVGTCSMMPKEMGGVVDNAARVYGVQGLRVIDGSIPPTQMSSHVMTVFYAMALKISDAILEDY

SEQ ID NO: 1474 - protein, 577 aa, Aspergillus niger
GIEASLLTDPKDVSGRTVDYIIAGGGLTGLTTAARLTENPNISVLVIESGSYESDRGPIIEDLNKYGDIFGSSVDHAYETVELATNNQTALIRSGNGLGGSTLVNGGTWTRPHKAQVDSWETVFGNEGWNWDNVAAYSLQAERARAPNAKQIAAGHYFNASCHGVNGTVHAGPRDTGDDYSPIVKALMSAVEDRGVPTKKDFGCGDPHGVSMFPNTLHEDQVRSDAAREWLLPNYQRPNLQVLTGQYVGKVLLSQNGTTPRAVGVEFGTHKGNTHNVYAKHEVLLAAGSAVSPTILEYSGIGMKSILEPLGIDTVVDLPVGLNLQDQTTATVRSRITSAGAGQGQAAWFATFNETFGDYSEKAHELLNTKLEQWAEEAVARGGFHNTTALLIQYENYRDWIVNHNVAYSELFLDTAGVASFDVWDLLPFTRGYVHILDKDPYLHHFAYDPQYFLNELDLLGQAAATQLARNISNSGAMQTYFAGETIPGDNLAYDADLSAWTEYIPYHFRPNYHGVGTCSMMPKEMGGVVDNAARVYGVQGLRVIDGSIPPTQMSSHVMTVFYAMALKISDAILEDY

SEQ ID NO: 1475 - protein, 577 aa, Aspergillus niger
GIEASLLTDPKDVSGRTVDYIIAGGGLTGLTTAARLTENPNISVLVIESGSYESDRGPIIEDLNAYGDIFGSSVDHAYETVELATNNQTALIRSGNGLGGSTLVNGGTWTRPHKAQVDSWETVFGNEGWNWDNVAAYSLQAERARAPNAKQIAAGHYFNASCHGVNGTVHAGPRDTGDDYSPIVKALMSAVEDRGVPTKKDFGCGDPHGVSMFPNTLHEDQVRSDAAREWLLPNYQRPNLQVLTGQYVGKVLLSQNGTTPRAVGVEFGTHKGNTHNVYAKHEVLLAAGSAVSPTILEYSGIGMKSILEPLGIDTVVDLPVGLNLQDQTTATVRSRITSAGAGQGQAAWFATFNETFGDYSEKAHELLNTKLEQWAEEAVARGGFHNTTALLIQYENYRDWIVNHNVAYSELFLDTAGVASFDVWDLLPFTRGYVHILDKDPYLHHFAYDPQYFLNELDLLGQAAATQLARFISNSGAMQTYFAGETIPGDNLAYDADLSAWTEYIPYHFRPNYHGVGTCSMMPKEMGGVVDNAARVYGVQGLRVIDGSIPPTQMSSHVMTVFYAMALKISDAILEDY

SEQ ID NO: 1476 - protein, 577 aa, Aspergillus niger
GIEASLLTDPKDVSGRTVDYIIAGGGLTGLTTAARLTENPNISVLVIESGSYESDRGPIIEDLNAYGDIFGSSVDHAYETVELATNNQTALIRSGNGLGGSTLVNGGTWTRPHKAQVDSWETVFGNEGWNWDNVAAYSLQAERARAPNAKQIAAGHYFNASCHGVNGTVHAGPRDTGDDYSPIVKALMSAVEDRGVPTKKDFGCGDPHGVSMFPNTLHEDQVRSDAAREWLLPNYQRPNLQVLTGQYVGKVLLSQNGTTPRAVGVEFGTHKGNTHNVYAKHEVLLAAGSAVSPTILEYSGIGMKSILEPLGIDTVVDLPVGLNLQDQTTATVRSRITSAGAGQGQAAWFATFNETFGDYSEKAHELLNTKLPQWAEEAVARGGFHNTTALLIQYENYRDWIVNHNVAYSELFLDTAGVASFDVWDLLPFTRGYVHILDKDPYLHHFAYDPQYFLNELDLLGQAAATQLARNISNSGAMQTYFAGETIPGDNLAYDADLSAWTEYIPYHFRPNYHGVGTCSMMPKEMGGVVDNAARVYGVQGLRVIDGSIPPTQMSSHVMTVFYAMALKISDAILEDY

SEQ ID NO: 1477 - protein, 577 aa, Aspergillus niger
GIEASLLTDPKDVSGRTVDYIIAGGGLTGLTTAARLTENPNISVLVIESGSYESDRGPIIEDLNAYGDIFGSSVDHAYETVELATNNQTALIRSGNGLGGSTLVNGGTWTRPHKAQVDSWETVFGNEGWNWDNVAAYSLQAERARAPNAKQIAAGHYFNASCHGVNGTVHAGPRDTGDDYSPIVKALMSAVEDRGVPTKKDFGCGDPHGVSMFPNTLHEDQVRSDAAREWLLPNYQRPNLQVLTGQYVGKVLLSQNGETPRAVGVEFGTHKGNTHNVYAKHEVLLAAGSAVSPTILEYSGIGMKSILEPLGIDTVVDLPVGLNLQDQTTATVRSRITSAGAGQGQAAWFATFNETFGDYSEKAHELLNTKLEQWAEEAVARGGFHNTTALLIQYENYRDWIVNHNVAYSELFLDTAGVASFDVWDLLPFTRGYVHILDKDPYLHHFAYDPQYFLNELDLLGQAAATQLARNISNSGAMQTYFAGETIPGDNLAYDADLSAWTEYIPYHFRPNYHGVGTCSMMPKEMGGVVDNAARVYGVQGLRVIDGSIPPTQMSSHVMTVFYAMALKISDAILEDY

SEQ ID NO: 1478 - protein, 577 aa, Aspergillus niger
GIEASLLTDPKDVSGRTVDYIIAGGGLTGLTTAARLTENPNISVLVIESGSYESDRGPIIEDLNRYGDIFGSSVDHAYETVELATNNQTALIRSGNGLGGSTLVNGGTWTRPHKAQVDSWETVFGNEGWNWDNVAAYSLQAERARAPNAKQIAAGHYFNASCHGVNGTVHAGPRDTGDDYSPIVKALMSAVEDRGVPTKKDFGCGDPHGVSMFPNTLHEDQVRSDAAREWLLPNYQRPNLQVLTGQYVGKVLLSQNGTTPRAVGVEFGTHKGNTHNVYAKHEVLLAAGSAVSPTILEYSGIGMKSILEPLGIDTVVDLPVGLNLQDQTTATVRSRITSAGAGQGQAAWFATFNETFGDYSEKAHELLNTKLEQWAEEAVARGGFHNTTALLIQYENYRDWIVNHNVAYSELFLDTNGVASFDVWDLLPFTRGYVHILDKDPYLHHFAYDPQYFLNELDLLGQAAATQLARNISNSGAMQTYFAGETIPGDNLAYDADLSAWTEYIPYHFRPNYHGVGTCSMMPKEMGGVVDNAARVYGVQGLRVIDGSIPPTQMSSHVMTVFYAMALKISDAILEDY

SEQ ID NO: 1479 - protein, 577 aa, Synthetic construct
GIEASLLTDPKEVAGRTVDYIIAGGGLTGLVVAARLTENPDITVLVIESGSYESDRGPIIEDLNAYGKIFGSSVDHAYETVCLATNNRTALIRAGNGLGGSTLVNGGTWTRPHKAQVDSWETVFGNEGWNWDSVAAYSLQAERARAPNAKQIAAGHYFNASCHGINGTVHAGPRDTGDDYSPIVKALMSAVEDRGVPTKKDLGCGDPHGVSMFPNTLHEDQVRSDAAREWLLPNYQRPNLEVLTGQYVGKVLLSQNATTPRAVGVEFGTHKGNFHNVTAKHEVLLAAGSAVSPTILEYSGIGMKSILEPLGIKTVVDLPVGLNLQDQTTSTVRSRITSAGAGQGQAAWFATFNETFGDYTEKAHELLNTKLEQWAEEAVARGGFHNTTALLIQYENYRDWIVKDNVAYSELFLDTAGEASFDVWDLLPFTRGYVHILDKDPYLRHFAYDPQYFLNELDLLGQAAATQLARNISNSGAMQTYFAGETIPGDNLAYDADLRAWVEYIPYHFRPNYHGVGTCSMMPKEMGGVVDNAARVYGVQGLRVIDGSIPPTQMSSHVMTVFYAMALKIADAVLADY

SEQ ID NO: 1480 - protein, 577 aa, Aspergillus niger
GIEASLLTDPNDVSGRTVDYIIAGGGLTGLTTAARLTENPNISVLVIESGSYESDRGPIIEDLNAYGDIFGSSVDHAYETVELATNNQTALIRSGNGLGGSTLVNGGTWTRPHKAQVDSWETVFGNEGWNWDNVAAYSLQAERARAPNAKQIAAGHYFNASCHGTNGTVHAGPRDTGDDYSPIVRALMSAVEDRGVPTKKDFGCGDPHGVSMFPNTLHEDQVRSDAAREWLLPNYQRPNLQVLTGQYVGKVLLSQNGTTPRAVGVEFGTHKGNTHNVYAKHEVLLAAGSAVSPTILEYSGIGMKSILEPLGIDTVVDLPVGLNLQDQTTATVRSRITSAGAGQGQAAWFATFNETFGDYSEKAHELPNTKLEQWAEEAVARGGFHNTTALLIQYENYRDWIVNHNVAYSELFLDTAGVASFDVWDLLPFTRGYVHILDKDPYLHHFAYDPQYFLNELDLLGQAAATQLARNISNSGAMQTYFAGETIPGDNLAYDADLSAWTEYIPYHFRPNYHGVGTCSMMPKEMGGVVDNAARVYGVQGLRVIDGSIPPTQMSSHVMTVFYAMALKISDAILEDY

SEQ ID NO: 1481 - protein, 577 aa, Aspergillus niger
GIEASLLTDPKDVSGRTVDYIIAGGGLTGLTTAARLTENPNISVLVIESGSYESDRGPIIEDLNAYGDIFGSSVDHAYETVELATNNQTALIRSGNGLGGSTLVNGGTWTRPHKAQVDSWETVFGNEGWNWDNVAAYSLQAERARAPNAKQIAAGHYFNASCHGVNGTVHAGPRDTGDDYSPIVKALMSAVEDRGVPTKKDFGCGDPHGVSMFPNTLHEDQVRSDAAREWLLPNYQRPNLQVLTGQYVGKVLLSQNGTTPRAVGVEFGTHKGNTHNVYAKHEVLLAAGSAVSPTILEYSGIGMKSILEPLGIDTVVDLPVGLNLQDQTTATVRSRITSAGAGQGQAAWFATFNETFGDYSEKAHELLNTKLEQWAEEAVARGGFHNTTALLIQYENYRDWIVNHNVAYSELFLDTAGVASFDVWDLLPFTRGYVHILDKDPYLHHFAYDPQYFLNELDLLGQAAATQLARNISNSGAMQTYFAGETIPGDNLAYDADLSAWLEYIPYHFRPNYHGVGTCSMMPKEMGGVVDNAARVYGVQGLRVIDGSIPPTQMSSHVMTVFYAMALKISDAILEDY

SEQ ID NO: 1482 - protein, 577 aa, Aspergillus niger
GIEASLLTDPKDVSGRTVDYIIAGGGLTGLTTAARLTENPNISVLVIESGSYESDRGPIIEDLNAYGDIFGSSVDHAYETVELATNNQTALIRSGNGLGGSTLVNGGTWTRPHKAQVDSWETVFGNEGWNWDNVAAYSLQAERARAPNAKQIAAGHYFNASCHGVNGTVHAGPRDTGDDYSPIVKALMYAVEDRGVPTKKDFGCGDPHGVSMFPNTLHEDQVRSDAAREWLLPNYQRPNLQVLTGQYVGKVLLSQNGTTPRAVGVEFGTHKGNTHNVYAKHEVLLAAGSAVSPTILEYSGIGMKSILEPLGIDTVVDLPVGLNLQDQTTATVRSRITSAGAGQGQAAWFATFNETFGDYSEKAHELLNTKLEQWAEEAVARGGFHNTTALLIQYENYRDWIVNHNVAYSELFLDTAGVASFDVWDLLPFTRGYVHILDKDPYLHHFAYDPQYFLNELDLLGQAAATQLARNISNSGAMQTYFAGETIPGDNLAYDADLSAWTEYIPYHFRPNYHGVGTCSMMPKEMGGVVDNAARVYGVQGLRVIDGSIPPTQMSSHVMTVFYAMALKISDAILEDY

SEQ ID NO: 1483 - protein, 577 aa, Aspergillus niger
GIEASLLTDPKDVSGRTVDYIIAGGGLTGLTTAARLTENPNISVLVIESGSYESDRGPIIEDLNAYGDIFGSSVDHAYETVELATNNQTALIRSGNGLGGSTLVNGGTWTRPHKAQVDSWETVFGNEGWNWDNVAAYSLQAERARAPNAKQIAAGHYFNASCHGVNGTVHAGPRDTGDDYSPIVKALMSAVEDRGVPTKKDFGCGDPHGVSMFPNTLHEDQVRSDAAREWLLPNYQRPNLQVLTGQYVGKVLLSQNGTTPRAVGVEFGTHKGNTHNVYAKHEVLLAAGSAVSPTILEYSGIGMKSILEPLGIDTVVDLPVGLNLQDQTTATVRSRITSAGAGQGQAAWFATFNETFGDYSEKAHELLNTKLEQWAEEAVARGGFHNTTALLIQYENYRDWIVNHNVAYSELFLDTAGVASFDVWDLLPFTRGYVHILDKDPYLHHFAYDPQYFLNELDLLGQAAATQLARNISNSGAMKTYFAGETIPGDNLAYDADLSAWTEYIPYHFRPNYHGVGTCSMMPKEMGGVVDNAARVYGVQGLRVIDGSIPPTQMSSHVMTVFYAMALKISDAILEDY

SEQ ID NO: 1484 - protein, 577 aa, Aspergillus niger
GIEASLLTDPKDVSGRTVDYIIAGGGLTGLTTAARLTENPNISVLVIESGSYESDRGPIIEDLNAYGDIFGSSVDHAYETVELATNNQTALIRSGNGLGGSTLVNGGTWTRPHKAQVDSWETVFGNEGWNWDNVAAYSLQAERARAPNAKQIAAGHYFNASCHGVNGTVHAGPRDTGDDYSPIVKALMSAVEDRGVPTKKDFGCGDPHGVSMFPNTLHEDQVRSDAAREWLLPNYQRPNLQVLTGQYVGKVLLSQNGTTPRAVGVEFGTHKGNTHNVYAKHEVLLAAGSLVSPTILEYSGIGMKSILEPLGIDTVVDLPVGLNLQDQTTATVRSRITSAGAGQGQAAWFATFNETFGDYSEKAHELLNTKLEQWAEEAVARGGFHNTTALLIQYENYRDWIVNHNVAYSELFLDTAGVASFDVWDLLPFTRGYVHILDKDPYLHHFAYDPQYFLNELDLLGQAAATQLARNISNSGAMQTYFAGETIPGDNLAYDADLSAWTEYIPYHFRPNYHGVGTCSMMPKEMGGVVDNAARVYGVQGLRVIDGSIPPTQMSSHVMTVFYAMALKISDAILEDY

SEQ ID NO: 1485 - protein, 577 aa, Aspergillus niger
GIEASLLTDPKDVSGRTVDYIIAGGGLTGLTTAARLTENPNISVLVIESGSYESDRGPIIEDLNAYGDIFGSSVDHAYETVELATNNQTALIRSGNGLGGSTLVNGGTWTRPHKAQVDSWETVFGNEGWNWDNVAAYSLQAERARAPNAKQIAAGHYFNASCHGVNGTVHAGPRDTGDDYSPIVEALMSAVEDRGVPTKKDFGCGDPHGVSMFPNTLHEDQVRSDAAREWLLPNYQRPNLQVLTGQYVGKVLLSQNGTTPRAVGVEFGTHKGNTHNVYAKHEVLLAAGSAVSPTILEYSGIGMKSILEPLGIDTVVDLPVGLNLQDQTTATVRSRITSAGAGQGQAAWFATFNETFGDYSEKAHELLNTKLEQWAEEAVARGGFHNTTALLIQYENYRDWIVNHNVAYSELFLDTAGVASFDVWDLLPFTRGYVHILDKDPYLHHFAYDPQYFLNELDLLGQAAATQLARNISNSGAMQTYFAGETIPGDNLAYDADLSAWTEYIPYHFRPNYHGVGTCSMMPKEMGGVVDNAARVYGVQGLRVIDGSIPPTQMSSHVMTVFYAMALKISDAILEDY

SEQ ID NO: 1486 - protein, 577 aa, Aspergillus niger
GIEASLLTDPKDVSGRTVDYIIAGGGLTGLTTAARLTENPNISVLVIESGSYESDRGPIIEDLNAYGDIFGSSVDHAYETVELATNNQTALIRSGNGLGGSTLVNGGTWTRPHKAQVDSWETVFGNEGWNWDNVAAYSLQAERARAPNAKQIAAGHYFNASCHGVNGTVHAGPRDTGDDYSPIVKALMSAVEDRGVPTKKDFGCGDPHGVSMFPNTLHEDQVRSDAAREWLLPNYQRPNLQVLTGQYVGKVLLYQNGTTPRAVGVEFGTHKGNTHNVYAKHEVLLAAGSAVSPTILEYSGIGMKSILEPLGIDTVVDLPVGLNLQDQTTATVRSRITSAGAGQGQAAWFATFNETFGDYSEKAHELLNTKLEQWAEEAVARGGFHNTTALLIQYENYRDWIVNHNVAYSELFLDTAGVASFDVWDLLPFTRGYVHILDKDPYLHHFAYDPQYFLNELDLLGQAAATQLARNISNSGAMQTYFAGETIPGDNLAYDADLSAWTEYIPYHFRPNYHGVGTCSMMPKEMGGVVDNAARVYGVQGLRVIDGSIPPTQMSSHVMTVFYAMALKISDAILEDY

SEQ ID NO: 1487 - protein, 577 aa, Aspergillus niger
GIEASLLTDPKEVAGRTVDYIIAGGGLTGLVVAARLTENPDITVLVIESGSYESDRGPIIEDLNAYGKIFGSSVDHAYETVCLATNNRTALIRAGNGLGGSTLVNGGTWTRPHKAQVDSWETVFGNEGWNWDSVAAYSLQAERARAPNAKQIAAGHYFNASCHGINGTVHAGPRDTGDDYSPIVKALMSAVEDRGVPTKKDLGCGDPHGVSMFPNTLHEDQVRSDAAREWLLPNYQRPNLSVLTGQYVGKVLLSQNATTPRAVGVEFGTHKGNFHNVTAKHEVLLAAGSAVSPTILEYSGIGMKSILEPLGIKTVVDLPVGLNLQDQTTSTVRSRITSAGAGQGQAAWFATFNETFGDYTEKAHELLNTKLEQWAEEAVARGGFHNTTALLIQYENYRDWIVKDNVAYSELFLDTAGEASFDVWDLLPFTRGYVHILDKDPYLRHFAYDPQYFLNELDLLGQAAATQLARNISNSGAMQTYFAGETIPGDNLAYDANLRAWVEYIPYHFRPNYHGVGTCSMMPKEMGGVVDNAARVYGVQGLRVIDGSIPPTQMSSHVMTVFYAMALKIADAVLADY

SEQ ID NO: 1488 - protein, 577 aa, Aspergillus niger
GIEASLLTDPKDVSGRTVDYIIAGGGLTGLTTAARLTENPNISVLVIESGSYESDRGPIIEDLNAYGDIFGSSVDHAYETVELATNNQTALIRSGNGLGGSTLVNGGTWTRPHKAQVDSWETVFGNEGWNWDNVAAYSLQAERAREPNAKQIAAGHYFNASCHGVNGTVHAGPRDTGDDYSPIVKALMSAVEDRGVPTKKDFGCGDPHGVSMFPNTLHEDQVRSDAAREWLLPNYQRPNLQVLTGQYVGKVLLSQNGTTPRAVGVEFGTHKGNTHNVYAKHEVLLAAGSAVSPTILEYSGIGMKSILEPLGIDTVVDLPVGLNLQDQTTATVRSRITSAGAGQGQAAWFATFNETFGDYSEKAHELLNTKLEQWAEEAVARGGFHNTTALLIQYENYRDWIVNHNVAYSELFLDTAGVASFDVWDLLPFTRGYVHILDKDPYLHHFAYDPQYFLNELDLLGQAAATQLARNISNSGAMQTYFAGETIPGDNLAYDADLSAWTEYIPYHFRPNYHGVGTCSMMPKEMGGVVDNAARVYGVQGLRVIDGSIPPTQMSSHVMTVFYAMALKISDAILEDY

SEQ ID NO: 1489 - protein, 577 aa, Aspergillus niger
GIEASLLTDPKDVSGRTVDYIIAGGGLTGLTTAARLTENPNISVLVIESGSYESDRGPIIEDLNAYGDIFGSSVDHAYETVELATNNQTALIRSGNGLGGSTLVNGGTWTRPHKAQVDSWETVFGNEGWNWDNVAAYSLQAERARAPNAKQIAAGHYFNASCHGVNGTVHAGPRDTGDDYSPIVKALMSAVEDRGVPTKKDFGCGDPHGVSMFPNTLHEDQVRSDAAREWLLPNYQRPNLQVLTGQYVGKVLLSQNGTTPRAVGVEFGTHKGNTHNVYAKHEVLLAAGSAVSPTILEYSGIGMKSILEPLGIDTVVDLPVGLNLQDQTTATVRSRITSAGAGQGQAAWFATFNETFGDYSEKAHELLNTKLEQWAEEAVARGGFHNTTALLIQYENYRDWIVNHNVAYSELFLDTAGVASFDVWDLLPFTRGYVHILDKDPYLHHFAYDPQYFLNELDLLGQAAATQLARKISNSGAMQTYFAGETIPGDNLAYDADLSAWTEYIPYHFRPNYHGVGTCSMMPKEMGGVVDNAARVYGVQGLRVIDGSIPPTQMSSHVMTVFYAMALKISDAILEDY

SEQ ID NO: 1490 - protein, 577 aa, Aspergillus niger
GIEASLLTDPKEVAGRTVDYIIAGGGLTGLVVAARLTENPDITVLVIESGSYESDRGPIIEDLNAYGKIFGSSVDHAYETVCLATNNRTALIRAGNGLGGSTLVNGGTWTRPSKAQVDSWETVFGNEGWNWDSVAAYSLQAERARAPNAKQIAAGHYFNASCHGINGTVHAGPRDTGDDYSPIVKALMSAVEDRGVPTKKDLGCGDPHGVSMFPNTLHEDQVRSDAAREWLLPNYQRPNLQVLTGQYVGKVLLSQNATTPRAVGVEFGTHKGNFHNVTAKHEVLLAAGSAVSPTILEYSGIGMKSILEPLGIKTVVDLPVGLNLQDQTTSTVRSRITSAGAGQGQAAWFATFNETFGDYTEKAHELLNTKLEQWAEEAVARGGFHNTTALLIQYENYRDWIVKDNVAYSELFLDTAGEASFDVWDLLPFTRGYVHILDKDPYLRHFAYDPQYFLNELDLLGQAAATQLARNISNSGAMQTYFAGETIPGDNLAYDADLRAWVEYIPYHFRPNYHGVGTCSMMPKEMGGVVDNAARVYGVQGLRVIDGSIPPTQMSSHVMTVFYAMALKIADAVLADY

SEQ ID NO: 1491 - protein, 577 aa, Aspergillus niger
GIEASLLTDPKDVSGRTVDYIIAGGGLTGLTTAARLTENPNISVLVIESGSYESDRGPIIEDLNAYGDIFGSSVDHAYETVELATNNQTALIRSGNGLGGSTLVNGGTWTRPHKAQVDSWETVFGNEGWNWDNVAAYSLQAERARAPNAKQIAAGHYFNASCHGVNGTVHAGPRDTGDDYSPIVKALMSAVEDRGVPTKKDFGCGDPHGVSMFPNTLHEDQVRSDAAREWLLPNYQRPNLQVLTGQYVGKVLLSQNGTTPRAVGVEFGTHKGNTHNVYAKHEVLLAAGSAVSPTILEYSGIGMKSILEPLGIDTVVDLPVGLNLQDQTTATVRSRITSAGAGQGQAAWFATFNETFGDYSEKAHELLNTKLEQWAEEAVARGGFHNTTALLIQYENYRDWIVNHNVAYSELFLDTAGVLSFDVWDLLPFTRGYVHILDKDPYLHHFAYDPQYFLNELDLLGQAAATQLARNISNSGAMQTYFAGETIPGDNLAYDADLSAWTEYIPYHFRPNYHGVGTCSMMPKEMGGVVDNAARVYGVQGLRVIDGSIPPTQMSSHVMTVFYAMALKISDAILEDY

SEQ ID NO: 1492 - protein, 577 aa, Aspergillus niger
GIEASLLTDPKDVSGRTVDYIIAGGGLTGLTTAARLTENPNISVLVIESGSYESDRGPIIEDLNAYGDIFGSSVDHAYETVELATNNQTALIRSGNGLGGSTLVNGGTWTRPHKAQVDSWETVFGNEGWNWDNVAAYSLQAERARAPNAKQIAAGHYFNASCHGVNGTVHAGPRDTGDDYSPIVAALMSAVEDRGVPTKKDFGCGDPHGVSMFPNTLHEDQVRSDAAREWLLPNYQRPNLQVLTGQYVGKVLLSQNGTTPRAVGVEFGTHKGNTHNVYAKHEVLLAAGSAVSPTILEYSGIGMKSILEPLGIDTVVDLPVGLNLQDQTTATVRSRITSAGAGQGQAAWFATFNETFGDYSEKAHELLNTKLEQWAEEAVARGGFHNTTALLIQYENYRDWIVNHNVAYSELFLDTAGVASFDVWDLLPFTRGYVHILDKDPYLHHFAYDPQYFLNELDLLGQAAATQLARNISNSGAMQTYFAGETIPGDNLAYDADLSAWTEYIPYHFRPNYHGVGTCSMMPKEMGGVVDNAARVYGVQGLRVIDGSIPPTQMSSHVMTVFYAMALKISDAILEDY

SEQ ID NO: 1493 - protein, 577 aa, Aspergillus niger
GIEASLLTDPKDVSGRTVDYIIAGGGLTGLTTAARLTENPNISVLVIESGSYESDRGPIIEDLNAYGDIFGSSVDHAYETVELATNNQTALIRSGNGLGGSTLVNGGTWTRPHKAQVDSWETVFGNEGWNWDNVAAYSLQAERARAPNAKQIAAGHYFNASCHGVNGTVHAGPRDTGDDYSPIVKALMSAVEDRGVPTKKDFGCGDPHGVSMFPNTLHEDQVRSDAAREWLLPNYQRPNLQVLTGQYVGKVLLSQNGTTPRAVGVEFGTHKGNTHNVYAKHEVLLAAGSAVSPTILEYSGIGMKSILEPLGIDTVVDLPVGLNLQDQTTATVRSRITSAGAGQGQAAWFATFNETFGDYSEKAHELLNTKLEQWAEEAVARGGFHNFTALLIQYENYRDWIVNHNVAYSELFLDTAGVASFDVWDLLPFTRGYVHILDKDPYLHHFAYDPQYFLNELDLLGQAAATQLARNISNSGAMQTYFAGETIPGDNLAYDADLSAWTEYIPYHFRPNYHGVGTCSMMPKEMGGVVDNAARVYGVQGLRVIDGSIPPTQMSSHVMTVFYAMALKISDAILEDY

SEQ ID NO: 1494 - protein, 577 aa, Aspergillus niger
GIEDSLLTDPKEVAGRTVDYIIAGGGLTGLVVAARLTENPDITVLVIESGSYESDRGPIIEDLNAYGKIFGSSVDHAYETVCLATNNRTALIRAGNGLGGSTLVNGGTWTRPHKAQVDSWETVFGNEGWNWDSVAAYSLQAERARAPNAKQIAAGHYFNASCHGINGTVHAGPRDTGDDYSPIVKALMSAVEDRGVPTKKDLGCGDPHGVSMFPNTLHEDQVRSDAAREWLLPNYQRPNLSVLTGQYVGKVLLSQNATTPRAVGVEFGTHKGNFHNVTAKHEVLLAAGSAVSPTILEYSGIGMKSILEPLGIKTVVDLPVGLNLQDQTTSTVRSRITSAGAGQGQAAWFATFNETFGDYTEKAHELLNTKLEQWAEEAVARGGFHNTTALLIQYENYRDWIVKDNVAYSELFLDTAGEASFDVWDLLPFTRGYVHILDKDPYLRHFAYDPQYFLNELDLLGQAAATQLARNISNSGAMQTYFAGETIPGDNLAYDADLRAWVEYIPYHFRPNYHGVGTCSMMPKEMGGVVDNAARVYGVQGLRVIDGSIPPTQMSSHVMTVFYAMALKIADAVLADY

SEQ ID NO: 1495 - protein, 577 aa, Aspergillus niger
GIEASLLTDPKDVSGRTVDYIIAGGGLTGLTTAARLTENPNISVLVIESGSYESDRGPIIEDLNAYGDIFGSSVDHAYETVELATNNQTALIRSGNGLGGSTLVNGGTWTRPHKAQVDSWETVFGNEGWNWDNVAAYSLQAERARAPNAKQIAAGHYFNAECHGVNGTVHAGPRDTGDDYSPIVKALMSAVEDRGVPTKKDFGCGDPHGVSMFPNTLHEDQVRSDAAREWLLPNYQRPNLQVLTGQYVGKVLLSQNGTTPRAVGVEFGTHKGNTHNVYAKHEVLLAAGSAVSPTILEYSGIGMKSILEPLGIDTVVDLPVGLNLQDQTTATVRSRITSAGAGQGQAAWFATFNETFGDYSEKAHELLNTKLEQWAEEAVARGGFHNTTALLIQYENYRDWIVNHNVAYSELFLDTAGVASFDVWDLLPFTRGYVHILDKDPYLHHFAYDPQYFLNELDLLGQAAATQLARNISNSGAMQTYFAGETIPGDNLAYDADLSAWTEYIPYHFRPNYHGVGTCSMMPKEMGGVVDNAARVYGVQGLRVIDGSIPPTQMSSHVMTVFYAMALKISDAILEDY

SEQ ID NO: 1496 - protein, 577 aa, Aspergillus niger
GIEASLLTDPKDVSGRTVDYIIAGGGLTGLTTAARLTENPNISVLVIESGSYESDRGPIIEDLNAYGDIFGSSVDHAYETVELATNNQTALIRSGNGLGGSTLVNGGTWTRPHKAQVDSWETVFGNEGWNWDNVAAYSLQAERARAPNAKQIAAGHYFNASCHGVNGTVHAGPRDTGDDYSPIVKALMSAVEDRGVPTKKDFGCGDPHGVSMFPNTLHEDQVRSDAAREWLLPNYQRPNLQVLTGQYVGKVLLSQNGTTPRAVGVEFGTHKGNTHNVYAKHEVLLAAGSAVSPTILEYSGIGMKSILEPLGIDTVVDLPVGLNLQDQTTATVRSRITSAGAGQGQAAWFATFNETFGDYSEKAHELLNTKLEQWAEEAVARGGFHNTTALLIQYENYRDWIVNHNVAYSELFLDTAGVASFDVWDLLPFTRGYVHILDKDPYLHHFMYDPQYFLNELDLLGQAAATQLARNISNSGAMQTYFAGETIPGDNLAYDADLSAWTEYIPYHFRPNYHGVGTCSMMPKEMGGVVDNAARVYGVQGLRVIDGSIPPTQMSSHVMTVFYAMALKISDAILEDY

SEQ ID NO: 1497 - protein, 577 aa, Aspergillus niger
GIEASLLKDPKGVAGRTYDYIIAGGGLAGLTVAEKLTENPNITVLVIESGSYESDRGPIIEDLNAYGEIFGTSVDHAYETVELATQNRTALIRSGNGLGGSTLINGGTWTRPHKAQVDSWETVFGNEGWNWDSVAAYSLQAERARAPNAKQIAAGHYFNASCHGLNGTVHVGPRDTGDDYSPLMRALMSAVEDRGVPTKKDLGCGDPHGVSMFPNTLHEDQVRADAAREWLLPNYQRPNLQVLTGQYVGKVLLSQNATTPRAVGVEFGTHKSNTHNVYAKHEVLLSAGSTVSPTILEYSGIGMKSILEPLGIDTVVDLPVGLNLQDQTTSTVRSRITSAGNGQGQAAWFATFNETFGDYTEKAHELLNTKLEQWAEEAVARGGFHNTTALLIQYENYRDWIVKDNVAYSELFLDTGGVASFDVWDLLPFTRGYVHILDKDPYLRHFAYDPQYFLNELDLLGQAAATQLARNISNSGAMQTYFAGETIPGDNLAYDADLSAWVEYIPEHFRPNYHGVGTCSMMPKEMGGVVDNAARVYGVQGLRVIDGSIPPTQLSSHVMTVFYAMALKIADAVLADY

SEQ ID NO: 1498 - protein, 577 aa, Aspergillus niger
GIEASLLTDPNDVSGRTVDYIIAGGGLTGLTTAARLTENPNISVLVIESGSYESDRGPIIEDLNAYGDIFGSSVDHAYETVELATNNQTALIRSGNGLGGSTLVNGGTWTRPHKAQVDSWETVFGNEGWNWDNVAAYSLQAERARAPNAKQIAAGHYFNASCHGTNGTVHAGPRDTGDDYSPIVKALMSAVEDRGVPTQKDFGCGDPHGVSMFPNTLHEDQVRSDAAREWLLPNYQRPNLQVLTGQYVGKVLLSQNGTTPRAVGVEFGTHKGNTHNVYAKHEVLLAAGSAVSPTILEYSGIGMKSILEPLGIDTVVDLPVGLNLQDQTTATVRSRITSAGAGQGQAAWFATFNETFGDYSEKAHELLNTKLEQWAEEAVARGGFHNTTALLIQYENYRDWIVNHNVAYSELFLDTAGVASFDVWDLLPFTRGYVHILDKDPYLHHFAYDPQYFLNELDLLGQAAATQLARNISNSGAMQTYFAGETIPGDNLAYDADLSAWTEYIPYHFRPNYHGVGTCSMMPKEMGGVVDNAARVYGVQGLRVIDGSIPPTQMSSHVMTVFYAMALKISDAILEDY

SEQ ID NO: 1499 - protein, 577 aa, Aspergillus niger
GIEASLLTDPKDVSGRTVDYIIAGGGLTGLTTAARLTENPNISVLVIESGSYESDRGPIIEDLNAYGDIFGSSVDHAYETVELATNNQTALIRSGNGLGGSTLVNGGTWTRPHKAQVDSWETVFGNEGWNWDNVAAYSLQAERARAPNAKQIAAGHYFNASCHGVNGTVHAGPRDTGDDYSPIVKALMSAVEDRGVPTKKDFGCGDPHGVSMFPNTLHEDQVRSDAAREWLLPNYQRPNLQVLTGQYVGKVLLSQNGTTPRAVGVEFGTHKGNTHNVYAKHEVLLAAGSAVSPTILEYSGIGMKSILEPLGIDTVVDLPVGLNLQDQTTATVRSRITSAGAGQGQAAWFATFNETFGDYSEKAHELLNTKLEQWAEEAVARGGFHNTTALLIQYENYRDWIVNHNVAYSELFLDTAGVASFDVWDLLPFTRGYVHILDKDPYLXHFAYDPQYFLNELDLLGQAAATQLARNISNSGAMQTYFAGETIPGDNLAYDADLSAWTEYIPYHFRPNYHGVGTCSMMPKEMGGVVDNAARVYGVQGLRVIDGSIPPTQMSSHVMTVFYAMALKISDAILEDY

SEQ ID NO: 1500 - protein, 577 aa, Aspergillus niger
GIEASLLTDPKDVSGRTVDYIIAGGGLTGLTTAARLTENPNISVLVIESGSYESDRGPIIEDLNAYGDIFGSSVDHAYETVELATNNQTALIRSGNGLGGSTLVNGGTWTRPHKAQVDSWETVFGNEGWNWDNVSAYSLQAERARAPNAKQIAAGHYFNASCHGVNGTVHAGPRDTGDDYSPIVKALMSAVEDRGVPTKKDFGCGDPHGVSMFPNTLHEDQVRSDAAREWLLPNYQRPNLQVLTGQYVGKVLLSQNGTTPRAVGVEFGTHKGNTHNVYAKHEVLLAAGSAVSPTILEYSGIGMKSILEPLGIDTVVDLPVGLNLQDQTTATVRSRITSAGAGQGQAAWFATFNETFGDYSEKAHELLNTKLEQWAEEAVARGGFHNTTALLIQYENYRDWIVNHNVAYSELFLDTAGVASFDVWDLLPFTRGYVHILDKDPYLHHFAYDPQYFLNELDLLGQAAATQLARNISNSGAMQTYFAGETIPGDNLAYDADLSAWTEYIPYHFRPNYHGVGTCSMMPKEMGGVVDNAARVYGVQGLRVIDGSIPPTQMSSHVMTVFYAMALKISDAILEDY

SEQ ID NO: 1501 - protein, 577 aa, Aspergillus niger
GIEASLLTDPKDVSGRTVDYIIAGGGLTGLTTAARLTENPNISVLVIESGSYESDRGPIIEDLNAYGDIFGSSVDHAYETVELATNNQTALIRSGNGLGGSTLVNGGTWTRPHKAQVDSWETVFGNEGWNWDNVAAYSLQAERARAPNAKQIAAGHYFNASCHGVNGTVHAGPRDTGDDYSPIVKALMSAVEDRGVPTKKDFGCGDPHGVSMFPNTLHEDQVRSDAAREWLLPNYQRPNLQVLTGQYVGKVLLSQNGTTPRAVGVEFGTHKGNTHNVYAKHEVLLAAGSAVSPTILEYSGIGMKSILEPLGIDTVVDLPVGLNLQDQTTATVRSRITSAGAGQGQAAWFATFNETFGDYFEKAHELLNTKLEQWAEEAVARGGFHNTTALLIQYENYRDWIVNHNVAYSELFLDTAGVASFDVWDLLPFTRGYVHILDKDPYLHHFAYDPQYFLNELDLLGQAAATQLARNISNSGAMQTYFAGETIPGDNLAYDADLSAWTEYIPYHFRPNYHGVGTCSMMPKEMGGVVDNAARVYGVQGLRVIDGSIPPTQMSSHVMTVFYAMALKISDAILEDY

SEQ ID NO: 1502 - protein, 577 aa, Aspergillus niger
GIEASLLTDPKDVSGRTVDYIIAGGGLTGLTTAARLTENPNISVLVIESGSYESDRGPIIEDLNAYGDIFGSSVDHAYETVELATNNQTALIRSGNGLGGSTLVNGGTWTRPHKAQVDSWETVFGNEGWNWDNVAAYSLQAERARAPNAKQIAAGHYFNASCHGVNGTVHAGPRDTGDDYSPIVKALMSAVEDRGVPTKKDFGCGDPHGVSMFPNTLHEDQVRSDAAREWLLPNYQRPNLQVLTGQYVGKVLLSQNGTTPRAVGVEFGTHKGNTHNVYAKHEVLLAAGSAVSPTILEYSGIGMKSILEPLGIDTVVDLPVGLNLQDQTTATVRSRITSAGAGQGQAAWFATFNETFGDYSEKAHELLNTKLEQWAEEAVARGGFHNTTALLIQYENYRDWIVNHNVAYSELFLDTAGVASFDVWDLLPFTRGYVHILDKDPYLHHFAYDPQYFLNELDLLGQAAATQLARNISNSGAMQTYFAGETIPGDNLAYDADLSAWTEYIPYHFRPNYHGVGTCSMMPKEMGGVVDNAARVYGVQGLRVIDGSIPPTQMSSHVMTVFYAMALKISDAILEDY

SEQ ID NO: 1503 - protein, 577 aa, Aspergillus niger
GIEASLLKDPKLVNGDTYDYIIAGGGLAGLTVAEKLTENPDITVLVIESGSYESDRGPIIEDLNAYGEIFGTSVDHAYETVELAVDNRTALIRSGNGLGGSTLINGGTWTRPHKAQVDSWETVFGNEGWNWDSVAAYSLQAERARAPNAKQIAAGHYFNASCHGLNGTVHVGPRDTGDDYSPLMRALMSAVEDRGVPTKKDLGCGDPHGVSMFPNTLHEDQVRADAAREWLLPNYQRPNLQVLTGQYVGKVLLSQNATTPRAVGVEFGTHKSNTHNVYAKHEVLLSAGSTVSPTILEYSGIGMKSILEPLGIDTVVDLPVGLNLQDQTTSTVRSRITSAGAGQGQAAWFATFNETFGDYTEKAHELLNTKLEQWAEEAVARGGFHNTTALLIQYENYRDWIVKDNVAYSELFLDTGGVASFDVWDLLPFTRGYVHILDKDPYLRHFAYDPQYFLNELDLLGQAAATQLARNISNSGAMQTYFAGETIPGDNLAYDADLSAWVEYIPEHFRPNYHGVGTCSMMPKEMGGVVDNAARVYGVQGLRVIDGSIPPTQLSSHVMTVFYAMALKIADAVLADY

SEQ ID NO: 1504 - protein, 577 aa, Aspergillus niger
GIEASLLKDPKLVAGRTYDYIIAGGGLAGLTVAEKLTENPDITVLVIESGSYESDRGPIIEDLNAYGEIFGTSVDHAYETVELATQNRTALIRSGNGLGGSTLINGGTWTRPHKAQVDSWETVFGNEGWNWDSVAAYSLQAERARAPNAKQIAAGHYFNASCHGLNGTVHVGPRDTGDDYSPLMRALMSAVEDRGVPTKKDLGCGDPHGVSMFPNTLHEDQVRADAAREWLLPNYQRPNLQVLTGQYVGKVLLSQNATTPRAVGVEFGTHKSNTHNVYAKHEVLLSAGSTVSPTILEYSGIGMKSILEPLGIDTVVDLPVGLNLQDQTTSTVRSRITSAGAGQGQAAWFATFNETFGDYTEKAHELLNTKLEQWAEEAVARGGFHNTTALLIQYENYRDWIVKDNVAYSELFLDTGGVASFDVWDLLPFTRGYVHILDKDPYLRHFAYDPQYFLNELDLLGQAAATQLARNISNSGAMQTYFAGETIPGDNLAYDADLSAWVEYIPEHFRPNYHGVGTCSMMPKEMGGVVDNAARVYGVQGLRVIDGSIPPTQLSSHVMTVFYAMALKIADAVLADY

SEQ ID NO: 1505 - protein, 577 aa, Aspergillus niger
GIEASLLTDPKDVSGRTVDYIIAGGGLTGLTTAARLTENPNISVLVIESGSYESDRGPIIEDLNYYGDIFGSSVDHAYETVELATNNQTALIRSGNGLGGSTLVNGGTWTRPHKAQVDSWETVFGNEGWNWDNVAAYSLQAERARAPNAKQIAAGHYFNASCHGVNGTVHAGPRDTGDDYSPIVKALMSAVEDRGVPTKKDFGCGDPHGVSMFPNTLHEDQVRSDAAREWLLPNYQRPNLQVLTGQYVGKVLLSQNGTTPRAVGVEFGTHKGNTHNVYAKHEVLLAAGSAVSPTILEYSGIGMKSILEPLGIDTVVDLPVGLNLQDQTTATVRSRITSAGAGQGQAAWFATFNETFGDYSEKAHELLNTKLEQWAEEAVARGGFHNTTALLIQYENYRDWIVNHNVAYSELFLDTAGVASFDVWDLLPFTRGYVHILDKDPYLHHFAYDPQYFLNELDLLGQAAATQLARNISNSGAMQTYFAGETIPGDNLAYDADLSAWTEYIPYHFRPNYHGVGTCSMMPKEMGGVVDNAARVYGVQGLRVIDGSIPPTQMSSHVMTVFYAMALKISDAILEDY

SEQ ID NO: 1506 - protein, 577 aa, Aspergillus niger
GIEASLLTDPKDVSGRTVDYIIAGGGLTGLTTAARLTENPNISVLVIESGSYESDRGPIIEDLNAYGDIFGSSVDHAYETVELATNNQTQLIRSGNGLGGSTLVNGGTWTRPHKAQVDSWETVFGNEGWNWDNVAAYSLQAERARAPNAKQIAAGHYFNASCHGVNGTVHAGPRDTGDDYSPIVKALMSAVEDRGVPTKKDFGCGDPHGVSMFPNTLHEDQVRSDAAREWLLPNYQRPNLQVLTGQYVGKVLLSQNGTTPRAVGVEFGTHKGNTHNVYAKHEVLLAAGSAVSPTILEYSGIGMKSILEPLGIDTVVDLPVGLNLQDQTTATVRSRITSAGAGQGQAAWFATFNETFGDYSEKAHELLNTKLEQWAEEAVARGGFHNTTALLIQYENYRDWIVNHNVAYSELFLDTAGVASFDVWDLLPFTRGYVHILDKDPYLHHFAYDPQYFLNELDLLGQAAATQLARNISNSGAMQTYFAGETIPGDNLAYDADLSAWTEYIPYHFRPNYHGVGTCSMMPKEMGGVVDNAARVYGVQGLRVIDGSIPPTQMSSHVMTVFYAMALKISDAILEDY

SEQ ID NO: 1507 - protein, 577 aa, Aspergillus niger
GIEASLLTDPKDVSGRTVDYIIAGGGLTGLTTAARLTENPNISVLVIESGSYESDRGPIIEDLNAYGDIFGSSVDHAYETVELATNNQTALIRSGNGLGGSTLVNGGTWTRPHKAQVDSWETVFGNEGWNWDNVAAYSLQAERARAPNAKQIAAGHYFNASCHGVNGTVHAGPRDTGDDYSPIVKALMSAVEDRGVPTKKDFGCGDPHGVSMFPNTLHEDQVRSDAAREWLLPNYQRPNLQVLTGQYVGKVLLSQNGTTPRAVGVEFGTHKGNTHNVYAKHEVLLAAGSAVSPTILEYSGIGMKSILEPLGIDTVVDLPVGLNLQDQTTATVRSRITSAGAGQGQAAWFATFNETFGDYSEKAHELLNTKLEQWAEEAVARGGFHNTTALLIQYENYRDWIVNHNVAYSELFLDTAGVASFDVWDLLPFTRGYVHILDKDPYLHHFAYDPQYFLNELDLLGQAAATQLARNISNYGAMQTYFAGETIPGDNLAYDADLSAWTEYIPYHFRPNYHGVGTCSMMPKEMGGVVDNAARVYGVQGLRVIDGSIPPTQMSSHVMTVFYAMALKISDAILEDY

SEQ ID NO: 1508 - protein, 577 aa, Aspergillus niger
GIEASLLTDPKEVAGRTVDYIIAGGGLTGLTVAARLTENPDITVLVIEPGSYESDRGAIIEDLNAYGDIFGSSVDHAYETVELATNNRTALIRSGNGLGGSTYFNGGTWTRPHKAQVDSWETVFGNEGWNWDSVAAYSLQAERARAPNAKQIAAGHYFNASCHGINGTVHAGPRDTGDDYSPIVKALMSAVEDRGVPTKKDLGCGDPHGVSMFPNTLHEDQVRSDAAREWLLPNYQRPNLEVLTGQYVGKVLLSQNATTPRAVGVEFGTHKGNTHNVYAKHEVLLAAGSAVSPTILEYSGIGMKSILEPLGIDTVVDLPVGLNLQDQTTSTVRSRITSAGAGQGQAAWFATFNETFGDYAEKAHELLNTKLEQWAEEAVARGGFHNTTALLIQYENYRDWIVKDNVAYSELFLDTAGVASFDVWDLLPFTRGYVHILDKDPYLRHFAYDPQYFLNELDLLGQAAATQLARNISNSGAMQTYFAGETIPGDNLAYDADLSAWVEYIPYNFRPNYHGVGTCSMMPKEMGGVVDNAARVYGVQGLRVIDGSIPPTQMSSHVSTVFYAMALKIADAILADY

SEQ ID NO: 1509 - protein, 577 aa, Aspergillus niger
GIEASLLTDPKDVSGRTVDYIIAGGGLTGLTTAARLTENPNISVLVIESGSYESDRGPIIEDLNAYGXIFGSSVDHAYETVELATNNQTALIRSGNGLGGSTLVNGGTWTRPHKAQVDSWETVFGNEGWNWDNVAAYSLQAERARAPNAKQIAAGHYFNASCHGVNGTVHAGPRDTGDDYSPIVKALMSAVEDRGVPTKKDFGCGDPHGVSMFPNTLHEDQVRSDAAREWLLPNYQRPNLQVLTGQYVGKVLLSQNGTTPRAVGVEFGTHKGNTHNVYAKHEVLLAAGSAVSPTILEYSGIGMKSILEPLGIDTVVDLPVGLNLQDQTTATVRSRITSAGAGQGQAAWFATFNETFGDYSEKAHELLNTKLEQWAEEAVARGGFHNTTALLIQYENYRDWIVNHNVAYSELFLDTAGVASFDVWDLLPFTRGYVHILDKDPYLHHFAYDPQYFLNELDLLGQAAATQLARNISNSGAMQTYFAGETIPGDNLAYDADLSAWTEYIPYHFRPNYHGVGTCSMMPKEMGGVVDNAARVYGVQGLRVIDGSIPPTQMSSHVMTVFYAMALKISDAILEDY

SEQ ID NO: 1510 - protein, 577 aa, Aspergillus niger
GIEASLLTDPKEVAGRTVDYIIAGGGLTGLTSAARLTENPDITVLVIEKGSYESDRGAIIEDLNAYGDIFGSSVDHAYETVELATNNATALIRSGNGLGGSTLLNGGTWTRPHKAQVDSWETVFGNEGWNWDSVAAYSLQAERARAPNAKQIAAGHYFNASCHGINGTVHAGPRDTGDDYSPIVKALMSAVEDRGVPTKKDLGCGDPHGVSMFPNTLHEDQVRSDAAREWLLPNYQRPNLEVLTGQYVGKVLLSQNATTPRAVGVEFGTHKGNTHNVYAKHEVLLAAGSAVSPTILEYSGIGMKSILEPLGIDTVVDLPVGLNLQDQTTSTVRSRITSAGAGQGQAAWFATFNETFGDYAEKAHELLNTKLEQWAEEAVARGGFHNTTALLIQYENYRDWIVKDNVAYSELFLDTAGVASFDVWDLLPFTRGYVHILDKDPYLRHFAYDPQYFLNELDLLGQAAATQLARNISNSGAMQTYFAGETIPGDNLAYDADLSAWVEYIPYNFRPNYHGVGTCSMMPKEMGGVVDNAARVYGVQGLRVIDGSIPPTQMSSHVSTVFYAMALKIADAILADY

SEQ ID NO: 1511 - protein, 577 aa, Aspergillus niger
GIEASLLTDPKDVSGRTVDYIIAGGGLTGLTTAARLTENPNISVLVIESGSYESDRGPIIEDLNAYGDIFGSSVDHAYETVELATNNQTALIRSGNGLGGSTLVNGGTWTRPHKAQVDSWETVFGNEGWNWDNVAAYSLQAERARAPNAKQIAAGHYFNASCHGVNGTVHAGPRDTGDDYSPIVKALMSAVEDRGVPTKKDFGCGDPHGVSMFPNTLHEDQVRSDAAREWLLPNYQRPNLQVLTGQYVGKVLLSQNGTTPRAVGVEFGTHKGNTHNVYAKHEVLLAAGSAVSPTILEYSGIGMKSILEPLGIDTVVDLPVGLNLQDQTTATVKSRITSAGAGQGQAAWFATFNETFGDYSEKAHELLNTKLEQWAEEAVARGGFHNTTALLIQYENYRDWIVNHNVAYSELFLDTAGVASFDVWDLLPFTRGYVHILDKDPYLHHFAYDPQYFLNELDLLGQAAATQLARNISNSGAMQTYFAGETIPGDNLAYDADLSAWTEYIPYHFRPNYHGVGTCSMMPKEMGGVVDNAARVYGVQGLRVIDGSIPPTQMSSHVMTVFYAMALKISDAILEDY

SEQ ID NO: 1512 - protein, 577 aa, Aspergillus niger
GIEASLLTDPKDVSGRTVDYIIAGGGLTGLTTAARLTENPNISVLVIESGSYESDRGPIIEDLNAYGDIFGSSVDHAYETVELATNNQTALIRSGNGLGGSTLVNGGTWTRPHKAQVDSWETVFGNEGWNWDNVAAYSLQAERARAPNAKQIAAGHYFNTSCHGVNGTVHAGPRDTGDDYSPIVKALMSAVEDRGVPTKKDFGCGDPHGVSMFPNTLHEDQVRSDAAREWLLPNYQRPNLQVLTGQYVGKVLLSQNGTTPRAVGVEFGTHKGNTHNVYAKHEVLLAAGSAVSPTILEYSGIGMKSILEPLGIDTVVDLPVGLNLQDQTTATVRSRITSAGAGQGQAAWFATFNETFGDYSEKAHELLNTKLEQWAEEAVARGGFHNTTALLIQYENYRDWIVNHNVAYSELFLDTAGVASFDVWDLLPFTRGYVHILDKDPYLHHFAYDPQYFLNELDLLGQAAATQLARNISNSGAMQTYFAGETIPGDNLAYDADLSAWTEYIPYHFRPNYHGVGTCSMMPKEMGGVVDNAARVYGVQGLRVIDGSIPPTQMSSHVMTVFYAMALKISDAILEDY

SEQ ID NO: 1513 - protein, 577 aa, Aspergillus niger
GIEASLLTDPKDVSGRTVDYIIAGGGLTGLTTAARLTENPNISVLVIESGSYESDRGPIIEDLNAYGDIFGSSVDHAYETVELATNNQTALIRSGNGLGGSTLVNGGTWTRPHKAQVDSWETVFGNEGWNWDNVAAYSLQAERARAPNAKQIAAGHYFNASCHGVNGTVHAGPRDTGDDYSPIVKALMSAVEDRGVPTKKDFGCGDPHGVSMFPNTLHEDQVRSDAAREWLLPNYQRPNLQVLTGQYVGKVLLSQNGTTPRAVGVEFGTHKGNTHNVYAKHEVLLAAGSAVSPTILEYSGIGMKSILEPLGIDTVVDLPVGLNLQDQTTATVRSRITSAGAGQGQAAWFATFNETFGDYSEKAHELLNTKLEQWAEEAVARGGFHNTTALLIQYENYRNWIVNHNVAYSELFLDTAGVASFDVWDLLPFTRGYVHILDKDPYLHHFAYDPQYFLNELDLLGQAAATQLARNISNSGAMQTYFAGETIPGDNLAYDADLSAWTEYIPYHFRPNYHGVGTCSMMPKEMGGVVDNAARVYGVQGLRVIDGSIPPTQMSSHVMTVFYAMALKISDVILEDY

SEQ ID NO: 1514 - protein, 577 aa, Aspergillus niger
GIEASLLTDPKDVSGRTVDYIIAGGGLTGLTTAARLTENPNISVLVIESGSYESDRGPIIEDLNAYGDIFGSSVDHAYETVELACNNQTALIRSGNGLGGSTLVNGGTWTRPHKAQVDSWETVFGNEGWNWDNVAAYSLQAERARAPNAKQIAAGHYFNASCHGVNGTVHAGPRDTGDDYSPIVKALMSAVEDRGVPTKKDFGCGDPHGVSMFPNTLHEDQVRSDAAREWLLPNYQRPNLQVLTGQYVGKVLLSQNGTTPRAVGVEFGTHKGNTHNVYAKHEVLLAAGSAVSPTILEYSGIGMKSILEPLGIDTVVDLPVGLNLQDQTTATVRSRITSAGAGQGQAAWFATFNETFGDYSEKAHELLNTKLEQWAEEAVARGGFHNTTALLIQYENYRDWIVNHNVAYSELFLDTAGVASFDVWDLLPFTRGYVHILDKDPYLHHFAYDPQYFLNELDLLGQAAATQLARNISNSGAMQTYFAGETIPGDNLAYDADLSAWTEYICYHFRPNYHGVGTCSMMPKEMGGVVDNAARVYGVQGLRVIDGSIPPTQMSSHVMTVFYAMALKISDAILEDY

SEQ ID NO: 1515 - protein, 577 aa, Aspergillus niger
GIEASLLTDPXDVSGRTVDYIIAGGGLTGLTTAARLTENPNISVLVIESGSYESDRGPIIEDLNAYGDIFGSSVDHAYETVELATNNQTALIRSGNGLGGSTLVNGGTWTRPHKAQVDSWETVFGNEGWNWDNVAAYSLQAERARAPNAKQIAAGHYFNASCHGVNGTVHAGPRDTGDDYSPIVKALMSAVEDRGVPTKKDFGCGDPHGVSMFPNTLHEDQVRSDAAREWLLPNYQRPNLQVLTGQYVGKVLLSQNGTTPRAVGVEFGTHKGNTHNVYAKHEVLLAAGSAVSPTILEYSGIGMKSILEPLGIDTVVDLPVGLNLQDQTTATVRSRITSAGAGQGQAAWFATFNETFGDYSEKAHELLNTKLEQWAEEAVARGGFHNTTALLIQYENYRDWIVNHNVAYSELFLDTAGVASFDVWDLLPFTRGYVHILDKDPYLHHFAYDPQYFLNELDLLGQAAATQLARNISNSGAMQTYFAGETIPGDNLAYDADLSAWTEYIPYHFRPNYHGVGTCSMMPKEMGGVVDNAARVYGVQGLRVIDGSIPPTQMSSHVMTVFYAMALKISDAILEDY

SEQ ID NO: 1516 - protein, 577 aa, Aspergillus niger
GIEASLLTDPKDVSGRTVDYIIAGGGLTGLTTAARLTENPNISVLVIESGSYESDRGPIIEDLNAYGDIFGSSVDHAYETVELATNNQTALIRSGNGLGGSTLVNGGTWTRPHKAQVDSWETVFGNEGWNWDNVAAYSLQAERARAPNAKQIAAGHYFNASCHGVNGTVHAGPRDTGDDYSPIVKALMSAVEDRGVPTKKDFGCGDPHGVSMFPNTLHEDQVRSDAAREWLLPNYQRPNLQVLTGQYVGKVLLSQNGTTPRAVGVEFGTHKGNTHNVYAKHEVLLAAGSAVSPTILEYSGIGMKSILEPLGIDTVVDLPVGLNLQDQTTATVRSRITSAGAGQGQAAWFATFNETFGDYSEKAHELLNTKLEQWAEEAVARGGFHNTTALLIQYENYRDWIVNHNVAYSELFLDTAGVASFDVWDLLPFTRGYVHILDKDPYLHHFAYDPQYFLNELDLLGQAAATQLARNISNSGAMQTYFAGETKPGDNLAYDADLSAWTEYIPYHFRPNYHGVGTCSMMPKEMGGVVDNAARVYGVQGLRVIDGSIPPTQMSSHVMTVFYAMALKISDAILEDY

SEQ ID NO: 1517 - protein, 577 aa, Aspergillus niger
GIEASLLTDPKDVSGRTVDYIIAGGGLTGLTTAARLTENPNISVLVIESGSYESDRGPIIEDLNAYGDIFGSSVDHAYETVELATNNQTALIRSGNGLGGSTLVNGGTWTRPHKAQVDSWETVFGNEGWNWDNVAAYSLQAERARAPNAKQIAAGHYFNASCHGVNGTVHAGPRDTGDDYSPIVKALMSAVEDRGVPTKKDFGCGDPHGVSMFPNTLHEDQVRSDAAREWLLPNYQRPNLQVLTGQYVGKVLLSQNGTTPRAVGVEFGTHKGNTHNVYAKHEVLLAAGSAVSPTILEYSGIGMKSILEPLGIDTVVDLPVGLNLQDQTTATVRSRITSAGAGQGQAAWFATFNETFGDYSEKAHELLNTKLEQWAEEAVARGGFHNTTALLIQYENYRDWIVNHNVAYSELFLDTAGVASFDVWDLLPFTRGYVHILDKDPYLHHFAYDPQYFLNELDLLGQAAATQLARNISNSGAMQTYFAGETIPGDNLAYDADLSAWTEYIPYHFRPNYHGVGTCSMMPKEMGGVVDNAARVYGVQGLRVIDGSIPPTQLSSHVMTVFYAMALKISDAILEDY

SEQ ID NO: 1518 - protein, 594 aa, Aspergillus tubingensis
SLVVSLAAALPHYIRSNGIEASLLTDPKEVAGRTVDYIIAGGGLTGLTTAARLTENPDITVLVIESGSYESDRGPIIEDLNAYGDIFGSSVDHAYETVELATNNQTALIRSGNGLGGSTLVNGGTWTRPHKAQVDSWETVFGNEGWNWDSVAAYSLQAERARAPNAKQIAAGHYFNASCHGINGTVHAGPRDTGDDYSPIVKALMSAVEDRGVPTKKDLGCGDPHGVSMFPNTLHEDQVRSDAAREWLLPNYQRPNLQVLTGQYVGKVLLSQNATTPRAVGVEFGTHKGNTHNVYAKHEVLLAAGSAVSPTILEYSGIGMKSILEPLGIDTVVDLPVGLNLQDQTTSTVRSRITSAGAGQGQAAWFATFNETFGDYAEKAHELLNTKLEQWAEEAVARGGFHNTTALLIQYENYRDWIVKDNVAYSELFLDTAGVASFDVWDLLPFTRGYVHILDKDPYLRHFAYDPQYFLNELDLLGQAAATQLARNISNSGAMQTYFAGETIPGDNLAYDADLSAWVEYIPYNFRPNYHGVGTCSMMPKEMGGVVDNAARVYGVQGLRVIDGSIPPTQMSSHVMTVFYAMALKIADAILADY

SEQ ID NO: 1519 - protein, 576 aa, Aspergillus niger
IEASLLTDPKEVAGRTVDYIIAGGGLTGLTTAARLTENPDITVLVIESGSYESDRGPIIEDLNAYGDIFGSSVDHAYETVELATNNQTALIRSGNGLGGSTLVNGGTWTRPHKAQVDSWETVFGNEGWNWDSVAAYSLQAERARAPNAKQIAAGHYFDPSCHGINGTVHAGPRDTGDDYSPIVKALMSAVEDRGVPTKKDLGCGDPHGVSMFPNTLHEDQVRSDAAREWLLPNYQRPNLQVLTGQYVGKVLLSQNATTPRAVGVEFGTHKGNTHNVYAKHEVLLAAGSAVSPTILEYSGIGMKSILEPLGIDTVVDLPVGLNLQDQTTSTVRSRITSAGAGQGQAAWFATFNETFGDYTEKAHELLNTKLEQWAEEAVARGGFHNTTALLIQYENYRDWIVKDNVAYSELFLDTAGVASFDVWDLLPFTRGYVHILDKDPYLRHFAYDPQYFLNELDLLGQAAATQLARNISNSGAMQTYFAGETIPGDNLAYDADLRAWVEYIPYNFRPNYHGVGTCSMMPKEMGGVVDNAARVYGVQGLRVIDGSIPPTQMSSHVMTVFYAMALKIADAVLADY

SEQ ID NO: 1520 - protein, 576 aa, Aspergillus niger
IEASLLTDPKEVAGRTVDYIIAGGGLTGLTTAARLTENPDITVLVIESGSYESDRGPIIEDLNAYGDIFGSSVDHAYETVELATNNQTALIRSGNGLGGSTLVNGGTWTRPHKAQVDSWETVFGNEGWNWDSVAAYSLQAERARAPNAKQIAAGHYFDPSCHGINGTVHAGPRDTGDDYSPIVKALMSAVEDRGVPTKKDLGCGDPHGVSMFPNTLHEDQVRSDAAREWLLPNYQRPNLQVLTGQYVGKVLLSQNATTPRAVGVEFGTHKGNTHNVYAKHEVLLAAGSAVSPTILEYSGIGMKSILEPLGIDTVVDLPVGLNLQDQTTSTVRSRITSAGAGQGQAAWFATFNETFGDYTEKAHELLNTKLEQWAEEAVARGGFHNTTALLIQYENYRDWIVKDNVAYSELFLDTAGEASFDVWDLLPFTRGYVHILDKDPYLRHFAYDPQYFLNELDLLGQAAATQLARNISNSGAMQTYFAGETIPGDNLAYDADLRAWVEYIPYNFRPNYHGVGTCSMMPKEMGGVVDNAARVYGVQGLRVIDGSIPPTQMSSHVMTVFYAMALKIADAVLADY

SEQ ID NO: 1521 - protein, 576 aa, Aspergillus niger
IEASLLTDPKEVAGRTYDYIIAGGGLTGLTVAARLTENPDITVLVIESGSYESDRGPIIEDLNAYGQIFGSSVDHAYETVELATNNRTALIRSGNGLGGSTLINGGTWTRPHKAQVDSWETVFGNEGWNWDSVAAYSLQAERARAPNAKQIAAGHYFNASCHGVNGTVHAGPRDTGDDYSPIVKALMSAVEDRGVPTKKDLGCGDPHGVSMFPNTLHEDQVRSDAAREWLLPNYQRPNLQVLTGQYVGKVLLSQNATTPRAVGVEFGTHKGNTHNVYAKHEVLLAAGSAVSPTILEYSGIGLKSILEPLGIDTVVDLPVGLNLQDQTTSTVRSRITSAGAGQGQAAWFATFNETFGDYAEKAHELLNTKLEQWAEEAVARGGFHNTTALLIQYENYRDWIVKDNVAYSELFLDTAGVASFDVWDLLPFTRGYVHILDKDPYLRHFAYDPQYFLNELDLLGQAAATQLARNISNSGAMQTYFAGETIPGDNLAYDADLSAWVEYIPYNFRPNYHGVGTCSMMPKEMGGVVDNAARVYGVQGLRVIDGSIPPTQMSSHVMTVFYAMALKIADAILADY

SEQ ID NO: 1522 - protein, 576 aa, Aspergillus niger
IEASLLKDPKEVAGRTYDYIIAGGGLTGLTVAARLTENPNITVLVIESGSYESDRGPIIEDLNAYGDIFGSSVDHAYETVELATNNRTALIRSGNGLGGSTLINGGTWTRPHKAQVDSWETVFGNEGWNWDSVAAYSLQAERARAPNAKQIAAGHYFNPSCHGLNGTVHAGPRDTGDDYSPIVKALMSAVEDRGVPTKKDLGCGDPHGVSMFPNTLHEDQVRSDAAREWLLPNYQRPNLQVLTGQYVGKVLLSQNATTPRAVGVEFGTHKGNTHNVYAKHEVLLAAGSAVSPTILEYSGIGMKSILEPLGIDTVVDLPVGLNLQDQTTSTVRSRITPAGAGQGQAAWFATFNETFGDYAEKAHELLNTKLEQWAEEAVARGGFHNTTALLIQYENYRDWIVKDNVAYSELFLDTAGVASFDVWDLLPFTRGYVHILDKDPYLRHFAYDPQYFLNELDLLGQAAATQLARNISNSGAMQTYFAGETIPGDNLAYDADLSAWVEYIPENFRPNYHGVGTCSMMPKEMGGVVDNAARVYGVQGLRVIDGSIPPTQMSSHVMTVFYAMALKIADAVLADY

SEQ ID NO: 1523 - protein, 597 aa, unidentified
LVSSLVVSLAAALPHYIRSNGIEASLLTDPKDVSGRTVDYIIAGGGLTGLTTAARLTENPNISVLVIESGSYESDRGPIIEDLNAYGDIFGSSVDHAYETVELATNNQTALIRSGNGLGGSTLVNGGTWTRPHKAQVDSWETVFGNEGWNWNNVAAYSLQAERARAPNAKQIAAGHYFNASCHGVNGTVHAGPRDTGDDYSPIVKALMSAVEDRGVPTKKDFGCGDPHGVSMFPNTLHEDQVRSDAAREWLLPNYQRPNLQVLTGQYVGKVLLSQNGTTPRAVGVEFGTHKGNTHNVYAKHEVLLAAGSAVSPTILEYSGIGMKSILEPLGIDTVVDLPVGLNLQDQTTATVRSRITSAGAGQGQAAWFATFNETFGDYSEKAHELLNTKLEQWAEEAVARGGFHNTTALLIQYENYRDWIVNHNVAYSELFLDTAGVASFDVWDLLPFTRGYVHILDKDPYLHHFAYDPQYFLNELDLLGQAAATQLARNISNSGAMQTYFAGETIPGDNLAYDADLSAWTEYIPYHFRPNYHGVGTCSMMPKEMGGVVDNAARVYGVQGLRVIDGSIPPTQMSSHVMTVFYAMALKISDAILEDY

SEQ ID NO: 1524 - protein, 597 aa, Aspergillus niger
LVSSLVVSLAAALPHYIRSNGIEASLLTDPKEVAGRTVDYIIAGGGLTGLTTAARLTENPDITVLVIESGSYESDRGPIIEDLNAYGDIFGSSVDHAYETVELATNNQTALIRSGNGLGGSTLVNGGAWTRPHKAQVDSWETVFGNEGWNWDSVAAYSLQAERARAPNAKQIAAGHYFNASCHGINGTVHAGPRDTGDDYSPIVKALMSAVEDRGVPTKKDLGCGDPHGVSMFPNTLHEDQVRSDAAREWLLPNYQRPNLQVLTGRYVGKVLLSQNATTPRAVGVEFGTHKGNTHNVYAKHEVLLAAGSAVSPTILEYSGIGMKSILEPLGIDTVVDLPVGLNLQDQATSTVRSRITSAGAGQGQAAWFATFNETFGDYAEKAHELLNTKLEQWAEEAVARGGFHNTTALLIQYENYRDWIVKDNVAYSELFLDTAGVASFHVWDLLPFTRGYVHILDKDPYLRHFAYDPQYFLNELDLLGQAAATQLARNISNSGAMQTYFAGETIPGDNLAYDADLSAWVEYIPYNFRPNYHGVGTCSMMPKEMGGVVDNAARVYGVQGLRVIDGSIPPTQMSSHSMTVFYAMALKVADAILADY

SEQ ID NO: 1525 - protein, 597 aa, Aspergillus niger
LVSSLVVSLAAALPHYIRSNGIEASLLTDPKEVAGRTVDYIIAGGGLTGLTTAARLTENPDITVLVIESGSYESDRGPIIEDLNAYGDIFGSSVDHAYETVELATNNQTALIRSGNGLGGSTLVNGGAWTRPHKAQVDSWETVFGNEGWNWDSVAAYSLQAERARAPNAKQIAAGHYFNASCHGINGTVHAGPRDTGDDYSPIVKALMSAVEDRGVPTKKDLGCGDPHGVSMFPNTLHEDQVRSDAAREWLLPNYQRPNLQVLTGRYVGKVLLSQNATTPRAVGVEFGTHKGNTHNVYAKHEVLLAAGSAVSPTILEYSGIGMKSILEPLGIDTVVDLPVGLNLQDQTASTVRSRITSAGAGQGQAAWFATFNETFGDYAEKAHELLNTKLEQWAEEAVARGGFHNTTALLIQYENYRDWIVKDNVAYSELFLDTAGVASFHVWDLLPFTRGYVHILDKDPYLRHFAYDPQYFLNELDLLGQAAATQLARNISNSGAMQTYFAGETIPGDNLAYDADLSAWVEYIPYNFRPNYHGVGTCSMMPKEMGGVVDNAARVYGVQGLRVIDGSIPPTQMSSHSMTVFYAMALKVADAILADY

SEQ ID NO: 1526 - protein, 589 aa, Aspergillus terreus
ALPKFPRDHLGVEPQLLTDPTVLANTTVDYIIAGGGLTGLTVAARLTEDPNIKVLVIESGYFESNRGPIIEDLNRYGEIFGTEVDHAFETVQLAVNNRTEIIRSGNGLGGSTLINGGTWTRPHKVQVDSWETVFGNQGWNWDDLLPYMLKIEKARPPNQRQIEAGHYFNPQCHGFNGSVHAGPRDTGEPYSPIMRALMDTVSAEGVPVRKDLCCGDPHGVSMFLNTLYPSQIRADAAREYLVPNYHRPNFQVLTGQRVGKVLLDKTVPGSPKAIGVEFGTHRTRKYEAYARREVLLAAGSTISPTILEYSGIGMKSVLDSVGIEQVVELPVGVNLQDQTTLHVESRITPAGAGQGQAAYFATFNETFGDFAPQAHELLNTKLDQWAEEVVARGGFHNATALRIQYENYRNWLVNNNVAFSELFLDTAGKISFDVWDLIPFTRGYVHIADKDPYLRRLYNNPQYFLNELDVLGEAAASKLARELSSKGAMAQYYAGETVPGFDQLPADASLRDWAKYVKDRFRPNYHAVSTCAMMSKELGGVVDSAARVYDVERLRVVDGSIPPTQVSSHVMTVFYGMAEKIAEAILQDY

SEQ ID NO: 1527 - protein, 576 aa, Aspergillus niger
IEASLLTDPKEVAGRTVDYIIAGGGLTGLVVAARLTENPDITVLVIESGSYESDRGPIIEDLNAYGKIFGSSVDHAYETVCLATNNRTALIRAGNGLGGSTLVNGGTWTRPHKAQVDSWETVFGNEGWNWDSVAAYSLQAERARAPNAKQIAAGHYFNASCHGINGTVHAGPRDTGDDYSPIVKALMSAVEDRGVPTKKDLGCGDPHGVSMFPNTLHEDQVRSDAAREWLLPNYQRPNLQVLTGQYVGKVLLSQNATTPRAVGVEFGTHKGNFHNVTAKHEVLLAAGSAVSPTILEYSGIGMKSILEPLGIKTVVDLPVGLNLQDQTTSTVRSRITSAGAGQGQAAWFATFNETFGDYTEKAHELLNTKLEQWAEEAVARGGFHNTTALLIQYENYRDWIVKDNVAYSELFLDTAGEASFDVWDLLPFTRGYVHILDKDPYLRHFAYDPQYFLNELDLLGQAAATQLARNISNSGAMQTYFAGETIPGDNLAYDANLRAWVEYIPYHFRPNYHGVGTCSMMPKEMGGVVDNAANVYGVQGLRVIDGSIPPTQMSSHVMTVFYAMALKIADAVLADY

SEQ ID NO: 1528 - protein, 576 aa, Synthetic construct
IEASLLTDPKEVAGRTVDYIIAGGGLTGLVVAARLTENPDITVLVIESGSYESDRGPIIEDLNAYGKIFGSSVDHAYETVCLATNNRTALIRAGNGLGGSTLVNGGTWTRPHKAQVDSWETVFGNEGWNWDSVAAYSLQAERARAPNAKQIAAGHYFNASCHGINGTVHAGPRDTGDDYSPIVKALMSAVEDRGVPTKKDLGCGDPHGVSMFPNTLHPDQVRSDAAREWLLPNYQRPNLQVLTGQYVGKVLLSQNATTPRAVGVEFGTHKGNFHNVTAKHEVLLAAGSAVSPTILEYSGIGMKSILEPLGIKTVVDLPVGLNLQDQTTSTVRSRITSAGAGQGQAAWFATFNETFGDYTEKAHELLNTKLEQWAEEAVARGGFHNTTALLIQYENYRDWIVKDNVAYSELFLDTAGEASFDVWDLLPFTRGYVHILDKDPYLRHFAYDPQYFLNELDLLGQAAATQLARNISNSGAMQTYFAGETIPGDNLAYDADLRAWVEYIPYHFRPNYHGVGTCSMMPKEMGGVVDNAARVYGVQGLRVIDGSIPPTQMSSHVMTVFYAMALKIADAVLADY

SEQ ID NO: 1529 - protein, 576 aa, Aspergillus niger
IEASLLTDPKEVAGRTVDYIIAGGGLTGLVVAARLTENPDITVLVIESGSYESDRGPIIEDLNAYGKIFGSSVDHAYETVCLATNNRTALIRAGNGLGGSTLVNGGTWTRPSKAQVDSWETVFGNEGWNWDSVAAYSLQAERARAPNAKQIAAGHYFNASCHGINGTVHAGPRDTGDDYSPIVKALMSAVEDRGVPTKKDLGCGDPHGVSMFPNTLHEDQVRSDAAREWLLPNYQRPNLQVLTGQYVGKVLLSQNATTPRAVGVEFGTHKGNFHNVTAKHEVLLAAGSAVSPTILEYSGIGMKSILEPLGIKTVVDLPVGLNLQDQTTSTVRSRITSAGAGQGQAAWFATFNETFGDYTEKAHELLNTKLEQWAEEAVARGGFHNTTALLIQYENYRDWIVKDNVAYSELFLDTAGEASFDVWDLLPFTRGYVHILDKDPYLRHFAYDPQYFLNELDLLGQAAATQLARNISNSGAMQTYFAGETIPGDNLAYDANLRAWVEYIPYHFRPNYHGVGTCSMMPKEMGGVVDNAARVYGVQGLRVIDGSIPPTQMSSHVMTVFYAMALKIADAVLADY

SEQ ID NO: 1530 - protein, 576 aa, Aspergillus niger
IEASLLTDPKEVAGRTVDYIIAGGGLTGLVVAARLTENPDITVLVIESGSYESDRGPIIEDLNAYGKIFGSSVDHAYETVCLATNNRTALIRAGNGLGGSTLVNGGTWTRPSKAQVDSWETVFGNEGWNWDSVAAYSLQAERARAPNAKQIAAGHYFNASCHGINGTVHAGPRDTGDDYSPIVKALMSAVEDRGVPTKKDLGCGDPHGVSMFPNTLHEDQVRSDAAREWLLPNYQRPNLSVLTGQYVGKVLLSQNATTPRAVGVEFGTHKGNFHNVTAKHEVLLAAGSAVSPTILEYSGIGMKSILEPLGIKTVVDLPVGLNLQDQTTSTVRSRITSAGAGQGQAAWFATFNETFGDYTEKAHELLNTKLEQWAEEAVARGGFHNTTALLIQYENYRDWIVKDNVAYSELFLDTAGEASFDVWDLLPFTRGYVHILDKDPYLRHFAYDPQYFLNELDLLGQAAATQLARNISNSGAMQTYFAGETIPGDNLAYDANLRAWVEYIPYHFRPNYHGVGTCSMMPKEMGGVVDNAARVYGVQGLRVIDGSIPPTQMSSHVMTVFYAMALKIADAVLADY

SEQ ID NO: 1531 - protein, 576 aa, Aspergillus niger
IEASLLTDPKEVAGRTVDYIIAGGGLTGLVVAARLTENPDITVLVIESGSYESDRGPIIEDLNAYGKIFGSSVDHAYETVCLATNNRTALIRAGNGLGGSTLVNGGTWTRPSKAQVDSWETVFGNEGWNWDSVAAYSLQAERARAPNAKQIAAGHYFNASCHGINGTVHAGPRDTGDDYSPIVKALMSAVEDRGVPTKKDLGCGDPHGVSMFPNTLHEDQVRSDAAREWLLPNYQRPNLQVLTGQYVGKVLLSQNATTPRAVGVEFGTHKGNFHNVTAKHEVLLAAGSAVSPTILEYSGIGMKSILEPLGIKTVVDLPVGLNLQDQTTSTVRSRITSAGAGQGQAAWFATFNETFGDYTEKAHELLNTKLEQWAEEAVARGGFHNTTALLIQYENYRDWIVKDNVAYSELFLDTAGEASFDVWDLLPFTRGYVHILDKDPYLRHFAYDPQYFLNELDLLGQAAATQLARNISNSGAMQTYFAGETIPGDNLAYDADLRAWVEYIPYHFRPNYHGVGTCSMMPKEMGGVVDNAARVYGVQGLRVIDGSIPPTQMSSHVMTVFYAMALKIADAVLADY

SEQ ID NO: 1532 - protein, 576 aa, Aspergillus niger
IEASLLTDPKEVAGRTVDYIIAGGGLTGLVVAARLTENPDITVLVIESGSYESDRGPIIEDLNAYGKIFGSSVDHAYETVCLATNNRTALIRAGNGLGGSTLVNGGTWTRPHKAQVDSWETVFGNEGWNWDSVAAYSLQAERARAPNAKQIAAGHYFNASCHGINGTVHAGPRDTGDDYSPIVKALMSAVEDRGVPTKKDLGCGDPHGVSMFPNTLHEDQVRSDAAREWLLPNYQRPNLSVLTGQYVGKVLLSQNATTPRAVGVEFGTHKGNFHNVTAKHEVLLAAGSAVSPTILEYSGIGMKSILEPLGIKTVVDLPVGLNLQDQTTSTVRSRITSAGAGQGQAAWFATFNETFGDYTEKAHELLNTKLEQWAEEAVARGGFHNTTALLIQYENYRDWIVKDNVAYSELFLDTAGEASFDVWDLLPFTRGYVHILDKDPYLRHFAYDPQYFLNELDLLGQAAATQLARNISNSGAMQTYFAGETIPGDNLAYDADLRAWVEYIPYHFRPNYHGVGTCSMMPKEMGGVVDNAANVYGVQGLRVIDGSIPPTQMSSHVMTVFYAMALKIADAVLADY

SEQ ID NO: 1533 - protein, 576 aa, Aspergillus niger
IEASLLTDPKEVAGRTVDYIIAGGGLTGLVVAARLTENPDITVLVIESGSYESDRGPIIEDLNAYGKIFGSSVDHAYETVCLATNNRTALIRAGNGLGGSTLVNGGTWTRPHKAQVDSWETVFGNEGWNWDSVAAYSLQAERARAPNAKQIAAGHYFNASCHGINGTVHAGPRDTGDDYSPIVKALMSAVEDRGVPTKKDLGCGDPHGVSMFPNTLHEDQVRSDAAREWLLPNYQRPNLQVLTGQYVGKVLLSQNATTPRAVGVEFGTHKGNFHNVTAKHEVLLAAGSAVSPTILEYSGIGMKSILEPLGIKTVVDLPVGLNLQDQTTSTVRSRITSAGAGQGQAAWFATFNETFGDYTEKAHELLNTKLEQWAEEAVARGGFHNTTALLIQYENYRDWIVKDNVAYSELFLDTAGEASFDVWDLLPFTRGYVHILDKDPYLRHFAYDPQYFLNELDLLGQAAATQLARNISNSGAMQTYFAGETIPGDNLAYDADLRAWVEYIPYHFRPNYHGVGTCSMMPKEMGGVVDNAANVYGVQGLRVIDGSIPPTQMSSHVMTVFYAMALKIADAVLADY

SEQ ID NO: 1534 - protein, 576 aa, Aspergillus niger
IEASLLTDPKEVAGRTVDYIIAGGGLTGLVVAARLTENPDITVLVIESGSYESDRGPIIEDLNAYGKIFGSSVDHAYETVCLATNNRTALIRAGNGLGGSTLVNGGTWTRPSKAQVDSWETVFGNEGWNWDSVAAYSLQAERARAPNAKQIAAGHYFNASCHGINGTVHAGPRDTGDDYSPIVKALMSAVEDRGVPTKKDLGCGDPHGVSMFPNTLHEDQVRSDAAREWLLPNYQRPNLSVLTGQYVGKVLLSQNATTPRAVGVEFGTHKGNFHNVTAKHEVLLAAGSAVSPTILEYSGIGMKSILEPLGIKTVVDLPVGLNLQDQTTSTVRSRITSAGAGQGQAAWFATFNETFGDYTEKAHELLNTKLEQWAEEAVARGGFHNTTALLIQYENYRDWIVKDNVAYSELFLDTAGEASFDVWDLLPFTRGYVHILDKDPYLRHFAYDPQYFLNELDLLGQAAATQLARNISNSGAMQTYFAGETIPGDNLAYDADLRAWVEYIPYHFRPNYHGVGTCSMMPKEMGGVVDNAARVYGVQGLRVIDGSIPPTQMSSHVMTVFYAMALKIADAVLADY

SEQ ID NO: 1535 - protein, 576 aa, Aspergillus niger
IEASLLTDPKEVAGRTVDYIIAGGGLTGLVVAARLTENPDITVLVIESGSYESDRGPIIEDLNAYGKIFGSSVDHAYETVCLATNNRTALIRAGNGLGGSTLVNGGTWTRPHKAQVDSWETVFGNEGWNWDSVAAYSLQAERARAPNAKQIAAGHYFNASCHGINGTVHAGPRDTGDDYSPIVKALMSAVEDRGVPTKKDLGCGDPHGVSMFPNTLHEDQVRSDAAREWLLPNYQRPNLSVLTGQYVGKVLLSQNATTPRAVGVEFGTHKGNFHNVTAKHEVLLAAGSAVSPTILEYSGIGMKSILEPLGIKTVVDLPVGLNLQDQTTSTVRSRITSAGAGQGQAAWFATFNETFGDYTEKAHELLNTKLEQWAEEAVARGGFHNTTALLIQYENYRDWIVKDNVAYSELFLDTAGEASFDVWDLLPFTRGYVHILDKDPYLRHFAYDPQYFLNELDLLGQAAATQLARNISNSGAMQTYFAGETIPGDNLAYDANLRAWVEYIPYHFRPNYHGVGTCSMMPKEMGGVVDNAANVYGVQGLRVIDGSIPPTQMSSHVMTVFYAMALKIADAVLADY

SEQ ID NO: 1536 - protein, 576 aa, Synthetic construct
IEASLLTDPKEVAGRTVDYIIAGGGLTGLVVAARLTENPDITVLVIESGSYESDRGPIIEDLNAYGKIFGSSVDHAYETVCLATNNRTALIRAGNGLGGSTLVNGGTWTRPHKAQVDSWETVFGNEGWNWDSVAAYSLQAERARAPNAKQIAAGHYFNASCHGINGTVHAGPRDTGDDYSPIVKALMSAVEDRGVPTKKDLGCGDPHGVSMFPNTLHEDQVRSDAAREWLLPNYQRPNLQVLTGQYVGKVLLSQNATTPRAVGVEFGTHKGNFHNVTAKHEVLLAAGSAVSPTILEYSGIGMKSILEPLGIKTVVDLPVGLNLQDQTTSTVRSRITSAGAGQGQAAWFATFNETFGDYTEKAHELLNTKLEQWAEEAVARGGFHNTTALLIQYENYRDWIVKDNVAYSELFLDTAGEASFDVWDLLPFTRGYVHILDKDPYLEHFAYDPQYFLNELDLLGQAAATQLARNISNSGAMQTYFAGETIPGDNLAYDADLRAWVEYIPYHFRPNYHGVGTCSMMPKEMGGVVDNAARVYGVQGLRVIDGSIPPTQMSSHVMTVFYAMALKIADAVLADY

SEQ ID NO: 1537 - protein, 576 aa, Synthetic construct
IEASLLTDPKEVAGRTVDYIIAGGGLTGLVVAARLTENPDITVLVIESGSYESDRGPIIEDLNAYGKIFGSSVDHAYETVCLATNNRTALIRAGNGLGGSTLVNGGTWTRPHKAQVDSWETVFGNEGWNWDSVAAYSLQAERARAPNAKQIAAGHYFNASCHGINGTVHAGPRDTGDDYSPIVKALMSAVEDRGVPTKKDLGCGDPHGVSMFPNTLHPDQVRSDAAREWLLPNYQRPNLSVLTGQYVGKVLLSQNATTPRAVGVEFGTHKGNFHNVTAKHEVLLAAGSAVSPTILEYSGIGMKSILEPLGIKTVVDLPVGLNLQDQTTSTVRSRITSAGAGQGQAAWFATFNETFGDYTEKAHELLNTKLEQWAEEAVARGGFHNTTALLIQYENYRDWIVKDNVAYSELFLDTAGEASFDVWDLLPFTRGYVHILDKDPYLRHFAYDPQYFLNELDLLGQAAATQLARNISNSGAMQTYFAGETIPGDNLAYDADLRAWVEYIPYHFRPNYHGVGTCSMMPKEMGGVVDNAARVYGVQGLRVIDGSIPPTQMSSHVMTVFYAMALKIADAVLADY

SEQ ID NO: 1538 - protein, 576 aa, Aspergillus niger
IEASLLTDPKEVAGRTVDYIIAGGGLTGLVVAARLTENPDITVLVIESGSYESDRGPIIEDLNAYGKIFGSSVDHAYETVCLATNNRTALIRAGNGLGGSTLVNGGTWTRPHKAQVDSWETVFGNEGWNWDSVAAYSLQAERARAPNAKQIAAGHYFNASCHGINGTVHAGPRDTGDDYSPIVKALMSAVEDRGVPTKKDLGCGDPHGVSMFPNTLHEDQVRSDAAREWLLPNYQRPNLQVLTGQYVGKVLLSQNATTPRAVGVEFGTHKGNFHNVTAKHEVLLAAGSAVSPTILEYSGIGMKSILEPLGIKTVVDLPVGLNLQDQTTSTVRSRITSAGAGQGQAAWFATFNETFGDYTEKAHELLNTKLEQWAEEAVARGGFHNTTALLIQYENYRDWIFKDNVAYSELFLDTAGEASFDVWDLLPFTRGYVHILDKDPYLRHFAYDPQYFLNELDLLGQAAATQLARNISNSGAMQTYFAGETIPGDNLAYDADLRAWVEYIPYHFRPNYHGVGTCSMMPKEMGGVVDNAARVYGVQGLRVIDGSIPPTQMSSHVMTVFYAMALKIADAVLADY

SEQ ID NO: 1539 - protein, 588 aa, Aspergillus cristatus
LPKFPRDHLGVEPQLLTDPTVLANTTVDYIIAGGGLTGLTVAARLTEDPNIKVLVIESGYFESNRGPIIEDLNRYGEIFGTEVDHAFETVQLAVNNRTEIIRSGNGLGGSTLINGGTWTRPHKVQVDSWETVFGNQGWNWDDLLPYMLKIEKARPPNQRQIEAGHYFNPQCHGFNGSVHAGPRDTGEPYSPIMRALMDTVSAEGVPVRKDLCCGDPHGVSMFLNTLYPSQIRADAAREYLVPNYHRPNFQVLTGQRVGKVLLDKTVPGSPKAIGVEFGTHRTRKYEAYARREVLLAAGSTISPTILEYSGIGMKSVLDSVGIEQVVELPVGVNLQDQTTLHVESRITPAGAGQGQAAYFATFNETFGDFAPQAHELLNTKLDQWAEEVVARGGFHNATALRIQYENYRNWLVNNNVAFSELFLDTAGKISFDVWDLIPFTRGYVHIADKDPYLRRLYNNPQYFLNELDVLGEAAASKLARELSSKGAMAQYYAGETVPGFDQLPADASLRDWAKYVKDRFRPNYHAVSTCAMMSKELGGVVDSAARVYDVERLRVVDGSIPPTQVSSHVMTVFYGMAEKIAEAILQDY

SEQ ID NO: 1540 - protein, 600 aa, Aspergillus niger
MKTILSSSLVVSMAAACTLHRSSGIEASLLTDPKAVAGRTVDDIIAGGGLTGLTTAARLTENPNITVLVIESGFYESDRGPLVEDLNAYGEIFGSEVDHAYQTVELATNNLTELIRSGNGLGGSTLVNGGTWTRPHKVQVDSWETVFGNEGWNWENVAAYSLEAERARAPNAKQVAAGHYFDPSCHGTNGTVHVGPRDTGDDYTPIIDALMTTVENMGVPTKKDLGCGDPHGVSMFPNTLHEDQVRSDAAREWLLPNYQRPNLQVLTGQLVGKVLLDQNNTVPKAVGVEFGTHKANTFNVYAKHEVLLAAGSAVSPQILEHSGIGMKSILDTVGIDTVVDLPVGLNLQDQTIVLVSSRITSAGAGQGQVAIFATFNETFGDYAPQAHALLDAKLEQWAEEGVARGGFHNATALRIQYENYRDWLVNHNVAYSELFLDTAGAVSFTIWDLIPFTRGYVHITDADPYLRLVSYDPQYFLNELDLYGQAAASQLARNLSNTDAMQTYFAGETTPGDNPAYDASLSDWAEYIKYNFRPNYHGVGTCSMMKKELGGVVDSSARVYGVDSLRVIDGSIPPTQVSSHVMTVFYAMALKISAAILADY

SEQ ID NO: 1541 - protein, 577 aa, Aspergillus niger
GIEASLLTDPKDVSGRTVDYIIAGGGLTGLTTAARLTENPNISVLVIESGSYESDRGPIIEDLNAYGDIFGSSVDHAYETVELATNNQTALIRSGNGLGGSTLVNGGTWTRPHKAQVDSWERVFGNEGWNWDNVAAYSLQAERARAPNAKQIAAGHYFNASCHGVNGTVHAGPRDTGDDYSPIVKALMSAVEDRGVPTKKDFGCGDPHGVSMFPNTLHEDQVRSDAAREWLLPNYQRPNLQVLTGQYVGKVLLSQNGTTPRAVGVEFGTHKGNTHNVYAKHEVLLAAGSAVSPTILEYSGIGMKSILEPLGIDTVVDLPVGLNLQDQTTATVRSRITSAGAGQGQAAWFATFNETFGDYSEKAHELLNTKLEQWAEEAVARGGFHNTTALLIQYENYRDWIVNHNVAYSELFLDTAGVASFDVWDLLPFTRGYVHILDKDPYLHHFAYDPQYFLNELDLLGQAAATQLARNISNSGAMQTYFAGETIPGDNLAYDADLSAWTEYIPYHFRPNYHGVGTCSMMPKEMGGVVDNAARVYGVQGLRVIDGSIPPTQMSSHVMTVFYAMALKISDAILEDY

SEQ ID NO: 1542 - protein, 577 aa, Aspergillus niger
GIEASLLTDPKDVSGRTYDYIIAGGGLTGLTTAARLTENPNISVLVIESGSYESDRGPIIEDLNAYGDIFGSSVDHAYETVELATNNQTALIRSGNGLGGSTLVNGGTWTRPHKAQVDSWETVFGNEGWNWDNVAAYSLQAERARAPNAKQIAAGHYFNASCHGVNGTVHAGPRDTGDDYSPIVKALMSAVEDRGVPTKKDFGCGDPHGVSMFPNTLHEDQVRSDAAREWLLPNYQRPNLQVLTGQYVGKVLLSQNGTTPRAVGVEFGTHKGNTHNVYAKHEVLLAAGSAVSPTILEYSGIGMKSILEPLGIDTVVDLPVGLNLQDQTTATVRSRITSAGAGQGQAAWFATFNETFGDYSEKAHELLNTKLEQWAEEAVARGGFHNTTALLIQYENYRDWIVNHNVAYSELFLDTAGVASFDVWDLLPFTRGYVHILDKDPYLHHFAYDPQYFLNELDLLGQAAATQLARNISNSGAMQTYFAGETIPGDNLAYDADLSAWTEYIPYHFRPNYHGVGTCSMMPKEMGGVVDNAARVYGVQGLRVIDGSIPPTQMSSHVMTVFYAMALKISDAILEDY

SEQ ID NO: 1543 - protein, 577 aa, Aspergillus niger
GIEASLLTDPKDVSGRTVDYIIAGGGLTGLTTAARLTENPNISVLVIESGSYESDRGPIIEDLNNYGDIFGSSVDHAYETVELATNNQTALIRSGNGLGGSTLVNGGTWTRPHKAQVDSWETVFGNEGWNWDNVAAYSLQAERARAPNAKQIAAGHYFNASCHGVNGTVHAGPRDTGDDYSPIVKALMSAVEDRGVPTKKDFGCGDPHGVSMFPNTLHEDQVRSDAAREWLLPNYQRPNLQVLTGQYVGKVLLSQNGTTPRAVGVEFGTHKGNTHNVYAKHEVLLAAGSAVSPTILEYSGIGMKSILEPLGIDTVVDLPVGLNLQDQTTATVRSRITSAGAGQGQAAWFATFNETFGDYSEKAHELLNTKLEQWAEEAVARGGFHNTTALLIQYENYRDWIVNHNVAYSELFLDTKGVASFDVWDLLPFTRGYVHILDKDPYLHHFAYDPQYFLNELDLLGQAAATQLARNISNSGAMQTYFAGETIPGDNLAYDADLSAWTEYIPYHFRPNYHGVGTCSMMPKEMGGVVDNAARVYGVQGLRVIDGSIPPTQMSSHVMTVFYAMALKISDAILEDY

SEQ ID NO: 1544 - protein, 577 aa, Aspergillus niger
GIEASLLTDPKDVSGRTVDYIIAGGGLTGLTTAARLTENPNISVLVIESGSYESDRGPIIEDLNNYGDIFGSSVDHAYETVELATNNQTALIRSGNGLGGSTLVNGGTWTRPHKAQVDSWETVFGNEGWNWDNVAAYSLQAERARAPNAKQIAAGHYFNASCHGVNGTVHAGPRDTGDDYSPIVKALMSAVEDRGVPTKKDFGCGDPHGVSMFPNTLHEDQVRSDAAREWLLPNYQRPNLQVLTGQYVGKVLLSQNGTTPRAVGVEFGTHKGNTHNVYAKHEVLLAAGSAVSPTILEYSGIGMKSILEPLGIDTVVDLPVGLNLQDQTTATVRSRITSAGAGQGQAAWFATFNETFGDYSEKAHELLNTKLEQWAEEAVARGGFHNTTALLIQYENYRDWIVNHNVAYSELFLDTNGVASFDVWDLLPFTRGYVHILDKDPYLHHFAYDPQYFLNELDLLGQAAATQLARNISNSGAMQTYFAGETIPGDNLAYDADLSAWTEYIPYHFRPNYHGVGTCSMMPKEMGGVVDNAARVYGVQGLRVIDGSIPPTQMSSHVMTVFYAMALKISDAILEDY

SEQ ID NO: 1545 - protein, 577 aa, Aspergillus niger
GIEASLLTDPKDVSGRTVDYIIAGGGLTGLTTAARLTENPNISVLVIESGSYESDRGPIIEDLNAYGDIFGSSVDHAYETVELATNNQTALIRSGNGLGGSTLVNGGTWTRPHKAQVDSWETVFGNEGWNWDNVAAYSLQAERARAPNAKQIAAGHYFNASCHGVNGTIHAGPRDTGDDYSPIVKALMSAVEDRGVPTKKDFGCGDPHGVSMFPNTLHEDQVRSDAAREWLLPNYQRPNLQVLTGQYVGKVLLSQNGTTPRAVGVEFGTHKGNTHNVYAKHEVLLAAGSAVSPTILEYSGIGMKSILEPLGIDTVVDLPVGLNLQDQTTATVRSRITSAGAGQGQAAWFATFNETFGDYSEKAHELLNTKLEQWAEEAVARGGFHNTTALLIQYENYRDWIVNHNVAYSELFLDTAGVASFDVWDLLPFTRGYVHILDKDPYLHHFAYDPQYFLNELDLLGQAAATQLARNISNSGAMQTYFAGETIPGDNLAYDADLSAWTEYIPYHFRPNYHGVGTCSMMPKEMGGVVDNAARVYGVQGLRVIDGSIPPTQMSSHVMTVFYAMALKISDAILEDY

SEQ ID NO: 1546 - protein, 577 aa, Aspergillus niger
GIEASLLTDPKDVSGRTVDYIIAGGGLTGLTTAARLTENPNISVLVIESGSYESDRGPIIEDLNAYGDIFGSSVDHAYETVELATNNQTALIRSGNGLGGSTLVNGGTWTRPHKAQVDSWETVFGNEGWNWDNVAAYSLQAERARAPNAKQIAAGHYFNASCHGVNGTVHAGPRDTGDDYSPIVKALMSAVEDRGVPTKKDFGCGDPHGVSMFPNTLHEDQVRSDAAREWLLPNYQRPNLQVLTGQYVGKVLLSQNGTTPRAVGVEFGTHKGNTHNVYAKHEVLLAAGSAVSPTILEYSGIGMKSILEPLGIDTVVDLPVGLNLQDQTTATVRSRITSAGAGQGQAAWFATFNETFGDYSEKAHELLNTKLEQWAEEAVARGGFHNTTALLIQYENYRDWIVNHNVAYSELFLDTRGVASFDVWDLLPFTRGYVHILDKDPYLHHFAYDPQYFLNELDLLGQAAATQLARNISNSGAMQTYFAGETIPGDNLAYDADLSAWTEYIPYHFRPNYHGVGTCSMMPKEMGGVVDNAARVYGVQGLRVIDGSIPPTQMSSHVMTVFYAMALKISDAILEDY

SEQ ID NO: 1547 - protein, 577 aa, Aspergillus niger
GIEASLLTDPKDVSGRTVDYIIAGGGLTGLTTAARLTENPNISVLVIESGSYESDRGPIIEDLNAYGDIFGSSVDHAYETVELATNNQTALIRSGNGLGGSTLVNGGTWTRPHKAQVDSWETVFGNEGWNWDNVAAYSLQAERARAPNAKQIAAGHYFNASCHGVNGTVHAGPRDTGDDYSPIVKALMSAVEDRGVPTKKDFGCGDPHGVSMFPNTLHEDQVRSDAAREWLLPNYQRPNLQVLTGQYVGKVLLSQNGTTPRAVGVEFGTHKGNTHNVYAKHEVLLAAGSAVSPTILEYSGIGMKSILEPLGIDTVVDLPVGLNLQDQTTATVRSRITSAGAGQGQAAWFATFNETFGDYSEKAHELLNTKLEQWAEEAVARGGFHNTTALLIQYENYRDWIVNHNVPYSELFLDTAGVASFDVWDLLPFTRGYVHILDKDPYLHHFAYDPQYFLNELDLLGQAAATQLARNISNSGAMQTYFAGETIPGDNLAYDADLSAWTEYIPYHFRPNYHGVGTCSMMPKEMGGVVDNAARVYGVQGLRVIDGSIPPTQMSSHVMTVFYAMALKISDAILEDY

SEQ ID NO: 1548 - protein, 577 aa, Aspergillus niger
GIEASLLTDPKDVSGRTVDYIIAGGGLTGLTTAARLTENPNISVLVIESGSYESDRGPIIEDLNAYGDIFGSSVDHAYETVELATNNQTALIRSGNGLGGSTLVNGGTWTRPHKAQIDSWETVFGNEGWNWDNVAAYSLQAERARAPNAKQIAAGHYFNASCHGVNGTVHAGPRDTGDDYSPIVKALMSAVEDRGVPTKKDFGCGDPHGVSMFPNTLHEDQVRSDAAREWLLPNYQRPNLQVLTGQYVGKVLLSQNGTTPRAVGVEFGTHKGNTHNVYAKHEVLLAAGSAVSPTILEYSGIGMKSILEPLGIDTVVDLPVGLNLQDQTTATVRSRITSAGAGQGQAAWFATFNETFGDYSEKAHELLNTKLEQWAEEAVARGGFHNTTALLIQYENYRDWIVNHNVAYSELFLDTAGVASFDVWDLLPFTRGYVHILDKDPYLHHFAYDPQYFLNELDLLGQAAATQLARNISNSGAMQTYFAGETIPGDNLAYDADLSAWTEYIPYHFRPNYHGVGTCSMMPKEMGGVVDNAARVYGVQGLRVIDGSIPPTQMSSHVMTVFYAMALKISDAILEDY

SEQ ID NO: 1549 - protein, 577 aa, Aspergillus niger
GIEASLLTDPKDVSGRTVDYIIAGGGLTGLTTAARLTENPNISVLVIESGSYESDRGPIIEDLNAYGDIFGSSVDHAYETVELATNNQTALIRSGNGLGGSTLVNGGTWTRPHKAQVDSWETVFGNEGWNWDNVAAYSLQAERARAPNAKQIAAGHYFNASCHGVNGTVHAGPRDTGDDYSPIVKALMSAVEDRGVPTKEDFGCGDPHGVSMFPNTLHEDQVRSDAAREWLLPNYQRPNLQVLTGQYVGKVLLSQNGTTPRAVGVEFGTHKGNTHNVYAKHEVLLAAGSAVSPTILEYSGIGMKSILEPLGIDTVVDLPVGLNLQDQTTATVRSRITSAGAGQGQAAWFATFNETFGDYSEKAHELLNTKLEQWAEEAVARGGFHNTTALLIQYENYRDWIVNHNVAYSELFLDTAGVASFDVWDLLPFTRGYVHILDKDPYLHHFAYDPQYFLNELDLLGQAAATQLARNISNSGAMQTYFAGETIPGDNLAYDADLSAWTEYIPYHFRPNYHGVGTCSMMPKEMGGVVDNAARVYGVQGLRVIDGSIPPTQMSSHVMTVFYAMALKISDAILEDY

SEQ ID NO: 1550 - protein, 577 aa, Aspergillus niger
GIEASLLTDPKDVSGRTVDYIIAGGGLTGLTTAARLTENPNISVLVIESGSYESDRGPIIEDLNAYGDIFGSSVDHAYETVELATNNQTALIRSGNGLGGSTLVNGGTWTRPHKAQVDSWETVFGNEGWNWDNVAAYSLQAERARAPNAKQIAAGHYFNASCHGVNGTVHAGPRDTGDDYSPIVKALMSAVEDRGVPTKKDFGCGDPHGVSMFPNTLHEDQVRSDAAREWLLPNYQRPNLQVLTGQYVGKVLLSQNGTTPRAVGVEFGTHKGNTHNVYAKHEVLLAAGSAVSPTILEYSGIGDKSILEPLGIDTVVDLPVGLNLQDQTTATVRSRITSAGAGQGQAAWFATFNETFGDYSEKAHELLNTKLEQWAEEAVARGGFHNTTALLIQYENYRDWIVNHNVAYSELFLDTAGVASFDVWDLLPFTRGYVHILDKDPYLHHFAYDPQYFLNELDLLGQAAATQLARNISNSGAMQTYFAGETIPGDNLAYDADLSAWTEYIPYHFRPNYHGVGTCSMMPKEMGGVVDNAARVYGVQGLRVIDGSIPPTQMSSHVMTVFYAMALKISDAILEDY

SEQ ID NO: 1551 - protein, 577 aa, Aspergillus niger
GIEASLLTDPKDVSGRTVDYIIAGGGLTGLTTAARLTENPNISVLVIESGSYESDRGPIIEDLNNYGDIFGSSVDHAYETVELATNNQTALIRSGNGLGGSTLVNGGTWTRPHKAQVDSWETVFGNEGWNWDNVAAYSLQAERARAPNAKQIAAGHYFNASCHGVNGTVHAGPRDTGDDYSPIVKALMSAVEDRGVPTKKDFGCGDPHGVSMFPNTLHEDQVRSDAAREWLLPNYQRPNLQVLTGQYVGKVLLSQNGTTPRAVGVEFGTHKGNTHNVYAKHEVLLAAGSAVSPTILEYSGIGMKSILEPLGIDTVVDLPVGLNLQDQTTATVRSRITSAGAGQGQAAWFATFNETFGDYSEKAHELLNTKLEQWAEEAVARGGFHNTTALLIQYENYRDWIVNHNVAYSELFLDTRGVASFDVWDLLPFTRGYVHILDKDPYLHHFAYDPQYFLNELDLLGQAAATQLARNISNSGAMQTYFAGETIPGDNLAYDADLSAWTEYIPYHFRPNYHGVGTCSMMPKEMGGVVDNAARVYGVQGLRVIDGSIPPTQMSSHVMTVFYAMALKISDAILEDY

SEQ ID NO: 1552 - protein, 577 aa, Aspergillus niger
GIEASLLTDPKDVSGRTVDYIIAGGGLTGLTTAARLTENPNISVLVIESGSYESDRGPIIEDLNAYGDIFGSSVDHAYETVELATNNQTALIRSGNGLGGSTLVNGGTWTRPHKAQVDSWETVFGNEGWNWDNVAAYSLQAERARAPNAKQIAAGHYFNASCHGVNGTVHAGPRDTGDDYSPIVKALMSAVEDRGVPTKKDFGCGDPHGVSMFPNTLHEDQVRSDAAREWLLPNYQRPNLQVLTGQYVGKVLLSQNGTTPRAVGVEFGTHKGNTHNVYAKHEVLLAAGSAVSPTILEYSGIGMKDILEPLGIDTVVDLPVGLNLQDQTTATVRSRITSAGAGQGQAAWFATFNETFGDYSEKAHELLNTKLEQWAEEAVARGGFHNTTALLIQYENYRDWIVNHNVAYSELFLDTAGVASFDVWDLLPFTRGYVHILDKDPYLHHFAYDPQYFLNELDLLGQAAATQLARNISNSGAMQTYFAGETIPGDNLAYDADLSAWTEYIPYHFRPNYHGVGTCSMMPKEMGGVVDNAARVYGVQGLRVIDGSIPPTQMSSHVMTVFYAMALKISDAILEDY

SEQ ID NO: 1553 - protein, 577 aa, Aspergillus niger
GIEASLLTDPKDVSGRTVDYIIAGGGLTGLTTAARLTENPNISVLVIESGSYESDRGPIIEDLNAYGDIFGSSVDHAYETVELATNNQTALIRSGNGLGGSTLVNGGTWTRPHKAQVDSWETVFGNEGWNWDNVAAYSLQAERARAPNAKQIAAGHYFNASCHGVNGTVHAGPRDTGDDYSPIVKALMSAVEDRGVPTKDDFGCGDPHGVSMFPNTLHEDQVRSDAAREWLLPNYQRPNLQVLTGQYVGKVLLSQNGTTPRAVGVEFGTHKGNTHNVYAKHEVLLAAGSAVSPTILEYSGIGMKSILEPLGIDTVVDLPVGLNLQDQTTATVRSRITSAGAGQGQAAWFATFNETFGDYSEKAHELLNTKLEQWAEEAVARGGFHNTTALLIQYENYRDWIVNHNVAYSELFLDTAGVASFDVWDLLPFTRGYVHILDKDPYLHHFAYDPQYFLNELDLLGQAAATQLARNISNSGAMQTYFAGETIPGDNLAYDADLSAWTEYIPYHFRPNYHGVGTCSMMPKEMGGVVDNAARVYGVQGLRVIDGSIPPTQMSSHVMTVFYAMALKISDAILEDY

SEQ ID NO: 1554 - protein, 577 aa, Aspergillus niger
GIEASLLTDPKDVSGRTVDYIIAGGGLTGLTTAARLTENPNISVLVIESGSYESDRGPIIEDLNAYGDIFGSSVDHAYETVELATNNQTALIRSGNGLGGSTLVNGGTWTRPHKAQVDSWETVFGNEGWNWDNVAAYSLQAERARAPNAKQIAAGHYFNASCHGVNGTVHAGPRDTGDDYSPIVKALMSAVEDRGVPTKADFGCGDPHGVSMFPNTLHEDQVRSDAAREWLLPNYQRPNLQVLTGQYVGKVLLSQNGTTPRAVGVEFGTHKGNTHNVYAKHEVLLAAGSAVSPTILEYSGIGMKSILEPLGIDTVVDLPVGLNLQDQTTATVRSRITSAGAGQGQAAWFATFNETFGDYSEKAHELLNTKLEQWAEEAVARGGFHNTTALLIQYENYRDWIVNHNVAYSELFLDTAGVASFDVWDLLPFTRGYVHILDKDPYLHHFAYDPQYFLNELDLLGQAAATQLARNISNSGAMQTYFAGETIPGDNLAYDADLSAWTEYIPYHFRPNYHGVGTCSMMPKEMGGVVDNAARVYGVQGLRVIDGSIPPTQMSSHVMTVFYAMALKISDAILEDY

SEQ ID NO: 1555 - protein, 577 aa, Aspergillus niger
GIEASLLTDPKDVSGRTVDYIIAGGGLTGLTTAARLTENPNISVLVIESGSYESDRGPIIEDLNAYGDIFGSSVDHAYETVELATNNQTALIRSGNGLGGSTLVNGGTWTRPHKAQVDSWETVFGNEGWNWDNVAAYSLQAERARAPNAKQIAAGHYFNASCHGVNGTVHAGPRDTGDDYSPIVKALMSAVEDRGVPTKKDFGCGDPHGVSMFPNTLHEDQVRSDAAREWLLPNYQRPNLQVLTGQYVGKVLLSQNGTTPRAVGVEFGTHKGNTHNVYAKHEVLLAAGSAVSPTILEYSGIGMKSILEPLGIDTVVDLPVGLNLQDQTTATVRSRITSAGAGQGQAAWFATFNETFGDYSEKAHELLNTKLEQWAEEAVARGGFHNTEALLIQYENYRDWIVNHNVAYSELFLDTAGVASFDVWDLLPFTRGYVHILDKDPYLHHFAYDPQYFLNELDLLGQAAATQLARNISNSGAMQTYFAGETIPGDNLAYDADLSAWTEYIPYHFRPNYHGVGTCSMMPKEMGGVVDNAARVYGVQGLRVIDGSIPPTQMSSHVMTVFYAMALKISDAILEDY

SEQ ID NO: 1556 - protein, 577 aa, Aspergillus niger
GIEASLLTDPKEVAGRTVDYIIAGGGLTGLVVAARLTENPDITVLVIESGSYESDRGPIIEDLNAYGKIFGSSVDHAYETVCLATNNRTALIRAGNGLGGSTLVNGGTWTRPSKAQVDSWETVFGNEGWNWDSVAAYSLQAERARAPNAKQIAAGHYFNASCHGINGTVHAGPRDTGDDYSPIVKALMSAVEDRGVPTKKDLGCGDPHGVSMFPNTLHEDQVRSDAAREWLLPNYQRPNLSVLTGQYVGKVLLSQNATTPRAVGVEFGTHKGNFHNVTAKHEVLLAAGSAVSPTILEYSGIGMKSILEPLGIKTVVDLPVGLNLQDQTTSTVRSRITSAGAGQGQAAWFATFNETFGDYTEKAHELLNTKLEQWAEEAVARGGFHNTTALLIQYENYRDWIVKDNVAYSELFLDTAGEASFDVWDLLPFTRGYVHILDKDPYLRHFAYDPQYFLNELDLLGQAAATQLARNISNSGAMQTYFAGETIPGDNLAYDADLRAWVEYIPYHFRPNYHGVGTCSMMPKEMGGVVDNAARVYGVQGLRVIDGSIPPTQMSSHVMTVFYAMALKIADAVLADY

SEQ ID NO: 1557 - protein, 577 aa, Aspergillus niger
GIEASLLTDPKDVSGRTVDYIIAGGGLTGLTTAARLTENPNISVLVIESGSYESDRGPIIEDLNAYGDIFGSSVDHAYETVELATNNQTALIRSGNGLGGSTLVNGGTWTRPHKAQVDSWETVFGNEGWNWDNVAAYSLQAERARAPNAKQIAAGHYFNASCHGVNGTVHAGPRDTGDDYSPIVKALMSAVEDRGVPTKKDFGCGDPHGVSMFPNTLHEDQVRSDAAREWLLPNYQRPNLQVLTGQYVGKVLLSQNGTTPRAVGVEFGTHKGNTHNVYAKHEVLLAAGSAVSPTILEYSGIGMKSILEPLGIDTVVDLPVGLNLQDQTTATVRSRITSAGAGQGQAAWFATFNETFGDYSEKAHELLNTKLEQWAEEAVARGGFHNTTALLIQYENYRDWIVNHNVAYSELFLDTNGVASFDVWDLLPFTRGYVHILDKDPYLHHFAYDPQYFLNELDLLGQAAATQLARNISNSGAMQTYFAGETIPGDNLAYDADLSAWTEYIPYHFRPNYHGVGTCSMMPKEMGGVVDNAARVYGVQGLRVIDGSIPPTQMSSHVMTVFYAMALKISDAILEDY

SEQ ID NO: 1558 - protein, 577 aa, Aspergillus niger
GIEASLLTDPKDVSGRTVDYIIAGGGLTGLTTAARLTENPNISVLVIESGSYESDRGPIIEDLNAYGDIFGSSVDHAYETVELATNNQTALIRSGNGLGGSTLVNGGTWTRPHKAQVDSWETVFGNEGWNWDNVAAYSLQAERARAPNAKQIAAGHYFNASCHGVNGTVHAGPRDTGDDYSPIVKALMSAVEDRGVPTKKDFGCGDPHGVSMFPNTLHEDQVRSDAAREWLLPNYQRPNLQVLTGQYVGKVLLSQNGTTPRAVGVEFGTHKGNTHNVYAKHEVLLAAGSAVSPTILEYSGIGMKSILEPLGIDTVVDLPVGLNLQDQTTATVRSRITSDGAGQGQAAWFATFNETFGDYSEKAHELLNTKLEQWAEEAVARGGFHNTTALLIQYENYRDWIVNHNVAYSELFLDTAGVASFDVWDLLPFTRGYVHILDKDPYLHHFAYDPQYFLNELDLLGQAAATQLARNISNSGAMQTYFAGETIPGDNLAYDADLSAWTEYIPYHFRPNYHGVGTCSMMPKEMGGVVDNAARVYGVQGLRVIDGSIPPTQMSSHVMTVFYAMALKISDAILEDY

SEQ ID NO: 1559 - protein, 577 aa, Aspergillus niger
GIEASLLTDPKDVSGRTVDYIIAGGGLTGLTTAARLTENPNISVLVIESGSYESDRGPIIEDLNMYGDIFGSSVDHAYETVELATNNQTALIRSGNGLGGSTLVNGGTWTRPHKAQVDSWETVFGNEGWNWDNVAAYSLQAERARAPNAKQIAAGHYFNASCHGVNGTVHAGPRDTGDDYSPIVKALMSAVEDRGVPTKKDFGCGDPHGVSMFPNTLHEDQVRSDAAREWLLPNYQRPNLQVLTGQYVGKVLLSQNGTTPRAVGVEFGTHKGNTHNVYAKHEVLLAAGSAVSPTILEYSGIGMKSILEPLGIDTVVDLPVGLNLQDQTTATVRSRITSAGAGQGQAAWFATFNETFGDYSEKAHELLNTKLEQWAEEAVARGGFHNTTALLIQYENYRDWIVNHNVAYSELFLDTNGVASFDVWDLLPFTRGYVHILDKDPYLHHFAYDPQYFLNELDLLGQAAATQLARNISNSGAMQTYFAGETIPGDNLAYDADLSAWTEYIPYHFRPNYHGVGTCSMMPKEMGGVVDNAARVYGVQGLRVIDGSIPPTQMSSHVMTVFYAMALKISDAILEDY

SEQ ID NO: 1560 - protein, 577 aa, Aspergillus niger
GIEASLLTDPKDVSGRTVDYIIAGGGLTGLTTAARLTENPNISVLVIESGSYESDRGPIIEDLNAYGDIFGSSVDHAYETVELATNNQTALIRSGNGLGGSTLVNGGTWTRPHKAQVDSWETVFGNEGWNWDNVAAYSLQAERARAPNAKQIAAGHYFNASCHGVNGTVHAGPRDTGDDYSPIVKALMSAVEDRGVPTKKDFGCGDPHGVSMFPNTLHEDQVRSDAAREWLLPNYQRPNLQVLTGQYVGKVLLSQNGTTPRAVGVEFGTHKGNTHNVYAKHEVLLAAGSAVSPTILEYSGIGMKSILEPLGIDTVVDLPVGLNLQDQTTATVRSRITSAGAGQGQAAWFATFNETFGDYSEKAHELLNTKLEQWAEEAVARGGFHNTTALLIQYENYRDWIFNHNVAYSELFLDTAGVASFDVWDLLPFTRGYVHILDKDPYLHHFAYDPQYFLNELDLLGQAAATQLARNISNSGAMQTYFAGETIPGDNLAYDADLSAWTEYIPYHFRPNYHGVGTCSMMPKEMGGVVDNAARVYGVQGLRVIDGSIPPTQMSSHVMTVFYAMALKISDAILEDY

SEQ ID NO: 1561 - protein, 577 aa, Aspergillus niger
GIEASLLTDPKDVSGRTVDYIIAGGGLTGLTTAARLTENPNISVLVIESGSYESDRGPIIEDLNKYGDIFGSSVDHAYETVELATNNQTALIRSGNGLGGSTLVNGGTWTRPHKAQVDSWETVFGNEGWNWDNVAAYSLQAERARAPNAKQIAAGHYFNASCHGVNGTVHAGPRDTGDDYSPIVKALMSAVEDRGVPTKKDFGCGDPHGVSMFPNTLHEDQVRSDAAREWLLPNYQRPNLQVLTGQYVGKVLLSQNGTTPRAVGVEFGTHKGNTHNVYAKHEVLLAAGSAVSPTILEYSGIGMKSILEPLGIDTVVDLPVGLNLQDQTTATVRSRITSAGAGQGQAAWFATFNETFGDYSEKAHELLNTKLEQWAEEAVARGGFHNTTALLIQYENYRDWIVNHNVAYSELFLDTNGVASFDVWDLLPFTRGYVHILDKDPYLHHFAYDPQYFLNELDLLGQAAATQLARNISNSGAMQTYFAGETIPGDNLAYDADLSAWTEYIPYHFRPNYHGVGTCSMMPKEMGGVVDNAARVYGVQGLRVIDGSIPPTQMSSHVMTVFYAMALKISDAILEDY

SEQ ID NO: 1562 - protein, 577 aa, Aspergillus niger
GIEASLLTDPKDVSGRTVDYIIAGGGLTGLTTAARLTENPNISVLVIESGSYESDRGPIIEDLNQYGDIFGSSVDHAYETVELATNNQTALIRSGNGLGGSTLVNGGTWTRPHKAQVDSWETVFGNEGWNWDNVAAYSLQAERARAPNAKQIAAGHYFNASCHGVNGTVHAGPRDTGDDYSPIVKALMSAVEDRGVPTKKDFGCGDPHGVSMFPNTLHEDQVRSDAAREWLLPNYQRPNLQVLTGQYVGKVLLSQNGTTPRAVGVEFGTHKGNTHNVYAKHEVLLAAGSAVSPTILEYSGIGMKSILEPLGIDTVVDLPVGLNLQDQTTATVRSRITSAGAGQGQAAWFATFNETFGDYSEKAHELLNTKLEQWAEEAVARGGFHNTTALLIQYENYRDWIVNHNVAYSELFLDTNGVASFDVWDLLPFTRGYVHILDKDPYLHHFAYDPQYFLNELDLLGQAAATQLARNISNSGAMQTYFAGETIPGDNLAYDADLSAWTEYIPYHFRPNYHGVGTCSMMPKEMGGVVDNAARVYGVQGLRVIDGSIPPTQMSSHVMTVFYAMALKISDAILEDY

SEQ ID NO: 1563 - protein, 577 aa, Aspergillus niger
GIEASLLTDPKDVSGRTVDYIIAGGGLTGLTTAARLTENPNISVLVIESGSYESDRGPIIEDLNAYGDIFGSSVDHAYETVELATNNQTALIRSGNGLGGSTLVNGGTWTRPHKAQVDSWETVFGNEGWNWDNVAAYSLQAERARAPNAKQIAAGHYFNASCHGVNGTVHAGPRDTGDDYSPIVKALMSAVEDRGVPTKKDFGCGDPHGVSMFPNTLHEDQVRSDAAREWLLPNYQRPNLQVLTGQYVGKVLLSQNGTTPRAVGVEFGTHKGNTHNVYAKHEVLLAAGSAVSPTILEYSGIGMKSILEPLGIDTVVDLPVGLNLQDQTTATVRSRITSAGAGQGQAAWFATFNETFGPYSEKAHELLNTKLEQWAEEAVARGGFHNTTALLIQYENYRDWIVNHNVAYSELFLDTAGVASFDVWDLLPFTRGYVHILDKDPYLHHFAYDPQYFLNELDLLGQAAATQLARNISNSGAMQTYFAGETIPGDNLAYDADLSAWTEYIPYHFRPNYHGVGTCSMMPKEMGGVVDNAARVYGVQGLRVIDGSIPPTQMSSHVMTVFYAMALKISDAILEDY

SEQ ID NO: 1564 - protein, 577 aa, Aspergillus niger
GIEASLLTDPKEVAGRTVDYIIAGGGLTGLVVAARLTENPDITVLVIESGSYESDRGPIIEDLNAYGKIFGSSVDHAYETVCLATNNRTALIRAGNGLGGSTLVNGGTWTRPHKAQVDSWETVFGNEGWNWDSVAAYSLQAERARAPNAKQIAAGHYFNASCHGINGTVHAGPRDTGDDYSPIVKALMSAVEDRGVPTKKDLGCGDPHGVSMFPNTLHEDQVRSDAAREWLLPNYQRPNLSVLTGQYVGKVLLSQNATTPRAVGVEFGTHKGNFHNVTAKHEVLLAAGSAVSPTILEYSGIGMKSILEPLGIKTVVDLPVGLNLQDQTTSTVRSRITSAGAGQGQAAWFATFNETFGDYTEKAHELLNTKLEQWAEEAVARGGFHNTTALLIQYENYRDWIVKDNVAYSELFLDTAGEASFDVWDLLPFTRGYVHILDKDPYLRHFAYDPQYFLNELDLLGQAAATQLARNISNSGAMQTYFAGETIPGDNLAYDANLRAWVEYIPYHFRPNYHGVGTCSMMPKEMGGVVDNAANVYGVQGLRVIDGSIPPTQMSSHVMTVFYAMALKIADAVLADY

SEQ ID NO: 1565 - protein, 577 aa, Aspergillus niger
GIEASLLTDPKDVSGRTVDYIIAGGGLTGLTTAARLTENPNISVLVIESGSYESDRGPIIEDLNAYGDIFGSSVDHAYETVELATNNQTALIRSGNGLGGSTLVNGGTWTRPHKAQVDSWETVFGNEGWNWDNVAAYSLQAERARAPNAKQIAAGHYFNASCHGVNGTVHAGPRDTGDDYSPIVKALMSAVEDRGVPTKKDFGCGDPHGVSMFPNTLHEDQVRSDAAREWLLPNYQRPNLQVLTGQYVGKVLLSQNGTTPRAVGVEFGTHKGNTHNVYAKHEVLLAAGSAVSPTILEYSGIGMKSILEPLGIDTVVDLPVGLNLQDQTTATVRSRITSAGAGQGQAAWFATFNETFGDYSEKAHELLNTKLEQWAEEAVARGGFHNTTALLIQYENYRDWIVNHNVAYSELFLDTAGVASFDVWDLLPFTRGYVHILDKDPYLHHFAYDPQYFLNDLDLLGQAAATQLARNISNSGAMQTYFAGETIPGDNLAYDADLSAWTEYIPYHFRPNYHGVGTCSMMPKEMGGVVDNAARVYGVQGLRVIDGSIPPTQMSSHVMTVFYAMALKISDAILEDY

SEQ ID NO: 1566 - protein, 577 aa, Aspergillus niger
GIEASLLTDPKDVSGRTVDYIIAGGGLTGLTTAARLTENPNISVLVIESGSYESDRGPIIEDLNAYGDIFGSSVDHAYETVELATNNQTALIRSGNGLGGSTLVNGGTWTRPHKAQVDSWETVFGNEGWNWDNVAAYSLQAERARAPNAKQIAAGHYFNASCHGVNGTVHAGPRDTGDDYSPIVKALMSAVEDRGVPTKKDFGCGDPHGVSMFPNTLHEDQVRSDAAREWLLPNYQRPNLQVLTGQYVGKILLSQNGTTPRAVGVEFGTHKGNTHNVYAKHEVLLAAGSAVSPTILEYSGIGMKSILEPLGIDTVVDLPVGLNLQDQTTATVRSRITSAGAGQGQAAWFATFNETFGDYSEKAHELLNTKLEQWAEEAVARGGFHNTTALLIQYENYRDWIVNHNVAYSELFLDTAGVASFDVWDLLPFTRGYVHILDKDPYLHHFAYDPQYFLNELDLLGQAAATQLARNISNSGAMQTYFAGETIPGDNLAYDADLSAWTEYIPYHFRPNYHGVGTCSMMPKEMGGVVDNAARVYGVQGLRVIDGSIPPTQMSSHVMTVFYAMALKISDAILEDY

SEQ ID NO: 1567 - protein, 577 aa, Aspergillus niger
GIEASLLTDPKDVSGRTVDYIIAGGGLTGLTTAARLTENPNISVLVIESGSYESDRGPIIEDLNAYGDIFGSSVDHAYETVELATNNQTALIRSGNGLGGSTLVNGGTWTRPHKAQVDSWETVFGNEGWNWDNVAAYSLQAERARAPNAKQIAAGHYFNASCHGVNGTVHAGPRDRGDDYSPIVKALMSAVEDRGVPTKKDFGCGDPHGVSMFPNTLHEDQVRSDAAREWLLPNYQRPNLQVLTGQYVGKVLLSQNGTTPRAVGVEFGTHKGNTHNVYAKHEVLLAAGSAVSPTILEYSGIGMKSILEPLGIDTVVDLPVGLNLQDQTTATVRSRITSAGAGQGQAAWFATFNETFGDYSEKAHELLNTKLEQWAEEAVARGGFHNTTALLIQYENYRDWIVNHNVAYSELFLDTAGVASFDVWDLLPFTRGYVHILDKDPYLHHFAYDPQYFLNELDLLGQAAATQLARNISNSGAMQTYFAGETIPGDNLAYDADLSAWTEYIPYHFRPNYHGVGTCSMMPKEMGGVVDNAARVYGVQGLRVIDGSIPPTQMSSHVMTVFYAMALKISDAILEDY

SEQ ID NO: 1568 - protein, 577 aa, Aspergillus niger
GIEASLLTDPKDVSGRTFDYIIAGGGLTGLTTAARLTENPNISVLVIESGSYESDRGPIIEDLNAYGDIFGSSVDHAYETVELATNNQTALIRSGNGLGGSTLVNGGTWTRPHKAQVDSWETVFGNEGWNWDNVAAYSLQAERARAPNAKQIAAGHYFNASCHGVNGTVHAGPRDTGDDYSPIVKALMSAVEDRGVPTKKDFGCGDPHGVSMFPNTLHEDQVRSDAAREWLLPNYQRPNLQVLTGQYVGKVLLSQNGTTPRAVGVEFGTHKGNTHNVYAKHEVLLAAGSAVSPTILEYSGIGMKSILEPLGIDTVVDLPVGLNLQDQTTATVRSRITSAGAGQGQAAWFATFNETFGDYSEKAHELLNTKLEQWAEEAVARGGFHNTTALLIQYENYRDWIVNHNVAYSELFLDTAGVASFDVWDLLPFTRGYVHILDKDPYLHHFAYDPQYFLNELDLLGQAAATQLARNISNSGAMQTYFAGETIPGDNLAYDADLSAWTEYIPYHFRPNYHGVGTCSMMPKEMGGVVDNAARVYGVQGLRVIDGSIPPTQMSSHVMTVFYAMALKISDAILEDY

SEQ ID NO: 1569 - protein, 577 aa, Aspergillus niger
GIEASLLTDPKDVSGRTVDYIIAGGGLTGLTTAARLTENPNISVLVIESGSYESDRGPIIEDLNMYGDIFGSSVDHAYETVELATNNQTALIRSGNGLGGSTLVNGGTWTRPHKAQVDSWETVFGNEGWNWDNVAAYSLQAERARAPNAKQIAAGHYFNASCHGVNGTVHAGPRDTGDDYSPIVKALMSAVEDRGVPTKKDFGCGDPHGVSMFPNTLHEDQVRSDAAREWLLPNYQRPNLQVLTGQYVGKVLLSQNGTTPRAVGVEFGTHKGNTHNVYAKHEVLLAAGSAVSPTILEYSGIGMKSILEPLGIDTVVDLPVGLNLQDQTTATVRSRITSAGAGQGQAAWFATFNETFGDYSEKAHELLNTKLEQWAEEAVARGGFHNTTALLIQYENYRDWIVNHNVAYSELFLDTKGVASFDVWDLLPFTRGYVHILDKDPYLHHFAYDPQYFLNELDLLGQAAATQLARNISNSGAMQTYFAGETIPGDNLAYDADLSAWTEYIPYHFRPNYHGVGTCSMMPKEMGGVVDNAARVYGVQGLRVIDGSIPPTQMSSHVMTVFYAMALKISDAILEDY

SEQ ID NO: 1570 - protein, 577 aa, Aspergillus niger
GIEASLLTDPKDVSGRTVDYIIAGGGLTGLTTAARLTENPNISVLVIESGSYESDRGPIIEDLNAYGDIFGSSVDHAYETVELATNNQTALIRSGNGLGGSTLVNGGTWTRPHKAQVDSWETVFGNEGWNWDNVAAYSLQAERARAPNAKQIAAGHYFNASCHGVNGTVHVGPRDTGDDYSPIVKALMSAVEDRGVPTKKDFGCGDPHGVSMFPNTLHEDQVRSDAAREWLLPNYQRPNLQVLTGQYVGKVLLSQNGTTPRAVGVEFGTHKGNTHNVYAKHEVLLAAGSAVSPTILEYSGIGMKSILEPLGIDTVVDLPVGLNLQDQTTATVRSRITSAGAGQGQAAWFATFNETFGDYSEKAHELLNTKLEQWAEEAVARGGFHNTTALLIQYENYRDWIVNHNVAYSELFLDTAGVASFDVWDLLPFTRGYVHILDKDPYLHHFAYDPQYFLNELDLLGQAAATQLARNISNSGAMQTYFAGETIPGDNLAYDADLSAWTEYIPYHFRPNYHGVGTCSMMPKEMGGVVDNAARVYGVQGLRVIDGSIPPTQMSSHVMTVFYAMALKISDAILEDY

SEQ ID NO: 1571 - protein, 577 aa, Aspergillus niger
GIEASLLTDPKEVAGRTVDYIIAGGGLTGLVVAARLTENPDITVLVIESGSYESDRGPIIEDLNAYGKIFGSSVDHAYETVCLATNNRTALIRAGNGLGGSTLVNGGTWTRPHKAQVDSWETVFGNEGWNWDSVAAYSLQAERARAPNAKQIAAGHYFNASCHGINGTVHAGPRDTGDDYSPIVKALMSAVEDRGVPTKKDLGCGDPHGVSMFPNTLHEDQVRSDAAREWLLPNYQRPNLSVLTGQYVGKVLLSQNATTPRAVGVEFGTHKGNFHNVTAKHEVLLAAGSAVSPTILEYSGIGMKSILEPLGIKTVVDLPVGLNLQDQTTSTVRSRITSAGAGQGQAAWFATFNETFGDYTEKAHELLNTKLEQWAEEAVARGGFHNTTALLIQYENYRDWIVKDNVAYSELFLDTAGEASFDVWDLLPFTRGYVHILDKDPYLRHFAYDPQYFLNELDLLGQAAATQLARNISNSGAMQTYFAGETIPGDNLAYDADLRAWVEYIPYHFRPNYHGVGTCSMMPKEMGGVVDNAANVYGVQGLRVIDGSIPPTQMSSHVMTVFYAMALKIADAVLADY

SEQ ID NO: 1572 - protein, 577 aa, Aspergillus niger
GIEASLLTDPKDVSGRTVDYIIAGGGLTGLTTAARLTENPNISVLVIESGSYESDRGPIIEDLNAYGDIFGSSVDHAYETVELATNNQTALIRSGNGLGGSTLVNGGTWTRPHKAQVDSWETVFGNEGWNWDNVAAYSLQAERARAPNAKQIAAGHYFNASCHGVNGTVHAGPRDTGDDYSPIVKALMSAVEDRGVPTKKDFGCGDPHGVSMFPNTLHEDQVRSDAAREWLLPNYQRPNLQVLTGQYVGKVLLSQNGTTPRAVGVEFGTHKGNTHNVYAKHEVLLAAGSAVSPTILEYSGIGMKRILEPLGIDTVVDLPVGLNLQDQTTATVRSRITSAGAGQGQAAWFATFNETFGDYSEKAHELLNTKLEQWAEEAVARGGFHNTTALLIQYENYRDWIVNHNVAYSELFLDTAGVASFDVWDLLPFTRGYVHILDKDPYLHHFAYDPQYFLNELDLLGQAAATQLARNISNSGAMQTYFAGETIPGDNLAYDADLSAWTEYIPYHFRPNYHGVGTCSMMPKEMGGVVDNAARVYGVQGLRVIDGSIPPTQMSSHVMTVFYAMALKISDAILEDY

SEQ ID NO: 1573 - protein, 577 aa, Aspergillus niger
GIEASLLTDPKDVSGRTVDYIIAGGGLTGLTTAARLTENPNISVLVIESGSYESDRGPIIEDLNAYGDIFGSSVDHAYETVELPTNNQTALIRSGNGLGGSTLVNGGTWTRPHKAQVDSWETVFGNEGWNWDNVAAYSLQAERARAPNAKQIAAGHYFNASCHGVNGTVHAGPRDTGDDYSPIVKALMSAVEDRGVPTKKDFGCGDPHGVSMFPNTLHEDQVRSDAAREWLLPNYQRPNLQVLTGQYVGKVLLSQNGTTPRAVGVEFGTHKGNTHNVYAKHEVLLAAGSAVSPTILEYSGIGMKSILEPLGIDTVVDLPVGLNLQDQTTATVRSRITSAGAGQGQAAWFATFNETFGDYSEKAHELLNTKLEQWAEEAVARGGFHNTTALLIQYENYRDWIVNHNVAYSELFLDTAGVASFDVWDLLPFTRGYVHILDKDPYLHHFAYDPQYFLNELDLLGQAAATQLARNISNSGAMQTYFAGETIPGDNLAYDADLSAWTEYIPYHFRPNYHGVGTCSMMPKEMGGVVDNAARVYGVQGLRVIDGSIPPTQMSSHVMTVFYAMALKISDAILEDY

SEQ ID NO: 1574 - protein, 577 aa, Aspergillus niger
GIEASLLTDPKDVSGRTVDYIIAGGGLTGLTTAARLTENPNISVLVIESGSYESDRGPIIEDLNKYGDIFGSSVDHAYETVELATNNQTALIRSGNGLGGSTLVNGGTWTRPHKAQVDSWETVFGNEGWNWDNVAAYSLQAERARAPNAKQIAAGHYFNASCHGVNGTVHAGPRDTGDDYSPIVKALMSAVEDRGVPTKKDFGCGDPHGVSMFPNTLHEDQVRSDAAREWLLPNYQRPNLQVLTGQYVGKVLLSQNGTTPRAVGVEFGTHKGNTHNVYAKHEVLLAAGSAVSPTILEYSGIGMKSILEPLGIDTVVDLPVGLNLQDQTTATVRSRITSAGAGQGQAAWFATFNETFGDYSEKAHELLNTKLEQWAEEAVARGGFHNTTALLIQYENYRDWIVNHNVAYSELFLDTKGVASFDVWDLLPFTRGYVHILDKDPYLHHFAYDPQYFLNELDLLGQAAATQLARNISNSGAMQTYFAGETIPGDNLAYDADLSAWTEYIPYHFRPNYHGVGTCSMMPKEMGGVVDNAARVYGVQGLRVIDGSIPPTQMSSHVMTVFYAMALKISDAILEDY

SEQ ID NO: 1575 - protein, 577 aa, Aspergillus niger
GIEASLLTDPKDVSGRTVDYIIAGGGLTGLTTAARLTENPNISVLVIESGSYESDRGPIIEDLNAYGDIFGSSVDHAYETVELATNNQTALIRSGNGLGGSTLVNGGTWTRPHKAQVDSWETVFGNEGWNWKNVAAYSLQAERARAPNAKQIAAGHYFNASCHGVNGTVHAGPRDTGDDYSPIVKALMSAVEDRGVPTKKDFGCGDPHGVSMFPNTLHEDQVRSDAAREWLLPNYQRPNLQVLTGQYVGKVLLSQNGTTPRAVGVEFGTHKGNTHNVYAKHEVLLAAGSAVSPTILEYSGIGMKSILEPLGIDTVVDLPVGLNLQDQTTATVRSRITSAGAGQGQAAWFATFNETFGDYSEKAHELLNTKLEQWAEEAVARGGFHNTTALLIQYENYRDWIVNHNVAYSELFLDTAGVASFDVWDLLPFTRGYVHILDKDPYLHHFAYDPQYFLNELDLLGQAAATQLARNISNSGAMQTYFAGETIPGDNLAYDADLSAWTEYIPYHFRPNYHGVGTCSMMPKEMGGVVDNAARVYGVQGLRVIDGSIPPTQMSSHVMTVFYAMALKISDAILEDY

SEQ ID NO: 1576 - protein, 577 aa, Aspergillus niger
GIEASLLTDPKDVSGRTVDYIIAGGGLTGLTTAARLTENPNISVLVIESGSYESDRGPIIEDLNLYGDIFGSSVDHAYETVELATNNQTALIRSGNGLGGSTLVNGGTWTRPHKAQVDSWETVFGNEGWNWDNVAAYSLQAERARAPNAKQIAAGHYFNASCHGVNGTVHAGPRDTGDDYSPIVKALMSAVEDRGVPTKKDFGCGDPHGVSMFPNTLHEDQVRSDAAREWLLPNYQRPNLQVLTGQYVGKVLLSQNGTTPRAVGVEFGTHKGNTHNVYAKHEVLLAAGSAVSPTILEYSGIGMKSILEPLGIDTVVDLPVGLNLQDQTTATVRSRITSAGAGQGQAAWFATFNETFGDYSEKAHELLNTKLEQWAEEAVARGGFHNTTALLIQYENYRDWIVNHNVAYSELFLDTRGVASFDVWDLLPFTRGYVHILDKDPYLHHFAYDPQYFLNELDLLGQAAATQLARNISNSGAMQTYFAGETIPGDNLAYDADLSAWTEYIPYHFRPNYHGVGTCSMMPKEMGGVVDNAARVYGVQGLRVIDGSIPPTQMSSHVMTVFYAMALKISDAILEDY

SEQ ID NO: 1577 - protein, 577 aa, Aspergillus niger
GIEASLLTDPKDVSGRTVDYIIAGGGLTGLTTAARLTENPNISVLVIESGSYESDRGPIIEDLNMYGDIFGSSVDHAYETVELATNNQTALIRSGNGLGGSTLVNGGTWTRPHKAQVDSWETVFGNEGWNWDNVAAYSLQAERARAPNAKQIAAGHYFNASCHGVNGTVHAGPRDTGDDYSPIVKALMSAVEDRGVPTKKDFGCGDPHGVSMFPNTLHEDQVRSDAAREWLLPNYQRPNLQVLTGQYVGKVLLSQNGTTPRAVGVEFGTHKGNTHNVYAKHEVLLAAGSAVSPTILEYSGIGMKSILEPLGIDTVVDLPVGLNLQDQTTATVRSRITSAGAGQGQAAWFATFNETFGDYSEKAHELLNTKLEQWAEEAVARGGFHNTTALLIQYENYRDWIVNHNVAYSELFLDTRGVASFDVWDLLPFTRGYVHILDKDPYLHHFAYDPQYFLNELDLLGQAAATQLARNISNSGAMQTYFAGETIPGDNLAYDADLSAWTEYIPYHFRPNYHGVGTCSMMPKEMGGVVDNAARVYGVQGLRVIDGSIPPTQMSSHVMTVFYAMALKISDAILEDY

SEQ ID NO: 1578 - protein, 577 aa, Aspergillus niger
GIEASLLTDPKDVSGRTVDYIIAGGGLTGLTTAARLTENPNISVLVIESGSYESDRGPIIEDLNQYGDIFGSSVDHAYETVELATNNQTALIRSGNGLGGSTLVNGGTWTRPHKAQVDSWETVFGNEGWNWDNVAAYSLQAERARAPNAKQIAAGHYFNASCHGVNGTVHAGPRDTGDDYSPIVKALMSAVEDRGVPTKKDFGCGDPHGVSMFPNTLHEDQVRSDAAREWLLPNYQRPNLQVLTGQYVGKVLLSQNGTTPRAVGVEFGTHKGNTHNVYAKHEVLLAAGSAVSPTILEYSGIGMKSILEPLGIDTVVDLPVGLNLQDQTTATVRSRITSAGAGQGQAAWFATFNETFGDYSEKAHELLNTKLEQWAEEAVARGGFHNTTALLIQYENYRDWIVNHNVAYSELFLDTRGVASFDVWDLLPFTRGYVHILDKDPYLHHFAYDPQYFLNELDLLGQAAATQLARNISNSGAMQTYFAGETIPGDNLAYDADLSAWTEYIPYHFRPNYHGVGTCSMMPKEMGGVVDNAARVYGVQGLRVIDGSIPPTQMSSHVMTVFYAMALKISDAILEDY

SEQ ID NO: 1579 - protein, 577 aa, Aspergillus niger
GIEASLLTDPKDVSGRTVDYIIAGGGLTGLTTAARLTENPNISVLVIESGSYESDRGPIIEDLNFYGDIFGSSVDHAYETVELATNNQTALIRSGNGLGGSTLVNGGTWTRPHKAQVDSWETVFGNEGWNWDNVAAYSLQAERARAPNAKQIAAGHYFNASCHGVNGTVHAGPRDTGDDYSPIVKALMSAVEDRGVPTKKDFGCGDPHGVSMFPNTLHEDQVRSDAAREWLLPNYQRPNLQVLTGQYVGKVLLSQNGTTPRAVGVEFGTHKGNTHNVYAKHEVLLAAGSAVSPTILEYSGIGMKSILEPLGIDTVVDLPVGLNLQDQTTATVRSRITSAGAGQGQAAWFATFNETFGDYSEKAHELLNTKLEQWAEEAVARGGFHNTTALLIQYENYRDWIVNHNVAYSELFLDTRGVASFDVWDLLPFTRGYVHILDKDPYLHHFAYDPQYFLNELDLLGQAAATQLARNISNSGAMQTYFAGETIPGDNLAYDADLSAWTEYIPYHFRPNYHGVGTCSMMPKEMGGVVDNAARVYGVQGLRVIDGSIPPTQMSSHVMTVFYAMALKISDAILEDY

SEQ ID NO: 1580 - protein, 577 aa, Aspergillus niger
GIEASLLTDPKDVSGRTVDYIIAGGGLTGLTTAARLTENPNISVLVIESGSYESDRGPIIEDLNLYGDIFGSSVDHAYETVELATNNQTALIRSGNGLGGSTLVNGGTWTRPHKAQVDSWETVFGNEGWNWDNVAAYSLQAERARAPNAKQIAAGHYFNASCHGVNGTVHAGPRDTGDDYSPIVKALMSAVEDRGVPTKKDFGCGDPHGVSMFPNTLHEDQVRSDAAREWLLPNYQRPNLQVLTGQYVGKVLLSQNGTTPRAVGVEFGTHKGNTHNVYAKHEVLLAAGSAVSPTILEYSGIGMKSILEPLGIDTVVDLPVGLNLQDQTTATVRSRITSAGAGQGQAAWFATFNETFGDYSEKAHELLNTKLEQWAEEAVARGGFHNTTALLIQYENYRDWIVNHNVAYSELFLDTNGVASFDVWDLLPFTRGYVHILDKDPYLHHFAYDPQYFLNELDLLGQAAATQLARNISNSGAMQTYFAGETIPGDNLAYDADLSAWTEYIPYHFRPNYHGVGTCSMMPKEMGGVVDNAARVYGVQGLRVIDGSIPPTQMSSHVMTVFYAMALKISDAILEDY

SEQ ID NO: 1581 - protein, 577 aa, Aspergillus niger
GIEASLLTDPKDVSGRTVDYIIAGGGLTGLTTAARLTENPNISVLVIESGSYESDRGPIIEDLNQYGDIFGSSVDHAYETVELATNNQTALIRSGNGLGGSTLVNGGTWTRPHKAQVDSWETVFGNEGWNWDNVAAYSLQAERARAPNAKQIAAGHYFNASCHGVNGTVHAGPRDTGDDYSPIVKALMSAVEDRGVPTKKDFGCGDPHGVSMFPNTLHEDQVRSDAAREWLLPNYQRPNLQVLTGQYVGKVLLSQNGTTPRAVGVEFGTHKGNTHNVYAKHEVLLAAGSAVSPTILEYSGIGMKSILEPLGIDTVVDLPVGLNLQDQTTATVRSRITSAGAGQGQAAWFATFNETFGDYSEKAHELLNTKLEQWAEEAVARGGFHNTTALLIQYENYRDWIVNHNVAYSELFLDTKGVASFDVWDLLPFTRGYVHILDKDPYLHHFAYDPQYFLNELDLLGQAAATQLARNISNSGAMQTYFAGETIPGDNLAYDADLSAWTEYIPYHFRPNYHGVGTCSMMPKEMGGVVDNAARVYGVQGLRVIDGSIPPTQMSSHVMTVFYAMALKISDAILEDY

SEQ ID NO: 1582 - protein, 577 aa, Aspergillus niger
GIEASLLTDPKDVSGRTVDYIIAGGGLTGLTTAARLTENPNISVLVIESGSYESDRGPIIEDLNAYGDIFGSSVDHAYETVELATNNQTALIRSGNGLGGSTLVNGGTWTRPHKAQVDSWETVFGNEGWNWDNVAAYSLQAERARAPNAKQIAAGHYFNASCHGVNGTVHAGPRDTGDDYSPIVKALMSAVEDRGVPTKKDFGCGDPHGVSMFPNTLHEDQVRSDAAREWLLPNYQRPNLQVLTGQYVGKVLLSQNGTTPRAVGVEFGTHKGNTHNVYAKHEVLLAAGSAVSPTILEYSGIGMKSILEPLGIDTVVDLPVGLNLQDQTTATVRSRITSAGAGQGQAAWFATFNETFGDYSEKAHELLNTKLEQWAEEAVARGGFHNTPALLIQYENYRDWIVNHNVAYSELFLDTAGVASFDVWDLLPFTRGYVHILDKDPYLHHFAYDPQYFLNELDLLGQAAATQLARNISNSGAMQTYFAGETIPGDNLAYDADLSAWTEYIPYHFRPNYHGVGTCSMMPKEMGGVVDNAARVYGVQGLRVIDGSIPPTQMSSHVMTVFYAMALKISDAILEDY

SEQ ID NO: 1583 - protein, 577 aa, Aspergillus niger
GIEASLLTDPKDVSGRTVDYIIAGGGLTGLTTAARLTENPNISVLVIESGSYESDRGPIIEDLNAYGDIFGSSVDHAYETVELATNNQTALIRSGNGLGGSTLVNGGTWTRPHKAQVDSWETVFGNEGWNWDNVAAYSLQAERARAPNAKQIAAGHYFNASCHGVNGTVHAGPRDTGDDYSPIVKALMSAVEDRGVPTKKDFGCGDPHGVSMFPNTLHEDQVRSDAAREWLLPNYQRPNLQVLTGQYVGKVLLSQNGTTPRAVGVEFGTHKGNTHNVYAKHEVLLAAGSAVSPTILEYSGIGMKPILEPLGIDTVVDLPVGLNLQDQTTATVRSRITSAGAGQGQAAWFATFNETFGDYSEKAHELLNTKLEQWAEEAVARGGFHNTTALLIQYENYRDWIVNHNVAYSELFLDTAGVASFDVWDLLPFTRGYVHILDKDPYLHHFAYDPQYFLNELDLLGQAAATQLARNISNSGAMQTYFAGETIPGDNLAYDADLSAWTEYIPYHFRPNYHGVGTCSMMPKEMGGVVDNAARVYGVQGLRVIDGSIPPTQMSSHVMTVFYAMALKISDAILEDY

SEQ ID NO: 1584 - protein, 577 aa, Synthetic construct
GIEASLLTDPKEVAGRTVDYIIAGGGLTGLVVAARLTENPDITVLVIESGSYESDRGPIIEDLNAYGKIFGSSVDHAYETVCLATNNRTALIRAGNGLGGSTLVNGGTWTRPHKAQVDSWETVFGNEGWNWDSVAAYSLQAERARAPNAKQIAAGHYFNASCHGINGTVHAGPRDTGDDYSPIVKALMSAVEDRGVPTKKDLGCGDPHGVSMFPNTLHEDQVRSDAAREWLLPNYQRPNLEVLTGQYVGKVLLSQNATTPRAVGVEFGTHKGNFHNVTAKHEVLLAAGSAVSPTILEYSGIGMKSILEPLGIKTVVDLPVGLNLQDQTTSTVRSRITSAGAGQGQAAWFATFNETFGDYTEKAHELLNTKLEQWAEEAVARGGFHNTTALLIQYENYRDWIVKDNVAYSELFLDTAGEASFDVWDLLPFTRGYVHILDKDPYLRHFAYDPQYFLNELDLLGQAAATQLARNISNSGAMQTYFAGETIPGDNLAYDADLEAWVEYIPYHFRPNYHGVGTCSMMPKEMGGVVDNAARVYGVQGLRVIDGSIPPTQMSSHVMTVFYAMALKIADAVLADY

SEQ ID NO: 1585 - protein, 577 aa, Aspergillus niger
GIEASLLTDPKEVAGRTVDYIIAGGGLTGLVVAARLTENPDITVLVIESGSYESDRGPIIEDLNAYGKIFGSSVDHAYETVCLATNNRTALIRAGNGLGGSTLVNGGTWTRPSKAQVDSWETVFGNEGWNWDSVAAYSLQAERARAPNAKQIAAGHYFNASCHGINGTVHAGPRDTGDDYSPIVKALMSAVEDRGVPTKKDLGCGDPHGVSMFPNTLHEDQVRSDAAREWLLPNYQRPNLSVLTGQYVGKVLLSQNATTPRAVGVEFGTHKGNFHNVTAKHEVLLAAGSAVSPTILEYSGIGMKSILEPLGIKTVVDLPVGLNLQDQTTSTVRSRITSAGAGQGQAAWFATFNETFGDYTEKAHELLNTKLEQWAEEAVARGGFHNTTALLIQYENYRDWIVKDNVAYSELFLDTAGEASFDVWDLLPFTRGYVHILDKDPYLRHFAYDPQYFLNELDLLGQAAATQLARNISNSGAMQTYFAGETIPGDNLAYDANLRAWVEYIPYHFRPNYHGVGTCSMMPKEMGGVVDNAARVYGVQGLRVIDGSIPPTQMSSHVMTVFYAMALKIADAVLADY

SEQ ID NO: 1586 - protein, 577 aa, Aspergillus niger
GIEASLLTDPKDVSGRTVDYIIAGGGLTGLTTAARLTENPNISVLVIESGSYESDRGPIIEDLNFYGDIFGSSVDHAYETVELATNNQTALIRSGNGLGGSTLVNGGTWTRPHKAQVDSWETVFGNEGWNWDNVAAYSLQAERARAPNAKQIAAGHYFNASCHGVNGTVHAGPRDTGDDYSPIVKALMSAVEDRGVPTKKDFGCGDPHGVSMFPNTLHEDQVRSDAAREWLLPNYQRPNLQVLTGQYVGKVLLSQNGTTPRAVGVEFGTHKGNTHNVYAKHEVLLAAGSAVSPTILEYSGIGMKSILEPLGIDTVVDLPVGLNLQDQTTATVRSRITSAGAGQGQAAWFATFNETFGDYSEKAHELLNTKLEQWAEEAVARGGFHNTTALLIQYENYRDWIVNHNVAYSELFLDTNGVASFDVWDLLPFTRGYVHILDKDPYLHHFAYDPQYFLNELDLLGQAAATQLARNISNSGAMQTYFAGETIPGDNLAYDADLSAWTEYIPYHFRPNYHGVGTCSMMPKEMGGVVDNAARVYGVQGLRVIDGSIPPTQMSSHVMTVFYAMALKISDAILEDY

SEQ ID NO: 1587 - protein, 577 aa, Aspergillus niger
GIEASLLTDPKDVSGRTVDYIIAGGGLTGLTTAARLTENPNISVLVIESGSYESDRGPIIEDLNFYGDIFGSSVDHAYETVELATNNQTALIRSGNGLGGSTLVNGGTWTRPHKAQVDSWETVFGNEGWNWDNVAAYSLQAERARAPNAKQIAAGHYFNASCHGVNGTVHAGPRDTGDDYSPIVKALMSAVEDRGVPTKKDFGCGDPHGVSMFPNTLHEDQVRSDAAREWLLPNYQRPNLQVLTGQYVGKVLLSQNGTTPRAVGVEFGTHKGNTHNVYAKHEVLLAAGSAVSPTILEYSGIGMKSILEPLGIDTVVDLPVGLNLQDQTTATVRSRITSAGAGQGQAAWFATFNETFGDYSEKAHELLNTKLEQWAEEAVARGGFHNTTALLIQYENYRDWIVNHNVAYSELFLDTKGVASFDVWDLLPFTRGYVHILDKDPYLHHFAYDPQYFLNELDLLGQAAATQLARNISNSGAMQTYFAGETIPGDNLAYDADLSAWTEYIPYHFRPNYHGVGTCSMMPKEMGGVVDNAARVYGVQGLRVIDGSIPPTQMSSHVMTVFYAMALKISDAILEDY

SEQ ID NO: 1588 - protein, 577 aa, Aspergillus niger
GIEASLLTDPKDVSGRTVDYIIAGGGLTGLTTAARLTENPNISVLVIESGSYESDRGPIIEDLNAYGDIFGSSVDHAYETVELATNNQTALIRSGNGLGGSTLVNGGTWTRPHKAQVDSWETVFGNEGWNWDNVAAYSLQAERARAPNAKQIAAGHYFNASCHGVNGTVHAGPRDTGDDYSPIVKALMSAVEDRGVPTKKDFGCGDPHGVSMFPNTLHEDQVRSDAAREWLLPNYQRPNLQVLTGQYVGKVLLSQNGTTPRAVGVEFGTHKGNTHNVYAKHEVLLAAGSAVSPTILEYSGIGMKSILEPLGIDTVVDLPVGLNLQDQTTATVRSRITSAGAGQGQAAWFATFNETFGDYSEKAHELLNTKLEQWAEEAVARGGFHNTTALLIQYENYRDWIVNHNVAYSELFLDTAGVASFDVWDLLPFTRGYVHILDKDPYLHHFAYDPQYFLNELDLLGQAAATQLARNISNSGAMQTYFAGETIPGDNLAYDADLSAWTEYIPYHFRPNYHGVGTCSMMPKEMGGVVDNRARVYGVQGLRVIDGSIPPTQMSSHVMTVFYAMALKISDAILEDY

SEQ ID NO: 1589 - protein, 577 aa, Aspergillus niger
GIEASLLTDPKDVSGRTVDYIIAGGGLTGLTTAARLTENPNISVLVIESGSYESDRGPIIEDLNAYGDIFGSSVDHAYETVELATNNQTALIRSGNGLGGSTLVNGGTWTRPHKAQVDSWETVFGNEGWNWDNVAAYSLQAERARAPNAKQIAAGHYFNASCHGVNGTVHAGPRDTGDDYSPIVKALMSAVEDRGVPTKKDFGCGDPHGVSMFPNTLHEDQVRSDAAREWLLPNYQRPNLQVLTGQYVGKVLLSQNGTTPRAVGVEFGTHKGNTHNVYAKHEVLLAAGSAVSPLILEYSGIGMKSILEPLGIDTVVDLPVGLNLQDQTTATVRSRITSAGAGQGQAAWFATFNETFGDYSEKAHELLNTKLEQWAEEAVARGGFHNTTALLIQYENYRDWIVNHNVAYSELFLDTAGVASFDVWDLLPFTRGYVHILDKDPYLHHFAYDPQYFLNELDLLGQAAATQLARNISNSGAMQTYFAGETIPGDNLAYDADLSAWTEYIPYHFRPNYHGVGTCSMMPKEMGGVVDNAARVYGVQGLRVIDGSIPPTQMSSHVMTVFYAMALKISDAILEDY

SEQ ID NO: 1590 - protein, 577 aa, Aspergillus niger
GIEASLLTDPKDVSGRTVDYIIAGGGLTGLTTAARLTENPNISVLVIESGSYESDRGPIIEDLNAYGDIFGSSVDHAYETVELATNNQTALIRSGNGLGGSTLVNGGTWTRPHKAQVDSWETVFGNEGWNWDNVAAYSLQAERARAPNAKQIAAGHYFNASCHGVNGTVHAGPRDTGDDYSPIVKALMSAVEDRGVPTKKDFGCGDPHGVSMFPNTLHEDQVRSDAAREWLLPNYQRPNLQVLTGQYVGKVLLSQNGTTPRAVGVEFGTHKGNTHNVYAKHEVLLAAGSAVSPTILEYSGIGMKSILEPLGIDTVVDLPVGLNLQDQTTATVRSRITSAGAGQGQAAWFATFNETFGDYSEKAHELLNTKLEQWAEEAVARGGFHNTTALLIQYENYRDWIVNHNVAYAELFLDTAGVASFDVWDLLPFTRGYVHILDKDPYLHHFAYDPQYFLNELDLLGQAAATQLARNISNSGAMQTYFAGETIPGDNLAYDADLSAWTEYIPYHFRPNYHGVGTCSMMPKEMGGVVDNAARVYGVQGLRVIDGSIPPTQMSSHVMTVFYAMALKISDAILEDY

SEQ ID NO: 1591 - protein, 577 aa, Aspergillus niger
GIEASLLTDPKDVSGRTVDYIIAGGGLTGLTTAARLTENPNISVLVIESGSYESDRGPIIEDLNAYGDIFGSSVDHAYETVELATNNQTALIRSGNGLGGSTLVNGGTWTRPHKAQVDSWETVFGNEGWNWDNVAAYSLQAERARAPNAKQIAAGHYFNASCHGVNGTVHAGPRDTGDDYSPIVKALMSAVEDRGVPTKKDFGCGDPHGVSMFPNTLHEDQVRSDAAREWLLPNYQRPNLQVLTGQYVGKVLLSQNGTTPRAVGVEFGTHKGNTHNVYAKHEVLLAAGSAVSPTILEYSGIGMKSILEPLGIDTVVDLPVGLNLQDQTTATVRSRITSAGAGQGQAAWYATFNETFGDYSEKAHELLNTKLEQWAEEAVARGGFHNTTALLIQYENYRDWIVNHNVAYSELFLDTAGVASFDVWDLLPFTRGYVHILDKDPYLHHFAYDPQYFLNELDLLGQAAATQLARNISNSGAMQTYFAGETIPGDNLAYDADLSAWTEYIPYHFRPNYHGVGTCSMMPKEMGGVVDNAARVYGVQGLRVIDGSIPPTQMSSHVMTVFYAMALKISDAILEDY

SEQ ID NO: 1592 - protein, 577 aa, Aspergillus niger
GIEASLLTDPKDVSGRTVDYIIAGGGLTGLTTAARLTENPNISVLVIESGSYESDRGPIIEDLNAYGDIFGSSVDHAYETVELATNNQTALIRSGNGLGGSTLVNGGTWTRPHKAQVDSWETVFGNEGWNWDNVAAYSLQAERARAPNAKQIAAGHYFNASCHGVNGTVHAGPRDTGDDYSPIVKALMSAVEDRGVPTKKDFGCGDPHGVSMFPNTLHEDQVRSDAAREWLLPNYQRPNLQVLTGQYVGKVLLSQNGTTPRAVGVEFGTHKGNTHNVYAKHEVLLAAGSAVSPTILEYSGIGMKSILEPLGIDTVVDLPVGLNLQDQTTATVRSRITSAGAGQGQAAWFATFNETFGDYSEKAHELLNTKLEQWAEEAVARGGFHNTTALLIQYENYRDWIVNHNVAYSELFLDTAGVASFDVWDLLPFTRGYVHILDKDPYLHHFAYDPQYFLNELDLLGQAAATQLARNISNSGPMQTYFAGETIPGDNLAYDADLSAWTEYIPYHFRPNYHGVGTCSMMPKEMGGVVDNAARVYGVQGLRVIDGSIPPTQMSSHVMTVFYAMALKISDAILEDY

SEQ ID NO: 1593 - protein, 577 aa, Aspergillus niger
GIEASLLTDPKDVSGRTVDYIIAGGGLTGLTTAARLTENPNISVLVIESGSYESDRGPIIEDLNAYGDIFGSSVDHAYETVELATNNQTALIRSGNGLGGSTLVNGGTWTRPHKAQVDSWETVFGNEGWNWDNVAAYSLQAERARAPNAKQIAAGHYFNASCHGVNGTVHAGPRDTGDDYSPIVKALMSAVEDRGVPTKKDFGCGDPHGVSMFPNTLHEDQVRSDAAREWLLPNYQRPNLQVLTGQYVGKVLLSQNGTTPRAVGVEFGTHKGNTHNVYAKHEVLLAAGSAVSPTILEYSGIGMKSILEPLGIDTVVDLPVGLNLQDQTTATVRSRITSAGAGQGQAAWFATFNETFGDYSEKAHELLNTKLEQWAEEAVARGGFHNTTALLIQYENYRDWIVNHNVAYSELFLDTKGVASFDVWDLLPFTRGYVHILDKDPYLHHFAYDPQYFLNELDLLGQAAATQLARNISNSGAMQTYFAGETIPGDNLAYDADLSAWTEYIPYHFRPNYHGVGTCSMMPKEMGGVVDNAARVYGVQGLRVIDGSIPPTQMSSHVMTVFYAMALKISDAILEDY

SEQ ID NO: 1594 - protein, 577 aa, Aspergillus niger
GIEASLLTDPKDVSGRTVDYIIAGGGLTGLTTAARLTENPNISVLVIESGSYESDRGPIIEDLNLYGDIFGSSVDHAYETVELATNNQTALIRSGNGLGGSTLVNGGTWTRPHKAQVDSWETVFGNEGWNWDNVAAYSLQAERARAPNAKQIAAGHYFNASCHGVNGTVHAGPRDTGDDYSPIVKALMSAVEDRGVPTKKDFGCGDPHGVSMFPNTLHEDQVRSDAAREWLLPNYQRPNLQVLTGQYVGKVLLSQNGTTPRAVGVEFGTHKGNTHNVYAKHEVLLAAGSAVSPTILEYSGIGMKSILEPLGIDTVVDLPVGLNLQDQTTATVRSRITSAGAGQGQAAWFATFNETFGDYSEKAHELLNTKLEQWAEEAVARGGFHNTTALLIQYENYRDWIVNHNVAYSELFLDTKGVASFDVWDLLPFTRGYVHILDKDPYLHHFAYDPQYFLNELDLLGQAAATQLARNISNSGAMQTYFAGETIPGDNLAYDADLSAWTEYIPYHFRPNYHGVGTCSMMPKEMGGVVDNAARVYGVQGLRVIDGSIPPTQMSSHVMTVFYAMALKISDAILEDY

SEQ ID NO: 1595 - protein, 577 aa, Aspergillus niger
GIEASLLTDPKDVSGRTVDYIIAGGGLTGLTTAARLTENPNISVLVIESGSYESDRGPIIEDLNAYGDIFGSSVDHAYETVELATNNQTALIRSGNGLGGSTLVNGGTWTRPHKAQVDSWETVFGNEGWNWDNVAAYSLQAERARAPNAKQIAAGHYFNASCHGVNGTVHAGPRDTGDDYSPIVKALMSAVEDRGVPTKKDFGCGDPHGVSMFPNTLHEDQVRSDAAREWLLPNYQRPNLQVLTGQYVGKVLLSQNGTTPRAVGVEFGTHKGNTHNVYAKHEVLLAAGSAVSPTILEYSGIGMKSILEPLGIDTVVDLPVGLNLQDQTTATVRSRITSAGAGQGQAAWFATFNETFGDYSEKAHELLNTKLEQWAEEAVARGGFHNTTALLIQYENYRDWIVNHNVAYSELFLDTAGVASFDVWDLLPFTRGYVHILDKDPYLHHFAYDPQYFLNELDLLGQAAATQLARNISNSGAMQTYFAGETIPGDNLAYDADLSAWTEYIPYHFRPNYHGVGTCSMMPKEMGGVVDNAARVYGVQGLRVIDASIPPTQMSSHVMTVFYAMALKISDAILEDY

SEQ ID NO: 1596 - protein, 577 aa, Aspergillus niger
GIEASLLTDPKDVSGRTVDYIIAGGGLTGLTTAARLTENPNISVLVIESGSYESDRGPIIEDLNAYGDIFGSSVDHAYETVELATNNQTALIRSGNGLGGSTLVNGGTWTRPHKAQVDSWEKVFGNEGWNWDNVAAYSLQAERARAPNAKQIAAGHYFNASCHGVNGTVHAGPRDTGDDYSPIVKALMSAVEDRGVPTKKDFGCGDPHGVSMFPNTLHEDQVRSDAAREWLLPNYQRPNLQVLTGQYVGKVLLSQNGTTPRAVGVEFGTHKGNTHNVYAKHEVLLAAGSAVSPTILEYSGIGMKSILEPLGIDTVVDLPVGLNLQDQTTATVRSRITSAGAGQGQAAWFATFNETFGDYSEKAHELLNTKLEQWAEEAVARGGFHNTTALLIQYENYRDWIVNHNVAYSELFLDTAGVASFDVWDLLPFTRGYVHILDKDPYLHHFAYDPQYFLNELDLLGQAAATQLARNISNSGAMQTYFAGETIPGDNLAYDADLSAWTEYIPYHFRPNYHGVGTCSMMPKEMGGVVDNAARVYGVQGLRVIDGSIPPTQMSSHVMTVFYAMALKISDAILEDY

SEQ ID NO: 1597 - protein, 577 aa, Aspergillus niger
GIEASLLTDPKDVSGRTVDYIIAGGGLTGLTTAARLTENPNISVLVIESGSYESDRGPIIEDLNKYGDIFGSSVDHAYETVELATNNQTALIRSGNGLGGSTLVNGGTWTRPHKAQVDSWETVFGNEGWNWDNVAAYSLQAERARAPNAKQIAAGHYFNASCHGVNGTVHAGPRDTGDDYSPIVKALMSAVEDRGVPTKKDFGCGDPHGVSMFPNTLHEDQVRSDAAREWLLPNYQRPNLQVLTGQYVGKVLLSQNGTTPRAVGVEFGTHKGNTHNVYAKHEVLLAAGSAVSPTILEYSGIGMKSILEPLGIDTVVDLPVGLNLQDQTTATVRSRITSAGAGQGQAAWFATFNETFGDYSEKAHELLNTKLEQWAEEAVARGGFHNTTALLIQYENYRDWIVNHNVAYSELFLDTRGVASFDVWDLLPFTRGYVHILDKDPYLHHFAYDPQYFLNELDLLGQAAATQLARNISNSGAMQTYFAGETIPGDNLAYDADLSAWTEYIPYHFRPNYHGVGTCSMMPKEMGGVVDNAARVYGVQGLRVIDGSIPPTQMSSHVMTVFYAMALKISDAILEDY

SEQ ID NO: 1598 - protein, 577 aa, Aspergillus niger
GIEASLLTDPKDVSGRTVDYIIAGGGLTGLTTAARLTENPNISVLVIESGSYESDRGPIIEDLNAYGDIFGSSVDHAYETVELATNNQTALIRSGNGLGGSTLVNGGTWTRPHKAQVDSWETVFGNEGWNWDNVAAYSLQAERARAPNAKQIAAGHYFNASCHGVNGTVHAGPRDTGDDYSPIVKALMSAVEDRGVPTKKDFGCGDPHGVSMFPNTLHEDQVRSDAAREWLLPNYQRPNLQVLTGQYVGKVLLSQNGTTPRAVGVEFGTHKGNTHNVYAKHEVLLAAGSAVSPTILEYSGIGMPSILEPLGIDTVVDLPVGLNLQDQTTATVRSRITSAGAGQGQAAWFATFNETFGDYSEKAHELLNTKLEQWAEEAVARGGFHNTTALLIQYENYRDWIVNHNVAYSELFLDTAGVASFDVWDLLPFTRGYVHILDKDPYLHHFAYDPQYFLNELDLLGQAAATQLARNISNSGAMQTYFAGETIPGDNLAYDADLSAWTEYIPYHFRPNYHGVGTCSMMPKEMGGVVDNAARVYGVQGLRVIDGSIPPTQMSSHVMTVFYAMALKISDAILEDY

SEQ ID NO: 1599 - protein, 577 aa, Aspergillus niger
GIEASLLKDPKLVAGRTYDYIIAGGGLAGLTVAEKLTENPNITVLVIEWGSYESDRGPIIEDLNAYGEIFGTSVDHAYETVELATNNRTALIRSGNGLGGSTLINGGTWTRPHKAQVDSWETVFGNEGWNWDSVAAYSLQAERARAPNAKQIAAGHYFNAACHGLNGTVHVGPRDTGDDYSPLMRALMSAVEDRGVPTKKDLGCGDPHGVSMFPNTLHEDQVRADAAREWLLPNYQRPNLQVLTGQYVGKVLLSQNATTPRAVGVEFGTHKSNTHNVYAKHEVLLSAGSTVSPTILEYSGIGMKSILEPLGIDTVVDLPVGLNLQDQTTSTVRSRITSAGNGQGQAAWFATFNETFGDYTEKAHELLNTKLEQWAEEAVARGGFHNTTALLIQYENYRDWIVKDNVAYSELFLDTGGVASFDVWDLLPFTRGYVHILDKDPYLRHFAYDPQYFLNELDLLGQAAATQLARNISNSGAMQTYFAGETIPGDNLAYMADLSAWVEYIPEHFRPNYHGVGTCSMMPKEMGGVVDNAARVYGVQGLRVIDGSIPPTQLSSHVMTVFYAMALKIADAVLADY

SEQ ID NO: 1600 - protein, 577 aa, Synthetic construct
GIEASLLTDPKDVSGRTVDYIIAGGGLTGLTTAARLTENPNISVLVIESGSYESDRGPIIEDLNAYGDIFGSSVDHAYETVELATNNQTALIRSGNGLGGSTLVNGGTWTRPHKAQVDSWETVFGNEGWNWDNVAAYSLQAERARAPNAKQIAAGHYFNASCHGVNGTVHAGPRDTGDDYSPIVKALMSAVEDRGVPTKKDFGCGDPHGVSMFPNTLHEDQVRSDAAREWLLPNYQRPNLQVLTGQYVGKVLLSQNGTTPRAVGVEFGTHKGNTHNVYAKHEVLLAAGSAVSPTILEYSGIGMKSILEPLGIDTVVDLPVGLNLQDQTTATVRSRITSAGAGQGQAAWFATFNETFGDYSEKAHELLNTKLEQWAEEAVARGGFHNTTALLIQYENYRDWIVNHNVAYSELFLDTAGVASFDVWDLLPFTRGYVHILDKDPYLHHFAYDPQYFLNELDLLGQAAATQLARNISNSGAMQTYFAGETIPGDNLAYDADLSAWTEYIPYHFRPNYHGVGTCSMLPKEMGGVVDNAARVYGVQGLRVIDGSIPPTQMSSHVMTVFYAMALKISDAILEDY

SEQ ID NO: 1601 - protein, 577 aa, Aspergillus niger
GIEASLLTDPKDVSGRTVDYIIAGGGLTGLTTAARLCENPNISVLVIESGSYESDRGPIIEDLNAYGDIFGSSVDHAYETVELATNNQTALIRSGNGLGGSTLVNGGTWTRPHKAQVDSWETVFGNEGWNWDNVAAYSLQAERARAPNAKQIAAGHYFNASCHGVNGTVHAGPRDTGDDYSPIVKALMSAVEDRGVPTKKDFGCGDPHGVSMFPNTLHEDQVRSDAAREWLLPNYQRPNCQVLTGQYVGKVLLSQNGTTPRAVGVEFGTHKGNTHNVYAKHEVLLAAGSAVSPTILEYSGIGMKSILEPLGIDTVVDLPVGLNLQDQTTATVRSRITSAGAGQGQAAWFATFNETFGDYSEKAHELLNTKLEQWAEEAVARGGFHNTTALLIQYENYRDWIVNHNVAYSELFLDTAGVASFDVWDLLPFTRGYVHILDKDPYLHHFAYDPQYFLNELDLLGQAAATQLARNISNSGAMQTYFAGETIPGDNLAYDADLSAWTEYIPYHFRPNYHGVGTCSMMPKEMGGVVDNAARVYGVQGLRVIDGSIPPTQMSSHVMTVFYAMALKISDAILEDY

SEQ ID NO: 1602 - protein, 577 aa, Aspergillus niger
GIEASLLTDPKDVSGRTVDYIIAGGGLTGLTTAARLTENPNISVLVIESGSYESDRGPIIEDLNAYGDIFGSSVDHAYETVELATNNQTALIRSGNGLGGSTLVNGGTWTRPHKAQVDSWETVFGNPGWNWDNVAAYSLQAERARAPNAKQIAAGHYFNASCHGVNGTVHAGPRDTGDDYSPIVKALMSAVEDRGVPTKKDFGCGDPHGVSMFPNTLHEDQVRSDAAREWLLPNYQRPNLVVLTGQYVGKVLLSQNGTTPRAVGVEFGTHKGNTHNVYAKHEVLLAAGSAVSPTILEYSGIGMKSILEPLGIDTVVDLPVGLNLQDQTTATVRSRITSAGAGQGQAAWFATFNETFGDYSEKAHELLNTKLEQWAEEAVARGGFHNTTALLIQYENYRDWIVNHNVAYSELFLDTAGVASFDVWDLLPFTRGYVHILDKDPYLHHFAYDPQYFLNELDLLGQAAATQLARNISNSGAMQTYFAGETIPGDNLAYDADLSAWTEYIPYHFRPNYHGVGTCSMMPKEMGGVVDNAARVYGVQGLRVIDGSIPPTQMSSHVMTVFYAMALKISDAILEDY

SEQ ID NO: 1603 - protein, 577 aa, Aspergillus niger
GIEASLLTDPKDVSGRTVDYIIAGGGLVGLTTAARLTENPNISVLVIESGSYESDRGPIIEDLNAYGKIFGSSVDHAYETVELATNNQTALIRSGNGLGGSTLVNGGTWTRPHKAQVDSWETVFGNEGWNWDNVAAYSLQAERARAPNAKQIAAGHYFNTSCHGVNGTVHAGPRDTGDDYSPIVKALMSAVEDRGVPTKKDFGCGDPHGVSMFPNTLHEDQVRSDAAREWLLPNYQRPNLQVLTGQYVGKVLLSQNGTTPRAVGVEFGTHKGNTHNVYAKHEVLLAAGSAVSPTILEYSGIGMKSILEPLGIKTVVDLPVGLNLQDQTTATVRSRITSAGAGQGQAAWFATFNETFGDYSEKAHELLNTKLEQWAEEAVARGGFHNTTALLIQYENYRDWIVNHNVAYSELFLDTAGVASFDVWDLLPFTRGYVHILDKDPYLHHFAYDPQYFLNELDLLGQAAATQLARNISNSGAMQTYFAGETIPGDNLAYDADLSAWTEYIPYHFRPNYHGVGTCSMMPKEMGGVVDNAARVYGVQGLRVIDGSIPPTQMSSHVMTVFYAMALKISDAILEDY

SEQ ID NO: 1604 - protein, 577 aa, Aspergillus niger
GIEASLLTDPKDVSGRTCDYIIAGGGLTGLTTAARLTENPNICVLVIESGSYESDRGPIIEDLNAYGDIFGSSVDHAYETVELATNNQTALIRSGNGLGGSTLVNGGTWTRPHKAQVDSWETVFGNEGWNWDNVAAYSLQAERARAPNAKQIAAGHYFNASCHGVNGTVHAGPRDTGDDYSPIVKALMSAVEDRGVPTKKDFGCGDPHGVSMFPNTLHEDQVRSDAAREWLLPNYQRPNLQVLTGQYVGKVLLSQNGTTPRAVGVEFGTHKGNTHNVYAKHEVLLAAGSAVSPTILEYSGIGMKSILEPLGIDTVVDLPVGLNLQDQTTATVRSRITSAGAGQGQAAWFATFNETFGDYSEKAHELLNTKLEQWAEEAVARGGFHNTTALLIQYENYRDWIVNHNVAYSELFLDTAGVASFDVWDLLPFTRGYVHILDKDPYLHHFAYDPQYFLNELDLLGQAAATQLARNISNSGAMQTYFAGETIPGDNLAYDADLSAWTEYIPYHFRPNYHGVGTCSMMPKEMGGVVDNAARVYGVQGLRVIDGSIPPTQMSSHVMTVFYAMALKISDAILEDY

SEQ ID NO: 1605 - protein, 577 aa, Aspergillus niger
GIEASLLTDPKDVSGRTVDYIIAGGGLTGLTTAARLTENPNISVLVIESGSYESDRGPIIEDLNAYGDIFGSSVDHAYETVELATNNQTALIRSGNGLGGSTLVNGGTWTRPHKAQVDSWETVFGNEGWNWDNVAAYSLQAERARAPNAKQIAAGHYFNASCHGVNGTVHAGPRDTGDDYSPIVKALMSAVEDRGVPTKKDFGCGDPHGVSMFPNTLHEDQVRSDAAREWLLPNYQRPNLQVLTGQYVGKVLLSQNGTTPRAVGVEFGTHKGNTHNVYAKHEVLLAAGSAVSPTILEYSGIGMKSILEPLGIDTVVDLPVGLNLQDQTTATVRSRITSAGAGQGQAAWFATFNETFGDYSEKAHELLNTKLEQWAEEAVARGGFHNTTALLIQYENYRDWIVNHNVAYSELFLDTAGVASFDVWDLLPFTRGYVHILDKDPYLHHFAYDPQYFLNELDLLGQAAATQLARNISNSGAMQTYFAGETIPGDNLAYDADLSAWTEYIPYHFRPNYHGVGTCSMMPKEMGGVVDNAARVYGVQGLRVIDGSIPPTQMSSHLMTVFYAMALKISDAILEDY

SEQ ID NO: 1606 - protein, 577 aa, Aspergillus niger
GIEASLLTDPKDVSGRTVDYIIAGGGLTGLTTAARLTENPNISVLVIESGSYESDRGPIIEDLNAYGDIFGSSVDHAYETVELATNNQTALIRSGNGLGGSTLVNGGTWTRPHKAQVDSWETVFGNEGWNWDNVAAYSLQAERARAPNAKQIAAGHYFNASCHGVNGTVHAGPRDTGDDYSPIVKALMCAVEDRGVPTKKDFGCGDPHGVSMFPNTLHEDQVRSDAAREWLLPNYQRPNLQVLTGQYVGKVLLSQNGTTPRAVGVEFGTHKGNTHNVYAKHEVLLAAGSAVSPTILEYSGIGMKSILEPLGIDTVVDLPVGLNLQDQTTATVRSRITSAGAGQGQAAWFATFNETFGDYSEKAHELLNTKLEQWAEEAVARGGFHNTTALLIQYENYRDWIVNHNVAYSELFLDTAGVASFDVWDLLPFTRGYVHILDKDPYLHHFAYDPQYFLNELDLLGQAAATQLARNISNSGCMQTYFAGETIPGDNLAYDADLSAWTEYIPYHFRPNYHGVGTCSMMPKEMGGVVDNAARVYGVQGLRVIDGSIPPTQMSSHVMTVFYAMALKISDAILEDY

SEQ ID NO: 1607 - protein, 577 aa, Aspergillus niger
GIEASLLTDPKDVSGRYVDYIIAGGGLTGLTTAARLTENPNISVLVIESGSYESDRGPIIEDLNAYGDIFGSSVDHAYETVELATNNQTALIRSGNGLGGSTLVNGGTWTRPHKAQVDSWETVFGNEGWNWDNVAAYSLQAERARAPNAKQIAAGHYFNASCHGVNGTVHAGPRDTGDDYSPIVKALMSAVEDRGVPTKKDFGCGDPHGVSMFPNTLHEDQVRSDAAREWLLPNYQRPNLQVLTGQYVGKVLLSQNGTTPRAVGVEFGTHKGNTHNVYAKHEVLLAAGSAVSPTILEYSGIGMKSILEPLGIDTVVDLPVGLNLQDQTTATVRSRITSAGAGQGQAAWFATFNETFGDYSEKAHELLNTKLEQWAEEAVARGGFHNTTALLIQYENYRDWIVNHNVAYSELFLDTAGVASFDVWDLLPFTRGYVHILDKDPYLHHFAYDPQYFLNELDLLGQAAATQLARNISNSGAMQTYFAGETIPGDNLAYDADLSAWTEYIPYHFRPNYHGVGTCSMMPKEMGGVVDNAARVYGVQGLRVIDGSIPPTQMSSHVMTVFYAMALKISDAILEDY

SEQ ID NO: 1608 - protein, 577 aa, Aspergillus niger
GIEASLLTDPKDVSGRTVDYIIAGGGLTGLTTAARLTENPNISVLVIESGSYESDRGPIIEDLNAYGDIFGSSVDHAYETVELATNNQTALIRSGNGLGGSTLVNGGTWTRPHKAQVDSWETVFGNEGWNWDNVAAYSKQAERARAPNAKQIAAGHYFNASCHGVNGTVHAGPRDTGDDYSPIVKALMSAVEDRGVPTKKDFGCGDPHGVSMFPNTLHEDQVRSDAAREWLLPNYQRPNLQVLTGQYVGKVLLSQNGTTPRAVGVEFGTHKGNTHNVYAKHEVLLAAGSAVSPTILEYSGIGMKSILEPLGIDTVVDLPVGLNLQDQTTATVRSRITSAGAGQGQAAWFATFNETFGDYSEKAHELLNTKLEQWAEEAVARGGFHNTTALLIQYENYRDWIVNHNVAYSELFLDTAGVASFDVWDLLPFTRGYVHILDKDPYLHHFAYDPQYFLNELDLLGQAAATQLARNISNSGAMQTYFAGETIPGDNLAYDADLSAWTEYIPYHFRPNYHGVGTCSMMPKEMGGVVDNAARVYGVQGLRVIDGSIPPTQMSSHVMTVFYAMALKISDAILEDY

SEQ ID NO: 1609 - protein, 577 aa, Aspergillus niger
GIEASLLTDPKDVSGRTVDYIIAGGGLTGLTTAARLTENPNISVLVIESGSYESDRGPIIEDLNAYGDIFGSSVDHAYETVELATNNQTALIRSGNGLGGSTLVNGGTWTRPHKAQVDSWETVFGNEGWNWDNVAAYSLQAERARAPNAKQIAAGHYFNASCHGVNGTVHAGPRDTGDDYSPIVKALMSAVEDRGVPTKKDFGCGDPHGVSMFPNTLHEDQVRSDAAREWLLPNYQRPNLQVLTGQYVGKVLLSQNGTTPRAVGVEFGTHKGNTHNVYAKHEVLLAAGSAVSPTILEYSGIGMKSILEPLGIDTVVDLPVGLNLQDQTTATVRSRITSAGAGQGQAAWFATFNETFGDYSEKAHELLNTKLEQWAEEAVARGGFHNTTALLIQYENYRDWIVNHNVAYSELFLDTAGVASFDVWDLLPFTRGYVHILDKDPYLHHFAYDPNYFLNELDLLGQAAATQLARNISNSGAMQTYFAGETIPGDNLAYDADLSAWTEYIPYHFRPNYHGVGTCSMMPKEMGGVVDNAARVYGVQGLRVIDGSIPPTQMSSHVMTVFYAMALKISDAILEDY

SEQ ID NO: 1610 - protein, 577 aa, Aspergillus niger
GIEASLLKDFKLVNGRTYDYIIAGGGLAGLTVAEKLTENPNITVLVIESGSYESDRGPIIEDLNAYGEIFGTSVDHAYETVELATDNRTALIRSGNGLGGSTLINGGTWTRPHKAQVDSWETVFGNEGWNWDSVAAYSLQAERARAPNAKQIAAGHYFNASCHGLNGTVHVGPRDTGDDYSPLMRALMSAVEDRGVPTKKDLGCGDPHGVSMFPNTLHEDQVRADAAREWLLPNYQRPNLQVLTGQYVGKVLLSQNATTPRAVGVEFGTHKSNTHNVYAKHEVLLSAGSTVSPTILEYSGIGMKSILEPLGIDTVVDLPVGLNLQDQTTSTVRSRITSAGAGQGQAAWFATFNETFGDYTEKAHELLNTKLEQWAEEAVARGGFHNTTALLIQYENYRDWIVKDNVAYSELFLDTGGVASFDVWDLLPFTRGYVHILDKDPYLRHFAYDPQYFLNELDLLGQAAATQLARNISNSGAMQTYFAGETIPGDNLAYDADLSAWVEYIPEHFRPNYHGVGTCSMMPKEMGGVVDNAARVYGVQGLRVIDGSIPPTQLSSHVMTVFYAMALKIADAVLADY

SEQ ID NO: 1611 - protein, 577 aa, Aspergillus niger
GIEASLLTDPKDVSGRTVDYIIAGGGLTGLTTAARLTENPNICVLVIESGSYESDRGPIIEDLNAYGDIFGSSVDHAYETVELATNNQTALIRSGNGLGGSTLVNGGTWTRPHKAQVDSWETVFGNEGWNWDNVAAYSLQAERARAPNAKQIAAGHYFNASCHGVNGTVHAGPRDTGDDYSPIVKALMSAVEDRGVPTKKDFGCGDPHGVSMFPNTLHEDQVRSDAAREWLLPNYQRPCLQVLTGQYVGKVLLSQNGTTPRAVGVEFGTHKGNTHNVYAKHEVLLAAGSAVSPTILEYSGIGMKSILEPLGIDTVVDLPVGLNLQDQTTATVRSRITSAGAGQGQAAWFATFNETFGDYSEKAHELLNTKLEQWAEEAVARGGFHNTTALLIQYENYRDWIVNHNVAYSELFLDTAGVASFDVWDLLPFTRGYVHILDKDPYLHHFAYDPQYFLNELDLLGQAAATQLARNISNSGAMQTYFAGETIPGDNLAYDADLSAWTEYIPYHFRPNYHGVGTCSMMPKEMGGVVDNAARVYGVQGLRVIDGSIPPTQMSSHVMTVFYAMALKISDAILEDY

SEQ ID NO: 1612 - protein, 577 aa, Synthetic construct
GIEASLLTDPKDVSGRTVDYIIAGGGLTGLTTAARLTENPNISVLVIESGSYESDRGPIIEDLNAYGDIFGSSVDHAYETVELATNNQTALIRSGNGLGGSTLVNGGTWTRPHKAQVDSWETVFGNEGWNWDNVAAYSLQAERARAPNAKQIAAGHYFNASCHGVNGTVHAGPRDTGDDYSPIVKALMSAVEDRGVPTKKDFGCGDPHGVSMFPNTLHEDQVRSDAAREWLLPNYQRPNLQVLTGQYVGKVLLSQNGTTPRAVGVEFGTHKGNTHNVYAKHEVLLAAGSAVSPTILEYSGIGLKSILEPLGIDTVVDLPVGLNLQDQTTATVRSRITSAGAGQGQAAWFATFNETFGDYSEKAHELLNTKLEQWAEEAVARGGFHNTTALLIQYENYRDWIVNHNVAYSELFLDTAGVASFDVWDLLPFTRGYVHILDKDPYLHHFAYDPQYFLNELDLLGQAAATQLARNISNSGAMQTYFAGETIPGDNLAYDADLSAWTEYIPYHFRPNYHGVGTCSMMPKEMGGVVDNAARVYGVQGLRVIDGSIPPTQMSSHVMTVFYAMALKISDAILEDY

SEQ ID NO: 1613 - protein, 577 aa, Aspergillus niger
GIEASLLTDPKDVSGRTVDYIIAGGGLVGLTTAARLTENPNISVLVIESGSYESDRGPIIEDLNAYGDIFGSSVDHAYETVELATNNQTALIRSGNGLGGSTLVNGGTWTRPHKAQVDSWETVFGNEGWNWDNVAAYSLQAERARAPNAKQIAAGHYFNASCHGVNGTVHAGPRDTGDDYSPIVKALMSAVEDRGVPTKKDFGCGDPHGVSMFPNTLHEDQVRSDAAREWLLPNYQRPNLQVLTGQYVGKVLLSQNGTTPRAVGVEFGTHKGNTHNVYAKHEVLLAAGSAVSPTILEYSGIGMKSILEPLGIDTVVDLPVGLNLQDQTTATVRSRITSAGAGQGQAAWFATFNETFGDYSEKAHELLNTKLEQWAEEAVARGGFHNTTALLIQYENYRDWIVNHNVAYSELFLDTAGVASFDVWDLLPFTRGYVHILDKDPYLHHFAYDPQYFLNELDLLGQAAATQLARNISNSGAMQTYFAGETIPGDNLAYDADLSAWTEYIPYHFRPNYHGVGTCSMMPKEMGGVVDNAARVYGVQGLRVIDGSIPPTQMSSHVMTVFYAMALKISDAILEDY

SEQ ID NO: 1614 - protein, 577 aa, Aspergillus niger
GIEASLLTDPKDVSGRTVDYIIAGGGLVGLTTAAKLTENPNISVLVIESGSYESDRGPIIEDLNAYGDIFGSSVDHAYETVELATNNQTALVRSGNGLGGSTLVNGGTWTRPHKAQVDSWETVFGNEGWNWDNVAAYSLQAERARAPNAKQIAAGHYFNTSCHGVNGTVHAGPRDTGDDYSPIVKALMSAVEDRGVPTKKDFGCGDPHGVSMFPNTLHEDQVRSDAAREWLLPNYQRPNLQVLTGQYVGKVLLSQNGTTPRAVGVEFGTHKGNTHNVYAKHEVLLAAGSAISPTILEYSGIGMKSILDPLGIDTVVDLPVGLNLQDQTTATVRSRITSAGAGQGQAAWFATFNETFGDYSEKAHELLNTKLEQWAEEAVARGGFHNTTALLIQYENYRDWIVNHNVAYSELFLDTAGVASFDVWDLLPFTRGYVHILDKDPYLHHFAYDPQYFLNELDLLGQAAATQLARNISNSGAMQTYFAGETIPGDNLAYDADLSAWTEYIPYHFRPNYHGVGTCSMMPKEMGGVVDNAAKVYGVQGLRVIDGSIPPTQVSSHVMTVFYAMALKISDAILEDY

SEQ ID NO: 1615 - protein, 577 aa, Aspergillus niger
GIEASLLKDPKLVAGRTYDYIIAGGGLAGLTVAEKLTENPNITVLVIESGSYESDRGPIIEDLNAYGEIFGTSVDHAYETVELATNNRTALIRSGNGLGGSTLINGGTWTRPHKAQVDSWETVFGNEGWNWDSVAAYSLQAERARAPNAKQIAAGHYFNAACHGLNGTVHVGPRDTGDDYSPLMRALMSAVEDRGVPTKKDLGCGDPHGVSMFPNTLHEDQVRADAAREWLLPNYQRPNLRVLTGQYVGKVLLSQNATTPRAVGVEFGTHKSNTHNVYAKHEVLLSAGSTVSPTILEYSGIGMKSILEPLGIDTVVDLPVGLNLQDQTTSTVRSRITSAGAGQGQAAWFATFNETFGKYTEKAHELLNTKLEQWAEEAVARGGFHNTTALLIQYENYRDWIVKDNVAYSELFLDTGGVASFDVWDLLPFTRGYVHILDKDPYLRHFAYDPQYFLNELDLLGQAAATQLARNISNSGAMQTYFAGETIPGNNLAYDADLSAWVEYIPEHFRPNYHGVGTCSMMPKEMGGVVDNAARVYGVQGLRVIDGSIPPTQLSSHVMTVFYAMALKIADAVLADY

SEQ ID NO: 1616 - protein, 577 aa, Aspergillus niger
GIEASLLTDPKDVSGRTVDYIIAGGGLTGLTTAARLTENPNISVLVIESGSYESDRGPIIEDLNAYGDIFGSSVDHAYETVELATNNQTALIRSGNGLGGSTLVNGGTWTRPHKAQVDSWETVFGNEGWNWDNVAAYSLQAERARAPNAKQIAAGHYFNASCHGVNGTVHAGPRDTGDDYSPIVKALMSAVEDRGVPTKKDFGCGDPHGVSMFPNTLHEDQVRSDAAREWLLPNYQRPNLQVLTGQYVGKVLLSQNGTTPRAVGVEFGTHKGNTHNVYAKHEVLLAAGSAVSPTILEYSGIGMKSILEPLGIDTVVDLPVGLNLQDQTTATVRSRITSAGAGQGQAAWFATFNETFGDYSEKAHELLNTKLEQWAEEAVARGGFHNTTALLIQYENYRDWIVNHNVAYSELFLDTAGVASFDVWDLLPFTRGYVHILDKDPYLHHFAYDPQYFLNELDLLGQAAATQLARNISNSGAMQTYFAGETIPGDNLAYDADLSAWTEYIPYHFRPNYHGVGTCSMMPKEMGGVVDNALRVYGVQGLRVIDGSIPPTQMSSHVMTVFYAMALKISDAILEDY

SEQ ID NO: 1617 - protein, 577 aa, Aspergillus niger
GIEASLLTDPKDVSGRTVDYIIAGGGLTGLTTAARLTENPNISVLVIESGSYESDRGPIIEDLNAYGDIFGSSVDHAYETVELATNNQTALIRSGNGLGGSTLVNGGTWTRPHKAQVDSWETVFGNEGWNWDNVAAYSLQAERARAPNAKQIAAGHYFNASCHGVNGTVHAGPRDTGDDYSPIVKALMSAVEDRGVPTKKDFGCGDPHGVSMFPNTLHEDQVRSDAAREWLLPNYQRPNLQVLTGQYVGKVLLSQNGTTPRAVGVEFGTHKGNTHNVYAKHEVLLAAGSAVSPTILEYSGIGMKSILEPLGIDTVVDLPVGLNLQDQTTATVRSRITSAGAGQGQAAWFATFNETFGDYSEKAHELLNTKLEQWAEEAVARGGFHNTTALLIQYENYRDWIVNHNVAYSELFLDTAGVASFDVWDLLPFTRGYVHILDKDPYLHHFAYDPQYFLNELDLLGQAAATQLARNISNSGAMQTYFAGETIPGDNLAYDADLSAWTEYIPYHFRPNYHGVGTASMMPKEMGGVVDNAARVYGVQGLRVIDGSIPPTQMSSHVMTVFYAMALKISDAILEDY

SEQ ID NO: 1618 - protein, 577 aa, Aspergillus niger
GIEASLLTDPKDVSGRTVDYIIAGGGLTGLTTAARLTENPNISVLVIESGSYESDRGPIIEDLNAYGDIFGSSVDHAYETVELATNNQTALVRSGNGLGGSTLVNGGTWTRPHKAQVDSWETVFGNEGWNWDNVAAYSLQAERARAPNAKQIAAGHYFNASCHGVNGTVHAGPRDTGDDYSPIVKALMSAVEDRGVPTKKDFGCGDPHGVSMFPNTLHEDQVRSDAAREWLLPNYQRPNLQVLTGQYVGKVLLSQNGTTPRAVGVEFGTHKGNTHNVYAKHEVLLAAGSAVSPTILEYSGIGMKSILEPLGIDTVVDLPVGLNLQDQTTATVRSRITSAGAGQGQAAWFATFNETFGDYSEKAHELLNTKLEQWAEEAVARGGFHNTTALLIQYENYRDWIVNHNVAYSELFLDTAGVASFDVWDLLPFTRGYVHILDKDPYLHHFAYDPQYFLNELDLLGQAAATQLARNISNSGAMQTYFAGETIPGDNLAYDADLSAWTEYIPYHFRPNYHGVGTCSMMPKEMGGVVDNAARVYGVQGLRVIDGSIPPTQMSSHVMTVFYAMALKISDAILEDY

SEQ ID NO: 1619 - protein, 577 aa, Aspergillus niger
GIEASLLTDPKDVSGRTVDYIIAGGGLTGLTTAARLTENPNISVLVIESGSYESDRGPIIEDLNAYGDIFGSSVDHAYETVELATNNQTALIRSGNGLGGSTLVNGGTWTRPHKAQVDSWETVFGNEGWNWDNVAAYSLQAERARAPNAKQIAAGHYFNASCHGVNGTVHAGPRDTGDDYSPIVKALMSAVEDRGVPTKKDFGCGDPHGVSMFPNTLHEDQVRSDAAREWLLPNYQRPNLQVLTGQYVGKVLLSQNGTTPRAVGVEFGTHKGNTHNVYAKHEVLLAAGSAVSPTILEYSGIGPKSILEPLGIDTVVDLPVGLNLQDQTTATVRSRITSAGAGQGQAAWFATFNETFGDYSEKAHELLNTKLEQWAEEAVARGGFHNTTALLIQYENYRDWIVNHNVAYSELFLDTAGVASFDVWDLLPFTRGYVHILDKDPYLHHFAYDPQYFLNELDLLGQAAATQLARNISNSGAMQTYFAGETIPGDNLAYDADLSAWTEYIPYHFRPNYHGVGTCSMMPKEMGGVVDNAARVYGVQGLRVIDGSIPPTQMSSHVMTVFYAMALKISDAILEDY

SEQ ID NO: 1620 - protein, 577 aa, Aspergillus niger
GIEASLLTDPKDVSGRTVDYIIAGGGLTGLTTAARLTENPNISVLVIESGSYESDRGPIIEDLNAYGDIFGSSVDHAYETVELATNNQTALIRSGNGLGGSTLVNGGTWTRPHKAQVDSWETVFGNEGWNWDNVAAYSLQAERARAPNAKQIAAGHYFNASCHGVNGTVHAGPRDTGDDYSPIVKALMSAVEDRGVPTKKDFGCGDPHGVSMFPNTLHEDQVRSDAAREWLLPNYQRPNLQVLTGQYVGKVLLSQNGTTPRAVGVEFGTHKGNTHNVYAKHEVLLAAGSAVSPTILEYSGIGMKSILEPLGIDTVVDLPVGLNLQDQTTATVRSRITSAGAGQGQAAWFATFNETFGDYSEKAHELLNTKLEQWAEEAVARGGFHNTTALLIQYENYRDWIVNHNVAYSELFLDTAGVASFDVWDLLPFTRGYVHILDKDPYLHHFAYDPQYFLNELDLLGQAAATQLARNISNSGAMQTYFAGETIPGDNLAYDADLSAWTEYIPYHFRPNYHGVGTCSMMPKEMGGVVDNAAKVYGVQGLRVIDGSIPPTQMSSHVMTVFYAMALKISDAILEDY

SEQ ID NO: 1621 - protein, 577 aa, Aspergillus niger
GIEASLLTDPKDVSGRTVDYIIAGGGLTGLTTAARLTENPNISVLVIESGSYESDRGPIIEDLNAYGDIFGSSVDHAYETVELATNNQTALIRFGNGLGGSTLVNGGTWTRPHKAQVDSWETVFGNEGWNWDNVAAYSLQAERARAPNAKQIAAGHYFNASCHGVNGTVHAGPRDTGDDYSPIVKALMSAVEDRGVPTKKDFGCGDPHGVSMFPNTLHEDQVRSDAAREWLLPNYQRPNLQVLTGQYVGKVLLSQNGTTPRAVGVEFGTHKGNTHNVYAKHEVLLAAGSAVSPTILEYSGIGMKSILEPLGIDTVVDLPVGLNLQDQTTATVRSRITSAGAGQGQAAWFATFNETFGDYSEKAHELLNTKLEQWAEEAVARGGFHNTTALLIQYENYRDWIVNHNVAYSELFLDTAGVASFDVWDLLPFTRGYVHILDKDPYLHHFAYDPQYFLNELDLLGQAAATQLARNISNSGAMQTYFAGETIPGDNLAYDADLSAWTEYIPYHFRPNYHGVGTCSMMPKEMGGVVDNAARVYGVQGLRVIDGSIPPTQMSSHVMTVFYAMALKISDAILEDY

SEQ ID NO: 1622 - protein, 577 aa, Aspergillus niger
GIEASLLKDPKLQAGRTYDYIIAGGGLAGLTVAEKLTENPNITVLVIESGSYESDRGPIIEDLNAYGEIFGTSVDHAYETVELATNNRTALIRSGNGLGGSTLINGGTWTRPHKAQVDSWETVFGNEGWNWDSVAAYSLQAERARAPNAKQIAAGHYFNASCHGLNGTVHVGPRDTGDDYSPLMRALMSAVEDRGVPTKKDLGCGDPHGVSMFPNTLHEDQVRADAAREWLLPNYQRPHLQVLTGQYVGKVLLSQNATTPRAVGVEFGTHKSNTHNVYAKHEVLLSAGSTVSPTILEYSGIGMKSILEPLGIDTVVDLPVGLNLQDQTTSTVRSRITSAGAGQGQAAWFATFNETFGKYTEKAHELLNTKLEQWAEEAVARGGFHNTTALLIQYENYRDWIVKDNVAYSELFLDTGGVASFDVWDLLPFTRGYVHILDKDPYLRHFAYDPQYFLNELDLLGQAAATQLARNISNSGAMQTYFAGETIPGENLAYDADLSAWVEYIPEHFRPNYHGVGTCSMMPKEMGGVVDNAARVYGVQGLRVIDGSIPPTQLSSHVMTVFYAMALKIADAVLADY

SEQ ID NO: 1623 - protein, 577 aa, Aspergillus niger
GIEASLLKDPKLVNGRTYDYIIAGGGLAGLTVAEKLTENPDITVLVIESGSYESDRGPIIEDLNAYGEIFGTSVDHAYETVELAADNRTALIRSGNGLGGSTLINGGTWTRPHKAQVDSWETVFGNEGWNWDSVAAYSLQAERARAPNAKQIAAGHYFNASCHGLNGTVHVGPRDTGDDYSPLMRALMSAVEDRGVPTKKDLGCGDPHGVSMFPNTLHEDQVRADAAREWLLPNYQRPNLQVLTGQYVGKVLLSQNATTPRAVGVEFGTHKSNTHNVYAKHEVLLSAGSTVSPTILEYSGIGMKSILEPLGIDTVVDLPVGLNLQDQTTSTVRSRITSAGAGQGQAAWFATFNETFGDYTEKAHELLNTKLEQWAEEAVARGGFHNTTALLIQYENYRDWIVKDNVAYSELFLDTGGVASFDVWDLLPFTRGYVHILDKDPYLRHFAYDPQYFLNELDLLGQAAATQLARNISNSGAMQTYFAGETIPGDNLAYDADLSAWVEYIPEHFRPNYHGVGTCSMMPKEMGGVVDNAARVYGVQGLRVIDGSIPPTQLSSHVMTVFYAMALKIADAVLADY

SEQ ID NO: 1624 - protein, 577 aa, Aspergillus niger
GIEASLLTDPEDVSGRTVDYIIAGGGLVGLTTAARLTENPNISVLVIESGSYESDRGPIIEDLNAYGDIFGSSVDHAYETVELATNNQTALVRSGNGLGGSTLVNGGTWTRPHKAQVDSWETVFGNEGWNWDNVAAYSLQAERARAPNARQIAAGHYFNASCHGVNGTVHAGPRDTGDDYSPIVKALMSAVEDRGVPTKKDFGCGDPHGVSMFPNTLHEDQVRSDAAREWLLPNYQRPNLQVLTGQYVGKVLLSQNGTTPRAVGVEFGTHKGNTHNVYAKHEVLLAAGSAVSPTILEYSGIGMKSILEPLGIDTVVDLPVGLNLQDQTTATVRSRITSAGAGQGQAAWFATFNETFGDYSEKAHELLNTKLEQWAEEAVARGGFHNTTALLIQYENYRDWIVNHNVAYSELFLDTAGVASFDVWDLLPFTRGYVHILDKDPYLHHFAYDPQYFLNELDLLGQAAATQLARNISNSGAMQTYFAGETIPGDNLAYDADLSAWTEYIPYHFRPNYHGVGTCSMMPKEMGGVVDNAARVYGVQGLRVIDGSIPPTQMSSHVMTVFYAMALKISDAILEDY

SEQ ID NO: 1625 - protein, 577 aa, Aspergillus niger
GIEASLLTDPKDVSGRTVDYIIAGGGLTGLTTAARLTENPNISVLVIESGSYESDRGPIIEDLNAYGDIFGSSVDHAYETVELATNNQTALIRSGNGLGGSTLVNGGTWTRPHKAQVDSWETVFGNEGWNWDNVAAYSLQAERARAPNAKQIAAGHYFNASCHGVNGTVHAGPRDTGDDYSPIVKALMSAVEDRGVPTKKDFGCGDPHGVSMFPNTLHEDQVRSDAAREWLLPNYQRPNLQVLTGQYVGKVLLSQNGTTPRAVGVEFGTHKGNTHNVYAKHEVLLAAGSAVSPTILEYSGIGMKSILEPLGIDTVVDLPVGLNLQDQTTATVRSRITSAGAGQGQAAWFATFNETFGDYSEKAHELLNTKLEQWAEEAVARGGFHNTTALLIQYENYRDWIVNHNVAYSELFLDTAGVASFDVWDLLPFTRGYVHILDKDPYLHHFAYDPQYFLNELDLLGQAAATQLARNISNSGAMQTYFAGETIPGDNLAYDADLSAWTEYIPYHFRPNYHGVGTCSMMPREMGGVVDNAARVYGVQGLRVIDGSIPPTQMSSHVMTVFYAMALKISDAILEDY

SEQ ID NO: 1626 - protein, 577 aa, Aspergillus niger
GIEASLLTDPKDVSGRTVDYIIAGGGLTGLTTAARLTENPNISVLVIESGCYESDRGPIIEDLNAYGDIFGSSVDHAYETVELATNNQTALIRSGNGLGGSTLVNGGTWTRPHKAQVDSWETVFGNEGWNWDNVAAYSLQAERARAPNAKQIAAGHYFNASCHGVNGTVHAGPRDTGDDYSPIVKALMSAVEDRGVPTKKDFGCGDPHGVSMFPNTLHEDQVRSDAAREWLLPNYQRPNLQVLCGQYVGKVLLSQNGTTPRAVGVEFGTHKGNTHNVYAKHEVLLAAGSAVSPTILEYSGIGMKSILEPLGIDTVVDLPVGLNLQDQTTATVRSRITSAGAGQGQAAWFATFNETFGDYSEKAHELLNTKLEQWAEEAVARGGFHNTTALLIQYENYRDWIVNHNVAYSELFLDTAGVASFDVWDLLPFTRGYVHILDKDPYLHHFAYDPQYFLNELDLLGQAAATQLARNISNSGAMQTYFAGETIPGDNLAYDADLSAWTEYIPYHFRPNYHGVGTCSMMPKEMGGVVDNAARVYGVQGLRVIDGSIPPTQMSSHVMTVFYAMALKISDAILEDY

SEQ ID NO: 1627 - protein, 577 aa, Aspergillus niger
GIEASLLTDPKDVSGRTVDYIIAGGGLTGLTTAARLTENPNISVLVIESGSYESDRGPIIEDLNAYGDIFGSSVDHAYETVELATNNQTALIRSGNGLGGSTLVNGGTWTRPHKAQVDSWETVFGNEGWNWDNVAAYSLQAERARAPNAKQIAAGHYFNASCHGVNGTVHAGPRDTGDDYSPIVKALMSAVEDRGVPTKKDFGCGDPHGVSMFPNTLHEDQVRSDAAREWLLPNYQRPNLQVLTGQYVGKVLLSQNGTTPRAVGVEFGTHKGNTHNVYAKHEVLLAAGSAVSPTILEYSGIGMKSILEPLGIDTVVDLPVGLNLQDQTTATVRSRITSAGAGQGQAAWFATFNETFGDYSEKAHELLNTKLEQWAEEAVARGGFHNTTALLIQYENYRDWIVNHNVAYSELFLDTXGVASFDVWDLLPFTRGYVHILDKDPYLHHFAYDPQYFLNELDLLGQAAATQLARNISNSGAMQTYFAGETIPGDNLAYDADLSAWTEYIPYHFRPNYHGVGTCSMMPKEMGGVVDNAARVYGVQGLRVIDGSIPPTQMSSHVMTVFYAMALKISDAILEDY

SEQ ID NO: 1628 - protein, 577 aa, Aspergillus niger
GIEASLLTDPKDVSGRTVDYIIAGGGLVGLTTAAKLTENPNISVLVIESGSYESDRGPIIEDLNAYGDIFGSSVDHAYETVELATNNQTALVRSGNGLGGSTLINGGTWTRPHKAQVDSWETVFGNEGWNWDNVAAYSLQAERARAPNAKQIAAGHYFNTSCHGVNGTVHAGPRDTGDDYSPIVKALMSAVEDRGVPTKKDFGCGDPHGVSMFPNTLHEDQVRSDAAREWLLPNYQRPNLQVLTGQYVGKVLLSQNGTTPRAVGVEFGTHKGNTHNVYAKHEVLLAAGSAVSPTILEYSGIGMKSILEPLGIDTVVDLPVGLNLQDQTTATVRSRITSAGAGQGQAAWFATFNETFGDYSEKAHELLNTKLEQWAEEAVARGGFHNTTALLIQYENYRDWIVNHNVAYSELFLDTAGVASFDVWDLLPFTRGYVHILDKDPYLHHFAYDPQYFLNELDLLGQAAATQLARNISNSGAMQTYFAGETIPGDNLAYDADLSAWTEYIPYHFRPNYHGVGTCSMMPKEMGGVVDNAARVYGVQGLRVIDGSIPPTQVSSHVMTVFYAMALKISDAILEDY

SEQ ID NO: 1629 - protein, 577 aa, Aspergillus niger
GIEASLLTDPKDVSGRTVDYIIAGGGLTGLTTAAKLTENPNISVLVIESGSYESDRGPIIEDLNAYGDIFGSSVDHAYETVELATNNQTALIRSGNGLGGSTLVNGGTWTRPHKAQVDSWETVFGNEGWNWDNVAAYSLQAERARAPNAKQIAAGHYFNASCHGVNGTVHAGPRDTGDDYSPIVKALMSAVEDRGVPTKKDFGCGDPHGVSMFPNTLHEDQVRSDAAREWLLPNYQRPNLQVLTGQYVGKVLLSQNGTTPRAVGVEFGTHKGNTHNVYAKHEVLLAAGSAVSPTILEYSGIGMKSILEPLGIDTVVDLPVGLNLQDQTTATVRSRITSAGAGQGQAAWFATFNETFGDYSEKAHELLNTKLEQWAEEAVARGGFHNTTALLIQYENYRDWIVNHNVAYSELFLDTAGVASFDVWDLLPFTRGYVHILDKDPYLHHFAYDPQYFLNELDLLGQAAATQLARNISNSGAMQTYFAGETIPGDNLAYDADLSAWTEYIPYHFRPNYHGVGTCSMMPKEMGGVVDNAARVYGVQGLRVIDGSIPPTQMSSHVMTVFYAMALKISDAILEDY

SEQ ID NO: 1630 - protein, 577 aa, Aspergillus niger
GIEASLLTDPKEVAGRTVDYIIAGGGLTGLTSAARLTENPDITVLVIEKGSYESDRGHIIEDLNAYGDIFGSSVDHAYETVELATNNATALIRSGNGLGGSTYFNGGTWTRPHKAQVDSWETVFGNEGWNWDSVAAYSLQAERARAPNAKQIAAGHYFNASCHGINGTVHAGPRDTGDDYSPIVKALMSAVEDRGVPTKKDLGCGDPHGVSMFPNTLHEDQVRSDAAREWLLPNYQRPNLEVLTGQYVGKVLLSQNATTPRAVGVEFGTHKGNTHNVYAKHEVLLAAGSAVSPTILEYSGIGMKSILEPLGIDTVVDLPVGLNLQDQTTSTVRSRITSAGAGQGQAAWFATFNETFGDYAEKAHELLNTKLEQWAEEAVARGGFHNTTALLIQYENYRDWIVKDNVAYSELFLDTAGVASFDVWDLLPFTRGYVHILDKDPYLRHFAYDPQYFLNELDLLGQAAATQLARNISNSGAMQTYFAGETIPGDNLAYDADLSAWVEYIPYNFRPNYHGVGTCSMMPKEMGGVVDNAARVYGVQGLRVIDGSIPPTQMSSHVSTVFYAMALKIADAILADY

SEQ ID NO: 1631 - protein, 577 aa, Aspergillus niger
GIEASLLTDPKDVSGRTVDYIIAGGGLTGLTTAARLTENPNISVLVIESGSYESDRGPIIEDLNAYGDIFGSSVDHAYETVELATNNQTALIRSGNGLGGSTLVNGGTWTRPHKAQVDAWETVFGNEGWNWDNVAAYSLQAERARAPNAKQIAAGHYFNASCHGVNGTVHAGPRDTGDDYSPIVKALMSAVEDRGVPTKKDFGCGDPHGVSMFPNTLHEDQVRSDAAREWLLPNYQRPNLQVLTGQYVGKVLLSQNGTTPRAVGVEFGTHKGNTHNVYAKHEVLLAAGSAVSPTILEYSGIGMKSILEPLGIDTVVDLPVGLNLQDQTTATVRSRITSAGAGQGQAAWFATFNETFGDYSEKAHELLNTKLEQWAEEAVARGGFHNTTALLIQYENYRDWIVNHNVAYSELFLDTAGVASFDVWDLLPFTRGYVHILDKDPYLHHFAYDPQYFLNELDLLGQAAATQLARNISNSGAMQTYFAGETIPGDNLAYDADLSAWTEYIPYHFRPNYHGVGTCSMMPKEMGGVVDNAARVYGVQGLRVIDGSIPPTQMSSHVMTVFYAMALKISDAILEDY

SEQ ID NO: 1632 - protein, 577 aa, Aspergillus niger
GIEASLLTDPKDVSGRTVDYIIAGGGLTGLTTAARLTENPNISVLVIESGSYESDRGPIICDLNAYGDIFGSSVDHAYETVELATNNQTALIRSGNGLGGSTLVNGGTWTRPHKAQVDSWETVFGNEGWNWDNVAAYSLQAERARAPNAKQIAAGHYFNASCHGVNGTVHAGPRDTGDDYSPIVKALMSAVEDRGVPTKKDFGCGDPHGVSMFPNTLHEDQCRSDAAREWLLPNYQRPNLQVLTGQYVGKVLLSQNGTTPRAVGVEFGTHKGNTHNVYAKHEVLLAAGSAVSPTILEYSGIGMKSILEPLGIDTVVDLPVGLNLQDQTTATVRSRITSAGAGQGQAAWFATFNETFGDYSEKAHELLNTKLEQWAEEAVARGGFHNTTALLIQYENYRDWIVNHNVAYSELFLDTAGVASFDVWDLLPFTRGYVHILDKDPYLHHFAYDPQYFLNELDLLGQAAATQLARNISNSGAMQTYFAGETIPGDNLAYDADLSAWTEYIPYHFRPNYHGVGTCSMMPKEMGGVVDNAARVYGVQGLRVIDGSIPPTQMSSHVMTVFYAMALKISDAILEDY

SEQ ID NO: 1633 - protein, 577 aa, Aspergillus niger
GIEASLLTDPKDVSGRTVDYIIAGGGLTGLTTAARLTENPNISVLVIESGSYESDRGPIIEDLNAYGDIFGSSVDHAYETVELATNNQTALIRSGNGLGGSTLVNGGTWTRPHKAQVDSWETVFGNEGWNWDNVAAYSLQAERARAPNAKQIAAGHYFNASCHGVNGTVHAGPRDTGDDYSPIVKALMSAVEDRGVPTKKDFGCGDPHGVSMFPNTLHEDQVRSDAAREWLLPNYQRPNLVVLTGQYVGKVLLSQNGTTPRAVGVEFGTHKGNTHNVYAKHEVLLAAGSAVSPTILEYSGIGMKSILEPLGIDTVVDLPVGLNLQDQTTATVRSRITSAGAGQGQAAWFATFNETFGDYSEKAHELLNTKLEQWAEEAVARGGFHNTTALLIQYENYRDWIVNHNVAYSELFLDTAGVASFDVWDLLPFTRGYVHILDKDPYLHHFAYDPQYFLNELDLLGQAAATQLARNISNSGAMQTYFAGETIPGDNLAYDADLSAWTEYIPYHFRPNYHGVGTCSMMPKEMGGVVDNAARVYGVQGLRVIDGSIPPTQMSSHVMTVFYAMALKISDAILEDY

SEQ ID NO: 1634 - protein, 577 aa, Aspergillus niger
GIEASLLTDPKDVSGRTVDYIIAGGGLTGLTTAARLTENPNISVLVIESGSYESDRGPIIEDLNAYGDIFGSSVDHAYETVELATNNQTALIRSGNGLGGSTLVNGGTWTRPHKAQVDSWETVFGNEGWNWDNVAAYSLQAERARAPNAKQIAAGHYFNASCHGVNGTVHAGPRDTGDDYSPIVKALMSAVEDRGVPTKKDFGCGDPHGVSMFPNTLHEDQVRSDAAREWLLPNYQRPNLQVLTGQYVGKVLLSQNGTTPRAVGVEFGTHKGNTHNVYAKHEVLLAAGSAVSPTILEYSGIGMKSILEPLGIDTVVDLPVGLNLQDQTTATVRSRITSAGAGQGQAAWFATFNETFGDYSEKAHELLNTKLEQWAEEAVARGGFHNTTALLIQYENYRDWIVNHNVAYSELFLDTAGVASFDVWDLLPFTRGYVHILDKDPYLHHFAYDPQYFLNELDLLGQAAATQLARNISNSGAMQTYFAGETIPGDNLAYDADLSAWTEWIPYHFRPNYHGVGTCSMMPKEMGGVVDNAARVYGVQGLRVIDGSIPPTQMSSHVMTVFYAMALKISDAILEDY

SEQ ID NO: 1635 - protein, 577 aa, Aspergillus niger
GIEASLLTDPKDVSGRTVDYIIAGGGLVGLTTAARLTENPNISVLVIESGSYESDRGPIIEDLNAYGDIFGSSVDHAYETVELATNNQTALVRSGNGLGGSTLVNGGTWTRPHKAQVDSWETVFGNEGWNWDNVLAYSLQAERARAPNAKQIAAGHYFNASCHGVNGTVHAGPRDTGDDYSPIVKALMSAVEDRGVPTKKDFGCGDPHGVSMFPNTLHEDQVRSDAAREWLLPNYQRPNLQVLTGQYVGKVLLSQNGTTPRAVGVEFGTHKGNTHNVYAKHEVLLAAGSAVSPTILEYSGIGMKSILEPLGIDTVVDLPVGLNLQDQTTATVRSRITSAGAGQGQAAWFATFNETFGDYSEKAHELLNTKLEQWAEEAVARGGFHNTTALLIQYENYRDWIVNHNVAYSELFLDTAGVASFDVWDLLPFTRGYVHILDKDPYLHHFAYDPQYFLNELDLLGQAAATQLARNISNSGAMQTYFAGETIPGDNLAYDADLSAWTEYIPYHFRPNYHGVGTCSMMPKEMGGVVDNAARVYGVQGLRVIDGSIPPTQMSSHVMTVFYAMALKISDAILEDY

SEQ ID NO: 1636 - protein, 577 aa, Aspergillus niger
GIEASLLTDPKDVSGRTVDYIIVGGGLTGLTTAARLTENPNISVLVIESGSYESDRGPIIEDLNAYGDIFGSSVDHAYETVELATNNQTALIRSGNGLGGSTLVNGGTWTRPHKAQVDSWETVFGNEGWNWDNVAAYSLQAERARAPNAKQIAAGHYFNASCHGVNGTVHAGPRDTGDDYSPIVKALMSAVEDRGVPTKKDFGCGDPHGVSMFPNTLHEDQVRSDAAREWLLPNYQRPNLQVLTGQYVGKVLLSQNGTTPRAVGVEFGTHKGNTHNVYAKHEVLLAAGSAVSPTILEYSGIGMKSILEPLGIDTVVDLPVGLNLQDQTTATVRSRITSAGAGQGQAAWFATFNETFGDYSEKAHELLNTKLEQWAEEAVARGGFHNTTALLIQYENYRDWIVNHNVAYSELFLDTAGVASFDVWDLLPFTRGYVHILDKDPYLHHFAYDPQYFLNELDLLGQAAATQLARNISNSGAMQTYFAGETIPGDNLAYDADLSAWTEYIPYHFRPNYHGVGTCSMMPKEMGGVVDNAARVYGVQGLRVIDGSIPPTQMSSHVMTVFYAMALKISDAILEDY

SEQ ID NO: 1637 - protein, 577 aa, Aspergillus niger
GIEASLLTDPKDVSGRTVDYIIAGGGLTGLTTAARLTENPNISVLVIESGSYESDRGPIIEDLNAYGDIFGSSVDHAYETVEPATNNQTALIRSGNGLGGSTLVNGGTWTRPHKAQVDSWETVFGNEGWNWDNVAAYSLQAERARAPNAKQIAAGHYFNASCHGVNGTVHAGPRDTGDDYSPIVKALMSAVEDRGVPTKKDFGCGDPHGVSMFPNTLHEDQVRSDAAREWLLPNYQRPNLQVLTGQYVGKVLLSQNGTTPRAVGVEFGTHKGNTHNVYAKHEVLLAAGSAVSPTILEYSGIGMKSILEPLGIDTVVDLPVGLNLQDQTTATVRSRITSAGAGQGQAAWFATFNETFGDYSEKAHELLNTKLEQWAEEAVARGGFHNTTALLIQYENYRDWIVNHNVAYSELFLDTAGVASFDVWDLLPFTRGYVHILDKDPYLHHFAYDPQYFLNELDLLGQAAATQLARNISNSGAMQTYFAGETIPGDNLAYDADLSAWTEYIPYHFRPNYHGVGTCSMMPKEMGGVVDNAARVYGVQGLRVIDGSIPPTQMSSHVMTVFYAMALKISDAILEDY

SEQ ID NO: 1638 - protein, 556 aa, Aspergillus niger
LVSSLVVSLAAALPHYIRSNGIEASLLTDPKDVSGRTVDYIIAGGGLTGLTTAARLTENPNISVLVIESGSYESDRGPIIEDLNAYGDIFGSSVDHAYETVELATNNQTALIRSGNGLGGSTLVNGGTWTRPHKAQVDSWETVFGNEGWNWDNVAAYSLQAERARAPNAKQIAAGHYFNASCHGTNGTVHAGPRDTGDDYSPIVKALMSAVEDRGVPTKKDFGCGDPHGVSMFPNTLHEDQVRSDAAREWLLPNYQRPNLQVLTGQYVGKVLLSQNGTTPRAVGVEFGTHKGNTHNVYAEHEVLLAAGSAVSPTILEYSGIGMKSILEPLGIDTVVDLPVGLNLQDQTTATVRSRITSAGAGQGQAAWFATFNETFGDYSEKAHELLNTKLEQWAEEAVARGGFHNTTALLIQYENYRDWIVNHNVAYSELFLDTAGVASFDVWDLLPFTRGYVHILDKDPYLHHFAYDPQYFLNELDLLGQAAATQLARNISNSGAMQTYFAGETIPGDNLAYDADLSAWTEYIPYHFRPNYHGVGTCSMMPKEMGGVVDNAARV

SEQ ID NO: 1639 - protein, 597 aa, Aspergillus niger
LVSSLVVSLAAALPHYIRSNGIEASLLTDPKEVAGRTVDYIIAGGGLTGLTTAARLTENPDITVLVIESGSYESDRGPIIEDLNAYGDIFGSSVDHAYETVELATNNQTALIRSGNGLGGSTLVNGGTWTRPHKAQVDSWETVFGNEGWNWDSVAAYSLQAFRARAPNAKQIAAGHYFNASCHGINGTVHAGPRDTGDDYSPIVKALMSAVEDRGVPTKKDLGCGDPHGVSMFPNTLHEDQVRSDAAREWLLPNYQRPNLQVLTGRYVGKVLLSQNATTPRAVGVEFGTHKGNTHNVYAKHEVLLAAGSAVSPTIIEYSGIGMKSILEPLGIDTVVDLPVGLNLQDQTTSTVRSRITSAGAGQGQAAWFATFNETFGDYAEKAHELLNTKLEQWAEEAVARGGFHNTTALLIQYENYRDWIVKDNVAYSELFLDTAGVASFDVWDLLPFTRGYVHILDKDPYLRHFAYDPQYFLNFLDLLGQAAATQLARNISNSGAMQTYFAGETIPGDNLAYDADLSAWVEYIPYNFRPNYHGVGTCSMMPKEMGCVVDNAARVYGVQGLRVIDGSIPPTQMSSHVMTVFYAMALKVADATLADY

SEQ ID NO: 1640 - protein, 597 aa, Aspergillus niger
LVSSLVVSLAAALPHYIRSNGIEASLLTDPKDVSGRTVDYIIAGGGLTGLTTAARLTENPNISVLVIESGSYESDRGPIIEDLNAYGDIFGSSVDHAYETVELATNNQTALIRSGNGLGGSTLVNGGXWTRPHKAQVDSWETVFGNEGWNWDNVAAYSLQAERARAPNAKQIAAGHYFNASCHGVNGTVHAGPRDTGDDYSPIVKALMSAVEDRGVPTKKDFGCGDPHGVSMFPNTLHEDQVRSDAAREWLLPNYQRPNLQVLTGQYVGKVLLSQNGTTPRAVGVEFGTHKGNTHNVYAKHEVLLAAGSAVSPTILEYSGIGMKSILEPLGIDTVVDLPVGLNLQDQTTATVRSRITSAGAGQGQAAWXATFNETFGDYSEKAHELLNTKLEQWAEEAVARGGFHNTTALLIQYENYRDWIVNHNVAYSELFLDTAGVASFDVWDLLPFTRGYVHILDKDPYLHHFAYDPQYFLNELDLLGQAAATQLARNISNSGAMQTYFAGETIPGDNLAYDADLSAWTEYIPYHFRPNYHGVGTCSMMPKEMGGVVDNAARVYGVQGLRVIDGSIPPTQMSSHVMTVFYAMALKISDAILEDY

SEQ ID NO: 1641 - protein, 576 aa, Aspergillus niger
IEASLLTDPKEVAGRTVDYIIAGGGLTGLTTAARLTENPDITVLVIESGSYESDRGPIIEDLNAYGDIFGSSVDHAYETVELATNNQTALIRSGNGLGGSTLVNGGTWTRPHKAQVDSWETVFGNEGWNWDSVAAYSLQAERARAPNAKQIAAGHYFNPSCHGINGTVHAGPRDTGDDYSPIVKALMSAVEDRGVPTKKDLGCGDPHGVSMFPNTLHEDQVRSDAAREWLLPNYQRPNLQVLTGQYVGKVLLSQNATTPRAVGVEFGTHKGNTHNVYAKHEVLLAAGSAVSPTILEYSGIGMKSILEPLGIDTVVDLPVGLNLQDQTTSTVRSRITSAGAGQGQAAWFATFNETFGDYTEKAHELLNTKLEQWAEEAVARGGFHNTTALLIQYENYRDWIVKDNVAYSELFLDTAGEASFDVWDLLPFTRGYVHILDKDPYLRHFAYDPQYFLNELDLLGQAAATQLARNISNSGAMQTYFAGETIPGDNLAYDADLRAWVEYIPYNFRPNYHGVGTCSMMPKEMGGVVDNAARVYGVQGLRVIDGSIPPTQMSSHVMTVFYAMALKIADAVLADY

SEQ ID NO: 1642 - protein, 576 aa, Aspergillus niger
IEASLLTDPKEVAGRTVDYIIAGGGLTGLTTAARLTENPDITVLVIESGSYESDRGPIIEDLNAYGDIFGSSVDHAYETVELATNNQTALIRSGNGLGGSTLVNGGTWTRPHKAQVDSWETVFGNEGWNWDSVAAYSLQAERARAPNAKQIAAGHYFDASCHGINGTVHAGPRDTGDDYSPIVKALMSAVEDRGVPTKKDLGCGDPHGVSMFPNTLHEDQVRSDAAREWLLPNYQRPNLQVLTGQYVGKVLLSQNATTPRAVGVEFGTHKGNTHNVYAKHEVLLAAGSAVSPTILEYSGIGMKSILEPLGIDTVVDLPVGLNLQDQTTSTVRSRITSAGAGQGQAAWFATFNETFGDYTEKAHELLNTKLEQWAEEAVARGGFHNTTALLIQYENYRDWIVKDNVAYSELFLDTAGEASFDVWDLLPFTRGYVHILDKDPYLRHFAYDPQYFLNELDLLGQAAATQLARNISNSGAMQTYFAGETIPGDNLAYDADLRAWVEYIPYNFRPNYHGVGTCSMMPKEMGGVVDNAARVYGVQGLRVIDGSIPPTQMSSHVMTVFYAMALKIADAVLADY

SEQ ID NO: 1643 - protein, 576 aa, Synthetic construct
GIEASLLTDPKDVSGRTVDYIIAGGGLTGLTTAARLTENPNISVLVIESGSYESDRGPIIEDLNAYGDIFGSSVDHAYETVELATNNQTALIRSGNGLGGSTLVNGGTWTRPHKAQVDSWETVFGNEGWNWDNVAYSLQAERARAPNAKQIAAGHYFNASCHGVNGTVHAGPRDTGDDYSPIVKALMSAVEDRGVPTKKDFGCGDPHGVSMFPNTLHEDQVRSDAAREWLLPNYQRPNLQVLTGQTVGKVLLSQNGTTPRAVGVEFGTHKGNTHNVYAKHEVLLAAGSAVSPTILEYSGIGMKSILEPLGIDTVVDLPVGLNLQDQTTATVRSRITSAGAGQGQAAWFATFNETFGDYSEKAHELLNTKLEQWAEEAVARGGFHNTTALLIQYENYRDWIVNHNVAYSELFLDTAGVASFDVWDLLPFTRGYVHILDKDPYLHHFAYDPQYFLNELDLLGQAAATQLARNISNSGAMQTTFAGETIPGDNLAYDADLSAWTEYIPYHFRPNTHGVGTCSMMPKEMGGVVDNAARVYGVQGLRVIDGSIPPTQMSSHVMTVFYAMALKISDAILEDY

SEQ ID NO: 1644 - protein, 576 aa, Aspergillus niger
IEASLLTDPKEVAGRTYDYIIAGGGLTGLTVAARLTENPDITVLVIESGSYESDRGPIIEDLNAYGQIFGSSVDHAYETVELATNNRTALIRSGNGLGGSTLINGGTWTRPHKAQVDSWETVFGNEGWNWDSVAAYSLQAERARAPNAKQIAAGHYFNASCHGINGTVHAGPRDTGDDYSPIVKALMSAVEDRGVPTKKDLGCGDPHGVSMFPNTLHEDQVRSDAAREWLLPNYQRPNLQVLTGQYVGKVLLSQNATTPRAVGVEFGTHKGNTHNVYAKHEVLLAAGSAVSPTILEYSGIGLKSILEPLGIDTVVDLPVGLNLQDQTTSTVRSRITSAGAGQGQAAWFATFNETFGDYAEKAHELLNTKLEQWAEEAVARGGFHNTTALLIQYENYRDWIVKDNVAYSELFLDTAGVASFDVWDLLPFTRGYVHILDKDPYLRHFAYDPQYFLNELDLLGQAAATQLARNISNSGAMQTYFAGETIPGDNLAYDADLSAWVEYIPYNFRPNYHGVGTCSMMPKEMGGVVDNAARVYGVQGLRVIDGSIPPTQMSSHVMTVFYAMALKIADAILADY

SEQ ID NO: 1645 - protein, 576 aa, Aspergillus niger
IEASLLKDPKEVAGRTYDYIIAGGGLTGLTVAARLTENPNITVLVIESGSYESDRGPIIEDLNAYGDIFGSSVDHAYETVELATNNQTALIRSGNGLGGSTLINGGTWTRPHKAQVDSWETVFGNEGWNWDSVAAYSLQAERARAPNAKQIAAGHYFNPSCHGLNGTVHAGPRDTGDDYSPIVKALMSAVEDRGVPTKKDLGCGDPHGVSMFPNTLHEDQVRSDAAREWLLPNYQRPNLQVLTGQYVGKVLLSQNATTPRAVGVEFGTHKGNTHNVYAKHEVLLAAGSAVSPTILEYSGIGMKSILEPLGIDTVVDLPVGLNLQDQTTSTVRSRITPAGAGQGQAAWFATFNETFGDYAEKAHELLNTKLEQWAEEAVARGGFHNTTALLIQYENYRDWIVKDNVAYSELFLDTAGVASFDVWDLLPFTRGYVHILDKDPYLRHFAYDPQYFLNELDLLGQAAATQLARNISNSGAMQTYFAGETIPGDNLAYDADLRAWVEYIPENFRPNYHGVGTCSMMPKEMGGVVDNAARVYGVQGLRVIDGSIPPTQLSSHVMTVFYAMALKIADAVLADY

SEQ ID NO: 1646 - protein, 576 aa, Aspergillus niger
IEASLLKDPKEVAGRTYDYIIAGGGLTGLTVAARLTENPNITVLVIESGSYESDRGPIIEDLNAYGDIFGSSVDHAYETVELATNNRTALIRSGNGLGGSTLINGGTWTRPHKAQVDSWETVFGNEGWNWDSVAAYSLQAERARAPNAKQIAAGHYFNASCHGINGTVHAGPRDTGDDYSPIVKALMSAVEDRGVPTKKDLGCGDPHGVSMFPNTLHEDQVRSDAAREWLLPNYQRPNLQVLTGQYVGKVLLSQNATTPRAVGVEFGTHKGNTHNVYAKHEVLLAAGSAVSPTILEYSGIGMKSILEPLGIDTVVDLPVGLNLQDQTTSTVRSRITPAGAGQGQAAWFATFNETFGDYAEKAHELLNTKLEQWAEEAVARGGFHNTTALLIQYENYRDWIVKDNVAYSELFLDTAGVASFDVWDLLPFTRGYVHILDKDPYLRHFAYDPQYFLNELDLLGQAAATQLARNISNSGAMQTYFAGETIPGDNLAYDADLSAWVEYIPENFRPNYHGVGTCSMMPKEMGGVVDNAARVYGVQGLRVIDGSIPPTQLSSHVMTVFYAMALKIADAVLADY

SEQ ID NO: 1647 - protein, 576 aa, Aspergillus niger
IEASLLTDPKEVAGRTVDYIIAGGGLTGLTVAARLTENPDITVLVIESGSYESDRGPIIEDLNAYGDIFGSSVDHAYETVCLATNNQTALIRSGNGLGGSTLVNGGTWTRPHKAQVDSWETVFGNEGWNWDSVAAYSLQAERARAPNAKQIAAGHYFNASCHGINGTVHAGPRDTGDDYSPIVKALMSAVEDRGVPTKKDLGCGDPHGVSMFPNTLHEDQVRSDAAREWLLPNYQRPNLQVLTGQYVGKVLLSQNATTPRAVGVEFGTHKGNTHNVYAKHEVLLAAGSAVSPTILEYSGIGMKSILEPLGIKTVVDLPVGLNLQDQTTSTVRSRITSAGAGQGQAAWFATFNETFGDYTEKAHELLNTKLEQWAEEAVARGGFHNTTALLIQYENYRDWIVKDNVAYSELFLDTAGEASFDVWDLLPFTRGYVHILDKDPYLRHFAYDPQYFLNELDLLGQAAATQLARNISNSGAMQTYFAGETIPGDNLAYDADLRAWVEYIPYHFRPNYHGVGTCSMMPKEMGGVVDNAARVYGVQGLRVIDGSIPPTQMSSHVMTVFYAMALKIADAVLADY

SEQ ID NO: 1648 - protein, 576 aa, Aspergillus niger
IEASLLTDPKEVAGRTYDYIIAGGGLTGLTVAARLTENPDITVLVIESGSYESDRGPIIEDLNAYGQIFGSSVDHAYETVELATNNRTALIRSGNGLGGSTLINGGTWTRPHKAQVDSWETVFGNEGWNWDSVAAYSLQAERARAPNAKQIAAGHYFNASCHGLNGTVHAGPRDTGDDYSPIVKALMSAVEDRGVPTKKDLGCGDPHGVSMFPNTLHEDQVRSDAAREWLLPNYQRPNLQVLTGQYVGKVLLSQNATTPRAVGVEFGTHKGNTHNVYAKHEVLLAAGSAVSPTILEYSGIGLKSILEPLGIDTVVDLPVGLNLQDQTTSTVRSRITSAGAGQGQAAWFATFNETFGDYAEKAHELLNTKLEQWAEEAVARGGFHNTTALLIQYENYRDWIVKDNVAYSELFLDTAGVASFDVWDLLPFTRGYVHILDKDPYLRHFAYDPQYFLNELDLLGQAAATQLARNISNSGAMQTYFAGETIPGDNLAYDADLSAWVEYIPYNFRPNYHGVGTCSMMPKEMGGVVDNAARVYGVQGLRVIDGSIPPTQMSSHVMTVFYAMALKIADAILADY

SEQ ID NO: 1649 - protein, 589 aa, Aspergillus terreus
ALPKFPRDHLGVEPQLLTDPTVLANTTVDYIIAGGGLTGLVVAARLTEDPNIKVLVIESGYFESNRGPIIEDLNRYGEIFGTEVDHAFETVQLAVNNRTEIIRSGNGLGGSTLINGGTWTRPHKVCVDSWETVFGNQGWNWDDLLPYMLKIEKARPPNQRQIEAGHYFNPQCHGFNGSVHAGPRDTGEPYSPIMRALMDTVSAEGVPVRKDLCCGDPHGVSMFLNTLYPSQIRADAAREYLVPNYHRPNFQVLTGQRVGKVLLDKTVPGSPKAIGVEFGTHRTRKYEAYARREVLLAAGSTISPTILEYSGIGMKSVLDSVGIEQVVELPVGVNLQDQTTLHVESRITPAGAGQGQAAYFATFNETFGDFAPQAHELLNTKLDQWAEEVVARGGFHNATALRIQYENYRNWLVNNNVAFSELFLDTAGKISFDVWDLIPFTRGYVHIADKDPYLRRLYNNPQYFLNELDVLGEAAASKLARELSSKGAMAQYYAGETVPGFDQLPADASLRDWAKYVKDHFRPNYHAVSTCAMMSKELGGVVDSAARVYDVERLRVVDGSIPPTQVSSHVMTVFYGMAEKIAEAILQDY

SEQ ID NO: 1650 - protein, 575 aa, Aspergillus niger
EASLLTDPKEVAGRTVDYIIAGGGLTGLTTAARLTENPDITVLVIESGSYESDRGPIIEDLNAYGDIFGSSVDHAYETVELATNNQTALIRSGNGLGGSTLVNGGTWTRPHKAQVDSWETVFGNEGWNWDSVAAYSLQAERARAPNAKQIAAGHYFNASCHGINGTVHAGPRDTGDDYSPIVKALMSAVEDRGVPTKKDLGCGDPHGVSMFPNTLHEDQVRSDAAREWLLPNYQRPNLQVLTGQYVGKVLLSQNATTPRAVGVEFGTHKGNTHNVYAKHEVLLAAGSAVSPTILEYSGIGMKSILEPLGIDTVVDLPVGLNLQDQTTSTVRSRITSAGAGQGQAAWFATFNETFGDYAEKAHELLNTKLEQWAEEAVARGGFHNTTALLIQYENYRDWIVKDNVAYSELFLDTAGVASFDVWDLLPFTRGYVHILDKDPYLRHFAYDPQYFLNELDLLGQAAATQLARNISNSGAMQTYFAGETIPGDNLAYDADLSAWVEYIPYNFRPNYHGVGTCSMMPKEMGGVVDNAARVYGVQGLRVIDGSIPPTQMSSHVMTVFYAMALKIADAILADY

SEQ ID NO: 1651 - protein, 588 aa, Penicillium polonicum
VATALPLQEFDLQSSLLTDPRKVAGETFDYVIAGGGLTGLTVAARLTENPDINVLVIESGFYESNIGPIIENLNHYGDIFTTSVDQAFETVPLAIHNRTEIVRSGKGLGGSTLVNGGSWTRPHKAQVNSWEKVFGMEGWNWDNLLPYMNKVEASRPPNAAQIAAGHYFDPACHGVNGTVQVGPRDTGESYSPMIKSLMETAKNSGVPVQKDFSCGVPHGISMFPNDVHEDQTRSDAAREWLLPNYKRKNLKVLTGQMVGRVLFDTTTSTPKAVGVNFGTHNKVNFDVHAKHEVLLAAGSTVSPQILEHSGVGLKTVLDKVGVKQLVELPVGLNLQDQTTTTVRSAINPIGAGQGQAAYFATFNETFGDQAPRAHELLNTKLEQWAKDAVSRGGFHNETALLIQYENYRDWLVNSDVSYAEIFIDTAGKLSLDLWDLIPFTRGYVHILDSDPYLRRFAYDPQYFLNELDLLGQAAASKLAREISNKGEMTKYFNSETVPGNNLAYDATLDQWVDYVKQNFRPNYHGVGTCSMMSKELGGVVDAAARVYDVEGLRVIDGSIPPTQVSSHVMTVFYGMAEKISEAILADYH

SEQ ID NO: 1652 - protein, 577 aa, Aspergillus niger
GIEASLLTDPKEIAGCTVDYIIAGGGLTGLTTAARLTENPDITVLVIESGSYESDRGPIIEDLNAYGDIFGSSVDHAYETVELATNNQTALIRSGNGLGGSSLVNGGXWTRPHKAQVDSWETVFGNEGWNWDSVAAYSLQAERARAPNAKQIAAGHYFNASCHGINGTVHAGPRDTGDDYSPIVKALMSAVEDRGVPTKKDLGCGDPHGVSMFPNTLHEDQVRSDAAREWLLPNYQRPNLQVLTGQYVGKVLLSQNATTPRAIGVEFGTHKGNTHNVYAKHEVLLAAGSAVSPTILEYSGIGMKSILEPLGIDTVVDLPVGLNLQDQTTSTVRSRITSAGAGQGQAAWXATFNETLGDYAEKAHELLNTKLEQWAEEAVARGGFHNTTALLIQYENYRDWIVKDNVAYSELFLDTAGVASFGVWDLLPFTRGYVHILDKAPYLRHFAYDPQYFLNELDLLGQAAATQLARNISNSGAMQTYFAGETIPGDNLAYDADLSAWVEYIPYNFRPNYHGVGTCSMMPKEMGGVVDNAARVYGVQGQRVIDGSIPPTQMSSHVMTVFYAMALKIADAILADY

SEQ ID NO: 1653 - protein, 577 aa, Aspergillus niger
GIEASLLTDPKDVSGRTVDYIICGGGLTGLTTAARLTENPNISVLVIESGSYESDRGPIIEDLNAYGDIFGSSVDHAYETVELATNNQTALIRSGNGLGGSTLVNGGTWTRPHKAQVDSWETVFGNEGWNWDNVAAYSLQAERARAPNAKQIAAGHYFNASCHGVNGTVHAGPRDTGDDYSPIVKALMSAVEDRGVPTKKDFGCGDPHGVSMFPNTLHEDQVRSDAAREWLLPNYQRPNLQVLTGQYCGKVLLSQNGTTPRAVGVEFGTHKGNTHNVYAKHEVLLAAGSAVSPTILEYSGIGMKSILEPLGIDTVVDLPVGLNLQDQTTATVRSRITSAGAGQGQAAWFATFNETFGDYSEKAHELLNTKLEQWAEEAVARGGFHNTTALLIQYENYRDWIVNHNVAYSELFLDTAGVASFDVWDLLPFTRGYVHILDKDPYLHHFAYDPQYFLNELDLLGQAAATQLARNISNSGAMQTYFAGETIPGDNLAYDADLSAWTEYIPYHFRPNYHGVGTCSMMPKEMGGVVDNAARVYGVQGLRVIDGSIPPTQMSSHVMTVFYAMALKISDAILEDY

SEQ ID NO: 1654 - protein, 577 aa, Aspergillus niger
GIEASLLTDPKDVSGRTVDYIIAGGGLVGLTTAAKLTENPNISVLVIESGSYESDRGPIIEDLNAYGDIFGSSVDHAYETVELATNNQTALVRSGNGLGGSTLINGGTWTRPHKAQVDSWETVFGNEGWNWDNVAAYSLQAERARAPNAKQIAAGHYFNTSCHGVNGTVHAGPRDTGDDYSPIVKALMSAVEDRGVPTKKDFGCGDPHGVSMFPNTLHEDQVRSDAAREWLLPNYQRPNLQVLTGQYVGKVLLSQNGTTPRAVGVEFGTHKGNTHNVYAKHEVLLAAGSAVSPTILEYSGIGMKSILEPLGIDTVVDLPVGLNLQDQTTATVRSRITSAGAGQGQAAWFATFNETFGDYSEKAHELLNTKLEQWAEEAVARGGFHNTTALLIQYENYRDWIVNHNVAYSELFLDTAGVASFDVWDLLPFTRGYVHILDKDPYLHHFAYDPQYFLNELDLLGQAAATQLARNISNSGAMQTYFAGETIPGDNLAYDADLSAWTEYIPYHFRPNYHGVGTCSMMPKEMGGVVDNAARVYGVQGLRVIDGSIPPTQMSSHVMTVFYAMALKISDAILEDY

SEQ ID NO: 1655 - protein, 577 aa, Aspergillus niger
GIEASLLTDPKDVSGRTVDYIIAGGGLVGLTTAARLTENPNISVLVIESGSYESDRGPIIEDLNAYGDIFGSSVDHAYETVELATNNQTALVRSGNGLGGSTLVNGGTWTRPHKAQVDSWETVFGNEGWNWDNVAAYSLQAERARAPNAKQIAAGHYFNASCHGVNGTVHAGPRDTGDDYSPIVKALMSAVEDRGVPTKKDFGCGDPHGVSMFPNTLHEDQVRSDAAREWLLPNYQRPNLQVLTGQYVGKVLLSQNGTTPRAVGVEFGTHKGNTHNVYAKHEVLLAAGSAVSPTILEYSGIGMKSILEPLGIDTVVDLPVGLNLQDQTTATVRSRITSAGAGQGQAAWFATFNETFGDYSEKAHELLNTKLEQWAEEAVARGGFHNTTALLIQYENYRDWIVNHNVAYSELFLDTAGVASFDVWDLLPFTRGYVHILDKDPYLHHFAYDPQYFLNELDLLGQAAATQLARNISNSGAMQTYFAGETIPGDNLAYDADLSAWTEYIPYHFRPNYHGVGTCSMMPKEMGGVVDNAARVYGVQGLRVIDGSIPPTQMSSHVMTVFYAMALKISDAILEDY

SEQ ID NO: 1656 - protein, 577 aa, Aspergillus niger
GIEASLLKNPKLVAGRTYDYIIAGGGLAGLTVAEKLTENPNITVLVIEGGSYESDRGPIIEDLNAYGEIFGTSVDHAYETVELATNNRTALIRSGNGLGGSTLINGGTWTRPHKAQVDSWETVFGNEGWNWDSVAAYSLQAERARAPNAKQIAAGHYFNASCHGLNGTVHVGPRDTGDDYSPLMRALMSAVEDRGVPTKKDLGCGDPHGVSMFPNTLHEDQVRADAAREWLLPNYQRPNLQVLTGQYVGKVLLSQNATTPRAVGVEFGTHKSNTHNVYAKHEVLLSAGSTVSPTILEYSGIGMKSILEPLGIDTVVDLPVGLNLQDQTTSTVRSRITSAGAGQGQAAWFATFNETFGHYTEKAHELLNTKLEQWAEEAVARGGFHNTTALLIQYENYRDWIVKDNVAYSELFLDTGGVASFDVWDLLPFTRGYVHILDKDPYLRHFAYDPQYFLNELDLLGQAAATQLARNISNSGAMQTYFAGETIPGDNLAYEADLSAWVEYIPEHFRPNYHGVGTCSMMPKEMGGVVDNAARVYGVQGLRVIDGSIPPTQLSSHVMTVFYAMALKIADAVLADY

SEQ ID NO: 1657 - protein, 577 aa, Aspergillus niger
GIEASLLTDPNDVSGRTVDYIIAGGGLTGLTTAARLTENPNISVLVIESGSYESDRGPIIEDLNAYGDIFGSSVDHAYETVELATNNQTALIRSGNGLGGSTLVNGGXWTRPHKAQVDSWETVFGNEGWNWDNVAAYSLQAERARAPNAKQIAAGHYFNASCHGTNGTVHAGPRDTGDDYSPIVKALMSAVEDRGVPTQKDFGCGDPHGVSMFPNTLHEDQVRSDAAREWLLPNYQRPNLQVLTGQYVGKVLLSQNGTTPRAVGVEFGTHKGNTHNVYAKHEVLLAAGSAVSPTILEYSGIGMKSILEPLGIDTVVDLPVGLNLQDQTTATVRSRITSAGAGQGQAAWXATFNETFGDYSEKAHELLNTKLEQWAEEAVARGGFHNTTALLIQYENYRDWIVNHNVAYSELFLDTAGVASFDVWDLLPFTRGYVHILDKDPYLHHFAYDPQYFLNELDLLGQAAATQLARNISNSGAMQTYFAGETIPGDNLAYDADLSAWTEYIPYHFRPNYHGVGTCSMMPKEMGGVVDNAARVYGVQGLRVIDGSIPPTQMSSHVMTVFYAMALKISDAILEDY

SEQ ID NO: 1658 - protein, 577 aa, Aspergillus niger
GIEASLLTDPKDVSGRTVDYIIAGGGLTGLTTAARLTENPNISVLVIESGSYECDRGPIIEDLNAYGDIFGSSVDHAYETVELATNNQTALIRSGNGLGGSTLVNGGTWTRPHKAQVDSWETVFGNEGWNWDNVAAYSLQAERARAPNAKQIAAGHYFNASCHGVNGTVHAGPRDTGDDYSPIVKALMSAVEDRGVPTKKDFGCGDPHGVSMFPNTLHEDQVRSDAACEWLLPNYQRPNLQVLTGQYVGKVLLSQNGTTPRAVGVEFGTHKGNTHNVYAKHEVLLAAGSAVSPTILEYSGIGMKSILEPLGIDTVVDLPVGLNLQDQTTATVRSRITSAGAGQGQAAWFATFNETFGDYSEKAHELLNTKLEQWAEEAVARGGFHNTTALLIQYENYRDWIVNHNVAYSELFLDTAGVASFDVWDLLPFTRGYVHILDKDPYLHHFAYDPQYFLNELDLLGQAAATQLARNISNSGAMQTYFAGETIPGDNLAYDADLSAWTEYIPYHFRPNYHGVGTCSMMPKEMGGVVDNAARVYGVQGLRVIDGSIPPTQMSSHVMTVFYAMALKISDAILEDY

SEQ ID NO: 1659 - protein, 577 aa, Aspergillus niger
GIEASLLTDPKDVSGRTVDYIIAGGGLVGLTTAARLTENPNISVLVIESGSYESDRGPIIEDLNAYGDIFGSSVDHAYETVELATNNQTALVRSGNGLGGSTLVNGGTWTRPHKAQVDSWETVFGNEGWNWDNVAAYSLQAERARAPNAKQIAAGHYFNTSCHGVNGTVHAGPRDTGDDYSPIVKALMSAVEDRGVPTKKDFGCGDPHGVSMFPNTLHEDQVRSDAAREWLLPNYQRPNLQVLTGQYVGKVLLSQNGTTPRAVGVEFGTHKGNTHNVYAKHEVLLAAGSAVSPTILEYSGIGMKSILEPLGIDTVVDLPVGLNLQDQTTATVRSRITSAGAGQGQAAWFATFNETFGDYSEKAHELLNTKLEQWAEEAVARGGFHNTTALLIQYENYRDWIVNHNVAYSELFLDTAGVASFDVWDLLPFTRGYVHILDKDPYLHHFAYDPQYFLNELDLLGQAAATQLARNISNSGAMQTYFAGETIPGDNLAYDADLSAWTEYIPYHFRPNYHGVGTCSMMPKEMGGVVDNAARVYGVQGLRVIDGSIPPTQMSSHVMTVFYAMALKISDAILEDY

SEQ ID NO: 1660 - protein, 577 aa, Aspergillus niger
GIEASLLTDPKDVSGRTWDYIIAGGGLWGLTTAARLTENPNISVLVIESGSYESDRGPIIEDLNAYGDIFGSSVDHAYETVELATNNQTALIRSGNGLGGSTLVNGGTWTRPHKAQVDSWETVFGNEGWNWDNVAAYSLQAERARAPNAKQIAAGHYFNASCHGVNGTVHAGPRDTGDDYSPIVKALMSAVEDRGVPTKKDFGCGDPHGVSMFPNTLHEDQVRSDAAREWLLPNYQRPNLQVLTGQYVGKVLLSQNGTTPRAVGVEFGTHKGNTHNVYAKHEVLLAAGSAVSPTILEYSGIGMKSILEPLGIDTVVDLPVGLNLQDQTTATVRSRITSAGAGQGQAAWFATFNETFGDYSEKAHELLNTKLEQWAEEAVARGGFHNTTALLIQYENYRDWIVNHNVAYSELFLDTAGVASFDVWDLLPFTRGYVHILDKDPYLHHFAYDPQYFLNELDLLGQAAATQLARNISNSGAMQTYFAGETIPGDNLAYDADLSAWTEYIPYHFRPNYHGVGTCSMMPKEMGGVVDNAARVYGVQGLRVIDGSIPPTQMSSHVMTVFYAMALKISDAILEDY

SEQ ID NO: 1661 - protein, 577 aa, Aspergillus niger
GIEASLLTDPKDVSGRTWDYIIAGGGLVGLTTAARLTENPNISVLVIESGSYESDRGPIIEDLNAYGDIFGSSVDHAYETVELATNNQTALIRSGNGLGGSTLVNGGTWTRPHKAQVDSWETVFGNEGWNWDNVAAYSLQAERARAPNAKQIAAGHYFNASCHGVNGTVHAGPRDTGDDYSPIVKALMSAVEDRGVPTKKDFGCGDPHGVSMFPNTLHEDQVRSDAAREWLLPNYQRPNLQVLTGQYVGKVLLSQNGTTPRAVGVEFGTHKGNTHNVYAKHEVLLAAGSAVSPTILEYSGIGMKSILEPLGIDTVVDLPVGLNLQDQTTATVRSRITSAGAGQGQAAWFATFNETFGDYSEKAHELLNTKLEQWAEEAVARGGFHNTTALLIQYENYRDWIVNHNVAYSELFLDTAGVASFDVWDLLPFTRGYVHILDKDPYLHHFAYDPQYFLNELDLLGQAAATQLARNISNSGAMQTYFAGETIPGDNLAYDADLSAWTEYIPYHFRPNYHGVGTCSMMPKEMGGVVDNAARVYGVQGLRVIDGSIPPTQMSSHVMTVFYAMALKISDAILEDY

SEQ ID NO: 1662 - protein, 577 aa, Aspergillus niger
GIEASLLTDPKDVSGRTMDYIIAGGGLSGLTTAARLTENPNISVLVIESGSYESDRGPIIEDLNAYGDIFGSSVDHAYETVELATNNQTALIRSGNGLGGSTLVNGGTWTRPHKAQVDSWETVFGNEGWNWDNVAAYSLQAERARAPNAKQIAAGHYFNASCHGVNGTVHAGPRDTGDDYSPIVKALMSAVEDRGVPTKKDFGCGDPHGVSMFPNTLHEDQVRSDAAREWLLPNYQRPNLQVLTGQYVGKVLLSQNGTTPRAVGVEFGTHKGNTHNVYAKHEVLLAAGSAVSPTILEYSGIGMKSILEPLGIDTVVDLPVGLNLQDQTTATVRSRITSAGAGQGQAAWFATFNETFGDYSEKAHELLNTKLEQWAEEAVARGGFHNTTALLIQYENYRDWIVNHNVAYSELFLDTAGVASFDVWDLLPFTRGYVHILDKDPYLHHFAYDPQYFLNELDLLGQAAATQLARNISNSGAMQTYFAGETIPGDNLAYDADLSAWTEYIPYHFRPNYHGVGTCSMMPKEMGGVVDNAARVYGVQGLRVIDGSIPPTQMSSHVMTVFYAMALKISDAILEDY

SEQ ID NO: 1663 - protein, 577 aa, Aspergillus niger
GIEASLLTDPKDVSGRTVDYIIAGGGLTGLTTAARLTENPNISVLVIYSGSYESDRGPIIEDLNAYGDIFGSSVDHAYETVELATNNQTALIRSGNGLGGSTLVNGGTWTRPHKAQVDSWETVFGNEGWNWDNVAAYSLQAERARAPNAKQIAAGHYFNASCHGVNGTVHAGPRDTGDDYSPIVKALMSAVEDRGVPTKKDFGCGDPHGVSMFPNTLHEDQVRSDAAREWLLPNYQRPNLQVLTGQYVGKVLLSQNGTTPRAVGVEFGTHKGNTHNVYAKHEVLLAAGSAVSPTILEYSGIGMKSILEPLGIDTVVDLPVGLNLQDQTTATVRSRITSAGAGQGQAAWFATFNETFGDYSEKAHELLNTKLEQWAEEAVARGGFHNTTALLIQYENYRDWIVNHNVAYSELFLDTAGVASFDVWDLLPFTRGYVHILDKDPYLHHFAYDPQYFLNELDLLGQAAATQLARNISNSGAMQTYFAGETIPGDNLAYDADLSAWTEYIPYHFRPNYHGVGTCSMMPKEMGGVVDNAARVYGVQGLRVIDGSIPPTQMSSTVMTVFYAMALKISDAILEDY

SEQ ID NO: 1664 - protein, 577 aa, Aspergillus niger
GIEASLCTDPKDVSGRTVDYIIAGGGLTGLTTAARLTENPNISVLVIESGSYESDRGPIIEDLNAYGDIFGSSVDHAYETVELATNNQTALIRSGNGLGGSTLVNGGTWTRPHKAQVDSWETVFGNEGWNWDNVAAYSLQAERARAPNAKQIAAGHYFNASCHGVNGTVHAGPRDTGDDYSPIVKALMSAVEDRGVPTKKDFGCGDPHGVSMFPNTLHEDQVRSDAAREWLLPNYQRPNLQVCTGQYVGKVLLSQNGTTPRAVGVEFGTHKGNTHNVYAKHEVLLAAGSAVSPTILEYSGIGMKSILEPLGIDTVVDLPVGLNLQDQTTATVRSRITSAGAGQGQAAWFATFNETFGDYSEKAHELLNTKLEQWAEEAVARGGFHNTTALLIQYENYRDWIVNHNVAYSELFLDTAGVASFDVWDLLPFTRGYVHILDKDPYLHHFAYDPQYFLNELDLLGQAAATQLARNISNSGAMQTYFAGETIPGDNLAYDADLSAWTEYIPYHFRPNYHGVGTCSMMPKEMGGVVDNAARVYGVQGLRVIDGSIPPTQMSSHVMTVFYAMALKISDAILEDY

SEQ ID NO: 1665 - protein, 577 aa, Aspergillus niger
GIEASLLTDPKDVSGRTVDYIIAGGGLTGLTTAARLTENPNISVLVIESGSYESDRGPIIEDLNAYGDIFGSSVDHAYETVELATNNQTALIRSGNGLGGSTLVNGGTWTRPHKAQVDSWETVFGNEGWNWDNVAAYSLQAERARAPNAKQIAAGHYFNASCHGVNGTVHAGPRDTGDDYSPIVKALMSAVEDRGVPTKKDFGCGDPHGVSMFPNTLHEDQVRSDAAREWLLPNYQRPNLQVLTGQYVCKVLLSQNGTTPRAVGVEFGTHKGNTHNVYAKHEVLLAAGSAVSPTILEYSGIGMKSILEPLGIDTVVDLPVGLNLQDQTTATVRSRITSAGAGQGQAAWFATFNETFGDYSEKAHELLNTKLEQWAEEAVARGGFHNTTALLIQYENYRDWIVNHNVAYSELFLDTAGVASFDVWDLLPFTRGYVHILDKDCYLHHFAYDPQYFLNELDLLGQAAATQLARNISNSGAMQTYFAGETIPGDNLAYDADLSAWTEYIPYHFRPNYHGVGTCSMMPKEMGGVVDNAARVYGVQGLRVIDGSIPPTQMSSHVMTVFYAMALKISDAILEDY

SEQ ID NO: 1666 - protein, 577 aa, Aspergillus niger
GIEASLLTDPKDVSGRTVDYIIAGGGLTGLTTAARLTENPNISVLVIESGSYESDRGPIIEDLNAYGDIFGSSVDHAYETVELATNNQTALIRSGNGLGGSTLVNGGTWTRPHKAQVDSWETVFGNEGWNWDNVAAYSLQAERARAPNAKQIAAGHYFNASCHGVNGTVHAGPRDTGDDCSPIVKALMSAVEDRGVPTKKDFGCGDPHGVSMFPNTLHEDQVRSDAAREWLLPNYQRPNLQVLTGQYVGKVLLSQNGTTPRAVGVEFGTHKGNTHNVYAKHEVLLAAGSAVSPTILEYSGIGMKSILEPLGIDTVVDLPVGLNLQDQTTATVRSRITSAGAGQCQAAWFATFNETFGDYSEKAHELLNTKLEQWAEEAVARGGFHNTTALLIQYENYRDWIVNHNVAYSELFLDTAGVASFDVWDLLPFTRGYVHILDKDPYLHHFAYDPQYFLNELDLLGQAAATQLARNISNSGAMQTYFAGETIPGDNLAYDADLSAWTEYIPYHFRPNYHGVGTCSMMPKEMGGVVDNAARVYGVQGLRVIDGSIPPTQMSSHVMTVFYAMALKISDAILEDY

SEQ ID NO: 1667 - protein, 577 aa, Aspergillus niger
GIEASLLTDPKDVSGRTVDYIIAGGGLVGLTTAARLTENPNISVLVIESGFYESDRGPIIEDLNAYGDIFGSSVDHAYETVELATNNQTALVRSGNGLGGSTLVNGGTWTRPHKAQVDSWETVFGNEGWNWDNVAAYSLQAERARAPNAKQIAAGHYFNASCHGVNGTVHAGPRDTGDDYSPIVKALMSAVEDRGVPTKKDFGCGDPHGVSMFPNTLHEDQVRSDAAREWLLPNYQRPNLQVLTGQYVGKVLLSQNGTTPRAVGVEFGTHKGNTHNVYAKHEVLLAAGSAVSPTILEYSGIGMKSILEPLGIDTVVDLPVGLNLQDQTTSTVRSRITSAGAGQGQAAWFATFNETFGDYSEKAHELLNTKLEQWAEEAVARGGFHNTTALLIQYENYRDWIVNHNVAYSELFLDTAGVASFDVWDLLPFTRGYVHILDKDPYLHHFAYDPQYFLNELDLLGQAAATQLARNISNSGAMQTYFAGETIPGDNLAYDADLSAWTEYIPYHFRPNYHGVGTCSMMPKEMGGVVDNAARVYGVQGLRVIDGSIPPTQMSSHVMTVFYAMALKISDAILEDY

SEQ ID NO: 1668 - protein, 577 aa, Aspergillus niger
GIEASLLTDPKDVSGRTVDYIIAGGGLVGLTTAARLTENPNISVLVIESGSYESDRGPIIEDLNAYGDIFGSSVDHAYETVELATNNQTALVRSGNGLGGSTLVNGGTWTRPHKAQVDSWETVFGNEGWNWDNVAAYSLQAERARAPNAKQIAAGHYFNASCHGVNGTVHAGPRDTGDDYSPIVKALMSAVEDRGVPTKKDFGCGDPHGVSMFPNTLHEDQVRSDAAREWLLPNYQRPNLQVLTGQYVGKVLLSQNGTTPRAVGVEFGTHKGNTHNVYAKHEVLLAAGSAVSPTILEYSGIGMKSILEPLGIDTVVDLPVGLNLQDQTTATVRSRITSAGAGQGQAAWFATFNETFGDYSEKAHELLNTKLEQWAEEAVARGGFHNTTALLIQYENYRDWIVNHNVAYSELFLDTAGVASFDVWDLLPFTRGYVHILDKDPYLHHFAYDPQYFLNELDLLGQAAATQLARNISNSGAMQTYFAGETIPGDNLAYDADLSAWTEYIPYHFRPNYHGVGTCSMMPKEMGGVVDNAAKVYGVQGLRVIDGSIPPTQVSSHVMTVFYAMALKISDAILEDY

SEQ ID NO: 1669 - protein, 577 aa, Aspergillus niger
GIEASLLKDPKLVAGDTYDYIIAGGGLAGLTVAEKLTENPNITVLVIESGSYESDRGPIIEDLNAYGEIFGTSVDHAYETVELAANDRTALIRSGNGLGGSTLINGGTWTRPHKAQVDSWETVFGNEGWNWDSVAAYSLQAERARAPNAKQIAAGHYFNAGCHGLNGTVHVGPRDTGDDYSPLMRALMSAVEDRGVPTKKDLGCGDPHGVSMFPNTLHEDQVRADAAREWLLPNYQRPHLQVLTGQYVGKVLLSQNATTPRAVGVEFGTHKSNTHNVYAKHEVLLSAGSTVSPTILEYSGIGMKSILEPLGIDTVVDLPVGLNLQDQTTSTVRSRITSAGDGQGQAAWFATFNETFGDYTEKAHELLNTKLEQWAEEAVARGGFHNTTALLIQYENYRDWIVKDNVAYSELFLDTGGVASFDVWDLLPFTRGYVHILDKDPYLRHFAYDPQYFLNELDLLGQAAATQLARNISNSGAMQTYFAGETIPGDNLAYNADLSAWVEYIPEHFRPNYHGVGTCSMMPKEMGGVVDNAARVYGVQGLRVIDGSIPPTQLSSHVMTVFYAMALKIADAVLADY

SEQ ID NO: 1670 - protein, 577 aa, Aspergillus niger
GIEASLLKDPKLVAGDTYDYIIAGGGLAGLTVAEKLTENPNITVLVIEGGSYESDRGPIIEDLNAYGEIFGTSVDHAYETVELATNDRTALIRSGNGLGGSTLINGGTWTRPHKAQVDSWETVFGNEGWNWDSVAAYSLQAERARAPNAKQIAAGHYFNASCHGLNGTVHVGPRDTGDDYSPLMRALMSAVEDRGVPTKKDLGCGDPHGVSMFPNTLHEDQVRADAAREWLLPNYQRPHLQVLTGQYVGKVLLSQNATTPRAVGVEFGTHKSNTHNVYAKHEVLLSAGSTVSPTILEYSGIGMKSILEPLGIDTVVDLPVGLNLQDQTTSTVRSRITSAGGGQGQAAWFATFNETFGDYTEKAHELLNTKLEQWAEEAVARGGFHNTTALLIQYENYRDWIVKDNVAYSELFLDTGGVASFDVWDLLPFTRGYVHILDKDPYLRHFAYDPQYFLNELDLLGQAAATQLARNISNSGAMQTYFAGETIPGDNLAYDADLSAWVEYIPEHFRPNYHGVGTCSMMPKEMGGVVDNAARVYGVQGLRVIDGSIPPTQLSSHVMTVFYAMALKIADAVLADY

SEQ ID NO: 1671 - protein, 577 aa, Aspergillus niger
GIEASLLTDPKDVSGRTVDYIIAGGGLTGLTTAARLTENPNISVLVIESCSYESDRGPIIEDLNAYGDIFGSSVDHAYETVELATNNQTALIRSGNCLGGSTLVNGGTWTRPHKAQVDSWETVFGNEGWNWDNVAAYSLQAERARAPNAKQIAAGHYFNASCHGVNGTVHAGPRDTGDDYSPIVKALMSAVEDRGVPTKKDFGCGDPHGVSMFPNTLHEDQVRSDAAREWLLPNYQRPNLQVLTGQYVGKVLLSQNGTTPRAVGVEFGTHKGNTHNVYAKHEVLLAAGSAVSPTILEYSGIGMKSILEPLGIDTVVDLPVGLNLQDQTTATVRSRITSAGAGQGQAAWFATFNETFGDYSEKAHELLNTKLEQWAEEAVARGGFHNTTALLIQYENYRDWIVNHNVAYSELFLDTAGVASFDVWDLLPFTRGYVHILDKDPYLHHFAYDPQYFLNELDLLGQAAATQLARNISNSGAMQTYFAGETIPGDNLAYDADLSAWTEYIPYHFRPNYHGVGTCSMMPKEMGGVVDNAARVYGVQGLRVIDGSIPPTQMSSHVMTVFYAMALKISDAILEDY

SEQ ID NO: 1672 - protein, 577 aa, Aspergillus niger
GIEASLLTDPKDVSGRTCDYIIAGGGLSGLTTAARLTENPNISVLVIESGSYESDRGPIIEDLNAYGDIFGSSVDHAYETVELATNNQTALIRSGNGLGGSTLVNGGTWTRPHKAQVDSWETVFGNEGWNWDNVAAYSLQAERARAPNAKQIAAGHYFNASCHGVNGTVHAGPRDTGDDYSPIVKALMSAVEDRGVPTKKDFGCGDPHGVSMFPNTLHEDQVRSDAAREWLLPNYQRPNLQVLTGQYVGKVLLSQNGTTPRAVGVEFGTHKGNTHNVYAKHEVLLAAGSAVSPTILEYSGIGMKSILEPLGIDTVVDLPVGLNLQDQTTATVRSRITSAGAGQGQAAWFATFNETFGDYSEKAHELLNTKLEQWAEEAVARGGFHNTTALLIQYENYRDWIVNHNVAYSELFLDTAGVASFDVWDLLPFTRGYVHILDKDPYLHHFAYDPQYFLNELDLLGQAAATQLARNISNSGAMQTYFAGETIPGDNLAYDADLSAWTEYIPYHFRPNYHGVGTCSMMPKEMGGVVDNAARVYGVQGLRVIDGSIPPTQMSSHVMTVFYAMALKISDAILEDY

SEQ ID NO: 1673 - protein, 577 aa, Aspergillus niger
GIEASLLTDPKDVSGRTVDYIIAGGGLVGLTTAARLTENPNISVLVIESGSYESDRGPIIEDLNAYGDIFGSSVDHAYETVELATNNQTALVRSGNGLGGSTLVNGGTWTRPHKAQVDSWETVFGNEGWNWDNVAAYSLQAERARAPNAKQIAAGHYFNTSCHGVNGTVHAGPRDTGDDYSPIVKALMSAVEDRGVPTKKDFGCGDPHGVSMFPNTLHEDQVRSDAAREWLLPNYQRPNLQVLTGQYVGKVLLSQNGTTPRAVGVEFGTHKGNTHNVYAKHEVLLAAGSAVSPTILEYSGIGMKSILEPLGIDTVVDLPVGLNLQDQTTATVRSRITSAGAGQGQAAWFATFNETFGDYSEKAHELLNTKLEQWAEEAVARGGFHNTTALLIQYENYRDWIVNHNVAYSELFLDTAGVASFDVWDLLPFTRGYVHILDKDPYLHHFAYDPQYFLNELDLLGQAAATQLARNISNSGAMQTYFAGETIPGDNLAYDADLSAWTEYIPYHFRPNYHGVGTCSMMPKEMGGVVDNAAKVYGVQGLRVIDGSIPPTQVSSHVMTVFYAMALKISDAILEDY

SEQ ID NO: 1674 - protein, 597 aa, Aspergillus niger
LVSSLVVSLAAALPHYIRSNGIEASLLTDPKDVSGRTVDYIIAGGGLTGLTTAARLTENPNISVLVIESGSYESDRGPIIEDLNAYGDIFGSSVDHAYETVELATNNQTALIRSGNGLGGSTLVNGGTWTRPHKAQVDSWETVFGNEGWNWDNVAAYSLQAERARAPNAKQIAAGHYFNASCHGVNGTVHAGPRDTGDDYSPIVKALMSAVEDRGVPTKKDFGCGDPHGVSMFPNTLHEDQVRSDAAREWLLPNYQRPNLQVLTGQYVGKVLLSQNGTTPRAVGVEFGTHKGNTHNVYAKHEVLLAAGSAVSPTILEYSGIGMKSILEPLGIDTVVDLPVGLNLQDQTTATVRSRITSAGAGQGQAAWFATFNETFGDYSEKAHELLNTKLEQWAEEAVARGGFHNTTALLIQYENYRDWIVNHNVAYSELFLDTAGVASFDVWDLLPFDRGYVHILDKDPYLHHFAYDPQYFLNELDLLGQAAATQLARNISNSGAMQTYFAGEILPGDNLAYDADLSAWTEYIPYHFRPNYHDVGTCSMMPKEMGSVVDNAARVYGVRGLRVIDGSIPPTQMSSHVMTVFYAMALKISDAILEDY

SEQ ID NO: 1675 - protein, 576 aa, Aspergillus niger
IEASLLTDPKDVSGRTVDYIIAGGGLTGLTTAARLTENPNISVLVIESGSYESDRGPIIEDLNAYGDIFGSSVDHAYETVELATNNQTALIRSGNGLGGSTLVNGGTWTRPHKAQVDSWETVFGNEGWNWDNVAAYSLQAERARAPNAKQIAAGHYFNPSCHGVNGTVHAGPRDTGDDYSPIVKALMSAVEDRGVPTKKDFGCGDPHGVSMFPNTLHEDQVRSDAAREWLLPNYQRPNLQVLTGQYVGKVLLSQNGTTPRAVGVEFGTHKGNTHNVYAKHEVLLAAGSAVSPTILEYSGIGMKSILEPLGIDTVVDLPVGLNLQDQTTATVRSRITSAGAGQGQAAWFATFNETFGDYSEKAHELLNTKLEQWAEEAVARGGFHNTTALLIQYENYRDWIVNHNVAYSELFLDTAGVASFDVWDLLPFTRGYVHILDKDPYLHHFAYDPQYFLNELDLLGQAAATQLARNISNSGAMQTYFAGETIPGDNLAYDADLSAWTEYIPYHFRPNYHGVGTCSMMPKEMGGVVDNAARVYGVQGLRVIDGSIPPTQMSSHVMTVFYAMALKISDAILEDY

SEQ ID NO: 1676 - protein, 576 aa, Aspergillus niger
IEASLLTDPKDVSGRTVDYIIAGGGLTGLTTAARLTENPNISVLVIESGSYESDRGPIIEDLNAYGDIFGSSVDHAYETVELATNNQTALIRSGNGLGGSTLVNGGTWTRPHKAQVDSWETVFGNEGWNWDNVAAYSLQAERARPPNAKQIAAGHYFNASCHGVNGTVHAGPRDTGDDYSPIVKALMSAVEDRGVPTKKDFGCGDPHGVSMFPNTLHEDQVRSDAAREWLLPNYQRPNLQVLTGQYVGKVLLSQNGTTPRAVGVEFGTHKGNTHNVYAKHEVLLAAGSAVSPTILEYSGIGMKSILEPLGIDTVVDLPVGLNLQDQTTATVRSRITSAGAGQGQAAWFATFNETFGDYSEKAHELLNTKLEQWAEEAVARGGFHNTTALLIQYENYRDWIVNHNVAYSELFLDTAGVASFDVWDLLPFTRGYVHILDKDPYLHHFAYDPQYFLNELDLLGQAAATQLARNISNSGAMQTYFAGETIPGDNLAYDADLSAWTEYIPYHFRPNYHGVGTCSMMPKEMGGVVDNAARVYGVQGLRVIDGSIPPTQMSSHVMTVFYAMALKISDAILEDY

SEQ ID NO: 1677 - protein, 576 aa, Aspergillus niger
IEASLLTDPKDVSGRTVDYIIAGGGLTGLTTAARLTENPNISVLVIESGSYESDRGPIIEDLNAYGDIFGSSVDHAYETVELATNNQTALIRSGNGLGGSTLVNGGTWTRPHKAQVDSWETVFGNEGWNWDNVAAYSLQAERARAPNAKQIAAGHYFNASCHGVNGTVHAGPRDTGDDYSPIVKALMSAVEDRGVPTKKDFGCGDPHGVSMFPNTLHEDQVRSDAAREWLLPNYQRPNLQVLTGQYVGKVLLSQNGTTPRAVGVEFGTHKGNTHNVYAKHEVLLAAGSAVSPTILEYSGIGMKSILEPLGIDTVVDLPVGLNLQDQTTATVRSRITPAGAGQGQAAWFATFNETFGDYSEKAHELLNTKLEQWAEEAVARGGFHNTTALLIQYENYRDWIVNHNVAYSELFLDTAGVASFDVWDLLPFTRGYVHILDKDPYLHHFAYDPQYFLNELDLLGQAAATQLARNISNSGAMQTYFAGETIPGDNLAYDADLSAWTEYIPYHFRPNYHGVGTCSMMPKEMGGVVDNAARVYGVQGLRVIDGSIPPTQMSSHVMTVFYAMALKISDAILEDY

SEQ ID NO: 1678 - protein, 576 aa, Aspergillus niger
IEASLLTDPKEVAGRTVDYIIAGGGLTGLTTAARLTENPDITVLVIESGSYESDRGPIIEDLNAYGDIFGSSVDHAYETVCLATNNQTALIRSGNGLGGSTLVNGGTWTRPHKAQVDSWETVFGNEGWNWDSVAAYSLQAERARAPNAKQIAAGHYFNASCHGINGTVHAGPRDTGDDYSPIVKALMSAVEDRGVPTKKDLGCGDPHGVSMFPNTLHEDQVRSDAAREWLLPNYQRPNLQVLTGQYVGKVLLSQNATTPRAVGVEFGTHKGNTHNVYAKHEVLLAAGSAVSPTILEYSGIGMKSILEPLGIDTVVDLPVGLNLQDQTTSTVRSRITSAGAGQGQAAWFATFNETFGDYTEKAHELLNTKLEQWAEEAVARGGFHNTTALLIQYENYRDWIVKDNVAYSELFLDTAGVASFDVWDLLPFTRGYVHILDKDPYLRHFAYDPQYFLNELDLLGQAAATQLARNISNSGAMQTYFAGETIPGDNLAYDADLRAWVEYIPYNFRPNYHGVGTCSMMPKEMGGVVDNAARVYGVQGLRVIDGSIPPTQMSSHVMTVFYAMALKIADAVLADY

SEQ ID NO: 1679 - protein, 576 aa, Aspergillus niger
IEASLLTDPKDVSGRTVDYIIAGGGLTGLTTAARLTENPNISVLVIESGSYESDRGPIIEDLNAYGDIFGSSVDHAYETVPLATNNQTALIRSGNGLGGSTLVNGGTWTRPHKAQVDSWETVFGNEGWNWDNVAAYSLQAERARAPNAKQIAAGHYFNASCHGVNGTVHAGPRDTGDDYSPIVKALMSAVEDRGVPTKKDFGCGDPHGVSMFPNTLHEDQVRSDAAREWLLPNYQRPNLQVLTGQYVGKVLLSQNGTTPRAVGVEFGTHKGNTHNVYAKHEVLLAAGSAVSPTILEYSGIGMKSILEPLGIDTVVDLPVGLNLQDQTTATVRSRITSAGAGQGQAAWFATFNETFGDYSEKAHELLNTKLEQWAEEAVARGGFHNTTALLIQYENYRDWIVNHNVAYSELFLDTAGVASFDVWDLLPFTRGYVHILDKDPYLHHFAYDPQYFLNELDLLGQAAATQLARNISNSGAMQTYFAGETIPGDNLAYDADLSAWTEYIPYHFRPNYHGVGTCSMMPKEMGGVVDNAARVYGVQGLRVIDGSIPPTQMSSHVMTVFYAMALKISDAILEDY

SEQ ID NO: 1680 - protein, 576 aa, Aspergillus niger
IEASLLTDPKDVSGRTVDYIIAGGGLTGLTTAARLTENPNISVLVIESGSYESDRGPIIEDLNAYGDIFGSSVDHAYETVELATNNQTALIRSGNGLGGSTLVNGGTWTRPHKAQVDSWETVFGNEGWNWDNVAAYSLQAERARAPNAKQIAAGHYFNASCHGVNGTVHAGPRDTGDDYSPIVKALMSAVEDRGVPTKKDFGCGDPHGVSMFPNTLHEDQVRSDAAREWLLPNYQRPNLQVLTGQYVGKVLLSQNGTTPRAVGVEFGTHKGNTHNVYAKHEVLLAAGSAVSPTILEYSGIGMKSILEPLGIDTVVDLPVGLNLQDQTTATVRSRITSAGAGQGQAAWFATFNETFGDYSEKAHELLNTKLEQWAEEAVARGGFHNTTALLIQYENYRDWIVNHNVAYSELFLDTAGVASFDVWDLLPFTRGYVHILDKDPYLHHFAYDPQYFLNELDLLGQAAATQLAREISNSGAMQTYFAGETIPGDNLAYDADLSAWTEYIPYHFRPNYHGVGTCSMMPKEMGGVVDNAARVYGVQGLRVIDGSIPPTQMSSHVMTVFYAMALKISDAILEDY

SEQ ID NO: 1681 - protein, 576 aa, Aspergillus niger
IEASLLTDPKDVSGRTVDYIIAGGGLTGLTTAARLTENPNISVLVIESGSYESDRGPIIEDLNAYGDIFGSSVDHAYETVELATNNQTALIRSGNGLGGSTLVNGGTWTRPHKAQVDSWETVFGNEGWNWDNVAAYSLQAERARAPNAKQIAAGHYFNASCHGVNGTVHAGPRDTGDDYSPIVKALMEAVEDRGVPTKKDFGCGDPHGVSMFPNTLHEDQVRSDAAREWLLPNYQRPNLQVLTGQYVGKVLLSQNGTTPRAVGVEFGTHKGNTHNVYAKHEVLLAAGSAVSPTILEYSGIGMKSILEPLGIDTVVDLPVGLNLQDQTTATVRSRITSAGAGQGQAAWFATFNETFGDYSEKAHELLNTKLEQWAEEAVARGGFHNTTALLIQYENYRDWIVNHNVAYSELFLDTAGVASFDVWDLLPFTRGYVHILDKDPYLHHFAYDPQYFLNELDLLGQAAATQLARNISNSGAMQTYFAGETIPGDNLAYDADLSAWTEYIPYHFRPNYHGVGTCSMMPKEMGGVVDNAARVYGVQGLRVIDGSIPPTQMSSHVMTVFYAMALKISDAILEDY

SEQ ID NO: 1682 - protein, 576 aa, Aspergillus niger
IEASLLTDPKDVSGRTVDYIIAGGGLTGLTTAARLTENPNISVLVIESGSYESDRGPIIEDLNAYGDIFGSSVDHAYETVELATNNQTALIRSGNGLGGSTLVNGGTWTRPHKAQVDSWETVFGNEGWNWDNVAAYSLQAERARAPNAKQIAAGHYFNASCHGVNGTVHAGPRDTGDDYSPIVKALMSAVEDRGVPTKKDFGCGDPHGVSMFPNTLHEDQVRSDAAREWLLPNYQRPNLQVLTGQYVGKVLLSQNGTTPRAVGVEFGTHKGNTHNVYAKHEVLLAAGSAVSPTILEYSGIGMKSILEPLGIDTVVDLPVGLNLQDQTTATVRSRITSAGAGQGQAAWFATFNETFGDYSEKAHELLNTKLEQWAEEAVARGGFHNTTALLIQYENYRDWIVNHNVAYSELFLDTAGVLSFDVWDLLPFTRGYVHILDKDPYLHHFAYDPQYFLNELDLLGQAAATQLARNISNSGAMQTYFAGETIPGDNLAYDADLSAWTEYIPYHFRPNYHGVGTCSMMPKEMGGVVDNAARVYGVQGLRVIDGSIPPTQMSSHVMTVFYAMALKISDAILEDY

SEQ ID NO: 1683 - protein, 576 aa, Aspergillus niger
IEASLLTDPKDVSGRTVDYIIAGGGLTGLTTAARLTENPNISVLVIESGSYESDRGPIIEDLNAYGDIFGSSVDHAYETVELATNNQTALIRSGNGLGGSTLVNGGTWTRPHKAQVDSWETVFGNEGWNWDNVAAYSLQAERARAPNAKQIAAGHYFNASCHGVNGTVHAGPRDTGDDYSPIVKALMSAVEDRGVPTKKDFGCGDPHGVSMFPNTLHEDQVRSDAAREWLLPNYQRPNLQVLTGQYVGKVLLSQNGTTPRAVGVEFGTHKGNTHNVYAKHEVLLAAGSAVSPTILEYSGIGMKSILEPLGIDTVVDLPVGLNLQDQTTATVRSRITSAGAGQGQAAWFATFNETFGDYAEKAHELLNTKLEQWAEEAVARGGFHNTTALLIQYENYRDWIVNHNVAYSELFLDTAGVASFDVWDLLPFTRGYVHILDKDPYLHHFAYDPQYFLNELDLLGQAAATQLARNISNSGAMQTYFAGETIPGDNLAYDADLSAWTEYIPYHFRPNYHGVGTCSMMPKEMGGVVDNAARVYGVQGLRVIDGSIPPTQMSSHVMTVFYAMALKISDAILEDY

SEQ ID NO: 1684 - protein, 576 aa, Aspergillus niger
IEASLLTDPKDVSGRTVDYIIAGGGLTGLTTAARLTENPNISVLVIESGSYESDRGPIIEDLNAYGDIFGSSVDHAYETVELATNNQTALIRSGNGLGGSTLVNGGTWTRPHKAQVDSWETVFGNEGWNWDNVAPYSLQAERARAPNAKQIAAGHYFNASCHGVNGTVHAGPRDTGDDYSPIVKALMSAVEDRGVPTKKDFGCGDPHGVSMFPNTLHEDQVRSDAAREWLLPNYQRPNLQVLTGQYVGKVLLSQNGTTPRAVGVEFGTHKGNTHNVYAKHEVLLAAGSAVSPTILEYSGIGMKSILEPLGIDTVVDLPVGLNLQDQTTATVRSRITSAGAGQGQAAWFATFNETFGDYSEKAHELLNTKLEQWAEEAVARGGFHNTTALLIQYENYRDWIVNHNVAYSELFLDTAGVASFDVWDLLPFTRGYVHILDKDPYLHHFAYDPQYFLNELDLLGQAAATQLARNISNSGAMQTYFAGETIPGDNLAYDADLSAWTEYIPYHFRPNYHGVGTCSMMPKEMGGVVDNAARVYGVQGLRVIDGSIPPTQMSSHVMTVFYAMALKISDAILEDY

SEQ ID NO: 1685 - protein, 576 aa, Aspergillus niger
IEASLLTDPKDVSGRTVDYIIAGGGLTGLTTAARLTENPNISVLVIESGSYESDRGPIIEDLNAYGDIFGSSVDHAYETVELATNNQTALIRSGNGLGGSTLVNGGTWTRPHKAQVDSWETVFGNEGWNWDNLAAYSLQAERARAPNAKQIAAGHYFNASCHGVNGTVHAGPRDTGDDYSPIVKALMSAVEDRGVPTKKDFGCGDPHGVSMFPNTLHEDQVRSDAAREWLLPNYQRPNLQVLTGQYVGKVLLSQNGTTPRAVGVEFGTHKGNTHNVYAKHEVLLAAGSAVSPTILEYSGIGMKSILEPLGIDTVVDLPVGLNLQDQTTATVRSRITSAGAGQGQAAWFATFNETFGDYSEKAHELLNTKLEQWAEEAVARGGFHNTTALLIQYENYRDWIVNHNVAYSELFLDTAGVASFDVWDLLPFTRGYVHILDKDPYLHHFAYDPQYFLNELDLLGQAAATQLARNISNSGAMQTYFAGETIPGDNLAYDADLSAWTEYIPYHFRPNYHGVGTCSMMPKEMGGVVDNAARVYGVQGLRVIDGSIPPTQMSSHVMTVFYAMALKISDAILEDY

SEQ ID NO: 1686 - protein, 576 aa, Aspergillus niger
IEASLLTDPKDVSGRTVDYIIAGGGLTGLTTAARLTENPNISVLVIESGSYESDRGPIIEDLNAYGDIFGSSVDHAYETVELATNNQTALIRSGNGLGGSTLVNGGTWTRPHKAQVDSWETVFGNEGWNWDNVAAYSLQAERARAPNAKQIAAGHYFNASCHGVNGTVHAGPRDTGDDYSPIVKALMSAVEDRGVPTKKDFGCGDPHGVSMFPNTLHEDQVRSDAAREWLLPNYQRPNLQVLTGQYVGKVLLSQNGTTPRAVGVEFGTHKGNTFNVYAKHEVLLAAGSAVSPTILEYSGIGMKSILEPLGIDTVVDLPVGLNLQDQTTATVRSRITSAGAGQGQAAWFATFNETFGDYSEKAHELLNTKLEQWAEEAVARGGFHNTTALLIQYENYRDWIVNHNVAYSELFLDTAGVASFDVWDLLPFTRGYVHILDKDPYLHHFAYDPQYFLNELDLLGQAAATQLARNISNSGAMQTYFAGETIPGDNLAYDADLSAWTEYIPYHFRPNYHGVGTCSMMPKEMGGVVDNAARVYGVQGLRVIDGSIPPTQMSSHVMTVFYAMALKISDAILEDY

SEQ ID NO: 1687 - protein, 576 aa, Aspergillus niger
IEASLLTDPKDVSGRTVDYIIAGGGLTGLTTAARLTENPNISVLVIESGSYESDRGPIIEDLNAYGDIFGSSVDHAYETVELATNNQTALIRSGNGLGGSTLVNGGTWTRPHKAQVDSWETVFGNEGWNWDNVAAYSLQAERARAPNAKQIAAGHYFNASCHGVNGTVHVGPRDTGDDYSPIVKALMSAVEDRGVPTKKDFGCGDPHGVSMFPNTLHEDQVRSDAAREWLLPNYQRPNLQVLTGQYVGKVLLSQNGTTPRAVGVEFGTHKGNTHNVYAKHEVLLAAGSAVSPTILEYSGIGMKSILEPLGIDTVVDLPVGLNLQDQTTATVRSRITSAGAGQGQAAWFATFNETFGDYSEKAHELLNTKLEQWAEEAVARGGFHNTTALLIQYENYRDWIVNHNVAYSELFLDTAGVASFDVWDLLPFTRGYVHILDKDPYLHHFAYDPQYFLNELDLLGQAAATQLARNISNSGAMQTYFAGETIPGDNLAYDADLSAWTEYIPYHFRPNYHGVGTCSMMPKEMGGVVDNAARVYGVQGLRVIDGSIPPTQMSSHVMTVFYAMALKISDAILEDY

SEQ ID NO: 1688 - protein, 576 aa, Aspergillus niger
IEASLLTDPKDVSGRTVDYIIAGGGLTGLTTAARLTENPNISVLVIESGSYESDRGPIIEDLNAYGDIFGSSVDHAYETVELATNNQTALIRSGNGLGGSTLVNGGTWTRPHKAQVDSWETVFGNEGWNWDNVAAYSLQAERARAPNAKQIAAGHYFNASCHGVNGTVHAGPRDTGDDYSPIVKALMSAVEDRGVPTKKDFGCGDPHGVSMFPNTLHEDQVRSDAAREWLLPNYQRPNLQVLTGQYVGKVLLSQNGTTPRAVGVEFGTHKGNTHNVYAKHEVLLAAGSAVSPTILEYSGIGMKSILEPLGIDTVVDLPVGLNLQDQTTATVRSRITSAGAGQGQAAWFATFNETFGDYSEKAHELLNTKLEQWAEEAVARGGFHNTTALLIQYENYRDWIVNHNVAYAELFLDTAGVASFDVWDLLPFTRGYVHILDKDPYLHHFAYDPQYFLNELDLLGQAAATQLARNISNSGAMQTYFAGETIPGDNLAYDADLSAWTEYIPYHFRPNYHGVGTCSMMPKEMGGVVDNAARVYGVQGLRVIDGSIPPTQMSSHVMTVFYAMALKISDAILEDY

SEQ ID NO: 1689 - protein, 576 aa, Aspergillus niger
IEASLLTDPKEVAGRTVDYIIAGGGLTGLTTAARLTENPDITVLVIESGSYESDRGPIIEDLNAYGDIFGSSVDHAYETVCLATNNQTALIRSGNGLGGSTLVNGGTWTRPHKAQVDSWETVFGNEGWNWDSVAAYSLQAERARAPNAKQIAAGHYFNASCHGINGTVHAGPRDTGDDYSPIVKALMSAVEDRGVPTKKDLGCGDPHGVSMFPNTLHEDQVRSDAAREWLLPNYQRPNLQVLTGQYVGKVLLSQNATTPRAVGVEFGTHKGNTHNVYAKHEVLLAAGSAVSPTILEYSGIGMKSILEPLGIDTVVDLPVGLNLQDQTTSTVRSRITSAGAGQGQAAWFATFNETFGDYTEKAHELLNTKLEQWAEEAVARGGFHNTTALLIQYENYRDWIVKDNVAYSELFLDTAGEASFDVWDLLPFTRGYVHILDKDPYLRHFAYDPQYFLNELDLLGQAAATQLARNISNSGAMQTYFAGETIPGDNLAYDADLRAWVEYIPYNFRPNYHGVGTCSMMPKEMGGVVDNAARVYGVQGLRVIDGSIPPTQMSSHVMTVFYAMALKIADAVLADY

SEQ ID NO: 1690 - protein, 576 aa, Aspergillus niger
IEASLLTDPKDVSGRTVDYIIAGGGLTGLTTAARLTENPNISVLVIESGSYESDRGPIIEDLNAYGDIFGSSVDHAYETVELATNNQTALIRSGNGLGGSTLVNGGTWTRPHKAQIDSWETVFGNEGWNWDNVAAYSLQAERARAPNAKQIAAGHYFNASCHGVNGTVHAGPRDTGDDYSPIVKALMSAVEDRGVPTKKDFGCGDPHGVSMFPNTLHEDQVRSDAAREWLLPNYQRPNLQVLTGQYVGKVLLSQNGTTPRAVGVEFGTHKGNTHNVYAKHEVLLAAGSAVSPTILEYSGIGMKSILEPLGIDTVVDLPVGLNLQDQTTATVRSRITSAGAGQGQAAWFATFNETFGDYSEKAHELLNTKLEQWAEEAVARGGFHNTTALLIQYENYRDWIVNHNVAYSELFLDTAGVASFDVWDLLPFTRGYVHILDKDPYLHHFAYDPQYFLNELDLLGQAAATQLARNISNSGAMQTYFAGETIPGDNLAYDADLSAWTEYIPYHFRPNYHGVGTCSMMPKEMGGVVDNAARVYGVQGLRVIDGSIPPTQMSSHVMTVFYAMALKISDAILEDY

SEQ ID NO: 1691 - protein, 576 aa, Aspergillus niger
IEASLLTDPKEVAGRTVDYIIAGGGLTGLTVAARLTENPDITVLVIESGSYESDRGPIIEDLNAYGDIFGSSVDHAYETVCLATNNQTALIRSGNGLGGSTLVNGGTWTRPHKAQVDSWETVFGNEGWNWDSVAAYSLQAERARAPNAKQIAAGHYFNASCHGINGTVHAGPRDTGDDYSPIVKALMSAVEDRGVPTKKDLGCGDPHGVSMFPNTLHEDQVRSDAAREWLLPNYQRPNLQVLTGQYVGKVLLSQNATTPRAVGVEFGTHKGNTHNVYAKHEVLLAAGSAVSPTILEYSGIGMKSILEPLGIDTVVDLPVGLNLQDQTTSTVRSRITSAGAGQGQAAWFATFNETFGDYTEKAHELLNTKLEQWAEEAVARGGFHNTTALLIQYENYRDWIVKDNVAYSELFLDTAGEASFDVWDLLPFTRGYVHILDKDPYLRHFAYDPQYFLNELDLLGQAAATQLARNISNSGAMQTYFAGETIPGDNLAYDADLRAWVEYIPYHFRPNYHGVGTCSMMPKEMGGVVDNAARVYGVQGLRVIDGSIPPTQMSSHVMTVFYAMALKIADAVLADY

SEQ ID NO: 1692 - protein, 576 aa, Aspergillus niger
IEASLLTDPKDVSGRTVDYIIAGGGLTGLTTAARLTENPNISVLVIESGSYESDRGPIIEDLNAYGDIFGSSVDHAYETVELATNNQTALIRSGNGLGGSTLVNGGTWTRPHKAQVDSWEKVFGNEGWNWDNVAAYSLQAERARAPNAKQIAAGHYFNASCHGVNGTVHAGPRDTGDDYSPIVKALMSAVEDRGVPTKKDFGCGDPHGVSMFPNTLHEDQVRSDAAREWLLPNYQRPNLQVLTGQYVGKVLLSQNGTTPRAVGVEFGTHKGNTHNVYAKHEVLLAAGSAVSPTILEYSGIGMKSILEPLGIDTVVDLPVGLNLQDQTTATVRSRITSAGAGQGQAAWFATFNETFGDYSEKAHELLNTKLEQWAEEAVARGGFHNTTALLIQYENYRDWIVNHNVAYSELFLDTAGVASFDVWDLLPFTRGYVHILDKDPYLHHFAYDPQYFLNELDLLGQAAATQLARNISNSGAMQTYFAGETIPGDNLAYDADLSAWTEYIPYHFRPNYHGVGTCSMMPKEMGGVVDNAARVYGVQGLRVIDGSIPPTQMSSHVMTVFYAMALKISDAILEDY

SEQ ID NO: 1693 - protein, 576 aa, Aspergillus niger
IEASLLTDPKDVSGRTFDYIIAGGGLTGLTTAARLTENPNISVLVIESGSYESDRGPIIEDLNAYGDIFGSSVDHAYETVELATNNQTALIRSGNGLGGSTLVNGGTWTRPHKAQVDSWETVFGNEGWNWDNVAAYSLQAERARAPNAKQIAAGHYFNASCHGVNGTVHAGPRDTGDDYSPIVKALMSAVEDRGVPTKKDFGCGDPHGVSMFPNTLHEDQVRSDAAREWLLPNYQRPNLQVLTGQYVGKVLLSQNGTTPRAVGVEFGTHKGNTHNVYAKHEVLLAAGSAVSPTILEYSGIGMKSILEPLGIDTVVDLPVGLNLQDQTTATVRSRITSAGAGQGQAAWFATFNETFGDYSEKAHELLNTKLEQWAEEAVARGGFHNTTALLIQYENYRDWIVNHNVAYSELFLDTAGVASFDVWDLLPFTRGYVHILDKDPYLHHFAYDPQYFLNELDLLGQAAATQLARNISNSGAMQTYFAGETIPGDNLAYDADLSAWTEYIPYHFRPNYHGVGTCSMMPKEMGGVVDNAARVYGVQGLRVIDGSIPPTQMSSHVMTVFYAMALKISDAILEDY

SEQ ID NO: 1694 - protein, 576 aa, Aspergillus niger
IEASLLTDPKDVSGRTVDYIIAGGGLTGLTTAARLTENPNISVLVIESGSYESDRGPIIEDLNAYGDIFGSSVDHAYETVELATNNQTALIRSGNGLGGSTLVNGGTWTRPHKAQVDSWETVFGNEGWNWDNVAAYSLQAERARAPNAKQIAAGHYFNASCHGVNGTVHAGPRDTGDDYSPIVKALMSAVEDRGVPTKKDFGCGDPHGVSMFPNTLHEDQVRSDAAREWLLPNYQRPNLQVLTGQYVGKVLLSQNGTTPRAVGVEFGTHKGNTHNVYAKHEVLLAAGSAVSPTILEYSGIGMKSILEPLGIDTVVDLPVGLNLQDQTTATVRSRITSAGAGQGQAAWFATFNETFGDYSEKAHELLNTKLEQWAEEAVARGGFHNTTALLIQYENYRDWIVNHNVAYSELFLDTAGVASFDVWDLLPFTRGYVHILDKDPYLHHFAYDPQYFLNELDLLGQAAATKLARNISNSGAMQTYFAGETIPGDNLAYDADLSAWTEYIPYHFRPNYHGVGTCSMMPKEMGGVVDNAARVYGVQGLRVIDGSIPPTQMSSHVMTVFYAMALKISDAILEDY

SEQ ID NO: 1695 - protein, 576 aa, Aspergillus niger
IEASLLTDPKEVAGRTVDYIIAGGGLTGLTTAARLTENPDITVLVIESGSYESDRGPIIEDLNAYGDIFGSSVDHAYETVELATNNQTALIRSGNGLGGSTLVNGGTWTRPHKAQVDSWETVFGNEGWNWDSVAAYSLQAERARAPNAKQIAAGHYFNASCHGINGTVHAGPRDTGDDYSPIVKALMSAVEDRGVPTKKDLGCGDPHGVSMFPNTLHEDQVRSDAAREWLLPNYQRPNLQVLTGQYVGKVLLSQNATTPRAVGVEFGTHKGNTHNVYAKHEVLLAAGSAVSPTILEYSGIGMKSILEPLGIDTVVDLPVGLNLQDQTTSTVRSRITSAGAGQGQAAWFATFNETFGDYTEKAHELLNTKLEQWAEEAVARGGFHNTTALLIQYENYRDWIVKDNVAYSELFLDTAGVASFDVWDLLPFTRGYVHILDKDPYLRHFAYDPQYFLNELDLLGQAAATQLARNISNSGAMQTYFAGETIPGDNLAYDADLRAWVEYIPYNFRPNYHGVGTCSMMPKEMGGVVDNAARVYGVQGLRVIDGSIPPTQMSSHVMTVFYAMALKIADAVLADY

SEQ ID NO: 1696 - protein, 576 aa, Aspergillus niger
IEASLLTDPKDVSGRTVDYIIAGGGLTGLTVAARLTENPNISVLVIESGSYESDRGPIIEDLNAYGDIFGSSVDHAYETVELATNNQTALIRSGNGLGGSTLVNGGTWTRPHKAQVDSWETVFGNEGWNWDNVAAYSLQAERARAPNAKQIAAGHYFNASCHGVNGTVHAGPRDTGDDYSPIVKALMSAVEDRGVPTKKDFGCGDPHGVSMFPNTLHEDQVRSDAAREWLLPNYQRPNLQVLTGQYVGKVLLSQNGTTPRAVGVEFGTHKGNTHNVYAKHEVLLAAGSAVSPTILEYSGIGMKSILEPLGIDTVVDLPVGLNLQDQTTATVRSRITSAGAGQGQAAWFATFNETFGDYSEKAHELLNTKLEQWAEEAVARGGFHNTTALLIQYENYRDWIVNHNVAYSELFLDTAGVASFDVWDLLPFTRGYVHILDKDPYLHHFAYDPQYFLNELDLLGQAAATQLARNISNSGAMQTYFAGETIPGDNLAYDADLSAWTEYIPYHFRPNYHGVGTCSMMPKEMGGVVDNAARVYGVQGLRVIDGSIPPTQMSSHVMTVFYAMALKISDAILEDY

SEQ ID NO: 1697 - protein, 576 aa, Aspergillus niger
IEASLLTDPKDVSGRTVDYIIAGGGLTGLTTAARLTENPNISVLVIESGSYESDRGPIIEDLNAYGDIFGSSVDHAYETVELATNNQTALIRSGNGLGGSTLVNGGTWTRPHKAQVDSWETVFGNEGWNWDNVAAYSLQAERARAPNAKQIAAGHYFNASCHGVNGTVHAGPRDTGDDYSPIVKALMSAVEDRGVPTKKDFGCGDPHGVSMFPNTLHEDQVRSDAAREWLLPNYQRPNLQVLTGQYVGKVLLSQNGTTPRAVGVEFGTHKGNTHNVYAKHEVLLAAGSAVSPTILEYSGIGMKSILEPLGIDTVVDLPVGLNLQDQTTATVRSRITSAGAGQGQAAWFATFNETFGDYSEKAHELLNTKLEQWAEEAVARGGFHNETALLIQYENYRDWIVNHNVAYSELFLDTAGVASFDVWDLLPFTRGYVHILDKDPYLHHFAYDPQYFLNELDLLGQAAATQLARNISNSGAMQTYFAGETIPGDNLAYDADLSAWTEYIPYHFRPNYHGVGTCSMMPKEMGGVVDNAARVYGVQGLRVIDGSIPPTQMSSHVMTVFYAMALKISDAILEDY

SEQ ID NO: 1698 - protein, 576 aa, Aspergillus niger
IEASLLTDPKDVAGRTVDYIIAGGGLTGLTTAARLTENPNISVLVIESGSYESDRGPIIEDLNAYGDIFGSSVDHAYETVELATNNQTALIRSGNGLGGSTLVNGGTWTRPHKAQVDSWETVFGNEGWNWDNVAAYSLQAERARAPNAKQIAAGHYFNASCHGVNGTVHAGPRDTGDDYSPIVKALMSAVEDRGVPTKKDFGCGDPHGVSMFPNTLHEDQVRSDAAREWLLPNYQRPNLQVLTGQYVGKVLLSQNGTTPRAVGVEFGTHKGNTHNVYAKHEVLLAAGSAVSPTILEYSGIGMKSILEPLGIDTVVDLPVGLNLQDQTTATVRSRITSAGAGQGQAAWFATFNETFGDYSEKAHELLNTKLEQWAEEAVARGGFHNTTALLIQYENYRDWIVNHNVAYSELFLDTAGVASFDVWDLLPFTRGYVHILDKDPYLHHFAYDPQYFLNELDLLGQAAATQLARNISNSGAMQTYFAGETIPGDNLAYDADLSAWTEYIPYHFRPNYHGVGTCSMMPKEMGGVVDNAARVYGVQGLRVIDGSIPPTQMSSHVMTVFYAMALKISDAILEDY

SEQ ID NO: 1699 - protein, 576 aa, Aspergillus niger
IEASLLTDPKDVSGRTVDYIIAGGGLTGLTTAARLTENPNISVLVIESGSYESDRGPIIEDLNAYGDIFGSSVDHAYETVELATNNQTALIRSGNGLGGSTLVNGGTWTRPHKAQVDSWETVFGNEGWNWDNVLAYSLQAERARAPNAKQIAAGHYFNASCHGVNGTVHAGPRDTGDDYSPIVKALMSAVEDRGVPTKKDFGCGDPHGVSMFPNTLHEDQVRSDAAREWLLPNYQRPNLQVLTGQYVGKVLLSQNGTTPRAVGVEFGTHKGNTHNVYAKHEVLLAAGSAVSPTILEYSGIGMKSILEPLGIDTVVDLPVGLNLQDQTTATVRSRITSAGAGQGQAAWFATFNETFGDYSEKAHELLNTKLEQWAEEAVARGGFHNTTALLIQYENYRDWIVNHNVAYSELFLDTAGVASFDVWDLLPFTRGYVHILDKDPYLHHFAYDPQYFLNELDLLGQAAATQLARNISNSGAMQTYFAGETIPGDNLAYDADLSAWTEYIPYHFRPNYHGVGTCSMMPKEMGGVVDNAARVYGVQGLRVIDGSIPPTQMSSHVMTVFYAMALKISDAILEDY

SEQ ID NO: 1700 - protein, 576 aa, Aspergillus niger
IEASLLTDPKDVSGRTVDYIIAGGGLTGLTTAARLTENPNISVLVIESGSYESDRGPIIEDLNAYGDIFGSSVDHAYETVELATNNQTALIRSGNGLGGSTLVNGGTWTRPHKAQVDSWETVFGNEGWNWDNVAAYSLQAERARAPNAKQIAAGHYFNASCHGVNGTVHAGPRDTGDDYSPIVKALMSAVEDRGVPTKKDFGCGDPHGVSMFPNTLHEDQVRSDAAREWLLPNYQRPNLQVLTGQYVGKVLLDQNGTTPRAVGVEFGTHKGNTHNVYAKHEVLLAAGSAVSPTILEYSGIGMKSILEPLGIDTVVDLPVGLNLQDQTTATVRSRITSAGAGQGQAAWFATFNETFGDYSEKAHELLNTKLEQWAEEAVARGGFHNTTALLIQYENYRDWIVNHNVAYSELFLDTAGVASFDVWDLLPFTRGYVHILDKDPYLHHFAYDPQYFLNELDLLGQAAATQLARNISNSGAMQTYFAGETIPGDNLAYDADLSAWTEYIPYHFRPNYHGVGTCSMMPKEMGGVVDNAARVYGVQGLRVIDGSIPPTQMSSHVMTVFYAMALKISDAILEDY

SEQ ID NO: 1701 - protein, 576 aa, Aspergillus niger
IEASLLKDPKEVAGRTYDYIIAGGGLTGLTVAARLTENPNITVLVIESGSYESDRGPIIEDLNAYGDIFGSSVDHAYETVELATNNRTALIRSGNGLGGSTLINGGTWTRPHKAQVDSWETVFGNEGWNWDSVAAYSLQAERARAPNAKQIAAGHYFNASCHGINGTVHAGPRDTGDDYSPIVKALMSAVEDRGVPTKKDLGCGDPHGVSMFPNTLHEDQVRSDAAREWLLPNYQRPNLQVLTGQYVGKVLLSQNATTPRAVGVEFGTHKGNTHNVYAKHEVLLAAGSAVSPTILEYSGIGMKSILEPLGIDTVVDLPVGLNLQDQTTSTVRSRITPAGAGQGQAAWFATFNETFGDYAEKAHELLNTKLEQWAEEAVARGGFHNTTALLIQYENYRDWIVKDNVAYSELFLDTAGVASFDVWDLLPFTRGYVHILDKDPYLRHFAYDPQYFLNELDLLGQAAATQLARNISNSGAMQTYFAGETIPGDNLAYDADLSAWVEYIPENFRPNYHGVGTCSMMPKEMGGVVDNAARVYGVQGLRVIDGSIPPTQMSSHVMTVFYAMALKIADAILADY

SEQ ID NO: 1702 - protein, 576 aa, Synthetic construct
IEASLLTDPKDVSGRTVDYIIAGGGLTGLTTAARLTENPNISVLVIESGSYESDRGPIIEDLNAYGDIFGSSVDHAYETVELATNNQTALIRSGNGLGGSTLVNGGTWTRPHKAQVDSWETVFGNEGWNWDNVAAYSLQAERARAPNAKQIAAGHYFNASCHGVNGTVHAGPRDTGDDYSPIVKALMSAVEDRGVPTKKDFGCGDPHGVSMFPNTLHEDQVRSDAAREWLLPNYQRPNLQVLTGQYVGKVLLSQNGTTPRAVGVEFGTHKGNTHNVYAKHEVLLAAGSAVSPTILEYSGIGLKSILEPLGIDTVVDLPVGLNLQDQTTATVRSRITSAGAGQGQAAWFATFNETFGDYSEKAHELLNTKLEQWAEEAVARGGFHNTTALLIQYENYRDWIVNHNVAYSELFLDTAGVASFDVWDLLPFTRGYVHILDKDPYLHHFAYDPQYFLNELDLLGQAAATQLARNISNSGAMQTYFAGETIPGDNLAYDADLSAWTEYIPYHFRPNYHGVGTCSMMPKEMGGVVDNAARVYGVQGLRVIDGSIPPTQMSSHVMTVFYAMALKISDAILEDY

SEQ ID NO: 1703 - protein, 576 aa, Aspergillus niger
IEASLLKDPKEVAGRTYDYIIAGGGLTGLTVAARLTENPNITVLVIESGSYESDRGPIIEDLNAYGDIFGSSVDHAYETVELATNNQTALIRSGNGLGGSTLINGGTWTRPHKAQVDSWETVFGNEGWNWDSVAAYSLQAERARAPNAKQIAAGHYFNPSCHGINGTVHAGPRDTGDDYSPIVKALMSAVEDRGVPTKKDLGCGDPHGVSMFPNTLHEDQVRSDAAREWLLPNYQRPNLQVLTGQYVGKVLLSQNATTPRAVGVEFGTHKGNTHNVYAKHEVLLAAGSAVSPTILEYSGIGMKSILEPLGIDTVVDLPVGLNLQDQTTSTVRSRITSAGAGQGQAAWFATFNETFGDYAEKAHELLNTKLEQWAEEAVARGGFHNTTALLIQYENYRDWIVKDNVAYSELFLDTAGVASFDVWDLLPFTRGYVHILDKDPYLRHFAYDPQYFLNELDLLGQAAATQLARNISNSGAMQTYFAGETIPGDNLAYDADLSAWVEYIPENFRPNYHGVGTCSMMPKEMGGVVDNAARVYGVQGLRVIDGSIPPTQLSSHVMTVFYAMALKIADAVLADY

SEQ ID NO: 1704 - protein, 576 aa, Aspergillus niger
IEASLLTDPKDVSGRTVDYIIAGGGLVGLTTAARLTENPNISVLVIESGSYESDRGPIIEDLNAYGDIFGSSVDHAYETVELATNNQTALVRSGNGLGGSTLVNGGTWTRPHKAQVDSWETVFGNEGWNWDNVLAYSLQAERARAPNAKQIAAGHYFNASCHGVNGTVHAGPRDTGDDYSPIVKALMSAVEDRGVPTKKDFGCGDPHGVSMFPNTLHEDQVRSDAAREWLLPNYQRPNLQVLTGQYVGKVLLSQNGTTPRAVGVEFGTHKGNTHNVYAKHEVLLAAGSAVSPTILEYSGIGMKSILEPLGIDTVVDLPVGLNLQDQTTATVRSRITSAGAGQGQAAWFATFNETFGDYSEKAHELLNTKLEQWAEEAVARGGFHNTTALLIQYENYRDWIVNHNVAYSELFLDTAGVASFDVWDLLPFTRGYVHILDKDPYLHHFAYDPQYFLNELDLLGQAAATQLARNISNSGAMQTYFAGETIPGDNLAYDADLSAWTEYIPYHFRPNYHGVGTCSMMPKEMGGVVDNAARVYGVQGLRVIDGSIPPTQMSSHVMTVFYAMALKISDAILEDY

SEQ ID NO: 1705 - protein, 576 aa, Aspergillus niger
IEASLLTDPKDVSGRTVDYIIAGGGLTGLTTAARLTENPNISVLVIESGSYESDRGPIIEDLNAYGDIFGSSVDHAYETVELATNNQTALIRSGNGLGGSTLVNGGTWTRPHKAQVDSWETVFGNEGWNWDNVAAYSLQAERARAPNAKQIAAGHYFNASCHGVNGTVHAGPRDTGDDYSPIVKALMSAVEDRGVPTKKDFGCGDPHGVSMFPNTLHEDQVRSDAAREWLLPNYQRPNLQVLTGQYVGKVLLSQNGTTPRAVGVEFGTHKGNTHNVYAKHEVLLAAGSAVSPTILEYSGIGMKSILDPLGIDTVVDLPVGLNLQDQTTATVRSRITSAGAGQGQAAWFATFNETFGDYSEKAHELLNTKLEQWAEEAVARGGFHNTTALLIQYENYRDWIVNHNVAYSELFLDTAGVASFDVWDLLPFTRGYVHILDKDPYLHHFAYDPQYFLNELDLLGQAAATQLARNISNSGAMQTYFAGETIPGDNLAYDADLSAWTEYIPYHFRPNYHGVGTCSMMPKEMGGVVDNAARVYGVQGLRVIDGSIPPTQMSSHVMTVFYAMALKISDAILEDY

SEQ ID NO: 1706 - protein, 576 aa, Aspergillus niger
IEASLLKDPKEVAGRTYDYIIAGGGLTGLTVAARLTENPNITVLVIESGSYESDRGPIIEDLNAYGDIFGSSVDHAYETVELATNNRTALIRSGNGLGGSTLINGGTWTRPHKAQVDSWETVFGNEGWNWDSVAAYSLQAERARAPNAKQIAAGHYFNASCHGINGTVHAGPRDTGDDYSPIVKALMSAVEDRGVPTKKDLGCGDPHGVSMFPNTLHEDQVRSDAAREWLLPNYQRPNLQVLTGQYVGKVLLSQNATTPRAVGVEFGTHKGNTHNVYAKHEVLLAAGSAVSPTILEYSGIGMKSILEPLGIDTVVDLPVGLNLQDQTTSTVRSRITSAGAGQGQAAWFATFNETFGDYAEKAHELLNTKLEQWAEEAVARGGFHNTTALLIQYENYRDWIVKDNVAYSELFLDTAGVASFDVWDLLPFTRGYVHILDKDPYLRHFAYDPQYFLNELDLLGQAAATQLARNISNSGAMQTYFAGETIPGDNLAYDADLSAWVEYIPENFRPNYHGVGTCSMMPKEMGGVVDNAARVYGVQGLRVIDGSIPPTQLSSHVMTVFYAMALKIADAVLADY

SEQ ID NO: 1707 - protein, 576 aa, Aspergillus niger
IEASLLKDPKEVAGRTYDYIIAGGGLTGLTVAARLTENPNITVLVIESGSYESDRGPIIEDLNAYGDIFGSSVDHAYETVELATNNRTALIRSGNGLGGSTLINGGTWTRPHKAQVDSWETVFGNEGWNWDSVAAYSLQAERARAPNAKQIAAGHYFNASCHGINGTVHAGPRDTGDDYSPIVKALMSAVEDRGVPTKKDLGCGDPHGVSMFPNTLHEDQVRSDAAREWLLPNYQRPNLQVLTGRYVGKVLLSQNATTPRAVGVEFGTHKGNTHNVYAKHEVLLAAGSAVSPTILEYSGIGMKSILEPLGIDTVVDLPVGLNLQDQTTSTVRSRITPAGAGQGQAAWFATFNETFGDYAEKAHELLNTKLEQWAEEAVARGGFHNTTALLIQYENYRDWIVKDNVAYSELFLDTAGVASFDVWDLLPFTRGYVHILDKDPYLRHFAYDPQYFLNELDLLGQAAATQLARNISNSGAMQTYFAGETIPGDNLAYDADLRAWVEYIPENFRPNYHGVGTCSMMPKEMGGVVDNAARVYGVQGLRVIDGSIPPTQLSSHVMTVFYAMALKIADAVLADY

SEQ ID NO: 1708 - protein, 576 aa, Aspergillus niger
IEASLLTDPKEVAGRTVDYIIAGGGLTGLTTAARLTENPDITVLVIESGSYESDRGPIIEDLNAYGDIFGSSVDHAYETVELATNNQTALIRSGNGLGGSTLVNGGTWTRPHKAQVDSWETVFGNEGWNWDSVAAYSLQAERARAPNAKQIAAGHYFNASCHGINGTVHAGPRDTGDDYSPIVKALMSAVEDRGVPTKKDLGCGDPHGVSMFPNTLHEDQVRSDAAREWLLPNYQRPNLQVLTGQYVGKVLLSQNATTPRAVGVEFGTHKHNTHNVYAKHEVLLAAGSAVSPTILEYSGIGMKSILEPLGIDTVVDLPVGLNLQDQTTSTVRSRITSAGAGQGQAAWFATFNETFGDYAEKAHELLNTKLEQWAEEAVARGGFHNTTALLIQYENYRDWIVKDNVAYSELFLDTAGVASFDVWDLLPFTRGYVHILDKDPYLRHFAYDPQYFLNELDLLGQAAATQLARNISNSGAMQTYFAGETIPGDNLAYDADLSAWVEYIPYNFRPNYHGVGTCSMMPKEMGGVVDNAARVYGVQGLRVIDGSIPPTQMSSHVMTVFYAMALKIADAILADY

SEQ ID NO: 1709 - protein, 576 aa, Aspergillus niger
IEASLLTDPKEVAGRTVDYIIAGGGLTGLTTAARLTENPDITVLVIESGSYESDRGPIIEDLNAYGDIFGSSVDHAYETVELATNNQTALIRSGNGLGGSTLVNGGTWTRPHKAQVDSWETVFGNEGWNWDSVAAYSLQAERARAPNAKQIAAGHYFNASCHGINGTVHAGPRDTGDDYSPIVKALMSAVEDRGVPTKKDLGCGDPHGVSMFPNTLHEDQVRSDAAREWLLPNYQRPNLQVLTGQYVGKVLLSQNATTPRAVGVEFGTHKSNTHNVYAKHEVLLAAGSAVSPTILEYSGIGMKSILEPLGIDTVVDLPVGLNLQDQTTSTVRSRITSAGAGQGQAAWFATFNETFGDYAEKAHELLNTKLEQWAEEAVARGGFHNTTALLIQYENYRDWIVKDNVAYSELFLDTAGVASFDVWDLLPFTRGYVHILDKDPYLRHFAYDPQYFLNELDLLGQAAATQLARNISNSGAMQTYFAGETIPGDNLAYDADLSAWVEYIPYNFRPNYHGVGTCSMMPKEMGGVVDNAARVYGVQGLRVIDGSIPPTQMSSHVMTVFYAMALKIADAILADY

SEQ ID NO: 1710 - protein, 576 aa, Aspergillus niger
IEASLLTDPKDVSGRTVDYIIAGGGLTGLTTAARLTENPNISVLVIESGSYESDRGPIIEDLNAYGDIFGSSVDHAYETVELATNNQTALIRSGNGLGGSTLVNGGTWTRPHKAQVDSWETVFGNEGWNWDNVAAYSLQAERARAPNAKQIAAGHYFNASCHGVNGTVHAGPRDTGDDYSPIVKALMSAVEDRGVPTKKDFGCGDPHGVSMFPNTLHEDQVRSDAAREWLLPNYQRPNLQVLTGQYVGKVLLSQNGTTPRAVGVEFGTHKGNTHNVYAKHEVLLAAGSAVSPTILEYSGIGMKSILEPLGIDTVVDLPVGLNLQDQTTATVRSRITSAGAGQGQAAWFATFNETFGDYSEKAHELLNTKLEQWAEEAVARGGFHNTTALLIQYENYRDWIVNHNVAYSELFLDTAGVASFDVWDLLPFTRGYVHILDKDPYLHHFAYDPQYFLNELDLLGQAAATQLARNISNSGAMQTYFAGETIPGDNLAYDADLSAWTEYIPYHFRPNYHGVGTCSMMPKELGGVVDNAARVYGVQGLRVIDGSIPPTQMSSHVMTVFYAMALKISDAILEDY

SEQ ID NO: 1711 - protein, 576 aa, Aspergillus niger
IEASLLKDPKEVAGRTYDYIIAGGGLTGLTVAARLTENPNITVLVIESGSYESDRGPIIEDLNAYGDIFGSSVDHAYETVELATNNQTALIRSGNGLGGSTLINGGTWTRPHKAQVDSWETVFGNEGWNWDSVAAYSLQAERARAPNAKQIAAGHYFNPSCHGINGTVHAGPRDTGDDYSPIVKALMSAVEDRGVPTKKDLGCGDPHGVSMFPNTLHEDQVRSDAAREWLLPNYQRPNLQVLTGQYVGKVLLSQNATTPRAVGVEFGTHKGNTHNVYAKHEVLLAAGSAVSPTILEYSGIGMKSILEPLGIDTVVDLPVGLNLQDQTTSTVRSRITPAGAGQGQAAWFATFNETFGDYAEKAHELLNTKLEQWAEEAVARGGFHNTTALLIQYENYRDWIVKDNVAYSELFLDTAGVASFDVWDLLPFTRGYVHILDKDPYLRHFAYDPQYFLNELDLLGQAAATQLARNISNSGAMQTYFAGETIPGDNLAYDADLSAWVEYIPENFRPNYHGVGTCSMMPKEMGGVVDNAARVYGVQGLRVIDGSIPPTQMSSHVMTVFYAMALKIADAILADY

SEQ ID NO: 1712 - protein, 576 aa, Aspergillus niger
IEASLLTDPKDVSGRTVDYIIAGGGLTGLTTAARLTENPNISVLVIESGSYESDRGPIIEDLNAYGDIFGSSVDHAYETVELATNNQTALVRSGNGLGGSTLVNGGTWTRPHKAQVDSWETVFGNEGWNWDNVAAYSLQAERARAPNAKQIAAGHYFNASCHGVNGTVHAGPRDTGDDYSPIVKALMSAVEDRGVPTKKDFGCGDPHGVSMFPNTLHEDQVRSDAAREWLLPNYQRPNLQVLTGQYVGKVLLSQNGTTPRAVGVEFGTHKGNTHNVYAKHEVLLAAGSAVSPTILEYSGIGMKSILEPLGIDTVVDLPVGLNLQDQTTATVRSRITSAGAGQGQAAWFATFNETFGDYSEKAHELLNTKLEQWAEEAVARGGFHNTTALLIQYENYRDWIVNHNVAYSELFLDTAGVASFDVWDLLPFTRGYVHILDKDPYLHHFAYDPQYFLNELDLLGQAAATQLARNISNSGAMQTYFAGETIPGDNLAYDADLSAWTEYIPYHFRPNYHGVGTCSMMPKEMGGVVDNAARVYGVQGLRVIDGSIPPTQMSSHVMTVFYAMALKISDAILEDY

SEQ ID NO: 1713 - protein, 576 aa, Aspergillus niger
IEASLLKDPKEVAGRTYDYIIAGGGLTGLTVAARLTENPNITVLVIESGSYESDRGPIIEDLNAYGDIFGSSVDHAYETVELATNNQTALIRSGNGLGGSTLINGGTWTRPHKAQVDSWETVFGNEGWNWDSVAAYSLQAERARAPNAKQIAAGHYFNPSCHGINGTVHAGPRDTGDDYSPIVKALMSAVEDRGVPTKKDLGCGDPHGVSMFPNTLHEDQVRSDAAREWLLPNYQRPNLQVLTGQYVGKVLLSQNATTPRAVGVEFGTHKGNTHNVYAKHEVLLAAGSAVSPTILEYSGIGMKSILEPLGIDTVVDLPVGLNLQDQTTSTVRSRITSAGAGQGQAAWFATFNETFGDYAEKAHELLNTKLEQWAEEAVARGGFHNTTALLIQYENYRDWIVKDNVAYSELFLDTAGVASFDVWDLLPFTRGYVHILDKDPYLRHFAYDPQYFLNELDLLGQAAATQLARNISNSGAMQTYFAGETIPGDNLAYDADLSAWVEYIPENFRPNYHGVGTCSMMPKEMGGVVDNAARVYGVQGLRVIDGSIPPTQMSSHVMTVFYAMALKIADAVLADY

SEQ ID NO: 1714 - protein, 576 aa, Aspergillus niger
IEASLLKDPKEVAGRTYDYIIAGGGLTGLTVAARLTENPNITVLVIESGSYESDRGPIIEDLNAYGDIFGSSVDHAYETVELATNNQTALIRSGNGLGGSTLINGGTWTRPHKAQVDSWETVFGNEGWNWDSVAAYSLQAERARAPNAKQIAAGHYFNPSCHGINGTVHAGPRDTGDDYSPIVKALMSAVEDRGVPTKKDLGCGDPHGVSMFPNTLHEDQVRSDAAREWLLPNYQRPNLQVLTGRYVGKVLLSQNATTPRAVGVEFGTHKGNTHNVYAKHEVLLAAGSAVSPTILEYSGIGMKSILEPLGIDTVVDLPVGLNLQDQTTSTVRSRITPAGAGQGQAAWFATFNETFGDYAEKAHELLNTKLEQWAEEAVARGGFHNTTALLIQYENYRDWIVKDNVAYSELFLDTAGVASFDVWDLLPFTRGYVHILDKDPYLRHFAYDPQYFLNELDLLGQAAATQLARNISNSGAMQTYFAGETIPGDNLAYDADLRAWVEYIPENFRPNYHGVGTCSMMPKEMGGVVDNAARVYGVQGLRVIDGSIPPTQMSSHVMTVFYAMALKIADAVLADY

SEQ ID NO: 1715 - protein, 576 aa, Aspergillus niger
IEASLLTDPKEVAGRTVDYIIAGGGLTGLTTAARLTENPDITVLVIESGSYESDRGPIIEDLNAYGDIFGSSVDHAYETVELATNNQTALIRSGNGLGGSTLVNGGTWTRPHKAQVDSWETVFGNEGWNWDSVAAYSLQAERARAPNAKQIAAGHYFNASCHGINGTVHAGPRDTGDDYSPIVKALMSAVEDRGVPTKKDLGCGDPHGVSMFPNTLHEDQVRSDAAREWLLPNYQRPNLQVLTGQYVGKVLLSQNATTPRAVGVEFGTHKGNTHNVYAKHEVLLAAGSAVSPTILEYSGIGMKSILEPLGIDTVVDLPVGLNLQDQTTSTVRSRITSAGAGQGQAAWFATFNETFGDYAEKAHELLNTKLEQWAEEAVARGGFHNTTALLIQYENYRDWIVKDNVAYSELFLDTAGVASFDVWDLLPFTRGYVHILDKDPYLRHFAYDPQYFLNELDLLGQAAATQLARNISNSGAMQTYFAGETIPGDNLAYDADLSAWVEYIAYNFRPNYHGVGTCSMMPKEMGGVVDNAARVYGVQGLRVIDGSIPPTQMSSHVMTVFYAMALKIADAILADY

SEQ ID NO: 1716 - protein, 576 aa, Aspergillus niger
IEASLLKDPKEVAGRTYDYIIAGGGLTGLTVAARLTENPNITVLVIESGSYESDRGPIIEDLNAYGDIFGSSVDHAYETVELATNNRTALIRSGNGLGGSTLINGGTWTRPHKAQVDSWETVFGNEGWNWDSVAAYSLQAERARAPNAKQIAAGHYFNASCHGINGTVHAGPRDTGDDYSPIVKALMSAVEDRGVPTKKDLGCGDPHGVSMFPNTLHEDQVRSDAAREWLLPNYQRPNLQVLTGQYVGKVLLSQNATTPRAVGVEFGTHKGNTHNVYAKHEVLLAAGSAVSPTILEYSGIGMKSILEPLGIDTVVDLPVGLNLQDQTTSTVRSRITSAGAGQGQAAWFATFNETFGDYAEKAHELLNTKLEQWAEEAVARGGFHNTTALLIQYENYRDWIVKDNVAYSELFLDTAGVASFDVWDLLPFTRGYVHILDKDPYLRHFAYDPQYFLNELDLLGQAAATQLARNISNSGAMQTYFAGETIPGDNLAYDADLSAWVEYIPENFRPNYHGVGTCSMMPKEMGGVVDNAARVYGVQGLRVIDGSIPPTQMSSHVMTVFYAMALKIADAVLADY

SEQ ID NO: 1717 - protein, 576 aa, Aspergillus niger
IEASLLKDPKEVAGRTYDYIIAGGGLTGLTVAARLTENPNITVLVIESGSYESDRGPIIEDLNAYGDIFGSSVDHAYETVELATNNRTALIRSGNGLGGSTLINGGTWTRPHKAQVDSWETVFGNEGWNWDSVAAYSLQAERARAPNAKQIAAGHYFNPSCHGLNGTVHAGPRDTGDDYSPIVKALMSAVEDRGVPTKKDLGCGDPHGVSMFPNTLHEDQVRSDAAREWLLPNYQRPNLQVLTGQYVGKVLLSQNATTPRAVGVEFGTHKGNTHNVYAKHEVLLAAGSAVSPTILEYSGIGMKSILEPLGIDTVVDLPVGLNLQDQTTSTVRSRITSAGAGQGQAAWFATFNETFGDYAEKAHELLNTKLEQWAEEAVARGGFHNTTALLIQYENYRDWIVKDNVAYSELFLDTAGVASFDVWDLLPFTRGYVHILDKDPYLRHFAYDPQYFLNELDLLGQAAATQLARNISNSGAMQTYFAGETIPGDNLAYDADLSAWVEYIPENFRPNYHGVGTCSMMPKEMGGVVDNAARVYGVQGLRVIDGSIPPTQMSSHVMTVFYAMALKIADAILADY

SEQ ID NO: 1718 - protein, 576 aa, Aspergillus niger
IEASLLKDPKEVAGRTYDYIIAGGGLTGLTVAARLTENPNITVLVIESGSYESDRGPIIEDLNAYGDIFGSSVDHAYETVELATNNQTALIRSGNGLGGSTLINGGTWTRPHKAQVDSWETVFGNEGWNWDSVAAYSLQAERARAPNAKQIAAGHYFNASCHGLNGTVHAGPRDTGDDYSPIVKALMSAVEDRGVPTKKDLGCGDPHGVSMFPNTLHEDQVRSDAAREWLLPNYQRPNLQVLTGQYVGKVLLSQNATTPRAVGVEFGTHKGNTHNVYAKHEVLLAAGSAVSPTILEYSGIGMKSILEPLGIDTVVDLPVGLNLQDQTTSTVRSRITPAGAGQGQAAWFATFNETFGDYAEKAHELLNTKLEQWAEEAVARGGFHNTTALLIQYENYRDWIVKDNVAYSELFLDTAGVASFDVWDLLPFTRGYVHILDKDPYLRHFAYDPQYFLNELDLLGQAAATQLARNISNSGAMQTYFAGETIPGDNLAYDADLRAWVEYIPENFRPNYHGVGTCSMMPKEMGGVVDNAARVYGVQGLRVIDGSIPPTQLSSHVMTVFYAMALKIADAVLADY

SEQ ID NO: 1719 - protein, 576 aa, Aspergillus niger
IEASLLTDPKDVSGRTVDYIIAGGGLVGLTTAARLTENPNISVLVIESGFYESDRGPIIEDLNAYGDIFGSSVDHAYETVELATNNQTALVRSGNGLGGSTLVNGGTWTRPHKAQVDSWETVFGNEGWNWDNVAAYSLQAERARAPNAKQIAAGHYFNASCHGVNGTVHAGPRDTGDDYSPIVKALMSAVEDRGVPTKKDFGCGDPHGVSMFPNTLHEDQVRSDAAREWLLPNYQRPNLQVLTGQYVGKVLLSQNGTTPRAVGVEFGTHKGNTHNVYAKHEVLLAAGSAVSPTILEYSGIGMKSILEPLGIDTVVDLPVGLNLQDQTTSTVRSRITSAGAGQGQAAWFATFNETFGDYSEKAHELLNTKLEQWAEEAVARGGFHNTTALLIQYENYRDWIVNHNVAYSELFLDTAGVASFDVWDLLPFTRGYVHILDKDPYLHHFAYDPQYFLNELDLLGQAAATQLARNISNSGAMQTYFAGETIPGDNLAYDADLSAWTEYIPYHFRPNYHGVGTCSMMPKEMGGVVDNAARVYGVQGLRVIDGSIPPTQMSSHVMTVFYAMALKISDAILEDY

SEQ ID NO: 1720 - protein, 576 aa, Aspergillus niger
IEASLLTDPKEVAGRTVDYIIAGGGLTGLTTAARLTENPDITVLVIESGSYESDRGPIIEDLNAYGDIFGSSVDHAYETVELATNNQTALIRSGNGLGGSTLVNGGTWTRPHKAQVDSWETVFGNEGWNWDSVAAYSLQAERARAPNAKQIAAGHYFNASCHGINGTVHAGPRDTGDDYSPIVKALMSAVEDRGVPTKKDLGCGDPHGVSMFPNTLHEDQVRSDAAREWLLPNYQRPNLQVLTGQYVGKVLLSQNATTPRAVGVEFGTHKGNTHNVYAKHEVLLAAGSAVSPTILEYSGIGMKSILEPLGIDTVVDLPVGLNLQDQTTSTVRSRITSAGAGQGQAAWFATFNETFGDYAEKAHELLNTKLEQWAEEAVARGGFHNTTALLIQYENYRDWIVKDNVAYSELFLDTAGVASFDVWDLLPFTRGYVHILDKDPYLRHFAYDPQYFLNELDLLGQAAATQLARNISNSGAMQTYFAGETIPGDNLAYDADLSAWVEYIHYNFRPNYHGVGTCSMMPKEMGGVVDNAARVYGVQGLRVIDGSIPPTQMSSHVMTVFYAMALKIADAILADY

SEQ ID NO: 1721 - protein, 576 aa, Aspergillus niger
IEASLLKDPKEVAGRTYDYIIAGGGLTGLTVAARLTENPNITVLVIESGSYESDRGPIIEDLNAYGDIFGSSVDHAYETVELPTNNRTALIRSGNGLGGSTLINGGTWTRPHKAQVDSWETVFGNEGWNWDSVAAYSLQAERARAPNAKQIAAGHYFNASCHGLNGTVHAGPRDTGDDYSPIVKALMSAVEDRGVPTKKDLGCGDPHGVSMFPNTLHEDQVRSDAAREWLLPNYQRPNLQVLTGQYVGKVLLSQNATTPRAVGVEFGTHKGNTHNVYAKHEVLLAAGSAVSPTILEYSGIGMKSILEPLGIDTVVDLPVGLNLQDQTTSTVRSRITPAGAGQGQAAWFATFNETFGDYAEKAHELLNTKLEQWAEEAVARGGFHNTTALLIQYENYRDWIVKDNVAYSELFLDTAGVASFDVWDLLPFTRGYVHILDKDPYLRHFAYDPQYFLNELDLLGQAAATQLARNISNSGAMQTYFAGETIPGDNLAYDADLRAWVEYIPENFRPNYHGVGTCSMMPKEMGGVVDNAARVYGVQGLRVIDGSIPPTQLSSHVMTVFYAMALKIADAVLADY

SEQ ID NO: 1722 - protein, 576 aa, Aspergillus niger
IEASLLKDPKEVAGRTYDYIIAGGGLTGLTVAARLTENPNITVLVIESGSYESDRGPIIEDLNAYGDIFGSSVDHAYETVELPTNNRTALIRSGNGLGGSTLINGGTWTRPHKAQVDSWETVFGNEGWNWDSVAAYSLQAERARAPNAKQIAAGHYFNPSCHGLNGTVHAGPRDTGDDYSPIVKALMSAVEDRGVPTKKDLGCGDPHGVSMFPNTLHEDQVRSDAAREWLLPNYQRPNLQVLTGQYVGKVLLSQNATTPRAVGVEFGTHKGNTHNVYAKHEVLLAAGSAVSPTILEYSGIGMKSILEPLGIDTVVDLPVGLNLQDQTTSTVRSRITPAGAGQGQAAWFATFNETFGDYAEKAHELLNTKLEQWAEEAVARGGFHNTTALLIQYENYRDWIVKDNVAYSELFLDTAGVASFDVWDLLPFTRGYVHILDKDPYLRHFAYDPQYFLNELDLLGQAAATQLARNISNSGAMQTYFAGETIPGDNLAYDADLSAWVEYIPENFRPNYHGVGTCSMMPKEMGGVVDNAARVYGVQGLRVIDGSIPPTQMSSHVMTVFYAMALKIADAILADY

SEQ ID NO: 1723 - protein, 576 aa, Aspergillus niger
IEASLLKDPKEVAGRTYDYIIAGGGLTGLTVAARLTENPNITVLVIESGSYESDRGPIIEDLNAYGDIFGSSVDHAYETVELATNNQTALIRSGNGLGGSTLINGGTWTRPHKAQVDSWETVFGNEGWNWDSVAAYSLQAERARAPNAKQIAAGHYFNASCHGINGTVHAGPRDTGDDYSPIVKALMSAVEDRGVPTKKDLGCGDPHGVSMFPNTLHEDQVRSDAAREWLLPNYQRPNLQVLTGQYVGKVLLSQNATTPRAVGVEFGTHKGNTHNVYAKHEVLLAAGSAVSPTILEYSGIGMKSILEPLGIDTVVDLPVGLNLQDQTTSTVRSRITPAGAGQGQAAWFATFNETFGDYAEKAHELLNTKLEQWAEEAVARGGFHNTTALLIQYENYRDWIVKDNVAYSELFLDTAGVASFDVWDLLPFTRGYVHILDKDPYLRHFAYDPQYFLNELDLLGQAAATQLARNISNSGAMQTYFAGETIPGDNLAYDADLSAWVEYIPENFRPNYHGVGTCSMMPKEMGGVVDNAARVYGVQGLRVIDGSIPPTQLSSHVMTVFYAMALKIADAVLADY

SEQ ID NO: 1724 - protein, 576 aa, Aspergillus niger
IEASLLKDPKEVAGRTYDYIIAGGGLTGLTVAARLTENPNITVLVIESGSYESDRGPIIEDLNAYGDIFGSSVDHAYETVELATNNQTALIRSGNGLGGSTLINGGTWTRPHKAQVDSWETVFGNEGWNWDSVAAYSLQAERARAPNAKQIAAGHYFNASCHGINGTVHAGPRDTGDDYSPIVKALMSAVEDRGVPTKKDLGCGDPHGVSMFPNTLHEDQVRSDAAREWLLPNYQRPNLQVLTGQYVGKVLLSQNATTPRAVGVEFGTHKGNTHNVYAKHEVLLAAGSAVSPTILEYSGIGMKSILEPLGIDTVVDLPVGLNLQDQTTSTVRSRITPAGAGQGQAAWFATFNETFGDYAEKAHELLNTKLEQWAEEAVARGGFHNTTALLIQYENYRDWIVKDNVAYSELFLDTAGVASFDVWDLLPFTRGYVHILDKDPYLRHFAYDPQYFLNELDLLGQAAATQLARNISNSGAMQTYFAGETIPGDNLAYDADLSAWVEYIPENFRPNYHGVGTCSMMPKEMGGVVDNAARVYGVQGLRVIDGSIPPTQMSSHVMTVFYAMALKIADAVLADY

SEQ ID NO: 1725 - protein, 576 aa, Aspergillus niger
IEASLLTDPKDVSGRTVDYIIAGGGLTGLTTAARLTENPNISVLVIESGSYESDRGPIIEDLNAYGDIFGSSVDHAYETVELATNNQTALIRSGNGLGGSTLVNGGTWTRPHKAQVDSWETVFGNEGWNWDNVAAYSLQAERARAPNAKQIAAGHYFNASCHGVNGTVHAGPRDTGDDYSPIVKALMSAVEDRGVPTKKDFGCGDPHGVSMFPNTLHEDQVRSDAAREWLLPNYQRPNLQVLTGQYVGKVLLSQNGTTPRAVGVEFGTHKGNTHNVYAKHEVLLAAGSAVSPTILEYSGIGMKSILEPLGIDTVVDLPVGLNLQDQTTATVRSRITSAGAGQGQAAWFATFNETFGDYSEKAHELLNTKLEQWAEEAVARGGFHNTTALLIQYENYRDWIVNHNVAYSELFLDTAGVASFDVWDLLPFTRGYVHILDKDPYLHHFAYDPQYFLNELDLLGQAAATQLARNISNSGAMQTYFAGETIPGDNLAYDADLSAWTEYIPYHFRPNYHGVGTCSMMPKEMGGVVDNAARVYGVQGLRVIDGSIPPTQVSSHVMTVFYAMALKISDAILEDY

SEQ ID NO: 1726 - protein, 576 aa, Aspergillus niger
IEASLLKDPKEVAGRTYDYIIAGGGLTGLTVAARLTENPNITVLVIESGSYESDRGPIIEDLNAYGDIFGSSVDHAYETVELATNNRTALIRSGNGLGGSTLINGGTWTRPHKAQVDSWETVFGNEGWNWDSVAAYSLQAERARAPNAKQIAAGHYFNPSCHGLNGTVHAGPRDTGDDYSPIVKALMSAVEDRGVPTKKDLGCGDPHGVSMFPNTLHPDQVRSDAAREWLLPNYQRPNLQVLTGQYVGKVLLSQNATTPRAVGVEFGTHKGNTHNVYAKHEVLLAAGSAVSPTILEYSGIGMKSILEPLGIDTVVDLPVGLNLQDQTTSTVRSRITPAGAGQGQAAWFATFNETFGDYAEKAHELLNTKLEQWAEEAVARGGFHNTTALLIQYENYRDWIVKDNVAYSELFLDTAGVASFDVWDLLPFTRGYVHILDKDPYLRHFAYDPQYFLNELDLLGQAAATQLARNISNSGAMQTYFAGETIPGDNLAYDADLSAWVEYIPENFRPNYHGVGTCSMMPKEMGGVVDNAARVYGVQGLRVIDGSIPPTQMSSHVMTVFYAMALKIADAILADY

SEQ ID NO: 1727 - protein, 576 aa, Aspergillus niger
IEASLLTDPKEVAGRTVDYIIAGGGLTGLTTAARLTENPDITVLVIESGSYESDRGPIIEDLNAYGDIFGSSVDHAYETVELATNNQTALIRSGNGLGGSTLVNGGTWTRPHKAQVDSWETVFGNEGWNWDSVAAYSLQAERARAPNAKQIAAGHYFNASCHGINGTVHAGPRDTGDDYSPIVKALMSAVEDRGVPTKKDLGCGDPHGVSMFPNTLHEDQVRSDAAREWLLPNYQRPNLQVLTGQYVGKVLLSQNATTPRAVGVEFGTHKQNTHNVYAKHEVLLAAGSAVSPTILEYSGIGMKSILEPLGIDTVVDLPVGLNLQDQTTSTVRSRITSAGAGQGQAAWFATFNETFGDYAEKAHELLNTKLEQWAEEAVARGGFHNTTALLIQYENYRDWIVKDNVAYSELFLDTAGVASFDVWDLLPFTRGYVHILDKDPYLRHFAYDPQYFLNELDLLGQAAATQLARNISNSGAMQTYFAGETIPGDNLAYDADLSAWVEYIPYNFRPNYHGVGTCSMMPKEMGGVVDNAARVYGVQGLRVIDGSIPPTQMSSHVMTVFYAMALKIADAILADY

SEQ ID NO: 1728 - protein, 576 aa, Aspergillus niger
IEASLLTDPKEVAGRTVDYIIAGGGLTGLTVAARLTENPDITVLVIESGCYESDRGPIIEDLNAYGDIFGSSVDHAYETVCLATNNQTALIRSGNGLGGSTLVNGGTWTRPHKAQVDSWETVFGNEGWNWDSVAAYSLQAERARAPNAKQIAAGHYFNASCHGINGTVHAGPRDTGDDYSPIVKALMSAVEDRGVPTKKDLGCGDPHGVSMFPNTLHEDQVRSDAAREWLLPNYQRPNLQVLCGQYVGKVLLSQNATTPRAVGVEFGTHKGNTHNVYAKHEVLLAAGSAVSPTILEYSGIGMKSILEPLGIKTVVDLPVGLNLQDQTTSTVRSRITSAGAGQGQAAWFATFNETFGDYTEKAHELLNTKLEQWAEEAVARGGFHNTTALLIQYENYRDWIVKDNVAYSELFLDTAGEASFDVWDLLPFTRGYVHILDKDPYLRHFAYDPQYFLNELDLLGQAAATQLARNISNSGAMQTYFAGETIPGDNLAYDADLRAWVEYIPYHFRPNYHGVGTCSMMPKEMGGVVDNAARVYGVQGLRVIDGSIPPTQMSSHVMTVFYAMALKIADAVLADY

SEQ ID NO: 1729 - protein, 576 aa, Aspergillus niger
IEASLLKDPKEVAGRTYDYIIAGGGLTGLTVAARLTENPNITVLVIESGSYESDRGPIIEDLNAYGDIFGSSVDHAYETVELATNNRTALIRSGNGLGGSTLINGGTWTRPHKAQVDSWETVFGNEGWNWDSVAAYSLQAERARAPNAKQIAAGHYFNPSCHGINGTVHAGPRDTGDDYSPIVKALMSAVEDRGVPTKKDLGCGDPHGVSMFPNTLHEDQVRSDAAREWLLPNYQRPNLQVLTGQYVGKVLLSQNATTPRAVGVEFGTHKGNTHNVYAKHEVLLAAGSAVSPTILEYSGIGMKSILEPLGIDTVVDLPVGLNLQDQTTSTVRSRITSAGAGQGQAAWFATFNETFGDYAEKAHELLNTKLEQWAEEAVARGGFHNTTALLIQYENYRDWIVKDNVAYSELFLDTAGVASFDVWDLLPFTRGYVHILDKDPYLRHFAYDPQYFLNELDLLGQAAATQLARNISNSGAMQTYFAGETIPGDNLAYDADLSAWVEYIPENFRPNYHGVGTCSMMPKEMGGVVDNAARVYGVQGLRVIDGSIPPTQMSSHVMTVFYAMALKIADAILADY

SEQ ID NO: 1730 - protein, 576 aa, Aspergillus niger
IEASLLKDPKEVAGRTYDYIIAGGGLTGLTVAARLTENPNITVLVIESGSYESDRGPIIEDLNAYGDIFGSSVDHAYETVELATNNQTALIRSGNGLGGSTLINGGTWTRPHKAQVDSWETVFGNEGWNWDSVAAYSLQAERARAPNAKQIAAGHYFNASCHGINGTVHAGPRDTGDDYSPIVKALMSAVEDRGVPTKKDLGCGDPHGVSMFPNTLHEDQVRSDAAREWLLPNYQRPNLQVLTGQYVGKVLLSQNATTPRAVGVEFGTHKGNTHNVYAKHEVLLAAGSAVSPTILEYSGIGMKSILEPLGIDTVVDLPVGLNLQDQTTSTVRSRITPAGAGQGQAAWFATFNETFGDYAEKAHELLNTKLEQWAEEAVARGGFHNTTALLIQYENYRDWIVKDNVAYSELFLDTAGVASFDVWDLLPFTRGYVHILDKDPYLRHFAYDPQYFLNELDLLGQAAATQLARNISNSGAMQTYFAGETIPGDNLAYDADLRAWVEYIPENFRPNYHGVGTCSMMPKEMGGVVDNAARVYGVQGLRVIDGSIPPTQLSSHVMTVFYAMALKIADAVLADY

SEQ ID NO: 1731 - protein, 576 aa, Aspergillus niger
IEASLLTDPKDVSGRTVDYIIAGGGLTGLTTAARLTENPNISVLVIESGSYESDRGPIIEDLNAYGDIFGSSVDHAYETVELATNNQTALIRSGNGLGGSTLVNGGTWTRPHKAQVDSWETVFGNEGWNWDNVAAYSLKAERARAPNAKQIAAGHYFNASCHGVNGTVHAGPRDTGDDYSPIVKALMSAVEDRGVPTKKDFGCGDPHGVSMFPNTLHEDQVRSDAAREWLLPNYQRPNLQVLTGQYVGKVLLSQNGTTPRAVGVEFGTHKGNTHNVYAKHEVLLAAGSAVSPTILEYSGIGMKSILEPLGIDTVVDLPVGLNLQDQTTATVRSRITSAGAGQGQAAWFATFNETFGDYSEKAHELLNTKLEQWAEEAVARGGFHNTTALLIQYENYRDWIVNHNVAYSELFLDTAGVASFDVWDLLPFTRGYVHILDKDPYLHHFAYDPQYFLNELDLLGQAAATQLARNISNSGAMQTYFAGETIPGDNLAYDADLSAWTEYIPYHFRPNYHGVGTCSMMPKEMGGVVDNAARVYGVQGLRVIDGSIPPTQMSSHVMTVFYAMALKISDAILEDY

SEQ ID NO: 1732 - protein, 576 aa, Aspergillus niger
IEASLLTDPKEVAGRTVDYIIAGGGLTGLTTAARLTENPDITVLVIESGSYESDRGPIIEDLNAYGDIFGSSVDHAYETVELATNNQTALIRSGNGLGGSTLVNGGTWTRPHKAQVDSWETVFGNEGWNWDSVAAYSLQAERARAPNAKQIAAGHYFNASCHGINGTVHAGPRDTGDDYSPIVKALMSAVEDRGVPTKKDLGCGDPHGVSMFPNTLHEDQVRSDAAREWLLPNYQRPNLQVLTGQYVGKVLLSQNATTPRAVGVEFGTHKGNTHNVYAKHEVLLAAGSAVSPTILEYSGIGMKSILEPLGIDTVVDLPVGLNLQDQTTSTVRSRITSAGAGQGQAAWFATFNETFGDYAEKAHELLNTKLEQWAEEAVARGGFHNTTALLIQYENYRDWIVKDNVAYSELFLDTAGVASFDVWDLLPFTRGYVHILDKDPYLRHFAYDPQYFLNELDLLGQAAATQLARNISNSGAMQTYFAGETIPGDNLAYDADLSAWVEYICYNFRPNYHGVGTCSMMPKEMGGVVDNAARVYGVQGLRVIDGSIPPTQMSSHVMTVFYAMALKIADAILADY

SEQ ID NO: 1733 - protein, 576 aa, Aspergillus niger
IEASLLTDPKDVSGRTVDYIIAGGGLTGLTTAARLTENPNISVLVIESGSYESDRGPIIEDLNAYGDIFGSSVDHAYETVELATNNQTALIRSGNGLGGSTLVNGGTWTRPHKAQVDSWETVFGNEGWNWDNVAAYSLQAERARAPNAKQIAAGHYFNASCHGVNGTVHAGPRDTGDDYSPIVKALMSAVEDRGVPTQKDFGCGDPHGVSMFPNTLHEDQVRSDAAREWLLPNYQRPNLQVLTGQYVGKVLLSQNGTTPRAVGVEFGTHKGNTHNVYAKHEVLLAAGSAVSPTILEYSGIGMKSILEPLGIDTVVDLPVGLNLQDQTTATVRSRITSAGAGQGQAAWFATFNETFGDYSEKAHELLNTKLEQWAEEAVARGGFHNTTALLIQYENYRDWIVNHNVAYSELFLDTAGVASFDVWDLLPFTRGYVHILDKDPYLHHFAYDPQYFLNELDLLGQAAATQLARNISNSGAMQTYFAGETIPGDNLAYDADLSAWTEYIPYHFRPNYHGVGTCSMMPKEMGGVVDNAARVYGVQGLRVIDGSIPPTQMSSHVMTVFYAMALKISDAILEDY

SEQ ID NO: 1734 - protein, 576 aa, Aspergillus niger
IEASLLTDPKEVAGRTVDYIIAGGGLTGLTTAARLTENPDITVLVIESGSYESDRGPIIEDLNAYGDIFGSSVDHAYETVELATNNQTALIRSGNGLGGSTLVNGGTWTRPHKAQVDSWETVFGNEGWNWDSVAAYSLQAERARAPNAKQIAAGHYFNASCHGINGTVHAGPRDTGDDYSPIVKALMSAVEDRGVPTKKDLGCGDPHGVSMFPNTLHEDQVRSDAAREWLLPNYQRPNLQVLTGQYVGKVLLSQNATTPRAVGVEFGTHKGNTHNVYAKHEVLLAAGSAVSPTILEYSGIGMKSILEPLGIDTVVDLPVGLNLQDQTTSTVRSRITSAGAGQGQAAWFATFNETFGDYAEKAHELLNTKLEQWAEEAVARGGFHNTTALLIQYENYRDWIVKDNVAYSELFLDTAGVASFDVWDLLPFTRGYVHILDKDPYLRHFAYDPQYFLNELDLLGQAAATQLARNISNSGAMQTYFAGETIPGDNLAYDADLSAWVEYIPYNFRPNYHGVGTCSMMPKEMGGVVDNAARVYGVQGLRVIDGSIPPTQMSSHVMTVFYAMALKIADAILADY

SEQ ID NO: 1735 - protein, 416 aa, Aspergillus niger
LVSSLVVSLAAALPHYIRSNGIEASLLTDPKEVSGRTVDYIIAGGGLTGLTTAARLTENPNISVLVIESGSYESDRGPIIEDLNAYGDIFGSSVDHAYETVELATNNQTALIRSGNGLGGSTLVNGGTWTRPHKAQVDSWETVFGNEGWNWDNVAAYSLQAERARAPNAKQIAAGHYFNASCHGLNGTVHAGPRDTGDDYSPIVKALMSAVEDRGVPTKKDFGCGDPHGVSMFPNTLHEDQVRSDAAREWLLPNYQRPNLQVLTGQYVGKVLLSQNGTTPRAVGVEFGTHKGNTHNVYAKHEVLLAAGSAVSPTILEYSGIGMKSILEPLGIDTVVDLPVGLNLQDQTTATVRSRITSAGAGQGQAAWFATFNETFGDYSEKAHELLNTKLEQWAEEAVARGGFHNTTALLIQYEN

SEQ ID NO: 1736 - protein, 575 aa, Aspergillus niger
IEASLLTDPKEVAGRTVDYIIAGGGLTGLTTAARLTENPDITVLVIESGSYESDRGPIIEDLNAYGDIFGSSVDHAYETVELTNNQTALIRSGNGLGGSTLVNGGTWTRPHKAQVDSWETVFGNEGWNWDSVAAYSLQAERARAPNAKQIAAGHYFNASCHGINGTVHAGPRDTGDDYSPIVKALMSAVEDRGVPTKKDLGCGDPHGVSMFPNTLHEDQVRSDAAREWLLPNYQRPNLQVLTGQYVGKVLLSQNATTPRAVGVEFGTHKGNTHNVYAKHEVLLAAGSAVSPTILEYSGIGMKSILEPLGIDTVVDLPVGLNLQDQTTSTVRSRITSAGAGQGQAAWFATFNETFGDYAEKAHELLNTKLEQWAEEAVARGGFHNTTALLIQYENYRDWIVKDNVAYSELFLDTAGVASFDVWDLLPFTRGYVHILDKDPYLRHFAYDPQYFLNELDLLGQAAATQLARNISNSGAMQTYFAGETIPGDNLAYDADLSAWVEYIPYNFRPNYHGVGTCSMMPKEMGGVVDNAARVYGVQGLRVIDGSIPPTQMSSHVMTVFYAMALKIADAILADY

SEQ ID NO: 1737 - protein, 600 aa, Aspergillus niger
MKTILSSSLVVSMAAACTLHRSSGIEASLLTDPKAVAGRTVDDIIAGGGLTGLTTAARLTENPNITVLVIESGFYESDRGPLVEDLNAYGEIFGSEVDHAYQTVELATNNLTELIRSGNGLGGSTLVNGGXWTRPHKVQVDSWETVFGNEGWNWENVAAYSLEAERARAPNAKQVAAGHYFDPSCHGTNGTVHVGPRDTGDDYTPIIDALMTTVENMGVPTKKDLGCGDPHGVSMFPNTLHEDQVRSDAAREWLLPNYQRPNLQVLTGQLVGKVLLDQNNTVPKAVGVEFGTHKANTFNVYAKHEVLLAAGSAVSPQILEHSGIGMKSILDTVGIDTVVDLPVGLNLQDQTIVLVSSRITSAGAGQGQVAIXATFNETFGDYAPQAHALLDAKLEQWAEEGVARGGFHNATALRIQYENYRDWLVNHNVAYSELFLDTAGAVSFTIWDLIPFTRGYVHITDADPYLRLVSYDPQYFLNELDLYGQAAASQLARNLSNTDAMQTYFAGETTPGDNPAYDASLSDWAEYIKYNFRPNYHGVGTCSMMKKELGGVVDSSARVYGVDSLRVIDGSIPPTQVSSHVMTVFYAMALKISAAILADY

SEQ ID NO: 1738 - protein, 577 aa, Aspergillus niger
GIEASLLTDPKDVSGRTVDYIIAGGGLVGLTTAARLTENPNISVLVIESGSYESDRGPIIEDLNAYGDIFGSSVDHAYETVELATNNQTALVRSGNGLGGSTLVNGGTWTRPHKAQVDSWETVFGNEGWNWDNVAAYSLQAERARAPNAKQIAAGHYFNASCHGVNGTVHAGPRDTGDDYSPIVKALMSAVEDRGVPTKKDFGCGDPHGVSMFPNTLHEDQVRSDAAREWLLPNYQRPNLQVLTGQYVGKVLLSQNGTTPRAVGVEFGTHKGNTHNVYAKHEVLLAAGSAVSPTILEYSGIGMKSILEPLGIDTVVDLPVGLNLQDQTTSTVRSRITSAGAGQGQAAWFATFNETFGDYSEKAHELLNTKLEQWAEEAVARGGFHNTTALLIQYENYRDWIVNHNVAYSELFLDTAGVASFDVWDLLPFTRGYVHILDKDPYLHHFAYDPQYFLNELDLLGQAAATQLARNISNSGAMQTYFAGETIPGDNLAYDADLSAWTEYIPYHFRPNYHGVGTCSMMPKEMGGVVDNAARVYGVQGLRVIDGSIPPTQMSSHAMTVFYAMALKISDAILEDY

SEQ ID NO: 1739 - protein, 577 aa, Aspergillus niger
GIEASLLTDPKDVSGRTVDYIIAGGGLVGLTTAAKLTENPNISVLVIESGCYESDRGPIIEDLNAYGDIFGSSVDHAYETVELATNNQTALVRSGNGLGGSTLINGGTWTRPHKAQVDSWETVFGNEGWNWDNVAAYSLQAERARAPNAKQIAAGHYFNTSCHGVNGTVHAGPRDTGDDYSPIVKALMSAVEDRGVPTKKDFGCGDPHGVSMFPNTLHEDQVRSDAAREWLLPNYQRPNLQVLCGQYVGKVLLSQNGTTPRAVGVEFGTHKGNTHNVYAKHEVLLAAGSAVSPTILEYSGIGMKSILEPLGIDTVVDLPVGLNLQDQTTATVRSRITSAGAGQGQAAWFATFNETFGDYSEKAHELLNTKLEQWAEEAVARGGFHNTTALLIQYENYRDWIVNHNVAYSELFLDTAGVASFDVWDLLPFTRGYVHILDKDPYLHHFAYDPQYFLNELDLLGQAAATQLARNISNSGAMQTYFAGETIPGDNLAYDADLSAWTEYIPYHFRPNYHGVGTCSMMPKEMGGVVDNAARVYGVQGLRVIDGSIPPTQMSSHVMTVFYAMALKISDAILEDY

SEQ ID NO: 1740 - protein, 577 aa, Aspergillus niger
GIEASLLTDPKDVSGRTVDYIIAGGGLVGLTTAARLTENPNISVLVIESGSYESDRGPIIEDLNAYGDIFGSSVDHAYETVELATNNQTALVRSGNGLGGSTLVNGGTWTRPHKAQVDSWETVFGNEGWNWDNVAAYSLQAERARAPNAKQIAAGHYFNASCHGVNGTVHAGPRDTGDDYSPIVKALMSAVEDRGVPTKKDFGCGDPHGVSMFPNTLHEDQVRSDAAREWLLPNYQRPNLQVLTGQYVGKVLLSQNGTTPRAVGVEFGTHKGNTHNVYAKHEVLLAAGSAVSPTILEYSGIGMKSILEPLGIDTVVDLPVGLNLQDQTTSTVRSRITSAGAGQGQAAWFATFNETFGDYSEKAHELLNTKLEQWAEEAVARGGFHNTTALLIQYENYRDWIVNHNVAYSELFLDTAGVASFDVWDLLPFTRGYVHILDKDPYLHHFAYDPQYFLNELDLLGQAAATQLARNISNSGAMQTYFAGETIPGDNLAYDADLSAWTEYIPYHFRPNYHGVGTCSMMPKEMGGVVDNAARVYGVQGLRVIDGSIPPTQMSSHPMTVFYAMALKISDAILEDY

SEQ ID NO: 1741 - protein, 576 aa, Aspergillus niger
IEASLLTDPKDVSGRTVDYIIAGGGLTGLTTAARLTENPNISVLVIESGSYESDRGPIIEDLNAYGDIFGSSVDHAYETVELATNNQTALIRSGNGLGGSTLVNGGTWTRPHKAQVDSWETVFGNEGWNWDNVAAYSLQAERARAPNAKQIAAGHYFNASCHGVNGTVHAGPRDTGDDYSPIVKALMSAVEDRGVPTKKDFGCGDPHGVSMFPNTLHEDQVRSDAAREWLLPNYQRPNLQVLTGQYVGKVLLSQNGTTPRAVGVEFGTHKGNTHNVYAKHEVLLAAGSAVSPTILEYSGIGMKSILEPLGIDTVVDLPVGLNLQDQTTATVRSRITSAGAGQGQAAWFATFNETFGDYSEKAHELLNTKLEQWAEEAVARGGFHNTTALLIQYENYRDWIVNHNVAYSELFLDTAGVASFDVWDLLPFTRGYVHILDKDPYLHHFAYDPQYFLNELDLLGQAAATQLARNISNSGAMKTYFAGETIPGDNLAYDADLSAWTEYIPYHFRPNYHGVGTCSMMPKEMGGVVDNAARVYGVQGLRVIDGSIPPTQMSSHVMTVFYAMALKISDAILEDY

SEQ ID NO: 1742 - protein, 576 aa, Aspergillus niger
IEASLLTDPKDVSGRTVDYIIAGGGLTGLTTAARLTENPNISVLVIESGSYESDRGPIIEDLNAYGDIFGSSVDHAYETVELATNNQTALIRSGNGLGGSTLVNGGTWTRPHKAQVDSWETVFGNEGWNWDNVAAYSLQAERARAPNAKQIAAGHYFNASCHGVNGTVHAGPRDTGDDYSPIVKALMSAVEDRGVPTKKDFGCGDPHGVSMFPNTLHEDQVRSDAAREWLLPNYQRPNLQVLTGQYVGKVLLSQNGTTPRAVGVEFGTHKGNTHNVYAKHEVLLAAGSAVSPTILEYSGIGMKSILEPLGIDTVVDLPVGLNLQDQTTATVRSRITSAGAGQGQAAWFATFNETFGDYSEKAHELLNTKLEQWAEEAVARGGFHNTTALLIQYENYRDWIVNHNVAYSELFLDTAGVASFDVWDLLPFTRGYVHILDKDPYLHHFAYDPQYFLNELDLLGQAAATQLARNISNSGAMQDYFAGETIPGDNLAYDADLSAWTEYIPYHFRPNYHGVGTCSMMPKEMGGVVDNAARVYGVQGLRVIDGSIPPTQMSSHVMTVFYAMALKISDAILEDY

SEQ ID NO: 1743 - protein, 576 aa, Aspergillus niger
IEASLLTDPKDVSGRTVDYIIAGGGLTGLTTAARLTENPNISVLVIESGSYESDRGPIIEDLNAYGDIFGSSVDHAYETVELATNNQTALIRSGNGLGGSTLVNGGTWTRPHKAQVDSWETVFGNEGWNWDNVAAYSLQAERARAPNAKQIAAGHYFNASCHGVNGTVHAGPRDTGDDYSPIVKALMSAVEDRGVPTKKDFGCGDPHGVSMFPNTLHEDQVRSDAAREWLLPNYQRPNLQVLTGQYVGKVLLSQNGTTPRAVGVEFGTHKGNTHNVYAKHEVLLAAGSAVSPTILEYSGIGMKSILEPLGIDTVVDLPVGLNLQDQTTATVRSRITSAGAGQGQAAWFATFNETFGDYSEKAHELLNTKLEQWAEEAVARGGFHNFTALLIQYENYRDWIVNHNVAYSELFLDTAGVASFDVWDLLPFTRGYVHILDKDPYLHHFAYDPQYFLNELDLLGQAAATQLARNISNSGAMQTYFAGETIPGDNLAYDADLSAWTEYIPYHFRPNYHGVGTCSMMPKEMGGVVDNAARVYGVQGLRVIDGSIPPTQMSSHVMTVFYAMALKISDAILEDY

SEQ ID NO: 1744 - protein, 576 aa, Aspergillus niger
IEASLLTDPKEVAGRTVDYIIAGGGLTGLTTAARLTENPDITVLVIESGSYESDRGPIIEDLNAYGDIFGSSVDHAYETVELATNNQTALIRSGNGLGGSTLVNGGXWTRPHKAQVDSWETVFGNEGWNWDSVAAYSLQAERARAPNAKQIAAGHYFNASCHGINGTVHAGPRDTGDDYSPIVKALMSAVEDRGVPTKKDLGCGDPHGVSMFPNTLHEDQVRSDAAREWLLPNYQRPNLQVLTGQYVGKVLLSQNATTPRAVGVEFGTHKGNTHNVYAKHEVLLAAGSAVSPTILEYSGIGMKSILEPLGIDTVVDLPVGLNLQDQTTSTVRSRITSAGAGQGQAAWXATFNETFGDYTEKAHELLNTKLEQWAEEAVARGGFHNTTALLIQYENYRDWIVKDNVAYSELFLDTAGVASFDVWDLLPFTRGYVHILDKDPYLRHFAYDPQYFLNELDLLGQAAATQLARNISNSGAMQTYFAGETIPGDNLAYDADLRAWVEYIPYNFRPNYHGVGTCSMMPKEMGGVVDNAARVYGVQGLRVIDGSIPPTQMSSHVMTVFYAMALKIADAVLADY

SEQ ID NO: 1745 - protein, 576 aa, Aspergillus niger
IEASLLTDPKDVSGRTVDYIIAGGGLTGLTTAARLTENPNISVLVIESGSYESDRGPIIEDLNAYGDIFGSSVDHAYETVELATNNQTALIRSGNGLGGSTLVNGGTWTRPHKAQVDSWETVFGNEGWNWDNVAAYSLQAERARAPNAKQIAAGHYFNASCHGVNGTVHAGPRDTGDDYSPIVKALMSAVEDRGVPTKKDFGCGDPHGVSMFPNTLHEDQVRSDAAREWLLPNYQRPNLQVLTGQYVGKVLLSQNGTTPRAVGVEFGTHKGNTHNVYAKHEVLLAAGSAVSPTILEYSGIGMKSILEPLGIDTVVDLPVGLNLQDQTTATVRSRITSAGAGQGQAAWFATFNETFGDYSEKAHELLNTKLEQWAEEAVARGGFHNTTALLIQYENYRDWIVNHNVAYSELFLDTAGVASFDVWDLLPFTRGYVHILDKDPYLHHFAYDPQYFLNELDLLGQAAATQLARNISNSGAMQTYFAGETIPGDNLAYDADLSAWYEYIPYHFRPNYHGVGTCSMMPKEMGGVVDNAARVYGVQGLRVIDGSIPPTQMSSHVMTVFYAMALKISDAILEDY

SEQ ID NO: 1746 - protein, 576 aa, Aspergillus niger
IEASLLTDPKDVSGRTVDYIIAGGGLTGLTTAARLTENPNISVLVIESGSYESDRGPIIEDLNFYGDIFGSSVDHAYETVELATNNQTALIRSGNGLGGSTLVNGGTWTRPHKAQVDSWETVFGNEGWNWDNVAAYSLQAERARAPNAKQIAAGHYFNASCHGVNGTVHAGPRDTGDDYSPIVKALMSAVEDRGVPTKKDFGCGDPHGVSMFPNTLHEDQVRSDAAREWLLPNYQRPNLQVLTGQYVGKVLLSQNGTTPRAVGVEFGTHKGNTHNVYAKHEVLLAAGSAVSPTILEYSGIGMKSILEPLGIDTVVDLPVGLNLQDQTTATVRSRITSAGAGQGQAAWFATFNETFGDYSEKAHELLNTKLEQWAEEAVARGGFHNTTALLIQYENYRDWIVNHNVAYSELFLDTAGVASFDVWDLLPFTRGYVHILDKDPYLHHFAYDPQYFLNELDLLGQAAATQLARNISNSGAMQTYFAGETIPGDNLAYDADLSAWTEYIPYHFRPNYHGVGTCSMMPKEMGGVVDNAARVYGVQGLRVIDGSIPPTQMSSHVMTVFYAMALKISDAILEDY

SEQ ID NO: 1747 - protein, 576 aa, Aspergillus niger
IEASLLTDPKDVSGRTVDYIIAGGGLTGLTTAARLTENPNISVLVIESGSYESDRGPIIEDLNRYGDIFGSSVDHAYETVELATNNQTALIRSGNGLGGSTLVNGGTWTRPHKAQVDSWETVFGNEGWNWDNVAAYSLQAERARAPNAKQIAAGHYFNASCHGVNGTVHAGPRDTGDDYSPIVKALMSAVEDRGVPTKKDFGCGDPHGVSMFPNTLHEDQVRSDAAREWLLPNYQRPNLQVLTGQYVGKVLLSQNGTTPRAVGVEFGTHKGNTHNVYAKHEVLLAAGSAVSPTILEYSGIGMKSILEPLGIDTVVDLPVGLNLQDQTTATVRSRITSAGAGQGQAAWFATFNETFGDYSEKAHELLNTKLEQWAEEAVARGGFHNTTALLIQYENYRDWIVNHNVAYSELFLDTAGVASFDVWDLLPFTRGYVHILDKDPYLHHFAYDPQYFLNELDLLGQAAATQLARNISNSGAMQTYFAGETIPGDNLAYDADLSAWTEYIPYHFRPNYHGVGTCSMMPKEMGGVVDNAARVYGVQGLRVIDGSIPPTQMSSHVMTVFYAMALKISDAILEDY

SEQ ID NO: 1748 - protein, 576 aa, Aspergillus niger
IEASLLTDPKDVSGRTVDYIIAGGGLTGLTTAARLTENPNISVLVIESGSYESDRGPIIEDLNAYGDIFGSSVDHAYETVELATNNQTALIRSGNGLGGSTLVNGGTWTRPHKAQVDSWETVFGNEGWNWDNVAAYSLQAERARAPNAKQIAAGHYFNASCHGVNGTVHAGPRDTGDDYSPIVKALMSAVEDRGVPTKKDFGCGDPHGVSMFPNTLHEDQVRSDAAREWLLPNYQRPNLQVLTGQYVGKVLLSQNGTTPRAVGVEFGTHKGNTHNVYAKHEVLLAAGSAVSPTILEYSGIGMKSILEPLGIDTVVDLPVGLNLQDQTTATVRSRITSAGAGQGQAAWFATFNETFGDYSEKAHELLNTKLEQWAEEAVARGGFHNTTALLIQYENYRDWIVNHNVAYSELFLDTAGVASFDVWDLLPFTRGYVHILDKDPYLHHFAYDPQYFLNELDLLGQAAATQLARNISNSGAMQTYFAGETIPGDNLAYDADLSAWTEYIPYHFRPNYHGVGTCSMMPKEMGGVVDPAARVYGVQGLRVIDGSIPPTQMSSHVMTVFYAMALKISDAILEDY

SEQ ID NO: 1749 - protein, 576 aa, Aspergillus niger
IEASLLTDPKDVSGRTVDYIIAGGGLTGLTMAARLTENPNISVLVIESGSYESDRGPIIEDLNAYGDIFGSSVDHAYETVELATNNQTALIRSGNGLGGSTLVNGGTWTRPHKAQVDSWETVFGNEGWNWDNVAAYSLQAERARAPNAKQIAAGHYFNASCHGVNGTVHAGPRDTGDDYSPIVKALMSAVEDRGVPTKKDFGCGDPHGVSMFPNTLHEDQVRSDAAREWLLPNYQRPNLQVLTGQYVGKVLLSQNGTTPRAVGVEFGTHKGNTHNVYAKHEVLLAAGSAVSPTILEYSGIGMKSILEPLGIDTVVDLPVGLNLQDQTTATVRSRITSAGAGQGQAAWFATFNETFGDYSEKAHELLNTKLEQWAEEAVARGGFHNTTALLIQYENYRDWIVNHNVAYSELFLDTAGVASFDVWDLLPFTRGYVHILDKDPYLHHFAYDPQYFLNELDLLGQAAATQLARNISNSGAMQTYFAGETIPGDNLAYDADLSAWTEYIPYHFRPNYHGVGTCSMMPKEMGGVVDNAARVYGVQGLRVIDGSIPPTQMSSHVMTVFYAMALKISDAILEDY

SEQ ID NO: 1750 - protein, 576 aa, Aspergillus niger
IEASLLTDPKDVSGRTVDYIIAGGGLTGLTTAARLTENPNISVLVIESGSYESDRGPIIEDLNAYGDIFGSSVDHAYETVELATNNQTALIRSGNGLGGSTLVNGGTWTRPHKAQVDSWETVFGNEGWNWDNVAAYSLQAERARAPNAKQIAAGHYFNASCHGVNGTVHAGPRDTGDDYSPIVKALMSAVEDRGVPTKKDFGCGDPHGVSMFPNTLHEDQVRSDAAREWLLPNYQRPNLQVLTGQYVGKVLLSQNGTTPRAVGVEFGTHKGNTHNVYAKHEVLLAAGSAVSPTILEYSGIGMKRILEPLGIDTVVDLPVGLNLQDQTTATVRSRITSAGAGQGQAAWFATFNETFGDYSEKAHELLNTKLEQWAEEAVARGGFHNTTALLIQYENYRDWIVNHNVAYSELFLDTAGVASFDVWDLLPFTRGYVHILDKDPYLHHFAYDPQYFLNELDLLGQAAATQLARNISNSGAMQTYFAGETIPGDNLAYDADLSAWTEYIPYHFRPNYHGVGTCSMMPKEMGGVVDNAARVYGVQGLRVIDGSIPPTQMSSHVMTVFYAMALKISDAILEDY

SEQ ID NO: 1751 - protein, 576 aa, Aspergillus niger
IEASLLTDPKDVSGRTVDYIIAGGGLTGLTTAARLTENPNISVLVIESGSYESDRGPIIEDLNAYGDIFGSSVDHAYETVELATNNQTALIRSGNGLGGSTLVNGGTWTRPHKAQVDSWETVFGNEGWNWDNVAAYSLQAERARAPNAKQIAAGHYFNASCHGVNGTVHAGPRDTGDDYSPIVKALMSAVEDRGVPTKKDFGCGDPHGVSMFPNTLHEDQVRSDAAREWLLPNYQRPNLQVLTGQYVGKVLLSQNGTTPRAVGVEFGTHKGNTHNVYAKHEVLLAAGSAVSPTILEYSGIGDKSILEPLGIDTVVDLPVGLNLQDQTTATVRSRITSAGAGQGQAAWFATFNETFGDYSEKAHELLNTKLEQWAEEAVARGGFHNTTALLIQYENYRDWIVNHNVAYSELFLDTAGVASFDVWDLLPFTRGYVHILDKDPYLHHFAYDPQYFLNELDLLGQAAATQLARNISNSGAMQTYFAGETIPGDNLAYDADLSAWTEYIPYHFRPNYHGVGTCSMMPKEMGGVVDNAARVYGVQGLRVIDGSIPPTQMSSHVMTVFYAMALKISDAILEDY

SEQ ID NO: 1752 - protein, 576 aa, Aspergillus niger
IEASLLTDPKDVSGRTVDYIIAGGGLTGLTTAARLTENPNISVLVIESGSYESDRGPIIEDLNAYGDIFGSSVDHAYETVELATNNQTALIRSGNGLGGSTLVNGGTWTRPHKAQVDSWETVFGNEGWNWDNVAAYSLQAERARAPNAKQIAAGHYFNASCHGVNGTVHAGPRDTGDDYSPIVKALMSAVEDRGVPTKKDFGCGDPHGVSMFPNTLHEDQVRSDAAREWLLPNYQRPNLQVLTGQYVGKVLLSQNGTTPRAVGVEFGTHKGNTHNVYAKHEVLLAAGSAVSPTILEYSGIGMKSILEPLGIDTVVDLPVGLNLQDQTTATVRSRITSAGAGQGQAAWFATFNETFGDYSEKAHELLNTKLEQWAEEAVARGGFHNTTALLIQYENYRDWIVNHNVAYSELFLDTAGVASFDVWDLLPFTRGYVHILDKDPYLHHFAYDPQYFLNELDLLGQAAATQLARNISNSGAMQTYFAGETIPGDNLAYDADLSAWLEYIPYHFRPNYHGVGTCSMMPKEMGGVVDNAARVYGVQGLRVIDGSIPPTQMSSHVMTVFYAMALKISDAILEDY

SEQ ID NO: 1753 - protein, 576 aa, Synthetic construct
IEASLLTDPKDVSGRTVDYIIAGGGLTGLTTAARLTENPNISVLVIESGSYESDRGPIIEDLNRYGDIFGSSVDHAYETVELATNNQTALIRSGNGLGGSTLVNGGTWTRPHKAQVDSWETVFGNEGWNWDNVAAYSLQAERARAPNAKQIAAGHYFNASCHGVNGTVHAGPRDTGDDYSPIVKALMSAVEDRGVPTKKDFGCGDPHGVSMFPNTLHEDQVRSDAAREWLLPNYQRPNLQVLTGQYVGKVLLSQNGTTPRAVGVEFGTHKGNTFNVYAKHEVLLAAGSAVSPTILEYSGIGMKSILEPLGIDTVVDLPVGLNLQDQTTATVRSRITSAGAGQGQAAWFATFNETFGDYSEKAHELLNTKLEQWAEEAVARGGFHNTTALLIQYENYRDWIVNHNVAYSELFLDTKGVASFDVWDLLPFTRGYVHILDKDPYLHHFAYDPQYFLNELDLLGQAAATQLARNISNSGAMQTYFAGETIPGDNLAYDADLSAWTEYIPYHFRPNYHGVGTCSMMPKEMGGVVDNAARVYGVQGLRVIDGSIPPTQMSSHVMTVFYAMALKISDAILEDY

SEQ ID NO: 1754 - protein, 576 aa, Aspergillus niger
IEASLLTDPKEVAGRTVDYIIAGGGLTGLTTAARLTENPDITVLVIESGSYESDRGPIIEDLNAYGDIFGSSVDHAYETVCLATNNQTALIRSGNGLGGSTLVNGGTWTRPHKAQVDSWETVFGNEGWNWDSVAAYSLQAERARAPNAKQIAAGHYFNASCHGINGTVHAGPRDTGDDYSPIVKALMSAVEDRGVPTKKDLGCGDPHGVSMFPNTLHEDQVRSDAAREWLLPNYQRPNLQVLTGQYVGKVLLSQNATTPRAVGVEFGTHKGNTHNVYAKHEVLLAAGSAVSPTILEYSGIGMKSILEPLGIDTVVDLPVGLNLQDQTTSTVRSRITSAGAGQGQAAWFATFNETFGDYTEKAHELLNTKLEQWAEEAVARGGFHNTTALLIQYENYRDWIVKDNVAYSELFLDTAGEASFDVWDLLPFTRGYVHILDKDPYLRHFAYDPQYFLNELDLLGQAAATQLARNISNSGAMQTYFAGETIPGDNLAYDADLRAWVEYIPYHFRPNYHGVGTCSMMPKEMGGVVDNAARVYGVQGLRVIDGSIPPTQMSSHVMTVFYAMALKIADAVLADY

SEQ ID NO: 1755 - protein, 576 aa, Aspergillus niger
IEASLLTDPKDVSGRTVDYIIAGGGLTGLTTAARLTENPNISVLVIESGSYESDRGPIIEDLNAYGDIFGSSVDHAYETVELATNNQTALIRSGNGLGGSTLVNGGTWTRPHKAQVDSWETVFGNEGWNWDNVAAYSLQAERARAPNAKQIAAGHYFNASCHGVNGTVHAGPRDTGDDYSPIVKALMSAVEDRGVPTKKDFGCGDPHGVSMFPNTLHEDQVRSDAAREWLLPNYQRPNLQVLTGQYVGKVLLSQNGTTPRAVGVEFGTHKGNTHNVYAKHEVLLAAGSAVSPTILEYSGIGMKSILEPLGIDTVVDLPVGLNLQDQTTATVRSRITSAGAGQGQAAWFATFNETFGDYSEKAHELLNTKLEQWAEEAVARGGFHNTTALLIQYENYRDWIVNHNVAYSELFLDTAGVASFDVWDLLPFTRGYVHILDKDPYLHHFAYDPQYFLNELDLLGQAAATQLARNISNSGAMQTYFAGETIPGDNLAYDADLSAWKEYIPYHFRPNYHGVGTCSMMPKEMGGVVDNAARVYGVQGLRVIDGSIPPTQMSSHVMTVFYAMALKISDAILEDY

SEQ ID NO: 1756 - protein, 576 aa, Aspergillus niger
IEASLLTDPKDVSGRTVDYIIAGGGLTGLTTAARLTENPNISVLVIESGSYESDRGPIIEDLNAYGDIFGSSVDHAYETVELATNNQTALIRSGNGLGGSTLVNGGTWTRPHKAQVDSWETVFGNEGWNWDNVAAYSLQAERARAPNAKQIAAGHYFNASCHGVNGTVHAGPRDTGDDYSPIVKALMSAVEDRGVPTKKDFGCGDPHGVSMFPNTLHEDQVRSDAAREWLLPNYQRPNLQVLTGQYVGKVLLSQNGTTPRAVGVEFGTHKGNTHNVYAKHEVLLAAGSAVSPTILEYSGIGMKSILEPLGIDTVVDLPVGLNLQDQTTATVRSRITSAGAGQGQAAWFATFNETFGDYSEKAHELLNTKLEQWAEEAVARGGFHNTTALLIQYENYRDWIVNHNVAYSELFLDTAGVASFDVWDLLPFTRGYVHILDKDPYLHHFAYDPQYFLNELDLLGQAAATQLARNISNSGPMQTYFAGETIPGDNLAYDADLSAWTEYIPYHFRPNYHGVGTCSMMPKEMGGVVDNAARVYGVQGLRVIDGSIPPTQMSSHVMTVFYAMALKISDAILEDY

SEQ ID NO: 1757 - protein, 576 aa, Aspergillus niger
IEASLLTDPKDVSGRTVDYIIAGGGLTGLTTAARLTENPNISVLVIESGSYESDRGPIIEDLNAYGDIFGSSVDHAYETVELATNNQTALIRSGNGLGGSTLVNGGTWTRPHKAQVDSWETVFGNEGWNWDNVAAYSLQAERARAPNAKQIAAGHYFNASCHGVNGTVHAGPRDTGDDYSPIVKALMSAVEDRGVPTKKDFGCGDPHGVSMFPNTLHEDQVRSDAAREWLLPNYQRPNLQVLTGQYVGKVLLSFNGTTPRAVGVEFGTHKGNTHNVYAKHEVLLAAGSAVSPTILEYSGIGMKSILEPLGIDTVVDLPVGLNLQDQTTATVRSRITSAGAGQGQAAWFATFNETFGDYSEKAHELLNTKLEQWAEEAVARGGFHNTTALLIQYENYRDWIVNHNVAYSELFLDTAGVASFDVWDLLPFTRGYVHILDKDPYLHHFAYDPQYFLNELDLLGQAAATQLARNISNSGAMQTYFAGETIPGDNLAYDADLSAWTEYIPYHFRPNYHGVGTCSMMPKEMGGVVDNAARVYGVQGLRVIDGSIPPTQMSSHVMTVFYAMALKISDAILEDY

SEQ ID NO: 1758 - protein, 576 aa, Aspergillus niger
IEASLLTDPKDVSGRTVDYIIAGGGLTGLTTAARLTENPNISVLVIESGSYESDRGPIIEDLNAYGDIFGSSVDHAYETVELATNNQTALIRSGNGLGGSTLVNGGTWTRPHKAQVDSWETVFGNEGWNWDNVAAYSLQAERARAPNAKQIAAGHYFNASCHGVNGTVHAGPRDTGDDYSPIVKALMSAVEDRGVPTKKDFGCGDPHGVSMFPNTLHEDQVRSDAAREWLLPNYQRPNLQVLTGQYVGKVLLSQNGETPRAVGVEFGTHKGNTHNVYAKHEVLLAAGSAVSPTILEYSGIGMKSILEPLGIDTVVDLPVGLNLQDQTTATVRSRITSAGAGQGQAAWFATFNETFGDYSEKAHELLNTKLEQWAEEAVARGGFHNTTALLIQYENYRDWIVNHNVAYSELFLDTAGVASFDVWDLLPFTRGYVHILDKDPYLHHFAYDPQYFLNELDLLGQAAATQLARNISNSGAMQTYFAGETIPGDNLAYDADLSAWTEYIPYHFRPNYHGVGTCSMMPKEMGGVVDNAARVYGVQGLRVIDGSIPPTQMSSHVMTVFYAMALKISDAILEDY

SEQ ID NO: 1759 - protein, 576 aa, Aspergillus niger
IEASLLTDPKDVSGRTVDYIIAGGGLTGLTTAARLTENPNISVLVIESGSYESDRGPIIEDLNAYGDIFGSSVDHAYETVELATNNQTALIRSGNGLGGSTLVNGGTWTRPHKAQVDSWETVFGNEGWNWDNVAAYSLQAERARAPNAKQIAAGHYFNASCHGVNGTVHAGPRDTGDDYSPIVKALMSAVEDRGVPTKKDFGCGDPHGVSMFPNTLHEDQVRSDAAREWLLPNYQRPNLQVLTGQYVGKVLLSQNGTTPRAVGVEFGTHKGNTHNVYAKHEVLLAAGSAVSPTILEYSGIGMKSILEPLGIDTVVDLPVGLNLQDQTTATVRSRITSAGAGQGQAAWFATFNETFGDYSEKAHELLNTKLEQWAEEAVARGGFHNTTALLIQYENYRDWIVNHNVPYSELFLDTAGVASFDVWDLLPFTRGYVHILDKDPYLHHFAYDPQYFLNELDLLGQAAATQLARNISNSGAMQTYFAGETIPGDNLAYDADLSAWTEYIPYHFRPNYHGVGTCSMMPKEMGGVVDNAARVYGVQGLRVIDGSIPPTQMSSHVMTVFYAMALKISDAILEDY

SEQ ID NO: 1760 - protein, 576 aa, Aspergillus niger
IEASLLTDPKDVSGRTVDYIIAGGGLTGLTTAARLTENPNISVLVIESGSYESDRGPIIEDLNAYGDIFGSSVDHAYETVELATNNQTALIRSGNGLGGSTLVNGGTWTRPHKAQVDSWETVFGNEGWNWDNVAAYSLQAERARAPNAKQIAAGHYFNASCHGVNGTVHAGPRDTGDDYSPIVKALMSAVEDLGVPTKKDFGCGDPHGVSMFPNTLHEDQVRSDAAREWLLPNYQRPNLQVLTGQYVGKVLLSQNGTTPRAVGVEFGTHKGNTHNVYAKHEVLLAAGSAVSPTILEYSGIGMKSILEPLGIDTVVDLPVGLNLQDQTTATVRSRITSAGAGQGQAAWFATFNETFGDYSEKAHELLNTKLEQWAEEAVARGGFHNTTALLIQYENYRDWIVNHNVAYSELFLDTAGVASFDVWDLLPFTRGYVHILDKDPYLHHFAYDPQYFLNELDLLGQAAATQLARNISNSGAMQTYFAGETIPGDNLAYDADLSAWTEYIPYHFRPNYHGVGTCSMMPKEMGGVVDNAARVYGVQGLRVIDGSIPPTQMSSHVMTVFYAMALKISDAILEDY

SEQ ID NO: 1761 - protein, 576 aa, Aspergillus niger
IEASLLTDPKDVSGRTVDYIIAGGGLTGLTIAARLTENPNISVLVIESGSYESDRGPIIEDLNAYGDIFGSSVDHAYETVELATNNQTALIRSGNGLGGSTLVNGGTWTRPHKAQVDSWETVFGNEGWNWDNVAAYSLQAERARAPNAKQIAAGHYFNASCHGVNGTVHAGPRDTGDDYSPIVKALMSAVEDRGVPTKKDFGCGDPHGVSMFPNTLHEDQVRSDAAREWLLPNYQRPNLQVLTGQYVGKVLLSQNGTTPRAVGVEFGTHKGNTHNVYAKHEVLLAAGSAVSPTILEYSGIGMKSILEPLGIDTVVDLPVGLNLQDQTTATVRSRITSAGAGQGQAAWFATFNETFGDYSEKAHELLNTKLEQWAEEAVARGGFHNTTALLIQYENYRDWIVNHNVAYSELFLDTAGVASFDVWDLLPFTRGYVHILDKDPYLHHFAYDPQYFLNELDLLGQAAATQLARNISNSGAMQTYFAGETIPGDNLAYDADLSAWTEYIPYHFRPNYHGVGTCSMMPKEMGGVVDNAARVYGVQGLRVIDGSIPPTQMSSHVMTVFYAMALKISDAILEDY

SEQ ID NO: 1762 - protein, 576 aa, Aspergillus niger
IEASLLTDPKDVSGRTVDYIIAGGGLTGLTTAARLTENPNISVLVIESGSYESDRGPIIEDLNAYGDIFGSSVDHAYETVELATNNQTALIRSGNGLGGSTLVNGGTWTRPHKAQVDSWETVFGNEGWNWDNVAAYSLQAERARAPNAKQIAAGHYFNASCHGVNGTVHAGPRDTGDDYSPIVKALMSAVEDRGVPTKKDFGCGDPHGVSMFPNTLHEDQVRSDAAREWLLPNYQRPNLQVLTGQYVGKVLLSQNGTTPRAVGVEFGTHKGNTHNVYAKHEVLLAAGSAVSPTILEYSGIGMKSILEPLGIDTVVDLPVGLNLQDQTTATVRSRITSAGAGQGQAAWFATFNETFGDYSEKAHELLNTKLEQWAEEAVARGGFHNTTALLIQYENYRDWIVNHNVAYSELFLDTAGVASFDVWDLLPFTRGYVHILDKDPYLHHFAYDPQYFLNELDLLGQAAATQLARKISNSGAMQTYFAGETIPGDNLAYDADLSAWTEYIPYHFRPNYHGVGTCSMMPKEMGGVVDNAARVYGVQGLRVIDGSIPPTQMSSHVMTVFYAMALKISDAILEDY

SEQ ID NO: 1763 - protein, 576 aa, Aspergillus niger
IEASLLTDPKDVSGRTVDYIIAGGGLTGLTTAARLTENPNISVLVIESGSYESDRGPIIEDLNMYGDIFGSSVDHAYETVELATNNQTALIRSGNGLGGSTLVNGGTWTRPHKAQVDSWETVFGNEGWNWDNVAAYSLQAERARAPNAKQIAAGHYFNASCHGVNGTVHAGPRDTGDDYSPIVKALMSAVEDRGVPTKKDFGCGDPHGVSMFPNTLHEDQVRSDAAREWLLPNYQRPNLQVLTGQYVGKVLLSQNGTTPRAVGVEFGTHKGNTHNVYAKHEVLLAAGSAVSPTILEYSGIGMKSILEPLGIDTVVDLPVGLNLQDQTTATVRSRITSAGAGQGQAAWFATFNETFGDYSEKAHELLNTKLEQWAEEAVARGGFHNTTALLIQYENYRDWIVNHNVAYSELFLDTAGVASFDVWDLLPFTRGYVHILDKDPYLHHFAYDPQYFLNELDLLGQAAATQLARNISNSGAMQTYFAGETIPGDNLAYDADLSAWTEYIPYHFRPNYHGVGTCSMMPKEMGGVVDNAARVYGVQGLRVIDGSIPPTQMSSHVMTVFYAMALKISDAILEDY

SEQ ID NO: 1764 - protein, 576 aa, Aspergillus niger
IEASLLTDPKDVSGRTVDYIIAGGGLTGLTTAARLTENPNISVLVIESGSYESDRGPIIEDLNAYGDIFGSSVDHAYETVELATNNQTALIRSGNGLGGSTLVNGGTWTRPHKAQVDSWETVFGNEGWNWDNVAAYSLQAERARAPNAKQIAAGHYFNASCHGVNGTVHAGPRDTGDDYSPIVKALMSAVEDRGVPTKKDFGCGDPHGVSMFPNTLHEDQVRSDAAREWLLPNYQRPNLQVLTGQYVGKVLLSQNGTTPRAVGVEFGTHKGNTHNVYAKHEVLLAAGSAVSPTILEYSGIGMKSILEPLGIDTVVDLPVGLNLQDQTTATVRSRITSAGAGQGQAAWFATFNETFGDYSEKAHELLNTKLEQWAEEAVARGGFHNPTALLIQYENYRDWIVNHNVAYSELFLDTAGVASFDVWDLLPFTRGYVHILDKDPYLHHFAYDPQYFLNELDLLGQAAATQLARNISNSGAMQTYFAGETIPGDNLAYDADLSAWTEYIPYHFRPNYHGVGTCSMMPKEMGGVVDNAARVYGVQGLRVIDGSIPPTQMSSHVMTVFYAMALKISDAILEDY

SEQ ID NO: 1765 - protein, 576 aa, Aspergillus niger
IEASLLTDPKDVSGRTVDYIIAGGGLTGLTLAARLTENPNISVLVIESGSYESDRGPIIEDLNAYGDIFGSSVDHAYETVELATNNQTALIRSGNGLGGSTLVNGGTWTRPHKAQVDSWETVFGNEGWNWDNVAAYSLQAERARAPNAKQIAAGHYFNASCHGVNGTVHAGPRDTGDDYSPIVKALMSAVEDRGVPTKKDFGCGDPHGVSMFPNTLHEDQVRSDAAREWLLPNYQRPNLQVLTGQYVGKVLLSQNGTTPRAVGVEFGTHKGNTHNVYAKHEVLLAAGSAVSPTILEYSGIGMKSILEPLGIDTVVDLPVGLNLQDQTTATVRSRITSAGAGQGQAAWFATFNETFGDYSEKAHELLNTKLEQWAEEAVARGGFHNTTALLIQYENYRDWIVNHNVAYSELFLDTAGVASFDVWDLLPFTRGYVHILDKDPYLHHFAYDPQYFLNELDLLGQAAATQLARNISNSGAMQTYFAGETIPGDNLAYDADLSAWTEYIPYHFRPNYHGVGTCSMMPKEMGGVVDNAARVYGVQGLRVIDGSIPPTQMSSHVMTVFYAMALKISDAILEDY

SEQ ID NO: 1766 - protein, 576 aa, Aspergillus niger
IEASLLTDPKDVSGRTVDYIIAGGGLTGLTTAARLTENPNISVLVIESGSYESDRGPIIEDLNQYGDIFGSSVDHAYETVELATNNQTALIRSGNGLGGSTLVNGGTWTRPHKAQVDSWETVFGNEGWNWDNVAAYSLQAERARAPNAKQIAAGHYFNASCHGVNGTVHAGPRDTGDDYSPIVKALMSAVEDRGVPTKKDFGCGDPHGVSMFPNTLHEDQVRSDAAREWLLPNYQRPNLQVLTGQYVGKVLLSQNGTTPRAVGVEFGTHKGNTHNVYAKHEVLLAAGSAVSPTILEYSGIGMKSILEPLGIDTVVDLPVGLNLQDQTTATVRSRITSAGAGQGQAAWFATFNETFGDYSEKAHELLNTKLEQWAEEAVARGGFHNTTALLIQYENYRDWIVNHNVAYSELFLDTAGVASFDVWDLLPFTRGYVHILDKDPYLHHFAYDPQYFLNELDLLGQAAATQLARNISNSGAMQTYFAGETIPGDNLAYDADLSAWTEYIPYHFRPNYHGVGTCSMMPKEMGGVVDNAARVYGVQGLRVIDGSIPPTQMSSHVMTVFYAMALKISDAILEDY

SEQ ID NO: 1767 - protein, 576 aa, Aspergillus niger
IEASLLTDPKDVSGRTVDYIIAGGGLTGLTTAARLTENPNISVLVIESGSYESDRGPIIEDLNAYGDIFGSSVDHAYETVELATNNQTALIRSGNGLGGSTLVNGGTWTRPHKAQVDSWETVFGNEGWNWDNVAAYSLQAERARAPNAKQIAAGHYFNASCHGVNGTVHAGPRDTGDDYSPIVKALMSAVEDRGVPTKKDFGCGDPHGVSMFPNTLHEDQVRSDAAREWLLPNYQRPNLQVLTGQYVGKVLLSQNGTTPRAVGVEFGTHKGNTHNVYAKHEVLLAAGSAVSPLILEYSGIGMKSILEPLGIDTVVDLPVGLNLQDQTTATVRSRITSAGAGQGQAAWFATFNETFGDYSEKAHELLNTKLEQWAEEAVARGGFHNTTALLIQYENYRDWIVNHNVAYSELFLDTAGVASFDVWDLLPFTRGYVHILDKDPYLHHFAYDPQYFLNELDLLGQAAATQLARNISNSGAMQTYFAGETIPGDNLAYDADLSAWTEYIPYHFRPNYHGVGTCSMMPKEMGGVVDNAARVYGVQGLRVIDGSIPPTQMSSHVMTVFYAMALKISDAILEDY

SEQ ID NO: 1768 - protein, 576 aa, Aspergillus niger
IEASLLTDPKDVSGRTVDYIIAGGGLTGLTTAARLTENPNISVLVIESGSYESDRGPIIEDLNNYGDIFGSSVDHAYETVELATNNQTALIRSGNGLGGSTLVNGGTWTRPHKAQVDSWETVFGNEGWNWDNVAAYSLQAERARAPNAKQIAAGHYFNASCHGVNGTVHAGPRDTGDDYSPIVKALMSAVEDRGVPTKKDFGCGDPHGVSMFPNTLHEDQVRSDAAREWLLPNYQRPNLQVLTGQYVGKVLLSQNGTTPRAVGVEFGTHKGNTHNVYAKHEVLLAAGSAVSPTILEYSGIGMKSILEPLGIDTVVDLPVGLNLQDQTTATVRSRITSAGAGQGQAAWFATFNETFGDYSEKAHELLNTKLEQWAEEAVARGGFHNTTALLIQYENYRDWIVNHNVAYSELFLDTAGVASFDVWDLLPFTRGYVHILDKDPYLHHFAYDPQYFLNELDLLGQAAATQLARNISNSGAMQTYFAGETIPGDNLAYDADLSAWTEYIPYHFRPNYHGVGTCSMMPKEMGGVVDNAARVYGVQGLRVIDGSIPPTQMSSHVMTVFYAMALKISDAILEDY

SEQ ID NO: 1769 - protein, 576 aa, Aspergillus niger
IEASLLTDPKDVSGRTVDYIIAGGGLTGLTTAARLTENPNISVLVIESGSYESDRGPIIEDLNLYGDIFGSSVDHAYETVELATNNQTALIRSGNGLGGSTLVNGGTWTRPHKAQVDSWETVFGNEGWNWDNVAAYSLQAERARAPNAKQIAAGHYFNASCHGVNGTVHAGPRDTGDDYSPIVKALMSAVEDRGVPTKKDFGCGDPHGVSMFPNTLHEDQVRSDAAREWLLPNYQRPNLQVLTGQYVGKVLLSQNGTTPRAVGVEFGTHKGNTHNVYAKHEVLLAAGSAVSPTILEYSGIGMKSILEPLGIDTVVDLPVGLNLQDQTTATVRSRITSAGAGQGQAAWFATFNETFGDYSEKAHELLNTKLEQWAEEAVARGGFHNTTALLIQYENYRDWIVNHNVAYSELFLDTAGVASFDVWDLLPFTRGYVHILDKDPYLHHFAYDPQYFLNELDLLGQAAATQLARNISNSGAMQTYFAGETIPGDNLAYDADLSAWTEYIPYHFRPNYHGVGTCSMMPKEMGGVVDNAARVYGVQGLRVIDGSIPPTQMSSHVMTVFYAMALKISDAILEDY

SEQ ID NO: 1770 - protein, 576 aa, Aspergillus niger
IEASLLTDPKDVSGRTVDYIIAGGGLTGLTTAARLTENPNISVLVIESGSYESDRGPIIEDLNAYGDIFGSSVDHAYETVELATNNQTALIRSGNGLGGSTLVNGGTWTRPHKAQVDSWETVFGNEGWNWDNVAAYSLQAERARAPNAKQIAAGHYFNASCHGVNGTVHAGPRDTGDDYSPIVKALMSAVEDRGVPTKKDFGCGDPHGVSMFPNTLHEDQVRSDAAREWLLPNYQRPNLQVLTGQYVGKVLLSQNGTTPRAVGVEFGTHKGNTHNVYAKHEVLLAAGSAVSPTILEYSGIGMKSILEPLGIDTVVDLPVGLNLQDQTTATVRSRITSAGAGQGQAAWFATFNETFGDYSELAHELLNTKLEQWAEEAVARGGFHNTTALLIQYENYRDWIVNHNVAYSELFLDTAGVASFDVWDLLPFTRGYVHILDKDPYLHHFAYDPQYFLNELDLLGQAAATQLARNISNSGAMQTYFAGETIPGDNLAYDADLSAWTEYIPYHFRPNYHGVGTCSMMPKEMGGVVDNAARVYGVQGLRVIDGSIPPTQMSSHVMTVFYAMALKISDAILEDY

SEQ ID NO: 1771 - protein, 576 aa, Aspergillus niger
IEASLLTDPKDVSGRTVDYIIAGGGLTGLTTAARLTENPNISVLVIESGSYESDRGPIIEDLNAYGDIFGSSVDHAYETVELATNNQTALIRSGNGLGGSTLVNGGTWTRPHKAQVDSWETVFGNEGWNWDNVAAYSLQAERARAPNAKQIAAGHYFNASCHGVNGTVHAGPRDTGDDYSPIVKALMSAVEDRGVPTKKDFGCGDPHGVSMFPNTLHEDQVRSDAAREWLLPNYQRPNLQVLTGQYVGKVLLSQNGTTPRAVGVEFGTHKGNTHTVYAKHEVLLAAGSAVSPTILEYSGIGMKSILEPLGIDTVVDLPVGLNLQDQTTATVRSRITSAGAGQGQAAWFATFNETFGDYSEKAHELLNTKLEQWAEEAVARGGFHNTTALLIQYENYRDWIVNHNVAYSELFLDTAGVASFDVWDLLPFTRGYVHILDKDPYLHHFAYDPQYFLNELDLLGQAAATQLARNISNSGAMQTYFAGETIPGDNLAYDADLSAWTEYIPYHFRPNYHGVGTCSMMPKEMGGVVDNAARVYGVQGLRVIDGSIPPTQMSSHVMTVFYAMALKISDAILEDY

SEQ ID NO: 1772 - protein, 576 aa, Aspergillus niger
IEASLLTDPKDVSGRTVDYIIAGGGLTGLTTAARLTENPNISVLVIESGSYESDRGPIIEDLNAYGDIFGSSVDHAYETVELATNNQTALIRSGNGLGGSTLVNGGTWTRPHKAQVDSWETVFGNEGWNWDNVAAYSLQAERARAPNAKQIAAGHYFNASCHGVNGTVHAGPRDTGDDYSPIVKALMSAVEDRGVPTKKDFGCGDPHGVSMFPNTLHEDQVRSDAAREWLLPNYQRPNLQVLTGQYVGKVLLSQNGTTPRAVGVEFGTHKGNTHNVYAKHEVLLAAGSLVSPTILEYSGIGMKSILEPLGIDTVVDLPVGLNLQDQTTATVRSRITSAGAGQGQAAWFATFNETFGDYSEKAHELLNTKLEQWAEEAVARGGFHNTTALLIQYENYRDWIVNHNVAYSELFLDTAGVASFDVWDLLPFTRGYVHILDKDPYLHHFAYDPQYFLNELDLLGQAAATQLARNISNSGAMQTYFAGETIPGDNLAYDADLSAWTEYIPYHFRPNYHGVGTCSMMPKEMGGVVDNAARVYGVQGLRVIDGSIPPTQMSSHVMTVFYAMALKISDAILEDY

SEQ ID NO: 1773 - protein, 576 aa, Aspergillus niger
IEASLLTDPKDVSGRTVDYIIAGGGLTGLTTAARLTENPNISVLVIESGSYESDRGPIIEDLNAYGDIFGSSVDHAYETVELATNNQTALIRSGNGLGGSTLVNGGTWTRPHKAQVDSWETVFGNEGWNWDNVAAYSLQAERARAPNAKQIAAGHYFNASCHGVNGTVHAGPRDTGDDYSPIVKALMRAVEDRGVPTKKDFGCGDPHGVSMFPNTLHEDQVRSDAAREWLLPNYQRPNLQVLTGQYVGKVLLSQNGTTPRAVGVEFGTHKGNTHNVYAKHEVLLAAGSAVSPTILEYSGIGMKSILEPLGIDTVVDLPVGLNLQDQTTATVRSRITSAGAGQGQAAWFATFNETFGDYSEKAHELLNTKLEQWAEEAVARGGFHNTTALLIQYENYRDWIVNHNVAYSELFLDTAGVASFDVWDLLPFTRGYVHILDKDPYLHHFAYDPQYFLNELDLLGQAAATQLARNISNSGAMQTYFAGETIPGDNLAYDADLSAWTEYIPYHFRPNYHGVGTCSMMPKEMGGVVDNAARVYGVQGLRVIDGSIPPTQMSSHVMTVFYAMALKISDAILEDY

SEQ ID NO: 1774 - protein, 576 aa, Aspergillus niger
IEASLLTDPKDVSGRTVDYIIAGGGLTGLTTAARLTENPNISVLVIESGSYESDRGPIIEDLNAYGDIFGSSVDHAYETVELATNNQTALIRSGNGLGGSTLVNGGTWTRPHKAQVDSWERVFGNEGWNWDNVAAYSLQAERARAPNAKQIAAGHYFNASCHGVNGTVHAGPRDTGDDYSPIVKALMSAVEDRGVPTKKDFGCGDPHGVSMFPNTLHEDQVRSDAAREWLLPNYQRPNLQVLTGQYVGKVLLSQNGTTPRAVGVEFGTHKGNTHNVYAKHEVLLAAGSAVSPTILEYSGIGMKSILEPLGIDTVVDLPVGLNLQDQTTATVRSRITSAGAGQGQAAWFATFNETFGDYSEKAHELLNTKLEQWAEEAVARGGFHNTTALLIQYENYRDWIVNHNVAYSELFLDTAGVASFDVWDLLPFTRGYVHILDKDPYLHHFAYDPQYFLNELDLLGQAAATQLARNISNSGAMQTYFAGETIPGDNLAYDADLSAWTEYIPYHFRPNYHGVGTCSMMPKEMGGVVDNAARVYGVQGLRVIDGSIPPTQMSSHVMTVFYAMALKISDAILEDY

SEQ ID NO: 1775 - protein, 576 aa, Aspergillus niger
IEASLLTDPKDVSGRTVDYIIAGGGLTGLTTAARLTENPNISVLVIESGSYESDRGPIIEDLNAYGDIFGSSVDHAYETVELATNNQTALIRSGNGLGGSTLVNGGTWTRPHKAQVDSWETVFGNEGWNWDNVAAYSLQAERARAPNAKQIAAGHYFNASCHGVNGTVHAGPRDTGDDYSPIVKALMSAVEDRGVPTKKDFGCGDPHGVSMFPNTLHEDQVRSDAAREWLLPNYQRPNLQVLTGQYVGKVLLSKNGTTPRAVGVEFGTHKGNTHNVYAKHEVLLAAGSAVSPTILEYSGIGMKSILEPLGIDTVVDLPVGLNLQDQTTATVRSRITSAGAGQGQAAWFATFNETFGDYSEKAHELLNTKLEQWAEEAVARGGFHNTTALLIQYENYRDWIVNHNVAYSELFLDTAGVASFDVWDLLPFTRGYVHILDKDPYLHHFAYDPQYFLNELDLLGQAAATQLARNISNSGAMQTYFAGETIPGDNLAYDADLSAWTEYIPYHFRPNYHGVGTCSMMPKEMGGVVDNAARVYGVQGLRVIDGSIPPTQMSSHVMTVFYAMALKISDAILEDY

SEQ ID NO: 1776 - protein, 576 aa, Aspergillus niger
IEASLLTDPKDVSGRTVDYIIAGGGLTGLTTAARLTENPNISVLVIESGSYESDRGPIIEDLNAYGDIFGSSVDHAYETVELATNNQTALIRSGNGLGGSTLVNGGTWTRPHKAQVDSWETVFGNEGWNWDNVAAYSLQAERARAPNAKQIAAGHYFNASCHGVNGTVHAGPRDTGDDYSPIVKALMSAVEDRGVPTKKDFGCGDPHGVSMFPNTLHEDQVRSDAAREWLLPNYQRPNLQVLTGQYVGKVLLSQNGTTPRAVGVEFGTHKGNTHEVYAKHEVLLAAGSAVSPTILEYSGIGMKSILEPLGIDTVVDLPVGLNLQDQTTATVRSRITSAGAGQGQAAWFATFNETFGDYSEKAHELLNTKLEQWAEEAVARGGFHNTTALLIQYENYRDWIVNHNVAYSELFLDTAGVASFDVWDLLPFTRGYVHILDKDPYLHHFAYDPQYFLNELDLLGQAAATQLARNISNSGAMQTYFAGETIPGDNLAYDADLSAWTEYIPYHFRPNYHGVGTCSMMPKEMGGVVDNAARVYGVQGLRVIDGSIPPTQMSSHVMTVFYAMALKISDAILEDY

SEQ ID NO: 1777 - protein, 576 aa, Aspergillus niger
IEASLLTDPKDVSGRTVDYIIAGGGLTGLTTAARLTENPNISVLVIESGSYESDRGPIIEDLNAYGDIFGSSVDHAYETVELATNNQTALIRSGNGLGGSTLVNGGTWTRPHKAQVDSWETVFGNEGWNWDNVAAYSLQAERARAPNAKQIAAGHYFNASCHGVNGTVHAGPRDTGDDYSPIVKALMSAVEDRGVPTKKDFGCGDPHGVSMFPNTLHEDQVRSDAAREWLLPNYQRPNLQVLTGQYVGKVLLSQNGKTPRAVGVEFGTHKGNTHNVYAKHEVLLAAGSAVSPTILEYSGIGMKSILEPLGIDTVVDLPVGLNLQDQTTATVRSRITSAGAGQGQAAWFATFNETFGDYSEKAHELLNTKLEQWAEEAVARGGFHNTTALLIQYENYRDWIVNHNVAYSELFLDTAGVASFDVWDLLPFTRGYVHILDKDPYLHHFAYDPQYFLNELDLLGQAAATQLARNISNSGAMQTYFAGETIPGDNLAYDADLSAWTEYIPYHFRPNYHGVGTCSMMPKEMGGVVDNAARVYGVQGLRVIDGSIPPTQMSSHVMTVFYAMALKISDAILEDY

SEQ ID NO: 1778 - protein, 576 aa, Aspergillus niger
IEASLLTDPKDVSGRTVDYIIAGGGLTGLTTAARLTENPNISVLVIESGSYESDRGPIIEDLNAYGDIFGSSVDHAYETVELATNNQTALIRSGNGLGGSTLVNGGTWTRPHKAQVDSWETVFGNEGWNWDNVAAYSLQAERARAPNAKQIAAGHYFNASCHGVNGTVHAGPRDTGDDYSPIVKALMSAVEDRGVPTKKDFGCGDPHGVSMFPNTLHEDQVRSDAAREWLLPNYQRPNLQVLTGQYVGKVLLSQNGTTPRAVGVEFGTHKGNTHNVYAKHEVLLAAGSAVSPTILEYSGIGMKDILEPLGIDTVVDLPVGLNLQDQTTATVRSRITSAGAGQGQAAWFATFNETFGDYSEKAHELLNTKLEQWAEEAVARGGFHNTTALLIQYENYRDWIVNHNVAYSELFLDTAGVASFDVWDLLPFTRGYVHILDKDPYLHHFAYDPQYFLNELDLLGQAAATQLARNISNSGAMQTYFAGETIPGDNLAYDADLSAWTEYIPYHFRPNYHGVGTCSMMPKEMGGVVDNAARVYGVQGLRVIDGSIPPTQMSSHVMTVFYAMALKISDAILEDY

SEQ ID NO: 1779 - protein, 576 aa, Aspergillus niger
IEASLLTDPKDVSGRTVDYIIAGGGLTGLTTAARLTENPNISVLVIESGSYESDRGPIIEDLNAYGDIFGSSVDHAYETVELATNNQTALIRSGNGLGGSTLVNGGTWTRPHKAQVDSWETVFGNEGWNWDNVAAYSLQAERARAPNAKQIAAGHYFNASCHGVNGTVHAGPRDTGDDYSPIVKALMSAVEDRGVPTKKDFGCGDPHGVSMFPNTLHEDQVRSDAAREWLLPNYQRPNLQVLTGQYVGKVLLSQNGTTPRAVGVEFGTHKGNTHNVYAKHEVLLAAGSAVSPTILEYSGIGMKSILEPLGIDTVVDLPVGLNLQDQTTATVRSRITSAGAGQGQAAWFATFNETFGDYSEKAHELLNTKLEQWAEEAVARGGFHNATALLIQYENYRDWIVNHNVAYSELFLDTAGVASFDVWDLLPFTRGYVHILDKDPYLHHFAYDPQYFLNELDLLGQAAATQLARNISNSGAMQTYFAGETIPGDNLAYDADLSAWTEYIPYHFRPNYHGVGTCSMMPKEMGGVVDNAARVYGVQGLRVIDGSIPPTQMSSHVMTVFYAMALKISDAILEDY

SEQ ID NO: 1780 - protein, 576 aa, Aspergillus niger
IEASLLTDPKDVSGRTVDYIIAGGGLTGLTTAARLTENPNISVLVIESGSYESDRGPIIEDLNAYGDIFGSSVDHAYETVELATNNQTALIRSGNGLGGSTLVNGGTWTRPHKAQVDSWETVFGNEGWNWDNVAAYSLQAERARAPNAKQIAAGHYFNASCHGVNGTVHAGPRDTGDDYSPIVKALMSAVEDRGVPTKKDFGCGDPHGVSMFPNTLHEDQVRSDAAREWLLPNYQRPNLQVLTGQYVGKVLLSQNGTTPRAVGVEFGTHKGNTHNVYAKHEVLLAAGSAVSPTILEYSGIGMKSILEPLGIPTVVDLPVGLNLQDQTTATVRSRITSAGAGQGQAAWFATFNETFGDYSEKAHELLNTKLEQWAEEAVARGGFHNTTALLIQYENYRDWIVNHNVAYSELFLDTAGVASFDVWDLLPFTRGYVHILDKDPYLHHFAYDPQYFLNELDLLGQAAATQLARNISNSGAMQTYFAGETIPGDNLAYDADLSAWTEYIPYHFRPNYHGVGTCSMMPKEMGGVVDNAARVYGVQGLRVIDGSIPPTQMSSHVMTVFYAMALKISDAILEDY

SEQ ID NO: 1781 - protein, 576 aa, Aspergillus niger
IEASLLTDPKDVSGRTVDYIIAGGGLTGLTTAARLTENPNISVLVIESGSYESDRGPIIEDLNAYGDIFGSSVDHAYETVELATNNQTALIRSGNGLGGSTLVNGGTWTRPHKAQVDSWETVFGNEGWNWDNVAAYSLQAERARAPNAKQIAAGHYFNASCHGVNGTVHAGPRDTGDDYSPIVKALMYAVEDRGVPTKKDFGCGDPHGVSMFPNTLHEDQVRSDAAREWLLPNYQRPNLQVLTGQYVGKVLLSQNGTTPRAVGVEFGTHKGNTHNVYAKHEVLLAAGSAVSPTILEYSGIGMKSILEPLGIDTVVDLPVGLNLQDQTTATVRSRITSAGAGQGQAAWFATFNETFGDYSEKAHELLNTKLEQWAEEAVARGGFHNTTALLIQYENYRDWIVNHNVAYSELFLDTAGVASFDVWDLLPFTRGYVHILDKDPYLHHFAYDPQYFLNELDLLGQAAATQLARNISNSGAMQTYFAGETIPGDNLAYDADLSAWTEYIPYHFRPNYHGVGTCSMMPKEMGGVVDNAARVYGVQGLRVIDGSIPPTQMSSHVMTVFYAMALKISDAILEDY

SEQ ID NO: 1782 - protein, 576 aa, Aspergillus niger
IEASLLTDPKDVSGDTVDYIIAGGGLTGLTTAARLTENPNISVLVIESGSYESDRGPIIEDLNAYGDIFGSSVDHAYETVELATNNQTALIRSGNGLGGSTLVNGGTWTRPHKAQVDSWETVFGNEGWNWDNVAAYSLQAERARAPNAKQIAAGHYFNASCHGVNGTVHAGPRDTGDDYSPIVKALMSAVEDRGVPTKKDFGCGDPHGVSMFPNTLHEDQVRSDAAREWLLPNYQRPNLQVLTGQYVGKVLLSQNGTTPRAVGVEFGTHKGNTHNVYAKHEVLLAAGSAVSPTILEYSGIGMKSILEPLGIDTVVDLPVGLNLQDQTTATVRSRITSAGAGQGQAAWFATFNETFGDYSEKAHELLNTKLEQWAEEAVARGGFHNTTALLIQYENYRDWIVNHNVAYSELFLDTAGVASFDVWDLLPFTRGYVHILDKDPYLHHFAYDPQYFLNELDLLGQAAATQLARNISNSGAMQTYFAGETIPGDNLAYDADLSAWTEYIPYHFRPNYHGVGTCSMMPKEMGGVVDNAARVYGVQGLRVIDGSIPPTQMSSHVMTVFYAMALKISDAILEDY

SEQ ID NO: 1783 - protein, 576 aa, Aspergillus niger
IEASLLTDPKDVSGRTVDYIIAGGGLTGLTTAARLTENPNISVLVIESGSYESDRGPIIEDLNAYGDIFGSSVDHAYETVELATNNQTALIRSGNGLGGSTLVNGGTWTRPHKAQVDSWETVFGNEGWNWDNVAAYSLQAERARAPNAKQIAAGHYFNASCHGVNGTVHAGPRDTGDDYSPIVKALMSAVEDRGVPTKKDFGCGDPHGVSMFPNTLHEDQVRSDAAREWLLPNYQRPNLQVLTGQYVGKVLLSQNGTTPRAVGVEFGTHKGNTHKVYAKHEVLLAAGSAVSPTILEYSGIGMKSILEPLGIDTVVDLPVGLNLQDQTTATVRSRITSAGAGQGQAAWFATFNETFGDYSEKAHELLNTKLEQWAEEAVARGGFHNTTALLIQYENYRDWIVNHNVAYSELFLDTAGVASFDVWDLLPFTRGYVHILDKDPYLHHFAYDPQYFLNELDLLGQAAATQLARNISNSGAMQTYFAGETIPGDNLAYDADLSAWTEYIPYHFRPNYHGVGTCSMMPKEMGGVVDNAARVYGVQGLRVIDGSIPPTQMSSHVMTVFYAMALKISDAILEDY

SEQ ID NO: 1784 - protein, 576 aa, Aspergillus niger
IEASLLTDPKDVSGRTVDYIIAGGGLTGLTTAARLTENPNISVLVIESGSYESDRGPIIEDLNAYGDIFGSSVDHAYETVELATNNQTALIRSGNGLGGSTLVNGGTWTRPHKAQVDSWETVFGNEGWNWDNVAAYSLQAERARAPNAKQIAAGHYFNAECHGVNGTVHAGPRDTGDDYSPIVKALMSAVEDRGVPTKKDFGCGDPHGVSMFPNTLHEDQVRSDAAREWLLPNYQRPNLQVLTGQYVGKVLLSQNGTTPRAVGVEFGTHKGNTHNVYAKHEVLLAAGSAVSPTILEYSGIGMKSILEPLGIDTVVDLPVGLNLQDQTTATVRSRITSAGAGQGQAAWFATFNETFGDYSEKAHELLNTKLEQWAEEAVARGGFHNTTALLIQYENYRDWIVNHNVAYSELFLDTAGVASFDVWDLLPFTRGYVHILDKDPYLHHFAYDPQYFLNELDLLGQAAATQLARNISNSGAMQTYFAGETIPGDNLAYDADLSAWTEYIPYHFRPNYHGVGTCSMMPKEMGGVVDNAARVYGVQGLRVIDGSIPPTQMSSHVMTVFYAMALKISDAILEDY

SEQ ID NO: 1785 - protein, 576 aa, Aspergillus niger
IEASLLTDPKDVSGRTVDYIIAGGGLTGLTTAARLTENPNISVLVIESGSYESDRGPIIEDLNAYGDIFGSSVDHAYETVELATNNQTALIRSGNGLGGSTLVNGGTWTRPHKAQVDSWETVFGNEGWNWDNVAAYSLQAERARAPNAKQIAAGHYFNASCHGVNGTVHAGPRDTGDDYSPIVKALMSAVEDRGVPTKKDFGCGDPHGVSMFPNTLHEDQVRSDAAREWLLPNYQRPNLQVLTGQYVGKVLLSQNGDTPRAVGVEFGTHKGNTHNVYAKHEVLLAAGSAVSPTILEYSGIGMKSILEPLGIDTVVDLPVGLNLQDQTTATVRSRITSAGAGQGQAAWFATFNETFGDYSEKAHELLNTKLEQWAEEAVARGGFHNTTALLIQYENYRDWIVNHNVAYSELFLDTAGVASFDVWDLLPFTRGYVHILDKDPYLHHFAYDPQYFLNELDLLGQAAATQLARNISNSGAMQTYFAGETIPGDNLAYDADLSAWTEYIPYHFRPNYHGVGTCSMMPKEMGGVVDNAARVYGVQGLRVIDGSIPPTQMSSHVMTVFYAMALKISDAILEDY

SEQ ID NO: 1786 - protein, 576 aa, Aspergillus niger
IEASLLTDPKDVSGRTVDYIIAGGGLTGLTTAARLTENPNISVLVIESGSYESDRGPIIEDLNAYGDIFGSSVDHAYETVELATNNQTALIRSGNGLGGSTLVNGGTWTRPHKAQVDSWETVFGNEGWNWDNVAAYSLQAERARAPNAKQIAAGHYFNASCHGVNGTVHAGPRDTGDDYSPIVKALMSAVEDRGVPTKKDFGCGDPHGVSMFPNTLHEDQVRSDAAREWLLPNYQRPNLQVLTGQYVGKVLLYQNGTTPRAVGVEFGTHKGNTHNVYAKHEVLLAAGSAVSPTILEYSGIGMKSILEPLGIDTVVDLPVGLNLQDQTTATVRSRITSAGAGQGQAAWFATFNETFGDYSEKAHELLNTKLEQWAEEAVARGGFHNTTALLIQYENYRDWIVNHNVAYSELFLDTAGVASFDVWDLLPFTRGYVHILDKDPYLHHFAYDPQYFLNELDLLGQAAATQLARNISNSGAMQTYFAGETIPGDNLAYDADLSAWTEYIPYHFRPNYHGVGTCSMMPKEMGGVVDNAARVYGVQGLRVIDGSIPPTQMSSHVMTVFYAMALKISDAILEDY

SEQ ID NO: 1787 - protein, 576 aa, Aspergillus niger
IEASLLTDPKDVSGRTVDYIIAGGGLTGLTTAARLTENPNISVLVIESGSYESDRGPIIEDLNAYGDIFGSSVDHAYETVELATNNQTALIRSGNGLGGSTLVNGGTWTRPHKAQVDSWETVFGNEGWNWDNVAAYSLQAERARAPNAKQIAAGHYFNASCHGVNGTVHAGPRDTGDDYSPIVKALMSAVEDRGVPTKKDFGCGDPHGVSMFPNTLHEDQVRSDAAREWLLPNYQRPNLQVLTGQYVGKVLLSQNGTTPRAVGVEFGTHKGNTHNVYAKHEVLLAAGSAVSPTILEYSGIGMKSILEPLGIDTVVDLPVGLNLQDQTTATVRSRITSDGAGQGQAAWFATFNETFGDYSEKAHELLNTKLEQWAEEAVARGGFHNTTALLIQYENYRDWIVNHNVAYSELFLDTAGVASFDVWDLLPFTRGYVHILDKDPYLHHFAYDPQYFLNELDLLGQAAATQLARNISNSGAMQTYFAGETIPGDNLAYDADLSAWTEYIPYHFRPNYHGVGTCSMMPKEMGGVVDNAARVYGVQGLRVIDGSIPPTQMSSHVMTVFYAMALKISDAILEDY

SEQ ID NO: 1788 - protein, 576 aa, Aspergillus niger
IEASLLTDPKDVDGRTVDYIIAGGGLTGLTTAARLTENPNISVLVIESGSYESDRGPIIEDLNAYGDIFGSSVDHAYETVELATNNQTALIRSGNGLGGSTLVNGGTWTRPHKAQVDSWETVFGNEGWNWDNVAAYSLQAERARAPNAKQIAAGHYFNASCHGVNGTVHAGPRDTGDDYSPIVKALMSAVEDRGVPTKKDFGCGDPHGVSMFPNTLHEDQVRSDAAREWLLPNYQRPNLQVLTGQYVGKVLLSQNGTTPRAVGVEFGTHKGNTHNVYAKHEVLLAAGSAVSPTILEYSGIGMKSILEPLGIDTVVDLPVGLNLQDQTTATVRSRITSAGAGQGQAAWFATFNETFGDYSEKAHELLNTKLEQWAEEAVARGGFHNTTALLIQYENYRDWIVNHNVAYSELFLDTAGVASFDVWDLLPFTRGYVHILDKDPYLHHFAYDPQYFLNELDLLGQAAATQLARNISNSGAMQTYFAGETIPGDNLAYDADLSAWTEYIPYHFRPNYHGVGTCSMMPKEMGGVVDNAARVYGVQGLRVIDGSIPPTQMSSHVMTVFYAMALKISDAILEDY

SEQ ID NO: 1789 - protein, 576 aa, Aspergillus niger
IEASLLTDPKDVSGRTVDYIIAGGGLTGLTTAARLTENPNISVLVIESGSYESDRGPIIEDLNAYGDIFGSSVDHAYETVELATNNQTALIRSGNGLGGSTLVNGGTWTRPHKAQVDSWETVFGNEGWNWDNVAAYSLQAERARAPNAKQIAAGHYFNASCHGVNGTVHAGPRDTGDDYSPIVKALMSAVEDRGVPTKKDFGCGDPHGVSMFPNTLHEDQVRSDAAREWLLPNYQRPNLQVLTGQYVGKVLLKQNGTTPRAVGVEFGTHKGNTHNVYAKHEVLLAAGSAVSPTILEYSGIGMKSILEPLGIDTVVDLPVGLNLQDQTTATVRSRITSAGAGQGQAAWFATFNETFGDYSEKAHELLNTKLEQWAEEAVARGGFHNTTALLIQYENYRDWIVNHNVAYSELFLDTAGVASFDVWDLLPFTRGYVHILDKDPYLHHFAYDPQYFLNELDLLGQAAATQLARNISNSGAMQTYFAGETIPGDNLAYDADLSAWTEYIPYHFRPNYHGVGTCSMMPKEMGGVVDNAARVYGVQGLRVIDGSIPPTQMSSHVMTVFYAMALKISDAILEDY

SEQ ID NO: 1790 - protein, 576 aa, Aspergillus niger
IEASLLTDPKDVSGRTVDYIIAGGGLTGLTTAARLTENPNISVLVIESGSYESDRGPIIEDLNKYGDIFGSSVDHAYETVELATNNQTALIRSGNGLGGSTLVNGGTWTRPHKAQVDSWETVFGNEGWNWDNVAAYSLQAERARAPNAKQIAAGHYFNASCHGVNGTVHAGPRDTGDDYSPIVKALMSAVEDRGVPTKKDFGCGDPHGVSMFPNTLHEDQVRSDAAREWLLPNYQRPNLQVLTGQYVGKVLLSQNGTTPRAVGVEFGTHKGNTHNVYAKHEVLLAAGSAVSPTILEYSGIGMKSILEPLGIDTVVDLPVGLNLQDQTTATVRSRITSAGAGQGQAAWFATFNETFGDYSEKAHELLNTKLEQWAEEAVARGGFHNTTALLIQYENYRDWIVNHNVAYSELFLDTAGVASFDVWDLLPFTRGYVHILDKDPYLHHFAYDPQYFLNELDLLGQAAATQLARNISNSGAMQTYFAGETIPGDNLAYDADLSAWTEYIPYHFRPNYHGVGTCSMMPKEMGGVVDNAARVYGVQGLRVIDGSIPPTQMSSHVMTVFYAMALKISDAILEDY

SEQ ID NO: 1791 - protein, 576 aa, Aspergillus niger
IEASLLTDPKDVSGRTVDYIIAGGGLTGLTTAARLTENPNISVLVIESGSYESDRGPIIEDLNAYGDIFGSSVDHAYETVELATNNQTALIRSGNGLGGSTLVNGGTWTRPHKAQVDSWETVFGNEGWNWDNVAAYSLQAERARAPNAKQIAAGHYFNASCHGVNGTVHAGPRDTGDDYSPIVKALMSAVEDRGVPTKKDFGCGDPHGVSMFPNTLHEDQVRSDAAREWLLPNYQRPNLQVLTGQYVGKVLLSQNGTTPRAVGVEFGTHKGNTHNVYAKHEVLLAAGSAVSPTILEYSGIGMKSILEPLGIDTVVDLPVGLNLQDQTTATVRSRITSAGAGQGQAAWFATFNETFGDYSEKAHELLNTKLEQWAEEAVARGGFHNTTALLIQYENYRDWIVNHNVAYSELFLDTAGVASFDVWDLLPFTRGYVHILDKDPYLHHFAYDPQYFLNELDLLGQAAATQLARNISNSGAMQTYFAGETIPGDNLAYDADLSAWREYIPYHFRPNYHGVGTCSMMPKEMGGVVDNAARVYGVQGLRVIDGSIPPTQMSSHVMTVFYAMALKISDAILEDY

SEQ ID NO: 1792 - protein, 576 aa, Aspergillus niger
IEASLLTDPKDVSGRTVDYIIAGGGLTGLTTAARLTENPNISVLVIESGSYESDRGPIIEDLNAYGDIFGSSVDHAYETVELATNNQTALIRSGNGLGGSTLVNGGTWTRPHKAQVDSWETVFGNEGWNWDNVAAYSLQAERARAPNAKQIAAGHYFNASCHGVNGTVHAGPRDTGDDYSPIVKALMSAVEDRGVPTKKDFGCGDPHGVSMFPNTLHEDQVRSDAAREWLLPNYQRPNLQVLTGQYVGKVLLSQNGTTPRAVGVEFGTHKGNTHNVYAKHEVLLAAGSAVSPTILEYSGIGMKSILEPLGIDTVVDLPVGLNLQDQTTATVRSRITSAGAGQGQAAWFATFNETFGDYSEKAHELLNTKLEQWAEEAVARGGFHNTTALLIQYENYRDWIVNHNVAYSELFLDTAGVASFDVWDLLPFTRGYVHILDKDPYLHHFAYDPQYFLNELDLLGQAAATQLARNISNSGAMQTYFAGETIPGDNLAYDADLSAWEEYIPYHFRPNYHGVGTCSMMPKEMGGVVDNAARVYGVQGLRVIDGSIPPTQMSSHVMTVFYAMALKISDAILEDY

SEQ ID NO: 1793 - protein, 576 aa, Aspergillus niger
IEASLLTDPKDVSGRTVDYIIAGGGLTGLTTAARLTENPNISVLVIESGSYESDRGPIIEDLNAYGDIFGSSVDHAYETVELATNNQTALIRSGNGLGGSTLVNGGTWTRPHKAQVDSWETVFGNEGWNWDNVAAYSLQAERARAPNAKQIAAGHYFNASCHGVNGTVHAGPRDTGDDYSPIVKALMSAVEDRGVPTKKDFGCGDPHGVSMFPNTLHEDQVRSDAAREWLLPNYQRPNLQVLTGQYVGKVLLSQNGTTPRAVGVEFGTHKGNTHNVYAKHEVLLAAGSAVSPTILEYSGIGMKPILEPLGIDTVVDLPVGLNLQDQTTATVRSRITSAGAGQGQAAWFATFNETFGDYSEKAHELLNTKLEQWAEEAVARGGFHNTTALLIQYENYRDWIVNHNVAYSELFLDTAGVASFDVWDLLPFTRGYVHILDKDPYLHHFAYDPQYFLNELDLLGQAAATQLARNISNSGAMQTYFAGETIPGDNLAYDADLSAWTEYIPYHFRPNYHGVGTCSMMPKEMGGVVDNAARVYGVQGLRVIDGSIPPTQMSSHVMTVFYAMALKISDAILEDY

SEQ ID NO: 1794 - protein, 576 aa, Aspergillus niger
IEASLLTDPKDVSGRTVDYIIAGGGLTGLTTAARLTENPNISVLVIESGSYESDRGPIIEDLNAYGDIFGSSVDHAYETVELATNNQTALIRSGNGLGGSTLVNGGTWTRPHKAQVDSWETVFGNEGWNWDNVAAYSLQAERARAPNAKQIAAGHYFNASCHGVNGTVHAGPRDTGDDYSPIVKALMSAVEDRGVPTKKDFGCGDPHGVSMFPNTLHEDQVRSDAAREWLLPNYQRPNLQVLTGQYVGKVLLSQNGTTPRAVGVEFGTHKGNTHNVYAKHEVLLAAGSAVSPTILEYSGIGMKSILEPLGIDTVVDLPVGLNLQDQTTATVRSRITSAGAGQGQAAWFATFNETFGDYSEKAHELLNTKLEQWAEEAVARGGFHNTTALLIQYENYRDWIVNHNVAYSELFLDTAGVASFDVWDLLPFTRGYVHILDKDPYLHHFAYDPQYFLNELDLLGQAAATQLARFISNSGAMQTYFAGETIPGDNLAYDADLSAWTEYIPYHFRPNYHGVGTCSMMPKEMGGVVDNAARVYGVQGLRVIDGSIPPTQMSSHVMTVFYAMALKISDAILEDY

SEQ ID NO: 1795 - protein, 576 aa, Aspergillus niger
IEASLLTDPKDVSGRTVDYIIAGGGLTGLTTAARLTENPNISVLVIESGSYESDRGPIIEDLNAYGDIFGSSVDHAYETVELATNNQTALIRSGNGLGGSTLVNGGTWTRPHKAQVDSWETVFGNEGWNWDNVAAYSLQAERAREPNAKQIAAGHYFNASCHGVNGTVHAGPRDTGDDYSPIVKALMSAVEDRGVPTKKDFGCGDPHGVSMFPNTLHEDQVRSDAAREWLLPNYQRPNLQVLTGQYVGKVLLSQNGTTPRAVGVEFGTHKGNTHNVYAKHEVLLAAGSAVSPTILEYSGIGMKSILEPLGIDTVVDLPVGLNLQDQTTATVRSRITSAGAGQGQAAWFATFNETFGDYSEKAHELLNTKLEQWAEEAVARGGFHNTTALLIQYENYRDWIVNHNVAYSELFLDTAGVASFDVWDLLPFTRGYVHILDKDPYLHHFAYDPQYFLNELDLLGQAAATQLARNISNSGAMQTYFAGETIPGDNLAYDADLSAWTEYIPYHFRPNYHGVGTCSMMPKEMGGVVDNAARVYGVQGLRVIDGSIPPTQMSSHVMTVFYAMALKISDAILEDY

SEQ ID NO: 1796 - protein, 576 aa, Aspergillus niger
IEASLLTDPKDVSGRTVDYIIAGGGLTGLTTAARLTENPNISVLVIESGSYESDRGPIIEDLNAYGDIFGSSVDHAYETVELATNNQTALIRSGNGLGGSTLVNGGTWTRPHKAQVDSWETVFGNEGWNWDNVAAYSLQAERARAPNAKQIAAGHYFNASCHGVNGTVHAGPRDTGDDYSPIVKALMSAVEDRGVPTKKDFGCGDPHGVSMFPNTLHEDQVRSDAAREWLLPNYQRPNLQVLTGQYVGKVLLSQNGTTPRAVGVEFGTHKGNTYNVYAKHEVLLAAGSAVSPTILEYSGIGMKSILEPLGIDTVVDLPVGLNLQDQTTATVRSRITSAGAGQGQAAWFATFNETFGDYSEKAHELLNTKLEQWAEEAVARGGFHNTTALLIQYENYRDWIVNHNVAYSELFLDTAGVASFDVWDLLPFTRGYVHILDKDPYLHHFAYDPQYFLNELDLLGQAAATQLARNISNSGAMQTYFAGETIPGDNLAYDADLSAWTEYIPYHFRPNYHGVGTCSMMPKEMGGVVDNAARVYGVQGLRVIDGSIPPTQMSSHVMTVFYAMALKISDAILEDY

SEQ ID NO: 1797 - protein, 576 aa, Aspergillus niger
IEASLLTDPKDVSGRTYDYIIAGGGLTGLTTAARLTENPNISVLVIESGSYESDRGPIIEDLNAYGDIFGSSVDHAYETVELATNNQTALIRSGNGLGGSTLVNGGTWTRPHKAQVDSWETVFGNEGWNWDNVAAYSLQAERARAPNAKQIAAGHYFNASCHGVNGTVHAGPRDTGDDYSPIVKALMSAVEDRGVPTKKDFGCGDPHGVSMFPNTLHEDQVRSDAAREWLLPNYQRPNLQVLTGQYVGKVLLSQNGTTPRAVGVEFGTHKGNTHNVYAKHEVLLAAGSAVSPTILEYSGIGMKSILEPLGIDTVVDLPVGLNLQDQTTATVRSRITSAGAGQGQAAWFATFNETFGDYSEKAHELLNTKLEQWAEEAVARGGFHNTTALLIQYENYRDWIVNHNVAYSELFLDTAGVASFDVWDLLPFTRGYVHILDKDPYLHHFAYDPQYFLNELDLLGQAAATQLARNISNSGAMQTYFAGETIPGDNLAYDADLSAWTEYIPYHFRPNYHGVGTCSMMPKEMGGVVDNAARVYGVQGLRVIDGSIPPTQMSSHVMTVFYAMALKISDAILEDY

SEQ ID NO: 1798 - protein, 576 aa, Aspergillus niger
IEASLLTDPKDVSGRTVDYIIAGGGLTGLTTAARLTENPNISVLVIESGSYESDRGPIIEDLNAYGDIFGSSVDHAYETVELATNNQTALIRSGNGLGGSTLVNGGTWTRPHKAQVDSWETVFGNEGWNWDNVAAYSLQAERARAPNAKQIAAGHYFNASCHGVNGTVHAGPRDTGDDYSPIVKALMSAVEDRGVPTKKDFGCGDPHGVSMFPNTLHEDQVRSDAAREWLLPNYQRPNLQVLTGQYVGKVLLSQNGTTPRAVGVEFGTHKGNTHNVYAKHEVLLAAGSAVSPTILEYSGIGMKSILEPLGIDTVVDLPVGLNLQDQTTATVRSRITSAGAGQGQAAWFATFNETFGDYSEKAHELLNTKLEQWAEEAVARGGFHNTTALLIQYENYRDWIVNHNVAYSELFLDTAGVASFDVWDLLPFTRGYVHILDKDPYLHHFAYDPQYFLNELDLLGQAAATQLARNISNSGAMQTYFAGETIPGDNLAYDADLSAWTEYIPYHFRPNYHGVGTCSMMPKEMGGVVDFAARVYGVQGLRVIDGSIPPTQMSSHVMTVFYAMALKISDAILEDY

SEQ ID NO: 1799 - protein, 576 aa, Aspergillus niger
IEASLLTDPKDVSGRTVDYIIAGGGLTGLTTAARLTENPNISVLVIESGSYESDRGPIIEDLNAYGDIFGSSVDHAYETVELATNNQTALIRSGNGLGGSTLVNGGTWTRPHKAQVDSWETVFGNEGWNWDNVAAYSLQAERARAPNAKQIAAGHYFNASCHGVNGTVHAGPRDTGDDYSPIVKALMSAVEDRGVPTKKDFGCGDPHGVSMFPNTLHEDQVRSDAAREWLLPNYQRPNLQVLTGQYVGKVLLSQNGTTPRAVGVEFGTHKGNTHNVYAKHEVLLAAGSAVSPTILEYSGIGMKSILEPLGIDTVVDLPVGLNLQDQTTATVRSRITSAGAGQGQAAWFATFNETFGDYSEFAHELLNTKLEQWAEEAVARGGFHNTTALLIQYENYRDWIVNHNVAYSELFLDTAGVASFDVWDLLPFTRGYVHILDKDPYLHHFAYDPQYFLNELDLLGQAAATQLARNISNSGAMQTYFAGETIPGDNLAYDADLSAWTEYIPYHFRPNYHGVGTCSMMPKEMGGVVDNAARVYGVQGLRVIDGSIPPTQMSSHVMTVFYAMALKISDAILEDY

SEQ ID NO: 1800 - protein, 576 aa, Aspergillus niger
IEASLLKDPKEVAGRTYDYIIAGGGLTGLTVAARLTENPNITVLVIESGSYESDRGPIIEDLNAYGDIFGSSVDHAYETVELATNNQTALIRSGNGLGGSTLINGGTWTRPHKAQVDSWETVFGNEGWNWDSVAAYSLQAERARAPNAKQIAAGHYFNPSCHGINGTVHAGPRDTGDDYSPIVKALMSAVEDRGVPTKKDLGCGDPHGVSMFPNTLHEDQVRSDAAREWLLPNYQRPNLQVLTGQYVGKVLLSQNATTPRAVGVEFGTHKGNTHNVYAKHEVLLAAGSAVSPTILEYSGIGMKSILEPLGIDTVVDLPVGLNLQDQTTSTVRSRITSAGAGQGQAAWFATFNETFGDYAEKAHELLNTKLEQWAEEAVARGGFHNTTALLIQYENYRDWIVKDNVAYSELFLDTAGVASFDVWDLLPFTRGYVHILDKDPYLRHFAYDPQYFLNELDLLGQAAATQLARNISNSGAMQTYFAGETIPGDNLAYDADLRAWVEYIPENFRPNYHGVGTCSMMPKEMGGVVDNAARVYGVQGLRVIDGSIPPTQMSSHVMTVFYAMALKIADAILADY

SEQ ID NO: 1801 - protein, 576 aa, Aspergillus niger
IEASLLKDPKEVAGRTYDYIIAGGGLTGLTVAARLTENPNITVLVIESGSYESDRGPIIEDLNAYGDIFGSSVDHAYETVELATNNQTALIRSGNGLGGSTLINGGTWTRPHKAQVDSWETVFGNEGWNWDSVAAYSLQAERARAPNAKQIAAGHYFNPSCHGINGTVHAGPRDTGDDYSPIVKALMSAVEDRGVPTKKDLGCGDPHGVSMFPNTLHPDQVRSDAAREWLLPNYQRPNLQVLTGQYVGKVLLSQNATTPRAVGVEFGTHKGNTHNVYAKHEVLLAAGSAVSPTILEYSGIGMKSILEPLGIDTVVDLPVGLNLQDQTTSTVRSRITPAGAGQGQAAWFATFNETFGDYAEKAHELLNTKLEQWAEEAVARGGFHNTTALLIQYENYRDWIVKDNVAYSELFLDTAGVASFDVWDLLPFTRGYVHILDKDPYLRHFAYDPQYFLNELDLLGQAAATQLARNISNSGAMQTYFAGETIPGDNLAYDADLRAWVEYIPENFRPNYHGVGTCSMMPKEMGGVVDNAARVYGVQGLRVIDGSIPPTQLSSHVMTVFYAMALKIADAILADY

SEQ ID NO: 1802 - protein, 576 aa, Aspergillus niger
IEASLLKDPKEVAGRTYDYIIAGGGLTGLTVAAKLTENPNITVLVIESGSYESDRGPIIEDLNAYGDIFGSSVDHAYETVELPTNNRTALIRSGNGLGGSTLINGGTWTRPHKAQVDSWETVFGNEGWNWDSVAAYSLQAERARAPNAKQIAAGHYFNASCHGLNGTVHAGPRDTGDDYSPIVKALMSAVEDRGVPTKKDLGCGDPHGVSMFPNTLHEDQVRSDAAREWLLPNYQRPNLQVLTGQYVGKVLLSQNATTPRAVGVEFGTHKGNTHNVYAKHEVLLAAGSAVSPTILEYSGIGMKSILEPLGIDTVVDLPVGLNLQDQTTSTVRSRITPAGAGQGQAAWFATFNETFGDYAEKAHELLNTKLEQWAEEAVARGGFHNTTALLIQYENYRDWIVKDNVAYSELFLDTAGVASFDVWDLLPFTRGYVHILDKDPYLRHFAYDPQYFLNELDLLGQAAATQLARNISNSGAMQTYFAGETIPGDNLAYDADLRAWVEYIPENFRPNYHGVGTCSMMPKEMGGVVDNAARVYGVQGLRVIDGSIPPTQLSSHVMTVFYAMALKIADAVLADY

SEQ ID NO: 1803 - protein, 576 aa, Aspergillus niger
IEASLLTDPKDVSGRTVDYIIAGGGLTGLTTAARLTENPNISVLVIESGSYESDRGPIIEDLNAYGDIFGSSVDHAYETVELATNNQTALIRSGNGLGGSTLVNGGTWTRPHKAQVDSWETVFGNEGWNWDNVAAYSKQAERARAPNAKQIAAGHYFNASCHGVNGTVHAGPRDTGDDYSPIVKALMSAVEDRGVPTKKDFGCGDPHGVSMFPNTLHEDQVRSDAAREWLLPNYQRPNLQVLTGQYVGKVLLSQNGTTPRAVGVEFGTHKGNTHNVYAKHEVLLAAGSAVSPTILEYSGIGMKSILEPLGIDTVVDLPVGLNLQDQTTATVRSRITSAGAGQGQAAWFATFNETFGDYSEKAHELLNTKLEQWAEEAVARGGFHNTTALLIQYENYRDWIVNHNVAYSELFLDTAGVASFDVWDLLPFTRGYVHILDKDPYLHHFAYDPQYFLNELDLLGQAAATQLARNISNSGAMQTYFAGETIPGDNLAYDADLSAWTEYIPYHFRPNYHGVGTCSMMPKEMGGVVDNAARVYGVQGLRVIDGSIPPTQMSSHVMTVFYAMALKISDAILEDY

SEQ ID NO: 1804 - protein, 576 aa, Aspergillus niger
IEASLLTDPKDVSGRTVDYIIAGGGLTGLTTAARLTENPNISVLVIESGSYESDRGPIIEDLNAYGDIFGSSVDHAYETVELATNNQTALIRSGNGLGGSTLVNGGTWTRPHKAQVDSWETVFGNEGWNWDNVAAYSLQAERARAPNAKQIAAGHYFNASCHGVNGTVHAGPRDTGDDYSPIVKALMSAVEDRGVPTKKDFGCGDPHGVSMFPNTLHEDQVRSDAAREWLLPNYQRPNLQVLTGQYVGKVLLSQNGTTPRAVGVEFGTHKGNTHNVYAKHEVLLAAGSAVSPTILEYSGIGMKSILEPLGIDTVVDLPVGLNLQDQTTATVRSRITSAGAGQGQAAWFATFNETFGDYSEKAHELLNTKLEQWAEEAVARGGFHNTTALLIQYENYRDWIVNHNVAYSELFLDTAGVASFDVWDLLPFTRGYVHILDKDPYLHHFAYDPQYFLNELDLLGQAAATQLARNISNYGAMQTYFAGETIPGDNLAYDADLSAWTEYIPYHFRPNYHGVGTCSMMPKEMGGVVDNAARVYGVQGLRVIDGSIPPTQMSSHVMTVFYAMALKISDAILEDY

SEQ ID NO: 1805 - protein, 576 aa, Aspergillus niger
IEASLLTDPKDVSGRTVDYIIAGGGLVGLTTAARLTENPNISVLVIESGSYESDRGPIIEDLNAYGDIFGSSVDHAYETVELATNNQTALVRSGNGLGGSTLVNGGTWTRPHKAQVDSWETVFGNEGWNWDNVAAYSLQAERARAPNAKQIAAGHYFNASCHGVNGTVHVGPRDTGDDYSPIVKALMSAVEDRGVPTKKDFGCGDPHGVSMFPNTLHEDQVRSDAAREWLLPNYQRPNLQVLTGQYVGKVLLSQNGTTPRAVGVEFGTHKGNTHNVYAKHEVLLAAGSAVSPTILEYSGIGMKSILEPLGIDTVVDLPVGLNLQDQTTNTVRSRITSAGAGQGQAAWFATFNETFGDYSEKAHELLNTKLEQWAEEAVARGGFHNTTALLIQYENYRDWIVNHNVAYSELFLDTAGVASFDVWDLLPFTRGYVHILDKDPYLHHFAYDPQYFLNELDLLGQAAATQLARNISNSGAMQTYFAGETIPGDNLAYDADLSAWTEYIPYHFRPNYHGVGTCSMMPKEMGGVVDNAARVYGVQGLRVIDGSIPPTQMSSHPMTVFYAMALKISDAILEDY

SEQ ID NO: 1806 - protein, 576 aa, Aspergillus niger
IEASLLTDPKDVSGRTVDYIIAGGGLVGLTTAARLTENPNISVLVIESGSYESDRGPIIEDLNAYGDIFGSSVDHAYETVELATNNQTALVRSGNGLGGSTLVNGGTWTRPHKAQVDSWETVFGNEGWNWDNVAAYSLQAERARAPNAKQIAAGHYFNASCHGVNGTVHAGPRDTGDDYSPIVKALMSAVEDRGVPTKKDFGCGDPHGVSMFPNTLHEDQVRSDAAREWLLPNYQRPNLQVLTGQYVGKVLLSQNGTTPRAVGVEFGTHKGNTHNVYAKHEVLLAAGSAVSPTILEYSGIGMKSILEPLGIDTVVDLPVGLNLQDQTTATVRSRITSAGAGQGQAAWFATFNETFGDYSEKAHELLNTKLEQWAEEAVARGGFHNTTALLIQYENYRDWIVNHNVAYSELFLDTAGVASFDVWDLLPFTRGYVHILDKDPYLHHFAYDPQYFLNELDLLGQAAATQLARNISNSGAMQTYFAGETIPGDNLAYDADLSAWTEYIPYHFRPNYHGVGTCSMMPKEMGGVVDNAARVYGVQGLRVIDGSIPPTQMSSHVMTVFYAMALKISDAILEDY

SEQ ID NO: 1807 - protein, 576 aa, Aspergillus niger
IEASLLKDPKEVAGRTYDYIIAGGGLTGLTVAARLTENPDITVLVIESGSYESDRGPIIEDLNAYGQIFGSSVDHAYETVELATNNQTALIRSGNGLGGSTLINGGNWTRPHKAQVDSWETVFGNEGWNWDSVAAYSLQAERARAPNAKQIAAGHYFNASCHGINGTVHAGPRDTGDDYSPIVKALMSAVEDRGVPTKKDLGCGDPHGVSMFPNTLHEDQVRSDAAREWLLPNYQRPNLQVLTGQYVGKVLLSQNATTPRAVGVEFGTHKGNTHNVYAKHEVLLAAGSAVSPTILEYSGIGLKSILEPLGIDTVVDLPVGLNLQDQTTSTVRSRITSAGAGQGQAAWFATFNETFGDYAEKAHELLNTKLEQWAEEAVARGGFHNTTALLIQYENYRDWIVKDNVAYSELFLDTAGVASFDVWDLLPFTRGYVHILDKDPYLRHFAYDPQYFLNELDLLGQAAATQLARNISNSGAMQTYFAGETIPGDNLAYDADLSAWVEYIPENFRPNYHGVGTCSMMPKEMGGVVDNAARVYGVQGLRVIDGSIPPTQMSSHVMTVFYAMALKIADAILADY

SEQ ID NO: 1808 - protein, 576 aa, Aspergillus niger
IEASLLTDPKDVSGRTCDYIIAGGGLTGLTTAARLTENPNICVLVIESGSYESDRGPIIEDLNAYGDIFGSSVDHAYETVELATNNQTALIRSGNGLGGSTLVNGGTWTRPHKAQVDSWETVFGNEGWNWDNVAAYSLQAERARAPNAKQIAAGHYFNASCHGVNGTVHAGPRDTGDDYSPIVKALMSAVEDRGVPTKKDFGCGDPHGVSMFPNTLHEDQVRSDAAREWLLPNYQRPNLQVLTGQYVGKVLLSQNGTTPRAVGVEFGTHKGNTHNVYAKHEVLLAAGSAVSPTILEYSGIGMKSILEPLGIDTVVDLPVGLNLQDQTTATVRSRITSAGAGQGQAAWFATFNETFGDYSEKAHELLNTKLEQWAEEAVARGGFHNTTALLIQYENYRDWIVNHNVAYSELFLDTAGVASFDVWDLLPFTRGYVHILDKDPYLHHFAYDPQYFLNELDLLGQAAATQLARNISNSGAMQTYFAGETIPGDNLAYDADLSAWTEYIPYHFRPNYHGVGTCSMMPKEMGGVVDNAARVYGVQGLRVIDGSIPPTQMSSHVMTVFYAMALKISDAILEDY

SEQ ID NO: 1809 - protein, 576 aa, Aspergillus niger
IEASLLKDPKEVAGRTYDYIIAGGGLTGLTVAARLTENPNITVLVIESGSYESDRGPIIEDLNAYGDIFGSSVDHAYETVELATNNRTALIRSGNGLGGSTLINGGTWTRPHKAQVDSWETVFGNEGWNWDSVAAYSLQAERARAPNAKQIAAGHYFNASCHGINGTVHAGPRDTGDDYSPIVKALMSAVEDRGVPTKKDLGCGDPHGVSMFPNTLHEDQVRSDAAREWLLPNYQRPNLQVLTGQYVGKVLLSQNATTPRAVGVEFGTHKGNTHNVYAKHEVLLAAGSAVSPTILEYSGIGMKSILEPLGIDTVVDLPVGLNLQDQTTSTVRSRITSAGAGQGQAAWFATFNETFGDYAEKAHELLNTKLEQWAEEAVARGGFHNTTALLIQYENYRDWIVKDNVAYSELFLDTAGVASFDVWDLLPFTRGYVHILDKDPYLRHFAYDPQYFLNELDLLGQAAATQLARNISNSGAMQTYFAGETIPGDNLAYDADLSAWVEYIPENFRPNYHGVGTCSMMPKEMGGVVDNAARVYGVQGLRVIDGSIPPTQLSSHVMTVFYAMALKIADAILADY

SEQ ID NO: 1810 - protein, 576 aa, Aspergillus niger
IEASLLTDPKDVSGRTVDYIIAGGGLTGLTTAARLTENPNISVLVIESGSYESDRGPIIEDLNAYGDIFGSSVDHAYETVELATNNQTALIRSGNGLGGSTLVNGGTWTRPHKAQVDSWETVFGNEGWNWDNVSAYSLQAERARAPNAKQIAAGHYFNASCHGVNGTVHAGPRDTGDDYSPIVKALMSAVEDRGVPTKKDFGCGDPHGVSMFPNTLHEDQVRSDAAREWLLPNYQRPNLQVLTGQYVGKVLLSQNGTTPRAVGVEFGTHKGNTHNVYAKHEVLLAAGSAVSPTILEYSGIGMKSILEPLGIDTVVDLPVGLNLQDQTTATVRSRITSAGAGQGQAAWFATFNETFGDYSEKAHELLNTKLEQWAEEAVARGGFHNTTALLIQYENYRDWIVNHNVAYSELFLDTAGVASFDVWDLLPFTRGYVHILDKDPYLHHFAYDPQYFLNELDLLGQAAATQLARNISNSGAMQTYFAGETIPGDNLAYDADLSAWTEYIPYHFRPNYHGVGTCSMMPKEMGGVVDNAARVYGVQGLRVIDGSIPPTQMSSHVMTVFYAMALKISDAILEDY

SEQ ID NO: 1811 - protein, 576 aa, Aspergillus niger
IEASLLTDPKDVSGRTVDYIIAGGGLTGLTTAARLTENPNISVLVIESGSYESDRGPIIEDLNAYGDIFGSSVDHAYETVELATNNQTALIRSGNGLGGSTLVNGGTWTRPHKAQVDSWETVFGNEGWNWDNVAAYSLQAERARAPNAKQIAAGHYFNASCHGVNGTVHAGPRDTGDDYSPIVKALMSAVEDRGVPTKKDFGCGDPHGVSMFPNTLHEDQVRSDAAREWLLPNYQRPNLVVLTGQYVGKVLLSQNGTTPRAVGVEFGTHKGNTHNVYAKHEVLLAAGSAVSPTILEYSGIGMKSILEPLGIDTVVDLPVGLNLQDQTTATVRSRITSAGAGQGQAAWFATFNETFGDYSEKAHELLNTKLEQWAEEAVARGGFHNTTALLIQYENYRDWIVNHNVAYSELFLDTAGVASFDVWDLLPFTRGYVHILDKDPYLHHFAYDPQYFLNELDLLGQAAATQLARNISNSGAMQTYFAGETIPGDNLAYDADLSAWTEYIPYHFRPNYHGVGTCSMMPKEMGGVVDNAARVYGVQGLRVIDGSIPPTQMSSHVMTVFYAMALKISDAILEDY

SEQ ID NO: 1812 - protein, 576 aa, Aspergillus niger
IEASLLTDPKDVSGRTVDYIIAGGGLTGLTTAARLTENPNISVLVIESGSYESDRGPIIEDLNAYGDIFGSSVDHAYETVELATNNQTALIRSGNGLGGSTLVNGGTWTRPHKAQVDSWETVFGNEGWNWDNVAAYSLQAERARAPNAKQIAAGHYFNASCHGVNGTVHAGPRDTGDDYSPIVKALMCAVEDRGVPTKKDFGCGDPHGVSMFPNTLHEDQVRSDAAREWLLPNYQRPNLQVLTGQYVGKVLLSQNGTTPRAVGVEFGTHKGNTHNVYAKHEVLLAAGSAVSPTILEYSGIGMKSILEPLGIDTVVDLPVGLNLQDQTTATVRSRITSAGAGQGQAAWFATFNETFGDYSEKAHELLNTKLEQWAEEAVARGGFHNTTALLIQYENYRDWIVNHNVAYSELFLDTAGVASFDVWDLLPFTRGYVHILDKDPYLHHFAYDPQYFLNELDLLGQAAATQLARNISNSGCMQTYFAGETIPGDNLAYDADLSAWTEYIPYHFRPNYHGVGTCSMMPKEMGGVVDNAARVYGVQGLRVIDGSIPPTQMSSHVMTVFYAMALKISDAILEDY

SEQ ID NO: 1813 - protein, 576 aa, Aspergillus niger
IEASLLTDPKDVSGRTVDYIIAGGGLTGLTTAARLTENPNISVLVIESGSYESDRGPIIEDLNAYGDIFGSSVDHAYETVELATNNQTALIRSGNGLGGSTLVNGGTWTRPHKAQVDSWETVFGNEGWNWDNVAAYSLQAERARAPNAKQIAAGHYFNASCHGVNGTVHAGPRDTGDDYSPIVKALMSAVEDRGVPTKKDFGCGDPHGVSMFPNTLHEDQVRSDAAREWLLPNYQRPNLQVLTGQYVGKVLLSQNGTTPRAVGVEFGTHKGNTHNVYAKHEVLLAAGSAVSPTILEYSGIGMKSILEPLGIDTVVDLPVGLNLQDQTTATVRSRITSAGAGQGQAAWFATFNETFGDYSEKAHELLNTKLEQWAEEAVARGGFHNTTALLIQYENYRDWIVNHNVAYSELFLDTAGVASFDVWDLLPFTRGYVHILDKDPYLHHFAYDPQYFLNELDLLGQAAATQLARNISNSGAMQTYFAGETKPGDNLAYDADLSAWTEYIPYHFRPNYHGVGTCSMMPKEMGGVVDNAARVYGVQGLRVIDGSIPPTQMSSHVMTVFYAMALKISDAILEDY

SEQ ID NO: 1814 - protein, 576 aa, Aspergillus niger
IEASLLTDPKDVSGRTVDYIIAGGGLTGLTTAARLTENPNISVLVIESGSYESDRGPIIEDLNAYGDIFGSSVDHAYETVELATNNQTALIRSGNGLGGSTLVNGGTWTRPHKAQVDSWETVFGNEGWNWDNVAAYSLQAERARAPNAKQIAAGHYFNASCHGVNGTVHAGPRDTGDDYSPIVKALMSAVEDRGVPTKKDFGCGDPHGVSMFPNTLHEDQVRSDAAREWLLPNYQRPNLQVLTGQYVGKVLLSQNGTTPRAVGVEFGTHKGNTHNVYAKHEVLLAAGSAVSPTILEYSGIGMKSILEPLGIDTVVDLPVGLNLQDQTTATVRSRITSAGAGQGQAAWFATFNETFGDYSEKAHELLNTKLEQWAEEAVARGGFHNTTALLIQYENYRDWIVNHNVAYSELFLDTAGVASFDVWDLLPFTRGYVHILDKDPYLXHFAYDPQYFLNELDLLGQAAATQLARNISNSGAMQTYFAGETIPGDNLAYDADLSAWTEYIPYHFRPNYHGVGTCSMMPKEMGGVVDNAARVYGVQGLRVIDGSIPPTQMSSHVMTVFYAMALKISDAILEDY

SEQ ID NO: 1815 - protein, 576 aa, Aspergillus niger
IEASLLTDPKDVSGRTVDYIIAGGGLVGLTTAARLTENPNISVLVIESGSYESDRGPIIEDLNAYGDIFGSSVDHAYETVELATNNQTALVRSGNGLGGSTLVNGGTWTRPHKAQVDSWETVFGNEGWNWDNVAAYSLQAERARAPNAKQIAAGHYFNTSCHGVNGTVHAGPRDTGDDYSPIVKALMSAVEDRGVPTKKDFGCGDPHGVSMFPNTLHEDQVRSDAAREWLLPNYQRPNLQVLTGQYVGKVLLSQNGTTPRAVGVEFGTHKGNTHNVYAKHEVLLAAGSAVSPTILEYSGIGMKSILEPLGIDTVVDLPVGLNLQDQTTATVRSRITSAGAGQGQAAWFATFNETFGDYSEKAHELLNTKLEQWAEEAVARGGFHNTTALLIQYENYRDWIVNHNVAYSELFLDTAGVASFDVWDLLPFTRGYVHILDKDPYLHHFAYDPQYFLNELDLLGQAAATQLARNISNSGAMQTYFAGETIPGDNLAYDADLSAWTEYIPYHFRPNYHGVGTCSMMPKEMGGVVDNAARVYGVQGLRVIDGSIPPTQMSSHVMTVFYAMALKISDAILEDY

SEQ ID NO: 1816 - protein, 576 aa, Aspergillus niger
IEASLLKDPKEVAGRTYDYIIAGGGLTGLTVAARLTENPNITVLVIESGSYESDRGPIIEDLNAYGDIFGSSVDHAYETVELATNNQTALIRSGNGLGGSTLINGGTWTRPHKAQVDSWETVFGNEGWNWDSVAAYSLQAERARAPNAKQIAAGHYFNPSCHGLNGTVHAGPRDTGDDYSPIVKALMSAVEDRGVPTKKDLGCGDPHGVSMFPNTLHEDQVRSDAAREWLLPNYQRPNLQVLTGQYVGKVLLSQNATTPRAVGVEFGTHKGNTHNVYAKHEVLLAAGSAVSPTILEYSGIGMKSILEPLGIDTVVDLPVGLNLQDQTTSTVRSRITSAGAGQGQAAWFATFNETFGDYAEKAHELLNTKLEQWAEEAVARGGFHNTTALLIQYENYRDWIVKDNVAYSELFLDTAGVASFDVWDLLPFTRGYVHILDKDPYLRHFAYDPQYFLNELDLLGQAAATQLARNISNSGAMQTYFAGETIPGDNLAYDADLSAWVEYIPENFRPNYHGVGTCSMMPKEMGGVVDNAARVYGVQGLRVIDGSIPPTQMSSHVMTVFYAMALKIADAILADY

SEQ ID NO: 1817 - protein, 576 aa, Aspergillus niger
IEASLLTDPEDVSGRTVDYIIAGGGLVGLTTAARLTENPNISVLVIESGSYESDRGPIIEDLNAYGDIFGSSVDHAYETVELATNNQTALVRSGNGLGGSTLVNGGTWTRPHKAQVDSWETVFGNEGWNWDNVAAYSLQAERARAPNARQIAAGHYFNASCHGVNGTVHAGPRDTGDDYSPIVKALMSAVEDRGVPTKKDFGCGDPHGVSMFPNTLHEDQVRSDAAREWLLPNYQRPNLQVLTGQYVGKVLLSQNGTTPRAVGVEFGTHKGNTHNVYAKHEVLLAAGSAVSPTILEYSGIGMKSILEPLGIDTVVDLPVGLNLQDQTTATVRSRITSAGAGQGQAAWFATFNETFGDYSEKAHELLNTKLEQWAEEAVARGGFHNTTALLIQYENYRDWIVNHNVAYSELFLDTAGVASFDVWDLLPFTRGYVHILDKDPYLHHFAYDPQYFLNELDLLGQAAATQLARNISNSGAMQTYFAGETIPGDNLAYDADLSAWTEYIPYHFRPNYHGVGTCSMMPKEMGGVVDNAARVYGVQGLRVIDGSIPPTQMSSHVMTVFYAMALKISDAILEDY

SEQ ID NO: 1818 - protein, 576 aa, Aspergillus niger
IEASLLTDPKEVAGRTVDYIIAGGGLTGLTTAARLTENPDITVLVIESGSYESDRGPIIEDLNAYGDIFGSSVDHAYETVELATNNQTALIRAGNGLGGSTLVNGGTWTRPHKAQVDSWETVFGNEGWNWDSVAAYSLQAERARAPNAKQIAAGHYFNASCHGINGTVHAGPRDTGDDYSPIVKALMSAVEDRGVPTKKDLGCGDPHGVSMFPNTLHEDQVRSDAAREWLLPNYQRPNLQVLTGQYVGKVLLSQNATTPRAVGVEFGTHKGNTHNVYAKHEVLLAAGSAVSPTILEYSGIGMKSILEPLGIDTVVDLPVGLNLQDQTTSTVRSRITSAGAGQGQAAWFATFNETFGDYAEKAHELLNTKLEQWAEEAVARGGFHNTTALLIQYENYRDWIVKDNVAYSELFLDTAGVASFDVWDLLPFTRGYVHILDKDPYLRHFAYDPQYFLNELDLLGQAAATQLARNISNSGAMQTYFAGETIPGDNLAYDADLSAWVEYIPYNFRPNYHGVGTCSMMPKEMGGVVDNAARVYGVQGLRVIDGSIPPTQMSSHVMTVFYAMALKIADAILADY

SEQ ID NO: 1819 - protein, 576 aa, Aspergillus niger
IEASLLKDPKEVAGRTYDYIIAGGGLTGLTVAARLTENPNITVLVIESGSYESDRGPIIEDLNAYGDIFGSSVDHAYETVELATNNQTALIRSGNGLGGSTLINGGTWTRPHKAQVDSWETVFGNEGWNWDSVAAYSLQAERARAPNAKQIAAGHYFNPSCHGINGTVHAGPRDTGDDYSPIVKALMSAVEDRGVPTKKDLGCGDPHGVSMFPNTLHEDQVRSDAAREWLLPNYQRPNLQVLTGRYVGKVLLSQNATTPRAVGVEFGTHKGNTHNVYAKHEVLLAAGSAVSPTILEYSGIGMKSILEPLGIDTVVDLPVGLNLQDQTTSTVRSRITPAGAGQGQAAWFATFNETFGDYAEKAHELLNTKLEQWAEEAVARGGFHNTTALLIQYENYRDWIVKDNVAYSELFLDTAGVASFDVWDLLPFTRGYVHILDKDPYLRHFAYDPQYFLNELDLLGQAAATQLARNISNSGAMQTYFAGETIPGDNLAYDADLSAWVEYIPENFRPNYHGVGTCSMMPKEMGGVVDNAARVYGVQGLRVIDGSIPPTQMSSHVMTVFYAMALKIADAILADY

SEQ ID NO: 1820 - protein, 576 aa, Aspergillus niger
IEASLLKDPKEVAGRTYDYIIAGGGLTGLTVAARLTENPNITVLVIESGSYESDRGPIIEDLNAYGDIFGSSVDHAYETVELATNNRTALIRSGNGLGGSTLINGGTWTRPHKAQVDSWETVFGNEGWNWDSVAAYSLQAERARAPNAKQIAAGHYFNASCHGINGTVHAGPRDTGDDYSPIVKALMSAVEDRGVPTKKDLGCGDPHGVSMFPNTLHEDQVRSDAAREWLLPNYQRPNLQVLTGQYVGKVLLSQNATTPRAVGVEFGTHKGNTHNVYAKHEVLLAAGSAVSPTILEYSGIGMKSILEPLGIDTVVDLPVGLNLQDQTTSTVRSRITSAGAGQGQAAWFATFNETFGDYAEKAHELLNTKLEQWAEEAVARGGFHNTTALLIQYENYRDWIVKDNVAYSELFLDTAGVASFDVWDLLPFTRGYVHILDKDPYLRHFAYDPQYFLNELDLLGQAAATQLARNISNSGAMQTYFAGETIPGDNLAYDADLRAWVEYIPENFRPNYHGVGTCSMMPKEMGGVVDNAARVYGVQGLRVIDGSIPPTQMSSHVMTVFYAMALKIADAILADY

SEQ ID NO: 1821 - protein, 576 aa, Aspergillus niger
IEASLLKDPKEVAGRTYDYIIAGGGLTGLTVAARLTENPNITVLVIESGSYESDRGPIIEDLNAYGDIFGSSVDHAYETVELPTNNRTALIRSGNGLGGSTLINGGTWTRPHKAQVDSWETVFGNEGWNWDSVAAYSLQAERARAPNAKQIAAGHYFNPSCHGINGTVHAGPRDTGDDYSPIVKALMSAVEDRGVPTKKDLGCGDPHGVSMFPNTLHEDQVRSDAAREWLLPNYQRPNLQVLTGQYVGKVLLSQNATTPRAVGVEFGTHKGNTHNVYAKHEVLLAAGSAVSPTILEYSGIGMKSILEPLGIDTVVDLPVGLNLQDQTTSTVRSRITSAGAGQGQAAWFATFNETFGDYAEKAHELLNTKLEQWAEEAVARGGFHNTTALLIQYENYRDWIVKDNVAYSELFLDTAGVASFDVWDLLPFTRGYVHILDKDPYLRHFAYDPQYFLNELDLLGQAAATQLARNISNSGAMQTYFAGETIPGDNLAYDADLSAWVEYIPENFRPNYHGVGTCSMMPKEMGGVVDNAARVYGVQGLRVIDGSIPPTQMSSHVMTVFYAMALKIADAILADY

SEQ ID NO: 1822 - protein, 576 aa, Aspergillus niger
IEASLLTDPKDVSGRTVDYIIAGGGLTGLTTAARLTENPNISVLVIESGSYESDRGPIIEDLNAYGDIFGSSVDHAYETVELATNNQTALIRSGNGLGGSTLVNGGTWTRPHKAQVDSWETVFGNEGWNWDNVAAYSLQAERARAPNAKQIAAGHYFNASCHGVNGTVHAGPRDTGDDYSPIVKALMSAVEDRGVPTKKDFGCGDPHGVSMFPNTLHEDQVRSDAAREWLLPNYQRPNLQVLTGQYVGKVLLSQNGTTPRAVGVEFGTHKGNTHNVYAKHEVLLAAGSAVSPTILEYSGIGMKSILEPLGIDTVVDLPVGLNLQDQTTATVRSRITSAGAGQGQAAWFATFNETFGDYFEKAHELLNTKLEQWAEEAVARGGFHNTTALLIQYENYRDWIVNHNVAYSELFLDTAGVASFDVWDLLPFTRGYVHILDKDPYLHHFAYDPQYFLNELDLLGQAAATQLARNISNSGAMQTYFAGETIPGDNLAYDADLSAWTEYIPYHFRPNYHGVGTCSMMPKEMGGVVDNAARVYGVQGLRVIDGSIPPTQMSSHVMTVFYAMALKISDAILEDY

SEQ ID NO: 1823 - protein, 576 aa, Aspergillus niger
IEASLLKDPKEVAGRTYDYIIAGGGLTGLTVAARLTENPNITVLVIESGSYESDRGPIIEDLNAYGDIFGSSVDHAYETVELATNNQTALIRSGNGLGGSTLINGGTWTRPHKAQVDSWETVFGNEGWNWDSVAAYSLQAERARAPNAKQIAAGHYFNASCHGINGTVHAGPRDTGDDYSPIVKALMSAVEDRGVPTKKDLGCGDPHGVSMFPNTLHEDQVRSDAAREWLLPNYQRPNLQVLTGQYVGKVLLSQNATTPRAVGVEFGTHKGNTHNVYAKHEVLLAAGSAVSPTILEYSGIGMKSILEPLGIDTVVDLPVGLNLQDQTTSTVRSRITPAGAGQGQAAWFATFNETFGDYTEKAHELLNTKLEQWAEEAVARGGFHNTTALLIQYENYRDWIVKDNVAYSELFLDTAGVASFDVWDLLPFTRGYVHILDKDPYLRHFAYDPQYFLNELDLLGQAAATQLARNISNSGAMQTYFAGETIPGDNLAYDADLSAWVEYIPENFRPNYHGVGTCSMMPKEMGGVVDNAARVYGVQGLRVIDGSIPPTQLSSHVMTVFYAMALKIADAVLADY

SEQ ID NO: 1824 - protein, 576 aa, Aspergillus niger
IEASLLKDPKEVAGRTYDYIIAGGGLTGLTVAARLTENPNITVLVIESGSYESDRGPIIEDLNAYGDIFGSSVDHAYETVELATNNRTALIRSGNGLGGSTLINGGTWTRPHKAQVDSWETVFGNEGWNWDSVAAYSLQAERARAPNAKQIAAGHYFNASCHGLNGTVHAGPRDTGDDYSPIVKALMSAVEDRGVPTKKDLGCGDPHGVSMFPNTLHEDQVRSDAAREWLLPNYQRPNLQVLTGQYVGKVLLSQNATTPRAVGVEFGTHKGNTHNVYAKHEVLLAAGSAVSPTILEYSGIGMKSILEPLGIDTVVDLPVGLNLQDQTTSTVRSRITSAGAGQGQAAWFATFNETFGDYTEKAHELLNTKLEQWAEEAVARGGFHNTTALLIQYENYRDWIVKDNVAYSELFLDTAGVASFDVWDLLPFTRGYVHILDKDPYLRHFAYDPQYFLNELDLLGQAAATQLARNISNSGAMQTYFAGETIPGDNLAYDADLRAWVEYIPENFRPNYHGVGTCSMMPKEMGGVVDNAARVYGVQGLRVIDGSIPPTQMSSHVMTVFYAMALKIADAVLADY

SEQ ID NO: 1825 - protein, 576 aa, Aspergillus niger
IEASLLKDPKEVAGRTYDYIIAGGGLTGLTVAARLTENPNITVLVIESGSYESDRGPIIEDLNAYGDIFGSSVDHAYETVELATNNQTALIRSGNGLGGSTLINGGTWTRPHKAQVDSWETVFGNEGWNWDSVAAYSLQAERARAPNAKQIAAGHYFNASCHGINGTVHAGPRDTGDDYSPIVKALMSAVEDRGVPTKKDLGCGDPHGVSMFPNTLHEDQVRSDAAREWLLPNYQRPNLQVLTGQYVGKVLLSQNATTPRAVGVEFGTHKGNTHNVYAKHEVLLAAGSAVSPTILEYSGIGMKSILEPLGIDTVVDLPVGLNLQDQTTSTVRSRITPAGAGQGQAAWFATFNETFGDYAEKAHELLNTKLEQWAEEAVARGGFHNTTALLIQYENYRDWIVKDNVAYSELFLDTAGVASFDVWDLLPFTRGYVHILDKDPYLRHFAYDPQYFLNELDLLGQAAATQLARNISNSGAMQTYFAGETIPGDNLAYDADLRAWVEYIPENFRPNYHGVGTCSMMPKEMGGVVDNAARVYGVQGLRVIDGSIPPTQMSSHVMTVFYAMALKIADAILADY

SEQ ID NO: 1826 - protein, 576 aa, Aspergillus niger
IEASLLTDPKDVSGRTVDYIIAGGGLTGLTTAARLTENPNISVLVIESGSYESDRGPIIEDLNYYGDIFGSSVDHAYETVELATNNQTALIRSGNGLGGSTLVNGGTWTRPHKAQVDSWETVFGNEGWNWDNVAAYSLQAERARAPNAKQIAAGHYFNASCHGVNGTVHAGPRDTGDDYSPIVKALMSAVEDRGVPTKKDFGCGDPHGVSMFPNTLHEDQVRSDAAREWLLPNYQRPNLQVLTGQYVGKVLLSQNGTTPRAVGVEFGTHKGNTHNVYAKHEVLLAAGSAVSPTILEYSGIGMKSILEPLGIDTVVDLPVGLNLQDQTTATVRSRITSAGAGQGQAAWFATFNETFGDYSEKAHELLNTKLEQWAEEAVARGGFHNTTALLIQYENYRDWIVNHNVAYSELFLDTAGVASFDVWDLLPFTRGYVHILDKDPYLHHFAYDPQYFLNELDLLGQAAATQLARNISNSGAMQTYFAGETIPGDNLAYDADLSAWTEYIPYHFRPNYHGVGTCSMMPKEMGGVVDNAARVYGVQGLRVIDGSIPPTQMSSHVMTVFYAMALKISDAILEDY

SEQ ID NO: 1827 - protein, 576 aa, Aspergillus niger
IEASLLKDPKEVAGRTYDYIIAGGGLTGLTVAARLTENPNITVLVIESGSYESDRGPIIEDLNAYGDIFGSSVDHAYETVELATNNRTALIRSGNGLGGSTLINGGTWTRPHKAQVDSWETVFGNEGWNWDSVAAYSLQAERARAPNAKQIAAGHYFNASCHGLNGTVHAGPRDTGDDYSPIVKALMSAVEDRGVPTKKDLGCGDPHGVSMFPNTLHEDQVRSDAAREWLLPNYQRPNLQVLTGQYVGKVLLSQNATTPRAVGVEFGTHKGNTHNVYAKHEVLLAAGSAVSPTILEYSGIGMKSILEPLGIDTVVDLPVGLNLQDQTTSTVRSRITSAGAGQGQAAWFATFNETFGDYAEKAHELLNTKLEQWAEEAVARGGFHNTTALLIQYENYRDWIVKDNVAYSELFLDTAGVASFDVWDLLPFTRGYVHILDKDPYLRHFAYDPQYFLNELDLLGQAAATQLARNISNSGAMQTYFAGETIPGDNLAYDADLSAWVEYIPENFRPNYHGVGTCSMMPKEMGGVVDNAARVYGVQGLRVIDGSIPPTQMSSHVMTVFYAMALKIADAILADY

SEQ ID NO: 1828 - protein, 576 aa, Aspergillus niger
IEASLLKDPKEVAGRTYDYIIAGGGLTGLTVAARLTENPNITVLVIESGSYESDRGPIIEDLNAYGDIFGSSVDHAYETVELATNNQTALIRSGNGLGGSTLINGGTWTRPHKAQVDSWETVFGNEGWNWDSVAAYSLQAERARAPNAKQIAAGHYFNASCHGINGTVHAGPRDTGDDYSPIVKALMSAVEDRGVPTKKDLGCGDPHGVSMFPNTLHEDQVRSDAAREWLLPNYQRPNLQVLTGQYVGKVLLSQNATTPRAVGVEFGTHKGNTHNVYAKHEVLLAAGSAVSPTILEYSGIGMKSILEPLGIDTVVDLPVGLNLQDQTTSTVRSRITSAGAGQGQAAWFATFNETFGDYAEKAHELLNTKLEQWAEEAVARGGFHNTTALLIQYENYRDWIVKDNVAYSELFLDTAGVASFDVWDLLPFTRGYVHILDKDPYLRHFAYDPQYFLNELDLLGQAAATQLARNISNSGAMQTYFAGETIPGDNLAYDADLSAWVEYIPENFRPNYHGVGTCSMMPKEMGGVVDNAARVYGVQGLRVIDGSIPPTQLSSHVMTVFYAMALKIADAVLADY

SEQ ID NO: 1829 - protein, 576 aa, Aspergillus niger
IEASLLKDPKEVAGRTYDYIIAGGGLTGLTVAARLTENPNITVLVIESGSYESDRGPIIEDLNAYGDIFGSSVDHAYETVELATNNRTALIRSGNGLGGSTLINGGTWTRPHKAQVDSWETVFGNEGWNWDSVAAYSLQAERARAPNAKQIAAGHYFNASCHGLNGTVHAGPRDTGDDYSPIVKALMSAVEDRGVPTKKDLGCGDPHGVSMFPNTLHEDQVRSDAAREWLLPNYQRPNLQVLTGQYVGKVLLSQNATTPRAVGVEFGTHKGNTHNVYAKHEVLLAAGSAVSPTILEYSGIGMKSILEPLGIDTVVDLPVGLNLQDQTTSTVRSRITPAGAGQGQAAWFATFNETFGDYTEKAHELLNTKLEQWAEEAVARGGFHNTTALLIQYENYRDWIVKDNVAYSELFLDTAGVASFDVWDLLPFTRGYVHILDKDPYLRHFAYDPQYFLNELDLLGQAAATQLARNISNSGAMQTYFAGETIPGDNLAYDADLSAWVEYIPENFRPNYHGVGTCSMMPKEMGGVVDNAARVYGVQGLRVIDGSIPPTQMSSHVMTVFYAMALKIADAILADY

SEQ ID NO: 1830 - protein, 576 aa, Aspergillus niger
IEASLLTDPNDVSGRTVDYIIAGGGLTGLTTAARLTENPNISVLVIESGSYESDRGPIIEDLNAYGDIFGSSVDHAYETVELATNNQTALIRSGNGLGGSTLVNGGTWTRPHKAQVDSWETVFGNEGWNWDNVAAYSLQAERARAPNAKQIAAGHYFNASCHGTNGTVHAGPRDTGDDYSPIVKALMSAVEDRGVPTQKDFGCGDPHGVSMFPNTLHEDQVRSDAAREWLLPNYQRPNLQVLTGQYVGKVLLSQNGTTPRAVGVEFGTHKGNTHNVYAKHEVLLAAGSAVSPTILEYSGIGMKSILEPLGIDTVVDLPVGLNLQDQTTATVRSRITSAGAGQGQAAWFATFNETFGDYSEKAHELLNTKLEQWAEEAVARGGFHNTTALLIQYENYRDWIVNHNVAYSELFLDTAGVASFDVWDLLPFTRGYVHILDKDPYLHHFAYDPQYFLNELDLLGQAAATQLARNISNSGAMQTYFAGETIPGDNLAYDADLSAWTEYIPYHFRPNYHGVGTCSMMPKEMGGVVDNAARVYGVQGLRVIDGSIPPTQMSSHVMTVFYAMALKISDAILEDY

SEQ ID NO: 1831 - protein, 576 aa, Aspergillus niger
IEASLLKDPKEVAGRTYDYIIAGGGLTGLTVAAKLTENPNITVLVIESGSYESDRGPIIEDLNAYGDIFGSSVDHAYETVELATNNRTALIRSGNGLGGSTLINGGTWTRPHKAQVDSWETVFGNEGWNWDSVAAYSLQAERARAPNAKQIAAGHYFNPSCHGLNGTVHAGPRDTGDDYSPIVKALMSAVEDRGVPTKKDLGCGDPHGVSMFPNTLHEDQVRSDAAREWLLPNYQRPNLQVLTGQYVGKVLLSQNATTPRAVGVEFGTHKGNTHNVYAKHEVLLAAGSAVSPTILEYSGIGMKSILEPLGIDTVVDLPVGLNLQDQTTSTVRSRITSAGAGQGQAAWFATFNETFGDYAEKAHELLNTKLEQWAEEAVARGGFHNTTALLIQYENYRDWIVKDNVAYSELFLDTAGVASFDVWDLLPFTRGYVHILDKDPYLRHFAYDPQYFLNELDLLGQAAATQLARNISNSGAMQTYFAGETIPGDNLAYDADLSAWVEYIPENFRPNYHGVGTCSMMPKEMGGVVDNAARVYGVQGLRVIDGSIPPTQMSSHVMTVFYAMALKIADAILADY

SEQ ID NO: 1832 - protein, 576 aa, Aspergillus niger
IEASLLKDPKEVAGRTYDYIIAGGGLTGLTVAARLTENPNITVLVIESGSYESDRGPIIEDLNAYGDIFGSSVDHAYETVELATNNQTALIRSGNGLGGSTLINGGTWTRPHKAQVDSWETVFGNEGWNWDSVAAYSLQAERARAPNAKQIAAGHYFNASCHGINGTVHAGPRDTGDDYSPIVKALMSAVEDRGVPTKKDLGCGDPHGVSMFPNTLHEDQVRSDAAREWLLPNYQRPNLQVLTGQYVGKVLLSQNATTPRAVGVEFGTHKGNTHNVYAKHEVLLAAGSAVSPTILEYSGIGMKSILEPLGIDTVVDLPVGLNLQDQTTSTVRSRITPAGAGQGQAAWFATFNETFGDYAEKAHELLNTKLEQWAEEAVARGGFHNTTALLIQYENYRDWIVKDNVAYSELFLDTAGVASFDVWDLLPFTRGYVHILDKDPYLRHFAYDPQYFLNELDLLGQAAATQLARNISNSGAMQTYFAGETIPGDNLAYDADLSAWVEYIPENFRPNYHGVGTCSMMPKEMGGVVDNAARVYGVQGLRVIDGSIPPTQMSSHVMTVFYAMALKIADAILADY

SEQ ID NO: 1833 - protein, 576 aa, Aspergillus niger
IEASLLKDPKEVAGRTYDYIIAGGGLTGLTVAARLTENPNITVLVIESGSYESDRGPIIEDLNAYGDIFGSSVDHAYETVELATNNQTALIRSGNGLGGSTLINGGTWTRPHKAQVDSWETVFGNEGWNWDSVAAYSLQAERARAPNAKQIAAGHYFNASCHGINGTVHAGPRDTGDDYSPIVKALMSAVEDRGVPTKKDLGCGDPHGVSMFPNTLHEDQVRSDAAREWLLPNYQRPNLQVLTGQYVGKVLLSQNATTPRAVGVEFGTHKGNTHNVYAKHEVLLAAGSAVSPTILEYSGIGMKSILEPLGIDTVVDLPVGLNLQDQTTSTVRSRITPAGAGQGQAAWFATFNETFGDYAEKAHELLNTKLEQWAEEAVARGGFHNTTALLIQYENYRDWIVKDNVAYSELFLDTAGVASFDVWDLLPFTRGYVHILDKDPYLRHFAYDPQYFLNELDLLGQAAATQLARNISNSGAMQTYFAGETIPGDNLAYDADLSAWVEYIPENFRPNYHGVGTCSMMPKEMGGVVDNAARVYGVQGLRVIDGSIPPTQLSSHVMTVFYAMALKIADAILADY

SEQ ID NO: 1834 - protein, 576 aa, Aspergillus niger
IEASLLKDPKEVAGRTYDYIIAGGGLTGLTVAAKLTENPNITVLVIESGSYESDRGPIIEDLNAYGDIFGSSVDHAYETVELPTNNRTALIRSGNGLGGSTLINGGTWTRPHKAQVDSWETVFGNEGWNWDSVAAYSLQAERARAPNAKQIAAGHYFNPSCHGLNGTVHAGPRDTGDDYSPIVKALMSAVEDRGVPTKKDLGCGDPHGVSMFPNTLHEDQVRSDAAREWLLPNYQRPNLQVLTGQYVGKVLLSQNATTPRAVGVEFGTHKGNTHNVYAKHEVLLAAGSAVSPTILEYSGIGMKSILEPLGIDTVVDLPVGLNLQDQTTSTVRSRITPAGAGQGQAAWFATFNETFGDYAEKAHELLNTKLEQWAEEAVARGGFHNTTALLIQYENYRDWIVKDNVAYSELFLDTAGVASFDVWDLLPFTRGYVHILDKDPYLRHFAYDPQYFLNELDLLGQAAATQLARNISNSGAMQTYFAGETIPGDNLAYDADLSAWVEYIPENFRPNYHGVGTCSMMPKEMGGVVDNAARVYGVQGLRVIDGSIPPTQMSSHVMTVFYAMALKIADAILADY

SEQ ID NO: 1835 - protein, 576 aa, Aspergillus niger
IEASLLKDPKEVAGRTYDYIIAGGGLTGLTVAARLTENPNITVLVIESGSYESDRGPIIEDLNAYGDIFGSSVDHAYETVELPTNNRTALIRSGNGLGGSTLINGGTWTRPHKAQVDSWETVFGNEGWNWDSVAAYSLQAERARAPNAKQIAAGHYFNASCHGLNGTVHAGPRDTGDDYSPIVKALMSAVEDRGVPTKKDLGCGDPHGVSMFPNTLHEDQVRSDAAREWLLPNYQRPNLQVLTGQYVGKVLLSQNATTPRAVGVEFGTHKGNTHNVYAKHEVLLAAGSAVSPTILEYSGIGMKSILEPLGIDTVVDLPVGLNLQDQTTSTVRSRITPAGAGQGQAAWFATFNETFGDYAEKAHELLNTKLEQWAEEAVARGGFHNTTALLIQYENYRDWIVKDNVAYSELFLDTAGVASFDVWDLLPFTRGYVHILDKDPYLRHFAYDPQYFLNELDLLGQAAATQLARNISNSGAMQTYFAGETIPGDNLAYDADLRAWVEYIPENFRPNYHGVGTCSMMPKEMGGVVDNAARVYGVQGLRVIDGSIPPTQLSSHVMTVFYAMALKIADAILADY

SEQ ID NO: 1836 - protein, 576 aa, Aspergillus niger
IEASLLTDPKEVAGRTVDYIIAGGGLTGLTTAARLTENPDITVLVIESGSYESDRGPIIEDLNAYGDIFGSSVDHAYETVELFTNNQTALIRSGNGLGGSTLVNGGTWTRPHKAQVDSWETVFGNEGWNWDSVAAYSLQAERARAPNAKQIAAGHYFNASCHGINGTVHAGPRDTGDDYSPIVKALMSAVEDRGVPTKKDLGCGDPHGVSMFPNTLHEDQVRSDAAREWLLPNYQRPNLQVLTGQYVGKVLLSQNATTPRAVGVEFGTHKGNTHNVYAKHEVLLAAGSAVSPTILEYSGIGMKSILEPLGIDTVVDLPVGLNLQDQTTSTVRSRITSAGAGQGQAAWFATFNETFGDYAEKAHELLNTKLEQWAEEAVARGGFHNTTALLIQYENYRDWIVKDNVAYSELFLDTAGVASFDVWDLLPFTRGYVHILDKDPYLRHFAYDPQYFLNELDLLGQAAATQLARNISNSGAMQTYFAGETIPGDNLAYDADLSAWVEYIPYNFRPNYHGVGTCSMMPKEMGGVVDNAARVYGVQGLRVIDGSIPPTQMSSHVMTVFYAMALKIADAILADY

SEQ ID NO: 1837 - protein, 576 aa, Aspergillus niger
IEASLLTDPXDVSGRTVDYIIAGGGLTGLTTAARLTENPNISVLVIESGSYESDRGPIIEDLNAYGDIFGSSVDHAYETVELATNNQTALIRSGNGLGGSTLVNGGTWTRPHKAQVDSWETVFGNEGWNWDNVAAYSLQAERARAPNAKQIAAGHYFNASCHGVNGTVHAGPRDTGDDYSPIVKALMSAVEDRGVPTKKDFGCGDPHGVSMFPNTLHEDQVRSDAAREWLLPNYQRPNLQVLTGQYVGKVLLSQNGTTPRAVGVEFGTHKGNTHNVYAKHEVLLAAGSAVSPTILEYSGIGMKSILEPLGIDTVVDLPVGLNLQDQTTATVRSRITSAGAGQGQAAWFATFNETFGDYSEKAHELLNTKLEQWAEEAVARGGFHNTTALLIQYENYRDWIVNHNVAYSELFLDTAGVASFDVWDLLPFTRGYVHILDKDPYLHHFAYDPQYFLNELDLLGQAAATQLARNISNSGAMQTYFAGETIPGDNLAYDADLSAWTEYIPYHFRPNYHGVGTCSMMPKEMGGVVDNAARVYGVQGLRVIDGSIPPTQMSSHVMTVFYAMALKISDAILEDY

SEQ ID NO: 1838 - protein, 576 aa, Aspergillus niger
IEASLLKDPKEVAGRTYDYIIAGGGLTGLTVAARLTENPNITVLVIESGSYESDRGPIIEDLNAYGDIFGSSVDHAYETVELPTNNRTALIRSGNGLGGSTLINGGTWTRPHKAQVDSWETVFGNEGWNWDSVAAYSLQAERARAPNAKQIAAGHYFNASCHGLNGTVHAGPRDTGDDYSPIVKALMSAVEDRGVPTKKDLGCGDPHGVSMFPNTLHEDQVRSDAAREWLLPNYQRPNLQVLTGQYVGKVLLSQNATTPRAVGVEFGTHKGNTHNVYAKHEVLLAAGSAVSPTILEYSGIGMKSILEPLGIDTVVDLPVGLNLQDQTTSTVRSRITPAGAGQGQAAWFATFNETFGDYAEKAHELLNTKLEQWAEEAVARGGFHNTTALLIQYENYRDWIVKDNVAYSELFLDTAGVASFDVWDLLPFTRGYVHILDKDPYLRHFAYDPQYFLNELDLLGQAAATQLARNISNSGAMQTYFAGETIPGDNLAYDADLSAWVEYIPENFRPNYHGVGTCSMMPKEMGGVVDNAARVYGVQGLRVIDGSIPPTQMSSHVMTVFYAMALKIADAILADY

SEQ ID NO: 1839 - protein, 576 aa, Aspergillus niger
IEASLLKDPKEVAGRTYDYIIAGGGLTGLTVAARLTENPNITVLVIESGSYESDRGPIIEDLNAYGDIFGSSVDHAYETVELPTNNQTALIRSGNGLGGSTLINGGTWTRPHKAQVDSWETVFGNEGWNWDSVAAYSLQAERARAPNAKQIAAGHYFNASCHGINGTVHAGPRDTGDDYSPIVKALMSAVEDRGVPTKKDLGCGDPHGVSMFPNTLHEDQVRSDAAREWLLPNYQRPNLQVLTGQYVGKVLLSQNATTPRAVGVEFGTHKGNTHNVYAKHEVLLAAGSAVSPTILEYSGIGMKSILEPLGIDTVVDLPVGLNLQDQTTSTVRSRITPAGAGQGQAAWFATFNETFGDYAEKAHELLNTKLEQWAEEAVARGGFHNTTALLIQYENYRDWIVKDNVAYSELFLDTAGVASFDVWDLLPFTRGYVHILDKDPYLRHFAYDPQYFLNELDLLGQAAATQLARNISNSGAMQTYFAGETIPGDNLAYDADLSAWVEYIPENFRPNYHGVGTCSMMPKEMGGVVDNAARVYGVQGLRVIDGSIPPTQLSSHVMTVFYAMALKIADAVLADY

SEQ ID NO: 1840 - protein, 576 aa, Aspergillus niger
IEASLLTDPKEVAGRTVDYIIAGGGLTGLTTAARLTENPDITVLVIESGSYESDRGPIIEDLNAYGDIFGSSVDHAYETVELATNNQTALIRSGNGLGGSTLVNGGTWTRPHKAQVDSWETVFGNEGWNWDSVAAYSLQAERARAPNAKQIAAGHYFNASCHGINGTVHAGPRDTGDDYSPIVKALMSAVEDRGVPTKKDLGCGDPHGVSMFPNTLHEDQVRSDAAREWLLPNYQRPNLQVLTGQYVGKVLLSQNATTPRAIGVEFGTHKGNTHNVYAKHEVLLAAGSAVSPTILEYSGIGMKSILEPLGIDTVVDLPVGLNLQDQTTSTVRSRITSAGAGQGQAAWFATFNETFGDYAEKAHELLNTKLEQWAEEAVARGGFHNTTALLIQYENYRDWIVKDNVAYSELFLDTAGVASFDVWDLLPFTRGYVHILDKDPYLRHFAYDPQYFLNELDLLGQAAATQLARNISNSGAMQTYFAGETIPGDNLAYDADLSAWVEYIPYNFRPNYHGVGTCSMMPKEMGGVVDNAARVYGVQGLRVIDGSIPPTQMSSHVMTVFYAMALKIADAILADY

SEQ ID NO: 1841 - protein, 576 aa, Aspergillus niger
IEASLLTDPKDVSGRTVDYIIAGGGLVGLTTAARLTENPNISVLVIESGSYESDRGPIIEDLNAYGDIFGSSVDHAYETVELATNNQTALVRSGNGLGGSTLVNGGTWTRPHKAQVDSWETVFGNEGWNWDNVAAYSLQAERARAPNAKQIAAGHYFNASCHGVNGTVHAGPRDTGDDYSPIVKALMSAVEDRGVPTKKDFGCGDPHGVSMFPNTLHEDQVRSDAAREWLLPNYQRPNLQVLTGQYVGKVLLSQNGTTPRAVGVEFGTHKGNTHNVYAKHEVLLAAGSAVSPTILEYSGIGMKSILEPLGIDTVVDLPVGLNLQDQTTATVRSRITSAGAGQGQAAWFATFNETFGDYSEKAHELLNTKLEQWAEEAVARGGFHNTTALLIQYENYRDWIVNHNVAYSELFLDTAGVASFDVWDLLPFTRGYVHILDKDPYLHHFAYDPQYFLNELDLLGQAAATQLARNISNSGAMQTYFAGETIPGDNLAYDADLSAWTEYIPYHFRPNYHGVGTCSMMPKEMGGVVDNAAKVYGVQGLRVIDGSIPPTQVSSHVMTVFYAMALKISDAILEDY

SEQ ID NO: 1842 - protein, 576 aa, Aspergillus niger
IEASLLKDPKEVAGRTYDYIIAGGGLTGLTVAARLTENPNITVLVIESGSYESDRGPIIEDLNAYGDIFGSSVDHAYETVELATNNRTALIRSGNGLGGSTLINGGTWTRPHKAQVDSWETVFGNEGWNWDSVAAYSLQAERARAPNAKQIAAGHYFNASCHGLNGTVHAGPRDTGDDYSPIVKALMSAVEDRGVPTKKDLGCGDPHGVSMFPNTLHEDQVRSDAAREWLLPNYQRPNLQVLTGQYVGKVLLSQNATTPRAVGVEFGTHKGNTHNVYAKHEVLLAAGSAVSPTILEYSGIGMKSILEPLGIDTVVDLPVGLNLQDQTTSTVRSRITSAGAGQGQAAWFATFNETFGDYTEKAHELLNTKLEQWAEEAVARGGFHNTTALLIQYENYRDWIVKDNVAYSELFLDTAGVASFDVWDLLPFTRGYVHILDKDPYLRHFAYDPQYFLNELDLLGQAAATQLARNISNSGAMQTYFAGETIPGDNLAYDADLSAWVEYIPENFRPNYHGVGTCSMMPKEMGGVVDNAARVYGVQGLRVIDGSIPPTQLSSHVMTVFYAMALKIADAVLADY

SEQ ID NO: 1843 - protein, 576 aa, Aspergillus niger
IEASLLKDPKEVAGRTYDYIIAGGGLTGLTVAARLTENPNITVLVIESGSYESDRGPIIEDLNAYGDIFGSSVDHAYETVELATNNQTALIRSGNGLGGSTLINGGTWTRPHKAQVDSWETVFGNEGWNWDSVAAYSLQAERARAPNAKQIAAGHYFNASCHGINGTVHAGPRDTGDDYSPIVKALMSAVEDRGVPTKKDLGCGDPHGVSMFPNTLHPDQVRSDAAREWLLPNYQRPNLQVLTGQYVGKVLLSQNATTPRAVGVEFGTHKGNTHNVYAKHEVLLAAGSAVSPTILEYSGIGMKSILEPLGIDTVVDLPVGLNLQDQTTSTVRSRITPAGAGQGQAAWFATFNETFGDYAEKAHELLNTKLEQWAEEAVARGGFHNTTALLIQYENYRDWIVKDNVAYSELFLDTAGVASFDVWDLLPFTRGYVHILDKDPYLRHFAYDPQYFLNELDLLGQAAATQLARNISNSGAMQTYFAGETIPGDNLAYDADLSAWVEYIPENFRPNYHGVGTCSMMPKEMGGVVDNAARVYGVQGLRVIDGSIPPTQMSSHVMTVFYAMALKIADAVLADY

SEQ ID NO: 1844 - protein, 576 aa, Aspergillus niger
IEASLLKDPKEVAGRTYDYIIAGGGLTGLTVAARLTENPNITVLVIESGSYESDRGPIIEDLNAYGDIFGSSVDHAYETVELATNNQTALIRSGNGLGGSTLINGGTWTRPHKAQVDSWETVFGNEGWNWDSVAAYSLQAERARAPNAKQIAAGHYFNPSCHGINGTVHAGPRDTGDDYSPIVKALMSAVEDRGVPTKKDLGCGDPHGVSMFPNTLHEDQVRSDAAREWLLPNYQRPNLQVLTGRYVGKVLLSQNATTPRAVGVEFGTHKGNTHNVYAKHEVLLAAGSAVSPTILEYSGIGMKSILEPLGIDTVVDLPVGLNLQDQTTSTVRSRITPAGAGQGQAAWFATFNETFGDYTEKAHELLNTKLEQWAEEAVARGGFHNTTALLIQYENYRDWIVKDNVAYSELFLDTAGVASFDVWDLLPFTRGYVHILDKDPYLRHFAYDPQYFLNELDLLGQAAATQLARNISNSGAMQTYFAGETIPGDNLAYDADLRAWVEYIPENFRPNYHGVGTCSMMPKEMGGVVDNAARVYGVQGLRVIDGSIPPTQMSSHVMTVFYAMALKIADAVLADY

SEQ ID NO: 1845 - protein, 576 aa, Aspergillus niger
IEASLLTDPKDVSGRTVDYIIAGGGLTGLTTAARLTENPNISVLVIESGSYESDRGPIIEDLNAYGDIFGSSVDHAYETVELATNNQTALIRSGNGLGGSTLVNGGTWTRPHKAQVDSWETVFGNEGWNWDNVAAYSLQAERARAPNAKQIAAGHYFNTSCHGVNGTVHAGPRDTGDDYSPIVKALMSAVEDRGVPTKKDFGCGDPHGVSMFPNTLHEDQVRSDAAREWLLPNYQRPNLQVLTGQYVGKVLLSQNGTTPRAVGVEFGTHKGNTHNVYAKHEVLLAAGSAVSPTILEYSGIGMKSILEPLGIDTVVDLPVGLNLQDQTTATVRSRITSAGAGQGQAAWFATFNETFGDYSEKAHELLNTKLEQWAEEAVARGGFHNTTALLIQYENYRDWIVNHNVAYSELFLDTAGVASFDVWDLLPFTRGYVHILDKDPYLHHFAYDPQYFLNELDLLGQAAATQLARNISNSGAMQTYFAGETIPGDNLAYDADLSAWTEYIPYHFRPNYHGVGTCSMMPKEMGGVVDNAARVYGVQGLRVIDGSIPPTQMSSHVMTVFYAMALKISDAILEDY

SEQ ID NO: 1846 - protein, 576 aa, Aspergillus niger
IEASLLTDPKDVSGRTVDYIIAGGGLTGLTTAARLTENPNISVLVIESGSYESDRGPIIEDLNAYGDIFGSSVDHAYETVELATNNQTALIRSGNGLGGSTLVNGGTWTRPHKAQVDSWETVFGNEGWNWDNVAAYSLQAERARAPNAKQIAAGHYFNASCHGVNGTVHAGPRDTGDDYSPIVKALMSAVEDRGVPTKKDFGCGDPHGVSMFPNTLHEDQVRSDAAREWLLPNYQRPNLQVLTGQYVGKVLLSQNGTTPRAVGVEFGTHKGNTHNVYAKHEVLLAAGSAVSPTILEYSGIGMKSILEPLGIDTVVDLPVGLNLQDQTTATVRSRITSAGAGQGQAAWFATFNETFGDYSEKAHELLNTKLEQWAEEAVARGGFHNTTALLIQYENYRDWIVNHNVAYSELFLDTAGVASFDVWDLLPFTRGYVHILDKDPYLHHFAYDPQYFLNELDLLGQAAATQLARNISNSGAMQTYFAGETIPGDNLAYDADLSAWTEYIPYHFRPNYHGVGTCSMMPKEMGGVVDNAARVYGVQGLRVIDGSIPPTQMSSHVMTVFYAMALKISDAILEDY

SEQ ID NO: 1847 - protein, 576 aa, Aspergillus niger
IEASLLKDPKEVAGRTYDYIIAGGGLTGLTVAARLTENPNITVLVIESGSYESDRGPIIEDLNAYGDIFGSSVDHAYETVELATNNRTALIRSGNGLGGSTLINGGTWTRPHKAQVDSWETVFGNEGWNWDSVAAYSLQAERARAPNAKQIAAGHYFNPSCHGLNGTVHAGPRDTGDDYSPIVKALMSAVEDRGVPTKKDLGCGDPHGVSMFPNTLHEDQVRSDAAREWLLPNYQRPNLQVLTGRYVGKVLLSQNATTPRAVGVEFGTHKGNTHNVYAKHEVLLAAGSAVSPTILEYSGIGMKSILEPLGIDTVVDLPVGLNLQDQTTSTVRSRITSAGAGQGQAAWFATFNETFGDYAEKAHELLNTKLEQWAEEAVARGGFHNTTALLIQYENYRDWIVKDNVAYSELFLDTAGVASFDVWDLLPFTRGYVHILDKDPYLRHFAYDPQYFLNELDLLGQAAATQLARNISNSGAMQTYFAGETIPGDNLAYDADLSAWVEYIPENFRPNYHGVGTCSMMPKEMGGVVDNAARVYGVQGLRVIDGSIPPTQMSSHVMTVFYAMALKIADAILADY

SEQ ID NO: 1848 - protein, 576 aa, Aspergillus niger
IEASLLTDPKEVAGRTVDYIIAGGGLTGLTTAARLTENPDITVLVIESGSYESDRGPIIEDLNAYGDIFGSSVDHAYETVELQTNNQTALIRSGNGLGGSTLVNGGTWTRPHKAQVDSWETVFGNEGWNWDSVAAYSLQAERARAPNAKQIAAGHYFNASCHGINGTVHAGPRDTGDDYSPIVKALMSAVEDRGVPTKKDLGCGDPHGVSMFPNTLHEDQVRSDAAREWLLPNYQRPNLQVLTGQYVGKVLLSQNATTPRAVGVEFGTHKGNTHNVYAKHEVLLAAGSAVSPTILEYSGIGMKSILEPLGIDTVVDLPVGLNLQDQTTSTVRSRITSAGAGQGQAAWFATFNETFGDYAEKAHELLNTKLEQWAEEAVARGGFHNTTALLIQYENYRDWIVKDNVAYSELFLDTAGVASFDVWDLLPFTRGYVHILDKDPYLRHFAYDPQYFLNELDLLGQAAATQLARNISNSGAMQTYFAGETIPGDNLAYDADLSAWVEYIPYNFRPNYHGVGTCSMMPKEMGGVVDNAARVYGVQGLRVIDGSIPPTQMSSHVMTVFYAMALKIADAILADY

SEQ ID NO: 1849 - protein, 576 aa, Aspergillus niger
IEASLLKDPKEVAGRTYDYIIAGGGLTGLTVAAKLTENPNITVLVIESGSYESDRGPIIEDLNAYGDIFGSSVDHAYETVELATNNRTALIRSGNGLGGSTLINGGTWTRPHKAQVDSWETVFGNEGWNWDSVAAYSLQAERARAPNAKQIAAGHYFNPSCHGINGTVHAGPRDTGDDYSPIVKALMSAVEDRGVPTKKDLGCGDPHGVSMFPNTLHEDQVRSDAAREWLLPNYQRPNLQVLTGQYVGKVLLSQNATTPRAVGVEFGTHKGNTHNVYAKHEVLLAAGSAVSPTILEYSGIGMKSILEPLGIDTVVDLPVGLNLQDQTTSTVRSRITSAGAGQGQAAWFATFNETFGDYAEKAHELLNTKLEQWAEEAVARGGFHNTTALLIQYENYRDWIVKDNVAYSELFLDTAGVASFDVWDLLPFTRGYVHILDKDPYLRHFAYDPQYFLNELDLLGQAAATQLARNISNSGAMQTYFAGETIPGDNLAYDADLSAWVEYIPENFRPNYHGVGTCSMMPKEMGGVVDNAARVYGVQGLRVIDGSIPPTQMSSHVMTVFYAMALKIADAILADY

SEQ ID NO: 1850 - protein, 576 aa, Aspergillus niger
IEASLLTDPKDVSGRTVDYIIAGGGLTGLTTAARLTENPNISVLVIESGSYESDRGPIIEDLNAYGDIFGSSVDHAYETVELACNNQTALIRSGNGLGGSTLVNGGTWTRPHKAQVDSWETVFGNEGWNWDNVAAYSLQAERARAPNAKQIAAGHYFNASCHGVNGTVHAGPRDTGDDYSPIVKALMSAVEDRGVPTKKDFGCGDPHGVSMFPNTLHEDQVRSDAAREWLLPNYQRPNLQVLTGQYVGKVLLSQNGTTPRAVGVEFGTHKGNTHNVYAKHEVLLAAGSAVSPTILEYSGIGMKSILEPLGIDTVVDLPVGLNLQDQTTATVRSRITSAGAGQGQAAWFATFNETFGDYSEKAHELLNTKLEQWAEEAVARGGFHNTTALLIQYENYRDWIVNHNVAYSELFLDTAGVASFDVWDLLPFTRGYVHILDKDPYLHHFAYDPQYFLNELDLLGQAAATQLARNISNSGAMQTYFAGETIPGDNLAYDADLSAWTEYICYHFRPNYHGVGTCSMMPKEMGGVVDNAARVYGVQGLRVIDGSIPPTQMSSHVMTVFYAMALKISDAILEDY

SEQ ID NO: 1851 - protein, 576 aa, Aspergillus niger
IEASLLKDPKEVAGRTYDYIIAGGGLTGLTVAARLTENPDITVLVIESGSYESDRGPIIEDLNAYGQIFGSSVDHAYETVELATNNRTALIRSGNGLGGSTLINGGNWTRPHKAQVDSWETVFGNEGWNWDSVAAYSLQAERARAPNAKQIAAGHYFNASCHGINGTVHAGPRDTGDDYSPIVKALMSAVEDRGVPTKKDLGCGDPHGVSMFPNTLHEDQVRSDAAREWLLPNYQRPNLQVLTGQYVGKVLLSQNATTPRAVGVEFGTHKGNTHNVYAKHEVLLAAGSAVSPTILEYSGIGMKSILEPLGIDTVVDLPVGLNLQDQTTSTVRSRITSAGAGQGQAAWFATFNETFGDYAEKAHELLNTKLEQWAEEAVARGGFHNTTALLIQYENYRDWIVKDNVAYSELFLDTAGVASFDVWDLLPFTRGYVHILDKDPYLRHFAYDPQYFLNELDLLGQAAATQLARNISNSGAMQTYFAGETIPGDNLAYDADLSAWVEYIPENFRPNYHGVGTCSMMPKEMGGVVDNAARVYGVQGLRVIDGSIPPTQMSSHVMTVFYAMALKIADAILADY

SEQ ID NO: 1852 - protein, 576 aa, Aspergillus niger
IEASLLKDPKEVAGRTYDYIIAGGGLTGLTVAARLTENPNITVLVIESGSYESDRGPIIEDLNAYGDIFGSSVDHAYETVELATNNQTALIRSGNGLGGSTLINGGTWTRPHKAQVDSWETVFGNEGWNWDSVAAYSLQAERARAPNAKQIAAGHYFNASCHGINGTVHAGPRDTGDDYSPIVKALMSAVEDRGVPTKKDLGCGDPHGVSMFPNTLHEDQVRSDAAREWLLPNYQRPNLQVLTGQYVGKVLLSQNATTPRAVGVEFGTHKGNTHNVYAKHEVLLAAGSAVSPTILEYSGIGMKSILEPLGIDTVVDLPVGLNLQDQTTSTVRSRITSAGAGQGQAAWFATFNETFGDYAEKAHELLNTKLEQWAEEAVARGGFHNTTALLIQYENYRDWIVKDNVAYSELFLDTAGVASFDVWDLLPFTRGYVHILDKDPYLRHFAYDPQYFLNELDLLGQAAATQLARNISNSGAMQTYFAGETIPGDNLAYDADLSAWVEYIPENFRPNYHGVGTCSMMPKEMGGVVDNAARVYGVQGLRVIDGSIPPTQMSSHVMTVFYAMALKIADAVLADY

SEQ ID NO: 1853 - protein, 576 aa, Aspergillus niger
IEASLLKDPKEVAGRTYDYIIAGGGLTGLTVAARLTENPNITVLVIESGSYESDRGPIIEDLNAYGDIFGSSVDHAYETVELATNNQTALIRSGNGLGGSTLINGGTWTRPHKAQVDSWETVFGNEGWNWDSVAAYSLQAERARAPNAKQIAAGHYFNASCHGINGTVHAGPRDTGDDYSPIVKALMSAVEDRGVPTKKDLGCGDPHGVSMFPNTLHEDQVRSDAAREWLLPNYQRPNLQVLTGQYVGKVLLSQNATTPRAVGVEFGTHKGNTHNVYAKHEVLLAAGSAVSPTILEYSGIGMKSILEPLGIDTVVDLPVGLNLQDQTTSTVRSRITPAGAGQGQAAWFATFNETFGDYTEKAHELLNTKLEQWAEEAVARGGFHNTTALLIQYENYRDWIVKDNVAYSELFLDTAGVASFDVWDLLPFTRGYVHILDKDPYLRHFAYDPQYFLNELDLLGQAAATQLARNISNSGAMQTYFAGETIPGDNLAYDADLRAWVEYIPENFRPNYHGVGTCSMMPKEMGGVVDNAARVYGVQGLRVIDGSIPPTQLSSHVMTVFYAMALKIADAVLADY

SEQ ID NO: 1854 - protein, 576 aa, Aspergillus niger
IEASLLTDPKDVSGRTVDYIIAGGGLTGLTTAARLTENPNISVLVIESGSYESDRGPIIEDLNAYGDIFGSSVDHAYETVELATNNQTALIRSGNGLGGSTLVNGGTWTRPHKAQVDSWETVFGNEGWNWDNVAAYSLQAERARAPNAKQIAAGHYFNASCHGVNGTVHAGPRDTGDDYSPIVKALMSAVEDRGVPTKKDFGCGDPHGVSMFPNTLHEDQVRSDAAREWLLPNYQRPNLQVLTGQYVGKVLLSQNGTTPRAVGVEFGTHKGNTHNVYAKHEVLLAAGSAVSPTILEYSGIGMKSILEPLGIDTVVDLPVGLNLQDQTTATVRSRITSAGAGQGQAAWFATFNETFGDYSEKAHELLNTKLEQWAEEAVARGGFHNTTALLIQYENYRDWIVNHNVAYSELFLDTAGVASFDVWDLLPFTRGYVHILDKDPYLHHFAYDPQYFLNELDLLGQAAATQLARNISNSGAMQTYFAGETIPGDNLAYDADLSAWTEYIPYHFRPNYHGVGTCSMMPKEMGGVVDNAARVYGVQGLRVIDGSIPPTQLSSHVMTVFYAMALKISDAILEDY

SEQ ID NO: 1855 - protein, 576 aa, Aspergillus niger
IEASLLTDPKDVSGRTVDYIIAGGGLTGLTTAARLTENPNISVLVIESGSYESDRGPIIEDLNAYGDIFGSSVDHAYETVELATNNQTALIRSGNGLGGSTLVNGGTWTRPHKAQVDSWETVFGNEGWNWDNVAAYSLQAERARAPNAKQIAAGHYFNASCHGVNGTVHAGPRDTGDDYSPIVKALMSAVEDRGVPTKKDFGCGDPHGVSMFPNTLHEDQVRSDAAREWLLPNYQRPNLQVLTGQYVGKVLLSQNGTTPRAVGVEFGTHKGNTHNVYAKHEVLLAAGSAVSPTILEYSGIGPKSILEPLGIDTVVDLPVGLNLQDQTTATVRSRITSAGAGQGQAAWFATFNETFGDYSEKAHELLNTKLEQWAEEAVARGGFHNTTALLIQYENYRDWIVNHNVAYSELFLDTAGVASFDVWDLLPFTRGYVHILDKDPYLHHFAYDPQYFLNELDLLGQAAATQLARNISNSGAMQTYFAGETIPGDNLAYDADLSAWTEYIPYHFRPNYHGVGTCSMMPKEMGGVVDNAARVYGVQGLRVIDGSIPPTQMSSHVMTVFYAMALKISDAILEDY

SEQ ID NO: 1856 - protein, 576 aa, Aspergillus niger
IEASLLKDPKEVAGRTYDYIIAGGGLTGLTVAARLTENPDITVLVIESGSYESDRGPIIEDLNAYGQIFGSSVDHAYETVELATNNQTALIRSGNGLGGSTLINGGTWTRPHKAQVDSWETVFGNEGWNWDSVAAYSLQAERARAPNAKQIAAGHYFNASCHGINGTVHAGPRDTGDDYSPIVKALMSAVEDRGVPTKKDLGCGDPHGVSMFPNTLHEDQVRSDAAREWLLPNYQRPNLQVLTGQYVGKVLLSQNATTPRAVGVEFGTHKGNTHNVYAKHEVLLAAGSAVSPTILEYSGIGLKSILEPLGIDTVVDLPVGLNLQDQTTSTVRSRITSAGAGQGQAAWFATFNETFGDYAEKAHELLNTKLEQWAEEAVARGGFHNTTALLIQYENYRDWIVKDNVAYSELFLDTAGVASFDVWDLLPFTRGYVHILDKDPYLRHFAYDPQYFLNELDLLGQAAATQLARNISNSGAMQTYFAGETIPGDNLAYDADLSAWVEYIPENFRPNYHGVGTCSMMPKEMGGVVDNAARVYGVQGLRVIDGSIPPTQMSSHVMTVFYAMALKIADAILADY

SEQ ID NO: 1857 - protein, 576 aa, Aspergillus niger
IEASLLKDPKEVAGRTYDYIIAGGGLTGLTVAARLTENPNITVLVIESGSYESDRGPIIEDLNAYGDIFGSSVDHAYETVELATNNQTALIRSGNGLGGSTLINGGTWTRPHKAQVDSWETVFGNEGWNWDSVAAYSLQAERARAPNAKQIAAGHYFNASCHGINGTVHAGPRDTGDDYSPIVKALMSAVEDRGVPTKKDLGCGDPHGVSMFPNTLHEDQVRSDAAREWLLPNYQRPNLQVLTGQYVGKVLLSQNATTPRAVGVEFGTHKGNTHNVYAKHEVLLAAGSAVSPTILEYSGIGMKSILEPLGIDTVVDLPVGLNLQDQTTSTVRSRITPAGAGQGQAAWFATFNETFGDYTEKAHELLNTKLEQWAEEAVARGGFHNTTALLIQYENYRDWIVKDNVAYSELFLDTAGVASFDVWDLLPFTRGYVHILDKDPYLRHFAYDPQYFLNELDLLGQAAATQLARNISNSGAMQTYFAGETIPGDNLAYDADLRAWVEYIPENFRPNYHGVGTCSMMPKEMGGVVDNAARVYGVQGLRVIDGSIPPTQMSSHVMTVFYAMALKIADAVLADY

SEQ ID NO: 1858 - protein, 576 aa, Aspergillus niger
IEASLLKDPKEVAGRTYDYIIAGGGLTGLTVAARLTENPNITVLVIESGSYESDRGPIIEDLNAYGDIFGSSVDHAYETVELATNNQTALIRSGNGLGGSTLINGGTWTRPHKAQVDSWETVFGNEGWNWDSVAAYSLQAERARAPNAKQIAAGHYFNPSCHGINGTVHAGPRDTGDDYSPIVKALMSAVEDRGVPTKKDLGCGDPHGVSMFPNTLHEDQVRSDAAREWLLPNYQRPNLQVLTGQYVGKVLLSQNATTPRAVGVEFGTHKGNTHNVYAKHEVLLAAGSAVSPTILEYSGIGMKSILEPLGIDTVVDLPVGLNLQDQTTSTVRSRITSAGAGQGQAAWFATFNETFGDYAEKAHELLNTKLEQWAEEAVARGGFHNTTALLIQYENYRDWIVKDNVAYSELFLDTAGVASFDVWDLLPFTRGYVHILDKDPYLRHFAYDPQYFLNELDLLGQAAATQLARNISNSGAMQTYFAGETIPGDNLAYDADLSAWVEYIPENFRPNYHGVGTCSMMPKEMGGVVDNAARVYGVQGLRVIDGSIPPTQLSSHVMTVFYAMALKIADAILADY

SEQ ID NO: 1859 - protein, 576 aa, Aspergillus niger
IEASLLTDPKDVSGRTVDYIIAGGGLVGLTTAARLTENPNISVLVIESGSYESDRGPIIEDLNAYGDIFGSSVDHAYETVELATNNQTALVRSGNGLGGSTLVNGGTWTRPHKAQVDSWETVFGNEGWNWDNVAAYSLQAERARAPNAKQIAAGHYFNTSCHGVNGTVHAGPRDTGDDYSPIVKALMSAVEDRGVPTKKDFGCGDPHGVSMFPNTLHEDQVRSDAAREWLLPNYQRPNLQVLTGQYVGKVLLSQNGTTPRAVGVEFGTHKGNTHNVYAKHEVLLAAGSAVSPTILEYSGIGMKSILEPLGIDTVVDLPVGLNLQDQTTATVRSRITSAGAGQGQAAWFATFNETFGDYSEKAHELLNTKLEQWAEEAVARGGFHNTTALLIQYENYRDWIVNHNVAYSELFLDTAGVASFDVWDLLPFTRGYVHILDKDPYLHHFAYDPQYFLNELDLLGQAAATQLARNISNSGAMQTYFAGETIPGDNLAYDADLSAWTEYIPYHFRPNYHGVGTCSMMPKEMGGVVDNAAKVYGVQGLRVIDGSIPPTQVSSHVMTVFYAMALKISDAILEDY

SEQ ID NO: 1860 - protein, 576 aa, Aspergillus niger
IEASLLTDPKEVAGRTVDYIIAGGGLTGLTTAARLTENPDITVLVIESGSYESDRGPIIEDLNAYGQIFGSSVDHAYETVELATNNQTALIRSGNGLGGSTLVNGGTWTRPHKAQVDSWETVFGNEGWNWDSVAAYSLQAERARAPNAKQIAAGHYFNASCHGINGTVHAGPRDTGDDYSPIVKALMSAVEDRGVPTKKDLGCGDPHGVSMFPNTLHEDQVRSDAAREWLLPNYQRPNLQVLTGQYVGKVLLSQNATTPRAVGVEFGTHKGNTHNVYAKHEVLLAAGSAVSPTILEYSGIGMKSILEPLGIDTVVDLPVGLNLQDQTTSTVRSRITSAGAGQGQAAWFATFNETFGDYAEKAHELLNTKLEQWAEEAVARGGFHNTTALLIQYENYRDWIVKDNVAYSELFLDTAGVASFDVWDLLPFTRGYVHILDKDPYLRHFAYDPQYFLNELDLLGQAAATQLARNISNSGAMQTYFAGETIPGDNLAYDADLSAWVEYIPYNFRPNYHGVGTCSMMPKEMGGVVDNAARVYGVQGLRVIDGSIPPTQMSSHVMTVFYAMALKIADAILADY

SEQ ID NO: 1861 - protein, 576 aa, Aspergillus niger
IEASLLTDPKEVAGRTVDYIICGGGLTGLTVAARLTENPDITVLVIESGSYESDRGPIIEDLNAYGDIFGSSVDHAYETVCLATNNQTALIRSGNGLGGSTLVNGGTWTRPHKAQVDSWETVFGNEGWNWDSVAAYSLQAERARAPNAKQIAAGHYFNASCHGINGTVHAGPRDTGDDYSPIVKALMSAVEDRGVPTKKDLGCGDPHGVSMFPNTLHEDQVRSDAAREWLLPNYQRPNLQVLTGQYCGKVLLSQNATTPRAVGVEFGTHKGNTHNVYAKHEVLLAAGSAVSPTILEYSGIGMKSILEPLGIKTVVDLPVGLNLQDQTTSTVRSRITSAGAGQGQAAWFATFNETFGDYTEKAHELLNTKLEQWAEEAVARGGFHNTTALLIQYENYRDWIVKDNVAYSELFLDTAGEASFDVWDLLPFTRGYVHILDKDPYLRHFAYDPQYFLNELDLLGQAAATQLARNISNSGAMQTYFAGETIPGDNLAYDADLRAWVEYIPYHFRPNYHGVGTCSMMPKEMGGVVDNAARVYGVQGLRVIDGSIPPTQMSSHVMTVFYAMALKIADAVLADY

SEQ ID NO: 1862 - protein, 576 aa, Aspergillus niger
IEASLLTDPKEVAGRTVDYIIAGGGLTGLTTAARLTENPDITVLVIESGSYESDRGPIIEDLNAYGDIFGSSVDHAYETVELATNNQTALIRNGNGLGGSTLVNGGTWTRPHKAQVDSWETVFGNEGWNWDSVAAYSLQAERARAPNAKQIAAGHYFNASCHGINGTVHAGPRDTGDDYSPIVKALMSAVEDRGVPTKKDLGCGDPHGVSMFPNTLHEDQVRSDAAREWLLPNYQRPNLQVLTGQYVGKVLLSQNATTPRAVGVEFGTHKGNTHNVYAKHEVLLAAGSAVSPTILEYSGIGMKSILEPLGIDTVVDLPVGLNLQDQTTSTVRSRITSAGAGQGQAAWFATFNETFGDYAEKAHELLNTKLEQWAEEAVARGGFHNTTALLIQYENYRDWIVKDNVAYSELFLDTAGVASFDVWDLLPFTRGYVHILDKDPYLRHFAYDPQYFLNELDLLGQAAATQLARNISNSGAMQTYFAGETIPGDNLAYDADLSAWVEYIPYNFRPNYHGVGTCSMMPKEMGGVVDNAARVYGVQGLRVIDGSIPPTQMSSHVMTVFYAMALKIADAILADY

SEQ ID NO: 1863 - protein, 576 aa, Aspergillus niger
IEASLLKDPKEVAGRTYDYIIAGGGLTGLTVAARLTENPNITVLVIESGSYESDRGPIIEDLNAYGDIFGSSVDHAYETVELATNNQTALIRSGNGLGGSTLINGGTWTRPHKAQVDSWETVFGNEGWNWDSVAAYSLQAERARAPNAKQIAAGHYFNASCHGINGTVHAGPRDTGDDYSPIVKALMSAVEDRGVPTKKDLGCGDPHGVSMFPNTLHEDQVRSDAAREWLLPNYQRPNLQVLTGQYVGKVLLSQNATTPRAVGVEFGTHKGNTHNVYAKHEVLLAAGSAVSPTILEYSGIGMKSILEPLGIDTVVDLPVGLNLQDQTTSTVRSRITSAGAGQGQAAWFATFNETFGDYAEKAHELLNTKLEQWAEEAVARGGFHNTTALLIQYENYRDWIVKDNVAYSELFLDTAGVASFDVWDLLPFTRGYVHILDKDPYLRHFAYDPQYFLNELDLLGQAAATQLARNISNSGAMQTYFAGETIPGDNLAYDADLRAWVEYIPENFRPNYHGVGTCSMMPKEMGGVVDNAARVYGVQGLRVIDGSIPPTQMSSHVMTVFYAMALKIADAVLADY

SEQ ID NO: 1864 - protein, 576 aa, Aspergillus niger
IEASLLKDPKEVAGRTYDYIIAGGGLTGLTVAARLTENPNITVLVIESGSYESDRGPIIEDLNAYGDIFGSSVDHAYETVELPTNNRTALIRSGNGLGGSTLINGGTWTRPHKAQVDSWETVFGNEGWNWDSVAAYSLQAERARAPNAKQIAAGHYFNPSCHGLNGTVHAGPRDTGDDYSPIVKALMSAVEDRGVPTKKDLGCGDPHGVSMFPNTLHEDQVRSDAAREWLLPNYQRPNLQVLTGQYVGKVLLSQNATTPRAVGVEFGTHKGNTHNVYAKHEVLLAAGSAVSPTILEYSGIGMKSILEPLGIDTVVDLPVGLNLQDQTTSTVRSRITSAGAGQGQAAWFATFNETFGDYAEKAHELLNTKLEQWAEEAVARGGFHNTTALLIQYENYRDWIVKDNVAYSELFLDTAGVASFDVWDLLPFTRGYVHILDKDPYLRHFAYDPQYFLNELDLLGQAAATQLARNISNSGAMQTYFAGETIPGDNLAYDADLSAWVEYIPENFRPNYHGVGTCSMMPKEMGGVVDNAARVYGVQGLRVIDGSIPPTQMSSHVMTVFYAMALKIADAILADY

SEQ ID NO: 1865 - protein, 576 aa, Aspergillus niger
IEASLLTDPKDVSGRTVDYIIAGGGLTGLTTAARLTENPNISVLVIESGSYESDRGPIIEDLNAYGDIFGSSVDHAYETVELATNNQTQLIRSGNGLGGSTLVNGGTWTRPHKAQVDSWETVFGNEGWNWDNVAAYSLQAERARAPNAKQIAAGHYFNASCHGVNGTVHAGPRDTGDDYSPIVKALMSAVEDRGVPTKKDFGCGDPHGVSMFPNTLHEDQVRSDAAREWLLPNYQRPNLQVLTGQYVGKVLLSQNGTTPRAVGVEFGTHKGNTHNVYAKHEVLLAAGSAVSPTILEYSGIGMKSILEPLGIDTVVDLPVGLNLQDQTTATVRSRITSAGAGQGQAAWFATFNETFGDYSEKAHELLNTKLEQWAEEAVARGGFHNTTALLIQYENYRDWIVNHNVAYSELFLDTAGVASFDVWDLLPFTRGYVHILDKDPYLHHFAYDPQYFLNELDLLGQAAATQLARNISNSGAMQTYFAGETIPGDNLAYDADLSAWTEYIPYHFRPNYHGVGTCSMMPKEMGGVVDNAARVYGVQGLRVIDGSIPPTQMSSHVMTVFYAMALKISDAILEDY

SEQ ID NO: 1866 - protein, 576 aa, Aspergillus niger
IEASLLTDPKEVAGRTVDYIIAGGGLTGLTTAARLTENPDITVLVIESGSYESDRGPIIEDLNAYGDIFGSSVDHAYETVELATNNQTALIRFGNGLGGSTLVNGGTWTRPHKAQVDSWETVFGNEGWNWDSVAAYSLQAERARAPNAKQIAAGHYFNASCHGINGTVHAGPRDTGDDYSPIVKALMSAVEDRGVPTKKDLGCGDPHGVSMFPNTLHEDQVRSDAAREWLLPNYQRPNLQVLTGQYVGKVLLSQNATTPRAVGVEFGTHKGNTHNVYAKHEVLLAAGSAVSPTILEYSGIGMKSILEPLGIDTVVDLPVGLNLQDQTTSTVRSRITSAGAGQGQAAWFATFNETFGDYAEKAHELLNTKLEQWAEEAVARGGFHNTTALLIQYENYRDWIVKDNVAYSELFLDTAGVASFDVWDLLPFTRGYVHILDKDPYLRHFAYDPQYFLNELDLLGQAAATQLARNISNSGAMQTYFAGETIPGDNLAYDADLSAWVEYIPYNFRPNYHGVGTCSMMPKEMGGVVDNAARVYGVQGLRVIDGSIPPTQMSSHVMTVFYAMALKIADAILADY

SEQ ID NO: 1867 - protein, 576 aa, Aspergillus niger
IEASLLKDPKEVAGRTYDYIIAGGGLTGLTVAARLTENPNITVLVIESGSYESDRGPIIEDLNAYGDIFGSSVDHAYETVELATNNQTALIRSGNGLGGSTLINGGTWTRPHKAQVDSWETVFGNEGWNWDSVAAYSLQAERARAPNAKQIAAGHYFNPSCHGLNGTVHAGPRDTGDDYSPIVKALMSAVEDRGVPTKKDLGCGDPHGVSMFPNTLHEDQVRSDAAREWLLPNYQRPNLQVLTGRYVGKVLLSQNATTPRAVGVEFGTHKGNTHNVYAKHEVLLAAGSAVSPTILEYSGIGMKSILEPLGIDTVVDLPVGLNLQDQTTSTVRSRITPAGAGQGQAAWFATFNETFGDYAEKAHELLNTKLEQWAEEAVARGGFHNTTALLIQYENYRDWIVKDNVAYSELFLDTAGVASFDVWDLLPFTRGYVHILDKDPYLRHFAYDPQYFLNELDLLGQAAATQLARNISNSGAMQTYFAGETIPGDNLAYDADLRAWVEYIPENFRPNYHGVGTCSMMPKEMGGVVDNAARVYGVQGLRVIDGSIPPTQLSSHVMTVFYAMALKIADAILADY

SEQ ID NO: 1868 - protein, 576 aa, Aspergillus niger
IEASLLKDPKEVAGRTYDYIIAGGGLTGLTVAARLTENPNITVLVIESGSYESDRGPIIEDLNAYGDIFGSSVDHAYETVELATNNQTALIRSGNGLGGSTLINGGTWTRPHKAQVDSWETVFGNEGWNWDSVAAYSLQAERARAPNAKQIAAGHYFNASCHGINGTVHAGPRDTGDDYSPIVKALMSAVEDRGVPTKKDLGCGDPHGVSMFPNTLHEDQVRSDAAREWLLPNYQRPNLQVLTGQYVGKVLLSQNATTPRAVGVEFGTHKGNTHNVYAKHEVLLAAGSAVSPTILEYSGIGMKSILEPLGIDTVVDLPVGLNLQDQTTSTVRSRITSAGAGQGQAAWFATFNETFGDYAEKAHELLNTKLEQWAEEAVARGGFHNTTALLIQYENYRDWIVKDNVAYSELFLDTAGVASFDVWDLLPFTRGYVHILDKDPYLRHFAYDPQYFLNELDLLGQAAATQLARNISNSGAMQTYFAGETIPGDNLAYDADLRAWVEYIPENFRPNYHGVGTCSMMPKEMGGVVDNAARVYGVQGLRVIDGSIPPTQLSSHVMTVFYAMALKIADAVLADY

SEQ ID NO: 1869 - protein, 576 aa, Aspergillus niger
IEASLLKDPKEVAGRTYDYIIAGGGLTGLTVAARLTENPNITVLVIESGSYESDRGPIIEDLNAYGDIFGSSVDHAYETVELATNNQTALIRSGNGLGGSTLINGGTWTRPHKAQVDSWETVFGNEGWNWDSVAAYSLQAERARAPNAKQIAAGHYFNPSCHGINGTVHAGPRDTGDDYSPIVKALMSAVEDRGVPTKKDLGCGDPHGVSMFPNTLHEDQVRSDAAREWLLPNYQRPNLQVLTGQYVGKVLLSQNATTPRAVGVEFGTHKGNTHNVYAKHEVLLAAGSAVSPTILEYSGIGMKSILEPLGIDTVVDLPVGLNLQDQTTSTVRSRITSAGAGQGQAAWFATFNETFGDYAEKAHELLNTKLEQWAEEAVARGGFHNTTALLIQYENYRDWIVKDNVAYSELFLDTAGVASFDVWDLLPFTRGYVHILDKDPYLRHFAYDPQYFLNELDLLGQAAATQLARNISNSGAMQTYFAGETIPGDNLAYDADLSAWVEYIPENFRPNYHGVGTCSMMPKEMGGVVDNAARVYGVQGLRVIDGSIPPTQMSSHVMTVFYAMALKIADAILADY

SEQ ID NO: 1870 - protein, 576 aa, Aspergillus niger
IEASLLKDPKEVAGRTYDYIIAGGGLTGLTVAARLTENPNITVLVIESGSYESDRGPIIEDLNAYGDIFGSSVDHAYETVELATNNQTALIRSGNGLGGSTLINGGTWTRPHKAQVDSWETVFGNEGWNWDSVAAYSLQAERARAPNAKQIAAGHYFNASCHGINGTVHAGPRDTGDDYSPIVKALMSAVEDRGVPTKKDLGCGDPHGVSMFPNTLHPDQVRSDAAREWLLPNYQRPNLQVLTGQYVGKVLLSQNATTPRAVGVEFGTHKGNTHNVYAKHEVLLAAGSAVSPTILEYSGIGMKSILEPLGIDTVVDLPVGLNLQDQTTSTVRSRITPAGAGQGQAAWFATFNETFGDYAEKAHELLNTKLEQWAEEAVARGGFHNTTALLIQYENYRDWIVKDNVAYSELFLDTAGVASFDVWDLLPFTRGYVHILDKDPYLRHFAYDPQYFLNELDLLGQAAATQLARNISNSGAMQTYFAGETIPGDNLAYDADLSAWVEYIPENFRPNYHGVGTCSMMPKEMGGVVDNAARVYGVQGLRVIDGSIPPTQLSSHVMTVFYAMALKIADAVLADY

SEQ ID NO: 1871 - protein, 576 aa, Aspergillus niger
IEASLLTDPKDVSGRTVDYIIAGGGLTGLTTAARLTENPNISVLVIESGSYESDRGPIIEDLNAYGDIFGSSVDHAYETVELATNNQTALIRSGNGLGGSTLVNGGTWTRPHKAQVDSWETVFGNEGWNWDNVAAYSLQAERARAPNAKQIAAGHYFNASCHGVNGTVHAGPRDTGDDYSPIVKALMSAVEDRGVPTKKDFGCGDPHGVSMFPNTLHEDQVRSDAAREWLLPNYQRPNLQVLTGQYVGKVLLSQNGTTPRAVGVEFGTHKGNTHYVYAKHEVLLAAGSAVSPTILEYSGIGMKSILEPLGIDTVVDLPVGLNLQDQTTATVRSRITSAGAGQGQAAWFATFNETFGDYSEKAHELLNTKLEQWAEEAVARGGFHNTTALLIQYENYRDWIVNHNVAYSELFLDTAGVASFDVWDLLPFTRGYVHILDKDPYLHHFAYDPQYFLNELDLLGQAAATQLARNISNSGAMQTYFAGETIPGDNLAYDADLSAWTEYIPYHFRPNYHGVGTCSMMPKEMGGVVDNAARVYGVQGLRVIDGSIPPTQMSSHVMTVFYAMALKISDAILEDY

SEQ ID NO: 1872 - protein, 576 aa, Aspergillus niger
IEASLLTDPKEVAGRTVDYIIAGGGLTGLTTAARLTENPDITVLVIESGSYESDRGPIIEDLNAYGKIFGSSVDHAYETVELATNNQTALIRSGNGLGGSTLVNGGTWTRPHKAQVDSWETVFGNEGWNWDSVAAYSLQAERARAPNAKQIAAGHYFNASCHGINGTVHAGPRDTGDDYSPIVKALMSAVEDRGVPTKKDLGCGDPHGVSMFPNTLHEDQVRSDAAREWLLPNYQRPNLQVLTGQYVGKVLLSQNATTPRAVGVEFGTHKGNTHNVYAKHEVLLAAGSAVSPTILEYSGIGMKSILEPLGIDTVVDLPVGLNLQDQTTSTVRSRITSAGAGQGQAAWFATFNETFGDYAEKAHELLNTKLEQWAEEAVARGGFHNTTALLIQYENYRDWIVKDNVAYSELFLDTAGVASFDVWDLLPFTRGYVHILDKDPYLRHFAYDPQYFLNELDLLGQAAATQLARNISNSGAMQTYFAGETIPGDNLAYDADLSAWVEYIPYNFRPNYHGVGTCSMMPKEMGGVVDNAARVYGVQGLRVIDGSIPPTQMSSHVMTVFYAMALKIADAILADY

SEQ ID NO: 1873 - protein, 576 aa, Aspergillus niger
IEASLLTDPKDVSGRTVDYIIAGGGLTGLTTAARLTENPNISVLVIESGSYESDRGPIIEDLNAYGDIFGSSVDHAYETVELATNNQTALIRSGNGLGGSTLVNGGTWTRPHKAQVDSWETVFGNEGWNWDNVAAYSLQAERARAPNAKQIAAGHYFNASCHGTNGTVHAGPRDTGDDYSPIVKALMSAVEDRGVPTQKDFGCGDPHGVSMFPNTLHEDQVRSDAAREWLLPNYQRPNLQVLTGQYVGKVLLSQNGTTPRAVGVEFGTHKGNTHNVYAKHEVLLAAGSAVSPTILEYSGIGMKSILEPLGIDTVVDLPVGLNLQDQTTATVRSRITSAGAGQGQAAWFATFNETFGDYSEKAHELLNTKLEQWAEEAVARGGFHNTTALLIQYENYRDWIVNHNVAYSELFLDTAGVASFDVWDLLPFTRGYVHILDKDPYLHHFAYDPQYFLNELDLLGQAAATQLARNISNSGAMQTYFAGETIPGDNLAYDADLSAWTEYIPYHFRPNYHGVGTCSMMPKEMGGVVDNAARVYGVQGLRVIDGSIPPTQMSSHVMTVFYAMALKISDAILEDY

SEQ ID NO: 1874 - protein, 575 aa, Aspergillus niger
EASLLTDPKEVAGRTVDYIIAGGGLTGLTTAARLTENPDITVLVIESGSYESDRGPIIEDLNAYGDIFGSSVDHAYETVELQTNNQTALIRFGNGLGGSTLVNGGTWTRPHKAQVDSWETVFGNEGWNWDSVAAYSLQAERARAPNAKQIAAGHYFNASCHGINGTVHAGPRDTGDDYSPIVKALMSAVEDRGVPTKKDLGCGDPHGVSMFPNTLHEDQVRSDAAREWLLPNYQRPNLQVLTGQYVGKVLLSQNATTPRAVGVEFGTHKQNTHNVYAKHEVLLAAGSAVSPTILEYSGIGMKSILEPLGIDTVVDLPVGLNLQDQTTSTVRSRITSAGAGQGQAAWFATFNETFGDYAEKAHELLNTKLEQWAEEAVARGGFHNTTALLIQYENYRDWIVKDNVAYSELFLDTAGVASFDVWDLLPFTRGYVHILDKDPYLRHFAYDPQYFLNELDLLGQAAATQLARNISNSGAMQTYFAGETIPGDNLAYDADLSAWVEYIHYNFRPNYHGVGTCSMMPKEMGGVVDNAARVYGVQGLRVIDGSIPPTQMSSHVMTVFYAMALKIADAILADY

SEQ ID NO: 1875 - protein, 574 aa, Aspergillus niger
EASLLTDPKEVAGRTVDYIIAGGGLTGLTTAARLTENPDITVLVIESGSYESDRGPIIEDLNAYGKIFGSSVDHAYETVELTNNQTALIRAGNGLGGSTLVNGGTWTRPHKAQVDSWETVFGNEGWNWDSVAAYSLQAERARAPNAKQIAAGHYFNASCHGINGTVHAGPRDTGDDYSPIVKALMSAVEDRGVPTKKDLGCGDPHGVSMFPNTLHEDQVRSDAAREWLLPNYQRPNLQVLTGQYVGKVLLSQNATTPRAVGVEFGTHKSNTHNVYAKHEVLLAAGSAVSPTILEYSGIGMKSILEPLGIDTVVDLPVGLNLQDQTTSTVRSRITSAGAGQGQAAWFATFNETFGDYAEKAHELLNTKLEQWAEEAVARGGFHNTTALLIQYENYRDWIVKDNVAYSELFLDTAGVASFDVWDLLPFTRGYVHILDKDPYLRHFAYDPQYFLNELDLLGQAAATQLARNISNSGAMQTYFAGETIPGDNLAYDADLSAWVEYICYNFRPNYHGVGTCSMMPKEMGGVVDNAARVYGVQGLRVIDGSIPPTQMSSHVMTVFYAMALKIADAILADY

SEQ ID NO: 1876 - protein, 574 aa, Aspergillus niger
EASLLTDPKEVAGRTVDYIIAGGGLTGLTTAARLTENPDITVLVIESGSYESDRGPIIEDLNAYGKIFGSSVDHAYETVELTNNQTALIRAGNGLGGSTLVNGGTWTRPHKAQVDSWETVFGNEGWNWDSVAAYSLQAERARAPNAKQIAAGHYFNASCHGINGTVHAGPRDTGDDYSPIVKALMSAVEDRGVPTKKDLGCGDPHGVSMFPNTLHEDQVRSDAAREWLLPNYQRPNLQVLTGQYVGKVLLSQNATTPRAVGVEFGTHKQNTHNVYAKHEVLLAAGSAVSPTILEYSGIGMKSILEPLGIDTVVDLPVGLNLQDQTTSTVRSRITSAGAGQGQAAWFATFNETFGDYAEKAHELLNTKLEQWAEEAVARGGFHNTTALLIQYENYRDWIVKDNVAYSELFLDTAGVASFDVWDLLPFTRGYVHILDKDPYLRHFAYDPQYFLNELDLLGQAAATQLARNISNSGAMQTYFAGETIPGDNLAYDADLSAWVEYIHYNFRPNYHGVGTCSMMPKEMGGVVDNAARVYGVQGLRVIDGSIPPTQMSSHVMTVFYAMALKIADAILADY

SEQ ID NO: 1877 - protein, 577 aa, Aspergillus niger
GIEASLLTDPKDVSGRTVDYIIAGGGLVGLTTAARLTENPNISVLVIESGSYESDRGPIIEDLNAYGDIFGSSVDHAYETVELATNNQTALVRSGNGLGGSTLVNGGTWTRPHKAQVDSWETVFGNEGWNWDNVAAYSLQAERARAPNAKQIAAGHYFNASCHGVNGTVHVGPRDTGDDYSPIVKALMSAVEDRGVPTKKDFGCGDPHGVSMFPNTLHEDQVRSDAAREWLLPNYQRPNLQVLTGQYVGKVLLSQNGTTPRAVGVEFGTHKGNTHNVYAKHEVLLAAGSAVSPTILEYSGIGMKSILEPLGIDTVVDLPVGLNLQDQTTNTVRSRITSAGAGQGQAAWFATFNETFGDYSEKAHELLNTKLEQWAEEAVARGGFHNTTALLIQYENYRDWIVNHNVAYSELFLDTAGVASFDVWDLLPFTRGYVHILDKDPYLHHFAYDPQYFLNELDLLGQAAATQLARNISNSGAMQTYFAGETIPGDNLAYDADLSAWTEYIPYHFRPNYHGVGTCSMMPKEMGGVVDNAARVYGVQGLRVIDGSIPPTQMSSHPMTVFYAMALKISDAILEDY

SEQ ID NO: 1878 - protein, 577 aa, Aspergillus niger
GIEASLLTDPKDVSGRTVDYIICGGGLVGLTTAAKLTENPNISVLVIESGSYESDRGPIIEDLNAYGDIFGSSVDHAYETVELATNNQTALVRSGNGLGGSTLINGGTWTRPHKAQVDSWETVFGNEGWNWDNVAAYSLQAERARAPNAKQIAAGHYFNTSCHGVNGTVHAGPRDTGDDYSPIVKALMSAVEDRGVPTKKDFGCGDPHGVSMFPNTLHEDQVRSDAAREWLLPNYQRPNLQVLTGQYCGKVLLSQNGTTPRAVGVEFGTHKGNTHNVYAKHEVLLAAGSAVSPTILEYSGIGMKSILEPLGIDTVVDLPVGLNLQDQTTATVRSRITSAGAGQGQAAWFATFNETFGDYSEKAHELLNTKLEQWAEEAVARGGFHNTTALLIQYENYRDWIVNHNVAYSELFLDTAGVASFDVWDLLPFTRGYVHILDKDPYLHHFAYDPQYFLNELDLLGQAAATQLARNISNSGAMQTYFAGETIPGDNLAYDADLSAWTEYIPYHFRPNYHGVGTCSMMPKEMGGVVDNAARVYGVQGLRVIDGSIPPTQMSSHVMTVFYAMALKISDAILEDY

SEQ ID NO: 1879 - protein, 577 aa, Aspergillus niger
GIEASLLTDPKDVSGRTVDYIIAGGGLVGLTTAARLTENPNISVLVIESGSYESDRGPIIEDLNAYGDIFGSSVDHAYETVELATNNQTALVRSGNGLGGSTLVNGGTWTRPHKAQVDSWETVFGNEGWNWDNVAAYSLQAERARAPNAKQIAAGHYFNASCHGVNGTVHIGPRDTGDDYSPIVKALMSAVEDRGVPTKKDFGCGDPHGVSMFPNTLHEDQVRSDAAREWLLPNYQRPNLQVLTGQYVGKVLLSQNGTTPRAVGVEFGTHKGNTHNVYAKHEVLLAAGSAVSPTILEYSGIGMKSILEPLGIDTVVDLPVGLNLQDQTTSTVRSRITSAGAGQGQAAWFATFNETFGDYSEKAHELLNTKLEQWAEEAVARGGFHNTTALLIQYENYRDWIVNHNVAYSELLLDTAGVASFDVWDLLPFTRGYVHILDKDPYLHHFAYDPQYFLNELDLLGQAAATQLARNISNSGAMQTYFAGETIPGDNLAYDADLSAWTEYIPYHFRPNYHGVGTCSMMPKEMGGVVDNAARVYGVQGLRVIDGSIPPTQMSSHVMTVFYAMALKISDAILEDY

SEQ ID NO: 1880 - protein, 577 aa, Aspergillus niger
GIEASLLTDPKDVSGRTVDYIIAGGGLVGLTTAARLTENPNISVLVIESGSYESDRGPIIEDLNAYGDIFGSSVDHAYETVELATNNQTALVRSGNGLGGSTLVNGGTWTRPHKAQVDSWETVFGNEGWNWDNVAAYSLQAERARAPNAKQIAAGHYFNASCHGVNGTVHTGPRDTGDDYSPIVKALMSAVEDRGVPTKKDFGCGDPHGVSMFPNTLHEDQVRSDAAREWLLPNYQRPNLQVLTGQYVGKVLLSQNGTTPRAVGVEFGTHKGNTHNVYAKHEVLLAAGSAVSPTILEYSGIGMKSILEPLGIDTVVDLPVGLNLQDQTTATVRSRITSAGAGQGQAAWFATFNETFGDYSEKAHELLNTKLEQWAEEAVARGGFHNTTALLIQYENYRDWIVNHNVAYSELLLDTAGVASFDVWDLLPFTRGYVHILDKDPYLHHFAYDPQYFLNELDLLGQAAATQLARNISNSGAMQTYFAGETIPGDNLAYDADLSAWTEYIPYHFRPNYHGVGTCSMMPKEMGGVVDNAARVYGVQGLRVIDGSIPPTQMSSHVMTVFYAMALKISDAILEDY

SEQ ID NO: 1881 - protein, 581 aa, Aspergillus niger
GIEASLLTDPKDVSGRTVDYIIAGGGLTGLTTAARLTENPNISVLVIESGSYESDRGPIIEDLNAYGDIFGSSVDHAYETVELATNNQTALIRSGNGLGGSTLVNGGTWTRPHKAQVDSWETVFGNEGWNWDNVAAYSLQAERARAPNAKQIAAGHYFNASCHGVNGTVHAGPRDTGDDYSPIVKALMSAVEDRGVPIKKDFGCGDPHGVSMFPNTLHEDQVRSDAAREWLLPNYQRPNLQVLIGQYVGKVLLSQNGTTPRAVGVEFGTHKGNTHNVYAKHEVLLAAGSAVSPTILEYSGIGMKSILEPLGIDTVVDLPVGLNLQDQTTATVRSRITSAGAGQGQAAWFATFNETFGDYSEKAHELLNTKLEQWAEEAVARGGFEINTTALLIQYENYRDWIVNEINVAYSELFLDTAGVASFDVWDLLPFTRGYVHILDKDPYLHHFAYDPQYFLNELDLLGQAAATQLARNISNSGAMQTYFAGETIPGDNLAYDADLSAWTEYIPYIIFRPNYEGVGICSMMPKEMGGVVDNAARVYGVQGLRVIDGSIPPTQMSSEIVMTVFYAMALKISDAILEDY

SEQ ID NO: 1882 - protein, 597 aa, Aspergillus niger
LVSSLVVSLAAALPHYIRSNGIEASLLTDPKDVSGRTVDYIIAGGGLTGLTTAARLTENPNISVLVIESGSYESDRGPIIEDLNAYGDIFGSSVDHAYETVELATNNQTALIRSGNGLGGSTLVNGGXWTRPHKAQVDSWETVFGNEGWNWDNVAAYSLQAERARAPNAKQIAAGHYFNASCHGVNGTVHAGPRDTGDDYSPIVKALMSAVEDRGVPTKKDFGCGDPHGVSMFPNTLHEDQVRSDAAREWLLPNYQRPNLQVLTGQYVGKVLLSQNGTTPRAVGVEFGTHKGNTHNVYAKHEVLLAAGSAVSPTILEYSGIGMKSILEPLGIDTVVDLPVGLNLQDQTTATVRSRITSAGAGQGQAAWXATFNETFGDYSEKAHELLNTKLEQWAEEAVARGGFHNTTALLIQYENYRDWIVNHNVAYSELFLDTAGVASFDVWDLLPFDRGYVHILDKDPYLHHFAYDPQYFLNELDLLGQAAATQLARNISNSGAMQTYFAGEILPGDNLAYDADLSAWTEYIPYHFRPNYHDVGTCSMMPKEMGSVVDNAARVYGVRGLRVIDGSIPPTQMSSHVMTVFYAMALKISDAILEDY

SEQ ID NO: 1883 - protein, 576 aa, Aspergillus niger
IEASLLTDPKEVAGRTVDYIIAGGGLTGLTTAARLTENPDITVLVIESGSYESDRGPIIEDLNAYGDIFGSSVDHAYETVELATNNQTALIRSGNGLGGSTLVNGGXWTRPHKAQVDSWETVFGNEGWNWDSVAAYSLQAERARAPNAKQIAAGHYFNASCHGINGTVHAGPRDTGDDYSPIVKALMSAVEDRGVPTKKDLGCGDPHGVSMFPNTLHEDQVRSDAAREWLLPNYQRPNLQVLTGQYVGKVLLSQNATTPRAVGVEFGTHKGNTHNVYAKHEVLLAAGSAVSPTILEYSDIGMKSILEPLGIDTVVDLPVGLNLQDQTTSTVRSRITSAGAGQGQAAWXATFNETFGDYAEKAHELLNTKLEQWAEEAVARGGFHNTTALLIQYENYRDWIVKDNVAYSELFLDTAGVASFDVWDLLPFTRGYVHILDKDPYLRHFAYDPQYFLNELDLLGQAAATQLARNISNSGAMQTYFAGETIPGDNLAYDADLSAWVEYIPYNFRPNYHGVGTCSMMPKEMGGVVDNAARVYGVQGLRVIDGSIPPTQMSSHVMTVFYAMALKIADAILADY

SEQ ID NO: 1884 - protein, 576 aa, Aspergillus niger
IEASLLTDPKDVSGRTVDYIIAGGGLTGLTTAARLTENPNISVLVIESGSYESDRGPIIEDLNLYGDIFGSSVDHAYETVELATNNQTALIRSGNGLGGSTLVNGGTWTRPHKAQVDSWETVFGNEGWNWDNVAAYSLQAERARAPNAKQIAAGHYFNASCHGVNGTVHAGPRDTGDDYSPIVKALMSAVEDRGVPTKKDFGCGDPHGVSMFPNTLHEDQVRSDAAREWLLPNYQRPNLQVLTGQYVGKVLLSQNGTTPRAVGVEFGTHKGNTHNVYAKHEVLLAAGSAVSPTILEYSGIGMKSILEPLGIDTVVDLPVGLNLQDQTTATVRSRITSAGAGQGQAAWFATFNETFGDYSEKAHELLNTKLEQWAEEAVARGGFHNTTALLIQYENYRDWIVNHNVAYSELFLDTRGVASFDVWDLLPFTRGYVHILDKDPYLHHFAYDPQYFLNELDLLGQAAATQLARNISNSGAMQTYFAGETIPGDNLAYDADLSAWTEYIPYHFRPNYHGVGTCSMMPKEMGGVVDNAARVYGVQGLRVIDGSIPPTQMSSHVMTVFYAMALKISDAILEDY

SEQ ID NO: 1885 - protein, 576 aa, Aspergillus niger
IEASLLTDPKDVSGRTVDYIIAGGGLTGLTTAARLTENPNISVLVIESGSYESDRGPIIEDLNAYGDIFGSSVDHAYETVELATNNQTALIRSGNGLGGSTLVNGGTWTRPHKAQVDSWETVFGNEGWNWDNVAAYSLQAERARAPNAKQIAAGHYFNASCHGVNGTVHAGPRDTGDDYSPIVKALMSAVEDRGVPTKDDFGCGDPHGVSMFPNTLHEDQVRSDAAREWLLPNYQRPNLQVLTGQYVGKVLLSQNGTTPRAVGVEFGTHKGNTHNVYAKHEVLLAAGSAVSPTILEYSGIGMKSILEPLGIDTVVDLPVGLNLQDQTTATVRSRITSAGAGQGQAAWFATFNETFGDYSEKAHELLNTKLEQWAEEAVARGGFHNTTALLIQYENYRDWIVNHNVAYSELFLDTAGVASFDVWDLLPFTRGYVHILDKDPYLHHFAYDPQYFLNELDLLGQAAATQLARNISNSGAMQTYFAGETIPGDNLAYDADLSAWTEYIPYHFRPNYHGVGTCSMMPKEMGGVVDNAARVYGVQGLRVIDGSIPPTQMSSHVMTVFYAMALKISDAILEDY

SEQ ID NO: 1886 - protein, 576 aa, Aspergillus niger
IEASLLTDPKDVSGRTVDYIIAGGGLTGLTTAARLTENPNISVLVIESGSYESDRGPIIEDLNAYGDIFGSSVDHAYETVELATNNQTALIRSGNGLGGSTLVNGGTWTRPHKAQVDSWETVFGNEGWNWDNVAAYSLQAERARAPNAKQIAAGHYFNASCHGVNGTVHAGPRDTGDDYSPIVAALMSAVEDRGVPTKKDFGCGDPHGVSMFPNTLHEDQVRSDAAREWLLPNYQRPNLQVLTGQYVGKVLLSQNGTTPRAVGVEFGTHKGNTHNVYAKHEVLLAAGSAVSPTILEYSGIGMKSILEPLGIDTVVDLPVGLNLQDQTTATVRSRITSAGAGQGQAAWFATFNETFGDYSEKAHELLNTKLEQWAEEAVARGGFHNTTALLIQYENYRDWIVNHNVAYSELFLDTAGVASFDVWDLLPFTRGYVHILDKDPYLHHFAYDPQYFLNELDLLGQAAATQLARNISNSGAMQTYFAGETIPGDNLAYDADLSAWTEYIPYHFRPNYHGVGTCSMMPKEMGGVVDNAARVYGVQGLRVIDGSIPPTQMSSHVMTVFYAMALKISDAILEDY

SEQ ID NO: 1887 - protein, 576 aa, Aspergillus niger
IEASLLTDPKDVSGRTVDYIIAGGGLTGLTTAARLTENPNISVLVIESGSYESDRGPIIEDLNNYGDIFGSSVDHAYETVELATNNQTALIRSGNGLGGSTLVNGGTWTRPHKAQVDSWETVFGNEGWNWDNVAAYSLQAERARAPNAKQIAAGHYFNASCHGVNGTVHAGPRDTGDDYSPIVKALMSAVEDRGVPTKKDFGCGDPHGVSMFPNTLHEDQVRSDAAREWLLPNYQRPNLQVLTGQYVGKVLLSQNGTTPRAVGVEFGTHKGNTHNVYAKHEVLLAAGSAVSPTILEYSGIGMKSILEPLGIDTVVDLPVGLNLQDQTTATVRSRITSAGAGQGQAAWFATFNETFGDYSEKAHELLNTKLEQWAEEAVARGGFHNTTALLIQYENYRDWIVNHNVAYSELFLDTRGVASFDVWDLLPFTRGYVHILDKDPYLHHFAYDPQYFLNELDLLGQAAATQLARNISNSGAMQTYFAGETIPGDNLAYDADLSAWTEYIPYHFRPNYHGVGTCSMMPKEMGGVVDNAARVYGVQGLRVIDGSIPPTQMSSHVMTVFYAMALKISDAILEDY

SEQ ID NO: 1888 - protein, 576 aa, Aspergillus niger
IEASLLTDPKDVSGRTVDYIIAGGGLTGLTTAARLTENPNISVLVIESGSYESDRGPIIEDLNNYGDIFGSSVDHAYETVELATNNQTALIRSGNGLGGSTLVNGGTWTRPHKAQVDSWETVFGNEGWNWDNVAAYSLQAERARAPNAKQIAAGHYFNASCHGVNGTVHAGPRDTGDDYSPIVKALMSAVEDRGVPTKKDFGCGDPHGVSMFPNTLHEDQVRSDAAREWLLPNYQRPNLQVLTGQYVGKVLLSQNGTTPRAVGVEFGTHKGNTHNVYAKHEVLLAAGSAVSPTILEYSGIGMKSILEPLGIDTVVDLPVGLNLQDQTTATVRSRITSAGAGQGQAAWFATFNETFGDYSEKAHELLNTKLEQWAEEAVARGGFHNTTALLIQYENYRDWIVNHNVAYSELFLDTKGVASFDVWDLLPFTRGYVHILDKDPYLHHFAYDPQYFLNELDLLGQAAATQLARNISNSGAMQTYFAGETIPGDNLAYDADLSAWTEYIPYHFRPNYHGVGTCSMMPKEMGGVVDNAARVYGVQGLRVIDGSIPPTQMSSHVMTVFYAMALKISDAILEDY

SEQ ID NO: 1889 - protein, 576 aa, Aspergillus niger
IEASLLTDPKDVSGRTVDYIIAGGGLTGLTTAARLTENPNISVLVIESGSYESDRGPIIEDLNAYGDIFGSSVDHAYETVELATNNQTALIRSGNGLGGSTLVNGGTWTRPHKAQVDSWETVFGNEGWNWDNVAAYSLQAERARAPNAKQIAAGHYFNASCHGVNGTVHAGPRDTGDDYSPIVKALMSAVEDRGVPTKKDFGCGDPHGVSMFPNTLHPDQVRSDAAREWLLPNYQRPNLQVLTGQYVGKVLLSQNGTTPRAVGVEFGTHKGNTHNVYAKHEVLLAAGSAVSPTILEYSGIGMKSILEPLGIDTVVDLPVGLNLQDQTTATVRSRITSAGAGQGQAAWFATFNETFGDYSEKAHELLNTKLEQWAEEAVARGGFHNTTALLIQYENYRDWIVNHNVAYSELFLDTAGVASFDVWDLLPFTRGYVHILDKDPYLHHFAYDPQYFLNELDLLGQAAATQLARNISNSGAMQTYFAGETIPGDNLAYDADLSAWTEYIPYHFRPNYHGVGTCSMMPKEMGGVVDNAARVYGVQGLRVIDGSIPPTQMSSHVMTVFYAMALKISDAILEDY

SEQ ID NO: 1890 - protein, 576 aa, Aspergillus niger
IEASLLTDPKDVSGRTVDYIIAGGGLTGLTTAARLTENPNISVLVIESGSYESDRGPIIEDLNAYGDIFGSSVDHAYETVELATNNQTALIRSGNGLGGSTLVNGGTWTRPHKAQVDSWETVFGNEGWNWDNVAAYSLQAERARAPNAKQIAAGHYFNASCHGVNGTVHAGPRDTGDDYSPIVKALMSAVEDRGVPTKKDFGCGDPHGVSMFPNTLHEDQVRSDAAREWLLPNYQRPNLQVLTGQYVGKILLSQNGTTPRAVGVEFGTHKGNTHNVYAKHEVLLAAGSAVSPTILEYSGIGMKSILEPLGIDTVVDLPVGLNLQDQTTATVRSRITSAGAGQGQAAWFATFNETFGDYSEKAHELLNTKLEQWAEEAVARGGFHNTTALLIQYENYRDWIVNHNVAYSELFLDTAGVASFDVWDLLPFTRGYVHILDKDPYLHHFAYDPQYFLNELDLLGQAAATQLARNISNSGAMQTYFAGETIPGDNLAYDADLSAWTEYIPYHFRPNYHGVGTCSMMPKEMGGVVDNAARVYGVQGLRVIDGSIPPTQMSSHVMTVFYAMALKISDAILEDY

SEQ ID NO: 1891 - protein, 576 aa, Aspergillus niger
IEASLLTDPKDVSGRTVDYIIAGGGLTGLTTAARLTENPNISVLVIESGSYESDRGPIIEDLNAYGDIFGSSVDHAYETVELATNNQTALIRSGNGLGGSTLVNGGTWTRPHKAQVDSWETVFGNEGWNWDNVAAYSLQAERARAPNAKQIAAGHYFNASCHGVNGTVHAGPRDTGDDYSPIVKALMSAVEDRGVPTKKDFGCGDPHGVSMFPNTLHEDQVRSDAAREWLLPNYQRPNLQVLTGQYVGKVLLSQNGTTPRAVGVEFGTHKGNTHNVYAKREVLLAAGSAVSPTILEYSGIGMKSILEPLGIDTVVDLPVGLNLQDQTTATVRSRITSAGAGQGQAAWFATFNETFGDYSEKAHELLNTKLEQWAEEAVARGGFHNTTALLIQYENYRDWIVNHNVAYSELFLDTAGVASFDVWDLLPFTRGYVHILDKDPYLHHFAYDPQYFLNELDLLGQAAATQLARNISNSGAMQTYFAGETIPGDNLAYDADLSAWTEYIPYHFRPNYHGVGTCSMMPKEMGGVVDNAARVYGVQGLRVIDGSIPPTQMSSHVMTVFYAMALKISDAILEDY

SEQ ID NO: 1892 - protein, 576 aa, Aspergillus niger
IEASLLTDPKDVSGRTVDYIIAGGGLTGLTTAARLTENPNISVLVIESGSYESDRGPIIEDLNAYGDIFGSSVDHAYETVELATNNQTALIRSGNGLGGSTLVNGGTWTRPHKAQVDSWETVFGNEGWNWDNVAAYSLQAERARAPNAKQIAAGHYFNASCHGVNGTVHAGPRDTGDDYSPIVKALMSAVEDRGVPTKKDFGCGDPHGVSMFPNTLHEDQVRSDAAREWLLPNYQRPNLQVLTGQYVGKVLLSQNGTTPRAVGVEFGTHKGNTHNVYAKHEVLLAAGSAVSPTILEYSGIGMKSILEPLGIDTVVDLPVGLNLQDQTTATVRSRITSAGAGQGQAAWFATFNETFGDYSEKAHELLNTKLEQWAEEAVARGGFLNTTALLIQYENYRDWIVNHNVAYSELFLDTAGVASFDVWDLLPFTRGYVHILDKDPYLHHFAYDPQYFLNELDLLGQAAATQLARNISNSGAMQTYFAGETIPGDNLAYDADLSAWTEYIPYHFRPNYHGVGTCSMMPKEMGGVVDNAARVYGVQGLRVIDGSIPPTQMSSHVMTVFYAMALKISDAILEDY

SEQ ID NO: 1893 - protein, 576 aa, Aspergillus niger
IEASLLTDPKDVSGRTVDYIIAGGGLTGLTTAARLTENPNISVLVIESGSYESDRGPIIEDLNAYGDIFGSSVDHAYETVELATNNQTALIRSGNGLGGSTLVNGGTWTRPHKAQVDSWETVFGNEGWNWDNVAAYSLQAERARAPNAKQIAAGHYFNASCHGVNGPVHAGPRDTGDDYSPIVKALMSAVEDRGVPTKKDFGCGDPHGVSMFPNTLHEDQVRSDAAREWLLPNYQRPNLQVLTGQYVGKVLLSQNGTTPRAVGVEFGTHKGNTHNVYAKHEVLLAAGSAVSPTILEYSGIGMKSILEPLGIDTVVDLPVGLNLQDQTTATVRSRITSAGAGQGQAAWFATFNETFGDYSEKAHELLNTKLEQWAEEAVARGGFHNTTALLIQYENYRDWIVNHNVAYSELFLDTAGVASFDVWDLLPFTRGYVHILDKDPYLHHFAYDPQYFLNELDLLGQAAATQLARNISNSGAMQTYFAGETIPGDNLAYDADLSAWTEYIPYHFRPNYHGVGTCSMMPKEMGGVVDNAARVYGVQGLRVIDGSIPPTQMSSHVMTVFYAMALKISDAILEDY

SEQ ID NO: 1894 - protein, 576 aa, Aspergillus niger
IEASLLTDPKDVSGRTVDYIIAGGGLTGLTTAARLTENPNISVLVIESGSYESDRGPIIEDLNRYGDIFGSSVDHAYETVELATNNQTALIRSGNGLGGSTLVNGGTWTRPHKAQVDSWETVFGNEGWNWDNVAAYSLQAERARAPNAKQIAAGHYFNASCHGVNGTVHAGPRDTGDDYSPIVKALMSAVEDRGVPTKKDFGCGDPHGVSMFPNTLHEDQVRSDAAREWLLPNYQRPNLQVLTGQYVGKVLLSQNGTTPRAVGVEFGTHKGNTHNVYAKHEVLLAAGSAVSPTILEYSGIGMKSILEPLGIDTVVDLPVGLNLQDQTTATVRSRITSAGAGQGQAAWFATFNETFGDYSEKAHELLNTKLEQWAEEAVARGGFHNTTALLIQYENYRDWIVNHNVAYSELFLDTNGVASFDVWDLLPFTRGYVHILDKDPYLHHFAYDPQYFLNELDLLGQAAATQLARNISNSGAMQTYFAGETIPGDNLAYDADLSAWTEYIPYHFRPNYHGVGTCSMMPKEMGGVVDNAARVYGVQGLRVIDGSIPPTQMSSHVMTVFYAMALKISDAILEDY

SEQ ID NO: 1895 - protein, 576 aa, Aspergillus niger
IEASLLTDPKDVSGRTVDYIIAGGGLTGLTTAARLTENPNISVLVIESGSYESDRGPIIEDLNMYGDIFGSSVDHAYETVELATNNQTALIRSGNGLGGSTLVNGGTWTRPHKAQVDSWETVFGNEGWNWDNVAAYSLQAERARAPNAKQIAAGHYFNASCHGVNGTVHAGPRDTGDDYSPIVKALMSAVEDRGVPTKKDFGCGDPHGVSMFPNTLHEDQVRSDAAREWLLPNYQRPNLQVLTGQYVGKVLLSQNGTTPRAVGVEFGTHKGNTHNVYAKHEVLLAAGSAVSPTILEYSGIGMKSILEPLGIDTVVDLPVGLNLQDQTTATVRSRITSAGAGQGQAAWFATFNETFGDYSEKAHELLNTKLEQWAEEAVARGGFHNTTALLIQYENYRDWIVNHNVAYSELFLDTNGVASFDVWDLLPFTRGYVHILDKDPYLHHFAYDPQYFLNELDLLGQAAATQLARNISNSGAMQTYFAGETIPGDNLAYDADLSAWTEYIPYHFRPNYHGVGTCSMMPKEMGGVVDNAARVYGVQGLRVIDGSIPPTQMSSHVMTVFYAMALKISDAILEDY

SEQ ID NO: 1896 - protein, 576 aa, Aspergillus niger
IEASLLTDPKDVSGRTVDYIIAGGGLTGLTTAARLTENPNISVLVIESGSYESDRGPIIEDLNAYGDIFGSSVDHAYETVELATNNQTALIRSGNGLGGSTLVNGGTWTRPHKAQVDSWETVFGNEGWNWDNVAAYSLQAERARAPNAKQIAAGHYFNASCHGVNGTVHAGPRDTGDDYSPIVKALMSAVEDRGVPTKKDFGCGDPHGVSMFPNTLHEDQVRSDAAREWLLPNYQRPNLQVLTGQYVGKVLLSQNGTTPRAVGVEFGTHKGNTHNVYAKHEVLLAAGSAVSPTILEYSGIGMKSILEPLGIDTVVDLPVGLNLQDQTTATVRSRITSAGAGQGQAAWFATFNETFGDYSEKAHELLNTKLEQWAEEAVARGGFHNTTALLIQYENYRDWIVNHNVAYSELFLDTAGVASFDVWDLLPFTRGYVHILDKDPYLHHFAYDPQYFLNELDLLGQAAATQLARNISNSGAMQTYFAGETIPGDNLAYDADLSAWTEYIPYHFRPNYHGVGTCSMMPKEMGGVVDNRARVYGVQGLRVIDGSIPPTQMSSHVMTVFYAMALKISDAILEDY

SEQ ID NO: 1897 - protein, 576 aa, Aspergillus niger
IEASLLTDPKDVSGRTVDYIIAGGGLTGLTTAARLTENPNISVLVIESGSYESDRGPIIEDLNAYGDIFGSSVDHAYETVELATNNQTALIRSGNGLGGSTLVNGGTWTRPHKAQVDSWETVFGNEGWNWDNVAAYSLQAERARAPNAKQIAAGHYFNASCHGVNGTVHAGPRDTGDDYSPIVKALMSAVEDRGVPTKKDFGCGDPHGVSMFPNTLHEDQVRSDAAREWLLPNYQRPNLQVLTGQYVGKVLLSQNGTTPRAVGVEFGTHKGNTHNVYAKHEVLLAAGSAVSPTILEYSGIGMKSILEPLGIDTVVDLPVGLNLQDQTTATVRSRITSAGAGQGQAAWFATFNETFGPYSEKAHELLNTKLEQWAEEAVARGGFHNTTALLIQYENYRDWIVNHNVAYSELFLDTAGVASFDVWDLLPFTRGYVHILDKDPYLHHFAYDPQYFLNELDLLGQAAATQLARNISNSGAMQTYFAGETIPGDNLAYDADLSAWTEYIPYHFRPNYHGVGTCSMMPKEMGGVVDNAARVYGVQGLRVIDGSIPPTQMSSHVMTVFYAMALKISDAILEDY

SEQ ID NO: 1898 - protein, 576 aa, Aspergillus niger
IEASLLTDPKDVSGRTVDYIIAGGGLTGLTTAARLTENPNISVLVIESGSYESDRGPIIEDLNAYGDIFGSSVDHAYETVELATNNQTALIRSGNGLGGSTLVNGGTWTRPHKAQVDSWETVFGNEGWNWDNVAAYSLQAERARAPNAKQIAAGHYFNASCHGVNGTVHAGPRDTGDDYSPIVKALMSAVEDRGVPTKKDPGCGDPHGVSMFPNTLHEDQVRSDAAREWLLPNYQRPNLQVLTGQYVGKVLLSQNGTTPRAVGVEFGTHKGNTHNVYAKHEVLLAAGSAVSPTILEYSGIGMKSILEPLGIDTVVDLPVGLNLQDQTTATVRSRITSAGAGQGQAAWFATFNETFGDYSEKAHELLNTKLEQWAEEAVARGGFHNTTALLIQYENYRDWIVNHNVAYSELFLDTAGVASFDVWDLLPFTRGYVHILDKDPYLHHFAYDPQYFLNELDLLGQAAATQLARNISNSGAMQTYFAGETIPGDNLAYDADLSAWTEYIPYHFRPNYHGVGTCSMMPKEMGGVVDNAARVYGVQGLRVIDGSIPPTQMSSHVMTVFYAMALKISDAILEDY

SEQ ID NO: 1899 - protein, 576 aa, Aspergillus niger
IEASLLTDPKDVSGRTVDYIIAGGGLTGLTTAARLTENPNISVLVIESGSYESDRGPIIEDLNAYGDIFGSSVDHAYETVELATNNQTALIRSGNGLGGSTLVNGGTWTRPHKAQVDSWETVFGNEGWNWDNVAAYSLQAERARAPNAKQIAAGHYFNASCHGVNGTVHAGPRDTGDDYSPIVKALMSAVEDRGVPTKKDFGCGDPHGVSMFPNTLHEDQVRSDAAREWLLPNYQRPNLQVLTGQYVGKVLLSQNGTTPRAVGVEFGTHKGNTHNVYAKHEVLLAAGSAVSPTILEYSGIGMKSILEPLGIDTVVDLPVGLNLQDQTTATVRSRITSAGAGQGQAAWFATFNETFGDYSEKAHELLNTKLEQWAEEAVARGGFHNTTALLIQYENYRDWIFNHNVAYSELFLDTAGVASFDVWDLLPFTRGYVHILDKDPYLHHFAYDPQYFLNELDLLGQAAATQLARNISNSGAMQTYFAGETIPGDNLAYDADLSAWTEYIPYHFRPNYHGVGTCSMMPKEMGGVVDNAARVYGVQGLRVIDGSIPPTQMSSHVMTVFYAMALKISDAILEDY

SEQ ID NO: 1900 - protein, 576 aa, Aspergillus niger
IEASLLTDPKDVSGRTVDYIIAGGGLTGLTTAARLTENPNISVLVIESGSYESDRGPIIEDLNKYGDIFGSSVDHAYETVELATNNQTALIRSGNGLGGSTLVNGGTWTRPHKAQVDSWETVFGNEGWNWDNVAAYSLQAERARAPNAKQIAAGHYFNASCHGVNGTVHAGPRDTGDDYSPIVKALMSAVEDRGVPTKKDFGCGDPHGVSMFPNTLHEDQVRSDAAREWLLPNYQRPNLQVLTGQYVGKVLLSQNGTTPRAVGVEFGTHKGNTHNVYAKHEVLLAAGSAVSPTILEYSGIGMKSILEPLGIDTVVDLPVGLNLQDQTTATVRSRITSAGAGQGQAAWFATFNETFGDYSEKAHELLNTKLEQWAEEAVARGGFHNTTALLIQYENYRDWIVNHNVAYSELFLDTKGVASFDVWDLLPFTRGYVHILDKDPYLHHFAYDPQYFLNELDLLGQAAATQLARNISNSGAMQTYFAGETIPGDNLAYDADLSAWTEYIPYHFRPNYHGVGTCSMMPKEMGGVVDNAARVYGVQGLRVIDGSIPPTQMSSHVMTVFYAMALKISDAILEDY

SEQ ID NO: 1901 - protein, 576 aa, Aspergillus niger
IEASLLTDPKDVSGRTVDYIIAGGGLTGLTTAARLTENPNISVLVIESGSYESDRGPIIEDLNAYGDIFGSSVDHAYETVELATNNQTALIRSGNGLGGSTLVNGGTWTRPHKAQVDSWETVFGNEGWNWDNVAAYSLQAERARAPNAKQIAAGHYFNASCHGVNGTIHAGPRDTGDDYSPIVKALMSAVEDRGVPTKKDFGCGDPHGVSMFPNTLHEDQVRSDAAREWLLPNYQRPNLQVLTGQYVGKVLLSQNGTTPRAVGVEFGTHKGNTHNVYAKHEVLLAAGSAVSPTILEYSGIGMKSILEPLGIDTVVDLPVGLNLQDQTTATVRSRITSAGAGQGQAAWFATFNETFGDYSEKAHELLNTKLEQWAEEAVARGGFHNTTALLIQYENYRDWIVNHNVAYSELFLDTAGVASFDVWDLLPFTRGYVHILDKDPYLHHFAYDPQYFLNELDLLGQAAATQLARNISNSGAMQTYFAGETIPGDNLAYDADLSAWTEYIPYHFRPNYHGVGTCSMMPKEMGGVVDNAARVYGVQGLRVIDGSIPPTQMSSHVMTVFYAMALKISDAILEDY

SEQ ID NO: 1902 - protein, 576 aa, Aspergillus niger
IEASLLTDPKDVSGRTVDYIIAGGGLTGLTTAARLTENPNISVLVIESGSYESDRGPIIEDLNAYGDIFGSSVDHAYETVELATNNQTALIRSGNGLGGSTLVNGGTWTRPHKAQVDSWETVFGNEGWNWKNVAAYSLQAERARAPNAKQIAAGHYFNASCHGVNGTVHAGPRDTGDDYSPIVKALMSAVEDRGVPTKKDFGCGDPHGVSMFPNTLHEDQVRSDAAREWLLPNYQRPNLQVLTGQYVGKVLLSQNGTTPRAVGVEFGTHKGNTHNVYAKHEVLLAAGSAVSPTILEYSGIGMKSILEPLGIDTVVDLPVGLNLQDQTTATVRSRITSAGAGQGQAAWFATFNETFGDYSEKAHELLNTKLEQWAEEAVARGGFHNTTALLIQYENYRDWIVNHNVAYSELFLDTAGVASFDVWDLLPFTRGYVHILDKDPYLHHFAYDPQYFLNELDLLGQAAATQLARNISNSGAMQTYFAGETIPGDNLAYDADLSAWTEYIPYHFRPNYHGVGTCSMMPKEMGGVVDNAARVYGVQGLRVIDGSIPPTQMSSHVMTVFYAMALKISDAILEDY

SEQ ID NO: 1903 - protein, 576 aa, Aspergillus niger
IEASLLTDPKDVSGRTVDYIIAGGGLTGLTTAARLTENPNISVLVIESGSYESDRGPIIEDLNRYGDIFGSSVDHAYETVELATNNQTALIRSGNGLGGSTLVNGGTWTRPHKAQVDSWETVFGNEGWNWDNVAAYSLQAERARAPNAKQIAAGHYFNASCHGVNGTVHAGPRDTGDDYSPIVKALMSAVEDRGVPTKKDFGCGDPHGVSMFPNTLHEDQVRSDAAREWLLPNYQRPNLQVLTGQYVGKVLLSQNGTTPRAVGVEFGTHKGNTHNVYAKHEVLLAAGSAVSPTILEYSGIGMKSILEPLGIDTVVDLPVGLNLQDQTTATVRSRITSAGAGQGQAAWFATFNETFGDYSEKAHELLNTKLEQWAEEAVARGGFHNTTALLIQYENYRDWIVNHNVAYSELFLDTKGVASFDVWDLLPFTRGYVHILDKDPYLHHFAYDPQYFLNELDLLGQAAATQLARNISNSGAMQTYFAGETIPGDNLAYDADLSAWTEYIPYHFRPNYHGVGTCSMMPKEMGGVVDNAARVYGVQGLRVIDGSIPPTQMSSHVMTVFYAMALKISDAILEDY

SEQ ID NO: 1904 - protein, 576 aa, Aspergillus niger
IEASLLTDPKDVSGRTVDYIIAGGGLTGLTTAARLTENPNISVLVIESGSYESDRGPIIEDLNRYGDIFGSSVDHAYETVELATNNQTALIRSGNGLGGSTLVNGGTWTRPHKAQVDSWETVFGNEGWNWDNVAAYSLQAERARAPNAKQIAAGHYFNASCHGVNGTVHAGPRDTGDDYSPIVKALMSAVEDRGVPTKKDFGCGDPHGVSMFPNTLHEDQVRSDAAREWLLPNYQRPNLQVLTGQYVGKVLLSQNGTTPRAVGVEFGTHKGNTHNVYAKHEVLLAAGSAVSPTILEYSGIGMKSILEPLGIDTVVDLPVGLNLQDQTTATVRSRITSAGAGQGQAAWFATFNETFGDYSEKAHELLNTKLEQWAEEAVARGGFHNTTALLIQYENYRDWIVNHNVAYSELFLDTRGVASFDVWDLLPFTRGYVHILDKDPYLHHFAYDPQYFLNELDLLGQAAATQLARNISNSGAMQTYFAGETIPGDNLAYDADLSAWTEYIPYHFRPNYHGVGTCSMMPKEMGGVVDNAARVYGVQGLRVIDGSIPPTQMSSHVMTVFYAMALKISDAILEDY

SEQ ID NO: 1905 - protein, 576 aa, Aspergillus niger
IEASLLTDPKDVSGRTVDYIIAGGGLTGLTTAARLTENPNISVLVIESGSYESDRGPIIEDLNKYGDIFGSSVDHAYETVELATNNQTALIRSGNGLGGSTLVNGGTWTRPHKAQVDSWETVFGNEGWNWDNVAAYSLQAERARAPNAKQIAAGHYFNASCHGVNGTVHAGPRDTGDDYSPIVKALMSAVEDRGVPTKKDFGCGDPHGVSMFPNTLHEDQVRSDAAREWLLPNYQRPNLQVLTGQYVGKVLLSQNGTTPRAVGVEFGTHKGNTHNVYAKHEVLLAAGSAVSPTILEYSGIGMKSILEPLGIDTVVDLPVGLNLQDQTTATVRSRITSAGAGQGQAAWFATFNETFGDYSEKAHELLNTKLEQWAEEAVARGGFHNTTALLIQYENYRDWIVNHNVAYSELFLDTRGVASFDVWDLLPFTRGYVHILDKDPYLHHFAYDPQYFLNELDLLGQAAATQLARNISNSGAMQTYFAGETIPGDNLAYDADLSAWTEYIPYHFRPNYHGVGTCSMMPKEMGGVVDNAARVYGVQGLRVIDGSIPPTQMSSHVMTVFYAMALKISDAILEDY

SEQ ID NO: 1906 - protein, 576 aa, Aspergillus niger
IEASLLTDPKDVSGRTVDYIIAGGGLTGLTTAARLTENPNISVLVIESGSYESDRGPIIEDLNAYGDIFGSSVDHAYETVELATNNQTALIRSGNGLGGSTLVNGGTWTRPHKAQVDSWETVFGNEGWNWDNVAAYSLQAERARAPNAKQIAAGHYFNASCHGVNGTVHAGPRDTGDDYSPIVKALMSAVEDRGVPTKKDFGCGDPHGVSMFPNTLHEDQVRSDAAREWLLPNYQRPNLQVLTGQYVGKVLLSQNGTTPRAVGVEFGTHKGNTHNVYAKHEVLLAAGSAVSPTILEYSGIGMKSILEPLGIDTVVDLPVGLNLQDQTTATVRSRITSAGAGQGQAAWFATFNETFGDYSEKAHELLNTKLEQWAEEAVARGGFHNTTALLIQYENYRDWIVNHNVAYSELFLDTNGVASFDVWDLLPFTRGYVHILDKDPYLHHFAYDPQYFLNELDLLGQAAATQLARNISNSGAMQTYFAGETIPGDNLAYDADLSAWTEYIPYHFRPNYHGVGTCSMMPKEMGGVVDNAARVYGVQGLRVIDGSIPPTQMSSHVMTVFYAMALKISDAILEDY

SEQ ID NO: 1907 - protein, 576 aa, Aspergillus niger
IEASLLTDPKDVSGRTVDYIIAGGGLTGLTTAARLTENPNISVLVIESGSYESDRGPIIEDLNAYGDIFGSSVDHAYETVELATNNQTALIRSGNGLGGSTLVNGGTWTRPHKAQVDSWETVFGNEGWNWDNVAAYSLQAERARAPNAKQIAAGHYFNASCHGVNGTVHAGPRDTGDDYSPIVKALMSAVEDRGVPTKKDFGCGDPHGVSMFPNTLHEDQVRSDAAREWLLPNYQRPNLQVLTGQYVGKVLLSQNGTTPRAVGVEFGTHKGNTHNVYAKHEVLLAAGSAVSPTILEYSGIGMKSILEPLGIDTVVDLPVGLNLQDQTTATVRSRITSAGAGQGQAAWFATFNETFGDYSEKAHELLNTKLEQWAEEAVARGGFHNTPALLIQYENYRDWIVNHNVAYSELFLDTAGVASFDVWDLLPFTRGYVHILDKDPYLHHFAYDPQYFLNELDLLGQAAATQLARNISNSGAMQTYFAGETIPGDNLAYDADLSAWTEYIPYHFRPNYHGVGTCSMMPKEMGGVVDNAARVYGVQGLRVIDGSIPPTQMSSHVMTVFYAMALKISDAILEDY

SEQ ID NO: 1908 - protein, 576 aa, Aspergillus niger
IEASLLTDPKDVSGRTVDYIIAGGGLTGLTTAARLTENPNISVLVIESGSYESDRGPIIEDLNAYGDIFGSSVDHAYETVELATNNQTALIRSGNGLGGSTLVNGGTWTRPHKAQVDSWETVFGNEGWNWDNVAAYSLQAERARAPNAKQIAAGHYFNASCHGRNGTVHAGPRDTGDDYSPIVKALMSAVEDRGVPTKKDFGCGDPHGVSMFPNTLHEDQVRSDAAREWLLPNYQRPNLQVLTGQYVGKVLLSQNGTTPRAVGVEFGTHKGNTHNVYAKHEVLLAAGSAVSPTILEYSGIGMKSILEPLGIDTVVDLPVGLNLQDQTTATVRSRITSAGAGQGQAAWFATFNETFGDYSEKAHELLNTKLEQWAEEAVARGGFHNTTALLIQYENYRDWIVNHNVAYSELFLDTAGVASFDVWDLLPFTRGYVHILDKDPYLHHFAYDPQYFLNELDLLGQAAATQLARNISNSGAMQTYFAGETIPGDNLAYDADLSAWTEYIPYHFRPNYHGVGTCSMMPKEMGGVVDNAARVYGVQGLRVIDGSIPPTQMSSHVMTVFYAMALKISDAILEDY

SEQ ID NO: 1909 - protein, 576 aa, Aspergillus niger
IEASLLTDPKDVSGRTVDYIIAGGGLTGLTTAARLTENPNISVLVIESGSYESDRGPIIEDLNAYGDIFGSSVDHAYETVELATNNQTALIRSGNGLGGSTLVNGGTWTRPHKAQVDSWETVFGNEGWNWDNVAAYSLQAERARAPNAKQIAAGHYFNASCHGVNGTVHAGPRDTGDDYSPIVKALMSAVEDRGVPTKKDFGCGDPHGVSMFPNTLHEDQVRSDAAREWLLPNYQRPNLQVLTGQYVGKVLLSQNGTTPRAVGVEFGTHKGNTHNVYAKHEVLLAAGSAVSPTILEYSGIGMKSILEPLGIDTVVDLPVGLNLQDQTTATVRSRITSAGAGQGQAAWFATFNETFGDYSEKAHELLNTKLEQWAEEAVARGGFHNTTALLIQYENYRDWIVNHNVAYSELFLDTAGVASFDVWDLLPFTRGYVHILDKDPYLHHFAYDPQYFLNELDLLGQAAATQLARNISNSGAMQTYFAGETIPGDNLPYDADLSAWTEYIPYHFRPNYHGVGTCSMMPKEMGGVVDNAARVYGVQGLRVIDGSIPPTQMSSHVMTVFYAMALKISDAILEDY

SEQ ID NO: 1910 - protein, 576 aa, Aspergillus niger
IEASLLTDPKDVSGRTVDYIIAGGGLTGLTTAARLTENPNISVLVIESGSYESDRGPIIEDLNAYGDIFGSSVDHAYETVELATNNQTALIRSGNGLGGSTLVNGGTWTRPHKAQVDSWETVFGNEGWNWDNVAAYSLQAERARAPNAKQIAAGHYFNASCHGVNGTVHAGPRDTGDDYSPIVDALMSAVEDRGVPTKKDFGCGDPHGVSMFPNTLHEDQVRSDAAREWLLPNYQRPNLQVLTGQYVGKVLLSQNGTTPRAVGVEFGTHKGNTHNVYAKHEVLLAAGSAVSPTILEYSGIGMKSILEPLGIDTVVDLPVGLNLQDQTTATVRSRITSAGAGQGQAAWFATFNETFGDYSEKAHELLNTKLEQWAEEAVARGGFHNTTALLIQYENYRDWIVNHNVAYSELFLDTAGVASFDVWDLLPFTRGYVHILDKDPYLHHFAYDPQYFLNELDLLGQAAATQLARNISNSGAMQTYFAGETIPGDNLAYDADLSAWTEYIPYHFRPNYHGVGTCSMMPKEMGGVVDNAARVYGVQGLRVIDGSIPPTQMSSHVMTVFYAMALKISDAILEDY

SEQ ID NO: 1911 - protein, 576 aa, Aspergillus niger
IEASLLTDPKDVSGRTVDYIIAGGGLTGLTTAARLTENPNISVLVIESGSYESDRGPIIEDLNFYGDIFGSSVDHAYETVELATNNQTALIRSGNGLGGSTLVNGGTWTRPHKAQVDSWETVFGNEGWNWDNVAAYSLQAERARAPNAKQIAAGHYFNASCHGVNGTVHAGPRDTGDDYSPIVKALMSAVEDRGVPTKKDFGCGDPHGVSMFPNTLHEDQVRSDAAREWLLPNYQRPNLQVLTGQYVGKVLLSQNGTTPRAVGVEFGTHKGNTHNVYAKHEVLLAAGSAVSPTILEYSGIGMKSILEPLGIDTVVDLPVGLNLQDQTTATVRSRITSAGAGQGQAAWFATFNETFGDYSEKAHELLNTKLEQWAEEAVARGGFHNTTALLIQYENYRDWIVNHNVAYSELFLDTKGVASFDVWDLLPFTRGYVHILDKDPYLHHFAYDPQYFLNELDLLGQAAATQLARNISNSGAMQTYFAGETIPGDNLAYDADLSAWTEYIPYHFRPNYHGVGTCSMMPKEMGGVVDNAARVYGVQGLRVIDGSIPPTQMSSHVMTVFYAMALKISDAILEDY

SEQ ID NO: 1912 - protein, 576 aa, Aspergillus niger
IEASLLTDPKDVSGRTVDYIIAGGGLTGLTTAARLTENPNISVLVIESGSYESDRGPIIEDLNQYGDIFGSSVDHAYETVELATNNQTALIRSGNGLGGSTLVNGGTWTRPHKAQVDSWETVFGNEGWNWDNVAAYSLQAERARAPNAKQIAAGHYFNASCHGVNGTVHAGPRDTGDDYSPIVKALMSAVEDRGVPTKKDFGCGDPHGVSMFPNTLHEDQVRSDAAREWLLPNYQRPNLQVLTGQYVGKVLLSQNGTTPRAVGVEFGTHKGNTHNVYAKHEVLLAAGSAVSPTILEYSGIGMKSILEPLGIDTVVDLPVGLNLQDQTTATVRSRITSAGAGQGQAAWFATFNETFGDYSEKAHELLNTKLEQWAEEAVARGGFHNTTALLIQYENYRDWIVNHNVAYSELFLDTRGVASFDVWDLLPFTRGYVHILDKDPYLHHFAYDPQYFLNELDLLGQAAATQLARNISNSGAMQTYFAGETIPGDNLAYDADLSAWTEYIPYHFRPNYHGVGTCSMMPKEMGGVVDNAARVYGVQGLRVIDGSIPPTQMSSHVMTVFYAMALKISDAILEDY

SEQ ID NO: 1913 - protein, 576 aa, Aspergillus niger
IEASLLTDPKDVSGRTVDYIIAGGGLTGLTTAARLTENPNISVLVIESGSYESDRGPIIEDLNAYGDIFGSSVDHAYETVELATNNQTALIRSGNGLGGSTLVNGGTWTRPHKAQVDSWETVFGNEGWNWDNVAAYSLQAERARAPNDKQIAAGHYFNASCHGVNGTVHAGPRDTGDDYSPIVKALMSAVEDRGVPTKKDFGCGDPHGVSMFPNTLHEDQVRSDAAREWLLPNYQRPNLQVLTGQYVGKVLLSQNGTTPRAVGVEFGTHKGNTHNVYAKHEVLLAAGSAVSPTILEYSGIGMKSILEPLGIDTVVDLPVGLNLQDQTTATVRSRITSAGAGQGQAAWFATFNETFGDYSEKAHELLNTKLEQWAEEAVARGGFHNTTALLIQYENYRDWIVNHNVAYSELFLDTAGVASFDVWDLLPFTRGYVHILDKDPYLHHFAYDPQYFLNELDLLGQAAATQLARNISNSGAMQTYFAGETIPGDNLAYDADLSAWTEYIPYHFRPNYHGVGTCSMMPKEMGGVVDNAARVYGVQGLRVIDGSIPPTQMSSHVMTVFYAMALKISDAILEDY

SEQ ID NO: 1914 - protein, 576 aa, Aspergillus niger
IEASLLTDPKDVSGRTVDYIIAGGGLTGLTTAARLTENPNISVLVIESGSYESDRGPIIEDLNAYGDIFGSSVDHAYETVELATNNQTALIRSGNGLGGSTLVNGGTWTRPHKAQVDSWETVFGNEGWNWDNVAAYSLQAERARAPNAKQIAAGHYFNASCHGVNGTVHAGPRDTGDDYSPIVKALMSAVEDRGVPTKEDFGCGDPHGVSMFPNTLHEDQVRSDAAREWLLPNYQRPNLQVLTGQYVGKVLLSQNGTTPRAVGVEFGTHKGNTHNVYAKHEVLLAAGSAVSPTILEYSGIGMKSILEPLGIDTVVDLPVGLNLQDQTTATVRSRITSAGAGQGQAAWFATFNETFGDYSEKAHELLNTKLEQWAEEAVARGGFHNTTALLIQYENYRDWIVNHNVAYSELFLDTAGVASFDVWDLLPFTRGYVHILDKDPYLHHFAYDPQYFLNELDLLGQAAATQLARNISNSGAMQTYFAGETIPGDNLAYDADLSAWTEYIPYHFRPNYHGVGTCSMMPKEMGGVVDNAARVYGVQGLRVIDGSIPPTQMSSHVMTVFYAMALKISDAILEDY

SEQ ID NO: 1915 - protein, 576 aa, Aspergillus niger
IEASLLTDPKDVSGRTVDYIIAGGGLTGLTTAARLTENPNISVLVIESGSYESDRGPIIEDLNAYGDIFGSSVDHAYETVELATNNQTALIRSGNGLGGSTLVNGGTWTRPHKAQVDSWETVFGNEGWNWDNVAAYSLQAERARAPNAKQIAAGHYFNASCHGVNGTVHAGPRDTGDDYSPIVKALMSAVEDRGVPTKKDFGCGDPHGVSMFPNTLHEDQVRSDAAREWLLPNYQRPNLQVLTGQYVGKVLLSQNGTTPRAVGVEFGTHKGNTHNVYAKHEVLLAAGSAVSPTILEYSGIGMKSILEPLGIDTVVDLPVGLNLQDQTTATVRSRITSAGAGQGQAAWFATFNETFGDYSEKAHELLNTKLEQWAEEAVARGGFDNTTALLIQYENYRDWIVNHNVAYSELFLDTAGVASFDVWDLLPFTRGYVHILDKDPYLHHFAYDPQYFLNELDLLGQAAATQLARNISNSGAMQTYFAGETIPGDNLAYDADLSAWTEYIPYHFRPNYHGVGTCSMMPKEMGGVVDNAARVYGVQGLRVIDGSIPPTQMSSHVMTVFYAMALKISDAILEDY

SEQ ID NO: 1916 - protein, 576 aa, Aspergillus niger
IEASLLTDPKDVSGRTVDYIIAGGGLTGLTTAARLTENPNISVLVIESGSYESDRGPIIEDLNNYGDIFGSSVDHAYETVELATNNQTALIRSGNGLGGSTLVNGGTWTRPHKAQVDSWETVFGNEGWNWDNVAAYSLQAERARAPNAKQIAAGHYFNASCHGVNGTVHAGPRDTGDDYSPIVKALMSAVEDRGVPTKKDFGCGDPHGVSMFPNTLHEDQVRSDAAREWLLPNYQRPNLQVLTGQYVGKVLLSQNGTTPRAVGVEFGTHKGNTHNVYAKHEVLLAAGSAVSPTILEYSGIGMKSILEPLGIDTVVDLPVGLNLQDQTTATVRSRITSAGAGQGQAAWFATFNETFGDYSEKAHELLNTKLEQWAEEAVARGGFHNTTALLIQYENYRDWIVNHNVAYSELFLDTNGVASFDVWDLLPFTRGYVHILDKDPYLHHFAYDPQYFLNELDLLGQAAATQLARNISNSGAMQTYFAGETIPGDNLAYDADLSAWTEYIPYHFRPNYHGVGTCSMMPKEMGGVVDNAARVYGVQGLRVIDGSIPPTQMSSHVMTVFYAMALKISDAILEDY

SEQ ID NO: 1917 - protein, 576 aa, Aspergillus niger
IEASLLTDPKDVSGRTVDYIIAGGGLTGLTTAARLTENPNISVLVIESGSYESDRGPIIEDLNAYGDIFGSSVDHAYETVELATNNQTALIRSGNGLGGSTLVNGGTWTRPHKAQVDSWETVFGNEGWNWDNVAAYSLQAERARAPNAKQIAAGHYFNASCHGVNGTVHAGPRDTGDDYSPIVKALMSAVEDRGVPTKKDFGCGDPHGVSMFPNTLHEDQVRSDAAREWLLPNYQRPNLQVLTGQYVGKVLLSQNGTTPRAVGVEFGTHKGNTHNVYAKHEVLLAAGSAVSPTILEYSGIGMPSILEPLGIDTVVDLPVGLNLQDQTTATVRSRITSAGAGQGQAAWFATFNETFGDYSEKAHELLNTKLEQWAEEAVARGGFHNTTALLIQYENYRDWIVNHNVAYSELFLDTAGVASFDVWDLLPFTRGYVHILDKDPYLHHFAYDPQYFLNELDLLGQAAATQLARNISNSGAMQTYFAGETIPGDNLAYDADLSAWTEYIPYHFRPNYHGVGTCSMMPKEMGGVVDNAARVYGVQGLRVIDGSIPPTQMSSHVMTVFYAMALKISDAILEDY

SEQ ID NO: 1918 - protein, 576 aa, Aspergillus niger
IEASLLTDPKDVSGRTVDYIIAGGGLTGLTTAARLTENPNISVLVIESGSYESDRGPIIEDLNAYGDIFGSSVDHAYETVELATNNQTALIRSGNGLGGSTLVNGGTWTRPHKAQVDSWETVFGNEGWNWDNVAAYSLQAERARAPNAKQIAAGHYFNASCHGVNGTVHAGPRDTGDDYSPIVEALMSAVEDRGVPTKKDFGCGDPHGVSMFPNTLHEDQVRSDAAREWLLPNYQRPNLQVLTGQYVGKVLLSQNGTTPRAVGVEFGTHKGNTHNVYAKHEVLLAAGSAVSPTILEYSGIGMKSILEPLGIDTVVDLPVGLNLQDQTTATVRSRITSAGAGQGQAAWFATFNETFGDYSEKAHELLNTKLEQWAEEAVARGGFHNTTALLIQYENYRDWIVNHNVAYSELFLDTAGVASFDVWDLLPFTRGYVHILDKDPYLHHFAYDPQYFLNELDLLGQAAATQLARNISNSGAMQTYFAGETIPGDNLAYDADLSAWTEYIPYHFRPNYHGVGTCSMMPKEMGGVVDNAARVYGVQGLRVIDGSIPPTQMSSHVMTVFYAMALKISDAILEDY

SEQ ID NO: 1919 - protein, 576 aa, Aspergillus niger
IEASLLTDPKDVSGRTVDYIIAGGGLTGLTTAARLTENPNISVLVIESGSYESDRGPIIEDLNQYGDIFGSSVDHAYETVELATNNQTALIRSGNGLGGSTLVNGGTWTRPHKAQVDSWETVFGNEGWNWDNVAAYSLQAERARAPNAKQIAAGHYFNASCHGVNGTVHAGPRDTGDDYSPIVKALMSAVEDRGVPTKKDFGCGDPHGVSMFPNTLHEDQVRSDAAREWLLPNYQRPNLQVLTGQYVGKVLLSQNGTTPRAVGVEFGTHKGNTHNVYAKHEVLLAAGSAVSPTILEYSGIGMKSILEPLGIDTVVDLPVGLNLQDQTTATVRSRITSAGAGQGQAAWFATFNETFGDYSEKAHELLNTKLEQWAEEAVARGGFHNTTALLIQYENYRDWIVNHNVAYSELFLDTNGVASFDVWDLLPFTRGYVHILDKDPYLHHFAYDPQYFLNELDLLGQAAATQLARNISNSGAMQTYFAGETIPGDNLAYDADLSAWTEYIPYHFRPNYHGVGTCSMMPKEMGGVVDNAARVYGVQGLRVIDGSIPPTQMSSHVMTVFYAMALKISDAILEDY

SEQ ID NO: 1920 - protein, 576 aa, Aspergillus niger
IEASLLTDPKDVSGRTVDYIIAGGGLTGLTTAARLTENPNISVLVIESGSYESDRGPIIEDLNFYGDIFGSSVDHAYETVELATNNQTALIRSGNGLGGSTLVNGGTWTRPHKAQVDSWETVFGNEGWNWDNVAAYSLQAERARAPNAKQIAAGHYFNASCHGVNGTVHAGPRDTGDDYSPIVKALMSAVEDRGVPTKKDFGCGDPHGVSMFPNTLHEDQVRSDAAREWLLPNYQRPNLQVLTGQYVGKVLLSQNGTTPRAVGVEFGTHKGNTHNVYAKHEVLLAAGSAVSPTILEYSGIGMKSILEPLGIDTVVDLPVGLNLQDQTTATVRSRITSAGAGQGQAAWFATFNETFGDYSEKAHELLNTKLEQWAEEAVARGGFHNTTALLIQYENYRDWIVNHNVAYSELFLDTNGVASFDVWDLLPFTRGYVHILDKDPYLHHFAYDPQYFLNELDLLGQAAATQLARNISNSGAMQTYFAGETIPGDNLAYDADLSAWTEYIPYHFRPNYHGVGTCSMMPKEMGGVVDNAARVYGVQGLRVIDGSIPPTQMSSHVMTVFYAMALKISDAILEDY

SEQ ID NO: 1921 - protein, 576 aa, Aspergillus niger
IEASLLTDPKDVSGRTVDYIIAGGGLTGLTTAARLTENPNISVLVIESGSYESDRGPIIEDLNKYGDIFGSSVDHAYETVELATNNQTALIRSGNGLGGSTLVNGGTWTRPHKAQVDSWETVFGNEGWNWDNVAAYSLQAERARAPNAKQIAAGHYFNASCHGVNGTVHAGPRDTGDDYSPIVKALMSAVEDRGVPTKKDFGCGDPHGVSMFPNTLHEDQVRSDAAREWLLPNYQRPNLQVLTGQYVGKVLLSQNGTTPRAVGVEFGTHKGNTHNVYAKHEVLLAAGSAVSPTILEYSGIGMKSILEPLGIDTVVDLPVGLNLQDQTTATVRSRITSAGAGQGQAAWFATFNETFGDYSEKAHELLNTKLEQWAEEAVARGGFHNTTALLIQYENYRDWIVNHNVAYSELFLDTNGVASFDVWDLLPFTRGYVHILDKDPYLHHFAYDPQYFLNELDLLGQAAATQLARNISNSGAMQTYFAGETIPGDNLAYDADLSAWTEYIPYHFRPNYHGVGTCSMMPKEMGGVVDNAARVYGVQGLRVIDGSIPPTQMSSHVMTVFYAMALKISDAILEDY

SEQ ID NO: 1922 - protein, 576 aa, Aspergillus niger
IEASLLTDPKDVSGRTVDYIIAGGGLTGLTTAARLTENPNISVLVIESGSYESDRGPIIEDLNAYGDIFGSSVDHAYETVELATNNQTALIRSGNGLGGSTLVNGGTWTRPHKAQVDSWETVFGNEGWNWDNVAAYSLQAERARAPNAKQIAAGHYFNASCHGVNGTVHAGPRDTGDDYSPIVKALMSAVEDRGVPTKKDFGCGDPHGVSMFPNTLHEDQVRSDAAREWLLPNYQRPNLQVLTGQYVGKVLLSQNGTTPRAVGVEFGTHKGNTHNVYAKHEVLLAAGSAVSPTILEYSGIGMKSILEPLGIDTVVDLPVGLNLQDQTTATVRSRITSAGAGQGQAAWFATFNETFGDYSEKAHELLNTKLEQWAEEAVARGGFHNTTALLIQYENYRDWIVNHNVAYSELFLDTKGVASFDVWDLLPFTRGYVHILDKDPYLHHFAYDPQYFLNELDLLGQAAATQLARNISNSGAMQTYFAGETIPGDNLAYDADLSAWTEYIPYHFRPNYHGVGTCSMMPKEMGGVVDNAARVYGVQGLRVIDGSIPPTQMSSHVMTVFYAMALKISDAILEDY

SEQ ID NO: 1923 - protein, 576 aa, Aspergillus niger
IEASLLTDPKDVSGRTVDYIIAGGGLTGLTTAARLTENPNISVLVIESGSYESDRGPIIEDLNQYGDIFGSSVDHAYETVELATNNQTALIRSGNGLGGSTLVNGGTWTRPHKAQVDSWETVFGNEGWNWDNVAAYSLQAERARAPNAKQIAAGHYFNASCHGVNGTVHAGPRDTGDDYSPIVKALMSAVEDRGVPTKKDFGCGDPHGVSMFPNTLHEDQVRSDAAREWLLPNYQRPNLQVLTGQYVGKVLLSQNGTTPRAVGVEFGTHKGNTHNVYAKHEVLLAAGSAVSPTILEYSGIGMKSILEPLGIDTVVDLPVGLNLQDQTTATVRSRITSAGAGQGQAAWFATFNETFGDYSEKAHELLNTKLEQWAEEAVARGGFHNTTALLIQYENYRDWIVNHNVAYSELFLDTKGVASFDVWDLLPFTRGYVHILDKDPYLHHFAYDPQYFLNELDLLGQAAATQLARNISNSGAMQTYFAGETIPGDNLAYDADLSAWTEYIPYHFRPNYHGVGTCSMMPKEMGGVVDNAARVYGVQGLRVIDGSIPPTQMSSHVMTVFYAMALKISDAILEDY

SEQ ID NO: 1924 - protein, 576 aa, Aspergillus niger
IEASLLTDPKDVSGRTVDYIIAGGGLTGLTTAARLTENPNISVLVIESGSYESDRGPIIEDLNMYGDIFGSSVDHAYETVELATNNQTALIRSGNGLGGSTLVNGGTWTRPHKAQVDSWETVFGNEGWNWDNVAAYSLQAERARAPNAKQIAAGHYFNASCHGVNGTVHAGPRDTGDDYSPIVKALMSAVEDRGVPTKKDFGCGDPHGVSMFPNTLHEDQVRSDAAREWLLPNYQRPNLQVLTGQYVGKVLLSQNGTTPRAVGVEFGTHKGNTHNVYAKHEVLLAAGSAVSPTILEYSGIGMKSILEPLGIDTVVDLPVGLNLQDQTTATVRSRITSAGAGQGQAAWFATFNETFGDYSEKAHELLNTKLEQWAEEAVARGGFHNTTALLIQYENYRDWIVNHNVAYSELFLDTKGVASFDVWDLLPFTRGYVHILDKDPYLHHFAYDPQYFLNELDLLGQAAATQLARNISNSGAMQTYFAGETIPGDNLAYDADLSAWTEYIPYHFRPNYHGVGTCSMMPKEMGGVVDNAARVYGVQGLRVIDGSIPPTQMSSHVMTVFYAMALKISDAILEDY

SEQ ID NO: 1925 - protein, 576 aa, Aspergillus niger
IEASLLTDPKDVSGRTVDYIIAGGGLTGLTTAARLTENPNISVLVIESGSYESDRGPIIEDLNRYGDIFGSSVDHAYETVELATNNQTALIRSGNGLGGSTLINGGTWTRPHKAQVDSWETVFGNEGWNWDNVAAYSLQAERARAPNAKQIAAGHYFNASCHGVNGTVHAGPRDTGDDYSPIVKALMSAVEDRGVPTKKDFGCGDPHGVSMFPNTLHEDQVRSDAAREWLLPNYQRPNLQVLTGQYVGKVLLSQNGTTPRAVGVEFGTHKGNTFNVYAKHEVLLAAGSAVSPTILEYSGIGMKSILEPLGIDTVVDLPVGLNLQDQTTATVRSRITSAGAGQGQAAWFATFNETFGDYSEKAHELLNTKLEQWAEEAVARGGFHNTTALLIQYENYRDWIVNHNVAYSELFLDTKGVASFDVWDLLPFTRGYVHILDKDPYLHHFAYDPQYFLNELDLLGQAAATQLARNISNSGAMQTYFAGETIPGDNLAYDADLSAWTEYIPYHFRPNYHGVGTCSMMPKEMGGVVDNAARVYGVQGLRVIDGSIPPTQMSSHVMTVFYAMALKISDAILEDY

SEQ ID NO: 1926 - protein, 576 aa, Aspergillus niger
IEASLLTDPKDVSGRTVDYIIAGGGLTGLTTAARLTENPNISVLVIESGSYESDRGPIIEDLNLYGDIFGSSVDHAYETVELATNNQTALIRSGNGLGGSTLVNGGTWTRPHKAQVDSWETVFGNEGWNWDNVAAYSLQAERARAPNAKQIAAGHYFNASCHGVNGTVHAGPRDTGDDYSPIVKALMSAVEDRGVPTKKDFGCGDPHGVSMFPNTLHEDQVRSDAAREWLLPNYQRPNLQVLTGQYVGKVLLSQNGTTPRAVGVEFGTHKGNTHNVYAKHEVLLAAGSAVSPTILEYSGIGMKSILEPLGIDTVVDLPVGLNLQDQTTATVRSRITSAGAGQGQAAWFATFNETFGDYSEKAHELLNTKLEQWAEEAVARGGFHNTTALLIQYENYRDWIVNHNVAYSELFLDTKGVASFDVWDLLPFTRGYVHILDKDPYLHHFAYDPQYFLNELDLLGQAAATQLARNISNSGAMQTYFAGETIPGDNLAYDADLSAWTEYIPYHFRPNYHGVGTCSMMPKEMGGVVDNAARVYGVQGLRVIDGSIPPTQMSSHVMTVFYAMALKISDAILEDY

SEQ ID NO: 1927 - protein, 576 aa, Aspergillus niger
IEASLLTDPKDVSGRTVDYIIAGGGLTGLTTAARLTENPNISVLVIESGSYESDRGPIIEDLNAYGDIFGSSVDHAYETVELATNNQTALIRSGNGLGGSTLVNGGTWTRPHKAQVDSWETVFGNEGWNWDNVAAYSLQAERARAPNAKQIAAGHYFNASCHGVNGTVHAGPRDRGDDYSPIVKALMSAVEDRGVPTKKDFGCGDPHGVSMFPNTLHEDQVRSDAAREWLLPNYQRPNLQVLTGQYVGKVLLSQNGTTPRAVGVEFGTHKGNTHNVYAKHEVLLAAGSAVSPTILEYSGIGMKSILEPLGIDTVVDLPVGLNLQDQTTATVRSRITSAGAGQGQAAWFATFNETFGDYSEKAHELLNTKLEQWAEEAVARGGFHNTTALLIQYENYRDWIVNHNVAYSELFLDTAGVASFDVWDLLPFTRGYVHILDKDPYLHHFAYDPQYFLNELDLLGQAAATQLARNISNSGAMQTYFAGETIPGDNLAYDADLSAWTEYIPYHFRPNYHGVGTCSMMPKEMGGVVDNAARVYGVQGLRVIDGSIPPTQMSSHVMTVFYAMALKISDAILEDY

SEQ ID NO: 1928 - protein, 576 aa, Aspergillus niger
IEASLLTDPKDVSGRTVDYIIAGGGLTGLTTAARLTENPNISVLVIESGSYESDRGPIIEDLNMYGDIFGSSVDHAYETVELATNNQTALIRSGNGLGGSTLVNGGTWTRPHKAQVDSWETVFGNEGWNWDNVAAYSLQAERARAPNAKQIAAGHYFNASCHGVNGTVHAGPRDTGDDYSPIVKALMSAVEDRGVPTKKDFGCGDPHGVSMFPNTLHEDQVRSDAAREWLLPNYQRPNLQVLTGQYVGKVLLSQNGTTPRAVGVEFGTHKGNTHNVYAKHEVLLAAGSAVSPTILEYSGIGMKSILEPLGIDTVVDLPVGLNLQDQTTATVRSRITSAGAGQGQAAWFATFNETFGDYSEKAHELLNTKLEQWAEEAVARGGFHNTTALLIQYENYRDWIVNHNVAYSELFLDTRGVASFDVWDLLPFTRGYVHILDKDPYLHHFAYDPQYFLNELDLLGQAAATQLARNISNSGAMQTYFAGETIPGDNLAYDADLSAWTEYIPYHFRPNYHGVGTCSMMPKEMGGVVDNAARVYGVQGLRVIDGSIPPTQMSSHVMTVFYAMALKISDAILEDY

SEQ ID NO: 1929 - protein, 576 aa, Aspergillus niger
IEASLLTDPKDVSGRTVDYIIAGGGLTGLTTAARLTENPNISVLVIESGSYESDRGPIIEDLNAYGDIFGSSVDHAYETVELATNNQTALIRSGNGLGGSTLINGGTWTRPHKAQVDSWETVFGNEGWNWDNVAAYSLQAERARAPNAKQIAAGHYFNASCHGVNGTVHAGPRDTGDDYSPIVKALMSAVEDRGVPTKKDFGCGDPHGVSMFPNTLHEDQVRSDAAREWLLPNYQRPNLQVLTGQYVGKVLLSQNGTTPRAVGVEFGTHKGNTHNVYAKHEVLLAAGSAVSPTILEYSGIGMKSILEPLGIDTVVDLPVGLNLQDQTTATVRSRITSAGAGQGQAAWFATFNETFGDYSEKAHELLNTKLEQWAEEAVARGGFHNTTALLIQYENYRDWIVNHNVAYSELFLDTAGVASFDVWDLLPFTRGYVHILDKDPYLHHFAYDPQYFLNELDLLGQAAATQLARNISNSGAMQTYFAGETIPGDNLAYDADLSAWTEYIPYHFRPNYHGVGTCSMMPKEMGGVVDNAARVYGVQGLRVIDGSIPPTQMSSHVMTVFYAMALKISDAILEDY

SEQ ID NO: 1930 - protein, 576 aa, Aspergillus niger
IEASLLTDPKDVSGRTVDYIIAGGGLTGLTLAARLTENPNISVLVIESGSYESDRGPIIEDLNRYGDIFGSSVDHAYETVELATNNQTALIRSGNGLGGSTLINGGTWTRPHKAQVDSWETVFGNEGWNWDNVAAYSLQAERARAPNAKQIAAGHYFNASCHGVNGTVHAGPRDTGDDYSPIVKALMSAVEDRGVPTKKDFGCGDPHGVSMFPNTLHEDQVRSDAAREWLLPNYQRPNLQVLTGQYVGKVLLSQNGTTPRAVGVEFGTHKGNTFNVYAKHEVLLAAGSAVSPTILEYSGIGMKSILEPLGIDTVVDLPVGLNLQDQTTATVRSRITSAGAGQGQAAWFATFNETFGDYSEKAHELLNTKLEQWAEEAVARGGFHNTTALLIQYENYRDWIVNHNVAYSELFLDTKGVASFDVWDLLPFTRGYVHILDKDPYLHHFAYDPQYFLNELDLLGQAAATQLARNISNSGAMQTYFAGETIPGDNLAYDADLSAWTEYIPYHFRPNYHGVGTCSMMPKEMGGVVDNAARVYGVQGLRVIDGSIPPTQMSSHVMTVFYAMALKISDAILEDY

SEQ ID NO: 1931 - protein, 576 aa, Aspergillus niger
IEASLLTDPKDVSGRTVDYIIAGGGLTGLTTAARLTENPNISVLVIESGSYESDRGPIIEDLNAYGDIFGSSVDHAYETVELATNNQTALIRSGNGLGGSTLVNGGTWTRPHKAQVDSWETVFGNEGWNWDNVAAYSLQAERARAPNAKQIAAGHYFNASCHGVNGTVHAGPRDTGDDYSPIVKALMSAVEDRGVPTKADFGCGDPHGVSMFPNTLHEDQVRSDAAREWLLPNYQRPNLQVLTGQYVGKVLLSQNGTTPRAVGVEFGTHKGNTHNVYAKHEVLLAAGSAVSPTILEYSGIGMKSILEPLGIDTVVDLPVGLNLQDQTTATVRSRITSAGAGQGQAAWFATFNETFGDYSEKAHELLNTKLEQWAEEAVARGGFHNTTALLIQYENYRDWIVNHNVAYSELFLDTAGVASFDVWDLLPFTRGYVHILDKDPYLHHFAYDPQYFLNELDLLGQAAATQLARNISNSGAMQTYFAGETIPGDNLAYDADLSAWTEYIPYHFRPNYHGVGTCSMMPKEMGGVVDNAARVYGVQGLRVIDGSIPPTQMSSHVMTVFYAMALKISDAILEDY

SEQ ID NO: 1932 - protein, 576 aa, Aspergillus niger
IEASLLTDPKDVSGRTVDYIIAGGGLTGLTTAARLTENPNISVLVIESGSYESDRGPIIEDLNLYGDIFGSSVDHAYETVELATNNQTALIRSGNGLGGSTLVNGGTWTRPHKAQVDSWETVFGNEGWNWDNVAAYSLQAERARAPNAKQIAAGHYFNASCHGVNGTVHAGPRDTGDDYSPIVKALMSAVEDRGVPTKKDFGCGDPHGVSMFPNTLHEDQVRSDAAREWLLPNYQRPNLQVLTGQYVGKVLLSQNGTTPRAVGVEFGTHKGNTHNVYAKHEVLLAAGSAVSPTILEYSGIGMKSILEPLGIDTVVDLPVGLNLQDQTTATVRSRITSAGAGQGQAAWFATFNETFGDYSEKAHELLNTKLEQWAEEAVARGGFHNTTALLIQYENYRDWIVNHNVAYSELFLDTNGVASFDVWDLLPFTRGYVHILDKDPYLHHFAYDPQYFLNELDLLGQAAATQLARNISNSGAMQTYFAGETIPGDNLAYDADLSAWTEYIPYHFRPNYHGVGTCSMMPKEMGGVVDNAARVYGVQGLRVIDGSIPPTQMSSHVMTVFYAMALKISDAILEDY

SEQ ID NO: 1933 - protein, 576 aa, Aspergillus niger
IEASLLTDPKDVSGRTVDYIIAGGGLTGLTTAARLTENPNISVLVIESGSYESDRGPIIEDLNAYGDIFGSSVDHAYETVELATNNQTALIRSGNGLGGSTLVNGGTWTRPHKAQVDSWETVFGNEGWNWDNVAAYSLQAERARAPNAKQIAAGHYFNASCHGVNGTVHAGPRDTGDDYSPIVKALMSAVEDRGVPTKKDFGCGDPHGVSMFPNTLHEDQVRSDAAREWLLPNYQRPNLQVLTGQYVGKVLLSQNGTTPRAVGVEFGTHKGNTHNVYAKHEVLLAAGSAVSPTILEYSGIGMKSILEPLGIDTVVDLPVGLNLQDQTTATVRSRITSAGAGQGQAAWFATFNETFGDYSEKAHELLNTKLEQWAEEAVARGGFHNTTALLIQYENYRDWIVNHNVAYSELFLDTAGVASFDVWDLLPFTRGYVHILDKDPYLHHFAYDPQYFLNELDLLGQAAATQLARNISNSGAMQTYFAGETIPGDNLAYDADLSAWTEYIPYHFRPNYHGVGTCSMMPKEMGGVVDNAARVYGVQGLRVIDASIPPTQMSSHVMTVFYAMALKISDAILEDY

SEQ ID NO: 1934 - protein, 576 aa, Aspergillus niger
IEASLLTDPKDVSGRTVDYIIAGGGLTGLTTAARLTENPNISVLVIESGSYESDRGPIIEDLNFYGDIFGSSVDHAYETVELATNNQTALIRSGNGLGGSTLVNGGTWTRPHKAQVDSWETVFGNEGWNWDNVAAYSLQAERARAPNAKQIAAGHYFNASCHGVNGTVHAGPRDTGDDYSPIVKALMSAVEDRGVPTKKDFGCGDPHGVSMFPNTLHEDQVRSDAAREWLLPNYQRPNLQVLTGQYVGKVLLSQNGTTPRAVGVEFGTHKGNTHNVYAKHEVLLAAGSAVSPTILEYSGIGMKSILEPLGIDTVVDLPVGLNLQDQTTATVRSRITSAGAGQGQAAWFATFNETFGDYSEKAHELLNTKLEQWAEEAVARGGFHNTTALLIQYENYRDWIVNHNVAYSELFLDTRGVASFDVWDLLPFTRGYVHILDKDPYLHHFAYDPQYFLNELDLLGQAAATQLARNISNSGAMQTYFAGETIPGDNLAYDADLSAWTEYIPYHFRPNYHGVGTCSMMPKEMGGVVDNAARVYGVQGLRVIDGSIPPTQMSSHVMTVFYAMALKISDAILEDY

SEQ ID NO: 1935 - protein, 576 aa, Aspergillus niger
IEASLLTDPKDVSGRTVDYIIAGGGLTGLTTAARLTENPNISVLVIESGSYESDRGPIIEDLNAYGDIFGSSVDHAYETVELATNNQTALIRSGNGLGGSTLVNGGTWTRPHKAQVDSWETVFGNEGWNWDNVAAYSLQAERARAPNAKQIAAGHYFNASCHGVNGTVHAGPRDTGDDYSPIVKALMSAVEDRGVPTKKDFGCGDPHGVSMFPNTLHEDQVRSDAAREWLLPNYQRPNLQVLTGQYVGKVLLSQNGTTPRAVGVEFGTHKGNTHNVYAKHEVLLAAGSAVSPTILEYSGIGMKSILEPLGIDTVVDLPVGLNLQDQTTATVRSRITSAGAGQGQAAWFATFNETFGDYSEKAHELLNTKLEQWAEEAVARGGFHNTTALLIQYENYRDWIVNHNVAYSELFLDTAGVASFDVWDLLPFTRGYVHILDKDPYLHHFAYDPQYFLNDLDLLGQAAATQLARNISNSGAMQTYFAGETIPGDNLAYDADLSAWTEYIPYHFRPNYHGVGTCSMMPKEMGGVVDNAARVYGVQGLRVIDGSIPPTQMSSHVMTVFYAMALKISDAILEDY

SEQ ID NO: 1936 - protein, 576 aa, Aspergillus niger
IEASLLTDPKDVSGRTVDYIIAGGGLTGLTTAARLTENPNISVLVIESGSYESDRGPIIEDLNAYGDIFGSSVDHAYETVELATNNQTALIRSGNGLGGSTLVNGGTWTRPHKAQVDSWETVFGNEGWNWDNVAAYSLQAERARAPNAKQIAAGHYFNASCHGKNGTVHAGPRDTGDDYSPIVKALMSAVEDRGVPTKKDFGCGDPHGVSMFPNTLHEDQVRSDAAREWLLPNYQRPNLQVLTGQYVGKVLLSQNGTTPRAVGVEFGTHKGNTHNVYAKHEVLLAAGSAVSPTILEYSGIGMKSILEPLGIDTVVDLPVGLNLQDQTTATVRSRITSAGAGQGQAAWFATFNETFGDYSEKAHELLNTKLEQWAEEAVARGGFHNTTALLIQYENYRDWIVNHNVAYSELFLDTAGVASFDVWDLLPFTRGYVHILDKDPYLHHFAYDPQYFLNELDLLGQAAATQLARNISNSGAMQTYFAGETIPGDNLAYDADLSAWTEYIPYHFRPNYHGVGTCSMMPKEMGGVVDNAARVYGVQGLRVIDGSIPPTQMSSHVMTVFYAMALKISDAILEDY

SEQ ID NO: 1937 - protein, 576 aa, Aspergillus niger
IEASLLTDPKDVSGRTVDYIIAGGGLTGLTTAARLTENPNISVLVIESGSYESDRGPIIEDLNRYGDIFGSSVDHAYETVELATNNQTALIRSGNGLGGSTLINGGTWTRPHKAQVDSWETVFGNEGWNWDNVAAYSLQAERARAPNAKQIAAGHYFNASCHGVNGTVHAGPRDTGDDYSPIVKALMSAVEDRGVPTKKDFGCGDPHGVSMFPNTLHEDQVRSDAAREWLLPNYQRPNLQVLTGQYVGKVLLSQNGTTPRAVGVEFGTHKGNTFNVYAKHEVLLAAGSLVSPTILEYSGIGMKSILEPLGIDTVVDLPVGLNLQDQTTATVRSRITSAGAGQGQAAWFATFNETFGDYSEKAHELLNTKLEQWAEEAVARGGFHNTTALLIQYENYRDWIVNHNVAYSELFLDTKGVASFDVWDLLPFTRGYVHILDKDPYLHHFAYDPQYFLNELDLLGQAAATQLARNISNSGAMQTYFAGETIPGDNLAYDADLSAWTEYIPYHFRPNYHGVGTCSMMPKEMGGVVDNAARVYGVQGLRVIDGSIPPTQMSSHVMTVFYAMALKISDAILEDY

SEQ ID NO: 1938 - protein, 576 aa, Aspergillus niger
IEASLLTDPKDVSGRTVDYIIAGGGLTGLTTAARLTENPNISVLVIESGSYESDRGPIIEDLNAYGDIFGSSVDHAYETVELATNNQTALIRSGNGLGGSTLVNGGTWTRPHKAQVDSWETVFGNEGWNWDNVAAYSLQAERARAPNAKQIAAGHYFNASCHGVNGTVHAGPRDTGDDYSPIVKALMSAVEDRGVPTKKDFGCGDPHGVSMFPNTLHEDQVRSDAAREWLLPNYQRPNLQVLTGQYVGKVLLSQNGTTPRAVGVEFGTHKGNTHNVYAKHEVLLAAGSAVSPTILEYSGIGMKSILEPLGIDTVVDLPVGLNLQDQTTATVRSRITSAGAGQGQAAWFATFNETFGDYSEKAHELLNTKLEQWAEEAVARGGFHNTTALLIQYENYRDWIVNHNVAYSELFLDTRGVASFDVWDLLPFTRGYVHILDKDPYLHHFAYDPQYFLNELDLLGQAAATQLARNISNSGAMQTYFAGETIPGDNLAYDADLSAWTEYIPYHFRPNYHGVGTCSMMPKEMGGVVDNAARVYGVQGLRVIDGSIPPTQMSSHVMTVFYAMALKISDAILEDY

SEQ ID NO: 1939 - protein, 576 aa, Aspergillus niger
IEASLLTDPKDVSGRTVDYIIAGGGLTGLTTAARLTENPNISVLVIESGSFESDRGPIIEDLNAYGDIFGSSVDHAYETVELATNNQTALIRSGNGLGGSTLVNGGTWTRPHKAQVDSWETVFGNEGWNWDNVAAYSLQAERARAPNAKQIAAGHYFNASCHGVNGTVHAGPRDTGDDYSPIVKALMSAVEDRGVPTKKDFGCGDPHGVSMFPNTLHEDQVRSDAAREWLLPNYQRPNLQVLTGQYVGKVLLSQNGTTPRAVGVEFGTHKGNTHNVYAKHEVLLAAGSAVSPTILEYSGIGMKSILEPLGIDTVVDLPVGLNLQDQTTATVRSRITSAGAGQGQAAWFATFNETFGDYSEKAHELLNTKLEQWAEEAVARGGFHNTTALLIQYENYRDWIVNHNVAYSELFLDTAGVASFDVWDLLPFTRGYVHILDKDPYLHHFAYDPQYFLNELDLLGQAAATQLARNISNSGAMQTYFAGETIPGDNLAYDADLSAWTEYIPYHFRPNYHGVGTCSMMPKEMGGVVDNAARVYGVQGLRVIDGSIPPTQMSSHVMTVFYAMALKISDAILEDY

SEQ ID NO: 1940 - protein, 576 aa, Aspergillus niger
IEASLLTDPKDVSGRTVDYIIAGGGLTGLTTAARLTENPNISVLVIESGSYESDRGPIIEDLNAYGDIFGSSVDHAYETVELATNNQTALIRSGNGLGGSTLVNGGTWTRPHKAQVDSWETVFGNEGWNWDNVAAYSLQAERARAPNAKQIAAGHYFNASCHGVNGTVHAGPRDTGDDYSPIVKALMSAVEDRGVPTKKDFGCGDPHGVSMFPNTLHEDQVRSDAAREWLLPNYQRPNLQVLTGQYVGKVLLSQNGTTPRAVGVEFGTHKGNTHNVYAKHEVLLAAGSAVSPTILEYSGIGMKSILEPLGIDTVVDLPVGLNLQDQTTATVRSRITSAGAGQGQAAWFATFNETFGDYSEKAHELLNTKLPQWAEEAVARGGFHNTTALLIQYENYRDWIVNHNVAYSELFLDTAGVASFDVWDLLPFTRGYVHILDKDPYLHHFAYDPQYFLNELDLLGQAAATQLARNISNSGAMQTYFAGETIPGDNLAYDADLSAWTEYIPYHFRPNYHGVGTCSMMPKEMGGVVDNAARVYGVQGLRVIDGSIPPTQMSSHVMTVFYAMALKISDAILEDY

SEQ ID NO: 1941 - protein, 576 aa, Aspergillus niger
IEASLLTDPKDVSGRTVDYIIAGGGLTGLTTAARLTENPNISVLVIESGSYESDRGPIIEDLNAYGDIFGSSVDHAYETVELATNNQTALIRSGNGLGGSTLVNGGTWTRPHKAQVDSWETVFGNEGWNWDNVAAYSLQAERARAPNAKQIAAGHYFNASCHGVNGTVHAGPRDTGDDYSPIVKALMSAVEDRGVPTKKDFGCGDPHGVSMFPNTLHEDQVRSDAAREWLLPNYQRPNLQVLTGQYVGKVLLSQNGTTPRAVGVEFGTHKGNTHNVYAKHEVLLAAGSAVSPTILEYSGIGMKSILEPLGIDTVVDLPVGLNLQDQTTATVRSRITSAGAGQGQAAWFATFNETFGDYSEKAHELLNTKLEQWAEEAVARGGFHNTTALLIQYENYRDWIVNHNVAYSELFLDTAGVASFDVWDLLPFTRGYVHILDKDPYLHHFAYDPQYFLNELDLLGQAAATQLARNISNSGAMQTYFAGETIPGDNLAPDADLSAWTEYIPYHFRPNYHGVGTCSMMPKEMGGVVDNAARVYGVQGLRVIDGSIPPTQMSSHVMTVFYAMALKISDAILEDY

SEQ ID NO: 1942 - protein, 576 aa, Aspergillus niger
IEASLLTDPKDVSGRTVDYIIAGGGLTGLTTAARLTENPNISVLVIESGSYESDRGPIIEDLNAYGDIFGSSVDHAYETVELATNNQTALIRSGNGLGGSTLVNGGTWTRPHKAQVDSWETVFGNEGWNWDNVAAYSLQAERARAPNAKQIAAGHYFNASCHGVNGTVHAGPRDTGDDYSPIVKALMSAVEDRGVPTKKDFGCGDPHGVSMFPNTLHEDQVRSDAAREWLLPNYQRPNLQVLTGQYVGKVLLSQNGTTPRAVGVEFGTHKGNTHNVYAKKEVLLAAGSAVSPTILEYSGIGMKSILEPLGIDTVVDLPVGLNLQDQTTATVRSRITSAGAGQGQAAWFATFNETFGDYSEKAHELLNTKLEQWAEEAVARGGFHNTTALLIQYENYRDWIVNHNVAYSELFLDTAGVASFDVWDLLPFTRGYVHILDKDPYLHHFAYDPQYFLNELDLLGQAAATQLARNISNSGAMQTYFAGETIPGDNLAYDADLSAWTEYIPYHFRPNYHGVGTCSMMPKEMGGVVDNAARVYGVQGLRVIDGSIPPTQMSSHVMTVFYAMALKISDAILEDY

SEQ ID NO: 1943 - protein, 576 aa, Aspergillus niger
IEASLLTDPKDVSGRTVDYIIAGGGLTGLTLAARLTENPNISVLVIESGSYESDRGPIIEDLNRYGDIFGSSVDHAYETVELATNNQTALIRSGNGLGGSTLINGGTWTRPHKAQVDSWETVFGNEGWNWDNVAAYSLQAERARAPNAKQIAAGHYFNASCHGVNGTVHAGPRDTGDDYSPIVKALMSAVEDRGVPTKKDFGCGDPHGVSMFPNTLHEDQVRSDAAREWLLPNYQRPNLQVLTGQYVGKVLLSQNGTTPRAVGVEFGTHKGNTFNVYAKHEVLLAAGSLVSPTILEYSGIGMKSILEPLGIDTVVDLPVGLNLQDQTTATVRSRITSAGAGQGQAAWFATFNETFGDYSEKAHELLNTKLEQWAEEAVARGGFHNTTALLIQYENYRDWIVNHNVAYSELFLDTKGVASFDVWDLLPFTRGYVHILDKDPYLHHFAYDPQYFLNELDLLGQAAATQLARNISNSGAMQTYFAGETIPGDNLAYDADLSAWTEYIPYHFRPNYHGVGTCSMMPKEMGGVVDNAARVYGVQGLRVIDGSIPPTQMSSHVMTVFYAMALKISDAILEDY

SEQ ID NO: 1944 - protein, 576 aa, Aspergillus niger
IEASLLTDPKDVSGRTVDYIIAGGGLTGLTTAARLTENPNISVLVIESGSYESDRGPIIEDLNAYGDIFGSSVDHAYETVELATNNQTALIRSGNGLGGSTLVNGGTWTRPHKAQVDSWETVFGNEGWNWDNVAAYSLQAERARAPNAKQIAAGHYFNASCHGVNGTVHAGPRDTGDDYSPIVKALMSAVEDRGVPTKKDFGCGDPHGVSMFPNTLHEDQVRSDAAREWLLPNYQRPNLQVLTGQYVGKVLLSQNGTTPRAVGVEFGTHKGNTHNVYAKHEVLLAAGSAVSPTILEYSGIGMKSILEPLGIDTVVDLPVGLNLQDQTTATVRSRITSAGAGQGQAAWFATFNETFGDYSEKAHELLNTKLEQWAEEAVARGGFHNTEALLIQYENYRDWIVNHNVAYSELFLDTAGVASFDVWDLLPFTRGYVHILDKDPYLHHFAYDPQYFLNELDLLGQAAATQLARNISNSGAMQTYFAGETIPGDNLAYDADLSAWTEYIPYHFRPNYHGVGTCSMMPKEMGGVVDNAARVYGVQGLRVIDGSIPPTQMSSHVMTVFYAMALKISDAILEDY

SEQ ID NO: 1945 - protein, 576 aa, Aspergillus niger
IEASLLTDPKDVSGRTVDYIIAGGGLTGLTTAARLTENPNISVLVIESGSYESDRGPIIEDLNAYGDIFGSSVDHAYETVELPTNNQTALIRSGNGLGGSTLVNGGTWTRPHKAQVDSWETVFGNEGWNWDNVAAYSLQAERARAPNAKQIAAGHYFNASCHGVNGTVHAGPRDTGDDYSPIVKALMSAVEDRGVPTKKDFGCGDPHGVSMFPNTLHEDQVRSDAAREWLLPNYQRPNLQVLTGQYVGKVLLSQNGTTPRAVGVEFGTHKGNTHNVYAKHEVLLAAGSAVSPTILEYSGIGMKSILEPLGIDTVVDLPVGLNLQDQTTATVRSRITSAGAGQGQAAWFATFNETFGDYSEKAHELLNTKLEQWAEEAVARGGFHNTTALLIQYENYRDWIVNHNVAYSELFLDTAGVASFDVWDLLPFTRGYVHILDKDPYLHHFAYDPQYFLNELDLLGQAAATQLARNISNSGAMQTYFAGETIPGDNLAYDADLSAWTEYIPYHFRPNYHGVGTCSMMPKEMGGVVDNAARVYGVQGLRVIDGSIPPTQMSSHVMTVFYAMALKISDAILEDY

SEQ ID NO: 1946 - protein, 576 aa, Aspergillus niger
IEASLLTDPKDVSGRTVDYIIAGGGLTGLTTAARLTENPNISVLVIESGSYESDRGPIIEDLNAYGDIFGSSVDHAYETVELATNNQTALIRSGNGLGGSTLVNGGTWTRPHKAQVDSWETVFGNEGWNWDNVAAYSLQAERARAPNAKQIAAGHYFNASCHGVNGTVHAGPRDTGDDYSPIVKALMSAVEDRGVPTKKDFGCGDPHGVSMFPNTLHEDQVRSDAAREWLLPNYQRPNLQVLTGQYVGKVLLSQNGTTPRAVGVEFGTHKGNTHNVYAKHEVLLAAGSAVSPTILEYSGIGMKSILEPLGIDTVVDLPVGLNLQDQTTATVRSRITSAGAGQGQAAWYATFNETFGDYSEKAHELLNTKLEQWAEEAVARGGFHNTTALLIQYENYRDWIVNHNVAYSELFLDTAGVASFDVWDLLPFTRGYVHILDKDPYLHHFAYDPQYFLNELDLLGQAAATQLARNISNSGAMQTYFAGETIPGDNLAYDADLSAWTEYIPYHFRPNYHGVGTCSMMPKEMGGVVDNAARVYGVQGLRVIDGSIPPTQMSSHVMTVFYAMALKISDAILEDY

SEQ ID NO: 1947 - protein, 576 aa, Aspergillus niger
IEASLLKDPKEVAGRTYDYIIAGGGLTGLTVAARLTENPNITVLVIESGSYESDRGPIIEDLNAYGDIFGSSVDHAYETVELPTNNRTALIRSGNGLGGSTLINGGTWTRPHKAQVDSWETVFGNEGWNWDSVAAYSLQAERARAPNAKQIAAGHYFNASCHGINGTVHAGPRDTGDDYSPIVKALMSAVEDRGVPTKKDLGCGDPHGVSMFPNTLHEDQVRSDAAREWLLPNYQRPNLQVLTGQYVGKVLLSQNATTPRAVGVEFGTHKGNTHNVYAKHEVLLAAGSAVSPTILEYSGIGMKSILEPLGIDTVVDLPVGLNLQDQTTSTVRSRITSAGAGQGQAAWFATFNETFGDYAEKAHELLNTKLEQWAEEAVARGGFHNTTALLIQYENYRDWIVKDNVAYSELFLDTAGVASFDVWDLLPFTRGYVHILDKDPYLRHFAYDPQYFLNELDLLGQAAATQLARNISNSGAMQTYFAGETIPGDNLAYDADLSAWVEYIPENFRPNYHGVGTCSMMPKEMGGVVDNAARVYGVQGLRVIDGSIPPTQMSSHVMTVFYAMALKIADAILADY

SEQ ID NO: 1948 - protein, 576 aa, Aspergillus niger
IEASLLKDPKEVAGRTYDYIIAGGGLTGLTVAAKLTENPNITVLVIESGSYESDRGPIIEDLNAYGDIFGSSVDHAYETVELATNNQTALIRSGNGLGGSTLINGGTWTRPHKAQVDSWETVFGNEGWNWDSVAAYSLQAERARAPNAKQIAAGHYFNPSCHGINGTVHAGPRDTGDDYSPIVKALMSAVEDRGVPTKKDLGCGDPHGVSMFPNTLHEDQVRSDAAREWLLPNYQRPNLQVLTGQYVGKVLLSQNATTPRAVGVEFGTHKGNTHNVYAKHEVLLAAGSAVSPTILEYSGIGMKSILEPLGIDTVVDLPVGLNLQDQTTSTVRSRITSAGAGQGQAAWFATFNETFGDYAEKAHELLNTKLEQWAEEAVARGGFHNTTALLIQYENYRDWIVKDNVAYSELFLDTAGVASFDVWDLLPFTRGYVHILDKDPYLRHFAYDPQYFLNELDLLGQAAATQLARNISNSGAMQTYFAGETIPGDNLAYDADLSAWVEYIPENFRPNYHGVGTCSMMPKEMGGVVDNAARVYGVQGLRVIDGSIPPTQMSSHVMTVFYAMALKIADAILADY

SEQ ID NO: 1949 - protein, 576 aa, Aspergillus niger
IEASLLTDPKEVAGRTVDYIIAGGGLTGLTVAARLTENPDITVLVIEPGSYESDRGAIIEDLNAYGDIFGSSVDHAYETVELATNNRTALIRSGNGLGGSTLLNGGTWTRPHKAQVDSWETVFGNEGWNWDSVAAYSLQAERARAPNAKQIAAGHYFNASCHGINGTVHAGPRDTGDDYSPIVKALMSAVEDRGVPTKKDLGCGDPHGVSMFPNTLHEDQVRSDAAREWLLPNYQRPNLHVLTGQYVGKVLLSQNATTPRAVGVEFGTHKGNTHNVYAKHEVLLAAGSAVSPTILEYSGIGMKSILEPLGIDTVVDLPVGLNLQDQTTSTVRSRITSAGAGQGQAAWFATFNETFGDYAEKAHELLNTKLEQWAEEAVARGGFHNTTALLIQYENYRDWIVKDNVAYSELFLDTAGVASFDVWDLLPFTRGYVHILDKDPYLRHFAYDPQYFLNELDLLGQAAATQLARNISNSGAMQTYFAGETIPGDNLAYDADLSAWVEYIPYNFRPNYHGVGTCSMMPKEMGGVVDNAARVYGVQGLRVIDGSIPPTQMSSHVTTVFYAMALKIADAILADY

SEQ ID NO: 1950 - protein, 576 aa, Aspergillus niger
IEASLLTDPKDVSGRTVDYIIAGGGLTGLTTAARLTENPNISVLVIESGSYESDRGPIIEDLNAYGDIFGSSVDHAYETVELATNNQTALIRSGNGLGGSTLVNGGTWTRPHKAQVDSWETVFGNEGWNWDNVAAYSLQAERARAPNAKQIAAGHYFNASCHGVNGTVHAGPRDTGDDYSPIVKALMSAVEDRGVPTKKDFGCGDPHGVSMFPNTLHEDQVRSDAAREWLLPNYQRPNLQVLTGQYVGKVLLSQNGTTPRAVGVEFGTHKGNTHNVYAKHEVLLAAGSAVSPTILEYSGIGMKSILEPLGIDTVVDLPVGLNLQDQTTATVRSRITSAGAGQGQAAWFATFNETFGDYSEKAHELLNTKLEQWAEEAVARGGFHNTTALLIQYENYRDWIVNHNVAYSELFLDTAGVASFDVWDLLPFTRGYVHILDKDPYLHHFAYDPNYFLNELDLLGQAAATQLARNISNSGAMQTYFAGETIPGDNLAYDADLSAWTEYIPYHFRPNYHGVGTCSMMPKEMGGVVDNAARVYGVQGLRVIDGSIPPTQMSSHVMTVFYAMALKISDAILEDY

SEQ ID NO: 1951 - protein, 576 aa, Aspergillus niger
IEASLLTDPKDVSGRTVDYIIAGGGLVGLTTAARLTENPNISVLVIESGSYESDRGPIIEDLNAYGDIFGSSVDHAYETVELATNNQTALVRSGNGLGGSTLVNGGTWTRPHKAQVDSWETVFGNEGWNWDNVAAYSLQAERARAPNAKQIAAGHYFNASCHGVNGTVHIGPRDTGDDYSPIVKALMSAVEDRGVPTKKDFGCGDPHGVSMFPNTLHEDQVRSDAAREWLLPNYQRPNLQVLTGQYVGKVLLSQNGTTPRAVGVEFGTHKGNTHNVYAKHEVLLAAGSAVSPTILEYSGIGMKSILEPLGIDTVVDLPVGLNLQDQTTSTVRSRITSAGAGQGQAAWFATFNETFGDYSEKAHELLNTKLEQWAEEAVARGGFHNTTALLIQYENYRDWIVNHNVAYSELLLDTAGVASFDVWDLLPFTRGYVHILDKDPYLHHFAYDPQYFLNELDLLGQAAATQLARNISNSGAMQTYFAGETIPGDNLAYDADLSAWTEYIPYHFRPNYHGVGTCSMMPKEMGGVVDNAARVYGVQGLRVIDGSIPPTQMSSHVMTVFYAMALKISDAILEDY

SEQ ID NO: 1952 - protein, 576 aa, Aspergillus niger
IEASLLKDPKEVAGRTYDYIIAGGGLTGLTVAARLTENPNITVLVIESGSYESDRGPIIEDLNAYGDIFGSSVDHAYETVELATNNRTALIRSGNGLGGSTLINGGTWTRPHKAQVDSWETVFGNEGWNWDSVAAYSLQAERARAPNAKQIAAGHYFNASCHGINGTVHAGPRDTGDDYSPIVKALMSAVEDRGVPTKKDLGCGDPHGVSMFPNTLHEDQVRSDAAREWLLPNYQRPNLQVLTGQYVGKVLLSQNATTPRAVGVEFGTHKGNTHNVYAKHEVLLAAGSAVSPTILEYSGIGMKSILEPLGIDTVVDLPVGLNLQDQTTSTVRSRITSAGAGQGQAAWFATFNETFGDYTEKAHELLNTKLEQWAEEAVARGGFHNTTALLIQYENYRDWIVKDNVAYSELFLDTAGVASFDVWDLLPFTRGYVHILDKDPYLRHFAYDPQYFLNELDLLGQAAATQLARNISNSGAMQTYFAGETIPGDNLAYDADLSAWVEYIPENFRPNYHGVGTCSMMPKEMGGVVDNAARVYGVQGLRVIDGSIPPTQMSSHVMTVFYAMALKIADAILADY

SEQ ID NO: 1953 - protein, 576 aa, Aspergillus niger
IEASLLTDPKDVSGRTVDYIIAGGGLTGLTTAARLTENPNISVLVIESGSYESDRGPIIEDLNAYGDIFGSSVDHAYETVELATNNQTALIRSGNGLGGSTLVNGGTWTRPHKAQVDSWETVFGNPGWNWDNVAAYSLQAERARAPNAKQIAAGHYFNASCHGVNGTVHAGPRDTGDDYSPIVKALMSAVEDRGVPTKKDFGCGDPHGVSMFPNTLHEDQVRSDAAREWLLPNYQRPNLVVLTGQYVGKVLLSQNGTTPRAVGVEFGTHKGNTHNVYAKHEVLLAAGSAVSPTILEYSGIGMKSILEPLGIDTVVDLPVGLNLQDQTTATVRSRITSAGAGQGQAAWFATFNETFGDYSEKAHELLNTKLEQWAEEAVARGGFHNTTALLIQYENYRDWIVNHNVAYSELFLDTAGVASFDVWDLLPFTRGYVHILDKDPYLHHFAYDPQYFLNELDLLGQAAATQLARNISNSGAMQTYFAGETIPGDNLAYDADLSAWTEYIPYHFRPNYHGVGTCSMMPKEMGGVVDNAARVYGVQGLRVIDGSIPPTQMSSHVMTVFYAMALKISDAILEDY

SEQ ID NO: 1954 - protein, 576 aa, Aspergillus niger
IEASLLKDPKEVAGRTYDYIIAGGGLTGLTVAAKLTENPNITVLVIESGSYESDRGPIIEDLNAYGDIFGSSVDHAYETVELPTNNRTALIRSGNGLGGSTLINGGTWTRPHKAQVDSWETVFGNEGWNWDSVAAYSLQAERARAPNAKQIAAGHYFNPSCHGINGTVHAGPRDTGDDYSPIVKALMSAVEDRGVPTKKDLGCGDPHGVSMFPNTLHEDQVRSDAAREWLLPNYQRPNLQVLTGQYVGKVLLSQNATTPRAVGVEFGTHKGNTHNVYAKHEVLLAAGSAVSPTILEYSGIGMKSILEPLGIDTVVDLPVGLNLQDQTTSTVRSRITSAGAGQGQAAWFATFNETFGDYAEKAHELLNTKLEQWAEEAVARGGFHNTTALLIQYENYRDWIVKDNVAYSELFLDTAGVASFDVWDLLPFTRGYVHILDKDPYLRHFAYDPQYFLNELDLLGQAAATQLARNISNSGAMQTYFAGETIPGDNLAYDADLSAWVEYIPENFRPNYHGVGTCSMMPKEMGGVVDNAARVYGVQGLRVIDGSIPPTQMSSHVMTVFYAMALKIADAILADY

SEQ ID NO: 1955 - protein, 576 aa, Aspergillus niger
IEASLLKDPKEVAGRTYDYIIAGGGLTGLTVAARLTENPDITVLVIESGSYESDRGPIIEDLNAYGQIFGSSVDHAYETVELATNNQTALIRSGNGLGGSTLINGGTWTRPHKAQVDSWETVFGNEGWNWDSVAAYSLQAERARAPNAKQIAAGHYFNASCHGINGTVHAGPRDTGDDYSPIVKALMSAVEDRGVPTKKDLGCGDPHGVSMFPNTLHEDQVRSDAAREWLLPNYQRPNLQVLTGQYVGKVLLSKNATTPRAVGVEFGTHKGNTHNVYAKHEVLLAAGSAVSPTILEYSGIGLKSILEPLGIDTVVDLPVGLNLQDQTTSTVRSRITSAGAGQGQAAWFATFNETFGDYAEKAHELLNTKLEQWAEEAVARGGFHNTTALLIQYENYRDWIVKDNVAYSELFLDTAGVASFDVWDLLPFTRGYVHILDKDPYLRHFAYDPQYFLNELDLLGQAAATQLARNISNSGAMQTYFAGETIPGDNLAYDADLSAWVEYIPYNFRPNYHAVGTCSMMPKEMGGVVDNAARVYGVQGLRVIDGSIPPTQMSSHVMTVFYAMALKIADAILADY

SEQ ID NO: 1956 - protein, 576 aa, Aspergillus niger
IEASLLKDPKEVAGRTYDYIIAGGGLTGLTVAARLTENPNITVLVIESGSYESDRGPIIEDLNAYGDIFGSSVDHAYETVELATNNQTALIRSGNGLGGSTLINGGTWTRPHKAQVDSWETVFGNEGWNWDSVAAYSLQAERARAPNAKQIAAGHYFNASCHGINGTVHAGPRDTGDDYSPIVKALMSAVEDRGVPTKKDLGCGDPHGVSMFPNTLHEDQVRSDAAREWLLPNYQRPNLQVLTGRYVGKVLLSQNATTPRAVGVEFGTHKGNTHNVYAKHEVLLAAGSAVSPTILEYSGIGMKSILEPLGIDTVVDLPVGLNLQDQTTSTVRSRITPAGAGQGQAAWFATFNETFGDYTEKAHELLNTKLEQWAEEAVARGGFHNTTALLIQYENYRDWIVKDNVAYSELFLDTAGVASFDVWDLLPFTRGYVHILDKDPYLRHFAYDPQYFLNELDLLGQAAATQLARNISNSGAMQTYFAGETIPGDNLAYDADLRAWVEYIPENFRPNYHGVGTCSMMPKEMGGVVDNAARVYGVQGLRVIDGSIPPTQLSSHVMTVFYAMALKIADAVLADY

SEQ ID NO: 1957 - protein, 576 aa, Aspergillus niger
IEASLLTDPKDVSGRTVDYIIAGGGLTGLTTAARLTENPNISVLVIESGSYESDRGPIIEDLNAYGDIFGSSVDHAYETVELATNNQTALIRSGNGLGGSTLVNGGTWTRPHKAQVDSWETVFGNPGWNWDNVAAYSLQAERARAPNAKQIAAGHYFNASCHGVNGTVHAGPRDTGDDYSPIVKALMSAVEDRGVPTKKDFGCGDPHGVSMFPNTLHEDQVRSDAAREWLLPNYQRPNLQVLTGQYVGKVLLSQNGTTPRAVGVEFGTHKGNTHNVYAKHEVLLAAGSAVSPTILEYSGIGMKSILEPLGIDTVVDLPVGLNLQDQTTATVRSRITSAGAGQGQAAWFATFNETFGDYSEKAHELLNTKLEQWAEEAVARGGFHNTTALLIQYENYRDWIVNHNVAYSELFLDTAGVASFDVWDLLPFTRGYVHILDKDPYLHHFAYDPQYFLNELDLLGQAAATQLARNISNSGAMQTYFAGETIPGDNLAYDADLSAWTEYIPYHFRPNYHGVGTCSMMPKEMGGVVDNAARVYGVQGLRVIDGSIPPTQMSSHVMTVFYAMALKISDAILEDY

SEQ ID NO: 1958 - protein, 576 aa, Aspergillus niger
IEASLLTDPKDVSGRTVDYIIAGGGLTGLTTAARLTENPNISVLVIESGSYESDRGPIIEDLNAYGDIFGSSVDHAYETVELATNNQTALIRSGNGLGGSTLVNGGTWTRPHKAQVDSWETVFGNEGWNWDNVAAYSLQAERARAPNAKQIAAGHYFNASCHGVNGTVHAGPRDTGDDYSPIVKALMSAVEDRGVPTKKDFGCGDPHGVSMFPNTLHEDQVRSDAAREWLLPNYQRPNLQVLTGQYVGKVLLSQNGTTPRAVGVEFGTHKGNTHNVYAKHEVLLAAGSAISPTILEYSGIGMKSILEPLGIDTVVDLPVGLNLQDQTTATVRSRITSAGAGQGQAAWFATFNETFGDYSEKAHELLNTKLEQWAEEAVARGGFHNTTALLIQYENYRDWIVNHNVAYSELFLDTAGVASFDVWDLLPFTRGYVHILDKDPYLHHFAYDPQYFLNELDLLGQAAATQLARNISNSGAMQTYFAGETIPGDNLAYDADLSAWTEYIPYHFRPNYHGVGTCSMMPKEMGGVVDNAARVYGVQGLRVIDGSIPPTQMSSHVMTVFYAMALKISDAILEDY

SEQ ID NO: 1959 - protein, 576 aa, Aspergillus niger
IEASLLTDPKDVSGRTVDYIIAGGGLTGLTTAARLTENPNISVLVIESGSYESDRGPIIEDLNAYGDIFGSSVDHAYETVELATNNQTALIRSGNGLGGSTLVNGGTWTRPHKAQVDSWETVFGNEGWNWDNVAAYSLQAERARAPNAKQIAAGHYFNASCHGVNGTVHAGPRDTGDDYSPIVKALMSAVEDRGVPTKKDFGCGDPHGVSMFPNTLHEDQVRSDAAREWLLPNYQRPNLQVLTGQYVGKVLLSQNGTTPRAVGVEFGTHKGNTHNVYAKHEVLLAAGSAVSPTILEYSGIGMKSILEPLGIDTVVDLPVGLNLQDQTTATVRSRITSAGAGQGQAAWFATFNETFGDYSEKAHELLNTKLEQWAEEAVARGGFHNTTALLIQYENYRDWIVNHNVAYSELFLDTAGVASFDVWDLLPFTRGYVHILDKDPYLHHFAYDPQYFLNELDLLGQAAATQLARNISNSGAMQTYFAGETIPGDNLAYDADLSAWTEYIPYHFRPNYHGVGTASMMPKEMGGVVDNAARVYGVQGLRVIDGSIPPTQMSSHVMTVFYAMALKISDAILEDY

SEQ ID NO: 1960 - protein, 576 aa, Aspergillus niger
IEASLLTDPKDVSGRTVDYIIAGGGLVGLTTAARLTENPNISVLVIESGSYESDRGPIIEDLNAYGDIFGSSVDHAYETVELATNNQTALIRSGNGLGGSTLVNGGTWTRPHKAQVDSWETVFGNEGWNWDNVAAYSLQAERARAPNAKQIAAGHYFNASCHGVNGTVHAGPRDTGDDYSPIVKALMSAVEDRGVPTKKDFGCGDPHGVSMFPNTLHEDQVRSDAAREWLLPNYQRPNLQVLTGQYVGKVLLSQNGTTPRAVGVEFGTHKGNTHNVYAKHEVLLAAGSAVSPTILEYSGIGMKSILEPLGIDTVVDLPVGLNLQDQTTATVRSRITSAGAGQGQAAWFATFNETFGDYSEKAHELLNTKLEQWAEEAVARGGFHNTTALLIQYENYRDWIVNHNVAYSELFLDTAGVASFDVWDLLPFTRGYVHILDKDPYLHHFAYDPQYFLNELDLLGQAAATQLARNISNSGAMQTYFAGETIPGDNLAYDADLSAWTEYIPYHFRPNYHGVGTCSMMPKEMGGVVDNAARVYGVQGLRVIDGSIPPTQMSSHVMTVFYAMALKISDAILEDY

SEQ ID NO: 1961 - protein, 576 aa, Aspergillus niger
IEASLLTDPKDVSGRTVDYIIAGGGLTGLTTAARLTENPNISVLVIESGSYESDRGPIIEDLNAYGDIFGSSVDHAYETVELATNNQTALIRSGNGLGGSTLVNGGTWTRPHKAQVDSWETVFGNEGWNWDNVAAYSLQAERARAPNAKQIAAGHYFNASCHGVNGTVHAGPRDTGDDYSPIVKALMSAVEDRGVPTKKDFGCGDPHGVSMFPNTLHEDQVRSDAAREWLLPNYQRPNLQVLTGQYVGKVLLSQNGTTPRAVGVEFGTHKGNTHNVYAKHEVLLAAGSAVSPTILEYSGIGMKSILEPLGIDTVVDLPVGLNLQDQTTATVRSRITSAGAGQGQAAWFATFNETFGDYSEKAHELLNTKLEQWAEEAVARGGFHNTTALLIQYENYRDWIVNHNVAYSELFLDTAGVASFDVWDLLPFTRGYVHILDKDPYLHHFMYDPQYFLNELDLLGQAAATQLARNISNSGAMQTYFAGETIPGDNLAYDADLSAWTEYIPYHFRPNYHGVGTCSMMPKEMGGVVDNAARVYGVQGLRVIDGSIPPTQMSSHVMTVFYAMALKISDAILEDY

SEQ ID NO: 1962 - protein, 576 aa, Aspergillus niger
IEASLLTDPKDVSGRTVDYIIAGGGLTGLTTAAKLTENPNISVLVIESGSYESDRGPIIEDLNAYGDIFGSSVDHAYETVELATNNQTALIRSGNGLGGSTLVNGGTWTRPHKAQVDSWETVFGNEGWNWDNVAAYSLQAERARAPNAKQIAAGHYFNASCHGVNGTVHAGPRDTGDDYSPIVKALMSAVEDRGVPTKKDFGCGDPHGVSMFPNTLHEDQVRSDAAREWLLPNYQRPNLQVLTGQYVGKVLLSQNGTTPRAVGVEFGTHKGNTHNVYAKHEVLLAAGSAVSPTILEYSGIGMKSILEPLGIDTVVDLPVGLNLQDQTTATVRSRITSAGAGQGQAAWFATFNETFGDYSEKAHELLNTKLEQWAEEAVARGGFHNTTALLIQYENYRDWIVNHNVAYSELFLDTAGVASFDVWDLLPFTRGYVHILDKDPYLHHFAYDPQYFLNELDLLGQAAATQLARNISNSGAMQTYFAGETIPGDNLAYDADLSAWTEYIPYHFRPNYHGVGTCSMMPKEMGGVVDNAARVYGVQGLRVIDGSIPPTQMSSHVMTVFYAMALKISDAILEDY

SEQ ID NO: 1963 - protein, 576 aa, Aspergillus niger
IEASLLKDPKEVAGRTYDYIIAGGGLTGLTVAARLTENPNITVLVIESGSYESDRGPIIEDLNAYGDIFGSSVDHAYETVELATNNQTALIRSGNGLGGSTLINGGTWTRPHKAQVDSWETVFGNEGWNWDSVAAYSLQAERARAPNAKQIAAGHYFNASCHGINGTVHAGPRDTGDDYSPIVKALMSAVEDRGVPTKKDLGCGDPHGVSMFPNTLHEDQVRSDAAREWLLPNYQRPNLQVLTGQYVGKVLLSQNATTPRAVGVEFGTHKGNTHNVYAKHEVLLAAGSAVSPTILEYSGIGMKSILEPLGIDTVVDLPVGLNLQDQTTSTVRSRITPAGAGQGQAAWFATFNETFGDYTEKAHELLNTKLEQWAEEAVARGGFHNTTALLIQYENYRDWIVKDNVAYSELFLDTAGVASFDVWDLLPFTRGYVHILDKDPYLRHFAYDPQYFLNELDLLGQAAATQLARNISNSGAMQTYFAGETIPGDNLAYDADLRAWVEYIPENFRPNYHGVGTCSMMPKEMGGVVDNAARVYGVQGLRVIDGSIPPTQMSSHVMTVFYAMALKIADAILADY

SEQ ID NO: 1964 - protein, 576 aa, Aspergillus niger
IEASLLKDPKEVAGRTYDYIIAGGGLTGLTVAARLTENPNITVLVIESGSYESDRGPIIEDLNAYGDIFGSSVDHAYETVELATNNRTALIRSGNGLGGSTLINGGTWTRPHKAQVDSWETVFGNEGWNWDSVAAYSLQAERARAPNAKQIAAGHYFNASCHGINGTVHAGPRDTGDDYSPIVKALMSAVEDRGVPTKKDLGCGDPHGVSMFPNTLHEDQVRSDAAREWLLPNYQRPNLQVLTGQYVGKVLLSQNATTPRAVGVEFGTHKGNTHNVYAKHEVLLAAGSAVSPTILEYSGIGMKSILEPLGIDTVVDLPVGLNLQDQTTSTVRSRITSAGAGQGQAAWFATFNETFGDYTEKAHELLNTKLEQWAEEAVARGGFHNTTALLIQYENYRDWIVKDNVAYSELFLDTAGVASFDVWDLLPFTRGYVHILDKDPYLRHFAYDPQYFLNELDLLGQAAATQLARNISNSGAMQTYFAGETIPGDNLAYDADLRAWVEYIPENFRPNYHGVGTCSMMPKEMGGVVDNAARVYGVQGLRVIDGSIPPTQLSSHVMTVFYAMALKIADAILADY

SEQ ID NO: 1965 - protein, 576 aa, Aspergillus niger
IEASLLKDPKEVAGRTYDYIIAGGGLTGLTVAARLTENPNITVLVIESGSYESDRGPIIEDLNAYGDIFGSSVDHAYETVELPTNNRTALIRSGNGLGGSTLINGGTWTRPHKAQVDSWETVFGNEGWNWDSVAAYSLQAERARAPNAKQIAAGHYFNPSCHGLNGTVHAGPRDTGDDYSPIVKALMSAVEDRGVPTKKDLGCGDPHGVSMFPNTLHPDQVRSDAAREWLLPNYQRPNLQVLTGRYVGKVLLSQNATTPRAVGVEFGTHKGNTHNVYAKHEVLLAAGSAVSPTILEYSGIGMKSILEPLGIDTVVDLPVGLNLQDQTTSTVRSRITPAGAGQGQAAWFATFNETFGDYTEKAHELLNTKLEQWAEEAVARGGFHNTTALLIQYENYRDWIVKDNVAYSELFLDTAGVASFDVWDLLPFTRGYVHILDKDPYLRHFAYDPQYFLNELDLLGQAAATQLARNISNSGAMQTYFAGETIPGDNLAYDADLRAWVEYIPENFRPNYHGVGTCSMMPKEMGGVVDNAARVYGVQGLRVIDGSIPPTQLSSHVMTVFYAMALKIADAVLADY

SEQ ID NO: 1966 - protein, 576 aa, Aspergillus niger
IEASLLKDPKEVAGRTYDYIIAGGGLTGLTVAARLTENPNITVLVIESGSYESDRGPIIEDLNAYGDIFGSSVDHAYETVELPTNNRTALIRSGNGLGGSTLINGGTWTRPHKAQVDSWETVFGNEGWNWDSVAAYSLQAERARAPNAKQIAAGHYFNASCHGLNGTVHAGPRDTGDDYSPIVKALMSAVEDRGVPTKKDLGCGDPHGVSMFPNTLHEDQVRSDAAREWLLPNYQRPNLQVLTGQYVGKVLLSQNATTPRAVGVEFGTHKGNTHNVYAKHEVLLAAGSAVSPTILEYSGIGMKSILEPLGIDTVVDLPVGLNLQDQTTSTVRSRITSAGAGQGQAAWFATFNETFGDYAEKAHELLNTKLEQWAEEAVARGGFHNTTALLIQYENYRDWIVKDNVAYSELFLDTAGVASFDVWDLLPFTRGYVHILDKDPYLRHFAYDPQYFLNELDLLGQAAATQLARNISNSGAMQTYFAGETIPGDNLAYDADLSAWVEYIPENFRPNYHGVGTCSMMPKEMGGVVDNAARVYGVQGLRVIDGSIPPTQMSSHVMTVFYAMALKIADAILADY

SEQ ID NO: 1967 - protein, 576 aa, Aspergillus niger
IEASLLTDPKDVSGRTVDYIIAGGGLTGLTTAARLTENPNISVLVIESGSYESDRGPIIEDLNAYGDIFGSSVDHAYETVELATNNQTALIRSGNGLGGSTLVNGGTWTRPHKAQVDSWETVFGNEGWNWDNVAAYSLQAERARAPNAKQIAAGHYFNASCHGVNGTVHAGPRDTGDDYSPIVKALMSAVEDRGVPTKKDFGCGDPHGVSMFPNTLHEDQVRSDAAREWLLPNYQRPNLQVLTGQYVGKVLLSQNGTTPRAVGVEFGTHKGNTHNVYAKHEVLLAAGSAVSPTILEYSGIGMKSILEPLGIDTVVDLPVGLNLQDQTTATVRSRITSAGAGQGQAAWFATFNETFGDYSEKAHELLNTKLEQWAEEAVARGGFHNTTALLIQYENYRDWIVNHNVAYSELFLDTAGVASFDVWDLLPFTRGYVHILDKDPYLHHFAYDPQYFLNELDLLGQAAATQLARNISNSGAMQTYFAGETIPGDNLAYDADLSAWTEYIPYHFRPNYHGVGTCSMMPKEMGGVVDNAAKVYGVQGLRVIDGSIPPTQMSSHVMTVFYAMALKISDAILEDY

SEQ ID NO: 1968 - protein, 576 aa, Aspergillus niger
IEASLLTDPKDVSGRTVDYIIVGGGLTGLTTAARLTENPNISVLVIESGSYESDRGPIIEDLNAYGDIFGSSVDHAYETVELATNNQTALIRSGNGLGGSTLVNGGTWTRPHKAQVDSWETVFGNEGWNWDNVAAYSLQAERARAPNAKQIAAGHYFNASCHGVNGTVHAGPRDTGDDYSPIVKALMSAVEDRGVPTKKDFGCGDPHGVSMFPNTLHEDQVRSDAAREWLLPNYQRPNLQVLTGQYVGKVLLSQNGTTPRAVGVEFGTHKGNTHNVYAKHEVLLAAGSAVSPTILEYSGIGMKSILEPLGIDTVVDLPVGLNLQDQTTATVRSRITSAGAGQGQAAWFATFNETFGDYSEKAHELLNTKLEQWAEEAVARGGFHNTTALLIQYENYRDWIVNHNVAYSELFLDTAGVASFDVWDLLPFTRGYVHILDKDPYLHHFAYDPQYFLNELDLLGQAAATQLARNISNSGAMQTYFAGETIPGDNLAYDADLSAWTEYIPYHFRPNYHGVGTCSMMPKEMGGVVDNAARVYGVQGLRVIDGSIPPTQMSSHVMTVFYAMALKISDAILEDY

SEQ ID NO: 1969 - protein, 576 aa, Aspergillus niger
IEASLLKDPKEVAGRTYDYIIAGGGLTGLTVAARLTENPNITVLVIESGSYESDRGPIIEDLNAYGDIFGSSVDHAYETVELATNNRTALIRSGNGLGGSTLINGGTWTRPHKAQVDSWETVFGNEGWNWDSVAAYSLQAERARAPNAKQIAAGHYFNASCHGLNGTVHAGPRDTGDDYSPIVKALMSAVEDRGVPTKKDLGCGDPHGVSMFPNTLHEDQVRSDAAREWLLPNYQRPNLQVLTGQYVGKVLLSQNATTPRAVGVEFGTHKGNTHNVYAKHEVLLAAGSAVSPTILEYSGIGMKSILEPLGIDTVVDLPVGLNLQDQTTSTVRSRITSAGAGQGQAAWFATFNETFGDYTEKAHELLNTKLEQWAEEAVARGGFHNTTALLIQYENYRDWIVKDNVAYSELFLDTAGVASFDVWDLLPFTRGYVHILDKDPYLRHFAYDPQYFLNELDLLGQAAATQLARNISNSGAMQTYFAGETIPGDNLAYDADLSAWVEYIPENFRPNYHGVGTCSMMPKEMGGVVDNAARVYGVQGLRVIDGSIPPTQMSSHVMTVFYAMALKIADAILADY

SEQ ID NO: 1970 - protein, 576 aa, Aspergillus niger
IEASLLKDPKEVAGRTYDYIIAGGGLTGLTVAARLTENPNITVLVIESGSYESDRGPIIEDLNAYGDIFGSSVDHAYETVELATNNQTALIRSGNGLGGSTLINGGTWTRPHKAQVDSWETVFGNEGWNWDSVAAYSLQAERARAPNAKQIAAGHYFNPSCHGINGTVHAGPRDTGDDYSPIVKALMSAVEDRGVPTKKDLGCGDPHGVSMFPNTLHEDQVRSDAAREWLLPNYQRPNLQVLTGQYVGKVLLSQNATTPRAVGVEFGTHKGNTHNVYAKHEVLLAAGSAVSPTILEYSGIGMKSILEPLGIDTVVDLPVGLNLQDQTTSTVRSRITSAGAGQGQAAWFATFNETFGDYTEKAHELLNTKLEQWAEEAVARGGFHNTTALLIQYENYRDWIVKDNVAYSELFLDTAGVASFDVWDLLPFTRGYVHILDKDPYLRHFAYDPQYFLNELDLLGQAAATQLARNISNSGAMQTYFAGETIPGDNLAYDADLSAWVEYIPENFRPNYHGVGTCSMMPKEMGGVVDNAARVYGVQGLRVIDGSIPPTQMSSHVMTVFYAMALKIADAILADY

SEQ ID NO: 1971 - protein, 576 aa, Aspergillus niger
IEASLLKDPKEVAGRTYDYIIAGGGLTGLTVAARLTENPNITVLVIESGSYESDRGPIIEDLNAYGDIFGSSVDHAYETVELATNNQTALIRSGNGLGGSTLINGGTWTRPHKAQVDSWETVFGNEGWNWDSVAAYSLQAERARAPNAKQIAAGHYFNPSCHGLNGTVHAGPRDTGDDYSPIVKALMSAVEDRGVPTKKDLGCGDPHGVSMFPNTLHPDQVRSDAAREWLLPNYQRPNLQVLTGRYVGKVLLSQNATTPRAVGVEFGTHKGNTHNVYAKHEVLLAAGSAVSPTILEYSGIGMKSILEPLGIDTVVDLPVGLNLQDQTTSTVRSRITPAGAGQGQAAWFATFNETFGDYTEKAHELLNTKLEQWAEEAVARGGFHNTTALLIQYENYRDWIVKDNVAYSELFLDTAGVASFDVWDLLPFTRGYVHILDKDPYLRHFAYDPQYFLNELDLLGQAAATQLARNISNSGAMQTYFAGETIPGDNLAYDADLRAWVEYIPENFRPNYHGVGTCSMMPKEMGGVVDNAARVYGVQGLRVIDGSIPPTQMSSHVMTVFYAMALKIADAVLADY

SEQ ID NO: 1972 - protein, 576 aa, Aspergillus niger
IEASLLTDPKEVAGRTYDYIIAGGGLTGLTVAARLTENPDITVLVIESGSYESDRGPIIEDLNAYGQIFGSSVDHAYETVELATNNQTALIRSGNGLGGSTLINGGNWTRPHKAQVDSWETVFGNEGWNWDSVAAYSLQAERARAPNAKQIAAGHYFNASCHGINGTVHAGPRDTGDDYSPIVKALMSAVEDRGVPTKKDLGCGDPHGVSMFPNTLHEDQVRSDAAREWLLPNYQRPNLQVLTGQYVGKVLLSKNATTPRAVGVEFGTHKGNTHNVYAKHEVLLAAGSAVSPTILEYSGIGMKSILEPLGIDTVVDLPVGLNLQDQTTSTVRSRITSAGAGQGQAAWFATFNETFGDYAEKAHELLNTKLEQWAEEAVARGGFHNTTALLIQYENYRDWIVKDNVAYSELFLDTAGVASFDVWDLLPFTRGYVHILDKDPYLRHFAYDPQYFLNELDLLGQAAATQLARNISNSGAMQTYFAGETIPGDNLAYDADLSAWVEYIPYNFRPNYHAVGTCSMMPKEMGGVVDNAARVYGVQGLRVIDGSIPPTQMSSHVMTVFYAMALKIADAILADY

SEQ ID NO: 1973 - protein, 576 aa, Aspergillus niger
IEASLLTDPKDVSGRTVDYIIAGGGLTGLTTAARLTENPNISVLVIESGSYESDRGPIIEDLNAYGDIFGSSVDHAYETVELATNNQTALIRFGNGLGGSTLVNGGTWTRPHKAQVDSWETVFGNEGWNWDNVAAYSLQAERARAPNAKQIAAGHYFNASCHGVNGTVHAGPRDTGDDYSPIVKALMSAVEDRGVPTKKDFGCGDPHGVSMFPNTLHEDQVRSDAAREWLLPNYQRPNLQVLTGQYVGKVLLSQNGTTPRAVGVEFGTHKGNTHNVYAKHEVLLAAGSAVSPTILEYSGIGMKSILEPLGIDTVVDLPVGLNLQDQTTATVRSRITSAGAGQGQAAWFATFNETFGDYSEKAHELLNTKLEQWAEEAVARGGFHNTTALLIQYENYRDWIVNHNVAYSELFLDTAGVASFDVWDLLPFTRGYVHILDKDPYLHHFAYDPQYFLNELDLLGQAAATQLARNISNSGAMQTYFAGETIPGDNLAYDADLSAWTEYIPYHFRPNYHGVGTCSMMPKEMGGVVDNAARVYGVQGLRVIDGSIPPTQMSSHVMTVFYAMALKISDAILEDY

SEQ ID NO: 1974 - protein, 576 aa, Aspergillus niger
IEASLLKDPKEVAGRTYDYIIAGGGLTGLTVAARLTENPNITVLVIESGSYESDRGPIIEDLNAYGDIFGSSVDHAYETVELATNNQTALIRSGNGLGGSTLINGGTWTRPHKAQVDSWETVFGNEGWNWDSVAAYSLQAERARAPNAKQIAAGHYFNPSCHGINGTVHAGPRDTGDDYSPIVKALMSAVEDRGVPTKKDLGCGDPHGVSMFPNTLHPDQVRSDAAREWLLPNYQRPNLQVLTGRYVGKVLLSQNATTPRAVGVEFGTHKGNTHNVYAKHEVLLAAGSAVSPTILEYSGIGMKSILEPLGIDTVVDLPVGLNLQDQTTSTVRSRITPAGAGQGQAAWFATFNETFGDYTEKAHELLNTKLEQWAEEAVARGGFHNTTALLIQYENYRDWIVKDNVAYSELFLDTAGVASFDVWDLLPFTRGYVHILDKDPYLRHFAYDPQYFLNELDLLGQAAATQLARNISNSGAMQTYFAGETIPGDNLAYDADLRAWVEYIPENFRPNYHGVGTCSMMPKEMGGVVDNAARVYGVQGLRVIDGSIPPTQLSSHVMTVFYAMALKIADAVLADY

SEQ ID NO: 1975 - protein, 576 aa, Aspergillus niger
IEASLLKDPKEVAGRTYDYIIAGGGLTGLTVAARLTENPNITVLVIESGSYESDRGPIIEDLNAYGDIFGSSVDHAYETVELPTNNQTALIRSGNGLGGSTLINGGTWTRPHKAQVDSWETVFGNEGWNWDSVAAYSLQAERARAPNAKQIAAGHYFNPSCHGLNGTVHAGPRDTGDDYSPIVKALMSAVEDRGVPTKKDLGCGDPHGVSMFPNTLHEDQVRSDAAREWLLPNYQRPNLQVLTGRYVGKVLLSQNATTPRAVGVEFGTHKGNTHNVYAKHEVLLAAGSAVSPTILEYSGIGMKSILEPLGIDTVVDLPVGLNLQDQTTSTVRSRITPAGAGQGQAAWFATFNETFGDYAEKAHELLNTKLEQWAEEAVARGGFHNTTALLIQYENYRDWIVKDNVAYSELFLDTAGVASFDVWDLLPFTRGYVHILDKDPYLRHFAYDPQYFLNELDLLGQAAATQLARNISNSGAMQTYFAGETIPGDNLAYDADLRAWVEYIPENFRPNYHGVGTCSMMPKEMGGVVDNAARVYGVQGLRVIDGSIPPTQLSSHVMTVFYAMALKIADAILADY

SEQ ID NO: 1976 - protein, 576 aa, Aspergillus niger
IEASLLKDPKEVAGRTYDYIIAGGGLTGLTVAARLTENPNITVLVIESGSYESDRGPIIEDLNAYGDIFGSSVDHAYETVELATNNQTALIRSGNGLGGSTLINGGTWTRPHKAQVDSWETVFGNEGWNWDSVAAYSLQAERARAPNAKQIAAGHYFNASCHGINGTVHAGPRDTGDDYSPIVKALMSAVEDRGVPTKKDLGCGDPHGVSMFPNTLHEDQVRSDAAREWLLPNYQRPNLQVLTGQYVGKVLLSQNATTPRAVGVEFGTHKGNTHNVYAKHEVLLAAGSAVSPTILEYSGIGMKSILEPLGIDTVVDLPVGLNLQDQTTSTVRSRITSAGAGQGQAAWFATFNETFGDYTEKAHELLNTKLEQWAEEAVARGGFHNTTALLIQYENYRDWIVKDNVAYSELFLDTAGVASFDVWDLLPFTRGYVHILDKDPYLRHFAYDPQYFLNELDLLGQAAATQLARNISNSGAMQTYFAGETIPGDNLAYDADLRAWVEYIPENFRPNYHGVGTCSMMPKEMGGVVDNAARVYGVQGLRVIDGSIPPTQLSSHVMTVFYAMALKIADAVLADY

SEQ ID NO: 1977 - protein, 576 aa, Aspergillus niger
IEASLLTDPKDVSGRTMDYIIAGGGLSGLTTAARLTENPNISVLVIESGSYESDRGPIIEDLNAYGDIFGSSVDHAYETVELATNNQTALIRSGNGLGGSTLVNGGTWTRPHKAQVDSWETVFGNEGWNWDNVAAYSLQAERARAPNAKQIAAGHYFNASCHGVNGTVHAGPRDTGDDYSPIVKALMSAVEDRGVPTKKDFGCGDPHGVSMFPNTLHEDQVRSDAAREWLLPNYQRPNLQVLTGQYVGKVLLSQNGTTPRAVGVEFGTHKGNTHNVYAKHEVLLAAGSAVSPTILEYSGIGMKSILEPLGIDTVVDLPVGLNLQDQTTATVRSRITSAGAGQGQAAWFATFNETFGDYSEKAHELLNTKLEQWAEEAVARGGFHNTTALLIQYENYRDWIVNHNVAYSELFLDTAGVASFDVWDLLPFTRGYVHILDKDPYLHHFAYDPQYFLNELDLLGQAAATQLARNISNSGAMQTYFAGETIPGDNLAYDADLSAWTEYIPYHFRPNYHGVGTCSMMPKEMGGVVDNAARVYGVQGLRVIDGSIPPTQMSSHVMTVFYAMALKISDAILEDY

SEQ ID NO: 1978 - protein, 576 aa, Aspergillus niger
IEASLLTDPKDVSGRTVDYIIAGGGLTGLTTAARLTENPNISVLVIESGSYESDRGPIIEDLNAYGDIFGSSVDHAYETVELATNNQTALIRSGNGLGGSTLVNGGTWTRPHKAQVDSWETVFGNEGWNWDNVAAYSLQAERARAPNAKQIAAGHYFNASCHGVNGTVHAGPRDTGDDYSPIVKALMSAVEDRGVPTKKDFGCGDPHGVSMFPNTLHEDQVRSDAAREWLLPNYQRPNLQVLTGQYVGKVLLSQNGTTPRAVGVEFGTHKGNTHNVYAKHEVLLAAGSAVSPTILEYSGIGMKSILEPLGIDTVVDLPVGLNLQDQTTATVRSRITSAGAGQGQAAWFATFNETFGDYSEKAHELLNTKLEQWAEEAVARGGFHNTTALLIQYENYRDWIVNHNVAYSELFLDTAGVASFDVWDLLPFTRGYVHILDKDPYLHHFAYDPQYFLNELDLLGQAAATQLARNISNSGAMQTYFAGETIPGDNLAYDADLSAWTEYIPYHFRPNYHGVGTCSMMPREMGGVVDNAARVYGVQGLRVIDGSIPPTQMSSHVMTVFYAMALKISDAILEDY

SEQ ID NO: 1979 - protein, 576 aa, Aspergillus niger
IEASLLTDPKDVSGRTVDYIIAGGGLTGLTTAARLTENPNISVLVIESGSYESDRGPIIEDLNAYGDIFGSSVDHAYETVELATNNQTALIRSGNGLGGSTLVNGGTWTRPHKAQVDSWETVFGNEGWNWDNVAAYSLQAERARAPNAKQIAAGHYFNASCHGVNGTVHAGPRDTGDDYSPIVKALMSAVEDRGVPTKKDFGCGDPHGVSMFPNTLHEDQVRSDAAREWLLPNYQRPNLQVLTGQYVGKVLLSQNGTTPRAVGVEFGTHKGNTHNVYAKHEVLLAAGSAVSPTILEYSGIGMKSILEPLGIDTVVDLPVGLNLQDQTTATVKSRITSAGAGQGQAAWFATFNETFGDYSEKAHELLNTKLEQWAEEAVARGGFHNTTALLIQYENYRDWIVNHNVAYSELFLDTAGVASFDVWDLLPFTRGYVHILDKDPYLHHFAYDPQYFLNELDLLGQAAATQLARNISNSGAMQTYFAGETIPGDNLAYDADLSAWTEYIPYHFRPNYHGVGTCSMMPKEMGGVVDNAARVYGVQGLRVIDGSIPPTQMSSHVMTVFYAMALKISDAILEDY

SEQ ID NO: 1980 - protein, 576 aa, Aspergillus niger
IEASLLTDPKDVSGRTVDYIIAGGGLVGLTTAARLTENPNISVLVIESGSYESDRGPIIEDLNAYGDIFGSSVDHAYETVELATNNQTALVRSGNGLGGSTLVNGGTWTRPHKAQVDSWETVFGNEGWNWDNVAAYSLQAERARAPNAKQIAAGHYFNASCHGVNGTVHAGPRDTGDDYSPIVKALMSAVEDRGVPTKKDFGCGDPHGVSMFPNTLHEDQVRSDAAREWLLPNYQRPNLQVLTGQYVGKVLLSQNGTTPRAVGVEFGTHKGNTHNVYAKHEVLLAAGSAVSPTILEYSGIGMKSILEPLGIDTVVDLPVGLNLQDQTTSTVRSRITSAGAGQGQAAWFATFNETFGDYSEKAHELLNTKLEQWAEEAVARGGFHNTTALLIQYENYRDWIVNHNVAYSELFLDTAGVASFDVWDLLPFTRGYVHILDKDPYLHHFAYDPQYFLNELDLLGQAAATQLARNISNSGAMQTYFAGETIPGDNLAYDADLSAWTEYIPYHFRPNYHGVGTCSMMPKEMGGVVDNAARVYGVQGLRVIDGSIPPTQMSSHPMTVFYAMALKISDAILEDY

SEQ ID NO: 1981 - protein, 576 aa, Aspergillus niger
IEASLLTDPKDVSGRYVDYIIAGGGLTGLTTAARLTENPNISVLVIESGSYESDRGPIIEDLNAYGDIFGSSVDHAYETVELATNNQTALIRSGNGLGGSTLVNGGTWTRPHKAQVDSWETVFGNEGWNWDNVAAYSLQAERARAPNAKQIAAGHYFNASCHGVNGTVHAGPRDTGDDYSPIVKALMSAVEDRGVPTKKDFGCGDPHGVSMFPNTLHEDQVRSDAAREWLLPNYQRPNLQVLTGQYVGKVLLSQNGTTPRAVGVEFGTHKGNTHNVYAKHEVLLAAGSAVSPTILEYSGIGMKSILEPLGIDTVVDLPVGLNLQDQTTATVRSRITSAGAGQGQAAWFATFNETFGDYSEKAHELLNTKLEQWAEEAVARGGFHNTTALLIQYENYRDWIVNHNVAYSELFLDTAGVASFDVWDLLPFTRGYVHILDKDPYLHHFAYDPQYFLNELDLLGQAAATQLARNISNSGAMQTYFAGETIPGDNLAYDADLSAWTEYIPYHFRPNYHGVGTCSMMPKEMGGVVDNAARVYGVQGLRVIDGSIPPTQMSSHVMTVFYAMALKISDAILEDY

SEQ ID NO: 1982 - protein, 576 aa, Aspergillus niger
IEASLLKDPKEVAGRTYDYIIAGGGLTGLTVAARLTENPNITVLVIESGSYESDRGPIIEDLNAYGDIFGSSVDHAYETVELPTNNQTALIRSGNGLGGSTLINGGTWTRPHKAQVDSWETVFGNEGWNWDSVAAYSLQAERARAPNAKQIAAGHYFNASCHGINGTVHAGPRDTGDDYSPIVKALMSAVEDRGVPTKKDLGCGDPHGVSMFPNTLHEDQVRSDAAREWLLPNYQRPNLQVLTGQYVGKVLLSQNATTPRAVGVEFGTHKGNTHNVYAKHEVLLAAGSAVSPTILEYSGIGMKSILEPLGIDTVVDLPVGLNLQDQTTSTVRSRITSAGAGQGQAAWFATFNETFGDYAEKAHELLNTKLEQWAEEAVARGGFHNTTALLIQYENYRDWIVKDNVAYSELFLDTAGVASFDVWDLLPFTRGYVHILDKDPYLRHFAYDPQYFLNELDLLGQAAATQLARNISNSGAMQTYFAGETIPGDNLAYDADLRAWVEYIPENFRPNYHGVGTCSMMPKEMGGVVDNAARVYGVQGLRVIDGSIPPTQMSSHVMTVFYAMALKIADAVLADY

SEQ ID NO: 1983 - protein, 576 aa, Aspergillus niger
IEASLLTDPKDVSGRTVDYIIAGGGLTGLTTAARLTENPNISVLVIESGSYESDRGPIIEDLNAYGDIFGSSVDHAYETVELATNNQTALIRSGNGLGGSTLVNGGTWTRPHKAQVDSWETVFGNEGWNWDNVAAYSLQAERARAPNAKQIAAGHYFNASCHGVNGTVHAGPRDTGDDYSPIVKALMSAVEDRGVPTKKDFGCGDPHGVSMFPNTLHEDQVRSDAAREWLLPNYQRPNLQVLTGQYVGKVLLSQNGTTPRAVGVEFGTHKGNTHNVYAKHEVLLAAGSAVSPTILEYSGIGMKSILEPLGIDTVVDLPVGLNLQDQTTATVRSRITSAGAGQGQAAWFATFNETFGDYSEKAHELLNTKLEQWAEEAVARGGFHNTTALLIQYENYRDWIVNHNVAYSELFLDTAGVASFDVWDLLPFTRGYVHILDKDPYLHHFAYDPQYFLNELDLLGQAAATQLARNISNSGAMQTYFAGETIPGDNLAYDADLSAWTEYIPYHFRPNYHGVGTCSMMPKEMGGVVDNAARVYGVQGLRVIDGSIPPTQMSSHLMTVFYAMALKISDAILEDY

SEQ ID NO: 1984 - protein, 576 aa, Aspergillus niger
IEASLLKDPKEVAGRTYDYIIAGGGLTGLTVAARLTENPNITVLVIESGSYESDRGPIIEDLNAYGDIFGSSVDHAYETVELATNNQTALIRSGNGLGGSTLINGGTWTRPHKAQVDSWETVFGNEGWNWDSVAAYSLQAERARAPNAKQIAAGHYFNASCHGINGTVHAGPRDTGDDYSPIVKALMSAVEDRGVPTKKDLGCGDPHGVSMFPNTLHPDQVRSDAAREWLLPNYQRPNLQVLTGQYVGKVLLSQNATTPRAVGVEFGTHKGNTHNVYAKHEVLLAAGSAVSPTILEYSGIGMKSILEPLGIDTVVDLPVGLNLQDQTTSTVRSRITSAGAGQGQAAWFATFNETFGDYAEKAHELLNTKLEQWAEEAVARGGFHNTTALLIQYENYRDWIVKDNVAYSELFLDTAGVASFDVWDLLPFTRGYVHILDKDPYLRHFAYDPQYFLNELDLLGQAAATQLARNISNSGAMQTYFAGETIPGDNLAYDADLSAWVEYIPENFRPNYHGVGTCSMMPKEMGGVVDNAARVYGVQGLRVIDGSIPPTQMSSHVMTVFYAMALKIADAVLADY

SEQ ID NO: 1985 - protein, 576 aa, Aspergillus niger
IEASLLKDPKEVAGRTYDYIIAGGGLTGLTVAARLTENPNITVLVIESGSYESDRGPIIEDLNAYGDIFGSSVDHAYETVELATNNRTALIRSGNGLGGSTLINGGTWTRPHKAQVDSWETVFGNEGWNWDSVAAYSLQAERARAPNAKQIAAGHYFNASCHGLNGTVHAGPRDTGDDYSPIVKALMSAVEDRGVPTKKDLGCGDPHGVSMFPNTLHEDQVRSDAAREWLLPNYQRPNLQVLTGRYVGKVLLSQNATTPRAVGVEFGTHKGNTHNVYAKHEVLLAAGSAVSPTILEYSGIGMKSILEPLGIDTVVDLPVGLNLQDQTTSTVRSRITSAGAGQGQAAWFATFNETFGDYAEKAHELLNTKLEQWAEEAVARGGFHNTTALLIQYENYRDWIVKDNVAYSELFLDTAGVASFDVWDLLPFTRGYVHILDKDPYLRHFAYDPQYFLNELDLLGQAAATQLARNISNSGAMQTYFAGETIPGDNLAYDADLRAWVEYIPENFRPNYHGVGTCSMMPKEMGGVVDNAARVYGVQGLRVIDGSIPPTQLSSHVMTVFYAMALKIADAILADY

SEQ ID NO: 1986 - protein, 576 aa, Aspergillus niger
IEASLLTDPKDVSGRTVDYIIAGGGLVGLTTAARLTENPNISVLVIESGSYESDRGPIIEDLNAYGDIFGSSVDHAYETVELATNNQTALVRSGNGLGGSTLVNGGTWTRPHKAQVDSWETVFGNEGWNWDNVAAYSLQAERARAPNAKQIAAGHYFNASCHGVNGTVHAGPRDTGDDYSPIVKALMSAVEDRGVPTKKDFGCGDPHGVSMFPNTLHEDQVRSDAAREWLLPNYQRPNLQVLTGQYVGKVLLSQNGTTPRAVGVEFGTHKGNTHNVYAKHEVLLAAGSAVSPTILEYSGIGMKSILEPLGIDTVVDLPVGLNLQDQTTSTVRSRITSAGAGQGQAAWFATFNETFGDYSEKAHELLNTKLEQWAEEAVARGGFHNTTALLIQYENYRDWIVNHNVAYSELFLDTAGVASFDVWDLLPFTRGYVHILDKDPYLHHFAYDPQYFLNELDLLGQAAATQLARNISNSGAMQTYFAGETIPGDNLAYDADLSAWTEYIPYHFRPNYHGVGTCSMMPKEMGGVVDNAARVYGVQGLRVIDGSIPPTQMSSHAMTVFYAMALKISDAILEDY

SEQ ID NO: 1987 - protein, 576 aa, Aspergillus niger
IEASLLKDPKEVAGRTYDYIIAGGGLTGLTVAARLTENPNITVLVIESGSYESDRGPIIEDLNAYGDIFGSSVDHAYETVELATNNQTALIRSGNGLGGSTLINGGTWTRPHKAQVDSWETVFGNEGWNWDSVAAYSLQAERARAPNAKQIAAGHYFNASCHGINGTVHAGPRDTGDDYSPIVKALMSAVEDRGVPTKKDLGCGDPHGVSMFPNTLHPDQVRSDAAREWLLPNYQRPNLQVLTGQYVGKVLLSQNATTPRAVGVEFGTHKGNTHNVYAKHEVLLAAGSAVSPTILEYSGIGMKSILEPLGIDTVVDLPVGLNLQDQTTSTVRSRITPAGAGQGQAAWFATFNETFGDYAEKAHELLNTKLEQWAEEAVARGGFHNTTALLIQYENYRDWIVKDNVAYSELFLDTAGVASFDVWDLLPFTRGYVHILDKDPYLRHFAYDPQYFLNELDLLGQAAATQLARNISNSGAMQTYFAGETIPGDNLAYDADLSAWVEYIPENFRPNYHGVGTCSMMPKEMGGVVDNAARVYGVQGLRVIDGSIPPTQMSSHVMTVFYAMALKIADAILADY

SEQ ID NO: 1988 - protein, 576 aa, Aspergillus niger
IEASLLKDPKEVAGRTYDYIIAGGGLTGLTVAAKLTENPNITVLVIESGSYESDRGPIIEDLNAYGDIFGSSVDHAYETVELATNNRTALIRSGNGLGGSTLINGGTWTRPHKAQVDSWETVFGNEGWNWDSVAAYSLQAERARAPNAKQIAAGHYFNASCHGINGTVHAGPRDTGDDYSPIVKALMSAVEDRGVPTKKDLGCGDPHGVSMFPNTLHEDQVRSDAAREWLLPNYQRPNLQVLTGQYVGKVLLSQNATTPRAVGVEFGTHKGNTHNVYAKHEVLLAAGSAVSPTILEYSGIGMKSILEPLGIDTVVDLPVGLNLQDQTTSTVRSRITSAGAGQGQAAWFATFNETFGDYAEKAHELLNTKLEQWAEEAVARGGFHNTTALLIQYENYRDWIVKDNVAYSELFLDTAGVASFDVWDLLPFTRGYVHILDKDPYLRHFAYDPQYFLNELDLLGQAAATQLARNISNSGAMQTYFAGETIPGDNLAYDADLSAWVEYIPENFRPNYHGVGTCSMMPKEMGGVVDNAARVYGVQGLRVIDGSIPPTQMSSHVMTVFYAMALKIADAILADY

SEQ ID NO: 1989 - protein, 576 aa, Aspergillus niger
IEASLLKDPKEVAGRTYDYIIAGGGLTGLTVAARLTENPNITVLVIESGSYESDRGPIIEDLNAYGDIFGSSVDHAYETVELATNNQTALIRSGNGLGGSTLINGGTWTRPHKAQVDSWETVFGNEGWNWDSVAAYSLQAERARAPNAKQIAAGHYFNPSCHGLNGTVHAGPRDTGDDYSPIVKALMSAVEDRGVPTKKDLGCGDPHGVSMFPNTLHPDQVRSDAAREWLLPNYQRPNLQVLTGRYVGKVLLSQNATTPRAVGVEFGTHKGNTHNVYAKHEVLLAAGSAVSPTILEYSGIGMKSILEPLGIDTVVDLPVGLNLQDQTTSTVRSRITPAGAGQGQAAWFATFNETFGDYAEKAHELLNTKLEQWAEEAVARGGFHNTTALLIQYENYRDWIVKDNVAYSELFLDTAGVASFDVWDLLPFTRGYVHILDKDPYLRHFAYDPQYFLNELDLLGQAAATQLARNISNSGAMQTYFAGETIPGDNLAYDADLSAWVEYIPENFRPNYHGVGTCSMMPKEMGGVVDNAARVYGVQGLRVIDGSIPPTQMSSHVMTVFYAMALKIADAILADY

SEQ ID NO: 1990 - protein, 576 aa, Aspergillus niger
IEASLLTDPKDVSGRTVDYIIAGGGLTGLTTAARLTENPNISVLVIESGCYESDRGPIIEDLNAYGDIFGSSVDHAYETVELATNNQTALIRSGNGLGGSTLVNGGTWTRPHKAQVDSWETVFGNEGWNWDNVAAYSLQAERARAPNAKQIAAGHYFNASCHGVNGTVHAGPRDTGDDYSPIVKALMSAVEDRGVPTKKDFGCGDPHGVSMFPNTLHEDQVRSDAAREWLLPNYQRPNLQVLCGQYVGKVLLSQNGTTPRAVGVEFGTHKGNTHNVYAKHEVLLAAGSAVSPTILEYSGIGMKSILEPLGIDTVVDLPVGLNLQDQTTATVRSRITSAGAGQGQAAWFATFNETFGDYSEKAHELLNTKLEQWAEEAVARGGFHNTTALLIQYENYRDWIVNHNVAYSELFLDTAGVASFDVWDLLPFTRGYVHILDKDPYLHHFAYDPQYFLNELDLLGQAAATQLARNISNSGAMQTYFAGETIPGDNLAYDADLSAWTEYIPYHFRPNYHGVGTCSMMPKEMGGVVDNAARVYGVQGLRVIDGSIPPTQMSSHVMTVFYAMALKISDAILEDY

SEQ ID NO: 1991 - protein, 576 aa, Aspergillus niger
IEASLLTDPKDVSGRTVDYIIAGGGLTGLTTAARLTENPNISVLVIESGSYESDRGPIICDLNAYGDIFGSSVDHAYETVELATNNQTALIRSGNGLGGSTLVNGGTWTRPHKAQVDSWETVFGNEGWNWDNVAAYSLQAERARAPNAKQIAAGHYFNASCHGVNGTVHAGPRDTGDDYSPIVKALMSAVEDRGVPTKKDFGCGDPHGVSMFPNTLHEDQCRSDAAREWLLPNYQRPNLQVLTGQYVGKVLLSQNGTTPRAVGVEFGTHKGNTHNVYAKHEVLLAAGSAVSPTILEYSGIGMKSILEPLGIDTVVDLPVGLNLQDQTTATVRSRITSAGAGQGQAAWFATFNETFGDYSEKAHELLNTKLEQWAEEAVARGGFHNTTALLIQYENYRDWIVNHNVAYSELFLDTAGVASFDVWDLLPFTRGYVHILDKDPYLHHFAYDPQYFLNELDLLGQAAATQLARNISNSGAMQTYFAGETIPGDNLAYDADLSAWTEYIPYHFRPNYHGVGTCSMMPKEMGGVVDNAARVYGVQGLRVIDGSIPPTQMSSHVMTVFYAMALKISDAILEDY

SEQ ID NO: 1992 - protein, 576 aa, Aspergillus niger
IEASLLKDPKEVAGRTYDYIIAGGGLTGLTVAARLTENPNITVLVIESGSYESDRGPIIEDLNAYGDIFGSSVDHAYETVELATNNQTALIRSGNGLGGSTLINGGTWTRPHKAQVDSWETVFGNEGWNWDSVAAYSLQAERARAPNAKQIAAGHYFNASCHGINGTVHAGPRDTGDDYSPIVKALMSAVEDRGVPTKKDLGCGDPHGVSMFPNTLHEDQVRSDAAREWLLPNYQRPNLQVLTGQYVGKVLLSQNATTPRAVGVEFGTHKGNTHNVYAKHEVLLAAGSAVSPTILEYSGIGMKSILEPLGIDTVVDLPVGLNLQDQTTSTVRSRITSAGAGQGQAAWFATFNETFGDYAEKAHELLNTKLEQWAEEAVARGGFHNTTALLIQYENYRDWIVKDNVAYSELFLDTAGVASFDVWDLLPFTRGYVHILDKDPYLRHFAYDPQYFLNELDLLGQAAATQLARNISNSGAMQTYFAGETIPGDNLAYDADLSAWVEYIPENFRPNYHGVGTCSMMPKEMGGVVDNAARVYGVQGLRVIDGSIPPTQMSSHVMTVFYAMALKIADAILADY

SEQ ID NO: 1993 - protein, 576 aa, Aspergillus niger
IEASLLKDPKEVAGRTYDYIIAGGGLTGLTVAAKLTENPNITVLVIESGSYESDRGPIIEDLNAYGDIFGSSVDHAYETVELATNNQTALIRSGNGLGGSTLINGGTWTRPHKAQVDSWETVFGNEGWNWDSVAAYSLQAERARAPNAKQIAAGHYFNASCHGINGTVHAGPRDTGDDYSPIVKALMSAVEDRGVPTKKDLGCGDPHGVSMFPNTLHEDQVRSDAAREWLLPNYQRPNLQVLTGQYVGKVLLSQNATTPRAVGVEFGTHKGNTHNVYAKHEVLLAAGSAVSPTILEYSGIGMKSILEPLGIDTVVDLPVGLNLQDQTTSTVRSRITSAGAGQGQAAWFATFNETFGDYAEKAHELLNTKLEQWAEEAVARGGFHNTTALLIQYENYRDWIVKDNVAYSELFLDTAGVASFDVWDLLPFTRGYVHILDKDPYLRHFAYDPQYFLNELDLLGQAAATQLARNISNSGAMQTYFAGETIPGDNLAYDADLSAWVEYIPENFRPNYHGVGTCSMMPKEMGGVVDNAARVYGVQGLRVIDGSIPPTQMSSHVMTVFYAMALKIADAVLADY

SEQ ID NO: 1994 - protein, 576 aa, Aspergillus niger
IEASLLKDPKEVAGRTYDYIIAGGGLTGLTVAARLTENPNITVLVIESGSYESDRGPIIEDLNAYGDIFGSSVDHAYETVELATNNQTALIRSGNGLGGSTLINGGTWTRPHKAQVDSWETVFGNEGWNWDSVAAYSLQAERARAPNAKQIAAGHYFNASCHGLNGTVHAGPRDTGDDYSPIVKALMSAVEDRGVPTKKDLGCGDPHGVSMFPNTLHEDQVRSDAAREWLLPNYQRPNLQVLTGQYVGKVLLSQNATTPRAVGVEFGTHKGNTHNVYAKHEVLLAAGSAVSPTILEYSGIGMKSILEPLGIDTVVDLPVGLNLQDQTTSTVRSRITSAGAGQGQAAWFATFNETFGDYAEKAHELLNTKLEQWAEEAVARGGFHNTTALLIQYENYRDWIVKDNVAYSELFLDTAGVASFDVWDLLPFTRGYVHILDKDPYLRHFAYDPQYFLNELDLLGQAAATQLARNISNSGAMQTYFAGETIPGDNLAYDADLSAWVEYIPENFRPNYHGVGTCSMMPKEMGGVVDNAARVYGVQGLRVIDGSIPPTQMSSHVMTVFYAMALKIADAILADY

SEQ ID NO: 1995 - protein, 576 aa, Aspergillus niger
IEASLLKDPKEVAGRTYDYIIAGGGLTGLTVAARLTENPNITVLVIESGSYESDRGPIIEDLNAYGDIFGSSVDHAYETVELATNNQTALIRSGNGLGGSTLINGGTWTRPHKAQVDSWETVFGNEGWNWDSVAAYSLQAERARAPNAKQIAAGHYFNASCHGINGTVHAGPRDTGDDYSPIVKALMSAVEDRGVPTKKDLGCGDPHGVSMFPNTLHPDQVRSDAAREWLLPNYQRPNLQVLTGQYVGKVLLSQNATTPRAVGVEFGTHKGNTHNVYAKHEVLLAAGSAVSPTILEYSGIGMKSILEPLGIDTVVDLPVGLNLQDQTTSTVRSRITSAGAGQGQAAWFATFNETFGDYAEKAHELLNTKLEQWAEEAVARGGFHNTTALLIQYENYRDWIVKDNVAYSELFLDTAGVASFDVWDLLPFTRGYVHILDKDPYLRHFAYDPQYFLNELDLLGQAAATQLARNISNSGAMQTYFAGETIPGDNLAYDADLSAWVEYIPENFRPNYHGVGTCSMMPKEMGGVVDNAARVYGVQGLRVIDGSIPPTQLSSHVMTVFYAMALKIADAVLADY

SEQ ID NO: 1996 - protein, 576 aa, Aspergillus niger
IEASLLTDPKDVSGRTVDYIIAGGGLTGLTTAARLTENPNICVLVIESGSYESDRGPIIEDLNAYGDIFGSSVDHAYETVELATNNQTALIRSGNGLGGSTLVNGGTWTRPHKAQVDSWETVFGNEGWNWDNVAAYSLQAERARAPNAKQIAAGHYFNASCHGVNGTVHAGPRDTGDDYSPIVKALMSAVEDRGVPTKKDFGCGDPHGVSMFPNTLHEDQVRSDAAREWLLPNYQRPCLQVLTGQYVGKVLLSQNGTTPRAVGVEFGTHKGNTHNVYAKHEVLLAAGSAVSPTILEYSGIGMKSILEPLGIDTVVDLPVGLNLQDQTTATVRSRITSAGAGQGQAAWFATFNETFGDYSEKAHELLNTKLEQWAEEAVARGGFHNTTALLIQYENYRDWIVNHNVAYSELFLDTAGVASFDVWDLLPFTRGYVHILDKDPYLHHFAYDPQYFLNELDLLGQAAATQLARNISNSGAMQTYFAGETIPGDNLAYDADLSAWTEYIPYHFRPNYHGVGTCSMMPKEMGGVVDNAARVYGVQGLRVIDGSIPPTQMSSHVMTVFYAMALKISDAILEDY

SEQ ID NO: 1997 - protein, 576 aa, Aspergillus niger
IEASLLTDPKDVSGRTVDYIIAGGGLVGLTTAAKLTENPNISVLVIESGSYESDRGPIIEDLNAYGDIFGSSVDHAYETVELATNNQTALVRSGNGLGGSTLVNGGTWTRPHKAQVDSWETVFGNEGWNWDNVAAYSLQAERARAPNAKQIAAGHYFNTSCHGVNGTVHAGPRDTGDDYSPIVKALMSAVEDRGVPTKKDFGCGDPHGVSMFPNTLHEDQVRSDAAREWLLPNYQRPNLQVLTGQYVGKVLLSQNGTTPRAVGVEFGTHKGNTHNVYAKHEVLLAAGSAISPTILEYSGIGMKSILDPLGIDTVVDLPVGLNLQDQTTATVRSRITSAGAGQGQAAWFATFNETFGDYSEKAHELLNTKLEQWAEEAVARGGFHNTTALLIQYENYRDWIVNHNVAYSELFLDTAGVASFDVWDLLPFTRGYVHILDKDPYLHHFAYDPQYFLNELDLLGQAAATQLARNISNSGAMQTYFAGETIPGDNLAYDADLSAWTEYIPYHFRPNYHGVGTCSMMPKEMGGVVDNAAKVYGVQGLRVIDGSIPPTQVSSHVMTVFYAMALKISDAILEDY

SEQ ID NO: 1998 - protein, 576 aa, Aspergillus niger
IEASLLTDPKDVSGRTVDYIIAGGGLTGLTTAARLTENPNISVLVIESGSYESDRGPIIEDLNAYGDIFGSSVDHAYETVELATNNQTALIRSGNGLGGSTLVNGGTWTRPHKAQVDSWETVFGNEGWNWDNVAAYSLQAERARAPNAKQIAAGHYFNASCHGVNGTVHAGPRDTGDDYSPIVKALMSAVEDRGVPTKKDFGCGDPHGVSMFPNTLHEDQVRSDAAREWLLPNYQRPNLQVLTGQYVGKVLLSQNGTTPRAVGVEFGTHKGNTHNVYAKHEVLLAAGSAVSPTILEYSGIGMKSILEPLGIDTVVDLPVGLNLQDQTTATVRSRITSAGAGQGQAAWFATFNETFGDYSEKAHELLNTKLEQWAEEAVARGGFHNTTALLIQYENYRDWIVNHNVAYSELFLDTAGVASFDVWDLLPFTRGYVHILDKDPYLHHFAYDPQYFLNELDLLGQAAATQLARNISNSGAMQTYFAGETIPGDNLAYDADLSAWTEWIPYHFRPNYHGVGTCSMMPKEMGGVVDNAARVYGVQGLRVIDGSIPPTQMSSHVMTVFYAMALKISDAILEDY

SEQ ID NO: 1999 - protein, 576 aa, Aspergillus niger
IEASLLKDPKEVAGRTYDYIIAGGGLTGLTVAARLTENPNITVLVIESGSYESDRGPIIEDLNAYGDIFGSSVDHAYETVELPTNNQTALIRSGNGLGGSTLINGGTWTRPHKAQVDSWETVFGNEGWNWDSVAAYSLQAERARAPNAKQIAAGHYFNASCHGINGTVHAGPRDTGDDYSPIVKALMSAVEDRGVPTKKDLGCGDPHGVSMFPNTLHEDQVRSDAAREWLLPNYQRPNLQVLTGQYVGKVLLSQNATTPRAVGVEFGTHKGNTHNVYAKHEVLLAAGSAVSPTILEYSGIGMKSILEPLGIDTVVDLPVGLNLQDQTTSTVRSRITPAGAGQGQAAWFATFNETFGDYAEKAHELLNTKLEQWAEEAVARGGFHNTTALLIQYENYRDWIVKDNVAYSELFLDTAGVASFDVWDLLPFTRGYVHILDKDPYLRHFAYDPQYFLNELDLLGQAAATQLARNISNSGAMQTYFAGETIPGDNLAYDADLSAWVEYIPENFRPNYHGVGTCSMMPKEMGGVVDNAARVYGVQGLRVIDGSIPPTQMSSHVMTVFYAMALKIADAILADY

SEQ ID NO: 2000 - protein, 576 aa, Aspergillus niger
IEASLLKDPKEVAGRTYDYIIAGGGLTGLTVAARLTENPNITVLVIESGSYESDRGPIIEDLNAYGDIFGSSVDHAYETVELATNNQTALIRSGNGLGGSTLINGGTWTRPHKAQVDSWETVFGNEGWNWDSVAAYSLQAERARAPNAKQIAAGHYFNASCHGINGTVHAGPRDTGDDYSPIVKALMSAVEDRGVPTKKDLGCGDPHGVSMFPNTLHPDQVRSDAAREWLLPNYQRPNLQVLTGRYVGKVLLSQNATTPRAVGVEFGTHKGNTHNVYAKHEVLLAAGSAVSPTILEYSGIGMKSILEPLGIDTVVDLPVGLNLQDQTTSTVRSRITPAGAGQGQAAWFATFNETFGDYAEKAHELLNTKLEQWAEEAVARGGFHNTTALLIQYENYRDWIVKDNVAYSELFLDTAGVASFDVWDLLPFTRGYVHILDKDPYLRHFAYDPQYFLNELDLLGQAAATQLARNISNSGAMQTYFAGETIPGDNLAYDADLRAWVEYIPENFRPNYHGVGTCSMMPKEMGGVVDNAARVYGVQGLRVIDGSIPPTQLSSHVMTVFYAMALKIADAVLADY

SEQ ID NO: 2001 - protein, 576 aa, Aspergillus niger
IEASLLTDPKDVSGRTVDYIIAGGGLVGLTTAAKLTENPNISVLVIESGSYESDRGPIIEDLNAYGDIFGSSVDHAYETVELATNNQTALVRSGNGLGGSTLINGGTWTRPHKAQVDSWETVFGNEGWNWDNVAAYSLQAERARAPNAKQIAAGHYFNTSCHGVNGTVHAGPRDTGDDYSPIVKALMSAVEDRGVPTKKDFGCGDPHGVSMFPNTLHEDQVRSDAAREWLLPNYQRPNLQVLTGQYVGKVLLSQNGTTPRAVGVEFGTHKGNTHNVYAKHEVLLAAGSAVSPTILEYSGIGMKSILEPLGIDTVVDLPVGLNLQDQTTATVRSRITSAGAGQGQAAWFATFNETFGDYSEKAHELLNTKLEQWAEEAVARGGFHNTTALLIQYENYRDWIVNHNVAYSELFLDTAGVASFDVWDLLPFTRGYVHILDKDPYLHHFAYDPQYFLNELDLLGQAAATQLARNISNSGAMQTYFAGETIPGDNLAYDADLSAWTEYIPYHFRPNYHGVGTCSMMPKEMGGVVDNAARVYGVQGLRVIDGSIPPTQVSSHVMTVFYAMALKISDAILEDY

SEQ ID NO: 2002 - protein, 576 aa, Aspergillus niger
IEASLLKDPKEVAGRTYDYIIAGGGLTGLTVAARLTENPNITVLVIESGSYESDRGPIIEDLNAYGDIFGSSVDHAYETVELATNNQTALIRSGNGLGGSTLINGGTWTRPHKAQVDSWETVFGNEGWNWDSVAAYSLQAERARAPNAKQIAAGHYFNPSCHGINGTVHAGPRDTGDDYSPIVKALMSAVEDRGVPTKKDLGCGDPHGVSMFPNTLHPDQVRSDAAREWLLPNYQRPNLQVLTGQYVGKVLLSQNATTPRAVGVEFGTHKGNTHNVYAKHEVLLAAGSAVSPTILEYSGIGMKSILEPLGIDTVVDLPVGLNLQDQTTSTVRSRITSAGAGQGQAAWFATFNETFGDYAEKAHELLNTKLEQWAEEAVARGGFHNTTALLIQYENYRDWIVKDNVAYSELFLDTAGVASFDVWDLLPFTRGYVHILDKDPYLRHFAYDPQYFLNELDLLGQAAATQLARNISNSGAMQTYFAGETIPGDNLAYDADLSAWVEYIPENFRPNYHGVGTCSMMPKEMGGVVDNAARVYGVQGLRVIDGSIPPTQMSSHVMTVFYAMALKIADAILADY

SEQ ID NO: 2003 - protein, 576 aa, Aspergillus niger
IEASLLTDPKDVSGRTVDYIIAGGGLVGLTTAARLTENPNISVLVIESGSYESDRGPIIEDLNAYGDIFGSSVDHAYETVELATNNQTALVRSGNGLGGSTLVNGGTWTRPHKAQVDSWETVFGNEGWNWDNVAAYSLQAERARAPNAKQIAAGHYFNASCHGVNGTVHVGPRDTGDDYSPIVKALMSAVEDRGVPTKKDFGCGDPHGVSMFPNTLHEDQVRSDAAREWLLPNYQRPNLQVLTGQYVGKVLLSQNGTTPRAVGVEFGTHKGNTHNVYAKHEVLLAAGSAVSPTILEYSGIGMKSILEPLGIDTVVDLPVGLNLQDQTTSTVRSRITSAGAGQGQAAWFATFNETFGDYSEKAHELLNTKLEQWAEEAVARGGFHNTTALLIQYENYRDWIVNHNVAYSELILDTAGVASFDVWDLLPFTRGYVHILDKDPYLHHFAYDPQYFLNELDLLGQAAATQLARNISNSGAMQTYFAGETIPGDNLAYDADLSAWTEYIPYHFRPNYHGVGTCSMMPKEMGGVVDNAARVYGVQGLRVIDGSIPPTQMSSHTMTVFYAMALKISDAILEDY

SEQ ID NO: 2004 - protein, 576 aa, Aspergillus niger
IEASLLKDPKEVAGRTYDYIIAGGGLTGLTVAARLTENPNITVLVIESGSYESDRGPIIEDLNAYGDIFGSSVDHAYETVELPTNNQTALIRSGNGLGGSTLINGGTWTRPHKAQVDSWETVFGNEGWNWDSVAAYSLQAERARAPNAKQIAAGHYFNPSCHGINGTVHAGPRDTGDDYSPIVKALMSAVEDRGVPTKKDLGCGDPHGVSMFPNTLHEDQVRSDAAREWLLPNYQRPNLQVLTGQYVGKVLLSQNATTPRAVGVEFGTHKGNTHNVYAKHEVLLAAGSAVSPTILEYSGIGMKSILEPLGIDTVVDLPVGLNLQDQTTSTVRSRITSAGAGQGQAAWFATFNETFGDYAEKAHELLNTKLEQWAEEAVARGGFHNTTALLIQYENYRDWIVKDNVAYSELFLDTAGVASFDVWDLLPFTRGYVHILDKDPYLRHFAYDPQYFLNELDLLGQAAATQLARNISNSGAMQTYFAGETIPGDNLAYDADLSAWVEYIPENFRPNYHGVGTCSMMPKEMGGVVDNAARVYGVQGLRVIDGSIPPTQMSSHVMTVFYAMALKIADAILADY

SEQ ID NO: 2005 - protein, 576 aa, Aspergillus niger
IEASLLTDPKDVSGRTVDYIIAGGGLTGLTTAARLTENPNISVLVIESGSYESDRGPIIEDLNAYGDIFGSSVDHAYETVELATNNQTALIRSGNGLGGSTLVNGGTWTRPHKAQVDAWETVFGNEGWNWDNVAAYSLQAERARAPNAKQIAAGHYFNASCHGVNGTVHAGPRDTGDDYSPIVKALMSAVEDRGVPTKKDFGCGDPHGVSMFPNTLHEDQVRSDAAREWLLPNYQRPNLQVLTGQYVGKVLLSQNGTTPRAVGVEFGTHKGNTHNVYAKHEVLLAAGSAVSPTILEYSGIGMKSILEPLGIDTVVDLPVGLNLQDQTTATVRSRITSAGAGQGQAAWFATFNETFGDYSEKAHELLNTKLEQWAEEAVARGGFHNTTALLIQYENYRDWIVNHNVAYSELFLDTAGVASFDVWDLLPFTRGYVHILDKDPYLHHFAYDPQYFLNELDLLGQAAATQLARNISNSGAMQTYFAGETIPGDNLAYDADLSAWTEYIPYHFRPNYHGVGTCSMMPKEMGGVVDNAARVYGVQGLRVIDGSIPPTQMSSHVMTVFYAMALKISDAILEDY

SEQ ID NO: 2006 - protein, 576 aa, Aspergillus niger
IEASLLKDPKEVAGRTYDYIIAGGGLTGLTVAARLTENPNITVLVIESGSYESDRGPIIEDLNAYGDIFGSSVDHAYETVELATNNQTALIRSGNGLGGSTLINGGTWTRPHKAQVDSWETVFGNEGWNWDSVAAYSLQAERARAPNAKQIAAGHYFNASCHGINGTVHAGPRDTGDDYSPIVKALMSAVEDRGVPTKKDLGCGDPHGVSMFPNTLHEDQVRSDAAREWLLPNYQRPNLQVLTGRYVGKVLLSQNATTPRAVGVEFGTHKGNTHNVYAKHEVLLAAGSAVSPTILEYSGIGMKSILEPLGIDTVVDLPVGLNLQDQTTSTVRSRITPAGAGQGQAAWFATFNETFGDYTEKAHELLNTKLEQWAEEAVARGGFHNTTALLIQYENYRDWIVKDNVAYSELFLDTAGVASFDVWDLLPFTRGYVHILDKDPYLRHFAYDPQYFLNELDLLGQAAATQLARNISNSGAMQTYFAGETIPGDNLAYDADLRAWVEYIPENFRPNYHGVGTCSMMPKEMGGVVDNAARVYGVQGLRVIDGSIPPTQMSSHVMTVFYAMALKIADAVLADY

SEQ ID NO: 2007 - protein, 576 aa, Aspergillus niger
IEASLLTDPKDVSGRTVDYIIAGGGLTGLTTAARLTENPNISVLVIESGSYESDRGPIIEDLNAYGXIFGSSVDHAYETVELATNNQTALIRSGNGLGGSTLVNGGTWTRPHKAQVDSWETVFGNEGWNWDNVAAYSLQAERARAPNAKQIAAGHYFNASCHGVNGTVHAGPRDTGDDYSPIVKALMSAVEDRGVPTKKDFGCGDPHGVSMFPNTLHEDQVRSDAAREWLLPNYQRPNLQVLTGQYVGKVLLSQNGTTPRAVGVEFGTHKGNTHNVYAKHEVLLAAGSAVSPTILEYSGIGMKSILEPLGIDTVVDLPVGLNLQDQTTATVRSRITSAGAGQGQAAWFATFNETFGDYSEKAHELLNTKLEQWAEEAVARGGFHNTTALLIQYENYRDWIVNHNVAYSELFLDTAGVASFDVWDLLPFTRGYVHILDKDPYLHHFAYDPQYFLNELDLLGQAAATQLARNISNSGAMQTYFAGETIPGDNLAYDADLSAWTEYIPYHFRPNYHGVGTCSMMPKEMGGVVDNAARVYGVQGLRVIDGSIPPTQMSSHVMTVFYAMALKISDAILEDY

SEQ ID NO: 2008 - protein, 576 aa, Synthetic construct
IEASLLTDPKDVSGRTVDYIIAGGGLTGLTTAARLTENPNISVLVIESGSYESDRGPIIEDLNAYGDIFGSSVDHAYETVELATNNQTALIRSGNGLGGSTLVNGGTWTRPHKAQVDSWETVFGNEGWNWDNVAAYSLQAERARAPNAKQIAAGHYFNASCHGVNGTVHAGPRDTGDDYSPIVKALMSAVEDRGVPTKKDFGCGDPHGVSMFPNTLHEDQVRSDAAREWLLPNYQRPNLQVLTGQYVGKVLLSQNGTTPRAVGVEFGTHKGNTHNVYAKHEVLLAAGSAVSPTILEYSGIGMKSILEPLGIDTVVDLPVGLNLQDQTTATVRSRITSAGAGQGQAAWFATFNETFGDYSEKAHELLNTKLEQWAEEAVARGGFHNTTALLIQYENYRDWIVNHNVAYSELFLDTAGVASFDVWDLLPFTRGYVHILDKDPYLHHFAYDPQYFLNELDLLGQAAATQLARNISNSGAMQTYFAGETIPGDNLAYDADLSAWTEYIPYHFRPNYHGVGTCSMLPKEMGGVVDNAARVYGVQGLRVIDGSIPPTQMSSHVMTVFYAMALKISDAILEDY

SEQ ID NO: 2009 - protein, 576 aa, Aspergillus niger
IEASLLKDPKEVAGRTYDYIIAGGGLTGLTVAAKLTENPNITVLVIESGSYESDRGPIIEDLNAYGDIFGSSVDHAYETVELATNNRTALIRSGNGLGGSTLINGGTWTRPHKAQVDSWETVFGNEGWNWDSVAAYSLQAERARAPNAKQIAAGHYFNASCHGLNGTVHAGPRDTGDDYSPIVKALMSAVEDRGVPTKKDLGCGDPHGVSMFPNTLHEDQVRSDAAREWLLPNYQRPNLQVLTGQYVGKVLLSQNATTPRAVGVEFGTHKGNTHNVYAKHEVLLAAGSAVSPTILEYSGIGMKSILEPLGIDTVVDLPVGLNLQDQTTSTVRSRITSAGAGQGQAAWFATFNETFGDYAEKAHELLNTKLEQWAEEAVARGGFHNTTALLIQYENYRDWIVKDNVAYSELFLDTAGVASFDVWDLLPFTRGYVHILDKDPYLRHFAYDPQYFLNELDLLGQAAATQLARNISNSGAMQTYFAGETIPGDNLAYDADLSAWVEYIPENFRPNYHGVGTCSMMPKEMGGVVDNAARVYGVQGLRVIDGSIPPTQMSSHVMTVFYAMALKIADAILADY

SEQ ID NO: 2010 - protein, 576 aa, Aspergillus niger
IEASLLKDPKEVAGRTYDYIIAGGGLTGLTVAARLTENPNITVLVIESGSYESDRGPIIEDLNAYGDIFGSSVDHAYETVELATNNQTALIRSGNGLGGSTLINGGTWTRPHKAQVDSWETVFGNEGWNWDSVAAYSLQAERARAPNAKQIAAGHYFNASCHGINGTVHAGPRDTGDDYSPIVKALMSAVEDRGVPTKKDLGCGDPHGVSMFPNTLHEDQVRSDAAREWLLPNYQRPNLQVLTGQYVGKVLLSQNATTPRAVGVEFGTHKGNTHNVYAKHEVLLAAGSAVSPTILEYSGIGMKSILEPLGIDTVVDLPVGLNLQDQTTSTVRSRITPAGAGQGQAAWFATFNETFGDYTEKAHELLNTKLEQWAEEAVARGGFHNTTALLIQYENYRDWIVKDNVAYSELFLDTAGVASFDVWDLLPFTRGYVHILDKDPYLRHFAYDPQYFLNELDLLGQAAATQLARNISNSGAMQTYFAGETIPGDNLAYDADLSAWVEYIPENFRPNYHGVGTCSMMPKEMGGVVDNAARVYGVQGLRVIDGSIPPTQMSSHVMTVFYAMALKIADAILADY

SEQ ID NO: 2011 - protein, 576 aa, Aspergillus niger
IEASLLKDPKEVAGRTYDYIIAGGGLTGLTVAARLTENPNITVLVIESGSYESDRGPIIEDLNAYGDIFGSSVDHAYETVELATNNQTALIRSGNGLGGSTLINGGTWTRPHKAQVDSWETVFGNEGWNWDSVAAYSLQAERARAPNAKQIAAGHYFNPSCHGINGTVHAGPRDTGDDYSPIVKALMSAVEDRGVPTKKDLGCGDPHGVSMFPNTLHEDQVRSDAAREWLLPNYQRPNLQVLTGRYVGKVLLSQNATTPRAVGVEFGTHKGNTHNVYAKHEVLLAAGSAVSPTILEYSGIGMKSILEPLGIDTVVDLPVGLNLQDQTTSTVRSRITSAGAGQGQAAWFATFNETFGDYAEKAHELLNTKLEQWAEEAVARGGFHNTTALLIQYENYRDWIVKDNVAYSELFLDTAGVASFDVWDLLPFTRGYVHILDKDPYLRHFAYDPQYFLNELDLLGQAAATQLARNISNSGAMQTYFAGETIPGDNLAYDADLSAWVEYIPENFRPNYHGVGTCSMMPKEMGGVVDNAARVYGVQGLRVIDGSIPPTQMSSHVMTVFYAMALKIADAILADY

SEQ ID NO: 2012 - protein, 576 aa, Aspergillus niger
IEASLLKDPKEVAGRTYDYIIAGGGLTGLTVAAKLTENPNITVLVIESGSYESDRGPIIEDLNAYGDIFGSSVDHAYETVELATNNQTALIRSGNGLGGSTLINGGTWTRPHKAQVDSWETVFGNEGWNWDSVAAYSLQAERARAPNAKQIAAGHYFNASCHGINGTVHAGPRDTGDDYSPIVKALMSAVEDRGVPTKKDLGCGDPHGVSMFPNTLHEDQVRSDAAREWLLPNYQRPNLQVLTGQYVGKVLLSQNATTPRAVGVEFGTHKGNTHNVYAKHEVLLAAGSAVSPTILEYSGIGMKSILEPLGIDTVVDLPVGLNLQDQTTSTVRSRITPAGAGQGQAAWFATFNETFGDYAEKAHELLNTKLEQWAEEAVARGGFHNTTALLIQYENYRDWIVKDNVAYSELFLDTAGVASFDVWDLLPFTRGYVHILDKDPYLRHFAYDPQYFLNELDLLGQAAATQLARNISNSGAMQTYFAGETIPGDNLAYDADLSAWVEYIPENFRPNYHGVGTCSMMPKEMGGVVDNAARVYGVQGLRVIDGSIPPTQMSSHVMTVFYAMALKIADAILADY

SEQ ID NO: 2013 - protein, 576 aa, Aspergillus niger
IEASLLKDPKEVAGRTYDYIIAGGGLTGLTVAARLTENPNITVLVIESGSYESDRGPIIEDLNAYGDIFGSSVDHAYETVELATNNQTALIRSGNGLGGSTLINGGTWTRPHKAQVDSWETVFGNEGWNWDSVAAYSLQAERARAPNAKQIAAGHYFNPSCHGLNGTVHAGPRDTGDDYSPIVKALMSAVEDRGVPTKKDLGCGDPHGVSMFPNTLHEDQVRSDAAREWLLPNYQRPNLQVLTGQYVGKVLLSQNATTPRAVGVEFGTHKGNTHNVYAKHEVLLAAGSAVSPTILEYSGIGMKSILEPLGIDTVVDLPVGLNLQDQTTSTVRSRITSAGAGQGQAAWFATFNETFGDYTEKAHELLNTKLEQWAEEAVARGGFHNTTALLIQYENYRDWIVKDNVAYSELFLDTAGVASFDVWDLLPFTRGYVHILDKDPYLRHFAYDPQYFLNELDLLGQAAATQLARNISNSGAMQTYFAGETIPGDNLAYDADLSAWVEYIPENFRPNYHGVGTCSMMPKEMGGVVDNAARVYGVQGLRVIDGSIPPTQMSSHVMTVFYAMALKIADAILADY

SEQ ID NO: 2014 - protein, 576 aa, Aspergillus niger
IEASLLTDPKDVSGRTVDYIIAGGGLTGLTTAARLTENPNISVLVIESGSYESDRGPIIEDLNAYGDIFGSSVDHAYETVELATNNQTALIRSGNGLGGSTLVNGGTWTRPHKAQVDSWETVFGNEGWNWDNVAAYSLQAERARAPNAKQIAAGHYFNASCHGVNGTVHAGPRDTGDDYSPIVKALMSAVEDRGVPTKKDFGCGDPHGVSMFPNTLHEDQVRSDAAREWLLPNYQRPNLQVLTGQYVGKVLLSQNGTTPRAVGVEFGTHKGNTHNVYAKHEVLLAAGSAVSPTILEYSGIGMKSILEPLGIDTVVDLPVGLNLQDQTTATVRSRITSAGAGQGQAAWFATFNETFGDYSEKAHELLNTKLEQWAEEAVARGGFHNTTALLIQYENYRDWIVNHNVAYSELFLDTXGVASFDVWDLLPFTRGYVHILDKDPYLHHFAYDPQYFLNELDLLGQAAATQLARNISNSGAMQTYFAGETIPGDNLAYDADLSAWTEYIPYHFRPNYHGVGTCSMMPKEMGGVVDNAARVYGVQGLRVIDGSIPPTQMSSHVMTVFYAMALKISDAILEDY

SEQ ID NO: 2015 - protein, 576 aa, Aspergillus niger
IEASLLKDPKEVAGRTYDYIIAGGGLTGLTVAARLTENPNITVLVIESGSYESDRGPIIEDLNAYGDIFGSSVDHAYETVELPTNNRTALIRSGNGLGGSTLINGGTWTRPHKAQVDSWETVFGNEGWNWDSVAAYSLQAERARAPNAKQIAAGHYFNASCHGLNGTVHAGPRDTGDDYSPIVKALMSAVEDRGVPTKKDLGCGDPHGVSMFPNTLHEDQVRSDAAREWLLPNYQRPNLQVLTGQYVGKVLLSQNATTPRAVGVEFGTHKGNTHNVYAKHEVLLAAGSAVSPTILEYSGIGMKSILEPLGIDTVVDLPVGLNLQDQTTSTVRSRITSAGAGQGQAAWFATFNETFGDYAEKAHELLNTKLEQWAEEAVARGGFHNTTALLIQYENYRDWIVKDNVAYSELFLDTAGVASFDVWDLLPFTRGYVHILDKDPYLRHFAYDPQYFLNELDLLGQAAATQLARNISNSGAMQTYFAGETIPGDNLAYDADLRAWVEYIPENFRPNYHGVGTCSMMPKEMGGVVDNAARVYGVQGLRVIDGSIPPTQLSSHVMTVFYAMALKIADAILADY

SEQ ID NO: 2016 - protein, 576 aa, Aspergillus niger
IEASLLKDPKEVAGRTYDYIIAGGGLTGLTVAARLTENPNITVLVIESGSYESDRGPIIEDLNAYGDIFGSSVDHAYETVELATNNQTALIRSGNGLGGSTLINGGTWTRPHKAQVDSWETVFGNEGWNWDSVAAYSLQAERARAPNAKQIAAGHYFNASCHGINGTVHAGPRDTGDDYSPIVKALMSAVEDRGVPTKKDLGCGDPHGVSMFPNTLHEDQVRSDAAREWLLPNYQRPNLQVLTGQYVGKVLLSQNATTPRAVGVEFGTHKGNTHNVYAKHEVLLAAGSAVSPTILEYSGIGMKSILEPLGIDTVVDLPVGLNLQDQTTSTVRSRITSAGAGQGQAAWFATFNETFGDYTEKAHELLNTKLEQWAEEAVARGGFHNTTALLIQYENYRDWIVKDNVAYSELFLDTAGVASFDVWDLLPFTRGYVHILDKDPYLRHFAYDPQYFLNELDLLGQAAATQLARNISNSGAMQTYFAGETIPGDNLAYDADLRAWVEYIPENFRPNYHGVGTCSMMPKEMGGVVDNAARVYGVQGLRVIDGSIPPTQMSSHVMTVFYAMALKIADAVLADY

SEQ ID NO: 2017 - protein, 576 aa, Aspergillus niger
IEASLLKDPKEVAGRTYDYIIAGGGLTGLTVAARLTENPNITVLVIESGSYESDRGPIIEDLNAYGDIFGSSVDHAYETVELATNNQTALIRSGNGLGGSTLINGGTWTRPHKAQVDSWETVFGNEGWNWDSVAAYSLQAERARAPNAKQIAAGHYFNASCHGINGTVHAGPRDTGDDYSPIVKALMSAVEDRGVPTKKDLGCGDPHGVSMFPNTLHEDQVRSDAAREWLLPNYQRPNLQVLTGQYVGKVLLSQNATTPRAVGVEFGTHKGNTHNVYAKHEVLLAAGSAVSPTILEYSGIGMKSILEPLGIDTVVDLPVGLNLQDQTTSTVRSRITSAGAGQGQAAWFATFNETFGDYAEKAHELLNTKLEQWAEEAVARGGFHNTTALLIQYENYRDWIVKDNVAYSELFLDTAGVASFDVWDLLPFTRGYVHILDKDPYLRHFAYDPQYFLNELDLLGQAAATQLARNISNSGAMQTYFAGETIPGDNLAYDADLSAWVEYIPENFRPNYHGVGTCSMMPKEMGGVVDNAARVYGVQGLRVIDGSIPPTQLSSHVMTVFYAMALKIADAILADY

SEQ ID NO: 2018 - protein, 576 aa, Aspergillus niger
IEASLLKDPKEVAGRTYDYIIAGGGLTGLTVAARLTENPNITVLVIESGSYESDRGPIIEDLNAYGDIFGSSVDHAYETVELATNNQTALIRSGNGLGGSTLINGGTWTRPHKAQVDSWETVFGNEGWNWDSVAAYSLQAERARAPNAKQIAAGHYFNASCHGINGTVHAGPRDTGDDYSPIVKALMSAVEDRGVPTKKDLGCGDPHGVSMFPNTLHEDQVRSDAAREWLLPNYQRPNLQVLTGQYVGKVLLSQNATTPRAVGVEFGTHKGNTHNVYAKHEVLLAAGSAVSPTILEYSGIGMKSILEPLGIDTVVDLPVGLNLQDQTTSTVRSRITSAGAGQGQAAWFATFNETFGDYAEKAHELLNTKLEQWAEEAVARGGFHNTTALLIQYENYRDWIVKDNVAYSELFLDTAGVASFDVWDLLPFTRGYVHILDKDPYLRHFAYDPQYFLNELDLLGQAAATQLARNISNSGAMQTYFAGETIPGDNLAYDADLRAWVEYIPENFRPNYHGVGTCSMMPKEMGGVVDNAARVYGVQGLRVIDGSIPPTQMSSHVMTVFYAMALKIADAILADY

SEQ ID NO: 2019 - protein, 576 aa, Aspergillus niger
IEASLLKDPKEVAGRTYDYIIAGGGLTGLTVAARLTENPNITVLVIESGSYESDRGPIIEDLNAYGDIFGSSVDHAYETVELATNNRTALIRSGNGLGGSTLINGGTWTRPHKAQVDSWETVFGNEGWNWDSVAAYSLQAERARAPNAKQIAAGHYFNASCHGINGTVHAGPRDTGDDYSPIVKALMSAVEDRGVPTKKDLGCGDPHGVSMFPNTLHPDQVRSDAAREWLLPNYQRPNLQVLTGQYVGKVLLSQNATTPRAVGVEFGTHKGNTHNVYAKHEVLLAAGSAVSPTILEYSGIGMKSILEPLGIDTVVDLPVGLNLQDQTTSTVRSRITSAGAGQGQAAWFATFNETFGDYAEKAHELLNTKLEQWAEEAVARGGFHNTTALLIQYENYRDWIVKDNVAYSELFLDTAGVASFDVWDLLPFTRGYVHILDKDPYLRHFAYDPQYFLNELDLLGQAAATQLARNISNSGAMQTYFAGETIPGDNLAYDADLSAWVEYIPENFRPNYHGVGTCSMMPKEMGGVVDNAARVYGVQGLRVIDGSIPPTQMSSHVMTVFYAMALKIADAILADY

SEQ ID NO: 2020 - protein, 576 aa, Aspergillus niger
IEASLLKDPKEVAGRTYDYIIAGGGLTGLTVAAKLTENPNITVLVIESGSYESDRGPIIEDLNAYGDIFGSSVDHAYETVELATNNRTALIRSGNGLGGSTLINGGTWTRPHKAQVDSWETVFGNEGWNWDSVAAYSLQAERARAPNAKQIAAGHYFNPSCHGLNGTVHAGPRDTGDDYSPIVKALMSAVEDRGVPTKKDLGCGDPHGVSMFPNTLHPDQVRSDAAREWLLPNYQRPNLQVLTGQYVGKVLLSQNATTPRAVGVEFGTHKGNTHNVYAKHEVLLAAGSAVSPTILEYSGIGMKSILEPLGIDTVVDLPVGLNLQDQTTSTVRSRITSAGAGQGQAAWFATFNETFGDYAEKAHELLNTKLEQWAEEAVARGGFHNTTALLIQYENYRDWIVKDNVAYSELFLDTAGVASFDVWDLLPFTRGYVHILDKDPYLRHFAYDPQYFLNELDLLGQAAATQLARNISNSGAMQTYFAGETIPGDNLAYDADLSAWVEYIPENFRPNYHGVGTCSMMPKEMGGVVDNAARVYGVQGLRVIDGSIPPTQMSSHVMTVFYAMALKIADAILADY

SEQ ID NO: 2021 - protein, 576 aa, Aspergillus niger
IEASLLTDPKDVSGRTVDYIIAGGGLTGLTTAARLTENPNISVLVIESGSYESDRGPIIEDLNAYGDIFGSSVDHAYETVELATNNQTALIRSGNGLGGSTLVNGGTWTRPHKAQVDSWETVFGNEGWNWDNVAAYSLQAERARAPNAKQIAAGHYFNASCHGVNGTVHAGPRDTGDDYSPIVKALMSAVEDRGVPTKKDFGCGDPHGVSMFPNTLHEDQVRSDAAREWLLPNYQRPNLQVLTGQYVGKVLLSQNGTTPRAVGVEFGTHKGNTHNVYAKHEVLLAAGSAVSPTILEYSGIGMKSILEPLGIDTVVDLPVGLNLQDQTTATVRSRITSAGAGQGQAAWFATFNETFGDYSEKAHELLNTKLEQWAEEAVARGGFHNTTALLIQYENYRDWIVNHNVAYSELFLDTAGVASFDVWDLLPFTRGYVHILDKDPYLHHFAYDPQYFLNELDLLGQAAATQLARNISNSGAMQTYFAGETIPGDNLAYDADLSAWTEYIPYHFRPNYHGVGTCSMMPKEMGGVVDNAARVYGVQGLRVIDGSIPPTQMSSHVMTVFYAMALKIADAILEDY

SEQ ID NO: 2022 - protein, 576 aa, Aspergillus niger
IEASLLKDPKEVAGRTYDYIIAGGGLTGLTVAAKLTENPNITVLVIESGSYESDRGPIIEDLNAYGDIFGSSVDHAYETVELATNNRTALIRSGNGLGGSTLINGGTWTRPHKAQVDSWETVFGNEGWNWDSVAAYSLQAERARAPNAKQIAAGHYFNPSCHGLNGTVHAGPRDTGDDYSPIVKALMSAVEDRGVPTKKDLGCGDPHGVSMFPNTLHPDQVRSDAAREWLLPNYQRPNLQVLTGRYVGKVLLSQNATTPRAVGVEFGTHKGNTHNVYAKHEVLLAAGSAVSPTILEYSGIGMKSILEPLGIDTVVDLPVGLNLQDQTTSTVRSRITPAGAGQGQAAWFATFNETFGDYAEKAHELLNTKLEQWAEEAVARGGFHNTTALLIQYENYRDWIVKDNVAYSELFLDTAGVASFDVWDLLPFTRGYVHILDKDPYLRHFAYDPQYFLNELDLLGQAAATQLARNISNSGAMQTYFAGETIPGDNLAYDADLSAWVEYIPENFRPNYHGVGTCSMMPKEMGGVVDNAARVYGVQGLRVIDGSIPPTQMSSHVMTVFYAMALKIADAILADY

SEQ ID NO: 2023 - protein, 576 aa, Aspergillus niger
IEASLLKDPKEVAGRTYDYIIAGGGLTGLTVAAKLTENPNITVLVIESGSYESDRGPIIEDLNAYGDIFGSSVDHAYETVELATNNQTALIRSGNGLGGSTLINGGTWTRPHKAQVDSWETVFGNEGWNWDSVAAYSLQAERARAPNAKQIAAGHYFNASCHGLNGTVHAGPRDTGDDYSPIVKALMSAVEDRGVPTKKDLGCGDPHGVSMFPNTLHEDQVRSDAAREWLLPNYQRPNLQVLTGRYVGKVLLSQNATTPRAVGVEFGTHKGNTHNVYAKHEVLLAAGSAVSPTILEYSGIGMKSILEPLGIDTVVDLPVGLNLQDQTTSTVRSRITPAGAGQGQAAWFATFNETFGDYAEKAHELLNTKLEQWAEEAVARGGFHNTTALLIQYENYRDWIVKDNVAYSELFLDTAGVASFDVWDLLPFTRGYVHILDKDPYLRHFAYDPQYFLNELDLLGQAAATQLARNISNSGAMQTYFAGETIPGDNLAYDADLRAWVEYIPENFRPNYHGVGTCSMMPKEMGGVVDNAARVYGVQGLRVIDGSIPPTQMSSHVMTVFYAMALKIADAVLADY

SEQ ID NO: 2024 - protein, 576 aa, Aspergillus niger
IEASLLKDPKEVAGRTYDYIIAGGGLTGLTVAARLTENPNITVLVIESGSYESDRGPIIEDLNAYGDIFGSSVDHAYETVELATNNRTALIRSGNGLGGSTLINGGTWTRPHKAQVDSWETVFGNEGWNWDSVAAYSLQAERARAPNAKQIAAGHYFNASCHGINGTVHAGPRDTGDDYSPIVKALMSAVEDRGVPTKKDLGCGDPHGVSMFPNTLHEDQVRSDAAREWLLPNYQRPNLQVLTGQYVGKVLLSQNATTPRAVGVEFGTHKGNTHNVYAKHEVLLAAGSAVSPTILEYSGIGMKSILEPLGIDTVVDLPVGLNLQDQTTSTVRSRITSAGAGQGQAAWFATFNETFGDYTEKAHELLNTKLEQWAEEAVARGGFHNTTALLIQYENYRDWIVKDNVAYSELFLDTAGVASFDVWDLLPFTRGYVHILDKDPYLRHFAYDPQYFLNELDLLGQAAATQLARNISNSGAMQTYFAGETIPGDNLAYDADLRAWVEYIPENFRPNYHGVGTCSMMPKEMGGVVDNAARVYGVQGLRVIDGSIPPTQMSSHVMTVFYAMALKIADAILADY

SEQ ID NO: 2025 - protein, 576 aa, Aspergillus niger
IEASLLKDPKEVAGRTYDYIIAGGGLTGLTVAARLTENPNITVLVIESGSYESDRGPIIEDLNAYGDIFGSSVDHAYETVELATNNQTALIRSGNGLGGSTLINGGTWTRPHKAQVDSWETVFGNEGWNWDSVAAYSLQAERARAPNAKQIAAGHYFNASCHGINGTVHAGPRDTGDDYSPIVKALMSAVEDRGVPTKKDLGCGDPHGVSMFPNTLHEDQVRSDAAREWLLPNYQRPNLQVLTGQYVGKVLLSQNATTPRAVGVEFGTHKGNTHNVYAKHEVLLAAGSAVSPTILEYSGIGMKSILEPLGIDTVVDLPVGLNLQDQTTSTVRSRITSAGAGQGQAAWFATFNETFGDYAEKAHELLNTKLEQWAEEAVARGGFHNTTALLIQYENYRDWIVKDNVAYSELFLDTAGVASFDVWDLLPFTRGYVHILDKDPYLRHFAYDPQYFLNELDLLGQAAATQLARNISNSGAMQTYFAGETIPGDNLAYDADLRAWVEYIPENFRPNYHGVGTCSMMPKEMGGVVDNAARVYGVQGLRVIDGSIPPTQLSSHVMTVFYAMALKIADAILADY

SEQ ID NO: 2026 - protein, 576 aa, Aspergillus niger
IEASLLKDPKEVAGRTYDYIIAGGGLTGLTVAARLTENPNITVLVIESGSYESDRGPIIEDLNAYGDIFGSSVDHAYETVELPTNNRTALIRSGNGLGGSTLINGGTWTRPHKAQVDSWETVFGNEGWNWDSVAAYSLQAERARAPNAKQIAAGHYFNPSCHGLNGTVHAGPRDTGDDYSPIVKALMSAVEDRGVPTKKDLGCGDPHGVSMFPNTLHPDQVRSDAAREWLLPNYQRPNLQVLTGRYVGKVLLSQNATTPRAVGVEFGTHKGNTHNVYAKHEVLLAAGSAVSPTILEYSGIGMKSILEPLGIDTVVDLPVGLNLQDQTTSTVRSRITPAGAGQGQAAWFATFNETFGDYAEKAHELLNTKLEQWAEEAVARGGFHNTTALLIQYENYRDWIVKDNVAYSELFLDTAGVASFDVWDLLPFTRGYVHILDKDPYLRHFAYDPQYFLNELDLLGQAAATQLARNISNSGAMQTYFAGETIPGDNLAYDADLRAWVEYIPENFRPNYHGVGTCSMMPKEMGGVVDNAARVYGVQGLRVIDGSIPPTQLSSHVMTVFYAMALKIADAILADY

SEQ ID NO: 2027 - protein, 576 aa, Aspergillus niger
IEASLLTDPKDVSGRTVDYIIAGGGLVGLTTAARLTENPNISVLVIESGSYESDRGPIIEDLNAYGDIFGSSVDHAYETVELATNNQTALVRSGNGLGGSTLVNGGTWTRPHKAQVDSWETVFGNEGWNWDNVAAYSLQAERARAPNAKQIAAGHYFNASCHGVNGTVHVGPRDTGDDYSPIVKALMSAVEDRGVPTKKDFGCGDPHGVSMFPNTLHEDQVRSDAAREWLLPNYQRPNLQVLTGQYVGKVLLSQNGTTPRAVGVEFGTHKGNTHNVYAKHEVLLAAGSAVSPTILEYSGIGMKSILEPLGIDTVVDLPVGLNLQDQTTNTVRSRITSAGAGQGQAAWFATFNETFGDYSEKAHELLNTKLEQWAEEAVARGGFHNTTALLIQYENYRDWIVNHNVAYSELVLDTAGVASFDVWDLLPFTRGYVHILDKDPYLHHFAYDPQYFLNELDLLGQAAATQLARNISNSGAMQTYFAGETIPGDNLAYDADLSAWTEYIPYHFRPNYHGVGTCSMMPKEMGGVVDNAARVYGVQGLRVIDGSIPPTQMSSHLMTVFYAMALKISDAILEDY

SEQ ID NO: 2028 - protein, 576 aa, Aspergillus niger
IEASLLKDPKEVAGRTYDYIIAGGGLTGLTVAARLTENPNITVLVIESGSYESDRGPIIEDLNAYGDIFGSSVDHAYETVELATNNRTALIRSGNGLGGSTLINGGTWTRPHKAQVDSWETVFGNEGWNWDSVAAYSLQAERARAPNAKQIAAGHYFNPSCHGINGTVHAGPRDTGDDYSPIVKALMSAVEDRGVPTKKDLGCGDPHGVSMFPNTLHPDQVRSDAAREWLLPNYQRPNLQVLTGRYVGKVLLSQNATTPRAVGVEFGTHKGNTHNVYAKHEVLLAAGSAVSPTILEYSGIGMKSILEPLGIDTVVDLPVGLNLQDQTTSTVRSRITSAGAGQGQAAWFATFNETFGDYAEKAHELLNTKLEQWAEEAVARGGFHNTTALLIQYENYRDWIVKDNVAYSELFLDTAGVASFDVWDLLPFTRGYVHILDKDPYLRHFAYDPQYFLNELDLLGQAAATQLARNISNSGAMQTYFAGETIPGDNLAYDADLSAWVEYIPENFRPNYHGVGTCSMMPKEMGGVVDNAARVYGVQGLRVIDGSIPPTQMSSHVMTVFYAMALKIADAILADY

SEQ ID NO: 2029 - protein, 576 aa, Aspergillus niger
IEASLLTDPKDVSGRTVDYIIAGGGLVGLTTAARLTENPNISVLVIESGSYESDRGPIIEDLNAYGDIFGSSVDHAYETVELATNNQTALVRSGNGLGGSTLVNGGTWTRPHKAQVDSWETVFGNEGWNWDNVAAYSLQAERARAPNAKQIAAGHYFNASCHGVNGTVHTGPRDTGDDYSPIVKALMSAVEDRGVPTKKDFGCGDPHGVSMFPNTLHEDQVRSDAAREWLLPNYQRPNLQVLTGQYVGKVLLSQNGTTPRAVGVEFGTHKGNTHNVYAKHEVLLAAGSAVSPTILEYSGIGMKSILEPLGIDTVVDLPVGLNLQDQTTATVRSRITSAGAGQGQAAWFATFNETFGDYSEKAHELLNTKLEQWAEEAVARGGFHNTTALLIQYENYRDWIVNHNVAYSELLLDTAGVASFDVWDLLPFTRGYVHILDKDPYLHHFAYDPQYFLNELDLLGQAAATQLARNISNSGAMQTYFAGETIPGDNLAYDADLSAWTEYIPYHFRPNYHGVGTCSMMPKEMGGVVDNAARVYGVQGLRVIDGSIPPTQMSSHVMTVFYAMALKISDAILEDY

SEQ ID NO: 2030 - protein, 576 aa, Aspergillus niger
IEASLLKDPKEVAGRTYDYIIAGGGLTGLTVAAKLTENPNITVLVIESGSYESDRGPIIEDLNAYGDIFGSSVDHAYETVELATNNRTALIRSGNGLGGSTLINGGTWTRPHKAQVDSWETVFGNEGWNWDSVAAYSLQAERARAPNAKQIAAGHYFNASCHGLNGTVHAGPRDTGDDYSPIVKALMSAVEDRGVPTKKDLGCGDPHGVSMFPNTLHEDQVRSDAAREWLLPNYQRPNLQVLTGRYVGKVLLSQNATTPRAVGVEFGTHKGNTHNVYAKHEVLLAAGSAVSPTILEYSGIGMKSILEPLGIDTVVDLPVGLNLQDQTTSTVRSRITPAGAGQGQAAWFATFNETFGDYAEKAHELLNTKLEQWAEEAVARGGFHNTTALLIQYENYRDWIVKDNVAYSELFLDTAGVASFDVWDLLPFTRGYVHILDKDPYLRHFAYDPQYFLNELDLLGQAAATQLARNISNSGAMQTYFAGETIPGDNLAYDADLSAWVEYIPENFRPNYHGVGTCSMMPKEMGGVVDNAARVYGVQGLRVIDGSIPPTQMSSHVMTVFYAMALKIADAILADY

SEQ ID NO: 2031 - protein, 576 aa, Aspergillus niger
IEASLLTDPKDVSGRTVDYIIAGGGLVGLTTAARLTENPNISVLVIESGSYESDRGPIIEDLNAYGKIFGSSVDHAYETVELATNNQTALIRSGNGLGGSTLVNGGTWTRPHKAQVDSWETVFGNEGWNWDNVAAYSLQAERARAPNAKQIAAGHYFNTSCHGVNGTVHAGPRDTGDDYSPIVKALMSAVEDRGVPTKKDFGCGDPHGVSMFPNTLHEDQVRSDAAREWLLPNYQRPNLQVLTGQYVGKVLLSQNGTTPRAVGVEFGTHKGNTHNVYAKHEVLLAAGSAVSPTILEYSGIGMKSILEPLGIKTVVDLPVGLNLQDQTTATVRSRITSAGAGQGQAAWFATFNETFGDYSEKAHELLNTKLEQWAEEAVARGGFHNTTALLIQYENYRDWIVNHNVAYSELFLDTAGVASFDVWDLLPFTRGYVHILDKDPYLHHFAYDPQYFLNELDLLGQAAATQLARNISNSGAMQTYFAGETIPGDNLAYDADLSAWTEYIPYHFRPNYHGVGTCSMMPKEMGGVVDNAARVYGVQGLRVIDGSIPPTQMSSHVMTVFYAMALKISDAILEDY

SEQ ID NO: 2032 - protein, 576 aa, Aspergillus niger
IEASLLKDPKEVAGRTYDYIIAGGGLTGLTVAARLTENPNITVLVIESGSYESDRGPIIEDLNAYGDIFGSSVDHAYETVELATNNRTALIRSGNGLGGSTLINGGTWTRPHKAQVDSWETVFGNEGWNWDSVAAYSLQAERARAPNAKQIAAGHYFNASCHGINGTVHAGPRDTGDDYSPIVKALMSAVEDRGVPTKKDLGCGDPHGVSMFPNTLHPDQVRSDAAREWLLPNYQRPNLQVLTGRYVGKVLLSQNATTPRAVGVEFGTHKGNTHNVYAKHEVLLAAGSAVSPTILEYSGIGMKSILEPLGIDTVVDLPVGLNLQDQTTSTVRSRITPAGAGQGQAAWFATFNETFGDYTEKAHELLNTKLEQWAEEAVARGGFHNTTALLIQYENYRDWIVKDNVAYSELFLDTAGVASFDVWDLLPFTRGYVHILDKDPYLRHFAYDPQYFLNELDLLGQAAATQLARNISNSGAMQTYFAGETIPGDNLAYDADLRAWVEYIPENFRPNYHGVGTCSMMPKEMGGVVDNAARVYGVQGLRVIDGSIPPTQMSSHVMTVFYAMALKIADAVLADY

SEQ ID NO: 2033 - protein, 576 aa, Aspergillus niger
IEASLLKDPKEVAGRTYDYIIAGGGLTGLTVAARLTENPNITVLVIESGSYESDRGPIIEDLNAYGDIFGSSVDHAYETVELPTNNQTALIRSGNGLGGSTLINGGTWTRPHKAQVDSWETVFGNEGWNWDSVAAYSLQAERARAPNAKQIAAGHYFNASCHGINGTVHAGPRDTGDDYSPIVKALMSAVEDRGVPTKKDLGCGDPHGVSMFPNTLHEDQVRSDAAREWLLPNYQRPNLQVLTGRYVGKVLLSQNATTPRAVGVEFGTHKGNTHNVYAKHEVLLAAGSAVSPTILEYSGIGMKSILEPLGIDTVVDLPVGLNLQDQTTSTVRSRITPAGAGQGQAAWFATFNETFGDYAEKAHELLNTKLEQWAEEAVARGGFHNTTALLIQYENYRDWIVKDNVAYSELFLDTAGVASFDVWDLLPFTRGYVHILDKDPYLRHFAYDPQYFLNELDLLGQAAATQLARNISNSGAMQTYFAGETIPGDNLAYDADLRAWVEYIPENFRPNYHGVGTCSMMPKEMGGVVDNAARVYGVQGLRVIDGSIPPTQMSSHVMTVFYAMALKIADAVLADY

SEQ ID NO: 2034 - protein, 576 aa, Aspergillus niger
IEASLLTDPKDVSGRTVDYIIAGGGLTGLTTAARLTENPNISVLVIESGSYESDRGPIIEDLNAYGDIFGSSVDHAYETVELATNNQTALIRSGNGLGGSTLVNGGTWTRPHKAQVDSWETVFGNEGWNWDNVAAYSLQAERARAPNAKQIAAGHYFNASCHGVNGTVHAGPRDTGDDYSPIVKALMSAVEDRGVPTKKDFGCGDPHGVSMFPNTLHEDQVRSDAAREWLLPNYQRPNLQVLTGQYVGKVLLSQNGTTPRAVGVEFGTHKGNTHNVYAKHEVLLAAGSAVSPTILEYSGIGMKSILEPLGIDTVVDLPVGLNLQDQTTATVRSRITSAGAGQGQAAWFATFNETFGDYSEKAHELLNTKLEQWAEEAVARGGFHNTTALLIQYENYRDWIVNHNVAYSELFLDTAGVASFDVWDLLPFTRGYVHILDKDPYLHHFAYDPQYFLNELDLLGQAAATQLARNISNSGAMQTYFAGETIPGDNLAYDADLSAWTEYIPYHFRPNYHGVGTCSMMPKEMGGVVDNALRVYGVQGLRVIDGSIPPTQMSSHVMTVFYAMALKISDAILEDY

SEQ ID NO: 2035 - protein, 576 aa, Aspergillus niger
IEASLLTDPKDVSGRTWDYIIAGGGLVGLTTAARLTENPNISVLVIESGSYESDRGPIIEDLNAYGDIFGSSVDHAYETVELATNNQTALIRSGNGLGGSTLVNGGTWTRPHKAQVDSWETVFGNEGWNWDNVAAYSLQAERARAPNAKQIAAGHYFNASCHGVNGTVHAGPRDTGDDYSPIVKALMSAVEDRGVPTKKDFGCGDPHGVSMFPNTLHEDQVRSDAAREWLLPNYQRPNLQVLTGQYVGKVLLSQNGTTPRAVGVEFGTHKGNTHNVYAKHEVLLAAGSAVSPTILEYSGIGMKSILEPLGIDTVVDLPVGLNLQDQTTATVRSRITSAGAGQGQAAWFATFNETFGDYSEKAHELLNTKLEQWAEEAVARGGFHNTTALLIQYENYRDWIVNHNVAYSELFLDTAGVASFDVWDLLPFTRGYVHILDKDPYLHHFAYDPQYFLNELDLLGQAAATQLARNISNSGAMQTYFAGETIPGDNLAYDADLSAWTEYIPYHFRPNYHGVGTCSMMPKEMGGVVDNAARVYGVQGLRVIDGSIPPTQMSSHVMTVFYAMALKISDAILEDY

SEQ ID NO: 2036 - protein, 576 aa, Aspergillus niger
IEASLLTDPKDVSGRTWDYIIAGGGLWGLTTAARLTENPNISVLVIESGSYESDRGPIIEDLNAYGDIFGSSVDHAYETVELATNNQTALIRSGNGLGGSTLVNGGTWTRPHKAQVDSWETVFGNEGWNWDNVAAYSLQAERARAPNAKQIAAGHYFNASCHGVNGTVHAGPRDTGDDYSPIVKALMSAVEDRGVPTKKDFGCGDPHGVSMFPNTLHEDQVRSDAAREWLLPNYQRPNLQVLTGQYVGKVLLSQNGTTPRAVGVEFGTHKGNTHNVYAKHEVLLAAGSAVSPTILEYSGIGMKSILEPLGIDTVVDLPVGLNLQDQTTATVRSRITSAGAGQGQAAWFATFNETFGDYSEKAHELLNTKLEQWAEEAVARGGFHNTTALLIQYENYRDWIVNHNVAYSELFLDTAGVASFDVWDLLPFTRGYVHILDKDPYLHHFAYDPQYFLNELDLLGQAAATQLARNISNSGAMQTYFAGETIPGDNLAYDADLSAWTEYIPYHFRPNYHGVGTCSMMPKEMGGVVDNAARVYGVQGLRVIDGSIPPTQMSSHVMTVFYAMALKISDAILEDY

SEQ ID NO: 2037 - protein, 576 aa, Aspergillus niger
IEASLLTDPKEVAGRTVDYIIAGGGLTGLTVAARLTENPDITVLVIEGGSYESDRGAIIEDLNAYGDIFGSSVDHAYETVELATNNRTALIRSGNGLGGSTLFNGGTWTRPHKAQVDSWETVFGNEGWNWDSVAAYSLQAERARAPNAKQIAAGHYFNASCHGINGTVHAGPRDTGDDYSPIVKALMSAVEDRGVPTKKDLGCGDPHGVSMFPNTLHEDQVRSDAAREWLLPNYQRPNLHVLTGQYVGKVLLSQNATTPRAVGVEFGTHKGNTHNVYAKHEVLLAAGSAVSPTILEYSGIGMKSILEPLGIDTVVDLPVGLNLQDQTTSTVRSRITSAGAGQGQAAWFATFNETFGDYAEKAHELLNTKLEQWAEEAVARGGFHNTTALLIQYENYRDWIVKDNVAYSELFLDTAGVASFDVWDLLPFTRGYVHILDKDPYLRHFAYDPQYFLNELDLLGQAAATQLARNISNSGAMQTYFAGETIPGDNLAYDADLSAWVEYIPYNFRPNYHGVGTCSMMPKEMGGVVDNAARVYGVQGLRVIDGSIPPTQMSSHVSTVFYAMALKIADAILADY

SEQ ID NO: 2038 - protein, 576 aa, Aspergillus niger
IEASLLKDPKEVAGRTYDYIIAGGGLTGLTVAARLTENPNITVLVIESGSYESDRGPIIEDLNAYGDIFGSSVDHAYETVELATNNRTALIRSGNGLGGSTLINGGTWTRPHKAQVDSWETVFGNEGWNWDSVAAYSLQAERARAPNAKQIAAGHYFNASCHGINGTVHAGPRDTGDDYSPIVKALMSAVEDRGVPTKKDLGCGDPHGVSMFPNTLHEDQVRSDAAREWLLPNYQRPNLQVLTGRYVGKVLLSQNATTPRAVGVEFGTHKGNTHNVYAKHEVLLAAGSAVSPTILEYSGIGMKSILEPLGIDTVVDLPVGLNLQDQTTSTVRSRITSAGAGQGQAAWFATFNETFGDYAEKAHELLNTKLEQWAEEAVARGGFHNTTALLIQYENYRDWIVKDNVAYSELFLDTAGVASFDVWDLLPFTRGYVHILDKDPYLRHFAYDPQYFLNELDLLGQAAATQLARNISNSGAMQTYFAGETIPGDNLAYDADLSAWVEYIPENFRPNYHGVGTCSMMPKEMGGVVDNAARVYGVQGLRVIDGSIPPTQMSSHVMTVFYAMALKIADAILADY

SEQ ID NO: 2039 - protein, 576 aa, Aspergillus niger
IEASLLKDPKEVAGRTYDYIIAGGGLTGLTVAARLTENPNITVLVIESGSYESDRGPIIEDLNAYGDIFGSSVDHAYETVELATNNQTALIRSGNGLGGSTLINGGTWTRPHKAQVDSWETVFGNEGWNWDSVAAYSLQAERARAPNAKQIAAGHYFNASCHGINGTVHAGPRDTGDDYSPIVKALMSAVEDRGVPTKKDLGCGDPHGVSMFPNTLHEDQVRSDAAREWLLPNYQRPNLQVLTGQYVGKVLLSQNATTPRAVGVEFGTHKGNTHNVYAKHEVLLAAGSAVSPTILEYSGIGMKSILEPLGIDTVVDLPVGLNLQDQTTSTVRSRITPAGAGQGQAAWFATFNETFGDYTEKAHELLNTKLEQWAEEAVARGGFHNTTALLIQYENYRDWIVKDNVAYSELFLDTAGVASFDVWDLLPFTRGYVHILDKDPYLRHFAYDPQYFLNELDLLGQAAATQLARNISNSGAMQTYFAGETIPGDNLAYDADLRAWVEYIPENFRPNYHGVGTCSMMPKEMGGVVDNAARVYGVQGLRVIDGSIPPTQLSSHVMTVFYAMALKIADAILADY

SEQ ID NO: 2040 - protein, 576 aa, Aspergillus niger
IEASLLTDPKDVSGRTCDYIIAGGGLSGLTTAARLTENPNISVLVIESGSYESDRGPIIEDLNAYGDIFGSSVDHAYETVELATNNQTALIRSGNGLGGSTLVNGGTWTRPHKAQVDSWETVFGNEGWNWDNVAAYSLQAERARAPNAKQIAAGHYFNASCHGVNGTVHAGPRDTGDDYSPIVKALMSAVEDRGVPTKKDFGCGDPHGVSMFPNTLHEDQVRSDAAREWLLPNYQRPNLQVLTGQYVGKVLLSQNGTTPRAVGVEFGTHKGNTHNVYAKHEVLLAAGSAVSPTILEYSGIGMKSILEPLGIDTVVDLPVGLNLQDQTTATVRSRITSAGAGQGQAAWFATFNETFGDYSEKAHELLNTKLEQWAEEAVARGGFHNTTALLIQYENYRDWIVNHNVAYSELFLDTAGVASFDVWDLLPFTRGYVHILDKDPYLHHFAYDPQYFLNELDLLGQAAATQLARNISNSGAMQTYFAGETIPGDNLAYDADLSAWTEYIPYHFRPNYHGVGTCSMMPKEMGGVVDNAARVYGVQGLRVIDGSIPPTQMSSHVMTVFYAMALKISDAILEDY

SEQ ID NO: 2041 - protein, 576 aa, Aspergillus niger
IEASLLKDPKEVAGRTYDYIIAGGGLTGLTVAARLTENPNITVLVIESGSYESDRGPIIEDLNAYGDIFGSSVDHAYETVELPTNNQTALIRSGNGLGGSTLINGGTWTRPHKAQVDSWETVFGNEGWNWDSVAAYSLQAERARAPNAKQIAAGHYFNASCHGINGTVHAGPRDTGDDYSPIVKALMSAVEDRGVPTKKDLGCGDPHGVSMFPNTLHEDQVRSDAAREWLLPNYQRPNLQVLTGQYVGKVLLSQNATTPRAVGVEFGTHKGNTHNVYAKHEVLLAAGSAVSPTILEYSGIGMKSILEPLGIDTVVDLPVGLNLQDQTTSTVRSRITSAGAGQGQAAWFATFNETFGDYAEKAHELLNTKLEQWAEEAVARGGFHNTTALLIQYENYRDWIVKDNVAYSELFLDTAGVASFDVWDLLPFTRGYVHILDKDPYLRHFAYDPQYFLNELDLLGQAAATQLARNISNSGAMQTYFAGETIPGDNLAYDADLSAWVEYIPENFRPNYHGVGTCSMMPKEMGGVVDNAARVYGVQGLRVIDGSIPPTQMSSHVMTVFYAMALKIADAVLADY

SEQ ID NO: 2042 - protein, 576 aa, Aspergillus niger
IEASLLKDPKEVAGRTYDYIIAGGGLTGLTVAAKLTENPNITVLVIESGSYESDRGPIIEDLNAYGDIFGSSVDHAYETVELATNNQTALIRSGNGLGGSTLINGGTWTRPHKAQVDSWETVFGNEGWNWDSVAAYSLQAERARAPNAKQIAAGHYFNASCHGINGTVHAGPRDTGDDYSPIVKALMSAVEDRGVPTKKDLGCGDPHGVSMFPNTLHEDQVRSDAAREWLLPNYQRPNLQVLTGQYVGKVLLSQNATTPRAVGVEFGTHKGNTHNVYAKHEVLLAAGSAVSPTILEYSGIGMKSILEPLGIDTVVDLPVGLNLQDQTTSTVRSRITSAGAGQGQAAWFATFNETFGDYAEKAHELLNTKLEQWAEEAVARGGFHNTTALLIQYENYRDWIVKDNVAYSELFLDTAGVASFDVWDLLPFTRGYVHILDKDPYLRHFAYDPQYFLNELDLLGQAAATQLARNISNSGAMQTYFAGETIPGDNLAYDADLSAWVEYIPENFRPNYHGVGTCSMMPKEMGGVVDNAARVYGVQGLRVIDGSIPPTQLSSHVMTVFYAMALKIADAVLADY

SEQ ID NO: 2043 - protein, 576 aa, Aspergillus niger
IEASLLTDPNDVSGRTVDYIIAGGGLTGLTTAARLTENPNISVLVIESGSYESDRGPIIEDLNAYGDIFGSSVDHAYETVELATNNQTALIRSGNGLGGSTLVNGGXWTRPHKAQVDSWETVFGNEGWNWDNVAAYSLQAERARAPNAKQIAAGHYFNASCHGTNGTVHAGPRDTGDDYSPIVKALMSAVEDRGVPTQKDFGCGDPHGVSMFPNTLHEDQVRSDAAREWLLPNYQRPNLQVLTGQYVGKVLLSQNGTTPRAVGVEFGTHKGNTHNVYAKHEVLLAAGSAVSPTILEYSGIGMKSILEPLGIDTVVDLPVGLNLQDQTTATVRSRITSAGAGQGQAAWXATFNETFGDYSEKAHELLNTKLEQWAEEAVARGGFHNTTALLIQYENYRDWIVNHNVAYSELFLDTAGVASFDVWDLLPFTRGYVHILDKDPYLHHFAYDPQYFLNELDLLGQAAATQLARNISNSGAMQTYFAGETIPGDNLAYDADLSAWTEYIPYHFRPNYHGVGTCSMMPKEMGGVVDNAARVYGVQGLRVIDGSIPPTQMSSHVMTVFYAMALKISDAILEDY

SEQ ID NO: 2044 - protein, 576 aa, Aspergillus niger
IEASLLKDPKEVAGRTYDYIIAGGGLTGLTVAARLTENPNITVLVIESGSYESDRGPIIEDLNAYGDIFGSSVDHAYETVELATNNQTALIRSGNGLGGSTLINGGTWTRPHKAQVDSWETVFGNEGWNWDSVAAYSLQAERARAPNAKQIAAGHYFNPSCHGINGTVHAGPRDTGDDYSPIVKALMSAVEDRGVPTKKDLGCGDPHGVSMFPNTLHPDQVRSDAAREWLLPNYQRPNLQVLTGQYVGKVLLSQNATTPRAVGVEFGTHKGNTHNVYAKHEVLLAAGSAVSPTILEYSGIGMKSILEPLGIDTVVDLPVGLNLQDQTTSTVRSRITSAGAGQGQAAWFATFNETFGDYAEKAHELLNTKLEQWAEEAVARGGFHNTTALLIQYENYRDWIVKDNVAYSELFLDTAGVASFDVWDLLPFTRGYVHILDKDPYLRHFAYDPQYFLNELDLLGQAAATQLARNISNSGAMQTYFAGETIPGDNLAYDADLRAWVEYIPENFRPNYHGVGTCSMMPKEMGGVVDNAARVYGVQGLRVIDGSIPPTQMSSHVMTVFYAMALKIADAILADY

SEQ ID NO: 2045 - protein, 576 aa, Aspergillus niger
IEASLLKDPKEVAGRTYDYIIAGGGLTGLTVAARLTENPNITVLVIESGSYESDRGPIIEDLNAYGDIFGSSVDHAYETVELATNNRTALIRSGNGLGGSTLINGGTWTRPHKAQVDSWETVFGNEGWNWDSVAAYSLQAERARAPNAKQIAAGHYFNASCHGLNGTVHAGPRDTGDDYSPIVKALMSAVEDRGVPTKKDLGCGDPHGVSMFPNTLHEDQVRSDAAREWLLPNYQRPNLQVLTGRYVGKVLLSQNATTPRAVGVEFGTHKGNTHNVYAKHEVLLAAGSAVSPTILEYSGIGMKSILEPLGIDTVVDLPVGLNLQDQTTSTVRSRITSAGAGQGQAAWFATFNETFGDYAEKAHELLNTKLEQWAEEAVARGGFHNTTALLIQYENYRDWIVKDNVAYSELFLDTAGVASFDVWDLLPFTRGYVHILDKDPYLRHFAYDPQYFLNELDLLGQAAATQLARNISNSGAMQTYFAGETIPGDNLAYDADLSAWVEYIPENFRPNYHGVGTCSMMPKEMGGVVDNAARVYGVQGLRVIDGSIPPTQMSSHVMTVFYAMALKIADAILADY

SEQ ID NO: 2046 - protein, 576 aa, Aspergillus niger
IEASLLKDPKEVAGRTYDYIIAGGGLTGLTVAARLTENPNITVLVIESGSYESDRGPIIEDLNAYGDIFGSSVDHAYETVELPTNNQTALIRSGNGLGGSTLINGGTWTRPHKAQVDSWETVFGNEGWNWDSVAAYSLQAERARAPNAKQIAAGHYFNPSCHGLNGTVHAGPRDTGDDYSPIVKALMSAVEDRGVPTKKDLGCGDPHGVSMFPNTLHEDQVRSDAAREWLLPNYQRPNLQVLTGQYVGKVLLSQNATTPRAVGVEFGTHKGNTHNVYAKHEVLLAAGSAVSPTILEYSGIGMKSILEPLGIDTVVDLPVGLNLQDQTTSTVRSRITSAGAGQGQAAWFATFNETFGDYAEKAHELLNTKLEQWAEEAVARGGFHNTTALLIQYENYRDWIVKDNVAYSELFLDTAGVASFDVWDLLPFTRGYVHILDKDPYLRHFAYDPQYFLNELDLLGQAAATQLARNISNSGAMQTYFAGETIPGDNLAYDADLSAWVEYIPENFRPNYHGVGTCSMMPKEMGGVVDNAARVYGVQGLRVIDGSIPPTQMSSHVMTVFYAMALKIADAILADY

SEQ ID NO: 2047 - protein, 576 aa, Aspergillus niger
IEASLLKDPKEVAGRTYDYIIAGGGLTGLTVAAKLTENPNITVLVIESGSYESDRGPIIEDLNAYGDIFGSSVDHAYETVELPTNNRTALIRSGNGLGGSTLINGGTWTRPHKAQVDSWETVFGNEGWNWDSVAAYSLQAERARAPNAKQIAAGHYFNASCHGLNGTVHAGPRDTGDDYSPIVKALMSAVEDRGVPTKKDLGCGDPHGVSMFPNTLHEDQVRSDAAREWLLPNYQRPNLQVLTGQYVGKVLLSQNATTPRAVGVEFGTHKGNTHNVYAKHEVLLAAGSAVSPTILEYSGIGMKSILEPLGIDTVVDLPVGLNLQDQTTSTVRSRITPAGAGQGQAAWFATFNETFGDYAEKAHELLNTKLEQWAEEAVARGGFHNTTALLIQYENYRDWIVKDNVAYSELFLDTAGVASFDVWDLLPFTRGYVHILDKDPYLRHFAYDPQYFLNELDLLGQAAATQLARNISNSGAMQTYFAGETIPGDNLAYDADLRAWVEYIPENFRPNYHGVGTCSMMPKEMGGVVDNAARVYGVQGLRVIDGSIPPTQLSSHVMTVFYAMALKIADAILADY

SEQ ID NO: 2048 - protein, 576 aa, Aspergillus niger
IEASLLTDPKDVSGRTVDYIIAGGGLTGLTTAARLTENPNISVLVIESGSYESDRGPIIEDLNAYGDIFGSSVDHAYETVEPATNNQTALIRSGNGLGGSTLVNGGTWTRPHKAQVDSWETVFGNEGWNWDNVAAYSLQAERARAPNAKQIAAGHYFNASCHGVNGTVHAGPRDTGDDYSPIVKALMSAVEDRGVPTKKDFGCGDPHGVSMFPNTLHEDQVRSDAAREWLLPNYQRPNLQVLTGQYVGKVLLSQNGTTPRAVGVEFGTHKGNTHNVYAKHEVLLAAGSAVSPTILEYSGIGMKSILEPLGIDTVVDLPVGLNLQDQTTATVRSRITSAGAGQGQAAWFATFNETFGDYSEKAHELLNTKLEQWAEEAVARGGFHNTTALLIQYENYRDWIVNHNVAYSELFLDTAGVASFDVWDLLPFTRGYVHILDKDPYLHHFAYDPQYFLNELDLLGQAAATQLARNISNSGAMQTYFAGETIPGDNLAYDADLSAWTEYIPYHFRPNYHGVGTCSMMPKEMGGVVDNAARVYGVQGLRVIDGSIPPTQMSSHVMTVFYAMALKISDAILEDY

SEQ ID NO: 2049 - protein, 576 aa, Aspergillus niger
IEASLLTDPKDVSGRTVDYIIAGGGLTGLTTAARLTENPNISVLVIESGSYESDRGPIIEDLNAYGDIFGSSVDHAYETVELAPNNQTALIRSGNGLGGSTLINGGTWTRPHKAQVDSWETVFGNEGWNWDNVAAYSLQAERARAPNAKQIAAGHYFNASCHGVNGTVHAGPRDTGDDYSPIVKALMSAVEDRGVPTKKDFGCGDPHGVSMFPNTLHEDQVRSDAAREWLLPNYQRPNLQVLTGQYVGKVLLSQNGTTPRAVGVEFGTHKGNTHNVYAKHEVLLAAGSAVSPTILEYSGIGMKSILEPLGIDTVVDLPVGLNLQDQTTATVRSRITSAGAGQGQAAWFATFNETFGDYSEKAHELLNTKLEQWAEEAVARGGFHNTTALLIQYENYRDWIVNHNVAYSELFLDTAGVASFDVWDLLPFTRGYVHILDKDPYLHHFAYDPQYFLNELDLLGQAAATQLARNISNSGAMQTYFAGETIPGDNLAYDADLSAWTEYIPYHFRPNYHGVGTCSMMPKEMGGVVDNAARVYGVQGLRVIDGSIPPTQMSSHVMTVFYAMALKISDAILEDY

SEQ ID NO: 2050 - protein, 576 aa, Aspergillus niger
IEASLLTDPKDVSGRTVDYIIAGGGLTGLTTAARLTENPNISVLVIESGSYESDRGPIIEDLNAYGDIFGSSVDHAYETVELATNNQTALIRSGNGLGGSTLVNGGTWTRPHKAQVDSWETVFGNEGWNWDNVAAYSLQAERARAPNAKQIAAGHYFNASCHGTNGTVHAGPRDTGDDYSPIVKALMSAVEDRGVPTKKDFGCGDPHGVSMFPNTLHEDQVRSDAAREWLLPNYQRPNLQVLTGQYVGKVLLSQNGTTPRAVGVEFGTHKGNTHNVYAKHEVLLAAGSAVSPTILEYSGIGMKSILEPLGIDTVVDLPVGLNLQDQTTATVRSRITSAGAGQGQAAWFATFNETFGDYSEKAHELLNTKLEQWAEEAVARGGFHNTTALLIQYENYRDWIVNHNVAYSELFLDTAGVASFDVWDLLPFTRGYVHILDKDPYLHHFAYDPQYFLNELDLLGQAAATQLARNISNSGAMQTYFAGETIPGDNLAYDADLSAWTEYIPYHFRPNYHGVGTCSMMPKEMGGVVDNAARVYGVQGLRVIDGSIPPTQMSSHVMTVFYAMALKISDAILEDY

SEQ ID NO: 2051 - protein, 576 aa, Aspergillus niger
IEASLLTDPKDVSGRTVDYIIAGGGLTGLTTAARLTENPNISVLVIESGSYESDRGPIIEDLNAYGDIFGSSVDHAYETVELATNNQTALIRSGNGLGGSTLINGGTWTRPHKAQVDSWETVFGNEGWNWDNVAAYSLQAERARAPNAKQIAAGHYFNASCHGVNGTVHAGPRDTGDDYSPIVKALMSAVEDRGVPTKKDFGCGDPHGVSMFPNTLHEDQVRSDAAREWLLPNYQRPNLQVLTGQYVGKVLLSQNGTTPRAVGVEFGTHNGNTHNVYAKHEVLLTAGSAVSPTILEYSGIGMKSILEPLGIDTVVDLPVGLNLQDQTTATVRSRITSAGAGQGQAAWFATFNETFGDYSEKAHELLNTKLEQWAEEAVARGGFHNTTALLIQYENYRDWIVNHNVAYSELFLDTAGVASFDVWDLLPFTRGYVHILDKDPYLHHFAYDPQYFLNELDLLGQAAATQLARNISNSGAMQTYFAGETIPGDNLAYDADLSAWTEYIPYHFRPNYHGVGTCSMMPKEMGGVVDNAARVYGVQGLRVIDGSIPPTQMSSHVMTVFYAMALKISDAILEDY

SEQ ID NO: 2052 - protein, 576 aa, Aspergillus niger
IEASLLTDPKDVSGRTVDYIIAGGGLTGLTTAARLTENPNISVLVIESGSYESDRGPIIEDLNAYGDIFGSSVDHAYETVELATNNQTALIRSGNGLGGSTLVNGGTWTRPHKAQVDSWETVFGNEGWNWDNVAAYSLQAERARAPNAKQIAAGHYFNASCHGVNGTVHAGPRDTGDDYSPIVKALMSAVEDRGVPTKKDFGCGDPHGVSMFPNTLHEDQVRSDAAREWLLPNYQRPNLQVLTGQYVGKVLLSQNGTTPRAVGVEFGTHKGNTHNVYAEHEVLLAAGSAVSPTILEYSGIGMKSILEPLGIDTVVDLPVGLNLQDQTTATVRSRITSAGAGQGQAAWFATFNETFGDYSEKAHELLNTKLEQWAEEAVARGGFHNTTALLIQYENYRDWIVNHNVAYSELFLDTAGVASFDVWDLLPFTRGYVHILDKDPYLHHFAYDPQYFLNELDLLGQAAATQLARNISNSGAMQTYFAGETIPGDNLAYDADLSAWTEYIPYHFRPNYHGVGTCSMMPKEMGGVVDNAARVYGVQGLRVIDGSIPPTQMSSHVMTVFYAMALKISDAILEDY

SEQ ID NO: 2053 - protein, 576 aa, Aspergillus niger
IEASLLKDPKEVAGRTYDYIIAGGGLTGLTVAAKLTENPNITVLVIESGSYESDRGPIIEDLNAYGDIFGSSVDHAYETVELATNNRTALIRSGNGLGGSTLINGGTWTRPHKAQVDSWETVFGNEGWNWDSVAAYSLQAERARAPNAKQIAAGHYFNASCHGLNGTVHAGPRDTGDDYSPIVKALMSAVEDRGVPTKKDLGCGDPHGVSMFPNTLHEDQVRSDAAREWLLPNYQRPNLQVLTGQYVGKVLLSQNATTPRAVGVEFGTHKGNTHNVYAKHEVLLAAGSAVSPTILEYSGIGMKSILEPLGIDTVVDLPVGLNLQDQTTSTVRSRITSAGAGQGQAAWFATFNETFGDYTEKAHELLNTKLEQWAEEAVARGGFHNTTALLIQYENYRDWIVKDNVAYSELFLDTAGVASFDVWDLLPFTRGYVHILDKDPYLRHFAYDPQYFLNELDLLGQAAATQLARNISNSGAMQTYFAGETIPGDNLAYDADLSAWVEYIPENFRPNYHGVGTCSMMPKEMGGVVDNAARVYGVQGLRVIDGSIPPTQLSSHVMTVFYAMALKIADAVLADY

SEQ ID NO: 2054 - protein, 575 aa, Synthetic construct
IEASLLTDPKDVSGRTVDYIIAGGGLTGLTTAARLTENPNISVLVIESGSYESDRGPIIEDLNAYGDIFGSSVDHAYETVELATNNQTALIRSGNGLGGSTLVNGGTWTRPHKAQVDSWETVFGNEGWNWDNVAYSLQAERARAPNAKQIAAGHYFNASCHGVNGTVHAGPRDTGDDYSPIVKALMSAVEDRGVPTKKDFGCGDPHGVSMFPNTLHEDQVRSDAAREWLLPNYQRPNLQVLTGQTVGKVLLSQNGTTPRAVGVEFGTHKGNTHNVYAKHEVLLAAGSAVSPTILEYSGIGMKSILEPLGIDTVVDLPVGLNLQDQTTATVRSRITSAGAGQGQAAWFATFNETFGDYSEKAHELLNTKLEQWAEEAVARGGFHNTTALLIQYENYRDWIVNHNVAYSELFLDTAGVASFDVWDLLPFTRGYVHILDKDPYLHHFAYDPQYFLNELDLLGQAAATQLARNISNSGAMQTTFAGETIPGDNLAYDADLSAWTEYIPYHFRPNTHGVGTCSMMPKEMGGVVDNAARVYGVQGLRVIDGSIPPTQMSSHVMTVFYAMALKISDAILEDY

SEQ ID NO: 2055 - protein, 575 aa, Aspergillus niger
EASLLTDPKEVAGRTVDYIIAGGGLTGLTTAARLTENPDITVLVIESGSYESDRGPIIEDLNAYGKIFGSSVDHAYETVELFTNNQTALIRAGNGLGGSTLVNGGTWTRPHKAQVDSWETVFGNEGWNWDSVAAYSLQAERARAPNAKQIAAGHYFNASCHGINGTVHAGPRDTGDDYSPIVKALMSAVEDRGVPTKKDLGCGDPHGVSMFPNTLHEDQVRSDAAREWLLPNYQRPNLQVLTGQYVGKVLLSQNATTPRAVGVEFGTHKSNTHNVYAKHEVLLAAGSAVSPTILEYSGIGMKSILEPLGIDTVVDLPVGLNLQDQTTSTVRSRITSAGAGQGQAAWFATFNETFGDYAEKAHELLNTKLEQWAEEAVARGGFHNTTALLIQYENYRDWIVKDNVAYSELFLDTAGVASFDVWDLLPFTRGYVHILDKDPYLRHFAYDPQYFLNELDLLGQAAATQLARNISNSGAMQTYFAGETIPGDNLAYDADLSAWVEYIAYNFRPNYHGVGTCSMMPKEMGGVVDNAARVYGVQGLRVIDGSIPPTQMSSHVMTVFYAMALKIADAILADY

SEQ ID NO: 2056 - protein, 575 aa, Aspergillus niger
EASLLTDPKEVAGRTVDYIIAGGGLTGLTTAARLTENPDITVLVIESGSYESDRGPIIEDLNAYGQIFGSSVDHAYETVELQTNNQTALIRAGNGLGGSTLVNGGTWTRPHKAQVDSWETVFGNEGWNWDSVAAYSLQAERARAPNAKQIAAGHYFNASCHGINGTVHAGPRDTGDDYSPIVKALMSAVEDRGVPTKKDLGCGDPHGVSMFPNTLHEDQVRSDAAREWLLPNYQRPNLQVLTGQYVGKVLLSQNATTPRAVGVEFGTHKHNTHNVYAKHEVLLAAGSAVSPTILEYSGIGMKSILEPLGIDTVVDLPVGLNLQDQTTSTVRSRITSAGAGQGQAAWFATFNETFGDYAEKAHELLNTKLEQWAEEAVARGGFHNTTALLIQYENYRDWIVKDNVAYSELFLDTAGVASFDVWDLLPFTRGYVHILDKDPYLRHFAYDPQYFLNELDLLGQAAATQLARNISNSGAMQTYFAGETIPGDNLAYDADLSAWVEYICYNFRPNYHGVGTCSMMPKEMGGVVDNAARVYGVQGLRVIDGSIPPTQMSSHVMTVFYAMALKIADAILADY

SEQ ID NO: 2057 - protein, 575 aa, Aspergillus niger
EASLLTDPKEVAGRTVDYIIAGGGLTGLTTAARLTENPDITVLVIESGSYESDRGPIIEDLNAYGQIFGSSVDHAYETVELQTNNQTALIRNGNGLGGSTLVNGGTWTRPHKAQVDSWETVFGNEGWNWDSVAAYSLQAERARAPNAKQIAAGHYFNASCHGINGTVHAGPRDTGDDYSPIVKALMSAVEDRGVPTKKDLGCGDPHGVSMFPNTLHEDQVRSDAAREWLLPNYQRPNLQVLTGQYVGKVLLSQNATTPRAVGVEFGTHKQNTHNVYAKHEVLLAAGSAVSPTILEYSGIGMKSILEPLGIDTVVDLPVGLNLQDQTTSTVRSRITSAGAGQGQAAWFATFNETFGDYAEKAHELLNTKLEQWAEEAVARGGFHNTTALLIQYENYRDWIVKDNVAYSELFLDTAGVASFDVWDLLPFTRGYVHILDKDPYLRHFAYDPQYFLNELDLLGQAAATQLARNISNSGAMQTYFAGETIPGDNLAYDADLSAWVEYIAYNFRPNYHGVGTCSMMPKEMGGVVDNAARVYGVQGLRVIDGSIPPTQMSSHVMTVFYAMALKIADAILADY

SEQ ID NO: 2058 - protein, 593 aa, Aspergillus niveoglaucus
VATALPKFPREHFDVQPQLLTDPTVLANTTVDYIIAGGGLTGLTIAARLTEDPKIKVLVIESGFFESNRGPIIEDLNSYGEIFGTEVDHAFETVSLAVNNRTENIRSGNGLGGSTLINGGTWTRPHKVQIDSWERVFGNEGWNWDDLLPYMLGIEKARHPNQRQIEAGHYFNPQCHGSNGTVHAGPRDTGESYSPIMKALMDTVSADGVPVRKDLGCGDPHGVSMFPNSLYESQIRADAAREWLVPNYYRPNLQVLTGQSVGKVLLDKTVPGAPKAIGVEFGTHRTRKYETFASREVLLAAGSTISPTILEYSGIGIKSVLDSVGIEQVVDLPVGLNLQDQTTVNLQSRITPDGAGQGQAAYFATFNETFGDFAPQAHELLNTKLDQWAEEVVARGGFHNATALRIQYENYRDWLVNDNVAYSELFLDTAGKISFDVWDLIPFTRGYVHIADKDPYLRRLSNDPQYFLNELDVLGQAAASKLARELSSRGAMAQYFASETVPGYDRLPADASLQDWAKYVKDRFRANYHAVSTCSMMPKEMGGVVDSTARVYGVERLRVVDGSIPPTQVSSHVMTVFYGMAVKIAEAILQDHH

SEQ ID NO: 2059 - protein, 588 aa, Penicillium viridicatum
VATALPLQELDLQSTLLTDPRKVAGETFDYVIAGGGLTGLTVAARLTENPDINVLVIESGFYESNIGPIIENLNHYGDIFTTSVDQAFETVPLAIHNRTEIVRSGKGLGGSTLVNGGSWTRPHKAQINSWEKVFGMEGWNWDNLLPYMNKVEASRPPNAAQIAAGHYFDPACHGVNGTVQVGPRDTGESYSPMIKSLMETAKKSGVPVQKDFSCGVPHGISMFPNDVHEDQTRSDAAREWLLPNYKRKNLKVLTGQMVGRVLFDTTTSTPKAVGVNFGTHNKVNFDVHAKHEVLLAAGSTVSPQILEHSGVGLKTVLDKVGIKQVVELPVGLNLQDQTTTTVRSAINPIGAGQGQAAYFATFNETFGDQAPRAHQLLNTKLEEWAKDAVSRGGFHNETALLIQYQNYRDWLVNSDVSYAEIFIDTAGKLSLDLWDLIPFTRGYVHILDSDPYLRRFAYDPQYFLNELDLLGQAAASKLAREISNKGEMTKYFNSETVPGNNLAYNATLDQWVDYVKQNFRPNYHGVGTCSMMSKELGGVVDAAARVYDVEGLRVIDGSIPPTQVSSHVMTVFYGMAEKISEAVLSDYH

SEQ ID NO: 2060 - protein, 577 aa, Aspergillus niger
GIEASLLTDPKDVSGRTVDYIIAGGGLVGLTTAARLTENPNISVLVIESGSYESDRGPIIEDLNAYGDIFGSSVDHAYETVELATNNQTALVRSGNGLGGSTLVNGGTWTRPHKAQVDSWETVFGNEGWNWDNVAAYSLQAERARAPNAKQIAAGHYFNASCHGVNGTVHVGPRDTGDDYSPIVKALMSAVEDRGVPTKKDFGCGDPHGVSMFPNTLHEDQVRSDAAREWLLPNYQRPNLQVLTGQYVGKVLLSQNGTTPRAVGVEFGTHKGNTHNVYAKHEVLLAAGSAVSPTILEYSGIGMKSILEPLGIDTVVDLPVGLNLQDQTTSTVRSRITSAGAGQGQAAWFATFNETFGDYSEKAHELLNTKLEQWAEEAVARGGFHNTTALLIQYENYRDWIVNHNVAYSELILDTAGVASFDVWDLLPFTRGYVHILDKDPYLHHFAYDPQYFLNELDLLGQAAATQLARNISNSGAMQTYFAGETIPGDNLAYDADLSAWTEYIPYHFRPNYHGVGTCSMMPKEMGGVVDNAARVYGVQGLRVIDGSIPPTQMSSHTMTVFYAMALKISDAILEDY

SEQ ID NO: 2061 - protein, 577 aa, Aspergillus niger
GIEASLLTDPKDVSGRTVDYIIAGGGLVGLTTAARLTENPNISVLVIESGSYESDRGPIIEDLNAYGDIFGSSVDHAYETVELATNNQTALVRSGNGLGGSTLVNGGTWTRPHKAQVDSWETVFGNEGWNWDNVAAYSLQAERARAPNAKQIAAGHYFNASCHGVNGTVHVGPRDTGDDYSPIVKALMSAVEDRGVPTKKDFGCGDPHGVSMFPNTLHEDQVRSDAAREWLLPNYQRPNLQVLTGQYVGKVLLSQNGTTPRAVGVEFGTHKGNTHNVYAKHEVLLAAGSAVSPTILEYSGIGMKSILEPLGIDTVVDLPVGLNLQDQTTNTVRSRITSAGAGQGQAAWFATFNETFGDYSEKAHELLNTKLEQWAEEAVARGGFHNTTALLIQYENYRDWIVNHNVAYSELVLDTAGVASFDVWDLLPFTRGYVHILDKDPYLHHFAYDPQYFLNELDLLGQAAATQLARNISNSGAMQTYFAGETIPGDNLAYDADLSAWTEYIPYHFRPNYHGVGTCSMMPKEMGGVVDNAARVYGVQGLRVIDGSIPPTQMSSHLMTVFYAMALKISDAILEDY

SEQ ID NO: 2062 - protein, 600 aa, Aspergillus chevalieri
LLWSLFLSVATALPKFPREHLGVEPQLLTDPTVLANTTVDYIIAGGGLTGLTIAARLTEDPNIKVLVIESGYFESNRGPIIEDLNRYGEIFGTEVDHAFETVQLAVNNRTEIIRSGNGLGGSTLINGGTWTRPHKVQVDSWETVFGNQGWNWDDLLPYMLKIEKARPPNQRQIEAGHYFNPQCHGFNGSVHAGPRDTGEPYSPIMRALMDTVSAEGVPVRKDLCCGDPHGVSMFLNTLYPSQIRADAAREYLVPNYYRPNFQVLTGQRVGKVLLDKTVPGSPKAIGVEFGTHRTRKYEAYARREVLLAAGSTISPTILEYSGIGMKSVLDSVGIEQVVELPVGVNLQDQTTVHVESRITPAGAGQGQAAYFATFNETFGDFAPQAHELLNTKLDQWAEEVVARGGFNNATALRIQYENYRNWLVNDNVAFSELFLDTAGKISFDVWDLIPFTRGYVHIADKDPYLRRLYNNPQYLLNELDVLGEAAASKLARELSSKGAMAQYYAGETVPGFDHLPADASLRDWAKYVKDRFRPNYHAVSTCAMMSKELGGVVDSAARVYDVERLRVVDGSIPPTQVSSHVMTVFYGMAEKIAEAILQDY

SEQ ID NO: 2063 - protein, 576 aa, Aspergillus niger
IEASLLTDPKDVSGRTVDYIIAGGGLTGLTTAARLTENPNISVLVIESGSYECDRGPIIEDLNAYGDIFGSSVDHAYETVELATNNQTALIRSGNGLGGSTLVNGGTWTRPHKAQVDSWETVFGNEGWNWDNVAAYSLQAERARAPNAKQIAAGHYFNASCHGVNGTVHAGPRDTGDDYSPIVKALMSAVEDRGVPTKKDFGCGDPHGVSMFPNTLHEDQVRSDAACEWLLPNYQRPNLQVLTGQYVGKVLLSQNGTTPRAVGVEFGTHKGNTHNVYAKHEVLLAAGSAVSPTILEYSGIGMKSILEPLGIDTVVDLPVGLNLQDQTTATVRSRITSAGAGQGQAAWFATFNETFGDYSEKAHELLNTKLEQWAEEAVARGGFHNTTALLIQYENYRDWIVNHNVAYSELFLDTAGVASFDVWDLLPFTRGYVHILDKDPYLHHFAYDPQYFLNELDLLGQAAATQLARNISNSGAMQTYFAGETIPGDNLAYDADLSAWTEYIPYHFRPNYHGVGTCSMMPKEMGGVVDNAARVYGVQGLRVIDGSIPPTQMSSHVMTVFYAMALKISDAILEDY

SEQ ID NO: 2064 - protein, 576 aa, Aspergillus niger
IEASLLKDPKEVAGRTYDYIIAGGGLTGLTVAARLTENPNITVLVIESGSYESDRGPIIEDLNAYGDIFGSSVDHAYETVELATNNQTALIRSGNGLGGSTLINGGTWTRPHKAQVDSWETVFGNEGWNWDSVAAYSLQAERARAPNAKQIAAGHYFNASCHGINGTVHAGPRDTGDDYSPIVKALMSAVEDRGVPTKKDLGCGDPHGVSMFPNTLHEDQVRSDAAREWLLPNYQRPNLQVLTGRYVGKVLLSQNATTPRAVGVEFGTHKGNTHNVYAKHEVLLAAGSAVSPTILEYSGIGMKSILEPLGIDTVVDLPVGLNLQDQTTSTVRSRITPAGAGQGQAAWFATFNETFGDYTEKAHELLNTKLEQWAEEAVARGGFHNTTALLIQYENYRDWIVKDNVAYSELFLDTAGVASFDVWDLLPFTRGYVHILDKDPYLRHFAYDPQYFLNELDLLGQAAATQLARNISNSGAMQTYFAGETIPGDNLAYDADLRAWVEYIPENFRPNYHGVGTCSMMPKEMGGVVDNAARVYGVQGLRVIDGSIPPTQLSSHVMTVFYAMALKIADAILADY

SEQ ID NO: 2065 - protein, 576 aa, Aspergillus niger
IEASLLKDPKEVAGRTYDYIIAGGGLTGLTVAARLTENPNITVLVIESGSYESDRGPIIEDLNAYGDIFGSSVDHAYETVELPTNNQTALIRSGNGLGGSTLINGGTWTRPHKAQVDSWETVFGNEGWNWDSVAAYSLQAERARAPNAKQIAAGHYFNASCHGLNGTVHAGPRDTGDDYSPIVKALMSAVEDRGVPTKKDLGCGDPHGVSMFPNTLHEDQVRSDAAREWLLPNYQRPNLQVLTGQYVGKVLLSQNATTPRAVGVEFGTHKGNTHNVYAKHEVLLAAGSAVSPTILEYSGIGMKSILEPLGIDTVVDLPVGLNLQDQTTSTVRSRITPAGAGQGQAAWFATFNETFGDYTEKAHELLNTKLEQWAEEAVARGGFHNTTALLIQYENYRDWIVKDNVAYSELFLDTAGVASFDVWDLLPFTRGYVHILDKDPYLRHFAYDPQYFLNELDLLGQAAATQLARNISNSGAMQTYFAGETIPGDNLAYDADLSAWVEYIPENFRPNYHGVGTCSMMPKEMGGVVDNAARVYGVQGLRVIDGSIPPTQMSSHVMTVFYAMALKIADAILADY

SEQ ID NO: 2066 - protein, 576 aa, Aspergillus niger
IEASLLTDPKDVSGRTVDYIIAGGGLTGLTTAARLTENPNISVLVIESGSYESDRGPIIEDLNAYGDIFGSSVDHAYETVELATNNQTALIRSGNGLGGSTLVNGGTWTRPHKAQVDSWETVFGNEGWNWDNVAAYSLQAERARAPNAKQIAAGHYFNASCHGVNGTVHAGPRDTGDDYSPIVKALMSAVEDRGVPTKKDFGCGDPHGVSMFPNTLHEDQVRSDAAREWLLPNYQRPNLQVLTGQYVCKVLLSQNGTTPRAVGVEFGTHKGNTHNVYAKHEVLLAAGSAVSPTILEYSGIGMKSILEPLGIDTVVDLPVGLNLQDQTTATVRSRITSAGAGQGQAAWFATFNETFGDYSEKAHELLNTKLEQWAEEAVARGGFHNTTALLIQYENYRDWIVNHNVAYSELFLDTAGVASFDVWDLLPFTRGYVHILDKDCYLHHFAYDPQYFLNELDLLGQAAATQLARNISNSGAMQTYFAGETIPGDNLAYDADLSAWTEYIPYHFRPNYHGVGTCSMMPKEMGGVVDNAARVYGVQGLRVIDGSIPPTQMSSHVMTVFYAMALKISDAILEDY

SEQ ID NO: 2067 - protein, 576 aa, Aspergillus niger
IEASLLKDPKEVAGRTYDYIIAGGGLTGLTVAAKLTENPNITVLVIESGSYESDRGPIIEDLNAYGDIFGSSVDHAYETVELATNNRTALIRSGNGLGGSTLINGGTWTRPHKAQVDSWETVFGNEGWNWDSVAAYSLQAERARAPNAKQIAAGHYFNASCHGLNGTVHAGPRDTGDDYSPIVKALMSAVEDRGVPTKKDLGCGDPHGVSMFPNTLHEDQVRSDAAREWLLPNYQRPNLQVLTGQYVGKVLLSQNATTPRAVGVEFGTHKGNTHNVYAKHEVLLAAGSAVSPTILEYSGIGMKSILEPLGIDTVVDLPVGLNLQDQTTSTVRSRITSAGAGQGQAAWFATFNETFGDYTEKAHELLNTKLEQWAEEAVARGGFHNTTALLIQYENYRDWIVKDNVAYSELFLDTAGVASFDVWDLLPFTRGYVHILDKDPYLRHFAYDPQYFLNELDLLGQAAATQLARNISNSGAMQTYFAGETIPGDNLAYDADLSAWVEYIPENFRPNYHGVGTCSMMPKEMGGVVDNAARVYGVQGLRVIDGSIPPTQMSSHVMTVFYAMALKIADAILADY

SEQ ID NO: 2068 - protein, 576 aa, Aspergillus niger
IEASLLKDPKEVAGRTYDYIIAGGGLTGLTVAAKLTENPNITVLVIESGSYESDRGPIIEDLNAYGDIFGSSVDHAYETVELATNNQTALIRSGNGLGGSTLINGGTWTRPHKAQVDSWETVFGNEGWNWDSVAAYSLQAERARAPNAKQIAAGHYFNASCHGINGTVHAGPRDTGDDYSPIVKALMSAVEDRGVPTKKDLGCGDPHGVSMFPNTLHEDQVRSDAAREWLLPNYQRPNLQVLTGQYVGKVLLSQNATTPRAVGVEFGTHKGNTHNVYAKHEVLLAAGSAVSPTILEYSGIGMKSILEPLGIDTVVDLPVGLNLQDQTTSTVRSRITSAGAGQGQAAWFATFNETFGDYAEKAHELLNTKLEQWAEEAVARGGFHNTTALLIQYENYRDWIVKDNVAYSELFLDTAGVASFDVWDLLPFTRGYVHILDKDPYLRHFAYDPQYFLNELDLLGQAAATQLARNISNSGAMQTYFAGETIPGDNLAYDADLSAWVEYIPENFRPNYHGVGTCSMMPKEMGGVVDNAARVYGVQGLRVIDGSIPPTQMSSHVMTVFYAMALKIADAILADY

SEQ ID NO: 2069 - protein, 576 aa, Aspergillus niger
IEASLLKDPKEVAGRTYDYIIAGGGLTGLTVAAKLTENPNITVLVIESGSYESDRGPIIEDLNAYGDIFGSSVDHAYETVELPTNNRTALIRSGNGLGGSTLINGGTWTRPHKAQVDSWETVFGNEGWNWDSVAAYSLQAERARAPNAKQIAAGHYFNPSCHGLNGTVHAGPRDTGDDYSPIVKALMSAVEDRGVPTKKDLGCGDPHGVSMFPNTLHPDQVRSDAAREWLLPNYQRPNLQVLTGRYVGKVLLSQNATTPRAVGVEFGTHKGNTHNVYAKHEVLLAAGSAVSPTILEYSGIGMKSILEPLGIDTVVDLPVGLNLQDQTTSTVRSRITPAGAGQGQAAWFATFNETFGDYTEKAHELLNTKLEQWAEEAVARGGFHNTTALLIQYENYRDWIVKDNVAYSELFLDTAGVASFDVWDLLPFTRGYVHILDKDPYLRHFAYDPQYFLNELDLLGQAAATQLARNISNSGAMQTYFAGETIPGDNLAYDADLRAWVEYIPENFRPNYHGVGTCSMMPKEMGGVVDNAARVYGVQGLRVIDGSIPPTQLSSHVMTVFYAMALKIADAVLADY

SEQ ID NO: 2070 - protein, 576 aa, Aspergillus niger
IEASLLKDPKEVAGRTYDYIIAGGGLTGLTVAAKLTENPNITVLVIESGSYESDRGPIIEDLNAYGDIFGSSVDHAYETVELPTNNRTALIRSGNGLGGSTLINGGTWTRPHKAQVDSWETVFGNEGWNWDSVAAYSLQAERARAPNAKQIAAGHYFNASCHGLNGTVHAGPRDTGDDYSPIVKALMSAVEDRGVPTKKDLGCGDPHGVSMFPNTLHEDQVRSDAAREWLLPNYQRPNLQVLTGQYVGKVLLSQNATTPRAVGVEFGTHKGNTHNVYAKHEVLLAAGSAVSPTILEYSGIGMKSILEPLGIDTVVDLPVGLNLQDQTTSTVRSRITSAGAGQGQAAWFATFNETFGDYAEKAHELLNTKLEQWAEEAVARGGFHNTTALLIQYENYRDWIVKDNVAYSELFLDTAGVASFDVWDLLPFTRGYVHILDKDPYLRHFAYDPQYFLNELDLLGQAAATQLARNISNSGAMQTYFAGETIPGDNLAYDADLRAWVEYIPENFRPNYHGVGTCSMMPKEMGGVVDNAARVYGVQGLRVIDGSIPPTQLSSHVMTVFYAMALKIADAILADY

SEQ ID NO: 2071 - protein, 576 aa, Aspergillus niger
IEASLLTDPKDVSGRTVDYIIAGGGLTGLTTAARLTENPNISVLVIESGSYESDRGPIIEDLNAYGDIFGSSVDHAYETVELATNNQTALIRSGNGLGGSTLVNGGTWTRPHKAQVDSWETVFGNEGWNWDNVAAYSLQAERARAPNAKQIAAGHYFNASCHGVNGTVHAGPRDTGDDCSPIVKALMSAVEDRGVPTKKDFGCGDPHGVSMFPNTLHEDQVRSDAAREWLLPNYQRPNLQVLTGQYVGKVLLSQNGTTPRAVGVEFGTHKGNTHNVYAKHEVLLAAGSAVSPTILEYSGIGMKSILEPLGIDTVVDLPVGLNLQDQTTATVRSRITSAGAGQCQAAWFATFNETFGDYSEKAHELLNTKLEQWAEEAVARGGFHNTTALLIQYENYRDWIVNHNVAYSELFLDTAGVASFDVWDLLPFTRGYVHILDKDPYLHHFAYDPQYFLNELDLLGQAAATQLARNISNSGAMQTYFAGETIPGDNLAYDADLSAWTEYIPYHFRPNYHGVGTCSMMPKEMGGVVDNAARVYGVQGLRVIDGSIPPTQMSSHVMTVFYAMALKISDAILEDY

SEQ ID NO: 2072 - protein, 576 aa, Aspergillus niger
IEASLLKDPKEVAGRTYDYIIAGGGLTGLTVAARLTENPNITVLVIESGSYESDRGPIIEDLNAYGDIFGSSVDHAYETVELPTNNQTALIRSGNGLGGSTLINGGTWTRPHKAQVDSWETVFGNEGWNWDSVAAYSLQAERARAPNAKQIAAGHYFNPSCHGINGTVHAGPRDTGDDYSPIVKALMSAVEDRGVPTKKDLGCGDPHGVSMFPNTLHPDQVRSDAAREWLLPNYQRPNLQVLTGQYVGKVLLSQNATTPRAVGVEFGTHKGNTHNVYAKHEVLLAAGSAVSPTILEYSGIGMKSILEPLGIDTVVDLPVGLNLQDQTTSTVRSRITSAGAGQGQAAWFATFNETFGDYAEKAHELLNTKLEQWAEEAVARGGFHNTTALLIQYENYRDWIVKDNVAYSELFLDTAGVASFDVWDLLPFTRGYVHILDKDPYLRHFAYDPQYFLNELDLLGQAAATQLARNISNSGAMQTYFAGETIPGDNLAYDADLSAWVEYIPENFRPNYHGVGTCSMMPKEMGGVVDNAARVYGVQGLRVIDGSIPPTQMSSHVMTVFYAMALKIADAILADY

SEQ ID NO: 2073 - protein, 576 aa, Aspergillus niger
IEASLLKDPKEVAGRTYDYIIAGGGLTGLTVAARLTENPNITVLVIESGSYESDRGPIIEDLNAYGDIFGSSVDHAYETVELATNNQTALIRSGNGLGGSTLINGGTWTRPHKAQVDSWETVFGNEGWNWDSVAAYSLQAERARAPNAKQIAAGHYFNASCHGINGTVHAGPRDTGDDYSPIVKALMSAVEDRGVPTKKDLGCGDPHGVSMFPNTLHPDQVRSDAAREWLLPNYQRPNLQVLTGQYVGKVLLSQNATTPRAVGVEFGTHKGNTHNVYAKHEVLLAAGSAVSPTILEYSGIGMKSILEPLGIDTVVDLPVGLNLQDQTTSTVRSRITSAGAGQGQAAWFATFNETFGDYAEKAHELLNTKLEQWAEEAVARGGFHNTTALLIQYENYRDWIVKDNVAYSELFLDTAGVASFDVWDLLPFTRGYVHILDKDPYLRHFAYDPQYFLNELDLLGQAAATQLARNISNSGAMQTYFAGETIPGDNLAYDADLSAWVEYIPENFRPNYHGVGTCSMMPKEMGGVVDNAARVYGVQGLRVIDGSIPPTQMSSHVMTVFYAMALKIADAILADY

SEQ ID NO: 2074 - protein, 576 aa, Aspergillus niger
IEASLLKDPKEVAGRTYDYIIAGGGLTGLTVAAKLTENPNITVLVIESGSYESDRGPIIEDLNAYGDIFGSSVDHAYETVELPTNNRTALIRSGNGLGGSTLINGGTWTRPHKAQVDSWETVFGNEGWNWDSVAAYSLQAERARAPNAKQIAAGHYFNASCHGINGTVHAGPRDTGDDYSPIVKALMSAVEDRGVPTKKDLGCGDPHGVSMFPNTLHEDQVRSDAAREWLLPNYQRPNLQVLTGQYVGKVLLSQNATTPRAVGVEFGTHKGNTHNVYAKHEVLLAAGSAVSPTILEYSGIGMKSILEPLGIDTVVDLPVGLNLQDQTTSTVRSRITSAGAGQGQAAWFATFNETFGDYAEKAHELLNTKLEQWAEEAVARGGFHNTTALLIQYENYRDWIVKDNVAYSELFLDTAGVASFDVWDLLPFTRGYVHILDKDPYLRHFAYDPQYFLNELDLLGQAAATQLARNISNSGAMQTYFAGETIPGDNLAYDADLSAWVEYIPENFRPNYHGVGTCSMMPKEMGGVVDNAARVYGVQGLRVIDGSIPPTQMSSHVMTVFYAMALKIADAILADY

SEQ ID NO: 2075 - protein, 576 aa, Aspergillus niger
IEASLLKDPKEVAGRTYDYIIAGGGLTGLTVAAKLTENPNITVLVIESGSYESDRGPIIEDLNAYGDIFGSSVDHAYETVELATNNQTALIRSGNGLGGSTLINGGTWTRPHKAQVDSWETVFGNEGWNWDSVAAYSLQAERARAPNAKQIAAGHYFNASCHGLNGTVHAGPRDTGDDYSPIVKALMSAVEDRGVPTKKDLGCGDPHGVSMFPNTLHEDQVRSDAAREWLLPNYQRPNLQVLTGQYVGKVLLSQNATTPRAVGVEFGTHKGNTHNVYAKHEVLLAAGSAVSPTILEYSGIGMKSILEPLGIDTVVDLPVGLNLQDQTTSTVRSRITSAGAGQGQAAWFATFNETFGDYAEKAHELLNTKLEQWAEEAVARGGFHNTTALLIQYENYRDWIVKDNVAYSELFLDTAGVASFDVWDLLPFTRGYVHILDKDPYLRHFAYDPQYFLNELDLLGQAAATQLARNISNSGAMQTYFAGETIPGDNLAYDADLSAWVEYIPENFRPNYHGVGTCSMMPKEMGGVVDNAARVYGVQGLRVIDGSIPPTQMSSHVMTVFYAMALKIADAILADY

SEQ ID NO: 2076 - protein, 576 aa, Aspergillus niger
IEASLLKDPKEVAGRTYDYIIAGGGLTGLTVAARLTENPNITVLVIESGSYESDRGPIIEDLNAYGDIFGSSVDHAYETVELATNNQTALIRSGNGLGGSTLINGGTWTRPHKAQVDSWETVFGNEGWNWDSVAAYSLQAERARAPNAKQIAAGHYFNASCHGINGTVHAGPRDTGDDYSPIVKALMSAVEDRGVPTKKDLGCGDPHGVSMFPNTLHPDQVRSDAAREWLLPNYQRPNLQVLTGQYVGKVLLSQNATTPRAVGVEFGTHKGNTHNVYAKHEVLLAAGSAVSPTILEYSGIGMKSILEPLGIDTVVDLPVGLNLQDQTTSTVRSRITSAGAGQGQAAWFATFNETFGDYAEKAHELLNTKLEQWAEEAVARGGFHNTTALLIQYENYRDWIVKDNVAYSELFLDTAGVASFDVWDLLPFTRGYVHILDKDPYLRHFAYDPQYFLNELDLLGQAAATQLARNISNSGAMQTYFAGETIPGDNLAYDADLSAWVEYIPENFRPNYHGVGTCSMMPKEMGGVVDNAARVYGVQGLRVIDGSIPPTQLSSHVMTVFYAMALKIADAILADY

SEQ ID NO: 2077 - protein, 576 aa, Aspergillus niger
IEASLLTDPKDVSGRTVDYIIAGGGLTGLTTAARLTENPNISVLVIYSGSYESDRGPIIEDLNAYGDIFGSSVDHAYETVELATNNQTALIRSGNGLGGSTLVNGGTWTRPHKAQVDSWETVFGNEGWNWDNVAAYSLQAERARAPNAKQIAAGHYFNASCHGVNGTVHAGPRDTGDDYSPIVKALMSAVEDRGVPTKKDFGCGDPHGVSMFPNTLHEDQVRSDAAREWLLPNYQRPNLQVLTGQYVGKVLLSQNGTTPRAVGVEFGTHKGNTHNVYAKHEVLLAAGSAVSPTILEYSGIGMKSILEPLGIDTVVDLPVGLNLQDQTTATVRSRITSAGAGQGQAAWFATFNETFGDYSEKAHELLNTKLEQWAEEAVARGGFHNTTALLIQYENYRDWIVNHNVAYSELFLDTAGVASFDVWDLLPFTRGYVHILDKDPYLHHFAYDPQYFLNELDLLGQAAATQLARNISNSGAMQTYFAGETIPGDNLAYDADLSAWTEYIPYHFRPNYHGVGTCSMMPKEMGGVVDNAARVYGVQGLRVIDGSIPPTQMSSTVMTVFYAMALKISDAILEDY

SEQ ID NO: 2078 - protein, 576 aa, Aspergillus niger
IEASLLKDPKEVAGRTYDYIIAGGGLTGLTVAARLTENPNITVLVIESGSYESDRGPIIEDLNAYGDIFGSSVDHAYETVELATNNQTALIRSGNGLGGSTLINGGTWTRPHKAQVDSWETVFGNEGWNWDSVAAYSLQAERARAPNAKQIAAGHYFNASCHGINGTVHAGPRDTGDDYSPIVKALMSAVEDRGVPTKKDLGCGDPHGVSMFPNTLHPDQVRSDAAREWLLPNYQRPNLQVLTGQYVGKVLLSQNATTPRAVGVEFGTHKGNTHNVYAKHEVLLAAGSAVSPTILEYSGIGMKSILEPLGIDTVVDLPVGLNLQDQTTSTVRSRITSAGAGQGQAAWFATFNETFGDYTEKAHELLNTKLEQWAEEAVARGGFHNTTALLIQYENYRDWIVKDNVAYSELFLDTAGVASFDVWDLLPFTRGYVHILDKDPYLRHFAYDPQYFLNELDLLGQAAATQLARNISNSGAMQTYFAGETIPGDNLAYDADLRAWVEYIPENFRPNYHGVGTCSMMPKEMGGVVDNAARVYGVQGLRVIDGSIPPTQMSSHVMTVFYAMALKIADAVLADY

SEQ ID NO: 2079 - protein, 576 aa, Aspergillus niger
IEASLLTDPKEVAGRTVDYIIAGGGLTGLTVAARLTENPDITVLVIEPGSYESDRGAIIEDLNAYGDIFGSSVDHAYETVELATNNRTALIRSGNGLGGSTYFNGGTWTRPHKAQVDSWETVFGNEGWNWDSVAAYSLQAERARAPNAKQIAAGHYFNASCHGINGTVHAGPRDTGDDYSPIVKALMSAVEDRGVPTKKDLGCGDPHGVSMFPNTLHEDQVRSDAAREWLLPNYQRPNLEVLTGQYVGKVLLSQNATTPRAVGVEFGTHKGNTHNVYAKHEVLLAAGSAVSPTILEYSGIGMKSILEPLGIDTVVDLPVGLNLQDQTTSTVRSRITSAGAGQGQAAWFATFNETFGDYAEKAHELLNTKLEQWAEEAVARGGFHNTTALLIQYENYRDWIVKDNVAYSELFLDTAGVASFDVWDLLPFTRGYVHILDKDPYLRHFAYDPQYFLNELDLLGQAAATQLARNISNSGAMQTYFAGETIPGDNLAYDADLSAWVEYIPYNFRPNYHGVGTCSMMPKEMGGVVDNAARVYGVQGLRVIDGSIPPTQMSSHVSTVFYAMALKIADAILADY

SEQ ID NO: 2080 - protein, 576 aa, Aspergillus niger
IEASLLKDPKEVAGRTYDYIIAGGGLTGLTVAARLTENPNITVLVIESGSYESDRGPIIEDLNAYGDIFGSSVDHAYETVELATNNRTALIRSGNGLGGSTLINGGTWTRPHKAQVDSWETVFGNEGWNWDSVAAYSLQAERARAPNAKQIAAGHYFNASCHGINGTVHAGPRDTGDDYSPIVKALMSAVEDRGVPTKKDLGCGDPHGVSMFPNTLHPDQVRSDAAREWLLPNYQRPNLQVLTGQYVGKVLLSQNATTPRAVGVEFGTHKGNTHNVYAKHEVLLAAGSAVSPTILEYSGIGMKSILEPLGIDTVVDLPVGLNLQDQTTSTVRSRITSAGAGQGQAAWFATFNETFGDYTEKAHELLNTKLEQWAEEAVARGGFHNTTALLIQYENYRDWIVKDNVAYSELFLDTAGVASFDVWDLLPFTRGYVHILDKDPYLRHFAYDPQYFLNELDLLGQAAATQLARNISNSGAMQTYFAGETIPGDNLAYDADLSAWVEYIPENFRPNYHGVGTCSMMPKEMGGVVDNAARVYGVQGLRVIDGSIPPTQMSSHVMTVFYAMALKIADAILADY

SEQ ID NO: 2081 - protein, 576 aa, Aspergillus niger
IEASLLKDPKEVAGRTYDYIIAGGGLTGLTVAAKLTENPNITVLVIESGSYESDRGPIIEDLNAYGDIFGSSVDHAYETVELATNNQTALIRSGNGLGGSTLINGGTWTRPHKAQVDSWETVFGNEGWNWDSVAAYSLQAERARAPNAKQIAAGHYFNASCHGLNGTVHAGPRDTGDDYSPIVKALMSAVEDRGVPTKKDLGCGDPHGVSMFPNTLHEDQVRSDAAREWLLPNYQRPNLQVLTGQYVGKVLLSQNATTPRAVGVEFGTHKGNTHNVYAKHEVLLAAGSAVSPTILEYSGIGMKSILEPLGIDTVVDLPVGLNLQDQTTSTVRSRITSAGAGQGQAAWFATFNETFGDYTEKAHELLNTKLEQWAEEAVARGGFHNTTALLIQYENYRDWIVKDNVAYSELFLDTAGVASFDVWDLLPFTRGYVHILDKDPYLRHFAYDPQYFLNELDLLGQAAATQLARNISNSGAMQTYFAGETIPGDNLAYDADLSAWVEYIPENFRPNYHGVGTCSMMPKEMGGVVDNAARVYGVQGLRVIDGSIPPTQLSSHVMTVFYAMALKIADAVLADY

SEQ ID NO: 2082 - protein, 576 aa, Aspergillus niger
IEASLLTDPKEVAGRTYDYIIAGGGLTGLTVAARLTENPDITVLVIESGSYESDRGPIIEDLNAYGQIFGSSVDHAYETVELATNNQTALIRSGNGLGGSTLINGGTWTRPHKAQVDSWETVFGNEGWNWDSVAAYSLQAERARAPNAKQIAAGHYFNASCHGLNGTVHAGPRDTGDDYSPIVKALMSAVEDRGVPTKKDLGCGDPHGVSMFPNTLHEDQVRSDAAREWLLPNYQRPNLQVLTGQYVGKVLLSKNATTPRAVGVEFGTHKGNTHNVYAKHEVLLAAGSAVSPTILEYSGIGMKSILEPLGIDTVVDLPVGLNLQDQTTSTVRSRITSAGAGQGQAAWFATFNETFGDYTEKAHELLNTKLEQWAEEAVARGGFHNTTALLIQYENYRDWIVKDNVAYSELFLDTAGVASFDVWDLLPFTRGYVHILDKDPYLRHFAYDPQYFLNELDLLGQAAATQLARNISNSGAMQTYFAGETIPGDNLAYDADLSAWVEYIPYNFRPNYHAVGTCSMMPKEMGGVVDNAARVYGVQGLRVIDGSIPPTQMSSHVMTVFYAMALKIADAILADY

SEQ ID NO: 2083 - protein, 576 aa, Aspergillus niger
IEASLLKDPKEVAGRTYDYIIAGGGLTGLTVAARLTENPNITVLVIESGSYESDRGPIIEDLNAYGDIFGSSVDHAYETVELPTNNQTALIRSGNGLGGSTLINGGTWTRPHKAQVDSWETVFGNEGWNWDSVAAYSLQAERARAPNAKQIAAGHYFNPSCHGLNGTVHAGPRDTGDDYSPIVKALMSAVEDRGVPTKKDLGCGDPHGVSMFPNTLHPDQVRSDAAREWLLPNYQRPNLQVLTGRYVGKVLLSQNATTPRAVGVEFGTHKGNTHNVYAKHEVLLAAGSAVSPTILEYSGIGMKSILEPLGIDTVVDLPVGLNLQDQTTSTVRSRITPAGAGQGQAAWFATFNETFGDYAEKAHELLNTKLEQWAEEAVARGGFHNTTALLIQYENYRDWIVKDNVAYSELFLDTAGVASFDVWDLLPFTRGYVHILDKDPYLRHFAYDPQYFLNELDLLGQAAATQLARNISNSGAMQTYFAGETIPGDNLAYDADLSAWVEYIPENFRPNYHGVGTCSMMPKEMGGVVDNAARVYGVQGLRVIDGSIPPTQMSSHVMTVFYAMALKIADAILADY

SEQ ID NO: 2084 - protein, 576 aa, Aspergillus niger
IEASLLKDPKEVAGRTYDYIIAGGGLTGLTVAARLTENPNITVLVIESGSYESDRGPIIEDLNAYGDIFGSSVDHAYETVELPTNNQTALIRSGNGLGGSTLINGGTWTRPHKAQVDSWETVFGNEGWNWDSVAAYSLQAERARAPNAKQIAAGHYFNASCHGINGTVHAGPRDTGDDYSPIVKALMSAVEDRGVPTKKDLGCGDPHGVSMFPNTLHEDQVRSDAAREWLLPNYQRPNLQVLTGQYVGKVLLSQNATTPRAVGVEFGTHKGNTHNVYAKHEVLLAAGSAVSPTILEYSGIGMKSILEPLGIDTVVDLPVGLNLQDQTTSTVRSRITSAGAGQGQAAWFATFNETFGDYAEKAHELLNTKLEQWAEEAVARGGFHNTTALLIQYENYRDWIVKDNVAYSELFLDTAGVASFDVWDLLPFTRGYVHILDKDPYLRHFAYDPQYFLNELDLLGQAAATQLARNISNSGAMQTYFAGETIPGDNLAYDADLRAWVEYIPENFRPNYHGVGTCSMMPKEMGGVVDNAARVYGVQGLRVIDGSIPPTQMSSHVMTVFYAMALKIADAILADY

SEQ ID NO: 2085 - protein, 576 aa, Aspergillus niger
IEASLLKDPKEVAGRTYDYIIAGGGLTGLTVAARLTENPNITVLVIESGSYESDRGPIIEDLNAYGDIFGSSVDHAYETVELPTNNRTALIRSGNGLGGSTLINGGTWTRPHKAQVDSWETVFGNEGWNWDSVAAYSLQAERARAPNAKQIAAGHYFNASCHGINGTVHAGPRDTGDDYSPIVKALMSAVEDRGVPTKKDLGCGDPHGVSMFPNTLHEDQVRSDAAREWLLPNYQRPNLQVLTGQYVGKVLLSQNATTPRAVGVEFGTHKGNTHNVYAKHEVLLAAGSAVSPTILEYSGIGMKSILEPLGIDTVVDLPVGLNLQDQTTSTVRSRITSAGAGQGQAAWFATFNETFGDYTEKAHELLNTKLEQWAEEAVARGGFHNTTALLIQYENYRDWIVKDNVAYSELFLDTAGVASFDVWDLLPFTRGYVHILDKDPYLRHFAYDPQYFLNELDLLGQAAATQLARNISNSGAMQTYFAGETIPGDNLAYDADLSAWVEYIPENFRPNYHGVGTCSMMPKEMGGVVDNAARVYGVQGLRVIDGSIPPTQMSSHVMTVFYAMALKIADAILADY

SEQ ID NO: 2086 - protein, 576 aa, Aspergillus niger
IEASLCTDPKDVSGRTVDYIIAGGGLTGLTTAARLTENPNISVLVIESGSYESDRGPIIEDLNAYGDIFGSSVDHAYETVELATNNQTALIRSGNGLGGSTLVNGGTWTRPHKAQVDSWETVFGNEGWNWDNVAAYSLQAERARAPNAKQIAAGHYFNASCHGVNGTVHAGPRDTGDDYSPIVKALMSAVEDRGVPTKKDFGCGDPHGVSMFPNTLHEDQVRSDAAREWLLPNYQRPNLQVCTGQYVGKVLLSQNGTTPRAVGVEFGTHKGNTHNVYAKHEVLLAAGSAVSPTILEYSGIGMKSILEPLGIDTVVDLPVGLNLQDQTTATVRSRITSAGAGQGQAAWFATFNETFGDYSEKAHELLNTKLEQWAEEAVARGGFHNTTALLIQYENYRDWIVNHNVAYSELFLDTAGVASFDVWDLLPFTRGYVHILDKDPYLHHFAYDPQYFLNELDLLGQAAATQLARNISNSGAMQTYFAGETIPGDNLAYDADLSAWTEYIPYHFRPNYHGVGTCSMMPKEMGGVVDNAARVYGVQGLRVIDGSIPPTQMSSHVMTVFYAMALKISDAILEDY

SEQ ID NO: 2087 - protein, 576 aa, Aspergillus niger
IEASLLKDPKEVAGRTYDYIIAGGGLTGLTVAARLTENPNITVLVIESGSYESDRGPIIEDLNAYGDIFGSSVDHAYETVELATNNRTALIRSGNGLGGSTLINGGTWTRPHKAQVDSWETVFGNEGWNWDSVAAYSLQAERARAPNAKQIAAGHYFNASCHGINGTVHAGPRDTGDDYSPIVKALMSAVEDRGVPTKKDLGCGDPHGVSMFPNTLHEDQVRSDAAREWLLPNYQRPNLQVLTGRYVGKVLLSQNATTPRAVGVEFGTHKGNTHNVYAKHEVLLAAGSAVSPTILEYSGIGMKSILEPLGIDTVVDLPVGLNLQDQTTSTVRSRITSAGAGQGQAAWFATFNETFGDYTEKAHELLNTKLEQWAEEAVARGGFHNTTALLIQYENYRDWIVKDNVAYSELFLDTAGVASFDVWDLLPFTRGYVHILDKDPYLRHFAYDPQYFLNELDLLGQAAATQLARNISNSGAMQTYFAGETIPGDNLAYDADLRAWVEYIPENFRPNYHGVGTCSMMPKEMGGVVDNAARVYGVQGLRVIDGSIPPTQMSSHVMTVFYAMALKIADAILADY

SEQ ID NO: 2088 - protein, 576 aa, Aspergillus niger
IEASLLKDPKEVAGRTYDYIIAGGGLTGLTVAARLTENPNITVLVIESGSYESDRGPIIEDLNAYGDIFGSSVDHAYETVELPTNNQTALIRSGNGLGGSTLINGGTWTRPHKAQVDSWETVFGNEGWNWDSVAAYSLQAERARAPNAKQIAAGHYFNASCHGLNGTVHAGPRDTGDDYSPIVKALMSAVEDRGVPTKKDLGCGDPHGVSMFPNTLHEDQVRSDAAREWLLPNYQRPNLQVLTGQYVGKVLLSQNATTPRAVGVEFGTHKGNTHNVYAKHEVLLAAGSAVSPTILEYSGIGMKSILEPLGIDTVVDLPVGLNLQDQTTSTVRSRITSAGAGQGQAAWFATFNETFGDYAEKAHELLNTKLEQWAEEAVARGGFHNTTALLIQYENYRDWIVKDNVAYSELFLDTAGVASFDVWDLLPFTRGYVHILDKDPYLRHFAYDPQYFLNELDLLGQAAATQLARNISNSGAMQTYFAGETIPGDNLAYDADLSAWVEYIPENFRPNYHGVGTCSMMPKEMGGVVDNAARVYGVQGLRVIDGSIPPTQMSSHVMTVFYAMALKIADAILADY

SEQ ID NO: 2089 - protein, 576 aa, Aspergillus niger
IEASLLKDPKEVAGRTYDYIIAGGGLTGLTVAARLTENPNITVLVIESGSYESDRGPIIEDLNAYGDIFGSSVDHAYETVELPTNNQTALIRSGNGLGGSTLINGGTWTRPHKAQVDSWETVFGNEGWNWDSVAAYSLQAERARAPNAKQIAAGHYFNASCHGINGTVHAGPRDTGDDYSPIVKALMSAVEDRGVPTKKDLGCGDPHGVSMFPNTLHPDQVRSDAAREWLLPNYQRPNLQVLTGQYVGKVLLSQNATTPRAVGVEFGTHKGNTHNVYAKHEVLLAAGSAVSPTILEYSGIGMKSILEPLGIDTVVDLPVGLNLQDQTTSTVRSRITPAGAGQGQAAWFATFNETFGDYAEKAHELLNTKLEQWAEEAVARGGFHNTTALLIQYENYRDWIVKDNVAYSELFLDTAGVASFDVWDLLPFTRGYVHILDKDPYLRHFAYDPQYFLNELDLLGQAAATQLARNISNSGAMQTYFAGETIPGDNLAYDADLSAWVEYIPENFRPNYHGVGTCSMMPKEMGGVVDNAARVYGVQGLRVIDGSIPPTQMSSHVMTVFYAMALKIADAILADY

SEQ ID NO: 2090 - protein, 576 aa, Aspergillus niger
IEASLLKDPKEVAGRTYDYIIAGGGLTGLTVAARLTENPNITVLVIESGSYESDRGPIIEDLNAYGDIFGSSVDHAYETVELATNNQTALIRSGNGLGGSTLINGGTWTRPHKAQVDSWETVFGNEGWNWDSVAAYSLQAERARAPNAKQIAAGHYFNASCHGINGTVHAGPRDTGDDYSPIVKALMSAVEDRGVPTKKDLGCGDPHGVSMFPNTLHEDQVRSDAAREWLLPNYQRPNLQVLTGQYVGKVLLSQNATTPRAVGVEFGTHKGNTHNVYAKHEVLLAAGSAVSPTILEYSGIGMKSILEPLGIDTVVDLPVGLNLQDQTTSTVRSRITSAGAGQGQAAWFATFNETFGDYTEKAHELLNTKLEQWAEEAVARGGFHNTTALLIQYENYRDWIVKDNVAYSELFLDTAGVASFDVWDLLPFTRGYVHILDKDPYLRHFAYDPQYFLNELDLLGQAAATQLARNISNSGAMQTYFAGETIPGDNLAYDADLSAWVEYIPENFRPNYHGVGTCSMMPKEMGGVVDNAARVYGVQGLRVIDGSIPPTQMSSHVMTVFYAMALKIADAILADY

SEQ ID NO: 2091 - protein, 576 aa, Aspergillus niger
IEASLLTDPKDVSGRTVDYIIAGGGLTGLTTAARLCENPNISVLVIESGSYESDRGPIIEDLNAYGDIFGSSVDHAYETVELATNNQTALIRSGNGLGGSTLVNGGTWTRPHKAQVDSWETVFGNEGWNWDNVAAYSLQAERARAPNAKQIAAGHYFNASCHGVNGTVHAGPRDTGDDYSPIVKALMSAVEDRGVPTKKDFGCGDPHGVSMFPNTLHEDQVRSDAAREWLLPNYQRPNCQVLTGQYVGKVLLSQNGTTPRAVGVEFGTHKGNTHNVYAKHEVLLAAGSAVSPTILEYSGIGMKSILEPLGIDTVVDLPVGLNLQDQTTATVRSRITSAGAGQGQAAWFATFNETFGDYSEKAHELLNTKLEQWAEEAVARGGFHNTTALLIQYENYRDWIVNHNVAYSELFLDTAGVASFDVWDLLPFTRGYVHILDKDPYLHHFAYDPQYFLNELDLLGQAAATQLARNISNSGAMQTYFAGETIPGDNLAYDADLSAWTEYIPYHFRPNYHGVGTCSMMPKEMGGVVDNAARVYGVQGLRVIDGSIPPTQMSSHVMTVFYAMALKISDAILEDY

SEQ ID NO: 2092 - protein, 576 aa, Aspergillus niger
IEASLLKDPKEVAGRTYDYIIAGGGLTGLTVAARLTENPNITVLVIESGSYESDRGPIIEDLNAYGDIFGSSVDHAYETVELATNNQTALIRSGNGLGGSTLINGGTWTRPHKAQVDSWETVFGNEGWNWDSVAAYSLQAERARAPNAKQIAAGHYFNPSCHGLNGTVHAGPRDTGDDYSPIVKALMSAVEDRGVPTKKDLGCGDPHGVSMFPNTLHPDQVRSDAAREWLLPNYQRPNLQVLTGQYVGKVLLSQNATTPRAVGVEFGTHKGNTHNVYAKHEVLLAAGSAVSPTILEYSGIGMKSILEPLGIDTVVDLPVGLNLQDQTTSTVRSRITSAGAGQGQAAWFATFNETFGDYTEKAHELLNTKLEQWAEEAVARGGFHNTTALLIQYENYRDWIVKDNVAYSELFLDTAGVASFDVWDLLPFTRGYVHILDKDPYLRHFAYDPQYFLNELDLLGQAAATQLARNISNSGAMQTYFAGETIPGDNLAYDADLRAWVEYIPENFRPNYHGVGTCSMMPKEMGGVVDNAARVYGVQGLRVIDGSIPPTQMSSHVMTVFYAMALKIADAILADY

SEQ ID NO: 2093 - protein, 576 aa, Aspergillus niger
IEASLLKDPKEVAGRTYDYIIAGGGLTGLTVAARLTENPNITVLVIESGSYESDRGPIIEDLNAYGDIFGSSVDHAYETVELPTNNQTALIRSGNGLGGSTLINGGTWTRPHKAQVDSWETVFGNEGWNWDSVAAYSLQAERARAPNAKQIAAGHYFNASCHGINGTVHAGPRDTGDDYSPIVKALMSAVEDRGVPTKKDLGCGDPHGVSMFPNTLHEDQVRSDAAREWLLPNYQRPNLQVLTGRYVGKVLLSQNATTPRAVGVEFGTHKGNTHNVYAKHEVLLAAGSAVSPTILEYSGIGMKSILEPLGIDTVVDLPVGLNLQDQTTSTVRSRITPAGAGQGQAAWFATFNETFGDYTEKAHELLNTKLEQWAEEAVARGGFHNTTALLIQYENYRDWIVKDNVAYSELFLDTAGVASFDVWDLLPFTRGYVHILDKDPYLRHFAYDPQYFLNELDLLGQAAATQLARNISNSGAMQTYFAGETIPGDNLAYDADLRAWVEYIPENFRPNYHGVGTCSMMPKEMGGVVDNAARVYGVQGLRVIDGSIPPTQLSSHVMTVFYAMALKIADAVLADY

SEQ ID NO: 2094 - protein, 576 aa, Aspergillus niger
IEASLLTDPKDVSGRTVDYIIAGGGLVGLTTAAKLTENPNISVLVIESGSYESDRGPIIEDLNAYGDIFGSSVDHAYETVELATNNQTALVRSGNGLGGSTLINGGTWTRPHKAQVDSWETVFGNEGWNWDNVAAYSLQAERARAPNAKQIAAGHYFNTSCHGVNGTVHAGPRDTGDDYSPIVKALMSAVEDRGVPTKKDFGCGDPHGVSMFPNTLHEDQVRSDAAREWLLPNYQRPNLQVLTGQYVGKVLLSQNGTTPRAVGVEFGTHKGNTHNVYAKHEVLLAAGSAVSPTILEYSGIGMKSILEPLGIDTVVDLPVGLNLQDQTTATVRSRITSAGAGQGQAAWFATFNETFGDYSEKAHELLNTKLEQWAEEAVARGGFHNTTALLIQYENYRDWIVNHNVAYSELFLDTAGVASFDVWDLLPFTRGYVHILDKDPYLHHFAYDPQYFLNELDLLGQAAATQLARNISNSGAMQTYFAGETIPGDNLAYDADLSAWTEYIPYHFRPNYHGVGTCSMMPKEMGGVVDNAARVYGVQGLRVIDGSIPPTQMSSHVMTVFYAMALKISDAILEDY

SEQ ID NO: 2095 - protein, 576 aa, Aspergillus niger
IEASLLKDPKEVAGRTYDYIIAGGGLTGLTVAAKLTENPNITVLVIESGSYESDRGPIIEDLNAYGDIFGSSVDHAYETVELATNNQTALIRSGNGLGGSTLINGGTWTRPHKAQVDSWETVFGNEGWNWDSVAAYSLQAERARAPNAKQIAAGHYFNASCHGINGTVHAGPRDTGDDYSPIVKALMSAVEDRGVPTKKDLGCGDPHGVSMFPNTLHEDQVRSDAAREWLLPNYQRPNLQVLTGRYVGKVLLSQNATTPRAVGVEFGTHKGNTHNVYAKHEVLLAAGSAVSPTILEYSGIGMKSILEPLGIDTVVDLPVGLNLQDQTTSTVRSRITPAGAGQGQAAWFATFNETFGDYAEKAHELLNTKLEQWAEEAVARGGFHNTTALLIQYENYRDWIVKDNVAYSELFLDTAGVASFDVWDLLPFTRGYVHILDKDPYLRHFAYDPQYFLNELDLLGQAAATQLARNISNSGAMQTYFAGETIPGDNLAYDADLSAWVEYIPENFRPNYHGVGTCSMMPKEMGGVVDNAARVYGVQGLRVIDGSIPPTQMSSHVMTVFYAMALKIADAILADY

SEQ ID NO: 2096 - protein, 576 aa, Aspergillus niger
IEASLLKDPKEVAGRTYDYIIAGGGLTGLTVAARLTENPNITVLVIESGSYESDRGPIIEDLNAYGDIFGSSVDHAYETVELPTNNQTALIRSGNGLGGSTLINGGTWTRPHKAQVDSWETVFGNEGWNWDSVAAYSLQAERARAPNAKQIAAGHYFNPSCHGLNGTVHAGPRDTGDDYSPIVKALMSAVEDRGVPTKKDLGCGDPHGVSMFPNTLHEDQVRSDAAREWLLPNYQRPNLQVLTGRYVGKVLLSQNATTPRAVGVEFGTHKGNTHNVYAKHEVLLAAGSAVSPTILEYSGIGMKSILEPLGIDTVVDLPVGLNLQDQTTSTVRSRITSAGAGQGQAAWFATFNETFGDYAEKAHELLNTKLEQWAEEAVARGGFHNTTALLIQYENYRDWIVKDNVAYSELFLDTAGVASFDVWDLLPFTRGYVHILDKDPYLRHFAYDPQYFLNELDLLGQAAATQLARNISNSGAMQTYFAGETIPGDNLAYDADLSAWVEYIPENFRPNYHGVGTCSMMPKEMGGVVDNAARVYGVQGLRVIDGSIPPTQMSSHVMTVFYAMALKIADAILADY

SEQ ID NO: 2097 - protein, 576 aa, Aspergillus niger
IEASLLKDPKEVAGRTYDYIIAGGGLTGLTVAAKLTENPNITVLVIESGSYESDRGPIIEDLNAYGDIFGSSVDHAYETVELATNNRTALIRSGNGLGGSTLINGGTWTRPHKAQVDSWETVFGNEGWNWDSVAAYSLQAERARAPNAKQIAAGHYFNASCHGINGTVHAGPRDTGDDYSPIVKALMSAVEDRGVPTKKDLGCGDPHGVSMFPNTLHEDQVRSDAAREWLLPNYQRPNLQVLTGQYVGKVLLSQNATTPRAVGVEFGTHKGNTHNVYAKHEVLLAAGSAVSPTILEYSGIGMKSILEPLGIDTVVDLPVGLNLQDQTTSTVRSRITSAGAGQGQAAWFATFNETFGDYTEKAHELLNTKLEQWAEEAVARGGFHNTTALLIQYENYRDWIVKDNVAYSELFLDTAGVASFDVWDLLPFTRGYVHILDKDPYLRHFAYDPQYFLNELDLLGQAAATQLARNISNSGAMQTYFAGETIPGDNLAYDADLSAWVEYIPENFRPNYHGVGTCSMMPKEMGGVVDNAARVYGVQGLRVIDGSIPPTQMSSHVMTVFYAMALKIADAILADY

SEQ ID NO: 2098 - protein, 576 aa, Aspergillus niger
IEASLLKDPKEVAGRTYDYIIAGGGLTGLTVAARLTENPNITVLVIESGSYESDRGPIIEDLNAYGDIFGSSVDHAYETVELATNNQTALIRSGNGLGGSTLINGGTWTRPHKAQVDSWETVFGNEGWNWDSVAAYSLQAERARAPNAKQIAAGHYFNPSCHGINGTVHAGPRDTGDDYSPIVKALMSAVEDRGVPTKKDLGCGDPHGVSMFPNTLHPDQVRSDAAREWLLPNYQRPNLQVLTGQYVGKVLLSQNATTPRAVGVEFGTHKGNTHNVYAKHEVLLAAGSAVSPTILEYSGIGMKSILEPLGIDTVVDLPVGLNLQDQTTSTVRSRITSAGAGQGQAAWFATFNETFGDYTEKAHELLNTKLEQWAEEAVARGGFHNTTALLIQYENYRDWIVKDNVAYSELFLDTAGVASFDVWDLLPFTRGYVHILDKDPYLRHFAYDPQYFLNELDLLGQAAATQLARNISNSGAMQTYFAGETIPGDNLAYDADLSAWVEYIPENFRPNYHGVGTCSMMPKEMGGVVDNAARVYGVQGLRVIDGSIPPTQMSSHVMTVFYAMALKIADAILADY

SEQ ID NO: 2099 - protein, 576 aa, Aspergillus niger
IEASLLKDPKEVAGRTYDYIIAGGGLTGLTVAARLTENPNITVLVIESGSYESDRGPIIEDLNAYGDIFGSSVDHAYETVELATNNQTALIRSGNGLGGSTLINGGTWTRPHKAQVDSWETVFGNEGWNWDSVAAYSLQAERARAPNAKQIAAGHYFNASCHGLNGTVHAGPRDTGDDYSPIVKALMSAVEDRGVPTKKDLGCGDPHGVSMFPNTLHPDQVRSDAAREWLLPNYQRPNLQVLTGRYVGKVLLSQNATTPRAVGVEFGTHKGNTHNVYAKHEVLLAAGSAVSPTILEYSGIGMKSILEPLGIDTVVDLPVGLNLQDQTTSTVRSRITPAGAGQGQAAWFATFNETFGDYAEKAHELLNTKLEQWAEEAVARGGFHNTTALLIQYENYRDWIVKDNVAYSELFLDTAGVASFDVWDLLPFTRGYVHILDKDPYLRHFAYDPQYFLNELDLLGQAAATQLARNISNSGAMQTYFAGETIPGDNLAYDADLSAWVEYIPENFRPNYHGVGTCSMMPKEMGGVVDNAARVYGVQGLRVIDGSIPPTQMSSHVMTVFYAMALKIADAILADY

SEQ ID NO: 2100 - protein, 576 aa, Aspergillus niger
IEASLLKDPKEVAGRTYDYIIAGGGLTGLTVAAKLTENPNITVLVIESGSYESDRGPIIEDLNAYGDIFGSSVDHAYETVELATNNQTALIRSGNGLGGSTLINGGTWTRPHKAQVDSWETVFGNEGWNWDSVAAYSLQAERARAPNAKQIAAGHYFNASCHGINGTVHAGPRDTGDDYSPIVKALMSAVEDRGVPTKKDLGCGDPHGVSMFPNTLHEDQVRSDAAREWLLPNYQRPNLQVLTGQYVGKVLLSQNATTPRAVGVEFGTHKGNTHNVYAKHEVLLAAGSAVSPTILEYSGIGMKSILEPLGIDTVVDLPVGLNLQDQTTSTVRSRITSAGAGQGQAAWFATFNETFGDYAEKAHELLNTKLEQWAEEAVARGGFHNTTALLIQYENYRDWIVKDNVAYSELFLDTAGVASFDVWDLLPFTRGYVHILDKDPYLRHFAYDPQYFLNELDLLGQAAATQLARNISNSGAMQTYFAGETIPGDNLAYDADLRAWVEYIPENFRPNYHGVGTCSMMPKEMGGVVDNAARVYGVQGLRVIDGSIPPTQMSSHVMTVFYAMALKIADAILADY

SEQ ID NO: 2101 - protein, 576 aa, Aspergillus niger
IEASLLKDPKEVAGRTYDYIIAGGGLTGLTVAARLTENPNITVLVIESGSYESDRGPIIEDLNAYGDIFGSSVDHAYETVELPTNNQTALIRSGNGLGGSTLINGGTWTRPHKAQVDSWETVFGNEGWNWDSVAAYSLQAERARAPNAKQIAAGHYFNASCHGINGTVHAGPRDTGDDYSPIVKALMSAVEDRGVPTKKDLGCGDPHGVSMFPNTLHEDQVRSDAAREWLLPNYQRPNLQVLTGQYVGKVLLSQNATTPRAVGVEFGTHKGNTHNVYAKHEVLLAAGSAVSPTILEYSGIGMKSILEPLGIDTVVDLPVGLNLQDQTTSTVRSRITSAGAGQGQAAWFATFNETFGDYAEKAHELLNTKLEQWAEEAVARGGFHNTTALLIQYENYRDWIVKDNVAYSELFLDTAGVASFDVWDLLPFTRGYVHILDKDPYLRHFAYDPQYFLNELDLLGQAAATQLARNISNSGAMQTYFAGETIPGDNLAYDADLSAWVEYIPENFRPNYHGVGTCSMMPKEMGGVVDNAARVYGVQGLRVIDGSIPPTQMSSHVMTVFYAMALKIADAILADY

SEQ ID NO: 2102 - protein, 576 aa, Aspergillus niger
IEASLLKDPKEVAGRTYDYIIAGGGLTGLTVAAKLTENPNITVLVIESGSYESDRGPIIEDLNAYGDIFGSSVDHAYETVELATNNRTALIRSGNGLGGSTLINGGTWTRPHKAQVDSWETVFGNEGWNWDSVAAYSLQAERARAPNAKQIAAGHYFNPSCHGLNGTVHAGPRDTGDDYSPIVKALMSAVEDRGVPTKKDLGCGDPHGVSMFPNTLHPDQVRSDAAREWLLPNYQRPNLQVLTGRYVGKVLLSQNATTPRAVGVEFGTHKGNTHNVYAKHEVLLAAGSAVSPTILEYSGIGMKSILEPLGIDTVVDLPVGLNLQDQTTSTVRSRITSAGAGQGQAAWFATFNETFGDYAEKAHELLNTKLEQWAEEAVARGGFHNTTALLIQYENYRDWIVKDNVAYSELFLDTAGVASFDVWDLLPFTRGYVHILDKDPYLRHFAYDPQYFLNELDLLGQAAATQLARNISNSGAMQTYFAGETIPGDNLAYDADLSAWVEYIPENFRPNYHGVGTCSMMPKEMGGVVDNAARVYGVQGLRVIDGSIPPTQMSSHVMTVFYAMALKIADAILADY

SEQ ID NO: 2103 - protein, 576 aa, Aspergillus niger
IEASLLKDPKEVAGRTYDYIIAGGGLTGLTVAARLTENPNITVLVIESGSYESDRGPIIEDLNAYGDIFGSSVDHAYETVELATNNQTALIRSGNGLGGSTLINGGTWTRPHKAQVDSWETVFGNEGWNWDSVAAYSLQAERARAPNAKQIAAGHYFNASCHGINGTVHAGPRDTGDDYSPIVKALMSAVEDRGVPTKKDLGCGDPHGVSMFPNTLHPDQVRSDAAREWLLPNYQRPNLQVLTGQYVGKVLLSQNATTPRAVGVEFGTHKGNTHNVYAKHEVLLAAGSAVSPTILEYSGIGMKSILEPLGIDTVVDLPVGLNLQDQTTSTVRSRITSAGAGQGQAAWFATFNETFGDYAEKAHELLNTKLEQWAEEAVARGGFHNTTALLIQYENYRDWIVKDNVAYSELFLDTAGVASFDVWDLLPFTRGYVHILDKDPYLRHFAYDPQYFLNELDLLGQAAATQLARNISNSGAMQTYFAGETIPGDNLAYDADLRAWVEYIPENFRPNYHGVGTCSMMPKEMGGVVDNAARVYGVQGLRVIDGSIPPTQMSSHVMTVFYAMALKIADAILADY

SEQ ID NO: 2104 - protein, 576 aa, Aspergillus niger
IEASLLKDPKEVAGRTYDYIIAGGGLTGLTVAARLTENPNITVLVIESGSYESDRGPIIEDLNAYGDIFGSSVDHAYETVELATNNQTALIRSGNGLGGSTLINGGTWTRPHKAQVDSWETVFGNEGWNWDSVAAYSLQAERARAPNAKQIAAGHYFNPSCHGLNGTVHAGPRDTGDDYSPIVKALMSAVEDRGVPTKKDLGCGDPHGVSMFPNTLHPDQVRSDAAREWLLPNYQRPNLQVLTGRYVGKVLLSQNATTPRAVGVEFGTHKGNTHNVYAKHEVLLAAGSAVSPTILEYSGIGMKSILEPLGIDTVVDLPVGLNLQDQTTSTVRSRITPAGAGQGQAAWFATFNETFGDYTEKAHELLNTKLEQWAEEAVARGGFHNTTALLIQYENYRDWIVKDNVAYSELFLDTAGVASFDVWDLLPFTRGYVHILDKDPYLRHFAYDPQYFLNELDLLGQAAATQLARNISNSGAMQTYFAGETIPGDNLAYDADLRAWVEYIPENFRPNYHGVGTCSMMPKEMGGVVDNAARVYGVQGLRVIDGSIPPTQMSSHVMTVFYAMALKIADAILADY

SEQ ID NO: 2105 - protein, 576 aa, Aspergillus niger
IEASLLKDPKEVAGRTYDYIIAGGGLTGLTVAARLTENPNITVLVIESGSYESDRGPIIEDLNAYGDIFGSSVDHAYETVELPTNNRTALIRSGNGLGGSTLINGGTWTRPHKAQVDSWETVFGNEGWNWDSVAAYSLQAERARAPNAKQIAAGHYFNASCHGLNGTVHAGPRDTGDDYSPIVKALMSAVEDRGVPTKKDLGCGDPHGVSMFPNTLHEDQVRSDAAREWLLPNYQRPNLQVLTGQYVGKVLLSQNATTPRAVGVEFGTHKGNTHNVYAKHEVLLAAGSAVSPTILEYSGIGMKSILEPLGIDTVVDLPVGLNLQDQTTSTVRSRITSAGAGQGQAAWFATFNETFGDYTEKAHELLNTKLEQWAEEAVARGGFHNTTALLIQYENYRDWIVKDNVAYSELFLDTAGVASFDVWDLLPFTRGYVHILDKDPYLRHFAYDPQYFLNELDLLGQAAATQLARNISNSGAMQTYFAGETIPGDNLAYDADLRAWVEYIPENFRPNYHGVGTCSMMPKEMGGVVDNAARVYGVQGLRVIDGSIPPTQMSSHVMTVFYAMALKIADAILADY

SEQ ID NO: 2106 - protein, 576 aa, Aspergillus niger
IEASLLTDPKDVSGRTVDYIIAGGGLTGLTTAARLTENPNISVLVIESCSYESDRGPIIEDLNAYGDIFGSSVDHAYETVELATNNQTALIRSGNCLGGSTLVNGGTWTRPHKAQVDSWETVFGNEGWNWDNVAAYSLQAERARAPNAKQIAAGHYFNASCHGVNGTVHAGPRDTGDDYSPIVKALMSAVEDRGVPTKKDFGCGDPHGVSMFPNTLHEDQVRSDAAREWLLPNYQRPNLQVLTGQYVGKVLLSQNGTTPRAVGVEFGTHKGNTHNVYAKHEVLLAAGSAVSPTILEYSGIGMKSILEPLGIDTVVDLPVGLNLQDQTTATVRSRITSAGAGQGQAAWFATFNETFGDYSEKAHELLNTKLEQWAEEAVARGGFHNTTALLIQYENYRDWIVNHNVAYSELFLDTAGVASFDVWDLLPFTRGYVHILDKDPYLHHFAYDPQYFLNELDLLGQAAATQLARNISNSGAMQTYFAGETIPGDNLAYDADLSAWTEYIPYHFRPNYHGVGTCSMMPKEMGGVVDNAARVYGVQGLRVIDGSIPPTQMSSHVMTVFYAMALKISDAILEDY

SEQ ID NO: 2107 - protein, 576 aa, Aspergillus niger
IEASLLKDPKEVAGRTYDYIIAGGGLTGLTVAARLTENPNITVLVIESGSYESDRGPIIEDLNAYGDIFGSSVDHAYETVELATNNQTALIRSGNGLGGSTLINGGTWTRPHKAQVDSWETVFGNEGWNWDSVAAYSLQAERARAPNAKQIAAGHYFNASCHGLNGTVHAGPRDTGDDYSPIVKALMSAVEDRGVPTKKDLGCGDPHGVSMFPNTLHEDQVRSDAAREWLLPNYQRPNLQVLTGQYVGKVLLSQNATTPRAVGVEFGTHKGNTHNVYAKHEVLLAAGSAVSPTILEYSGIGMKSILEPLGIDTVVDLPVGLNLQDQTTSTVRSRITSAGAGQGQAAWFATFNETFGDYTEKAHELLNTKLEQWAEEAVARGGFHNTTALLIQYENYRDWIVKDNVAYSELFLDTAGVASFDVWDLLPFTRGYVHILDKDPYLRHFAYDPQYFLNELDLLGQAAATQLARNISNSGAMQTYFAGETIPGDNLAYDADLSAWVEYIPENFRPNYHGVGTCSMMPKEMGGVVDNAARVYGVQGLRVIDGSIPPTQMSSHVMTVFYAMALKIADAILADY

SEQ ID NO: 2108 - protein, 576 aa, Aspergillus niger
IEASLLKDPKEVAGRTYDYIIAGGGLTGLTVAARLTENPNITVLVIESGSYESDRGPIIEDLNAYGDIFGSSVDHAYETVELATNNQTALIRSGNGLGGSTLINGGTWTRPHKAQVDSWETVFGNEGWNWDSVAAYSLQAERARAPNAKQIAAGHYFNASCHGLNGTVHAGPRDTGDDYSPIVKALMSAVEDRGVPTKKDLGCGDPHGVSMFPNTLHPDQVRSDAAREWLLPNYQRPNLQVLTGRYVGKVLLSQNATTPRAVGVEFGTHKGNTHNVYAKHEVLLAAGSAVSPTILEYSGIGMKSILEPLGIDTVVDLPVGLNLQDQTTSTVRSRITPAGAGQGQAAWFATFNETFGDYTEKAHELLNTKLEQWAEEAVARGGFHNTTALLIQYENYRDWIVKDNVAYSELFLDTAGVASFDVWDLLPFTRGYVHILDKDPYLRHFAYDPQYFLNELDLLGQAAATQLARNISNSGAMQTYFAGETIPGDNLAYDADLRAWVEYIPENFRPNYHGVGTCSMMPKEMGGVVDNAARVYGVQGLRVIDGSIPPTQMSSHVMTVFYAMALKIADAVLADY

SEQ ID NO: 2109 - protein, 576 aa, Aspergillus niger
IEASLLKDPKEVAGRTYDYIIAGGGLTGLTVAARLTENPNITVLVIESGSYESDRGPIIEDLNAYGDIFGSSVDHAYETVELATNNQTALIRSGNGLGGSTLINGGTWTRPHKAQVDSWETVFGNEGWNWDSVAAYSLQAERARAPNAKQIAAGHYFNASCHGINGTVHAGPRDTGDDYSPIVKALMSAVEDRGVPTKKDLGCGDPHGVSMFPNTLHPDQVRSDAAREWLLPNYQRPNLQVLTGRYVGKVLLSQNATTPRAVGVEFGTHKGNTHNVYAKHEVLLAAGSAVSPTILEYSGIGMKSILEPLGIDTVVDLPVGLNLQDQTTSTVRSRITPAGAGQGQAAWFATFNETFGDYTEKAHELLNTKLEQWAEEAVARGGFHNTTALLIQYENYRDWIVKDNVAYSELFLDTAGVASFDVWDLLPFTRGYVHILDKDPYLRHFAYDPQYFLNELDLLGQAAATQLARNISNSGAMQTYFAGETIPGDNLAYDADLRAWVEYIPENFRPNYHGVGTCSMMPKEMGGVVDNAARVYGVQGLRVIDGSIPPTQMSSHVMTVFYAMALKIADAVLADY

SEQ ID NO: 2110 - protein, 576 aa, Aspergillus niger
IEASLLKDPKEVAGRTYDYIIAGGGLTGLTVAARLTENPNITVLVIESGSYESDRGPIIEDLNAYGDIFGSSVDHAYETVELATNNRTALIRSGNGLGGSTLINGGTWTRPHKAQVDSWETVFGNEGWNWDSVAAYSLQAERARAPNAKQIAAGHYFNPSCHGINGTVHAGPRDTGDDYSPIVKALMSAVEDRGVPTKKDLGCGDPHGVSMFPNTLHPDQVRSDAAREWLLPNYQRPNLQVLTGRYVGKVLLSQNATTPRAVGVEFGTHKGNTHNVYAKHEVLLAAGSAVSPTILEYSGIGMKSILEPLGIDTVVDLPVGLNLQDQTTSTVRSRITSAGAGQGQAAWFATFNETFGDYTEKAHELLNTKLEQWAEEAVARGGFHNTTALLIQYENYRDWIVKDNVAYSELFLDTAGVASFDVWDLLPFTRGYVHILDKDPYLRHFAYDPQYFLNELDLLGQAAATQLARNISNSGAMQTYFAGETIPGDNLAYDADLRAWVEYIPENFRPNYHGVGTCSMMPKEMGGVVDNAARVYGVQGLRVIDGSIPPTQLSSHVMTVFYAMALKIADAILADY

SEQ ID NO: 2111 - protein, 576 aa, Aspergillus niger
IEASLLKDPKEVAGRTYDYIIAGGGLTGLTVAARLTENPNITVLVIESGSYESDRGPIIEDLNAYGDIFGSSVDHAYETVELPTNNQTALIRSGNGLGGSTLINGGTWTRPHKAQVDSWETVFGNEGWNWDSVAAYSLQAERARAPNAKQIAAGHYFNASCHGINGTVHAGPRDTGDDYSPIVKALMSAVEDRGVPTKKDLGCGDPHGVSMFPNTLHEDQVRSDAAREWLLPNYQRPNLQVLTGQYVGKVLLSQNATTPRAVGVEFGTHKGNTHNVYAKHEVLLAAGSAVSPTILEYSGIGMKSILEPLGIDTVVDLPVGLNLQDQTTSTVRSRITSAGAGQGQAAWFATFNETFGDYAEKAHELLNTKLEQWAEEAVARGGFHNTTALLIQYENYRDWIVKDNVAYSELFLDTAGVASFDVWDLLPFTRGYVHILDKDPYLRHFAYDPQYFLNELDLLGQAAATQLARNISNSGAMQTYFAGETIPGDNLAYDADLSAWVEYIPENFRPNYHGVGTCSMMPKEMGGVVDNAARVYGVQGLRVIDGSIPPTQLSSHVMTVFYAMALKIADAILADY

SEQ ID NO: 2112 - protein, 576 aa, Aspergillus niger
IEASLLKDPKEVAGRTYDYIIAGGGLTGLTVAARLTENPNITVLVIESGSYESDRGPIIEDLNAYGDIFGSSVDHAYETVELATNNRTALIRSGNGLGGSTLINGGTWTRPHKAQVDSWETVFGNEGWNWDSVAAYSLQAERARAPNAKQIAAGHYFNASCHGLNGTVHAGPRDTGDDYSPIVKALMSAVEDRGVPTKKDLGCGDPHGVSMFPNTLHPDQVRSDAAREWLLPNYQRPNLQVLTGRYVGKVLLSQNATTPRAVGVEFGTHKGNTHNVYAKHEVLLAAGSAVSPTILEYSGIGMKSILEPLGIDTVVDLPVGLNLQDQTTSTVRSRITPAGAGQGQAAWFATFNETFGDYTEKAHELLNTKLEQWAEEAVARGGFHNTTALLIQYENYRDWIVKDNVAYSELFLDTAGVASFDVWDLLPFTRGYVHILDKDPYLRHFAYDPQYFLNELDLLGQAAATQLARNISNSGAMQTYFAGETIPGDNLAYDADLRAWVEYIPENFRPNYHGVGTCSMMPKEMGGVVDNAARVYGVQGLRVIDGSIPPTQMSSHVMTVFYAMALKIADAILADY

SEQ ID NO: 2113 - protein, 576 aa, Aspergillus niger
IEASLLKDPKEVAGRTYDYIIAGGGLTGLTVAARLTENPNITVLVIESGSYESDRGPIIEDLNAYGDIFGSSVDHAYETVELATNNQTALIRSGNGLGGSTLINGGTWTRPHKAQVDSWETVFGNEGWNWDSVAAYSLQAERARAPNAKQIAAGHYFNPSCHGINGTVHAGPRDTGDDYSPIVKALMSAVEDRGVPTKKDLGCGDPHGVSMFPNTLHPDQVRSDAAREWLLPNYQRPNLQVLTGQYVGKVLLSQNATTPRAVGVEFGTHKGNTHNVYAKHEVLLAAGSAVSPTILEYSGIGMKSILEPLGIDTVVDLPVGLNLQDQTTSTVRSRITSAGAGQGQAAWFATFNETFGDYTEKAHELLNTKLEQWAEEAVARGGFHNTTALLIQYENYRDWIVKDNVAYSELFLDTAGVASFDVWDLLPFTRGYVHILDKDPYLRHFAYDPQYFLNELDLLGQAAATQLARNISNSGAMQTYFAGETIPGDNLAYDADLRAWVEYIPENFRPNYHGVGTCSMMPKEMGGVVDNAARVYGVQGLRVIDGSIPPTQLSSHVMTVFYAMALKIADAILADY

SEQ ID NO: 2114 - protein, 576 aa, Aspergillus niger
IEASLLKDPKEVAGRTYDYIIAGGGLTGLTVAARLTENPNITVLVIESGSYESDRGPIIEDLNAYGDIFGSSVDHAYETVELATNNQTALIRSGNGLGGSTLINGGTWTRPHKAQVDSWETVFGNEGWNWDSVAAYSLQAERARAPNAKQIAAGHYFNASCHGINGTVHAGPRDTGDDYSPIVKALMSAVEDRGVPTKKDLGCGDPHGVSMFPNTLHPDQVRSDAAREWLLPNYQRPNLQVLTGQYVGKVLLSQNATTPRAVGVEFGTHKGNTHNVYAKHEVLLAAGSAVSPTILEYSGIGMKSILEPLGIDTVVDLPVGLNLQDQTTSTVRSRITPAGAGQGQAAWFATFNETFGDYTEKAHELLNTKLEQWAEEAVARGGFHNTTALLIQYENYRDWIVKDNVAYSELFLDTAGVASFDVWDLLPFTRGYVHILDKDPYLRHFAYDPQYFLNELDLLGQAAATQLARNISNSGAMQTYFAGETIPGDNLAYDADLSAWVEYIPENFRPNYHGVGTCSMMPKEMGGVVDNAARVYGVQGLRVIDGSIPPTQMSSHVMTVFYAMALKIADAILADY

SEQ ID NO: 2115 - protein, 576 aa, Aspergillus niger
IEASLLTDPKDVSGRTVDYIICGGGLTGLTTAARLTENPNISVLVIESGSYESDRGPIIEDLNAYGDIFGSSVDHAYETVELATNNQTALIRSGNGLGGSTLVNGGTWTRPHKAQVDSWETVFGNEGWNWDNVAAYSLQAERARAPNAKQIAAGHYFNASCHGVNGTVHAGPRDTGDDYSPIVKALMSAVEDRGVPTKKDFGCGDPHGVSMFPNTLHEDQVRSDAAREWLLPNYQRPNLQVLTGQYCGKVLLSQNGTTPRAVGVEFGTHKGNTHNVYAKHEVLLAAGSAVSPTILEYSGIGMKSILEPLGIDTVVDLPVGLNLQDQTTATVRSRITSAGAGQGQAAWFATFNETFGDYSEKAHELLNTKLEQWAEEAVARGGFHNTTALLIQYENYRDWIVNHNVAYSELFLDTAGVASFDVWDLLPFTRGYVHILDKDPYLHHFAYDPQYFLNELDLLGQAAATQLARNISNSGAMQTYFAGETIPGDNLAYDADLSAWTEYIPYHFRPNYHGVGTCSMMPKEMGGVVDNAARVYGVQGLRVIDGSIPPTQMSSHVMTVFYAMALKISDAILEDY

SEQ ID NO: 2116 - protein, 576 aa, Aspergillus niger
IEASLLKDPKEVAGRTYDYIIAGGGLTGLTVAAKLTENPNITVLVIESGSYESDRGPIIEDLNAYGDIFGSSVDHAYETVELPTNNQTALIRSGNGLGGSTLINGGTWTRPHKAQVDSWETVFGNEGWNWDSVAAYSLQAERARAPNAKQIAAGHYFNPSCHGLNGTVHAGPRDTGDDYSPIVKALMSAVEDRGVPTKKDLGCGDPHGVSMFPNTLHPDQVRSDAAREWLLPNYQRPNLQVLTGRYVGKVLLSQNATTPRAVGVEFGTHKGNTHNVYAKHEVLLAAGSAVSPTILEYSGIGMKSILEPLGIDTVVDLPVGLNLQDQTTSTVRSRITPAGAGQGQAAWFATFNETFGDYAEKAHELLNTKLEQWAEEAVARGGFHNTTALLIQYENYRDWIVKDNVAYSELFLDTAGVASFDVWDLLPFTRGYVHILDKDPYLRHFAYDPQYFLNELDLLGQAAATQLARNISNSGAMQTYFAGETIPGDNLAYDADLRAWVEYIPENFRPNYHGVGTCSMMPKEMGGVVDNAARVYGVQGLRVIDGSIPPTQLSSHVMTVFYAMALKIADAVLADY

SEQ ID NO: 2117 - protein, 576 aa, Aspergillus niger
IEASLLKDPKEVAGRTYDYIIAGGGLTGLTVAARLTENPNITVLVIESGSYESDRGPIIEDLNAYGDIFGSSVDHAYETVELATNNQTALIRSGNGLGGSTLINGGTWTRPHKAQVDSWETVFGNEGWNWDSVAAYSLQAERARAPNAKQIAAGHYFNASCHGINGTVHAGPRDTGDDYSPIVKALMSAVEDRGVPTKKDLGCGDPHGVSMFPNTLHPDQVRSDAAREWLLPNYQRPNLQVLTGRYVGKVLLSQNATTPRAVGVEFGTHKGNTHNVYAKHEVLLAAGSAVSPTILEYSGIGMKSILEPLGIDTVVDLPVGLNLQDQTTSTVRSRITPAGAGQGQAAWFATFNETFGDYTEKAHELLNTKLEQWAEEAVARGGFHNTTALLIQYENYRDWIVKDNVAYSELFLDTAGVASFDVWDLLPFTRGYVHILDKDPYLRHFAYDPQYFLNELDLLGQAAATQLARNISNSGAMQTYFAGETIPGDNLAYDADLRAWVEYIPENFRPNYHGVGTCSMMPKEMGGVVDNAARVYGVQGLRVIDGSIPPTQLSSHVMTVFYAMALKIADAVLADY

SEQ ID NO: 2118 - protein, 576 aa, Aspergillus niger
IEASLLKDPKEVAGRTYDYIIAGGGLTGLTVAAKLTENPNITVLVIESGSYESDRGPIIEDLNAYGDIFGSSVDHAYETVELATNNQTALIRSGNGLGGSTLINGGTWTRPHKAQVDSWETVFGNEGWNWDSVAAYSLQAERARAPNAKQIAAGHYFNASCHGLNGTVHAGPRDTGDDYSPIVKALMSAVEDRGVPTKKDLGCGDPHGVSMFPNTLHEDQVRSDAAREWLLPNYQRPNLQVLTGRYVGKVLLSQNATTPRAVGVEFGTHKGNTHNVYAKHEVLLAAGSAVSPTILEYSGIGMKSILEPLGIDTVVDLPVGLNLQDQTTSTVRSRITPAGAGQGQAAWFATFNETFGDYTEKAHELLNTKLEQWAEEAVARGGFHNTTALLIQYENYRDWIVKDNVAYSELFLDTAGVASFDVWDLLPFTRGYVHILDKDPYLRHFAYDPQYFLNELDLLGQAAATQLARNISNSGAMQTYFAGETIPGDNLAYDADLRAWVEYIPENFRPNYHGVGTCSMMPKEMGGVVDNAARVYGVQGLRVIDGSIPPTQMSSHVMTVFYAMALKIADAVLADY

SEQ ID NO: 2119 - protein, 576 aa, Aspergillus niger
IEASLLKDPKEVAGRTYDYIIAGGGLTGLTVAARLTENPNITVLVIESGSYESDRGPIIEDLNAYGDIFGSSVDHAYETVELATNNQTALIRSGNGLGGSTLINGGTWTRPHKAQVDSWETVFGNEGWNWDSVAAYSLQAERARAPNAKQIAAGHYFNASCHGINGTVHAGPRDTGDDYSPIVKALMSAVEDRGVPTKKDLGCGDPHGVSMFPNTLHPDQVRSDAAREWLLPNYQRPNLQVLTGQYVGKVLLSQNATTPRAVGVEFGTHKGNTHNVYAKHEVLLAAGSAVSPTILEYSGIGMKSILEPLGIDTVVDLPVGLNLQDQTTSTVRSRITSAGAGQGQAAWFATFNETFGDYTEKAHELLNTKLEQWAEEAVARGGFHNTTALLIQYENYRDWIVKDNVAYSELFLDTAGVASFDVWDLLPFTRGYVHILDKDPYLRHFAYDPQYFLNELDLLGQAAATQLARNISNSGAMQTYFAGETIPGDNLAYDADLSAWVEYIPENFRPNYHGVGTCSMMPKEMGGVVDNAARVYGVQGLRVIDGSIPPTQLSSHVMTVFYAMALKIADAVLADY

SEQ ID NO: 2120 - protein, 576 aa, Aspergillus niger
IEASLLKDPKEVAGRTYDYIIAGGGLTGLTVAAKLTENPNITVLVIESGSYESDRGPIIEDLNAYGDIFGSSVDHAYETVELPTNNRTALIRSGNGLGGSTLINGGTWTRPHKAQVDSWETVFGNEGWNWDSVAAYSLQAERARAPNAKQIAAGHYFNPSCHGLNGTVHAGPRDTGDDYSPIVKALMSAVEDRGVPTKKDLGCGDPHGVSMFPNTLHPDQVRSDAAREWLLPNYQRPNLQVLTGRYVGKVLLSQNATTPRAVGVEFGTHKGNTHNVYAKHEVLLAAGSAVSPTILEYSGIGMKSILEPLGIDTVVDLPVGLNLQDQTTSTVRSRITPAGAGQGQAAWFATFNETFGDYAEKAHELLNTKLEQWAEEAVARGGFHNTTALLIQYENYRDWIVKDNVAYSELFLDTAGVASFDVWDLLPFTRGYVHILDKDPYLRHFAYDPQYFLNELDLLGQAAATQLARNISNSGAMQTYFAGETIPGDNLAYDADLSAWVEYIPENFRPNYHGVGTCSMMPKEMGGVVDNAARVYGVQGLRVIDGSIPPTQLSSHVMTVFYAMALKIADAILADY

SEQ ID NO: 2121 - protein, 576 aa, Aspergillus niger
IEASLLKDPKEVAGRTYDYIIAGGGLTGLTVAARLTENPNITVLVIESGSYESDRGPIIEDLNAYGDIFGSSVDHAYETVELATNNRTALIRSGNGLGGSTLINGGTWTRPHKAQVDSWETVFGNEGWNWDSVAAYSLQAERARAPNAKQIAAGHYFNPSCHGLNGTVHAGPRDTGDDYSPIVKALMSAVEDRGVPTKKDLGCGDPHGVSMFPNTLHPDQVRSDAAREWLLPNYQRPNLQVLTGRYVGKVLLSQNATTPRAVGVEFGTHKGNTHNVYAKHEVLLAAGSAVSPTILEYSGIGMKSILEPLGIDTVVDLPVGLNLQDQTTSTVRSRITSAGAGQGQAAWFATFNETFGDYTEKAHELLNTKLEQWAEEAVARGGFHNTTALLIQYENYRDWIVKDNVAYSELFLDTAGVASFDVWDLLPFTRGYVHILDKDPYLRHFAYDPQYFLNELDLLGQAAATQLARNISNSGAMQTYFAGETIPGDNLAYDADLSAWVEYIPENFRPNYHGVGTCSMMPKEMGGVVDNAARVYGVQGLRVIDGSIPPTQMSSHVMTVFYAMALKIADAILADY

SEQ ID NO: 2122 - protein, 576 aa, Aspergillus niger
IEASLLKDPKEVAGRTYDYIIAGGGLTGLTVAARLTENPNITVLVIESGSYESDRGPIIEDLNAYGDIFGSSVDHAYETVELPTNNQTALIRSGNGLGGSTLINGGTWTRPHKAQVDSWETVFGNEGWNWDSVAAYSLQAERARAPNAKQIAAGHYFNASCHGINGTVHAGPRDTGDDYSPIVKALMSAVEDRGVPTKKDLGCGDPHGVSMFPNTLHEDQVRSDAAREWLLPNYQRPNLQVLTGRYVGKVLLSQNATTPRAVGVEFGTHKGNTHNVYAKHEVLLAAGSAVSPTILEYSGIGMKSILEPLGIDTVVDLPVGLNLQDQTTSTVRSRITPAGAGQGQAAWFATFNETFGDYTEKAHELLNTKLEQWAEEAVARGGFHNTTALLIQYENYRDWIVKDNVAYSELFLDTAGVASFDVWDLLPFTRGYVHILDKDPYLRHFAYDPQYFLNELDLLGQAAATQLARNISNSGAMQTYFAGETIPGDNLAYDADLRAWVEYIPENFRPNYHGVGTCSMMPKEMGGVVDNAARVYGVQGLRVIDGSIPPTQMSSHVMTVFYAMALKIADAVLADY

SEQ ID NO: 2123 - protein, 576 aa, Aspergillus niger
IEASLLTDPKDVSGRTVDYIIAGGGLTGLTTAARLTENPNISVLVIESGSYESDRGPIIEDLNAYGDIFGSSVDHAYETVELATNNQTALIRSGNGLGGSTLVNGGTWTRPHKAQVDSWETVFGNEGWNWDNVAAYSLQAERARAPNAKQIAAGHYFNASCHGVNGTVHAGPRDTGDDYSPIVKALMSAVEDRGVPTKKDFGCGDPHGVSMFPNTLHEDQVRSDAAREWLLPNYQRPNLQVLTGQYVGKVLLSQNGTTPRAVGVEFGTHKGNTHNVYAKHEVLLAAGSAVSPTILEYSGIGMKSILEPLGIDTVVDLPVGLNLQDQTTATVRSRITSAGAGQGQAAWFATFNETFGDYSEKAHELLNTKLEQWAEEAVARGGFHNTTALLIQYENYRNWIVNHNVAYSELFLDTAGVASFDVWDLLPFTRGYVHILDKDPYLHHFAYDPQYFLNELDLLGQAAATQLARNISNSGAMQTYFAGETIPGDNLAYDADLSAWTEYIPYHFRPNYHGVGTCSMMPKEMGGVVDNAARVYGVQGLRVIDGSIPPTQMSSHVMTVFYAMALKISDVILEDY

SEQ ID NO: 2124 - protein, 576 aa, Aspergillus niger
IEASLLKDPKEVAGRTYDYIIAGGGLTGLTVAARLTENPNITVLVIESGSYESDRGPIIEDLNAYGDIFGSSVDHAYETVELATNNQTALIRSGNGLGGSTLINGGTWTRPHKAQVDSWETVFGNEGWNWDSVAAYSLQAERARAPNAKQIAAGHYFNASCHGINGTVHAGPRDTGDDYSPIVKALMSAVEDRGVPTKKDLGCGDPHGVSMFPNTLHEDQVRSDAAREWLLPNYQRPNLQVLTGQYVGKVLLSQNATTPRAVGVEFGTHKGNTHNVYAKHEVLLAAGSAVSPTILEYSGIGMKSILEPLGIDTVVDLPVGLNLQDQTTSTVRSRITSAGAGQGQAAWFATFNETFGDYTEKAHELLNTKLEQWAEEAVARGGFHNTTALLIQYENYRDWIVKDNVAYSELFLDTAGVASFDVWDLLPFTRGYVHILDKDPYLRHFAYDPQYFLNELDLLGQAAATQLARNISNSGAMQTYFAGETIPGDNLAYDADLRAWVEYIPENFRPNYHGVGTCSMMPKEMGGVVDNAARVYGVQGLRVIDGSIPPTQLSSHVMTVFYAMALKIADAILADY

SEQ ID NO: 2125 - protein, 576 aa, Aspergillus niger
IEASLLKDPKEVAGRTYDYIIAGGGLTGLTVAAKLTENPNITVLVIESGSYESDRGPIIEDLNAYGDIFGSSVDHAYETVELPTNNQTALIRSGNGLGGSTLINGGTWTRPHKAQVDSWETVFGNEGWNWDSVAAYSLQAERARAPNAKQIAAGHYFNPSCHGLNGTVHAGPRDTGDDYSPIVKALMSAVEDRGVPTKKDLGCGDPHGVSMFPNTLHEDQVRSDAAREWLLPNYQRPNLQVLTGRYVGKVLLSQNATTPRAVGVEFGTHKGNTHNVYAKHEVLLAAGSAVSPTILEYSGIGMKSILEPLGIDTVVDLPVGLNLQDQTTSTVRSRITPAGAGQGQAAWFATFNETFGDYAEKAHELLNTKLEQWAEEAVARGGFHNTTALLIQYENYRDWIVKDNVAYSELFLDTAGVASFDVWDLLPFTRGYVHILDKDPYLRHFAYDPQYFLNELDLLGQAAATQLARNISNSGAMQTYFAGETIPGDNLAYDADLRAWVEYIPENFRPNYHGVGTCSMMPKEMGGVVDNAARVYGVQGLRVIDGSIPPTQLSSHVMTVFYAMALKIADAILADY

SEQ ID NO: 2126 - protein, 576 aa, Aspergillus niger
IEASLLKDPKEVAGRTYDYIIAGGGLTGLTVAAKLTENPNITVLVIESGSYESDRGPIIEDLNAYGDIFGSSVDHAYETVELPTNNQTALIRSGNGLGGSTLINGGTWTRPHKAQVDSWETVFGNEGWNWDSVAAYSLQAERARAPNAKQIAAGHYFNPSCHGINGTVHAGPRDTGDDYSPIVKALMSAVEDRGVPTKKDLGCGDPHGVSMFPNTLHPDQVRSDAAREWLLPNYQRPNLQVLTGRYVGKVLLSQNATTPRAVGVEFGTHKGNTHNVYAKHEVLLAAGSAVSPTILEYSGIGMKSILEPLGIDTVVDLPVGLNLQDQTTSTVRSRITPAGAGQGQAAWFATFNETFGDYAEKAHELLNTKLEQWAEEAVARGGFHNTTALLIQYENYRDWIVKDNVAYSELFLDTAGVASFDVWDLLPFTRGYVHILDKDPYLRHFAYDPQYFLNELDLLGQAAATQLARNISNSGAMQTYFAGETIPGDNLAYDADLRAWVEYIPENFRPNYHGVGTCSMMPKEMGGVVDNAARVYGVQGLRVIDGSIPPTQLSSHVMTVFYAMALKIADAVLADY

SEQ ID NO: 2127 - protein, 576 aa, Aspergillus niger
IEASLLKDPKEVAGRTYDYIIAGGGLTGLTVAAKLTENPNITVLVIESGSYESDRGPIIEDLNAYGDIFGSSVDHAYETVELATNNRTALIRSGNGLGGSTLINGGTWTRPHKAQVDSWETVFGNEGWNWDSVAAYSLQAERARAPNAKQIAAGHYFNASCHGLNGTVHAGPRDTGDDYSPIVKALMSAVEDRGVPTKKDLGCGDPHGVSMFPNTLHEDQVRSDAAREWLLPNYQRPNLQVLTGRYVGKVLLSQNATTPRAVGVEFGTHKGNTHNVYAKHEVLLAAGSAVSPTILEYSGIGMKSILEPLGIDTVVDLPVGLNLQDQTTSTVRSRITSAGAGQGQAAWFATFNETFGDYAEKAHELLNTKLEQWAEEAVARGGFHNTTALLIQYENYRDWIVKDNVAYSELFLDTAGVASFDVWDLLPFTRGYVHILDKDPYLRHFAYDPQYFLNELDLLGQAAATQLARNISNSGAMQTYFAGETIPGDNLAYDADLSAWVEYIPENFRPNYHGVGTCSMMPKEMGGVVDNAARVYGVQGLRVIDGSIPPTQMSSHVMTVFYAMALKIADAILADY

SEQ ID NO: 2128 - protein, 576 aa, Aspergillus niger
IEASLLKDPKEVAGRTYDYIIAGGGLTGLTVAAKLTENPNITVLVIESGSYESDRGPIIEDLNAYGDIFGSSVDHAYETVELATNNRTALIRSGNGLGGSTLINGGTWTRPHKAQVDSWETVFGNEGWNWDSVAAYSLQAERARAPNAKQIAAGHYFNASCHGLNGTVHAGPRDTGDDYSPIVKALMSAVEDRGVPTKKDLGCGDPHGVSMFPNTLHEDQVRSDAAREWLLPNYQRPNLQVLTGQYVGKVLLSQNATTPRAVGVEFGTHKGNTHNVYAKHEVLLAAGSAVSPTILEYSGIGMKSILEPLGIDTVVDLPVGLNLQDQTTSTVRSRITSAGAGQGQAAWFATFNETFGDYTEKAHELLNTKLEQWAEEAVARGGFHNTTALLIQYENYRDWIVKDNVAYSELFLDTAGVASFDVWDLLPFTRGYVHILDKDPYLRHFAYDPQYFLNELDLLGQAAATQLARNISNSGAMQTYFAGETIPGDNLAYDADLSAWVEYIPENFRPNYHGVGTCSMMPKEMGGVVDNAARVYGVQGLRVIDGSIPPTQLSSHVMTVFYAMALKIADAILADY

SEQ ID NO: 2129 - protein, 576 aa, Aspergillus niger
IEASLLKDPKEVAGRTYDYIIAGGGLTGLTVAAKLTENPNITVLVIESGSYESDRGPIIEDLNAYGDIFGSSVDHAYETVELATNNQTALIRSGNGLGGSTLINGGTWTRPHKAQVDSWETVFGNEGWNWDSVAAYSLQAERARAPNAKQIAAGHYFNASCHGINGTVHAGPRDTGDDYSPIVKALMSAVEDRGVPTKKDLGCGDPHGVSMFPNTLHEDQVRSDAAREWLLPNYQRPNLQVLTGQYVGKVLLSQNATTPRAVGVEFGTHKGNTHNVYAKHEVLLAAGSAVSPTILEYSGIGMKSILEPLGIDTVVDLPVGLNLQDQTTSTVRSRITSAGAGQGQAAWFATFNETFGDYAEKAHELLNTKLEQWAEEAVARGGFHNTTALLIQYENYRDWIVKDNVAYSELFLDTAGVASFDVWDLLPFTRGYVHILDKDPYLRHFAYDPQYFLNELDLLGQAAATQLARNISNSGAMQTYFAGETIPGDNLAYDADLSAWVEYIPENFRPNYHGVGTCSMMPKEMGGVVDNAARVYGVQGLRVIDGSIPPTQLSSHVMTVFYAMALKIADAILADY

SEQ ID NO: 2130 - protein, 576 aa, Aspergillus niger
IEASLLKDPKEVAGRTYDYIIAGGGLTGLTVAARLTENPNITVLVIESGSYESDRGPIIEDLNAYGDIFGSSVDHAYETVELPTNNQTALIRSGNGLGGSTLINGGTWTRPHKAQVDSWETVFGNEGWNWDSVAAYSLQAERARAPNAKQIAAGHYFNASCHGLNGTVHAGPRDTGDDYSPIVKALMSAVEDRGVPTKKDLGCGDPHGVSMFPNTLHEDQVRSDAAREWLLPNYQRPNLQVLTGQYVGKVLLSQNATTPRAVGVEFGTHKGNTHNVYAKHEVLLAAGSAVSPTILEYSGIGMKSILEPLGIDTVVDLPVGLNLQDQTTSTVRSRITSAGAGQGQAAWFATFNETFGDYTEKAHELLNTKLEQWAEEAVARGGFHNTTALLIQYENYRDWIVKDNVAYSELFLDTAGVASFDVWDLLPFTRGYVHILDKDPYLRHFAYDPQYFLNELDLLGQAAATQLARNISNSGAMQTYFAGETIPGDNLAYDADLSAWVEYIPENFRPNYHGVGTCSMMPKEMGGVVDNAARVYGVQGLRVIDGSIPPTQLSSHVMTVFYAMALKIADAVLADY

SEQ ID NO: 2131 - protein, 576 aa, Aspergillus niger
IEASLLKDPKEVAGRTYDYIIAGGGLTGLTVAAKLTENPNITVLVIESGSYESDRGPIIEDLNAYGDIFGSSVDHAYETVELATNNQTALIRSGNGLGGSTLINGGTWTRPHKAQVDSWETVFGNEGWNWDSVAAYSLQAERARAPNAKQIAAGHYFNASCHGINGTVHAGPRDTGDDYSPIVKALMSAVEDRGVPTKKDLGCGDPHGVSMFPNTLHEDQVRSDAAREWLLPNYQRPNLQVLTGQYVGKVLLSQNATTPRAVGVEFGTHKGNTHNVYAKHEVLLAAGSAVSPTILEYSGIGMKSILEPLGIDTVVDLPVGLNLQDQTTSTVRSRITSAGAGQGQAAWFATFNETFGDYTEKAHELLNTKLEQWAEEAVARGGFHNTTALLIQYENYRDWIVKDNVAYSELFLDTAGVASFDVWDLLPFTRGYVHILDKDPYLRHFAYDPQYFLNELDLLGQAAATQLARNISNSGAMQTYFAGETIPGDNLAYDADLSAWVEYIPENFRPNYHGVGTCSMMPKEMGGVVDNAARVYGVQGLRVIDGSIPPTQLSSHVMTVFYAMALKIADAVLADY

SEQ ID NO: 2132 - protein, 576 aa, Aspergillus niger
IEASLLKDPKEVAGRTYDYIIAGGGLTGLTVAAKLTENPNITVLVIESGSYESDRGPIIEDLNAYGDIFGSSVDHAYETVELATNNQTALIRSGNGLGGSTLINGGTWTRPHKAQVDSWETVFGNEGWNWDSVAAYSLQAERARAPNAKQIAAGHYFNPSCHGINGTVHAGPRDTGDDYSPIVKALMSAVEDRGVPTKKDLGCGDPHGVSMFPNTLHPDQVRSDAAREWLLPNYQRPNLQVLTGQYVGKVLLSQNATTPRAVGVEFGTHKGNTHNVYAKHEVLLAAGSAVSPTILEYSGIGMKSILEPLGIDTVVDLPVGLNLQDQTTSTVRSRITSAGAGQGQAAWFATFNETFGDYAEKAHELLNTKLEQWAEEAVARGGFHNTTALLIQYENYRDWIVKDNVAYSELFLDTAGVASFDVWDLLPFTRGYVHILDKDPYLRHFAYDPQYFLNELDLLGQAAATQLARNISNSGAMQTYFAGETIPGDNLAYDADLSAWVEYIPENFRPNYHGVGTCSMMPKEMGGVVDNAARVYGVQGLRVIDGSIPPTQMSSHVMTVFYAMALKIADAILADY

SEQ ID NO: 2133 - protein, 576 aa, Aspergillus niger
IEASLLTDPKDVSGRTVDYIIAGGGLTGLKTAARLTENPNISVLVIESGSYESDRGPIIEDLNAYGDIFGSSVDHAYETVELATNNQTALIRSGNGLGGSTLINGGTWTRPHKAQVDSWETVFGNEGWNWDNVAAYSLQAERARAPNAKQIAAGHYFNASCHGVNGTVHAGPRDTGDDYSPIVKALMSAVEDRGVPTKKDFGCGDPHGVSMFPNTLHEDQVRSDAAREWLLPNYQRPNLQVLTGQYVGKVLLSQNGTTPRAVGVEFGTHKGNTHNVYAKHEVLLAAGSAVSPTILEYSGIGMKSILEPLGIDTVVDLPVGLNLQDQTTATVRSRITSAGAGQGQAAWFATFNETFGDYSEKAHELLNTKLEQWAEEAVARGGFHNTTALLIQYENYRDWIVNHNVAYSELFLDTAGVASFDVWDLLPFTRGYVHILDKDPYLHHFAYDPQYFLNELDLLGQAAATQLARNISNSGAMQTYFAGETIPGDNLAYDADLSAWTEYIPYHFRPNYHGVGTCSMMPKEMGGVVDNAARVYGVQGLRVIDGSIPPTQMSSHVMTVFYAMALKISDAILEDY

SEQ ID NO: 2134 - protein, 576 aa, Aspergillus niger
IEASLLTDPKDVSGRTVDYIIAGGGLTGLTTAARLTENPNISVLVIESGSYESDRGPIIEDLNAYGDIFGSSVDHAYETVELATNNQTALIRSGNGLGGSTLINGGTWTRPHKAQVDSWETVFGNEGWNWDNVAAYSLQAERARAPNAKQIAAGHYFNASCHGVNGTVHAGPRDTGDDYSPIVKALMSAVEDRGVPTKKDFDCGDPHGVSMFPNTLHEDQVRSDAAREWLLPNYQRPNLQVLTGQYVGKVLLSQNGTTPRAVGVEFGTHKGNTHNVYAKHEVLLAAGSAVSPTILEYSGIGMKSILEPLGIDTVVDLPVGLNLQDQTTATVRSRITSAGAGQGQAAWFATFNETFGDYSEKAHELLNTKLEQWAEEAVARGGFHNTTALLIQYENYRDWIVNHNVAYSELFLDTAGVASFDVWDLLPFTRGYVHILDKDPYLHHFAYDPQYFLNELDLLGQAAATQLARNISNSGAMQTYFAGETIPGDNLAYDADLSAWTEWIPYHFRPNYHGVGTCSMMPKEMGGVVDNAARVYGVQGLRVIDGSIPPTQMSSHVMTVFYAMALKISDAILEDY

SEQ ID NO: 2135 - protein, 576 aa, Aspergillus niger
IEASLLTDPKDVSGRTVDYIIAGGGLTGLTTAARLTENPNISVLVIESGSYESDRGPIIEDLNAYGDIFGSSVDHAYETVELATNNQTALIRSGNGLGGSTLVNGGTWTRPHKAQVDSWETVFGNEGWNWDNVAAYSLQAERARAPNAKQIAAGHYFNASCHGTNGTVHAGPRDTGDDYSPIVKALMSAVEDRGVPTKKDFGCGDPHGVSMFPNTLHEDQVRSDAAREWLLPNYQRPNLQVLTGQYVGKVLLSQNGTTPRAVGVEFGTHKGNTHNVYAEHEVLLAAGSAVSPTILEYSGIGMKSILEPLGIDTVVDLPVGLNLQDQTTATVRSRITSAGAGQGQAAWFATFNETFGDYSEKAHELLNTKLEQWAEEAVARGGFHNTTALLIQYENYRDWIVNHNVAYSELFLDTAGVASFDVWDLLPFTRGYVHILDKDPYLHHFAYDPQYFLNELDLLGQAAATQLARNISNSGAMQTYFAGETIPGDNLAYDADLSAWTEYIPYHFRPNYHGVGTCSMMPKEMGGVVDNAARVYGVQGLRVIDGSIPPTQMSSHVMTVFYAMALKISDAILEDY

SEQ ID NO: 2136 - protein, 589 aa, Escherichia coli BL21(DE3)
GLQVAAPALASNGIEASLLTDPRDVSGRTVDYIIAGGGLTGLTTAARLTENPNISVLVIESGSYESDRGPIIEDLNAYGDIFGSSVDHAYETVELATNNQTALIRSGNGLGGSTLVNGGTWTRPHKAQVDSWETVFGNEGWNWDNVAAYSLQAERARAPNAKQIAAGHYFNASCHGVNGTVHAGPRDTGDDYSPIVKALMSAVEDRGVPTKKDFGCGDPHGVSMFPNTLHEDQVRSDAAREWLLPNYQRPNLQVLTGQYVGKVLLSQNGTTPRAVGVEFGTHKGNTHNVYAKHEVLLAAGSAVSPTILEYSGIGMKSILEPLGIDTVVDLPVGLNLQDQTTATVRSRITSAGAGQGQAAWFATFNETFGDYSEKAHELLNTKLEQWAEEAVARGGFHNTTALLIQYENYRDWIVNHNVAYSELFLDTAGVASFDVWDLLPFTRGYVHILDKDPYLHHFAYDPQYFLNELDLLGQAAATQLARNISNSGAMQTYFAGETIPGDNLAYDADLSAWTEYIPYHFRPNYHGVGTCSMMPKEMGGVVDNAARVYGVQGLRVIDGSIPPTQMSSHVMTVFYAMALKISDAILEDY

SEQ ID NO: 2137 - protein, 601 aa, Aspergillus oryzae
LLFSLNAIAGAVAHPSFPIHKRSNGIEASLLTDPKDVSGRTVDYIIAGGGLTGLTTAARLTENPNISVLVIESGSYESDRGPIIEDLNAYGDIFGSSVDHAYETVELATNNQTALIRSGNGLGGSTLVNGGTWTRPHKAQVDSWETVFGNEGWNWDNVAAYSLQAERARAPNAKQIAAGHYFNASCHGVNGTVHAGPRDTGDDYSPIVKALMSAVEDRGVPTKKDFGCGDPHGVSMFPNTLHEDQVRSDAAREWLLPNYQRPNLQVLTGQYVGKVLLSQNGTTPRAVGVEFGTHKGNTHNVYAKHEVLLAAGSAVSPTILEYSGIGMKSILEPLGIDTVVDLPVGLNLQDQTTATVRSRITSAGAGQGQAAWFATFNETFGDYSEKAHELLNTKLEQWAEEAVARGGFHNTTALLIQYENYRDWIVNHNVAYSELFLDTAGVASFDVWDLLPFTRGYVHILDKDPYLHHFAYDPQYFLNELDLLGQAAATQLARNISNSGAMQTYFAGETIPGDNLAYDADLSAWTEYIPYHFRPNYHGVGTCSMMPKEMGGVVDNAARVYGVQGLRVIDGSIPPTQMSSHVMTVFYAMALKISDAILEDY

SEQ ID NO: 2138 - protein, 609 aa, Penicillium polonicum
MKSIIFSCFLISVAASKRYLPSEQIDVQSSLLSDPTQVTGKTVDYIIAGGGLTGLTIAAKLTEDPSIEVLVIENGFYESTDGDIIEDLNDYGDIFGTTVDHAYEIVPHPINNRTENVRSGNGLGGSTLINGGSWTRPHKAQIDSWEKVFGNKGWNWDDMLPYMQKVEISRPPSDVEIAAGHYYNSTCHGTNGTVHAGPRNNGEPYSPIIKALMDTAKGRGVPTQLDFHCGVPRGVSMIPNGLHEDQIRSDAAREWLLPNYKRPNLQVLTGQFVGKVLINQTTTSGAVSGHKAVGVNFGTNKNVNFNVYAKHEVLLASGSVVSPRILEYSGIGLKSVLDTAGIQQIVDLPVGLNMQDQTTTTVASRIKSSGNGQGQAIYFATFNETFGDYAPQAHKLLNTKLHQWATETVARGGFHNVTALEIQYQNYRDWLVNEEVAYTELFLDTSGKINFDLWDLIPFTRGSVHIEGNDPYLRRFSYDPKFFMNDLDLLGQAAGSKLAREISNSGDMQTYFDGETTPGDNLEYDADLDQWVDYVKQNFRANWHAVGTCSMMAKELGGVVDSEARVYGVEGLRVVDGSIPPTQVSSHVMTIFYAMALKISDAVLTDFHA

SEQ ID NO: 2139 - protein, 589 aa, Aspergillus sp.
AEQVDAQSSLLSNPNDVADKTFDYIIAGGGLTGLTVAAKLTENPNIDVLVIEKGFYESNAGPIIEDPNNYGQVFGSSGDQNYLSVQQINNRTAAIVSGKGLGGSTLVNGNSWTRPDKAQIDSWEKIFGMQGWTWDSILPYMNKAERSRAPNTAEIAAGHSFDSSCHGFNGTVHAGPRDNGKPWSPVMKALMNTTSALGIPTQVDFHCGHPRGVSMIPNNLLEDQTRADTAREWLLPSYTRPNLKILTGQVVGKVLFDEKNSASDPSSTSNQPRAVGVNFGTHRAVNFNTYAKREVLLAAGSAISPLILEYSGIGPRAVLDNANVTQIVDLPVGLNMQEQTTTSVRARSAPEGFGQGQAAYFANFTEVFGEDSVRAVELLNTKLDQWAEETVAQGGLHNVTALKVQYEEYRSWLLDEDVAYAELFLDTEGNIKFDIWDLIPFTRGSTHILSSDPYMWHYANDPKLYRNELDVLGQAAATRLARKLQSSGDMAKYFAGEVTPGDQVPSDATLGQWAEYVTDVFRPNYHAIGTCSMMARELGGVVDATAKVYGTQGLRVIDGSIPPTQLSSHVMTVFYGMALKIAEAVLADY

SEQ ID NO: 2140 - protein, 599 aa, Aspergillus sp.
LATLAQAYTAAEQVDAQSSLLSNPNDVADKTFDYIIAGGGLTGLTVAAKLTENPNIDVLVIEKGFYESNAGPIIEDPNNYGQVFGSSGDQNYLSVQQINNRTAAIVSGKGLGGSTLVNGNSWTRPDKAQIDSWEKIFGMQGWTWDSILPYMNKAERSRAPNTAEIAAGHSFDSSCHGFNGTVHAGPRDNGKPWSPVMKALMNTTSALGIPTQVDFHCGHPRGVSMIPNNLLEDQTRADTAREWLLPSYTRPNLKILTGQVVGKVLFDEKNSASDPSSTSNQPRAVGVNFGTHRAVNFNTYAKREVLLAAGSAISPLILEYSGIGPRAVLDNANVTQIVDLPVGLNMQEQTTTSVRARSAPEGFGQGQAAYFANFTEVFGEDSVRAVELLNTKLDQWAEETVAQGGLHNVTALKVQYEEYRSWLLDEDVAYAELFLDTEGNIKFDIWDLIPFTRGSTHILSSDPYMWHYANDPKLYRNELDVLGQAAATRLARKLQSSGDMAKYFAGEVTPGDQVPSDATLGQWAEYVTDVFRPNYHAIGTCSMMARELGGVVDATAKVYGTQGLRVIDGSIPPTQLSSHVMTVFYGMALKIAEAVLADY

SEQ ID NO: 2141 - protein, 576 aa, Aspergillus niger
IEASLLTDPNDVSGRTVDYIIAGGGLTGLTTAARLTENPNISVLVIESGSYESDRGPIIEDLNAYGDIFGSSVDHAYETVELATNNQTALIRSGNGLGGSTLVNGGTWTRPHKAQVDSWETVFGNEGWNWDNVAAYSLQAERARAPNAKQIAAGHYFNASCHGTNGTVHAGPRDTGDDYSPIVRALMSAVEDRGVPTKKDFGCGDPHGVSMFPNTLHEDQVRSDAAREWLLPNYQRPNLQVLTGQYVGKVLLSQNGTTPRAVGVEFGTHKGNTHNVYAKHEVLLAAGSAVSPTILEYSGIGMKSILEPLGIDTVVDLPVGLNLQDQTTATVRSRITSAGAGQGQAAWFATFNETFGDYSEKAHELPNTKLEQWAEEAVARGGFHNTTALLIQYENYRDWIVNHNVAYSELFLDTAGVASFDVWDLLPFTRGYVHILDKDPYLHHFAYDPQYFLNELDLLGQAAATQLARNISNSGAMQTYFAGETIPGDNLAYDADLSAWTEYIPYHFRPNYHGVGTCSMMPKEMGGVVDNAARVYGVQGLRVIDGSIPPTQMSSHVMTVFYAMALKISDAILEDY

SEQ ID NO: 2142 - protein, 577 aa, unidentified
GIEASLLTDPKDVSGRTVDYIIAGGGLTGLTTAARLTENPNISVLVIYSGSYESDRGPIIEDLNAYGDIFGSSVDHAYETVELATNNQTALIRSGNGLGGSTLVNGGTWTRPHKAQVDSWETVFGNEGWNWDNVAYSLQAERARAPNAKQIAAGHYFNASCHGVNGTVHAGPRDTGDDYSPIVKALMSAVEDRGVPTKKDFGCGDPHGVSMFPNTLHEDQVRSDAAREWLLPNYQRPNLQVLTGQTVGKVLLSQNGTTPRAVGVEFGTHKGNTHNVYALHEVLLAAGSAVSPTILEYSGIGMKSILEPLGIDTVVDLPVGLNLQDQTTATVRSRITSAGAGQGQAAWFATFNETFGDYSEKAHELLNTKLEQWAEEAVARGGFHNTTALLIQYENTRDWIVNHNVATSELFLDTAGVASFDVWDLLPFTRGYVHILDKDPTTLHHFAYDPQTFLNELDLLGQAAATQLARNISNSGAMQTTFAGETIPGDNLATDADLSAWTEYIPYHFRPNTHGVGTCSMMPKEMGGVVDNAARVYGVQVLRVIDGSIPPTQMSSTVMTVFYAMALKISDAILEDY

SEQ ID NO: 2143 - protein, 576 aa, Aspergillus niger
IEASLLKDPKEVAGRTYDYIIAGGGLTGLTVAARLTENPNITVLVIESGSYESDRGPIIEDLNAYGDIFGSSVDHAYETVELATNNQTALIRSGNGLGGSTLINGGTWTRPHKAQVDSWETVFGNEGWNWDSVAAYSLQAERARAPNAKQIAAGHYFNASCHGINGTVHAGPRDTGDDYSPIVKALMSAVEDRGVPTKKDLGCGDPHGVSMFPNTLHPDQVRSDAAREWLLPNYQRPNLQVLTGQYVGKVLLSQNATTPRAVGVEFGTHKGNTHNVYAKHEVLLAAGSAVSPTILEYSGIGMKSILEPLGIDTVVDLPVGLNLQDQTTSTVRSRITSAGAGQGQAAWFATFNETFGDYTEKAHELLNTKLEQWAEEAVARGGFHNTTALLIQYENYRDWIVKDNVAYSELFLDTAGVASFDVWDLLPFTRGYVHILDKDPYLRHFAYDPQYFLNELDLLGQAAATQLARNISNSGAMQTYFAGETIPGDNLAYDADLSAWVEYIPENFRPNYHGVGTCSMMPKEMGGVVDNAARVYGVQGLRVIDGSIPPTQMSSHVMTVFYAMALKIADAILADY

SEQ ID NO: 2144 - protein, 576 aa, Aspergillus niger
IEASLLKDPKEVAGRTYDYIIAGGGLTGLTVAAKLTENPNITVLVIESGSYESDRGPIIEDLNAYGDIFGSSVDHAYETVELATNNQTALIRSGNGLGGSTLINGGTWTRPHKAQVDSWETVFGNEGWNWDSVAAYSLQAERARAPNAKQIAAGHYFNASCHGINGTVHAGPRDTGDDYSPIVKALMSAVEDRGVPTKKDLGCGDPHGVSMFPNTLHPDQVRSDAAREWLLPNYQRPNLQVLTGQYVGKVLLSQNATTPRAVGVEFGTHKGNTHNVYAKHEVLLAAGSAVSPTILEYSGIGMKSILEPLGIDTVVDLPVGLNLQDQTTSTVRSRITSAGAGQGQAAWFATFNETFGDYAEKAHELLNTKLEQWAEEAVARGGFHNTTALLIQYENYRDWIVKDNVAYSELFLDTAGVASFDVWDLLPFTRGYVHILDKDPYLRHFAYDPQYFLNELDLLGQAAATQLARNISNSGAMQTYFAGETIPGDNLAYDADLSAWVEYIPENFRPNYHGVGTCSMMPKEMGGVVDNAARVYGVQGLRVIDGSIPPTQMSSHVMTVFYAMALKIADAILADY

SEQ ID NO: 2145 - protein, 576 aa, Aspergillus niger
IEASLLKDPKEVAGRTYDYIIAGGGLTGLTVAAKLTENPNITVLVIESGSYESDRGPIIEDLNAYGDIFGSSVDHAYETVELATNNRTALIRSGNGLGGSTLINGGTWTRPHKAQVDSWETVFGNEGWNWDSVAAYSLQAERARAPNAKQIAAGHYFNPSCHGINGTVHAGPRDTGDDYSPIVKALMSAVEDRGVPTKKDLGCGDPHGVSMFPNTLHPDQVRSDAAREWLLPNYQRPNLQVLTGRYVGKVLLSQNATTPRAVGVEFGTHKGNTHNVYAKHEVLLAAGSAVSPTILEYSGIGMKSILEPLGIDTVVDLPVGLNLQDQTTSTVRSRITSAGAGQGQAAWFATFNETFGDYTEKAHELLNTKLEQWAEEAVARGGFHNTTALLIQYENYRDWIVKDNVAYSELFLDTAGVASFDVWDLLPFTRGYVHILDKDPYLRHFAYDPQYFLNELDLLGQAAATQLARNISNSGAMQTYFAGETIPGDNLAYDADLRAWVEYIPENFRPNYHGVGTCSMMPKEMGGVVDNAARVYGVQGLRVIDGSIPPTQLSSHVMTVFYAMALKIADAILADY

SEQ ID NO: 2146 - protein, 576 aa, Aspergillus niger
IEASLLKDPKEVAGRTYDYIIAGGGLTGLTVAARLTENPNITVLVIESGSYESDRGPIIEDLNAYGDIFGSSVDHAYETVELPTNNQTALIRSGNGLGGSTLINGGTWTRPHKAQVDSWETVFGNEGWNWDSVAAYSLQAERARAPNAKQIAAGHYFNASCHGINGTVHAGPRDTGDDYSPIVKALMSAVEDRGVPTKKDLGCGDPHGVSMFPNTLHEDQVRSDAAREWLLPNYQRPNLQVLTGRYVGKVLLSQNATTPRAVGVEFGTHKGNTHNVYAKHEVLLAAGSAVSPTILEYSGIGMKSILEPLGIDTVVDLPVGLNLQDQTTSTVRSRITSAGAGQGQAAWFATFNETFGDYAEKAHELLNTKLEQWAEEAVARGGFHNTTALLIQYENYRDWIVKDNVAYSELFLDTAGVASFDVWDLLPFTRGYVHILDKDPYLRHFAYDPQYFLNELDLLGQAAATQLARNISNSGAMQTYFAGETIPGDNLAYDADLSAWVEYIPENFRPNYHGVGTCSMMPKEMGGVVDNAARVYGVQGLRVIDGSIPPTQMSSHVMTVFYAMALKIADAILADY

SEQ ID NO: 2147 - protein, 576 aa, Aspergillus niger
IEASLLKDPKEVAGRTYDYIIAGGGLTGLTVAAKLTENPNITVLVIESGSYESDRGPIIEDLNAYGDIFGSSVDHAYETVELATNNQTALIRSGNGLGGSTLINGGTWTRPHKAQVDSWETVFGNEGWNWDSVAAYSLQAERARAPNAKQIAAGHYFNASCHGLNGTVHAGPRDTGDDYSPIVKALMSAVEDRGVPTKKDLGCGDPHGVSMFPNTLHPDQVRSDAAREWLLPNYQRPNLQVLTGRYVGKVLLSQNATTPRAVGVEFGTHKGNTHNVYAKHEVLLAAGSAVSPTILEYSGIGMKSILEPLGIDTVVDLPVGLNLQDQTTSTVRSRITPAGAGQGQAAWFATFNETFGDYTEKAHELLNTKLEQWAEEAVARGGFHNTTALLIQYENYRDWIVKDNVAYSELFLDTAGVASFDVWDLLPFTRGYVHILDKDPYLRHFAYDPQYFLNELDLLGQAAATQLARNISNSGAMQTYFAGETIPGDNLAYDADLRAWVEYIPENFRPNYHGVGTCSMMPKEMGGVVDNAARVYGVQGLRVIDGSIPPTQMSSHVMTVFYAMALKIADAVLADY

SEQ ID NO: 2148 - protein, 576 aa, Aspergillus niger
IEASLLKDPKEVAGRTYDYIIAGGGLTGLTVAARLTENPNITVLVIESGSYESDRGPIIEDLNAYGDIFGSSVDHAYETVELPTNNQTALIRSGNGLGGSTLINGGTWTRPHKAQVDSWETVFGNEGWNWDSVAAYSLQAERARAPNAKQIAAGHYFNPSCHGINGTVHAGPRDTGDDYSPIVKALMSAVEDRGVPTKKDLGCGDPHGVSMFPNTLHPDQVRSDAAREWLLPNYQRPNLQVLTGRYVGKVLLSQNATTPRAVGVEFGTHKGNTHNVYAKHEVLLAAGSAVSPTILEYSGIGMKSILEPLGIDTVVDLPVGLNLQDQTTSTVRSRITSAGAGQGQAAWFATFNETFGDYAEKAHELLNTKLEQWAEEAVARGGFHNTTALLIQYENYRDWIVKDNVAYSELFLDTAGVASFDVWDLLPFTRGYVHILDKDPYLRHFAYDPQYFLNELDLLGQAAATQLARNISNSGAMQTYFAGETIPGDNLAYDADLSAWVEYIPENFRPNYHGVGTCSMMPKEMGGVVDNAARVYGVQGLRVIDGSIPPTQMSSHVMTVFYAMALKIADAILADY

SEQ ID NO: 2149 - protein, 576 aa, Aspergillus niger
IEASLLKDPKEVAGRTYDYIIAGGGLTGLTVAAKLTENPNITVLVIESGSYESDRGPIIEDLNAYGDIFGSSVDHAYETVELATNNQTALIRSGNGLGGSTLINGGTWTRPHKAQVDSWETVFGNEGWNWDSVAAYSLQAERARAPNAKQIAAGHYFNASCHGLNGTVHAGPRDTGDDYSPIVKALMSAVEDRGVPTKKDLGCGDPHGVSMFPNTLHEDQVRSDAAREWLLPNYQRPNLQVLTGQYVGKVLLSQNATTPRAVGVEFGTHKGNTHNVYAKHEVLLAAGSAVSPTILEYSGIGMKSILEPLGIDTVVDLPVGLNLQDQTTSTVRSRITSAGAGQGQAAWFATFNETFGDYTEKAHELLNTKLEQWAEEAVARGGFHNTTALLIQYENYRDWIVKDNVAYSELFLDTAGVASFDVWDLLPFTRGYVHILDKDPYLRHFAYDPQYFLNELDLLGQAAATQLARNISNSGAMQTYFAGETIPGDNLAYDADLSAWVEYIPENFRPNYHGVGTCSMMPKEMGGVVDNAARVYGVQGLRVIDGSIPPTQLSSHVMTVFYAMALKIADAILADY

SEQ ID NO: 2150 - protein, 576 aa, Aspergillus niger
IEASLLKDPKEVAGRTYDYIIAGGGLTGLTVAARLTENPNITVLVIESGSYESDRGPIIEDLNAYGDIFGSSVDHAYETVELATNNQTALIRSGNGLGGSTLINGGTWTRPHKAQVDSWETVFGNEGWNWDSVAAYSLQAERARAPNAKQIAAGHYFNPSCHGINGTVHAGPRDTGDDYSPIVKALMSAVEDRGVPTKKDLGCGDPHGVSMFPNTLHPDQVRSDAAREWLLPNYQRPNLQVLTGRYVGKVLLSQNATTPRAVGVEFGTHKGNTHNVYAKHEVLLAAGSAVSPTILEYSGIGMKSILEPLGIDTVVDLPVGLNLQDQTTSTVRSRITSAGAGQGQAAWFATFNETFGDYTEKAHELLNTKLEQWAEEAVARGGFHNTTALLIQYENYRDWIVKDNVAYSELFLDTAGVASFDVWDLLPFTRGYVHILDKDPYLRHFAYDPQYFLNELDLLGQAAATQLARNISNSGAMQTYFAGETIPGDNLAYDADLRAWVEYIPENFRPNYHGVGTCSMMPKEMGGVVDNAARVYGVQGLRVIDGSIPPTQLSSHVMTVFYAMALKIADAILADY

SEQ ID NO: 2151 - protein, 576 aa, Aspergillus niger
IEASLLKDPKEVAGRTYDYIIAGGGLTGLTVAARLTENPNITVLVIESGSYESDRGPIIEDLNAYGDIFGSSVDHAYETVELPTNNQTALIRSGNGLGGSTLINGGTWTRPHKAQVDSWETVFGNEGWNWDSVAAYSLQAERARAPNAKQIAAGHYFNASCHGINGTVHAGPRDTGDDYSPIVKALMSAVEDRGVPTKKDLGCGDPHGVSMFPNTLHEDQVRSDAAREWLLPNYQRPNLQVLTGQYVGKVLLSQNATTPRAVGVEFGTHKGNTHNVYAKHEVLLAAGSAVSPTILEYSGIGMKSILEPLGIDTVVDLPVGLNLQDQTTSTVRSRITSAGAGQGQAAWFATFNETFGDYTEKAHELLNTKLEQWAEEAVARGGFHNTTALLIQYENYRDWIVKDNVAYSELFLDTAGVASFDVWDLLPFTRGYVHILDKDPYLRHFAYDPQYFLNELDLLGQAAATQLARNISNSGAMQTYFAGETIPGDNLAYDADLRAWVEYIPENFRPNYHGVGTCSMMPKEMGGVVDNAARVYGVQGLRVIDGSIPPTQLSSHVMTVFYAMALKIADAILADY

SEQ ID NO: 2152 - protein, 576 aa, Aspergillus niger
IEASLLKDPKEVAGRTYDYIIAGGGLTGLTVAAKLTENPNITVLVIESGSYESDRGPIIEDLNAYGDIFGSSVDHAYETVELPTNNQTALIRSGNGLGGSTLINGGTWTRPHKAQVDSWETVFGNEGWNWDSVAAYSLQAERARAPNAKQIAAGHYFNPSCHGLNGTVHAGPRDTGDDYSPIVKALMSAVEDRGVPTKKDLGCGDPHGVSMFPNTLHPDQVRSDAAREWLLPNYQRPNLQVLTGRYVGKVLLSQNATTPRAVGVEFGTHKGNTHNVYAKHEVLLAAGSAVSPTILEYSGIGMKSILEPLGIDTVVDLPVGLNLQDQTTSTVRSRITPAGAGQGQAAWFATFNETFGDYTEKAHELLNTKLEQWAEEAVARGGFHNTTALLIQYENYRDWIVKDNVAYSELFLDTAGVASFDVWDLLPFTRGYVHILDKDPYLRHFAYDPQYFLNELDLLGQAAATQLARNISNSGAMQTYFAGETIPGDNLAYDADLRAWVEYIPENFRPNYHGVGTCSMMPKEMGGVVDNAARVYGVQGLRVIDGSIPPTQLSSHVMTVFYAMALKIADAVLADY

SEQ ID NO: 2153 - protein, 576 aa, Aspergillus niger
IEASLLKDPKEVAGRTYDYIIAGGGLTGLTVAARLTENPNITVLVIESGSYESDRGPIIEDLNAYGDIFGSSVDHAYETVELATNNQTALIRSGNGLGGSTLINGGTWTRPHKAQVDSWETVFGNEGWNWDSVAAYSLQAERARAPNAKQIAAGHYFNASCHGINGTVHAGPRDTGDDYSPIVKALMSAVEDRGVPTKKDLGCGDPHGVSMFPNTLHPDQVRSDAAREWLLPNYQRPNLQVLTGQYVGKVLLSQNATTPRAVGVEFGTHKGNTHNVYAKHEVLLAAGSAVSPTILEYSGIGMKSILEPLGIDTVVDLPVGLNLQDQTTSTVRSRITSAGAGQGQAAWFATFNETFGDYTEKAHELLNTKLEQWAEEAVARGGFHNTTALLIQYENYRDWIVKDNVAYSELFLDTAGVASFDVWDLLPFTRGYVHILDKDPYLRHFAYDPQYFLNELDLLGQAAATQLARNISNSGAMQTYFAGETIPGDNLAYDADLRAWVEYIPENFRPNYHGVGTCSMMPKEMGGVVDNAARVYGVQGLRVIDGSIPPTQMSSHVMTVFYAMALKIADAILADY

SEQ ID NO: 2154 - protein, 576 aa, Aspergillus niger
IEASLLKDPKEVAGRTYDYIIAGGGLTGLTVAAKLTENPNITVLVIESGSYESDRGPIIEDLNAYGDIFGSSVDHAYETVELPTNNRTALIRSGNGLGGSTLINGGTWTRPHKAQVDSWETVFGNEGWNWDSVAAYSLQAERARAPNAKQIAAGHYFNPSCHGLNGTVHAGPRDTGDDYSPIVKALMSAVEDRGVPTKKDLGCGDPHGVSMFPNTLHPDQVRSDAAREWLLPNYQRPNLQVLTGRYVGKVLLSQNATTPRAVGVEFGTHKGNTHNVYAKHEVLLAAGSAVSPTILEYSGIGMKSILEPLGIDTVVDLPVGLNLQDQTTSTVRSRITPAGAGQGQAAWFATFNETFGDYTEKAHELLNTKLEQWAEEAVARGGFHNTTALLIQYENYRDWIVKDNVAYSELFLDTAGVASFDVWDLLPFTRGYVHILDKDPYLRHFAYDPQYFLNELDLLGQAAATQLARNISNSGAMQTYFAGETIPGDNLAYDADLRAWVEYIPENFRPNYHGVGTCSMMPKEMGGVVDNAARVYGVQGLRVIDGSIPPTQLSSHVMTVFYAMALKIADAILADY

SEQ ID NO: 2155 - protein, 576 aa, Aspergillus niger
IEASLLKDPKEVAGRTYDYIIAGGGLTGLTVAARLTENPNITVLVIESGSYESDRGPIIEDLNAYGDIFGSSVDHAYETVELATNNQTALIRSGNGLGGSTLINGGTWTRPHKAQVDSWETVFGNEGWNWDSVAAYSLQAERARAPNAKQIAAGHYFNASCHGINGTVHAGPRDTGDDYSPIVKALMSAVEDRGVPTKKDLGCGDPHGVSMFPNTLHPDQVRSDAAREWLLPNYQRPNLQVLTGQYVGKVLLSQNATTPRAVGVEFGTHKGNTHNVYAKHEVLLAAGSAVSPTILEYSGIGMKSILEPLGIDTVVDLPVGLNLQDQTTSTVRSRITSAGAGQGQAAWFATFNETFGDYTEKAHELLNTKLEQWAEEAVARGGFHNTTALLIQYENYRDWIVKDNVAYSELFLDTAGVASFDVWDLLPFTRGYVHILDKDPYLRHFAYDPQYFLNELDLLGQAAATQLARNISNSGAMQTYFAGETIPGDNLAYDADLRAWVEYIPENFRPNYHGVGTCSMMPKEMGGVVDNAARVYGVQGLRVIDGSIPPTQLSSHVMTVFYAMALKIADAILADY

SEQ ID NO: 2156 - protein, 576 aa, Aspergillus niger
IEASLLKDPKEVAGRTYDYIIAGGGLTGLTVAARLTENPNITVLVIESGSYESDRGPIIEDLNAYGDIFGSSVDHAYETVELPTNNQTALIRSGNGLGGSTLINGGTWTRPHKAQVDSWETVFGNEGWNWDSVAAYSLQAERARAPNAKQIAAGHYFNASCHGINGTVHAGPRDTGDDYSPIVKALMSAVEDRGVPTKKDLGCGDPHGVSMFPNTLHEDQVRSDAAREWLLPNYQRPNLQVLTGQYVGKVLLSQNATTPRAVGVEFGTHKGNTHNVYAKHEVLLAAGSAVSPTILEYSGIGMKSILEPLGIDTVVDLPVGLNLQDQTTSTVRSRITSAGAGQGQAAWFATFNETFGDYTEKAHELLNTKLEQWAEEAVARGGFHNTTALLIQYENYRDWIVKDNVAYSELFLDTAGVASFDVWDLLPFTRGYVHILDKDPYLRHFAYDPQYFLNELDLLGQAAATQLARNISNSGAMQTYFAGETIPGDNLAYDADLRAWVEYIPENFRPNYHGVGTCSMMPKEMGGVVDNAARVYGVQGLRVIDGSIPPTQMSSHVMTVFYAMALKIADAILADY

SEQ ID NO: 2157 - protein, 576 aa, Aspergillus niger
IEASLLKDPKEVAGRTYDYIIAGGGLTGLTVAAKLTENPNITVLVIESGSYESDRGPIIEDLNAYGDIFGSSVDHAYETVELPTNNRTALIRSGNGLGGSTLINGGTWTRPHKAQVDSWETVFGNEGWNWDSVAAYSLQAERARAPNAKQIAAGHYFNASCHGLNGTVHAGPRDTGDDYSPIVKALMSAVEDRGVPTKKDLGCGDPHGVSMFPNTLHEDQVRSDAAREWLLPNYQRPNLQVLTGQYVGKVLLSQNATTPRAVGVEFGTHKGNTHNVYAKHEVLLAAGSAVSPTILEYSGIGMKSILEPLGIDTVVDLPVGLNLQDQTTSTVRSRITSAGAGQGQAAWFATFNETFGDYTEKAHELLNTKLEQWAEEAVARGGFHNTTALLIQYENYRDWIVKDNVAYSELFLDTAGVASFDVWDLLPFTRGYVHILDKDPYLRHFAYDPQYFLNELDLLGQAAATQLARNISNSGAMQTYFAGETIPGDNLAYDADLRAWVEYIPENFRPNYHGVGTCSMMPKEMGGVVDNAARVYGVQGLRVIDGSIPPTQMSSHVMTVFYAMALKIADAILADY

SEQ ID NO: 2158 - protein, 576 aa, Aspergillus niger
IEASLLKDPKEVAGRTYDYIIAGGGLTGLTVAARLTENPNITVLVIESGSYESDRGPIIEDLNAYGDIFGSSVDHAYETVELATNNQTALIRSGNGLGGSTLINGGTWTRPHKAQVDSWETVFGNEGWNWDSVAAYSLQAERARAPNAKQIAAGHYFNASCHGINGTVHAGPRDTGDDYSPIVKALMSAVEDRGVPTKKDLGCGDPHGVSMFPNTLHPDQVRSDAAREWLLPNYQRPNLQVLTGRYVGKVLLSQNATTPRAVGVEFGTHKGNTHNVYAKHEVLLAAGSAVSPTILEYSGIGMKSILEPLGIDTVVDLPVGLNLQDQTTSTVRSRITPAGAGQGQAAWFATFNETFGDYTEKAHELLNTKLEQWAEEAVARGGFHNTTALLIQYENYRDWIVKDNVAYSELFLDTAGVASFDVWDLLPFTRGYVHILDKDPYLRHFAYDPQYFLNELDLLGQAAATQLARNISNSGAMQTYFAGETIPGDNLAYDADLRAWVEYIPENFRPNYHGVGTCSMMPKEMGGVVDNAARVYGVQGLRVIDGSIPPTQMSSHVMTVFYAMALKIADAILADY

SEQ ID NO: 2159 - protein, 576 aa, Aspergillus niger
IEASLLTDPKEVAGRTVDYIIAGGGLTGLTSAARLTENPDITVLVIEKGSYESDRGAIIEDLNAYGDIFGSSVDHAYETVELATNNATALIRSGNGLGGSTLLNGGTWTRPHKAQVDSWETVFGNEGWNWDSVAAYSLQAERARAPNAKQIAAGHYFNASCHGINGTVHAGPRDTGDDYSPIVKALMSAVEDRGVPTKKDLGCGDPHGVSMFPNTLHEDQVRSDAAREWLLPNYQRPNLEVLTGQYVGKVLLSQNATTPRAVGVEFGTHKGNTHNVYAKHEVLLAAGSAVSPTILEYSGIGMKSILEPLGIDTVVDLPVGLNLQDQTTSTVRSRITSAGAGQGQAAWFATFNETFGDYAEKAHELLNTKLEQWAEEAVARGGFHNTTALLIQYENYRDWIVKDNVAYSELFLDTAGVASFDVWDLLPFTRGYVHILDKDPYLRHFAYDPQYFLNELDLLGQAAATQLARNISNSGAMQTYFAGETIPGDNLAYDADLSAWVEYIPYNFRPNYHGVGTCSMMPKEMGGVVDNAARVYGVQGLRVIDGSIPPTQMSSHVSTVFYAMALKIADAILADY

SEQ ID NO: 2160 - protein, 576 aa, Aspergillus niger
IEASLLKDPKEVAGRTYDYIIAGGGLTGLTVAARLTENPNITVLVIESGSYESDRGPIIEDLNAYGDIFGSSVDHAYETVELPTNNQTALIRSGNGLGGSTLINGGTWTRPHKAQVDSWETVFGNEGWNWDSVAAYSLQAERARAPNAKQIAAGHYFNASCHGINGTVHAGPRDTGDDYSPIVKALMSAVEDRGVPTKKDLGCGDPHGVSMFPNTLHPDQVRSDAAREWLLPNYQRPNLQVLTGQYVGKVLLSQNATTPRAVGVEFGTHKGNTHNVYAKHEVLLAAGSAVSPTILEYSGIGMKSILEPLGIDTVVDLPVGLNLQDQTTSTVRSRITSAGAGQGQAAWFATFNETFGDYAEKAHELLNTKLEQWAEEAVARGGFHNTTALLIQYENYRDWIVKDNVAYSELFLDTAGVASFDVWDLLPFTRGYVHILDKDPYLRHFAYDPQYFLNELDLLGQAAATQLARNISNSGAMQTYFAGETIPGDNLAYDADLSAWVEYIPENFRPNYHGVGTCSMMPKEMGGVVDNAARVYGVQGLRVIDGSIPPTQMSSHVMTVFYAMALKIADAILADY

SEQ ID NO: 2161 - protein, 576 aa, Aspergillus niger
IEASLLKDPKEVAGRTYDYIIAGGGLTGLTVAARLTENPNITVLVIESGSYESDRGPIIEDLNAYGDIFGSSVDHAYETVELPTNNQTALIRSGNGLGGSTLINGGTWTRPHKAQVDSWETVFGNEGWNWDSVAAYSLQAERARAPNAKQIAAGHYFNPSCHGLNGTVHAGPRDTGDDYSPIVKALMSAVEDRGVPTKKDLGCGDPHGVSMFPNTLHPDQVRSDAAREWLLPNYQRPNLQVLTGRYVGKVLLSQNATTPRAVGVEFGTHKGNTHNVYAKHEVLLAAGSAVSPTILEYSGIGMKSILEPLGIDTVVDLPVGLNLQDQTTSTVRSRITSAGAGQGQAAWFATFNETFGDYAEKAHELLNTKLEQWAEEAVARGGFHNTTALLIQYENYRDWIVKDNVAYSELFLDTAGVASFDVWDLLPFTRGYVHILDKDPYLRHFAYDPQYFLNELDLLGQAAATQLARNISNSGAMQTYFAGETIPGDNLAYDADLSAWVEYIPENFRPNYHGVGTCSMMPKEMGGVVDNAARVYGVQGLRVIDGSIPPTQMSSHVMTVFYAMALKIADAILADY

SEQ ID NO: 2162 - protein, 576 aa, Aspergillus niger
IEASLLKDPKEVAGRTYDYIIAGGGLTGLTVAAKLTENPNITVLVIESGSYESDRGPIIEDLNAYGDIFGSSVDHAYETVELATNNQTALIRSGNGLGGSTLINGGTWTRPHKAQVDSWETVFGNEGWNWDSVAAYSLQAERARAPNAKQIAAGHYFNPSCHGLNGTVHAGPRDTGDDYSPIVKALMSAVEDRGVPTKKDLGCGDPHGVSMFPNTLHPDQVRSDAAREWLLPNYQRPNLQVLTGQYVGKVLLSQNATTPRAVGVEFGTHKGNTHNVYAKHEVLLAAGSAVSPTILEYSGIGMKSILEPLGIDTVVDLPVGLNLQDQTTSTVRSRITSAGAGQGQAAWFATFNETFGDYTEKAHELLNTKLEQWAEEAVARGGFHNTTALLIQYENYRDWIVKDNVAYSELFLDTAGVASFDVWDLLPFTRGYVHILDKDPYLRHFAYDPQYFLNELDLLGQAAATQLARNISNSGAMQTYFAGETIPGDNLAYDADLRAWVEYIPENFRPNYHGVGTCSMMPKEMGGVVDNAARVYGVQGLRVIDGSIPPTQLSSHVMTVFYAMALKIADAILADY

SEQ ID NO: 2163 - protein, 576 aa, Aspergillus niger
IEASLLTDPKDVSGRTVDYIIAGGGLVGLTTAAKLTENPNISVLVIESGCYESDRGPIIEDLNAYGDIFGSSVDHAYETVELATNNQTALVRSGNGLGGSTLINGGTWTRPHKAQVDSWETVFGNEGWNWDNVAAYSLQAERARAPNAKQIAAGHYFNTSCHGVNGTVHAGPRDTGDDYSPIVKALMSAVEDRGVPTKKDFGCGDPHGVSMFPNTLHEDQVRSDAAREWLLPNYQRPNLQVLCGQYVGKVLLSQNGTTPRAVGVEFGTHKGNTHNVYAKHEVLLAAGSAVSPTILEYSGIGMKSILEPLGIDTVVDLPVGLNLQDQTTATVRSRITSAGAGQGQAAWFATFNETFGDYSEKAHELLNTKLEQWAEEAVARGGFHNTTALLIQYENYRDWIVNHNVAYSELFLDTAGVASFDVWDLLPFTRGYVHILDKDPYLHHFAYDPQYFLNELDLLGQAAATQLARNISNSGAMQTYFAGETIPGDNLAYDADLSAWTEYIPYHFRPNYHGVGTCSMMPKEMGGVVDNAARVYGVQGLRVIDGSIPPTQMSSHVMTVFYAMALKISDAILEDY

SEQ ID NO: 2164 - protein, 576 aa, Aspergillus niger
IEASLLKDPKEVAGRTYDYIIAGGGLTGLTVAAKLTENPNITVLVIESGSYESDRGPIIEDLNAYGDIFGSSVDHAYETVELATNNQTALIRSGNGLGGSTLINGGTWTRPHKAQVDSWETVFGNEGWNWDSVAAYSLQAERARAPNAKQIAAGHYFNASCHGINGTVHAGPRDTGDDYSPIVKALMSAVEDRGVPTKKDLGCGDPHGVSMFPNTLHPDQVRSDAAREWLLPNYQRPNLQVLTGRYVGKVLLSQNATTPRAVGVEFGTHKGNTHNVYAKHEVLLAAGSAVSPTILEYSGIGMKSILEPLGIDTVVDLPVGLNLQDQTTSTVRSRITPAGAGQGQAAWFATFNETFGDYTEKAHELLNTKLEQWAEEAVARGGFHNTTALLIQYENYRDWIVKDNVAYSELFLDTAGVASFDVWDLLPFTRGYVHILDKDPYLRHFAYDPQYFLNELDLLGQAAATQLARNISNSGAMQTYFAGETIPGDNLAYDADLRAWVEYIPENFRPNYHGVGTCSMMPKEMGGVVDNAARVYGVQGLRVIDGSIPPTQLSSHVMTVFYAMALKIADAVLADY

SEQ ID NO: 2165 - protein, 576 aa, Aspergillus niger
IEASLLKDPKEVAGRTYDYIIAGGGLTGLTVAAKLTENPNITVLVIESGSYESDRGPIIEDLNAYGDIFGSSVDHAYETVELPTNNRTALIRSGNGLGGSTLINGGTWTRPHKAQVDSWETVFGNEGWNWDSVAAYSLQAERARAPNAKQIAAGHYFNPSCHGLNGTVHAGPRDTGDDYSPIVKALMSAVEDRGVPTKKDLGCGDPHGVSMFPNTLHPDQVRSDAAREWLLPNYQRPNLQVLTGRYVGKVLLSQNATTPRAVGVEFGTHKGNTHNVYAKHEVLLAAGSAVSPTILEYSGIGMKSILEPLGIDTVVDLPVGLNLQDQTTSTVRSRITPAGAGQGQAAWFATFNETFGDYTEKAHELLNTKLEQWAEEAVARGGFHNTTALLIQYENYRDWIVKDNVAYSELFLDTAGVASFDVWDLLPFTRGYVHILDKDPYLRHFAYDPQYFLNELDLLGQAAATQLARNISNSGAMQTYFAGETIPGDNLAYDADLRAWVEYIPENFRPNYHGVGTCSMMPKEMGGVVDNAARVYGVQGLRVIDGSIPPTQMSSHVMTVFYAMALKIADAILADY

SEQ ID NO: 2166 - protein, 576 aa, Aspergillus niger
IEASLLKDPKEVAGRTYDYIIAGGGLTGLTVAAKLTENPNITVLVIESGSYESDRGPIIEDLNAYGDIFGSSVDHAYETVELPTNNRTALIRSGNGLGGSTLINGGTWTRPHKAQVDSWETVFGNEGWNWDSVAAYSLQAERARAPNAKQIAAGHYFNASCHGLNGTVHAGPRDTGDDYSPIVKALMSAVEDRGVPTKKDLGCGDPHGVSMFPNTLHEDQVRSDAAREWLLPNYQRPNLQVLTGQYVGKVLLSQNATTPRAVGVEFGTHKGNTHNVYAKHEVLLAAGSAVSPTILEYSGIGMKSILEPLGIDTVVDLPVGLNLQDQTTSTVRSRITSAGAGQGQAAWFATFNETFGDYTEKAHELLNTKLEQWAEEAVARGGFHNTTALLIQYENYRDWIVKDNVAYSELFLDTAGVASFDVWDLLPFTRGYVHILDKDPYLRHFAYDPQYFLNELDLLGQAAATQLARNISNSGAMQTYFAGETIPGDNLAYDADLSAWVEYIPENFRPNYHGVGTCSMMPKEMGGVVDNAARVYGVQGLRVIDGSIPPTQMSSHVMTVFYAMALKIADAILADY

SEQ ID NO: 2167 - protein, 576 aa, Aspergillus niger
IEASLLKDPKEVAGRTYDYIIAGGGLTGLTVAAKLTENPNITVLVIESGSYESDRGPIIEDLNAYGDIFGSSVDHAYETVELATNNQTALIRSGNGLGGSTLINGGTWTRPHKAQVDSWETVFGNEGWNWDSVAAYSLQAERARAPNAKQIAAGHYFNASCHGINGTVHAGPRDTGDDYSPIVKALMSAVEDRGVPTKKDLGCGDPHGVSMFPNTLHEDQVRSDAAREWLLPNYQRPNLQVLTGRYVGKVLLSQNATTPRAVGVEFGTHKGNTHNVYAKHEVLLAAGSAVSPTILEYSGIGMKSILEPLGIDTVVDLPVGLNLQDQTTSTVRSRITSAGAGQGQAAWFATFNETFGDYAEKAHELLNTKLEQWAEEAVARGGFHNTTALLIQYENYRDWIVKDNVAYSELFLDTAGVASFDVWDLLPFTRGYVHILDKDPYLRHFAYDPQYFLNELDLLGQAAATQLARNISNSGAMQTYFAGETIPGDNLAYDADLSAWVEYIPENFRPNYHGVGTCSMMPKEMGGVVDNAARVYGVQGLRVIDGSIPPTQMSSHVMTVFYAMALKIADAILADY

SEQ ID NO: 2168 - protein, 576 aa, Aspergillus niger
IEASLLKDPKEVAGRTYDYIIAGGGLTGLTVAAKLTENPNITVLVIESGSYESDRGPIIEDLNAYGDIFGSSVDHAYETVELATNNQTALIRSGNGLGGSTLINGGTWTRPHKAQVDSWETVFGNEGWNWDSVAAYSLQAERARAPNAKQIAAGHYFNASCHGINGTVHAGPRDTGDDYSPIVKALMSAVEDRGVPTKKDLGCGDPHGVSMFPNTLHEDQVRSDAAREWLLPNYQRPNLQVLTGQYVGKVLLSQNATTPRAVGVEFGTHKGNTHNVYAKHEVLLAAGSAVSPTILEYSGIGMKSILEPLGIDTVVDLPVGLNLQDQTTSTVRSRITSAGAGQGQAAWFATFNETFGDYTEKAHELLNTKLEQWAEEAVARGGFHNTTALLIQYENYRDWIVKDNVAYSELFLDTAGVASFDVWDLLPFTRGYVHILDKDPYLRHFAYDPQYFLNELDLLGQAAATQLARNISNSGAMQTYFAGETIPGDNLAYDADLSAWVEYIPENFRPNYHGVGTCSMMPKEMGGVVDNAARVYGVQGLRVIDGSIPPTQMSSHVMTVFYAMALKIADAILADY

SEQ ID NO: 2169 - protein, 576 aa, Aspergillus niger
IEASLLKDPKEVAGRTYDYIIAGGGLTGLTVAARLTENPNITVLVIESGSYESDRGPIIEDLNAYGDIFGSSVDHAYETVELATNNQTALIRSGNGLGGSTLINGGTWTRPHKAQVDSWETVFGNEGWNWDSVAAYSLQAERARAPNAKQIAAGHYFNASCHGINGTVHAGPRDTGDDYSPIVKALMSAVEDRGVPTKKDLGCGDPHGVSMFPNTLHPDQVRSDAAREWLLPNYQRPNLQVLTGRYVGKVLLSQNATTPRAVGVEFGTHKGNTHNVYAKHEVLLAAGSAVSPTILEYSGIGMKSILEPLGIDTVVDLPVGLNLQDQTTSTVRSRITSAGAGQGQAAWFATFNETFGDYAEKAHELLNTKLEQWAEEAVARGGFHNTTALLIQYENYRDWIVKDNVAYSELFLDTAGVASFDVWDLLPFTRGYVHILDKDPYLRHFAYDPQYFLNELDLLGQAAATQLARNISNSGAMQTYFAGETIPGDNLAYDADLSAWVEYIPENFRPNYHGVGTCSMMPKEMGGVVDNAARVYGVQGLRVIDGSIPPTQMSSHVMTVFYAMALKIADAILADY

SEQ ID NO: 2170 - protein, 576 aa, Aspergillus niger
IEASLLKDPKEVAGRTYDYIIAGGGLTGLTVAAKLTENPNITVLVIESGSYESDRGPIIEDLNAYGDIFGSSVDHAYETVELATNNQTALIRSGNGLGGSTLINGGTWTRPHKAQVDSWETVFGNEGWNWDSVAAYSLQAERARAPNAKQIAAGHYFNPSCHGLNGTVHAGPRDTGDDYSPIVKALMSAVEDRGVPTKKDLGCGDPHGVSMFPNTLHPDQVRSDAAREWLLPNYQRPNLQVLTGRYVGKVLLSQNATTPRAVGVEFGTHKGNTHNVYAKHEVLLAAGSAVSPTILEYSGIGMKSILEPLGIDTVVDLPVGLNLQDQTTSTVRSRITPAGAGQGQAAWFATFNETFGDYTEKAHELLNTKLEQWAEEAVARGGFHNTTALLIQYENYRDWIVKDNVAYSELFLDTAGVASFDVWDLLPFTRGYVHILDKDPYLRHFAYDPQYFLNELDLLGQAAATQLARNISNSGAMQTYFAGETIPGDNLAYDADLRAWVEYIPENFRPNYHGVGTCSMMPKEMGGVVDNAARVYGVQGLRVIDGSIPPTQMSSHVMTVFYAMALKIADAILADY

SEQ ID NO: 2171 - protein, 576 aa, Aspergillus niger
IEASLLKDPKEVAGRTYDYIIAGGGLTGLTVAAKLTENPNITVLVIESGSYESDRGPIIEDLNAYGDIFGSSVDHAYETVELPTNNQTALIRSGNGLGGSTLINGGTWTRPHKAQVDSWETVFGNEGWNWDSVAAYSLQAERARAPNAKQIAAGHYFNASCHGINGTVHAGPRDTGDDYSPIVKALMSAVEDRGVPTKKDLGCGDPHGVSMFPNTLHEDQVRSDAAREWLLPNYQRPNLQVLTGQYVGKVLLSQNATTPRAVGVEFGTHKGNTHNVYAKHEVLLAAGSAVSPTILEYSGIGMKSILEPLGIDTVVDLPVGLNLQDQTTSTVRSRITSAGAGQGQAAWFATFNETFGDYAEKAHELLNTKLEQWAEEAVARGGFHNTTALLIQYENYRDWIVKDNVAYSELFLDTAGVASFDVWDLLPFTRGYVHILDKDPYLRHFAYDPQYFLNELDLLGQAAATQLARNISNSGAMQTYFAGETIPGDNLAYDADLSAWVEYIPENFRPNYHGVGTCSMMPKEMGGVVDNAARVYGVQGLRVIDGSIPPTQMSSHVMTVFYAMALKIADAILADY

SEQ ID NO: 2172 - protein, 576 aa, Aspergillus niger
IEASLLKDPKEVAGRTYDYIIAGGGLTGLTVAAKLTENPNITVLVIESGSYESDRGPIIEDLNAYGDIFGSSVDHAYETVELATNNQTALIRSGNGLGGSTLINGGTWTRPHKAQVDSWETVFGNEGWNWDSVAAYSLQAERARAPNAKQIAAGHYFNASCHGINGTVHAGPRDTGDDYSPIVKALMSAVEDRGVPTKKDLGCGDPHGVSMFPNTLHEDQVRSDAAREWLLPNYQRPNLQVLTGQYVGKVLLSQNATTPRAVGVEFGTHKGNTHNVYAKHEVLLAAGSAVSPTILEYSGIGMKSILEPLGIDTVVDLPVGLNLQDQTTSTVRSRITSAGAGQGQAAWFATFNETFGDYTEKAHELLNTKLEQWAEEAVARGGFHNTTALLIQYENYRDWIVKDNVAYSELFLDTAGVASFDVWDLLPFTRGYVHILDKDPYLRHFAYDPQYFLNELDLLGQAAATQLARNISNSGAMQTYFAGETIPGDNLAYDADLRAWVEYIPENFRPNYHGVGTCSMMPKEMGGVVDNAARVYGVQGLRVIDGSIPPTQMSSHVMTVFYAMALKIADAILADY

SEQ ID NO: 2173 - protein, 576 aa, Aspergillus niger
IEASLLKDPKEVAGRTYDYIIAGGGLTGLTVAAKLTENPNITVLVIESGSYESDRGPIIEDLNAYGDIFGSSVDHAYETVELATNNQTALIRSGNGLGGSTLINGGTWTRPHKAQVDSWETVFGNEGWNWDSVAAYSLQAERARAPNAKQIAAGHYFNASCHGLNGTVHAGPRDTGDDYSPIVKALMSAVEDRGVPTKKDLGCGDPHGVSMFPNTLHEDQVRSDAAREWLLPNYQRPNLQVLTGQYVGKVLLSQNATTPRAVGVEFGTHKGNTHNVYAKHEVLLAAGSAVSPTILEYSGIGMKSILEPLGIDTVVDLPVGLNLQDQTTSTVRSRITSAGAGQGQAAWFATFNETFGDYTEKAHELLNTKLEQWAEEAVARGGFHNTTALLIQYENYRDWIVKDNVAYSELFLDTAGVASFDVWDLLPFTRGYVHILDKDPYLRHFAYDPQYFLNELDLLGQAAATQLARNISNSGAMQTYFAGETIPGDNLAYDADLSAWVEYIPENFRPNYHGVGTCSMMPKEMGGVVDNAARVYGVQGLRVIDGSIPPTQMSSHVMTVFYAMALKIADAILADY

SEQ ID NO: 2174 - protein, 576 aa, Aspergillus niger
IEASLLKDPKEVAGRTYDYIIAGGGLTGLTVAARLTENPNITVLVIESGSYESDRGPIIEDLNAYGDIFGSSVDHAYETVELATNNQTALIRSGNGLGGSTLINGGTWTRPHKAQVDSWETVFGNEGWNWDSVAAYSLQAERARAPNAKQIAAGHYFNASCHGLNGTVHAGPRDTGDDYSPIVKALMSAVEDRGVPTKKDLGCGDPHGVSMFPNTLHPDQVRSDAAREWLLPNYQRPNLQVLTGRYVGKVLLSQNATTPRAVGVEFGTHKGNTHNVYAKHEVLLAAGSAVSPTILEYSGIGMKSILEPLGIDTVVDLPVGLNLQDQTTSTVRSRITPAGAGQGQAAWFATFNETFGDYTEKAHELLNTKLEQWAEEAVARGGFHNTTALLIQYENYRDWIVKDNVAYSELFLDTAGVASFDVWDLLPFTRGYVHILDKDPYLRHFAYDPQYFLNELDLLGQAAATQLARNISNSGAMQTYFAGETIPGDNLAYDADLRAWVEYIPENFRPNYHGVGTCSMMPKEMGGVVDNAARVYGVQGLRVIDGSIPPTQMSSHVMTVFYAMALKIADAILADY

SEQ ID NO: 2175 - protein, 576 aa, Aspergillus niger
IEASLLKDPKEVAGRTYDYIIAGGGLTGLTVAARLTENPNITVLVIESGSYESDRGPIIEDLNAYGDIFGSSVDHAYETVELPTNNQTALIRSGNGLGGSTLINGGTWTRPHKAQVDSWETVFGNEGWNWDSVAAYSLQAERARAPNAKQIAAGHYFNASCHGINGTVHAGPRDTGDDYSPIVKALMSAVEDRGVPTKKDLGCGDPHGVSMFPNTLHPDQVRSDAAREWLLPNYQRPNLQVLTGRYVGKVLLSQNATTPRAVGVEFGTHKGNTHNVYAKHEVLLAAGSAVSPTILEYSGIGMKSILEPLGIDTVVDLPVGLNLQDQTTSTVRSRITPAGAGQGQAAWFATFNETFGDYTEKAHELLNTKLEQWAEEAVARGGFHNTTALLIQYENYRDWIVKDNVAYSELFLDTAGVASFDVWDLLPFTRGYVHILDKDPYLRHFAYDPQYFLNELDLLGQAAATQLARNISNSGAMQTYFAGETIPGDNLAYDADLRAWVEYIPENFRPNYHGVGTCSMMPKEMGGVVDNAARVYGVQGLRVIDGSIPPTQMSSHVMTVFYAMALKIADAVLADY

SEQ ID NO: 2176 - protein, 576 aa, Aspergillus niger
IEASLLKDPKEVAGRTYDYIIAGGGLTGLTVAAKLTENPNITVLVIESGSYESDRGPIIEDLNAYGDIFGSSVDHAYETVELATNNQTALIRSGNGLGGSTLINGGTWTRPHKAQVDSWETVFGNEGWNWDSVAAYSLQAERARAPNAKQIAAGHYFNPSCHGLNGTVHAGPRDTGDDYSPIVKALMSAVEDRGVPTKKDLGCGDPHGVSMFPNTLHPDQVRSDAAREWLLPNYQRPNLQVLTGQYVGKVLLSQNATTPRAVGVEFGTHKGNTHNVYAKHEVLLAAGSAVSPTILEYSGIGMKSILEPLGIDTVVDLPVGLNLQDQTTSTVRSRITSAGAGQGQAAWFATFNETFGDYTEKAHELLNTKLEQWAEEAVARGGFHNTTALLIQYENYRDWIVKDNVAYSELFLDTAGVASFDVWDLLPFTRGYVHILDKDPYLRHFAYDPQYFLNELDLLGQAAATQLARNISNSGAMQTYFAGETIPGDNLAYDADLRAWVEYIPENFRPNYHGVGTCSMMPKEMGGVVDNAARVYGVQGLRVIDGSIPPTQMSSHVMTVFYAMALKIADAILADY

SEQ ID NO: 2177 - protein, 576 aa, Aspergillus niger
IEASLLKDPKEVAGRTYDYIIAGGGLTGLTVAARLTENPNITVLVIESGSYESDRGPIIEDLNAYGDIFGSSVDHAYETVELPTNNQTALIRSGNGLGGSTLINGGTWTRPHKAQVDSWETVFGNEGWNWDSVAAYSLQAERARAPNAKQIAAGHYFNASCHGINGTVHAGPRDTGDDYSPIVKALMSAVEDRGVPTKKDLGCGDPHGVSMFPNTLHEDQVRSDAAREWLLPNYQRPNLQVLTGQYVGKVLLSQNATTPRAVGVEFGTHKGNTHNVYAKHEVLLAAGSAVSPTILEYSGIGMKSILEPLGIDTVVDLPVGLNLQDQTTSTVRSRITSAGAGQGQAAWFATFNETFGDYTEKAHELLNTKLEQWAEEAVARGGFHNTTALLIQYENYRDWIVKDNVAYSELFLDTAGVASFDVWDLLPFTRGYVHILDKDPYLRHFAYDPQYFLNELDLLGQAAATQLARNISNSGAMQTYFAGETIPGDNLAYDADLSAWVEYIPENFRPNYHGVGTCSMMPKEMGGVVDNAARVYGVQGLRVIDGSIPPTQMSSHVMTVFYAMALKIADAILADY

SEQ ID NO: 2178 - protein, 576 aa, Aspergillus niger
IEASLLKDPKEVAGRTYDYIIAGGGLTGLTVAARLTENPNITVLVIESGSYESDRGPIIEDLNAYGDIFGSSVDHAYETVELATNNQTALIRSGNGLGGSTLINGGTWTRPHKAQVDSWETVFGNEGWNWDSVAAYSLQAERARAPNAKQIAAGHYFNASCHGINGTVHAGPRDTGDDYSPIVKALMSAVEDRGVPTKKDLGCGDPHGVSMFPNTLHPDQVRSDAAREWLLPNYQRPNLQVLTGRYVGKVLLSQNATTPRAVGVEFGTHKGNTHNVYAKHEVLLAAGSAVSPTILEYSGIGMKSILEPLGIDTVVDLPVGLNLQDQTTSTVRSRITSAGAGQGQAAWFATFNETFGDYAEKAHELLNTKLEQWAEEAVARGGFHNTTALLIQYENYRDWIVKDNVAYSELFLDTAGVASFDVWDLLPFTRGYVHILDKDPYLRHFAYDPQYFLNELDLLGQAAATQLARNISNSGAMQTYFAGETIPGDNLAYDADLRAWVEYIPENFRPNYHGVGTCSMMPKEMGGVVDNAARVYGVQGLRVIDGSIPPTQLSSHVMTVFYAMALKIADAILADY

SEQ ID NO: 2179 - protein, 576 aa, Aspergillus niger
IEASLLKDPKEVAGRTYDYIIAGGGLTGLTVAARLTENPNITVLVIESGSYESDRGPIIEDLNAYGDIFGSSVDHAYETVELPTNNQTALIRSGNGLGGSTLINGGTWTRPHKAQVDSWETVFGNEGWNWDSVAAYSLQAERARAPNAKQIAAGHYFNASCHGLNGTVHAGPRDTGDDYSPIVKALMSAVEDRGVPTKKDLGCGDPHGVSMFPNTLHEDQVRSDAAREWLLPNYQRPNLQVLTGQYVGKVLLSQNATTPRAVGVEFGTHKGNTHNVYAKHEVLLAAGSAVSPTILEYSGIGMKSILEPLGIDTVVDLPVGLNLQDQTTSTVRSRITSAGAGQGQAAWFATFNETFGDYTEKAHELLNTKLEQWAEEAVARGGFHNTTALLIQYENYRDWIVKDNVAYSELFLDTAGVASFDVWDLLPFTRGYVHILDKDPYLRHFAYDPQYFLNELDLLGQAAATQLARNISNSGAMQTYFAGETIPGDNLAYDADLSAWVEYIPENFRPNYHGVGTCSMMPKEMGGVVDNAARVYGVQGLRVIDGSIPPTQMSSHVMTVFYAMALKIADAILADY

SEQ ID NO: 2180 - protein, 576 aa, Aspergillus niger
IEASLLTDPKDVSGRTVDYIIAGGGLTGLTTAARLTENPNISVLVIESGSYESDRGPIIEQLNAYGDIFGSSVDHAYETVELATNNQTALIRSGNGLGGSTLVNGGTWTRPHNAQVDSWETVFGNEGWNWDNVAAYSLQAERARAPNAKQIAAGHYFNASCHGTNGTVHAGPRDTGDDYSPIVKALMSAVEDRGVPTKKDFGCGDPHGVSMFPNTLHEDQVRSDAAREWLLPNYQRPNLQVLTGQYVGKVLLSQNGTTPRAVGVEFGTHKGNTHNVYAEHEVLLAAGSAVSPTILEYSGIGMKSILEPLGIDTVVDLPVGLNLQDQTTATVRSRITSAGAGQGQAAWFATFNETFGDYSEKAHELLNTKLEQWAEEAVARGGFHNTTALLIQYENYRDWIVNHNVAYSELFLDTAGVASFDVWDLLPFTRGYVHILDKDPYLHHFAYDPQYFLNELDLLGQAAATQLARNISNSGAMQTYFAEETIPGDNLAYDADLSAWTEYIPYHFRPNYHGVGTCSMMPKEMGGVVDNAARVYGVQGLRVIDGSIPPTQMSSHVMTVFYAMALKISDAILEDY

SEQ ID NO: 2181 - protein, 576 aa, Aspergillus niger
IEASLLTDPKDVSGRTVDYIIAGGGLTGLTTAARLTENPNISVLVIESGSYESDRGPIIEDLNAYGDIFGSSVDHAYETVELATNNQTALIRSGNGLGGSTLVNGGTWTRPHKAQVDSWETVFGNEGWNWDNVPAYSLQAERARAPNAKQIAAGHYFNASCHGTNGTVHAGPRDTGDDYSPIVKALMSAVEDRGVPTKKDFGCGDPHGVSMFPNTLHEDQVRSDAAREWLLPNYQRPNLQVLTGQYVGKVLLSQNGTTPRAVGVEFGTHKGNTHNVYAEHEVLLAAGSAVSPTILEYSGIGMKSILEPLGIDTVVDLPVGLNLQDQTTATVRSRITSAGAGQGQAAWFATFNETFGDYSEKAHELLNTKLEQWAEEAVARGGFHNTTALLIQYENYRDWIVNHNVAYSELFLDTAGVASFDVWDLLPFTRGYVHILDKDPYLHHFAYDPQYILNELDLLGQAAATQLARNISNSGAMQTYFAGETIPGDNLAYDADLSAWTEYIPYHFRPNYHGVGTCSMMPKEMGGVVDNAARVYGVQGLRVIDGSIPPTQMSSHVMTVFYAMALKISDAILEDY

SEQ ID NO: 2182 - protein, 576 aa, Aspergillus niger
IEASLLTDPKDVSGRTVDYIIAGGGLTGLTTAARLTENPNISVLVIESGSYESDRGPIIEDLNAYGDIFGSSVDHAYETVELATNNQTALIRSGNGLGGSTLVNGGTWTRPHNAQVDSWETVFGNEGWNWDNVAAYSLQAERARAPNAKQIAAGHYFNASCHGTNGTVHAGPRDTGDDYSPIVKALMSAVEDRGVPTKKDFGCGDPHGVSMFPNTLHEDQVRSDAAREWLLPNYQRPNLQVLTGQYVGKVLLSQNGTTPRAVGVEFGTHKGNTHNVYAEHEVLLAAGSAVSPTILEYSGIGMKSILEPLGIDTVVDLPVGLNLQDQTTATVRSRITSAGAGQGQAAWFATFNETFGDYSEKAHELLNTKLEQWAEEAVARGGFHNTTALLIQYENYRDWIVNHNVAYSELFLDTAGVASFDVWDLLPFTRGYVHILDKDPYLHHFAYDPQYFLNELDLLGQAAATQLARNISNSGAMQTYFAEETIPGDNLAYDADLSAWTEYIPYHFRPNYHGVGTCSMMPKEMGGVVDNAARVYGVQGLRVIDGSIPPTQMSSHVMTVFYAMALKISDAILEDY

SEQ ID NO: 2183 - protein, 596 aa, Penicillium polonicum
VLSGLGLVVVATALPLQEFDLQSSLLTDPRKVAGETFDYVIAGGGLTGLTVAARLTENPDINVLVIESGFYESNIGPIIENLNHYGDIFTTSVDQAFETVPLAIHNRTEIVRSGKGLGGSTLVNGGSWTRPHKAQVNSWEKVFGMEGWNWDNLLPYMNKVEASRPPNAAQIAAGHYFDPACHGVNGTVQVGPRDTGESYSPMIKSLMETAKNSGVPVQKDFSCGVPHGISMFPNDVHEDQTRSDAAREWLLPNYKRKNLKVLTGQMVGRVLFDTTTSTPKAVGVNFGTHNKVNFDVHAKHEVLLAAGSTVSPQILEHSGVGLKTVLDKVGVKQLVELPVGLNLQDQTTTTVRSAINPIGAGQGQAAYFATFNETFGDQAPRAHELLNTKLEQWAKDAVSRGGFHNETALLIQYENYRDWLVNSDVSYAEIFIDTAGKLSLDLWDLIPFTRGYVHILDSDPYLRRFAYDPQYFLNELDLLGQAAASKLAREISNKGEMTKYFNSETVPGNNLAYDATLDQWVDYVKQNFRPNYHGVGTCSMMSKELGGVVDAAARVYDVEGLRVIDGSIPPTQVSSHVMTVFYGMAEKISEAILADY

SEQ ID NO: 2184 - protein, 580 aa, Aspergillus flavus NRRL3357
KHFDVQSSLISDPKEVSEKTFDYVIAGGGLTGLTVATKLTENPDIEVLVIEKGFYESNCGSIVEDLNEYGDIFGTDVDQAYQTVPLAVNNRTELIRSGNGLGGSTLINGGSWTRPDKVQIDSWERVFGNEGWNWDSLFEYMKKAEHSRPPNEAQIAAGHSYDPACHGTNGTVQAGPRDNGKPWSPIIKALINTASERGVPTQQDFHCGHPRGVSMIPNAVHEDQTRSDTAREWLLPNHERPNLKVLTGQRVGKVLLNKTESGAKATGLNFGTHRKVNYNVYAKHEVLLAAGSAISPLILEWSGIGLKDVLSAAGVEQVVDLPVGLNMQDQTTTNVRSQAQASGAGQGQAVYFASFNETFGDYAHKAMELLNTKLDQWAEETVRNGGFHNVTALKIQYENYRDWLLNEDVAFAELFLDTEGKINFDLWDLIPFTRGSVHILNGDPYLHRYANDPKFFLNEFDILGQAAATKLARELSNTGEMKKYFAGEIIPGDNLAYDASLEQWADYVKENFRANWHAVSSCSMMSREMGGVVDSAARVYDVENLRIVDGSIPPTQVSSHVMTIFYGMALKVADAILADY

SEQ ID NO: 2185 - protein, 592 aa, Aspergillus niger
VVSLAAALPHYIRSNGIEASLLTDPKEVAGRTVDYIIAGGGLTGLTTAARLTENPDITVLVIESGSYESDRGPIIEDLNAYGDIFGSSVDHAYETVELATNNQTALIRSGNGLGGSTLVNGGTWTRPHKAQVDSWETVFGNEGWNWDSVAAYSLQAERARAPNAKQIAAGHYFNASCHGINGTVHAGPRDTGDDYSPIVKALMSAVEDRGVPTKKDLGCGDPHGVSMFPNTLHEDQVRSDAAREWLLPNYQRPNLQVLTGQYVGKVLLSQNATTPRAVGVEFGTHKGNTHNVYAKHEVLLAAGSAVSPTILEYSGIGMKSILEPLGIDTVVDLPVGLNLQDQTTSTVRSRITSAGAGQGQAAWFATFNETFGDYAEKAHELLNTKLEQWAEEAVARGGFHNTTALLIQYENYRDWIVKDNVAYSELFLDTAGVASFDVWDLLPFTRGYVHILDKDPYLRHFAYDPQYFLNELDLLGQAAATQLARNISNSGAMQTYFAGETIPGDNLAYDADLSAWVEYIPYNFRPNYHGVGTCSMMPKEMGGVVDNAARVYGVQGLRVIDGSIPPTQMSSHVMTVFYAMALKIADAILADY

SEQ ID NO: 2186 - protein, 576 aa, Aspergillus niger
IEASLLTDPEDVSGRTVDYIIAGGGLTGLTTAARLTENPNISVLVIESGSYESDRGPIIEDLNAYGDIFGSSVDHAYETVELATNNQTALIRSGNGLGGSTLVNGGTWTRPHKAQVDSWETVFGNEGWNWDNVAAYSLQAERARAPNAKQIAAGHYFNASCHGKNGTVHAGPRDTGDDYSPIVDALMSAVEDRGVPTKKDFGCGDPHGVSMFPNTLHEDQVRSDAAREWLLPNYQRPNLQVLTGQYVGKVLLSQNGTTPRAVGVEFGTHKGNTHNVYAKHEVLLAAGSAVSPTILEYSGIGMKSILEPLGIDTVVDLPVGLNLQDQTTATVRSRITSAGAGQGQAAWFATFNETFGDYTEKAHELPNTKLEQWAEEAVARGGFHNTTALLIQYENYRDWIVNHNVAYSELFLDTAGVASFDVWDLLPFTRGYVHILDKDPYLHHFAYDPQYFLNELDLLGQAAATQLARNISNSGAMQTYFAGETIPGDNLAYDADLSAWQEYIPYHFRPNYHGVGTCSMMPKEMGGVVDNAARVYGVQGLRVIDGSIPPTQMSSHVMTVFYAMALKIADAILEDY

SEQ ID NO: 2187 - protein, 576 aa, Aspergillus niger
IEASLLKDPKEVAGRTYDYIIAGGGLTGLTVAARLTENPNITVLVIESGSYESDRGPIIEDLNAYGDIFGSSVDHAYETVELPTNNQTALIRSGNGLGGSTLINGGTWTRPHKAQVDSWETVFGNEGWNWDSVAAYSLQAERARAPNAKQIAAGHYFNASCHGINGTVHAGPRDTGDDYSPIVKALMSAVEDRGVPTKKDLGCGDPHGVSMFPNTLHEDQVRSDAAREWLLPNYQRPNLQVLTGRYVGKVLLSQNATTPRAVGVEFGTHKGNTHNVYAKHEVLLAAGSAVSPTILEYSGIGMKSILEPLGIDTVVDLPVGLNLQDQTTSTVRSRITSAGAGQGQAAWFATFNETFGDYTEKAHELLNTKLEQWAEEAVARGGFHNTTALLIQYENYRDWIVKDNVAYSELFLDTAGVASFDVWDLLPFTRGYVHILDKDPYLRHFAYDPQYFLNELDLLGQAAATQLARNISNSGAMQTYFAGETIPGDNLAYDADLRAWVEYIPENFRPNYHGVGTCSMMPKEMGGVVDNAARVYGVQGLRVIDGSIPPTQMSSHVMTVFYAMALKIADAILADY

SEQ ID NO: 2188 - protein, 576 aa, Aspergillus niger
IEASLLTDPKDVSGRTVDYIICGGGLVGLTTAAKLTENPNISVLVIESGSYESDRGPIIEDLNAYGDIFGSSVDHAYETVELATNNQTALVRSGNGLGGSTLINGGTWTRPHKAQVDSWETVFGNEGWNWDNVAAYSLQAERARAPNAKQIAAGHYFNTSCHGVNGTVHAGPRDTGDDYSPIVKALMSAVEDRGVPTKKDFGCGDPHGVSMFPNTLHEDQVRSDAAREWLLPNYQRPNLQVLTGQYCGKVLLSQNGTTPRAVGVEFGTHKGNTHNVYAKHEVLLAAGSAVSPTILEYSGIGMKSILEPLGIDTVVDLPVGLNLQDQTTATVRSRITSAGAGQGQAAWFATFNETFGDYSEKAHELLNTKLEQWAEEAVARGGFHNTTALLIQYENYRDWIVNHNVAYSELFLDTAGVASFDVWDLLPFTRGYVHILDKDPYLHHFAYDPQYFLNELDLLGQAAATQLARNISNSGAMQTYFAGETIPGDNLAYDADLSAWTEYIPYHFRPNYHGVGTCSMMPKEMGGVVDNAARVYGVQGLRVIDGSIPPTQMSSHVMTVFYAMALKISDAILEDY

SEQ ID NO: 2189 - protein, 576 aa, Aspergillus niger
IEASLLKDPKEVAGRTYDYIIAGGGLTGLTVAARLTENPNITVLVIESGSYESDRGPIIEDLNAYGDIFGSSVDHAYETVELPTNNQTALIRSGNGLGGSTLINGGTWTRPHKAQVDSWETVFGNEGWNWDSVAAYSLQAERARAPNAKQIAAGHYFNPSCHGINGTVHAGPRDTGDDYSPIVKALMSAVEDRGVPTKKDLGCGDPHGVSMFPNTLHPDQVRSDAAREWLLPNYQRPNLQVLTGRYVGKVLLSQNATTPRAVGVEFGTHKGNTHNVYAKHEVLLAAGSAVSPTILEYSGIGMKSILEPLGIDTVVDLPVGLNLQDQTTSTVRSRITSAGAGQGQAAWFATFNETFGDYTEKAHELLNTKLEQWAEEAVARGGFHNTTALLIQYENYRDWIVKDNVAYSELFLDTAGVASFDVWDLLPFTRGYVHILDKDPYLRHFAYDPQYFLNELDLLGQAAATQLARNISNSGAMQTYFAGETIPGDNLAYDADLRAWVEYIPENFRPNYHGVGTCSMMPKEMGGVVDNAARVYGVQGLRVIDGSIPPTQLSSHVMTVFYAMALKIADAILADY

SEQ ID NO: 2190 - protein, 576 aa, Aspergillus niger
IEASLLKDPKEVAGRTYDYIIAGGGLTGLTVAARLTENPNITVLVIESGSYESDRGPIIEDLNAYGDIFGSSVDHAYETVELATNNQTALIRSGNGLGGSTLINGGTWTRPHKAQVDSWETVFGNEGWNWDSVAAYSLQAERARAPNAKQIAAGHYFNASCHGINGTVHAGPRDTGDDYSPIVKALMSAVEDRGVPTKKDLGCGDPHGVSMFPNTLHPDQVRSDAAREWLLPNYQRPNLQVLTGRYVGKVLLSQNATTPRAVGVEFGTHKGNTHNVYAKHEVLLAAGSAVSPTILEYSGIGMKSILEPLGIDTVVDLPVGLNLQDQTTSTVRSRITSAGAGQGQAAWFATFNETFGDYTEKAHELLNTKLEQWAEEAVARGGFHNTTALLIQYENYRDWIVKDNVAYSELFLDTAGVASFDVWDLLPFTRGYVHILDKDPYLRHFAYDPQYFLNELDLLGQAAATQLARNISNSGAMQTYFAGETIPGDNLAYDADLRAWVEYIPENFRPNYHGVGTCSMMPKEMGGVVDNAARVYGVQGLRVIDGSIPPTQLSSHVMTVFYAMALKIADAILADY

SEQ ID NO: 2191 - protein, 576 aa, Aspergillus niger
IEASLLKDPKEVAGRTYDYIIAGGGLTGLTVAARLTENPNITVLVIESGSYESDRGPIIEDLNAYGDIFGSSVDHAYETVELPTNNQTALIRSGNGLGGSTLINGGTWTRPHKAQVDSWETVFGNEGWNWDSVAAYSLQAERARAPNAKQIAAGHYFNASCHGINGTVHAGPRDTGDDYSPIVKALMSAVEDRGVPTKKDLGCGDPHGVSMFPNTLHPDQVRSDAAREWLLPNYQRPNLQVLTGRYVGKVLLSQNATTPRAVGVEFGTHKGNTHNVYAKHEVLLAAGSAVSPTILEYSGIGMKSILEPLGIDTVVDLPVGLNLQDQTTSTVRSRITSAGAGQGQAAWFATFNETFGDYAEKAHELLNTKLEQWAEEAVARGGFHNTTALLIQYENYRDWIVKDNVAYSELFLDTAGVASFDVWDLLPFTRGYVHILDKDPYLRHFAYDPQYFLNELDLLGQAAATQLARNISNSGAMQTYFAGETIPGDNLAYDADLSAWVEYIPENFRPNYHGVGTCSMMPKEMGGVVDNAARVYGVQGLRVIDGSIPPTQMSSHVMTVFYAMALKIADAILADY

SEQ ID NO: 2192 - protein, 576 aa, Aspergillus niger
IEASLLKDPKEVAGRTYDYIIAGGGLTGLTVAARLTENPNITVLVIESGSYESDRGPIIEDLNAYGDIFGSSVDHAYETVELPTNNQTALIRSGNGLGGSTLINGGTWTRPHKAQVDSWETVFGNEGWNWDSVAAYSLQAERARAPNAKQIAAGHYFNASCHGLNGTVHAGPRDTGDDYSPIVKALMSAVEDRGVPTKKDLGCGDPHGVSMFPNTLHPDQVRSDAAREWLLPNYQRPNLQVLTGQYVGKVLLSQNATTPRAVGVEFGTHKGNTHNVYAKHEVLLAAGSAVSPTILEYSGIGMKSILEPLGIDTVVDLPVGLNLQDQTTSTVRSRITSAGAGQGQAAWFATFNETFGDYTEKAHELLNTKLEQWAEEAVARGGFHNTTALLIQYENYRDWIVKDNVAYSELFLDTAGVASFDVWDLLPFTRGYVHILDKDPYLRHFAYDPQYFLNELDLLGQAAATQLARNISNSGAMQTYFAGETIPGDNLAYDADLRAWVEYIPENFRPNYHGVGTCSMMPKEMGGVVDNAARVYGVQGLRVIDGSIPPTQLSSHVMTVFYAMALKIADAILADY

SEQ ID NO: 2193 - protein, 576 aa, Aspergillus niger
IEASLLKDPKEVAGRTYDYIIAGGGLTGLTVAARLTENPNITVLVIESGSYESDRGPIIEDLNAYGDIFGSSVDHAYETVELATNNQTALIRSGNGLGGSTLINGGTWTRPHKAQVDSWETVFGNEGWNWDSVAAYSLQAERARAPNAKQIAAGHYFNASCHGINGTVHAGPRDTGDDYSPIVKALMSAVEDRGVPTKKDLGCGDPHGVSMFPNTLHPDQVRSDAAREWLLPNYQRPNLQVLTGRYVGKVLLSQNATTPRAVGVEFGTHKGNTHNVYAKHEVLLAAGSAVSPTILEYSGIGMKSILEPLGIDTVVDLPVGLNLQDQTTSTVRSRITSAGAGQGQAAWFATFNETFGDYTEKAHELLNTKLEQWAEEAVARGGFHNTTALLIQYENYRDWIVKDNVAYSELFLDTAGVASFDVWDLLPFTRGYVHILDKDPYLRHFAYDPQYFLNELDLLGQAAATQLARNISNSGAMQTYFAGETIPGDNLAYDADLRAWVEYIPENFRPNYHGVGTCSMMPKEMGGVVDNAARVYGVQGLRVIDGSIPPTQMSSHVMTVFYAMALKIADAILADY

SEQ ID NO: 2194 - protein, 576 aa, Aspergillus niger
IEASLLTDPKEVAGRTVDYIIAGGGLTGLTSAARLTENPDITVLVIEKGSYESDRGHIIEDLNAYGDIFGSSVDHAYETVELATNNATALIRSGNGLGGSTYFNGGTWTRPHKAQVDSWETVFGNEGWNWDSVAAYSLQAERARAPNAKQIAAGHYFNASCHGINGTVHAGPRDTGDDYSPIVKALMSAVEDRGVPTKKDLGCGDPHGVSMFPNTLHEDQVRSDAAREWLLPNYQRPNLEVLTGQYVGKVLLSQNATTPRAVGVEFGTHKGNTHNVYAKHEVLLAAGSAVSPTILEYSGIGMKSILEPLGIDTVVDLPVGLNLQDQTTSTVRSRITSAGAGQGQAAWFATFNETFGDYAEKAHELLNTKLEQWAEEAVARGGFHNTTALLIQYENYRDWIVKDNVAYSELFLDTAGVASFDVWDLLPFTRGYVHILDKDPYLRHFAYDPQYFLNELDLLGQAAATQLARNISNSGAMQTYFAGETIPGDNLAYDADLSAWVEYIPYNFRPNYHGVGTCSMMPKEMGGVVDNAARVYGVQGLRVIDGSIPPTQMSSHVSTVFYAMALKIADAILADY

SEQ ID NO: 2195 - protein, 576 aa, Aspergillus niger
IEASLLKDPKEVAGRTYDYIIAGGGLTGLTVAARLTENPNITVLVIESGSYESDRGPIIEDLNAYGDIFGSSVDHAYETVELPTNNQTALIRSGNGLGGSTLINGGTWTRPHKAQVDSWETVFGNEGWNWDSVAAYSLQAERARAPNAKQIAAGHYFNASCHGLNGTVHAGPRDTGDDYSPIVKALMSAVEDRGVPTKKDLGCGDPHGVSMFPNTLHPDQVRSDAAREWLLPNYQRPNLQVLTGRYVGKVLLSQNATTPRAVGVEFGTHKGNTHNVYAKHEVLLAAGSAVSPTILEYSGIGMKSILEPLGIDTVVDLPVGLNLQDQTTSTVRSRITPAGAGQGQAAWFATFNETFGDYTEKAHELLNTKLEQWAEEAVARGGFHNTTALLIQYENYRDWIVKDNVAYSELFLDTAGVASFDVWDLLPFTRGYVHILDKDPYLRHFAYDPQYFLNELDLLGQAAATQLARNISNSGAMQTYFAGETIPGDNLAYDADLRAWVEYIPENFRPNYHGVGTCSMMPKEMGGVVDNAARVYGVQGLRVIDGSIPPTQMSSHVMTVFYAMALKIADAILADY

SEQ ID NO: 2196 - protein, 576 aa, Aspergillus niger
IEASLLKDPKEVAGRTYDYIIAGGGLTGLTVAAKLTENPNITVLVIESGSYESDRGPIIEDLNAYGDIFGSSVDHAYETVELATNNQTALIRSGNGLGGSTLINGGTWTRPHKAQVDSWETVFGNEGWNWDSVAAYSLQAERARAPNAKQIAAGHYFNASCHGINGTVHAGPRDTGDDYSPIVKALMSAVEDRGVPTKKDLGCGDPHGVSMFPNTLHPDQVRSDAAREWLLPNYQRPNLQVLTGRYVGKVLLSQNATTPRAVGVEFGTHKGNTHNVYAKHEVLLAAGSAVSPTILEYSGIGMKSILEPLGIDTVVDLPVGLNLQDQTTSTVRSRITSAGAGQGQAAWFATFNETFGDYAEKAHELLNTKLEQWAEEAVARGGFHNTTALLIQYENYRDWIVKDNVAYSELFLDTAGVASFDVWDLLPFTRGYVHILDKDPYLRHFAYDPQYFLNELDLLGQAAATQLARNISNSGAMQTYFAGETIPGDNLAYDADLSAWVEYIPENFRPNYHGVGTCSMMPKEMGGVVDNAARVYGVQGLRVIDGSIPPTQMSSHVMTVFYAMALKIADAILADY

SEQ ID NO: 2197 - protein, 576 aa, Aspergillus niger
IEASLLTDPKDVSGRTVDYIIAGGGLTGLTTAARLTENPNISVLVIESGSYESDRGPIIEDLNAYGDIFGSSVDHAYETVELATNNQTALIRSGNGLGGSTLVNGGTWTRPHNAQVDSWETVFGNEGWNWDNVAAYSLQAERARAPNAKQIAAGHYFNASCHGTNGTVHAGPRDTGDDYSPIVKALMSAVEDRGVPTKKDFGCGDPHGVSMFPNTLHEDQVRSDAAREWLLPNYQRPNLQVLTGQYVGKVLLSPNGTTPRAVGVEFGTHKGNTHNVYAEHEVLLAAGSAVSPTILEYSGIGMKSILEPLGIDTVVDLPVGLNLQDQTTATVSSRITSAGAGQGQAAWFATFNETFGDYSEKAHELLNTKLEQWAEEAVARGGFHNTTALLIQYENYRDWIVNHNVAYSELFLDTAGVASFDVWDLLPFTRGYVHILDKDPYLHHFAYDPQYFLNELDLLGQAAATQLARNISNSGAMQTYFAEETIPGDNLAYDADLSAWTEYIPYHFRPNYHGVGTCSMMPKEMGGVVDNAARVYGVQGLRVIDGSIPPTQMSSHVMTVFYAMALKISDAILEDY

SEQ ID NO: 2198 - protein, 576 aa, Aspergillus niger
IEASLLTDPKDVSGRTVDYLIAGGGLTGLTTAARLTENPNISVLVIESGSYESDRGPIIEDLNAYGDIFGSSVDHAYETVELATNNQTALIRSGNGLGGSTLVNGGTWTRPHKAQVDSWETVFGNEGWNWDNVPAYSLQAERARAPNAKQIAAGHYFNASCHGTNGTVHAGPRDTGDDYSPIVKALMSAVEDRGVPTKKDFGCGDPHGVSMFPNTLHEDQVRSDAAREWLLPNYQRPNLQVLTGQYVGKVLLSQNGTTPRAVGVEFGTHKGNTHNVYAEHEVLLAAGSAVSPTILEYSGIGMKSILEPLGIDTVVDLPVGLNLQDQTTATVRSRITSAGAGQGQAAWFATFNETFGDYSEKAHELLNTKLEQWAEEAVARRGFHNTTALLIQYENYRDWIVNHNVAYSELFLDTAGVASFDVWDLLPFTRGYVHILDKDPYLHHFAYDPQYILNELDLLGQAAATQLARNISNSGAMQTYFAGETIPGDNLAYDADLSAWTEYIPYHFRPNYHGVGTCSMMPKEMGGVVDNAARVYGVQGLRVIDGSIPPTQMSSHVMTVFYAMALKISDAILEDY

SEQ ID NO: 2199 - protein, 576 aa, Aspergillus niger
IEASLLKDPKLVAGRTYDYIIAGGGLAGLTVAEKLTENPDITVLVIESGSYESDRGPIIEDLNAYGEIFGTSVDHAYETVELATQNRTALIRSGNGLGGSTLINGGTWTRPHKAQVDSWETVFGNEGWNWDSVAAYSLQAERARAPNAKQIAAGHYFNASCHGLNGTVHVGPRDTGDDYSPLMRALMSAVEDRGVPTKKDLGCGDPHGVSMFPNTLHEDQVRADAAREWLLPNYQRPNLQVLTGQYVGKVLLSQNATTPRAVGVEFGTHKSNTHNVYAKHEVLLSAGSTVSPTILEYSGIGMKSILEPLGIDTVVDLPVGLNLQDQTTSTVRSRITSAGAGQGQAAWFATFNETFGDYTEKAHELLNTKLEQWAEEAVARGGFHNTTALLIQYENYRDWIVKDNVAYSELFLDTGGVASFDVWDLLPFTRGYVHILDKDPYLRHFAYDPQYFLNELDLLGQAAATQLARNISNSGAMQTYFAGETIPGDNLAYDADLSAWVEYIPEHFRPNYHGVGTCSMMPKEMGGVVDNAARVYGVQGLRVIDGSIPPTQLSSHVMTVFYAMALKIADAVLADY

SEQ ID NO: 2200 - protein, 576 aa, Aspergillus niger
IEASLLKDPKLVAGRTYDYIIAGGGLAGLTVAEKLTENPNITVLVIESGSYESDRGPIIEDLNAYGEIFGTSVDHAYETVELATNNRTALIRSGNGLGGSTLINGGTWTRPHKAQVDSWETVFGNEGWNWDSVAAYSLQAERARAPNAKQIAAGHYFNAACHGLNGTVHVGPRDTGDDYSPLMRALMSAVEDRGVPTKKDLGCGDPHGVSMFPNTLHEDQVRADAAREWLLPNYQRPNLRVLTGQYVGKVLLSQNATTPRAVGVEFGTHKSNTHNVYAKHEVLLSAGSTVSPTILEYSGIGMKSILEPLGIDTVVDLPVGLNLQDQTTSTVRSRITSAGAGQGQAAWFATFNETFGKYTEKAHELLNTKLEQWAEEAVARGGFHNTTALLIQYENYRDWIVKDNVAYSELFLDTGGVASFDVWDLLPFTRGYVHILDKDPYLRHFAYDPQYFLNELDLLGQAAATQLARNISNSGAMQTYFAGETIPGNNLAYDADLSAWVEYIPEHFRPNYHGVGTCSMMPKEMGGVVDNAARVYGVQGLRVIDGSIPPTQLSSHVMTVFYAMALKIADAVLADY

SEQ ID NO: 2201 - protein, 580 aa, Aspergillus niger
IEASLLTDPKDVSGRTVDYIIAGGGLTGLTTAARLTENPNISVLVIESGSYESDRGPIIEDLNAYGDIFGSSVDHAYETVELATNNQTALIRSGNGLGGSTLVNGGTWTRPHKAQVDSWETVFGNEGWNWDNVAAYSLQAERARAPNAKQIAAGHYFNASCHGVNGTVHAGPRDTGDDYSPIVKALMSAVEDRGVPIKKDFGCGDPHGVSMFPNTLHEDQVRSDAAREWLLPNYQRPNLQVLIGQYVGKVLLSQNGTTPRAVGVEFGTHKGNTHNVYAKHEVLLAAGSAVSPTILEYSGIGMKSILEPLGIDTVVDLPVGLNLQDQTTATVRSRITSAGAGQGQAAWFATFNETFGDYSEKAHELLNTKLEQWAEEAVARGGFEINTTALLIQYENYRDWIVNEINVAYSELFLDTAGVASFDVWDLLPFTRGYVHILDKDPYLHHFAYDPQYFLNELDLLGQAAATQLARNISNSGAMQTYFAGETIPGDNLAYDADLSAWTEYIPYIIFRPNYEGVGICSMMPKEMGGVVDNAARVYGVQGLRVIDGSIPPTQMSSEIVMTVFYAMALKISDAILEDY

SEQ ID NO: 2202 - protein, 576 aa, Penicillium expansum
LQSSLLTDPTKVAGTTFDYIIAGGGLTGLTVAARLTENPNITVLVIERGFYESNIGPIIENLNHYGDIFGTSVDQAFETIPLAIHNRTEIVRSGKGLGGSTLVNGGSWTRPHKAQVDSWESVFGMEGWNWDSLLPYMKKIEAARAPNAEQIAAGHYYDPSCHGTDGIVHVGPRDTGESFSPMIKSLMKNANNSGIPVQKDLGCGVPHGISMILNDVHEDQTRSDAAREWLLPNYQRSNLKILTGQMVGKVLFDTTTTTPKAVGVNFGTHAKVNFDVHARHEVLLASGSAVSPQILEHSGVGLKAVLDNVGVEQLVDLPVGLNLQDQTTTTVRSNINSIGAGQGQAAYFATFNETFGDQAPRAHQLLNTKLEEWAKDVVSRGGFHNETALLVQYENYRDWLVNEDVSFAEIFIDTAGKLNLDLWDLIPFTRGYVHILDSDPYLRRFAYDPQFFLNELDVLGQAAASKLAREISNTGEMTQYFNGEAIPGNNLAYNATLDDWVDHVKQNFRANYHGVGTCSMMSKELGGVVDAAARVYGVESLRVIDGSIPPTQLSSHVMTVFYGMAQKVSEAILADY

SEQ ID NO: 2203 - protein, 576 aa, Aspergillus niger
IEASLLTDPKDVSGRTVDYIIAGGGLTGLTTAARLTENPNISVLVIESGSYESDRGPIIEDLNAYGDIFGSSVDHAYETVELATNNQTALIRSGNGLGGSTLVNGGTWTRPHKAQVDSWETVFGNEGWNWDNVPAYSLQAERARAPNAKQIAAGHYFNASCHGTNGTVHAGPRDTGDDYSPIVKALMSAVEDRGVPTKKDFGCGDPHGVSMFPNTLHEDQVRSDAAREWLLDNYQRPNLQVLTGQYVGKVLLSQNGTTPRAVGVEFGTHKGNTHNVYAEHEVLLAAGSAVSPTILEYSGIGMKSILEPLGIDTVVDLPVGLNLQDQTTATVRSRITSAGAGQGQAAWFASFNETFGDYSEKAHELLNTKLEQWAEEAVARGGFHNTTALLIQYENYRDWIVNHNVAYSELFLDTAGVASFDVWDLLPFTRGYVHILDKDPYLHHFAYDPQYILNELDLLGQAAATQLARNISNSGAMQTYFAGETIPGDNLAYDADLSAWTEYIPYHFRPNYHGVGTCSMMPKEMGGVVDNAARVYGVQGLRVIDGSIPPTQMSSHVMTVFYAMALKISDAILEDY

SEQ ID NO: 2204 - protein, 597 aa, Aspergillus niger
LVSSLVVSLAAALPHYIRSNGIEASLLTDPKEVAGRTVDYIIAGGGLTGLTTAARLTENPDITVLVIESGSYESDRGPIIEDLNAYGDIFGSSVDHAYETVELATNNQTALIRSGNGLGGSTLVNGGTWTRPHKAQVDSWETVFGNEGWNWDSVAAYSLQAERARAPNAKQIAAGHYFNASCHGINGTVHAGPRDTGDDYSPIVKALMSAVEDRGVPTKKDLGCGDPHGVSMFPNTLHEDQVRSDAAREWLLPNYQRPNLQVLTGQYVGKVLLSQNATTPRAVGVEFGTHKGNTHNVYAKHEVLLAAGSAVSPTILEYSGIGMKSILEPLGIDTVVDLPVGLNLQDQTTSTVRSRITSAGAGQGQAAWFATFNETFGDYAEKAHELLNTKLEQWAEEAVARGGFHNTTALLIQYENYRDWIVKDNVAYSELFLDTAGVASFDVWDLLPFTRGYVHILDKDPYLRHFAYDPQYFLNELDLLGQAAATQLARNISNSGAMQTYFAGETIPGDNLAYDADLSAWVEYIPYNFRPNYHGVGTCSMMPKEMGGVVDNAARVYGVQGLRVIDGSIPPTQMSSHVMTVFYAMALKIADAILADY

SEQ ID NO: 2205 - protein, 580 aa, Aspergillus flavus
KHFDVQSSLISDPKEVSEKTFDYVIAGGGLTGLTVATKLTENPDIEVLVIEKGFYESNCGSIVEDLNEYGDIFGTDVDQAYQTVPLAVNNRTELIRSGNGLGGSTLINGGXWTRPDKVQIDSWERVFGNEGWNWDSLFEYMKKAEHSRPPNEAQIAAGHSYDPACHGTNGTVQAGPRDNGKPWSPIIKALINTASERGVPTQQDFHCGHPRGVSMIPNAVHEDQTRSDTAREWLLPNHERPNLKVLTGQRVGKVLLNKTESGAKATGLNFGTHRKVNYNVYAKHEVLLAAGSAISPLILEWSGIGLKDVLSAAGVEQVVDLPVGLNMQDQTTTNVRSQAQASGAGQGQAVYXASFNETFGDYAHKAMELLNTKLDQWAEETVRNGGFHNVTALKIQYENYRDWLLNEDVAFAELFLDTEGKINFDLWDLIPFTRGSVHILNGDPYLHRYANDPKFFLNEFDILGQAAATKLARELSNTGEMKKYFAGEIIPGDNLAYDASLEQWADYVKENFRANWHAVSSCSMMSREMGGVVDSAARVYDVENLRIVDGSIPPTQVSSHVMTIFYGMALKVADAILADY

SEQ ID NO: 2206 - protein, 477 aa, Microdochium nivale; identical to SEQ ID NO: 6

SEQ ID NO: 2207 - protein, 473 aa, Microdochium nivale
GAIEACLSAAGVPIDIPGTADYERDVEPFNIRLPYIPTAIAQTQTTAHIQSAVQCAKKLNLKVSAKSGGHSYASFGFGGENGHLMVQLDRMIDVISYNDKTGIAHVEPGARLGHLATVLNDKYGRAISHGTCPGVGISGHFAHGGFGFSSHMHGLAVDSVVGVTVVLADGRIVEASATENADLFWGIKGAGSNFGIVAVWKLATFPAPKVLTRFGVTLNWKNKTSALKGIEAVEDYARWVAPREVNFRIGDYGAGNPGIEGLYYGTPEQWRAAFQPLLDTLPAGYVVNPTTSLNWIESVLSYSNFDHVDFITPQPVENFYAKSLTLKSIKGDAVKNFVDYYFDVSNKVKDRFWFYQLDVHGGKNSQVTKVTNAETAYPHRDKLWLIQFYDRYDNNQTYPETSFKFLDGWVNSVTKALPKSDWGMYINYADPRMDRDYATKVYYGENLARLQKLKAKFDPTDRFYYPQAVRPVK

SEQ ID NO: 2208 - protein, 504 aa, Chaetomium globosum; identical to SEQ ID NO: 7

SEQ ID NO: 2209 - protein, 509 aa, Neurospora crassa; identical to SEQ ID NO: 8

SEQ ID NO: 2210 - protein, 497 aa, Myceliophthora
MHSLTSLAGGLLGLAAVGQASPYLSFRSSNQTSPLTDCLTKAGVPISEPGTEDYDIDVSSFNLRLPYTPAVVVGANTTDHVRDAVVCAAEHGVKATAKCGGHSYASFGLGGEDGHLVIEMSRMNKVVLDAESGVATAEGGTRLGHLAVELWNQGGRAISHGTCPGVGVGGHVLHGGYGMSSHTHGLALDWMVGATVVLANGSVVETSETENADLFWALRGAGGSMGVVTEFRFNTFEPPENLTYFVGTVQWPTEERALVGLTAVQEFAKTMPAELNMRLYIASRFVNLEGLYYGDKAGLEETLAPLIEKTNATLALAKTAGWLDQLKQYGGSNLDQGHGHEEHENFYSTSLYTKELSDTQLQNFVSYWFHSAKNNTRNWHVQIDLHGGENSAVAAPAADSTSYAHRDYLLMYLLYDRINSGEYPADGHIVMDGFVDAITEGMEREDWGMYINYPNQGLDQETAQVNYWGSHLEKLKAIKKEVDPEDLFYYPQGISPA

SEQ ID NO: 2211 - protein, 398 aa, Myceliophthora thermophila
CGGHSYASFGLGGEDGHLVIEMSRMNRVVLDDETGIATVEGGARLGHLAVELWDQGKRAISHGTCPGVGVGGHVLHGGYGMSSHTHGLALDWMVGATVVLANASVVECSETENPDLFWALRGAGSSMGVVTEFRFKTFEPPENLTYFVATAQWPTEDRALAGLAAVQEYAKTMPAELNMRLYIANRFVNLEGLYYGDDAALHHTLAPLLDQANATLALAQTGGWLDQLKHFGGSNLDQGHGHEEHETFHSTSLYTGPLDEDRLRAFVGYWFGPAKNNTRSWHVQIDLHGGENSAVSVAPRSTAYAHRDSLLMFLLYDRADRGEFPADGAALMDNFAAAVTAGFDPDDWGMYVNYPNPSLSQDDAQARYWGPNLARLRAIKKDVDPDDLFHYPQGILPA

SEQ ID NO: 2212 - protein, 467 aa, Myceliophthora thermophila
NQTDRLTECLTEAGVPVDMAGTAEYAIDVSSFNLRLNYTPAAVAAAGTADHVRDAVACAARLGVKATAKCGGHSYASFGLGGEDGHLVIEMSRMNRVVLDDETGIATVEGGARLGHLAVELWDQGKRAISHGTCPGVGVGGHVLHGGYGMSSHTHGLALDWMVGATVVLANASVVECSETENPDLFWALRGAGSSMGVVTEFRFKTFEPPENLTYFVATAQWPTEDRALAGLAAVQEYAKTMPAELNMRLYIANRFVNLEGLYYGDDAALHHTLAPLLDQANATLALAQTGGWLDQLKHFGGSNLDQGHGHEEHETFHSTSLYTGPLDEDRLRAFVGYWFGPAKNNTRSWHVQIDLHGGENSAVSVAPRSTAYAHRDSLLMFLLYDRADRGEFPADGAALMDNFAAAVTAGFDPDDWGMYVNYPNPSLSQDDAQARYWGPNLARLRAIKKDVDPDDLFHYPQGILPA

SEQ ID NO: 2213 - protein, 377 aa, Myceliophthora thermophila
MSRMNRVVLDDETGIATVEGGARLGHLAVELWDQGKRAISHGTCPGVGVGGHVLHGGYGMSSHTHGLALDWMVGATVVLANASVVECSETENPDLFWALRGAGSSMGVVTEFRFKTFEPPENLTYFVATAQWPTEDRALAGLAAVQEYAKTMPAELNMRLYIANRFVNLEGLYYGDDAALHHTLAPLLDQANATLALAQTGGWLDQLKHFGGSNLDQGHGHEEHETFHSTSLYTGPLDEDRLRAFVGYWFGPAKNNTRSWHVQIDLHGGENSAVSVAPRSTAYAHRDSLLMFLLYDRADRGEFPADGAALMDNFAAAVTAGFDPDDWGMYVNYPNPSLSQDDAQARYWGPNLARLRAIKKDVDPDDLFHYPQGILPA

SEQ ID NO: 2214 - protein, 488 aa, Myceliophthora thermophila
LLGLAVASQGSRLHHRFGGGGNQTDRLTECLTEAGVPVDMAGTAEYAIDVSSFNLRLNYTPAAVAAAGTADHVRDAVACAARLGVKATAKCGGHSYASFGLGGEDGHLVIEMSRMNRVVLDDETGIATVEGGARLGHLAVELWDQGKRAISHGTCPGVGVGGHVLHGGYGMSSHTHGLALDWMVGATVVLANASVVECSETENPDLFWALRGAGSSMGVVTEFRFKTFEPPENLTYFVATAQWPTEDRALAGLAAVQEYAKTMPAELNMRLYIANRFVNLEGLYYGDDAALHHTLAPLLDQANATLALAQTGGWLDQLKHFGGSNLDQGHGHEEHETFHSTSLYTGPLDEDRLRAFVGYWFGPAKNNTRSWHVQIDLHGGENSAVSVAPRSTAYAHRDSLLMFLLYDRADRGEFPADGAALMDNFAAAVTAGFDPDDWGMYVNYPNPSLSQDDAQARYWGPNLARLRAIKKDVDPDDLFHYPQGILPA

SEQ ID NO: 2215 - protein, 492 aa, Humicola hyalothermophila
MRQLAPILASLALATNSNAVSLSEKADALSDCLAKASVPLDVPGSGDWNLDSSPFNLRLNYTPVAIAVPRTAKHVQDSVACASQVGIKTNAKCGGHSYASFGLGGEDGHLVIQMDRMDKVVLDNSTGIATVEGGARLGHLAWELYNQGKRAISHGTCPGVGVGGHVLHGGYGTSSHTKGLALDWIIGATVVLANSTIVNCSATENPDLFWALRGAGGSMGVVTEFRFETFQAPEELTYFVAPVQWPTEERALVGLRAVQEIAQTMPAELNMRLFIGRLFVNLEGLYYGDREGLETVLEPLMKKTNATLAMAQTGGWLDQVKHFGGSSNIDQRWPHEEHETFFSTSLYTKALNEAQLQNFVSYWFKHAKTNTKDWYVQIDLHGGENSAVARREADSTAYAHRDYLLMYLLYDRIDKGTYPVDGHTYMTNFVRNITDGMDRNDWGMYINYPDSNLDQASAQVNYWGSHLPRLQAIKKVVDPDNLFHHPQGVLPA

SEQ ID NO: 2216 - protein, 490 aa, Remersonia thermophila
MRRIAPLFALLGAATSSPVSARSAALLDCLAAAEVPVDEVGSPEYKLDATGFNLALRYTPAAVVAATTVKHIQDAVTCARENGFRATPKCGGHSYANFGLGGEDGHVVIEMSRMNKVVLDKETGIVTAEGGTRLGHFAWEAYNQGKRAISHGTCPGVGAGGHVLHGGFGMSSHTRGLASDWLVGATVVLANSTMVRCSETENPDLFWALRGAGGSMGIVTEFRFRTFEVPEKVTWFIAAVQWPTEERALAGLKAAQEFADTMPAELNMRLFIARRFVNFEGLYHGGREGLQAALAPLLKATGANLALVKTGDWVDQARHFGGMTNIDQQHGHEDHDTFFSTSLYTKALSDEQLRAFVGYWFQHAKASPRDWHVQMDFHGGKTSAVSKPASDHTAYAYRDALFMFLLYDRVDHGVAYPADGHLLMDNFVGNITQGMDRDDWGMYINYPNHRLGQEEAQQNYWGRHLPRLQAIKKAVDPEDLFHFPQGVLPA

SEQ ID NO: 2217 - protein, 500 aa, Myriococcum thermophilum
LASLLGLLATAAPAAVQASPFRHGIRANNQTDPLIECLTEAGVPVDEAGTEDYRLDVSTFNLRLNYTPAAVVGASTAEHVRDAVACAARTGVKTTAKCGGHSYASFGLGGEDGHLVIEMSRMNEVVLDTETGIATVQGGTRLGHLAVELWDQGKRAISHGTCPGVGVGGHALHGGYGMSSHTHGLALDWIVGATVVLANGTVVEASETENPDLFWALRGAGSSMGVVTEFRFNTFQPPENLTYFVVSVQWTTEERALSGLAAVQEFAKTMPAELNMRVYITSRFVNLEGLYYGDKAGLEETLAPLIEQVNGVLALAQTGSWLDQLKHYGGSNLDQGYGHEEHENFHSTSLYTHELSEAQLQSFVGYWFNSAKNNTRNWHVQIDLHGGENSGVAVGDRDISGVPSAYAHRDFLLMFLLYDRSDRGAFPDDGTASMDDFAAAITDGLEPDQWGMYINYPNPLLDQAAAQQSYWGPNLARLQAIKKEVDPDDLFHYPQGVLPA

SEQ ID NO: 2218 - protein, 573 aa, Myceliophthora thermophila
QQSCNTPSNRACWTDGYDINTDYEVDSPDTGVVRPYTLTLTEVDNWTGPDGVVKEKVMLVNNSIIGPTIFADWGDTIQVTVINNLETNGTSIHWHGLHQKGTNLHDGANGITECPIPPKGGRKVYRFKAQQYGTSWYHSHFSAQYGNGVVGAIQINGPASLPYDTDLGVFPISDYYYSSADELVELTKNSGAPFSDNVLFNGTAKHPETGEGEYANVTLTPGRRHRLRLINTSVENHFQVSLVNHTMTIIAADMVPVNAMTVDSLFLGVGQRYDVVIEASRTPGNYWFNVTFGGGLLCGGSRNPYPAAIFHYAGAPGGPPTDEGKAPVDHNCLDLPNLKPVVARDVPLSGFAKRPDNTLDVTLDTTGTPLFVWKVNGSAINIDWGRPVVDYVLTQNTSFPPGYNIVEVNGADQWSYWLIENDPGAPFTLPHPMHLHGHDFYVLGRSPDESPASNERHVFDPARDAGLLSGANPVRRDVTMLPAFGWVVLAFRADNPGAWLFHCHIAWHVSGGLGVVYLERADDLRGAVSDADADDLDRLCADWRRYWPTNPYPKSDSGLKHRWVEEGEWLVKA

SEQ ID NO: 2219 - protein, 620 aa, unidentified; identical to SEQ ID NO: 9

SEQ ID NO: 2220 - protein, 605 aa, Synthetic construct
KSFISAATLLVGILTPSVAAAPPSTPEQRDLLVPITEREEAAVKARQQSCNTPSNRACWTDGYDINTDYEVDSPDTGVVRPYTLTLTEVDNWTGPDGVVKEKVMLVNNSIIGPTIFADWGDTIQVTVINNLETNGTSIHWHGLHQKGTNLHDGANGITECPIPPKGGRKVYRFKAQQYGTSWYHSHFSAQYGNGVVGAIQINGPASLPYDTDLGVFPISDYYYSSADELVELTKNSGAPFSDNVLFNGTAKHPETGEGEYANVTLTPGRRHRLRLINTSVENHFQVSLVNHTMTIIAADMVPVNAMTVDSLFLGVGQRYDVVIEASRTPGNYWFNVTFGGGLLCGGSRNPYPAAIFHYAGAPGGPPTDEGKAPVDHNCLDLPNLKPVVARDVPLSGFAKRPDNTLDVTLDTTGTPLFVWKVNGSAINIDWGRPVVDYVLTQNTSFPPGYNIVEVNGADQWSYWLIENDPGAPFTLPHPMHLHGHDFYVLGRSPDESPASNERHVFDPARDAGLLSGANPVRRDVTMLPAFGWVVLAFRADNPGAWLFHCHIAWHVSGGLGVVYLERADDLRGAVSDADADDLDRLCADWRRYWPTNPYPKSDSGL

SEQ ID NO: 2221 - protein, 620 aa, Myceliophthora thermophila
MRSFISAATLLVGILTPSVAAAPPSTPEQRDLLVPITEREEAAVKARQQSCNTPSNRACWTDGYDINTDYEVDSPDTGVVRPYTLTLTEVDNWTGPDGVVKEKVMLVNNSIIGPTIFADWGDTIQVTVINNLETNGTSIHWHGLHQKGTNLHDGANGITECPIPPKGGRKVYRFKAQQYGTSWYHSHFSAQYGNGVVGAIQINGPASLPYDTDLGVFPISDYYYSSADELVELTKNSGAPFSDNVLFNGTAKHPETGEGEYANVTLTPGRRHRLRLINTSVENHFQVSLVNHTMTIIAADMVPVNAMTVDSLFLGVGQRYDVVIEASRTPGNYWFNVTFGGGLLCGGSRNPYPAAIFHYAGAPGGPPTDEGKAPVDHNCLDLPNLKPVVARDVPLSGFAKRPDNTLDVTLDTTGTPLFVWKVNGSAINIDWGRPVVDYVLTQNTSFPPGYNIVEVNGADQWSYWLIENDPGAPFTLPHPMHLHGHDFYVLGRSPDESPASNERHVFDPARDAGLLSGANPVRRDVTMLPAFGWVVLAFRADNPGAWLFHCHIAWHVSGGLGVVYLERADDLRGAVSDADADDLDRLCADWRRYWPTNPYPKSDSGLKHRWVEEGEWLVKA

SEQ ID NO: 2222 - protein, 620 aa, Myceliophthora thermophila
MKSFISAATLLVGILTPSVAAAPPSTPEQRDLLVPITEREEAAVKARQQSCNTPSNRACWTDGYDINTDYEVDSPDTGVVRPYTLTLTEVDNWTGPDGVVKEKVMLVNNSIIGPTIFADWGDTIQVTVINNLETNGTSIHWHGLHQKGTNLHDGANGITECPIPPKGGRKVYRFKAQQYGTSWYHSHFSAQYGNGVVGAIQINGPASLPYDTDLGVFPISDYYYSSADELVELTKNSGAPFSDNVLFNGTAKHPETGEGEYANVTLTPGRRHRLRLINTSVENHFQVSLVNHTMTIIAADMVPVNAMTVDSLFLGVGQRYDVVIEASRTPGNYWFNVTFGGGLLCGGSRNPYPAAIFHYAGAPGGPPTDEGKAPVDHNCLDLPNLKPVVARDVPLSGFAKRPDNTLDVTLDTTGTPLFVWKVNGSAINIDWGRPVVDYVLTQNTSFPPGYNIVEVNGADQWSYWLIENDPGAPFTLPHPMHLHGHDFYVLGRSPDESPASNERHVFDPARDAGLLSGANPVRRDVTMLPAFGWVVLAFRADNPGAWLFHCHIAWHVSGGVGVVYLERADDLRGAVSDADADDLDRLCADWRRYWPTNPYPKSDSGLKHRWVEEGEWLVKA

SEQ ID NO: 2223 - protein, 616 aa, Myceliophthora thermophila
MKSFISAATLLVGILTPSVAAAPPSTPEQRDLLVPITEREEAAVKARQQSCNTPSNRACWTDGYDINTDYEVDSPDTGVVRPYTLTLTEVDNWTGPDGVVKEKVMLVNRPTIFADWGDTIQVTVINNLETNGTSIHWHGLHQKGTNLHDGANGITECPIPPKGGRKVYRFKAQQYGTSWYHSHFSAQYGNGVVGAIQINGPASLPYDTDLGVFPISDYYYSSADELVELTKNSGAPFSDNVLFNGTAKHPETGEGEYANVTLTPGRRHRLRLINTSVENHFQVSLVNHTMTIIAADMVPVNAMTVDSLFLGVGQRYDVVIEASRTPGNYWFNVTFGGGLLCGGSRNPYPAAIFHYAGAPGGPPTDEGKAPVDHNCLDLPNLKPVVARDVPLSGFAKRPDNTLDVTLDTTGTPLFVWKVNGSAINIDWGRPVVDYVLTQNTSFPPGYNIVEVNGADQWSYWLIENDPGAPFTLPHPMHLHGHDFYVLGRSPDESPASNERHVFDPARDAGLLSGANPVRRDVTMLPAFGWVVLAFRADNPGAWLFHCHIAWHVSGGLGVVYLERADDLRGAVSDADADDLDRLCADWRRYWPTNPYPKSDSGLKHRWVEEGEWLVKA

SEQ ID NO: 2224 - protein, 595 aa, Myceliophthora thermophila
APPSTPEQRDLLVPITEREEAAVKARQQSCNTPSNRACWTDGYDINTDYEVDSPDTGVVRPYTLTLTEVDNWTGPDGVVKEKVMLVNRPTIFADWGDTIQVTVINNLETNGTSIHWHGLHQKGTNLHDGANGITECPIPPKGGRKVYRFKAQQYGTSWYHSHFSAQYGNGVVGAIQINGPASLPYDTDLGVFPISDYYYSSADELVELTKNSGAPFSDNVLFNGTAKHPETGEGEYANVTLTPGRRHRLRLINTSVENHFQVSLVNHTMTIIAADMVPVNAMTVDSLFLGVGQRYDVVIEASRTPGNYWFNVTFGGGLLCGGSRNPYPAAIFHYAGAPGGPPTDEGKAPVDHNCLDLPNLKPVVARDVPLSGFAKRPDNTLDVTLDTTGTPLFVWKVNGSAINIDWGRPVVDYVLTQNTSFPPGYNIVEVNGADQWSYWLIENDPGAPFTLPHPMHLHGHDFYVLGRSPDESPASNERHVFDPARDAGLLSGANPVRRDVTMLPAFGWVVLAFRADNPGAWLFHCHIAWHVSGGLGVVYLERADDLRGAVSDADADDLDRLCADWRRYWPTNPYPKSDSGLKHRWVEEGEWLVKA

SEQ ID NO: 2225 - protein, 456 aa, Myceliophthora thermophila
MKSFISAATLLVGILTPSVAAAPPSTPEQRDLLVPITEREEAAVKARQQSCNTPSNRACWTDGYDINTDYEVDSPDTGVVRPYTLTLTEVDNWTGPDGVVKEKVMLVNRPTIFADWGDTIQVTVINNLETNGTSIHWHGLHQKGTNLHDGANGITECPIPPKGGRKVYRFKAQQYGTSWYHSHFSAQYGNGVVGAIQINGPASLPYDTDLGVFPISDYYYSSADELVELTKNSGAPFSDNVLFNGTAKHPETGEGEYANVTLTPGRRHRLRLINTSVENHFQVSLVNHTMTIIAADMVPVNAMTVDSLFLGVGQRYDVVIEASRTPGNYWFNVTFGGGLLCGGSRNPYPAAIFHYAGAPGGPPTDEGKAPVDHNCLDLPNLKPVVARDVPLSGFAKRPDNTLDVTLDTTGTPLFVWKVNGSAINIDWGRPVVDYVLTQNTSFPPGYNIVEVNGADQ

SEQ ID NO: 2226 - protein, 620 aa, Myceliophthora thermophila
MRSFISAATLLVGILTPSVAAAPPSTPEQRDLLVPITEREEAAVKARQQSCNTPSNRACWTDGYDINTDYEVDSPDTGVVRPYTLTLTEVDNWTGPDGVVKEKVMLVNNSIIGPTIFADWGDTIQVTVINNLETNGTSIHWHGLHQKGTNLHDGANGITECPIPPKGGRKVYRFKAQQYGTSWYHSHFSAQYGNGVVGAIQINGPASLPYDTDLGVFPISDYYYSSADELVELTKNSGAPFSDNVLFNGTAKHPETGEGEYANVTLTPGRRHRLRLINTSVENHFQVSLVNHTMTIIAADMVPVNAMTVDSLFLGVGQRYDVVIEASRTPGNYWFNVTFGGGLLCGGSRNPYPAAIFHYAGAPGGPPTDEGKAPVDHNCLDLPNLKPVVARDVPLSGFAKRPDNTLDVTLDTTGTPLFVWKVNGSAINIDWGRPVVDYVLTQNTSFPPGYNIVEVNGADQWSYWLIENDPGAPFTLPHPIHLHGHDFYVLGRSPDESPASNERHVFDPARDAGLLSGANPVRRDVTMLPAFGWVVLAFRADNPGAWLFHCHIAWHVSGGLGVVYLERADDLRGAVSDADADDLDRLCADWRRYWPTNPYPKSDSGLKHRWVEEGEWLVKA

SEQ ID NO: 2227 - protein, 620 aa, Myceliophthora thermophila
MRSFISAATLLVGILTPSVAAAPPSTPEQRDLLVPITEREEAAVKARQQSCNTPSNRACWTDGYDINTDYEVDSPDTGVVRPYTLTLTEVDNWTGPDGVVKEKVMLVNNSIIGPTIFADWGDTIQVTVINNLETNGTSIHWHGLHQKGTNLHDGANGITECPIPPKGGRKVYRFKAQQYGTSWYHSHFSAQYGNGVVGAIQINGPASLPYDTDLGVFPISDYYYSSADELVELTKNSGAPFSDNVLFNGTAKHPETGEGEYANVTLTPGRRHRLRLINTSVENHFQVSLVNHTMTIIAADMVPVNAMTVDSLFLGVGQRYDVVIEASRTPGNYWFNVTFGGGLLCGGSRNPYPAAIFHYAGAPGGPPTDEGKAPVDHNCLDLPNLKPVVARDVPLSGFAKRPDNTLDVTLDTTGTPLFVWKVNGSAINIDWGRPVVDYVMTQNTSFPPGYNIVEVNGADQWSYWLIENDPGAPFTLPHPMHLHGHDFYVLGRSPDESPASNERHVFDPARDAGLLSGANPVRRDVTMLPAFGWVVLAFRADNPGAWLFHCHIAWHVSGGLGVVYLERADDLRGAVSDADADDLDRLCADWRRYWPTNPYPKSDSGLKHRWVEEGEWLVKA

SEQ ID NO: 2228 - protein, 620 aa, Myceliophthora thermophila
MRSFISAATLLVGILTPSVAAAPPSTPEQRDLLVPITEREEAAVKARQQSCNTPSNRACWTDGYDINTDYEVDSPDTGVVRPYTLTLTEVDNWTGPDGVVKEKVMLVNNSIIGPTIFADWGDTIQVTVINNLETNGTSIHWHGLHQKGTNLHDGANGITECPIPPKGGRKVYRFKAQQYGTSWYHSHFSAQYGNGVVGAIQINGPASLPYDTDLGVFPISDYYYSSADELVELTKNSGAPFSDNVLFNGTAKHPETGEGEYANVTLTPGRRHRLRLINTSVENHFQVSLVNHTMTIIAADMVPVNAMTVDSLFLGVGQRYDVVIEASRTPGNYWFNVTFGGGLLCGGSRNPYPAAIFHYAGAPGGPPTDEGKAPVDHNCLDLPNLKPVVARDVPLSGFAKRPDNTLDVTLDTTGTPLFVWKVNGSAINIDWGRPVVSYVLTQNTSFPPGYNIVEVNGADQWSYWLIENDPGAPFTLPHPMHLHGHDFYVLGRSPDESPASNERHVFDPARDAGLLSGANPVRRDVTMLPAFGWVVLAFRADNPGAWLFHCHIAWHVSGGLGVVYLERADDLRGAVSDADADDLDRLCADWRRYWPTNPYPKSDSGLKHRWVEEGEWLVKA

SEQ ID NO: 2229 - protein, 620 aa, Myceliophthora thermophila
MRSFISAATLLVGILTPSVAAAPPSTPEQRDLLVPITEREEAAVKARQQSCNTPSNRACWTDGYDINTDYEVDSPDTGVVRPYTLTLTEVDNWTGPDGVVKEKVMLVNNSIIGPTIFADWGDTIQVTVINNLETNGTSIHWHGLHQKGTNLHDGANGITECPIPPKGGRKVYRFKAQQYGTSWYHSHFSAQYGNGVVGAIQINGPASLPYDTDLGVFPITDYYYSSADELVELTKNSGAPFSDNVLFNGTAKHPETGEGEYANVTLTPGRRHRLRLINTSVENHFQVSLVNHTMTIIAADMVPVNAMTVDSLFLGVGQRYDVVIEASRTPGNYWFNVTFGGGLLCGGSRNPYPAAIFHYAGAPGGPPTDEGKAPVDHNCLDLPNLKPVVARDVPLSGFAKRPDNTLDVTLDTTGTPLFVWKVNGSAINIDWGRPVVDYVLTQNTSFPPGYNIVEVNGADQWSYWLIENDPGAPFTLPHPMHLHGHDFYVLGRSPDESPASNERHVFDPARDAGLLSGANPVRRDVTMLPAFGWVVLAFRADNPGAWLFHCHIAWHVSGGLGVVYLERADDLRGAVSDADADDLDRLCADWRRYWPTNPYPKSDSGLKHRWVEEGEWLVKA

SEQ ID NO: 2230 - protein, 620 aa, Myceliophthora thermophila
MRSFISAATLLVGILTPSVAAAPPSTPEQRDLLVPITEREEAAVKARQQSCNTPSNRACWTDGYDINTDYEVDSPDTGVVRPYTLTLTEVDNWTGPDGVVKEKVMLVNNSIIGPTIFADWGDTIQVTVINNLETNGTSIHWHGLHQKGTNLHDGANGITECPIPPKGGRKVYRFKAQQYGTSWYHSHFSAQYGNGVVGAIQINGPASLPYDTDLGVFPISDYYYSSADELVELTKNSGAPFSDNVLFNGTAKHPETGEGEYANVTLTPGRRHRLRLINTSVENHFQVSLVNHTMTIIAADMVPVNAMTVDSLFLGVGQRYDVVIEASRTPGNYWFNVTFGGGLLCGGSRNPYPAAIFHYAGAPGGPPTDEGKAPVDHNCLDLPNLKPVVARDVPLSGFAKRPDNTLDVTLDTTGTPLFVWKVNGSAINIDWGRPVVDYVLTQNTSFPPGYNIVEVNGADQWSYWLIENDPGAPFTLPHPVHLHGHDFYVLGRSPDESPASNERHVFDPARDAGLLSGANPVRRDVTMLPAFGWVVLAFRADNPGAWLFHCHIAWHVSGGLGVVYLERADDLRGAVSDADADDLDRLCADWRRYWPTNPYPKSDSGLKHRWVEEGEWLVKA

SEQ ID NO: 2231 - protein, 620 aa, Myceliophthora thermophila
MRSFISAATLLVGILTPSVAAAPPSTPEQRDLLVPITEREEAAVKARQQSCNTPSNRACWTDGYDINTDYEVDSPDTGVVRPYTLTLTEVDNWTGPDGVVKEKVMLVNNSIIGPTIFADWGDTIQVTVINNLETNGTSIHWHGLHQKGTNLHDGANGITECPIPPKGGRKVYRFKAQQYGTSWYHSHFSAQYGNGVVGAIQINGPASLPYDTDLGVFPISDYYYSSADELVELTKNSGAPFSDNVLFNGTAKHPETGEGEYANVTLTPGRRHRLRLINTSVENHFQVSLVNHTMTIIAADMVPVNAMTVDSLFLGVGQRYDVVIEASRTPGNYWFNVTFGGGLLCGGSKNPYPAAIFHYAGAPGGPPTDEGKAPVDHNCLDLPNLKPVVARDVPLSGFAKRPDNTLDVTLDTTGTPLFVWKVNGSAINIDWGRPVVDYVLTQNTSFPPGYNIVEVNGADQWSYWLIENDPGAPFTLPHPMHLHGHDFYVLGRSPDESPASNERHVFDPARDAGLLSGANPVRRDVTMLPAFGWVVLAFRADNPGAWLFHCHIAWHVSGGLGVVYLERADDLRGAVSDADADDLDRLCADWRRYWPTNPYPKSDSGLKHRWVEEGEWLVKA

SEQ ID NO: 2232 - protein, 620 aa, Myceliophthora thermophila
MRSFISAATLLVGILTPSVAAAPPSTPEQRDLLVPITEREEAAVKARQQSCNTPSNRACWTDGYDINTDYEVDSPDTGVVRPYTLTLTEVDNWTGPDGVVKEKVMLVNNSIIGPTIFADWGDTIQVTVINNLETNGTSIHWHGLHQKGTNLHDGANGITECPIPPKGGRKVYRFKAQQYGTSWYHSHFSAQYGNGVVGAIQINGPASLPYDTDLGVFPISDYYYSSADELVELTKNSGAPFSDNVLFNGTAKHPETGEGEYANVTLTPGRRHRLRLINTSVENHFQVSLVNHTMTIIAADMVPVNAMTVDSLFLGVGQRYDVVIEASRTPGNYWFNVTFGGGLKCGGSRNPYPAAIFHYAGAPGGPPTDEGKAPVDHNCLDLPNLKPVVARDVPLSGFAKRPDNTLDVTLDTTGTPLFVWKVNGSAINIDWGRPVVDYVLTQNTSFPPGYNIVEVNGADQWSYWLIENDPGAPFTLPHPMHLHGHDFYVLGRSPDESPASNERHVFDPARDAGLLSGANPVRRDVTMLPAFGWVVLAFRADNPGAWLFHCHIAWHVSGGLGVVYLERADDLRGAVSDADADDLDRLCADWRRYWPTNPYPKSDSGLKHRWVEEGEWLVKA

SEQ ID NO: 2233 - protein, 620 aa, Myceliophthora thermophila
MRSFISAATLLVGILTPSVAAAPPSTPEQRDLLVPITEREEAAVKARQQSCNTPSNRACWTDGYDINTDYEVDSPDTGVVRPYTLTLTEVDNWTGPDGVVKEKVMLVNNSIIGPTIFADWGDTIQVTVINNLETNGTSIHWHGLHQKGTNLHDGANGITECPIPPKGGRKVYRFKAQQYGTSWYHSHFSAQYGNGVVGAIQINGPASLPYDTDLGVFPISDYYYSSADELVELTKNSGAPFSDNVLFNGTAKHPETGEGEYANVTLTPGRRHRLRLINTSVENHFQVSLVNHTMTIIAADMVPVNAMTVDSLFLGVGQRYDVVIEASRTPGNYWFNVTFGGGLLCGGSRNPYPAAIFHYAGAPGGPPTDEGKAPVDHNCLDLPNLKPVVARDVPLSGFAKRPDNTLDVTLDTTGTPLFVWKVNGSAINIDWGRPVVMYVLTQNTSFPPGYNIVEVNGADQWSYWLIENDPGAPFTLPHPMHLHGHDFYVLGRSPDESPASNERHVFDPARDAGLLSGANPVRRDVTMLPAFGWVVLAFRADNPGAWLFHCHIAWHVSGGLGVVYLERADDLRGAVSDADADDLDRLCADWRRYWPTNPYPKSDSGLKHRWVEEGEWLVKA

SEQ ID NO: 2234 - protein, 620 aa, Myceliophthora thermophila
MRSFISAATLLVGILTPSVAAAPPSTPEQRDLLVPITEREEAAVKARQQSCNTPSNRACWTDGYDINTDYEVDSPDTGVVRPYTLTLTEVDNWTGPDGVVKEKVMLVNNSIIGPTIFADWGDTIQVTVINNLETNGTSIHWHGLHQKGTNLHDGANGITECPIPPKGGRKVYRFKAQQYGTSWYHSHFSAQYGNGVVGAIQINGPASLPYDTDLGVFPISDYYYSSADELVELTKNSGAPFSDNVLFNGTAKHPETGEGEYANVTLTPGRRHRLRLINTSVENHFQVSLVNHTMTIIAADMVPVNAMTVDSLFLGVGQRYDVVIEASRTPGNYWFNVTFGGGLLCGGSRNPYPAAIFHYAGAPGGPPTDEGKAPVDHNCLDLPNLKPVVARDVPLSGFAKRPDNTLDVTLDTTGTPLFVWKVNGSAINIDWGRPVVGYVLTQNTSFPPGYNIVEVNGADQWSYWLIENDPGAPFTLPHPMHLHGHDFYVLGRSPDESPASNERHVFDPARDAGLLSGANPVRRDVTMLPAFGWVVLAFRADNPGAWLFHCHIAWHVSGGLGVVYLERADDLRGAVSDADADDLDRLCADWRRYWPTNPYPKSDSGLKHRWVEEGEWLVKA

SEQ ID NO: 2235 - protein, 620 aa, Myceliophthora thermophila
MRSFISAATLLVGILTPSVAAAPPSTPEQRDLLVPITEREEAAVKARQQSCNTPSNRACWTDGYDINTDYEVDSPDTGVVRPYTLTLTEVDNWTGPDGVVKEKVMLVNNSIIGPTIFADWGDTIQVTVINNLETNGTSIHWHGLHQKGTNLHDGANGITECPIPPKGGRKVYRFKAQQYGTSWYHSHFSAQYGNGVVGAIQINGPASLPYDTDLGVFPISDYYYSSADELVELTKNSGAPFSDNVLFNGTAKHPETGEGEYANVTLTPGRRHRLRLINTSVENHFQVSLVNHTMTIIAADMVPVNAMTVDSLFLGVGQRYDVVIEASRTPGNYWFNVTFGGGLTCGGSRNPYPAAIFHYAGAPGGPPTDEGKAPVDHNCLDLPNLKPVVARDVPLSGFAKRPDNTLDVTLDTTGTPLFVWKVNGSAINIDWGRPVVDYVLTQNTSFPPGYNIVEVNGADQWSYWLIENDPGAPFTLPHPMHLHGHDFYVLGRSPDESPASNERHVFDPARDAGLLSGANPVRRDVTMLPAFGWVVLAFRADNPGAWLFHCHIAWHVSGGLGVVYLERADDLRGAVSDADADDLDRLCADWRRYWPTNPYPKSDSGLKHRWVEEGEWLVKA

SEQ ID NO: 2236 - protein, 616 aa, Myceliophthora thermophila
MKSFISAATLLVGILTPSVAAAPPSTPEQRDLLVPITEREEAAVKARQQSCNTPSNRACWTDGYDINTDYEVDSPDTGVVRPYTLTLTEVDNWTGPDGVVKEKVMLVNRPTIFADWGDTIQVTVINNLETNGTSIHWHGLHQKGTNLHDGANGITECPIPPKGGRKVYRFKAQQYGTSWYHSHFSAQYGNGVVGAIQINGPASLPYDTDLGVFPISDYYYSSADELVELTKNSGAPFSDNVLFNGTAKHPETGEGEYANVTLTPGRRHRLRLINTSVENHFQVSLVNHTMTIIAADMVPVNAMTVDSLFLGVGQRYDVVIEASRTPGNYWFNVTFGGGLLCGGSRNPYPAAIFHYAGAPGGPPTDEGKAPVDHNCLDLPNLKPVVARDVPLSGFAKRPDNTLDVTLDTTGTPLFVWKVNGSAINIDWGRPVVDYVLTQNTSFPPGYNIVEVNGADQWSYWLIENDPGAPFTLPHPMHLHGHDFYVLGRSPDESPASNERHVFDPARDAGLLSGANPVRRDVTMLPAFGWVVLAFRADNPGAWLFHCHIAWHVSGGLGVVYLERADDLRGAVSDADADDLDRLCADWRHYWPTNPYPKSDSGLKHRWVEEGEWLVKA

SEQ ID NO: 2237 - protein, 620 aa, Myceliophthora thermophila
MRSFISAATLLVGILTPSVAAAPPSTPEQRDLLVPITEREEAAVKARQQSCNTPSNRACWTDGYDINTDYEVDSPDTGVVRPYTLTLTEVDNWTGPDGVVKEKVMLVNNSIIGPTIFADWGDTIQVTVINNLETNGTSIHWHGLHQKGTNLHDGANGITECPIPPKGGRKVYRFKAQQYGTSWYHSHFSAQYGNGVVGAIQINGPASLPYDTDLGVFPISDYYYSSADELVELTKNSGAPFSDNVLFNGTAKHPETGEGEYANVTLTPGRRHRLRLINTSVENHFQVSLVNHTMTIIAADMVPVNAMTVDSLFLGVGQRYDVVIEASRTPGNYWFNVTFGGGLLCGGSRNPYPAAIFHYAGAPGGPPTDEGKAPVDHNCLDLPNLKPVVARDVPLSGFAKRPDNTLDVTLDTTGTPLFVWKVNGSAINIDWGRPVVDYVLTQNTSFPPGYNIVEVNGADQWSYWLIENDPGAPFTLPHPMHLHGHDFYVLGRSPDESPASNERHVFDPARDAGLLSGANPVRRDVTMLPAFGWVVLAFRADNPGAWLFHCHIAWHLEAGLGVVYLERADDLRGAVSDADADDLDRLCADWRRYWPTNPYPKSDSGLKHRWVEEGEWLVKA

SEQ ID NO: 2238 - protein, 620 aa, unidentified
MKSFISAATLLVGILTPSVAAAPPSTPEQRDLLVPITEREEAAVKARQQSCNTPSNRACWTDGYDINTDYEVDSPDTGVVRPYTLTLTEVDNWTGPDGVVKEKVMLVNNSIIGPTIFADWGDTIQVTVINNLETNGTSIHWHGLHQKGTNLHDGANGITECPIPPKGGRKVYRFKAQQYGTSWYHSHFSAQYGNGVVGAIQINGPASLPYDTDLGVFPISDYYYSSADELVELTKNSGAPFSDNVLFNGTAKHPETGEGEYANVTLTPGRRHRLRLINTSVENHFQVSLVNHTMCIIAADMVPVNAMTVDSLFLGVGQRYDVVIEANRTPGNYWFNVTFGGGLLCGGSRNPYPAAIFHYAGAPGGPPTDEGKAPVDHNCLDLPNLKPVVARDVPLSGFAKRADNTLDVTLDTTGTPLFVWKVNGSAINIDWGRAVVDYVLTQNTSFPPGYNIVEVNGADQWSYWLIENDPGAPFTLPHPMHLHGHDFYVLGRSPDESPASNERHVFDPARDAGLLSGANPVRRDVSMLPAFGWVVLSFRADNPGAWLFHCHIAWHVSGGLGVVYLERADDLRGAVSDADADDLDRLCADWRRYWPTNPYPKSDSGLKHRWVEEGEWLVKA

SEQ ID NO: 2239 - protein, 573 aa, unidentified
QQSCNTPSNRACWTDGYDINTDYEVDSPDTGVVRPYTLTLTEVDNWTGPDGVVKEKVMLVNNSIIGPTIFADWGDTIQVTVINNLETNGTSIHWHGLHQKGTNLHDGANGITECPIPPKGGRKVYRFKAQQYGTSWYHSHFSAQYGNGVVGAIQINGPASLPYDTDLGVFPISDYYYSSADELVELTKNSGAPFSDNVLFNGTAKHPETGEGEYANVTLTPGRRHRLRLINTSVENHFQVSLVNHTMCIIAADMVPVNAMTVDSLFLGVGQRYDVVIEANRTPGNYWFNVTFGGGLLCGGSRNPYPAAIFHYAGAPGGPPTDEGKAPVDHNCLDLPNLKPVVARDVPLSGFAKRADNTLDVTLDTTGTPLFVWKVNGSAINIDWGRAVVDYVLTQNTSFPPGYNIVEVNGADQWSYWLIENDPGAPFTLPHPMHLHGHDFYVLGRSPDESPASNERHVFDPARDAGLLSGANPVRRDVSMLPAFGWVVLSFRADNPGAWLFHCHIAWHVSGGLGVVYLERADDLRGAVSDADADDLDRLCADWRRYWPTNPYPKSDSGLKHRWVEEGEWLVKA

SEQ ID NO: 2240 - protein, 573 aa, unidentified
QQSCNTPSNRACWTDGYDINTDYEVDSPDTGVVRPYTLTLTEVDNWTGPDGVVKEKVMLVNNSIIGPTIFADWGDTIQVTVINNLETNGTSIHWHGLHQKGTNLHDGANGITECPIPPKGGRKVYRFKAQQYGTSWYHSHFSAQYGNGVVGAIQINGPASLPYDTDLGVFPISDYYYSSADELVELTKXXGAPFSDNVLFNGTAKHPETGEGEYANVTLTPGRRHRLRLINTSVENHFQVSLVNHTMCIIAADMVPVNAMTVDSLFLGVGQRYDVVIEANRTPGNYWFNVTFGGGLLCGGSRNPYPAAIFHYAGAPGGPPTDEGKAPVDHNCLDLPNLKPVVARDVPLSGFAKRADNTLDVTLDTTGTPLXVWKVNGSAINIDWGRAVVDYVLTQNTSFPPGYNIVEVNGADQWSYWLIENDPGAPFTLPHPMHLHGHDFYVLGRSPDESPASNERHVFDPARDAGLLSGANPVRRDVSMLPAFGWVVLSFRADNPGAWLFHCHIAWHVSGGLGVVYLERADDLRGAVSDADADDLDRLCADWRRYWPTNPYPKSDSGLKHRWVEEGEWLVKA

SEQ ID NO: 2241 - protein, 573 aa, Unidentified
QQSCNTPSNRACWTDGYDINTDYEVDSPDTGVVRPYTLTLTEVDNWTGPDGVVKEKVMLVNNSIIGPTIFADWGDTIQVTVINNLETNGTSIEWEGLHQKGTNLHDGADGITECPIPPKGGRKVYRFKAQQYGTSWYHSHFSAQYGNGVVGAIQINGPASLPYDTDLGVFPISDYYYSSADELVELTKNSGAPFSDNVLFNGTAKHPETGEGEYANVTLTPGRRHRLRLINTSVENHFQVSLVNHTMCIIAADMVPVNAMTVDSLFLGVGQRYDVVIEANRTPGNYWFNVTFGGGLLCGGSRNPYPAAIFHYAGAPGGPPTDEGKAPVDHNCLDLPNLKPVVARDVPLSGFAKRADNTLDVTLDTTGTPLFVWKVNGSAINIDWGRAVVDYVLTQNTSFPPGYNIVEVNGADQWSYWLIENDPGAPFTLPHPEHLHGHDFYVLGRSPDESPASNERHVFDPARDAGLLSGANPVRRDVSELPAFGWVVLSFRADNPGAWLFHCHIEWHVSGGLGVVYLERADDLRGAVSDADADDLDRLCADWRRYWPTNPYPKSDSGLKHRWVEEGEWLVKA

SEQ ID NO: 2242 - protein, 620 aa, Myceliophthora thermophila
MKSFISAATLLVGILTPSVAAAPPSTPEQRDLLVPITEREEAAVKARQQSCNTPSNRACWTNGYDINTDYEVDSPDTGVVRPYTLTLTEVNNWTGPDGVVKEKVMLVNNSIIGPTIFADWGDTIQVTVINNLETNGTSIHWHGLHQKGTNLHDGANGITECPIPPKGGRKVYRFKAQQYGTSWYHSHFSAQYGNGVVGAIQINGPASLPYDTDLGVFPISDYYYSSADELVELTXXXGAPFSDNVLFNGTAKHPGTGEGEYANVTLTPGRRHRLRLINTSVENHFQVSLVNHTMCIIAADMVPVNAMTVDSLFLGVGQRYDVVIXANRXXGNYWFNVTFGGGLLCGGSRNPYPAAIFHYAGAPGGPPTDEGKAPVDHNCLDLPNLKPVVARDVPLSGFAKRADNTLDVTLDTTGTPLFVWKVNGSAINIDWGRAVVDYVLTQNTSFPPGYNIVEVNGADQWSYWLIENDPGAPFTLPHPMHLHGHDFYVLGRSPDESPASNERHVFDPARDAGLLSGANPVRRDVSMLPAFGWVVLSFRADNPGAWLFHCHIAWHVSGGLGVVYLERADDLRGAVSDADADDLDRLCADWRRYWPTNPYPKSDSGLKHRWVEEGEWLVKA

SEQ ID NO: 2243 - protein, 573 aa, Unidentified
QQSCNTPSNRACWTDGYDINTDYEVDSPDTGVVRPYTLTLTEVDNWTGPDGVVKEKVMLVNNSIIGPTIFADWGDTIQVTVINNLETNGTSIHWHGLHQKGTNLHXGXXGITECPIPPKGGRKVYRFKAQQYGTSWYHSHFSAQYGNGVVGAIQINGPASLPYDTDLGVFPISDYYYSSADELVELTKNSGAPFSDNVLFNGTAKHPETGEGEYANVTLTPGRRHRLRLINTSVENHFQVSLVNHTMCIIAADMVPVNAMTVDSLFLGVGQRYDVVIEANRTPGNYWFNVTFGGGLLCGGSRNPYPAAIFHYAGAPGGPPTDEGKAPVDHNCLDLPNLKPVVARDVPLSGFAKRADNTLDVTLDTTGTPLFVWKVNGSAINIDWGRAVVDYVLTQNTSFPPGYNIVEVNGADQWSYWLIENDPGAPFXLPHPMHLHGHDFYVLGRSPDESPASNERHVFDPARDAGLLSGANPVRRDVSMLPAFGWVVLSFRADNPGAWXFHCHIAWHVXXGLXVVYLERADDLRGAVSDADADDLDRLCADWRRYWPTNPYPKSDSGLKHRWVEEGEWLVKA

SEQ ID NO: 2244 - protein, 627 aa, Myceliophthora
MKSFISAAAFLVGILTPSVAAAPPSTPEQRDLLVPITEREEASVKPRQQSCNTPSNRTCWTDGYDINTDYEVDSPDTGVVRPAGADMRQYTLTLTEVDNWTGPDGVVKGKVMLVNNSIIGPTIFADWGDTIQVTVINNLETNGTSIHWHGLHQKGTNLHDGANGITECPIPPKGGRKVYRFKAQQYGTSWYHSHFSAQYGNGVVGAIQINGPASLPYDIDLGVFPISDYYYSSADELVQLTKNSGAPFSDNVLFNGTAKHPETGEGEYANVTLTSGRRHRLRLINTSVENHFQVSLVNHTMTIIAADMVPVNAMTVDSLFLGVGQRYDVVIDASRTPGNYWFNVTFGGGLLCGSSKNPYPAAIFHYAGAPGGLPTDEGKPPIDHNCLDLPNLKPVVARNVPLSGFTKRPDNTLDVTLDTTGTPLFVWKVNGSAINIDWGKPVVDYVLTQNTSFPPEYNIVEVNGANQWSYWLIENDPGAAFTLPHPMHLHGHDFYVLGRSPEESPAANERYVFDPAVDLRLLGGDNPARRDVTMLPAFGWVVLAFRADNPGAWLFHCHIAWHVSGGLSVAYLERADDLREAVSDADADDFNRVCAEWRQYWPTNPYPKTDSGLKHRWVEESEWLVKA

SEQ ID NO: 2245 - protein, 612 aa, Chrysocorona lucknowensis
MKTFIGAVALMLGAVVPRVIAAPPGNAIQRDLLVPLEERQDTARPPRQISCHTPSNRACWTTGFNINTDYEVSTPNTGVVRPYTLTLTEVDNWTGPDGVVKNKVMLVNGPTIFADWGDTIQVTVINNLLTNGTSIHWHGLRQKDTNLHDGANGVTECPIKPGGGRRVYRFRAQQYGTSWYHSHFSAQYGNGVVGTIQINGPASLPYDIDLGVFPLQDYYYRSADELVHFTMNNGPPFSDNVLFNGTAKHPTTGAGQYANVTLTPGKRHRLRLINTSTENHFQVSLVNHTMTIIAADLVPVNAMTVDSLFLGVGQRYDVTIDANRTPGNYWFNVTFGGGNLCGGSNHPNPAAIFHYAGAPGGLPTDRGTPPVDHQCLDLPNLTPVVTRNVPVSGFVKRPGNTLPVHLDTTGTPLFVWKVNGSAINVDWNKPVLEYVLTQNTSYPASNNIVQVDAVDQWTYWLVENDPDAPFTLPHPMHLHGHDFVVLGRSPDVPAATQQRFVFDPAVDLPRLRGTNPVRRDVTMLPPKGWLLLAFKTDNPGAWLFHCHIAWHVSGGLSVQFLERPNELRQGISQADRDDFNRVCNDWRAYWPTNPFPKIDSGLRHRFVEEMQY

SEQ ID NO: 2246 - protein, 618 aa, Myceliophthora
MKLFIGAAALMMGILAPSVAAAPPSTPAQRDLLVPISERDETTIVPRQASCNTPSNRACWSEGFDINTDYEVETPDTGVVRHYNLTLTEVDDWLGPDGVIKKKVMLVNGNIMGPTIYGDWGDTIEVTVVNNLRTNGTSIHWHGLHQKDNNLHDGANGITECPIPPKGGRKVYRFRARQYGTSWYHSHFSAQYGNGVVGSIQINGPASLPYDIDLGVFPITDYYYLAADELVHMTQVGPPPFSDNVLFNGTAKHYETGDGEYATVTLTPGKRHRLRLINPSVENHFQVSLVNHTMTIIASDMVPVQAQTVDSLFLGVGQRYDVVIDASSTPGNYWFNVTFGGANACGGSRHPNPAAIFHYAGAPNALPTDEGTPPVDHQCLDLDNLTPVLERDVPVNDFVQNPGNTLDISLDLTPIFVWKINGSAINIDWGKPAVDYVLTGNISFPPEYNIVQVDGVNQWTYWLIENDPDGIVSLPHPMHLHGHDFYVLGRSPVTSPGDNLKFRFDPAVDRGRLSGDNPTRRDVAMVPARGWLLIAFKTDNPGAWLFHCHIAWHVSGGLSVTFLERPSDLRDAVEGTADEQELNRVCEEWREYWPTNPYPKIDSGLKHRWVEESEWFVK

SEQ ID NO: 2247 - protein, 619 aa, Chaetomium olivicolor
MKRLLSAVAILVGILAASLVIAAPPTIPPQRELLVPLEERQEAQGRPRQNNCNTPSNRACWRPGFNINTDYEVNTPDTGVTRSYTLTLTEVNNWAGPDGVVKEKVMLVNGKILGPTISADWGDTIQVTVINNLETNGTSIHWHGMHQKNTNLHDGANGVTECPIPPKGGRKIYRFRAQQYGTSWYHSHFSAQYGNGVVGTIQINGPASLPYDIDLGVFPITDYYYRSADELVHLTQNAGPPFSDNVLFNGTGVHPTTGAGQYANVTLTPGKRHRLRIINTSTENHFQISLVNHTMTVIAADMVPVNAMTVDSLFLAVGQRYDVTIEASRPVNSYWFNVTFGGQALCGGSFNQYPAAIFHYAGAPGGLPTDKGVPPVDHQCLDNMNLTPVVTRNVPVNSFVKRPSNTLDVHLDLTGTPLFVWKINGSAINVDWGRPVLENVMAGNMTFPIEENIVRVDGVDQWTYWLVENDPDGPFSIPHPMHLHGHDFLVLGRSPDVPPGSQQRFVFDPAVDLHRLRGSNPVRRDVTMLPAKGWLLLAFKTNNPGAWLFHCHIAWHVSGGLSIDFLERPNDLRQRITQADRNDFNRVCNEWRAYWPTNPYPRVDSGLRHRFVEEGEWMV

SEQ ID NO: 2248 - protein, 559 aa, Melanocarpus albomyces
EPTCNTPSNRACWSDGFDINTDYEVSTPDTGVTQSYVFNLTEVDNWMGPDGVVKEKVMLINGNIMGPNIVANWGDTVEVTVINNLVTNGTSIHWHGIHQKDTNLHDGANGVTECPIPPKGGQRTYRWRARQYGTSWYHSHFSAQYGNGVVGTIQINGPASLPYDIDLGVFPITDYYYRAADDLVHFTQNNAPPFSDNVLINGTAVNPNTGEGQYANVTLTPGKRHRLRILNTSTENHFQVSLVNHTMTVIAADMVPVNAMTVDSLFLAVGQRYDVVIDASRAPDNYWFNVTFGGQAACGGSLNPHPAAIFHYAGAPGGLPTDEGTPPVDHQCLDTLDVRPVVPRSVPVNSFVKRPDNTLPVALDLTGTPLFVWKVNGSDINVDWGKPIIDYILTGNTSYPVSDNIVQVDAVDQWTYWLIENDPEGPFSLPHPMHLHGHDFLVLGRSPDVPAASQQRFVFDPAVDLARLNGDNPPRRDTTMLPAGGWLLLAFRTDNPGAWLFHCHIAWHVSGGLSVDFLERPADLRQRISQEDEDDFNRVCDEWRAYWPTNPYPKIDSGL

SEQ ID NO: 2249 - protein, 559 aa, Melanocarpus albomyces
EPTCNTPSNRACWSDGFDINTDYEVSTPDTGVTQSYVFNLTEVDNWMGPDGVVKEKVMLINGNIMGPNIVANWGDTVEVTVINNLVTNGTSIHWHGIXQKDTNLHDGANGVTECPIPPKGGQRTYRWRARQYGTSWYHSHFSAQYGNGVVGTIQINGPASLPYDIDLGVFPITDYYYRAADDLVHFTQNNAPPFSDNVLINGTAVNPNTGEGQYANVTLTPGKRHRLRILNTSTENHFQVSLVNHTMTVIAADMVPVNAMTVDSLFLAVGQRYDVVIDASRAPDNYWFNVTFGGQAACGGSLNPHPAAIFHYAGAPGGLPTDEGTPPVDHQCLDTLDVRPVVPRSVPVNSFVKRPDNTLPVALDLTGTPLFVWKVNGSDINVDWGKPIIDYILTGNTSYPVSDNIVQVDAVDQWTYWLIENDPEGPFSLPHPMHLHGHDFLVLGRSPDVPAASQQRFVFDPAVDLARLNGDNPPRRDTTMLPAGGWLLLAFRTDNPGAWLFHCHIAWHVSGGLSVDFLERPADLRQRISQEDEDDFNRVCDEWRAYWPTNPYPKIDSGL

SEQ ID NO: 2250 - protein, 623 aa, Melanocarpus albomyces
MKTFTSALALVVGMLAPGAVVAAPPSTPAQRDLVELREARQEGGKDLRPREPTCNTPSNRACWSDGFDINTDYEVSTPDTGVTQSYVFNLTEVDNWMGPDGVVKEKVMLINGNIMGPNIVANWGDTVEVTVINNLVTNGTSIHWHGIHQKDTNLHDGANGVTECPIPPKGGQRTYRWRARQYGTSWYHSHFSAQYGNGVVGTIQINGPASLPYDIDLGVFPITDYYYRAADDLVHFTQNNAPPFSDNVLINGTAVNPNTGEGQYANVTLTPGKRHRLRILNTSTENHFQVSLVNHTMTVIAADMVPVNAMTVDSLFLAVGQRYDVVIDASRAPDNYWFNVTFGGQAACGGSLNPHPAAIFHYAGAPGGLPTDEGTPPVDHQCLDTLDVRPVVPRSVPVNSFVKRPDNTLPVALDLTGTPLFVWKVNGSDINVDWGKPIIDYILTGNTSYPVSDNIVQVDAVDQWTYWLIENDPEGPFSLPHPMHLHGHDFLVLGRSPDVPAASQQRFVFDPAVDLARLNGDNPPRRDTTMLPAGGWLLLAFRTDNPGAWLFHCHIAWHVSGGLSVDFLERPADLRQRISQEDEDDFNRVCDEWRAYWPTNPYPKIDSGLKRRRWVEESEWLVR

SEQ ID NO: 2251 - protein, 624 aa, Myriococcum thermophilum
MKPFIGAAALLVGVLSHIVAAAPPSTSEQRDLLAPITERDEPAVEPRQGCSSFSNNDRACWRGGYDLRTDWETDFPDTGVVRKYTLEITEKDNWTGPDGVVKEKVMLVNGNILGPTIFADWGDTVEVTVINNLEHNGTSIHWHGMHQKKTILNDGVNGILECPIPPKGGKKVYRFRAQQYGTSWYHSHFSAQYGNGVVGTIVFYGPASADYDIDLGVFPISDYYYQTADRLVEYTKQNGPPPANNILFNGTAKHPTTGEGEYANVTLTPGKRHRLRLINTSVEAHFQLSLVNHNMTIITADTVPVQPRTVDSLFIGVGQRYDVIIDANQTPGNYWFNVTFSESSGCGEVLSPDGETPVYPAAIFHYAGAPGDLPTNPGGPVRDHKCLDLIDLKPVVPRKVPVDGIGTVGSLDIHLETTPYFKWTINGSAIDVDWQNPVIDYVINQNTSFPPEYNVVEVEGKSNNHWTIWLIQNDMESGFSLPHPMHLHGHDFYILGRSPQGSVRRGRTFEFNPARDAAQLNGNLPLRRDTAMLPEGGWMVVAFMTDNPGAWLFHCHIAWHVSWGLSVTYLERPGEILKDIPQADLDQHNRICKEWREYWPTNPYPKIDSGLRHRWVEEGEWPVK

SEQ ID NO: 2252 - protein, 712 aa, Aspergillus niger
PYLSGEMSFTQEQDNAGDTIEVTEQTIDNTLYVNDTGSYMTTDFGTPISDQYSLKAGRRGPTLLEDFIFRQKLQRFDHERVPERVVHARGAGAYGTFKSYADWSNVTAADFLSANEKETPMFCRFSTVVGFRGSVDTARDVHGHACRFYTDEGNYDIVGINFAPFFIQDAIQFPDLVHAIKPMPNNEIPQAATAHTSAWDFFSQQSTALHSALWLMSGNGIPRSFRHMNGYGVHSFRFVAANGTSKVVRYRWKSQQGVASLVWEEAQAAAGKNSDYHRQDLYNAIANGHYPKYELQAQIMDEADMLRFGFDLLDPTKLVPEEVVPYTPLGMMELNANPTNYFAEVEQAGFQPGHVVPGIDFTDDPLLQGRLFSYLDTQLTRHGGPNFEQIPVNRPRKPVHNNNRDGFGQQQIPTNNWAYTPNTMSNGYPMQANQTHGHGFFTSPYRYASGHLIREPSPTFHDHWSQPAMFWNSLIPAEQQMVVNAIVFENSKVNSPHVRKNVVNQLNMVNNNLAVRVARGLGLDEPSPNPTYYTSNKTSNVGTFGKPLLSIEGLQVGFLASNSHPESIKQGQAMAAQFSAAGVDLNIVTEAYADGVNTTYALSDAIDFDALIIADGVQSLFASPSLANQMNSTATSTLYPPARPYQILVDSFRYGKPVAAVGSGSAALKNAGIDTSRSGVYTGSSETTENIAKEVLKGLYTFRFVDRFALDE

SEQ ID NO: 2253 - protein, 714 aa, Aspergillus niger; identical to SEQ ID NO: 10

SEQ ID NO: 2254 - protein, 701 aa, Thermoascus aurantiacus
AEGGGGAAAETEKFLSQFYLNDNDTFMTTDVGGPIEDQNSLSAGDRGPTLLEDFILRQKIQRFDHERVPERAVHARGAGAHGVFTSYADWSNITAASFLSAAGKETPVFVRFSTVAGSRGSADTARDVHGFATRFYTDEGNFDIVGNNIPVFFIQDAIQFPDLIHAVKPSPNNEIPQAATAHDSAWDFFSQQPSSLHTLFWAMAGHGIPRSYRNMDGFGIHTFRFVTDDGASKLVKFHWTSLQGKASLVWEEAQAVAGKNADYHRQDLWDAIEAGRYPEWELGVQIMDEEDQLRFGFDLLDPTKIVPEEYVPITKLGKMQLNRNPLNYFAETEQIMFQPGHVVRGIDFTEDPLLQGRLFSYLDTQLNRHGGPNFEQIPINRPRTPIHNNNRDGAAQMYIPLNKAAYTPNTLNNGSPKQANQTVGKGFFTTPGRTASGRLVRAVSSTFADVWSQPRLFYNSLVPAEQQFLINAIRFETAHITSDVVKNNVIIQLNRVSNNLAKRVARAIGVAEPEPDPTLYHNNKTANVGVFGKPLARLDGLQVGVLATVNKPDSIKQAASLKASFAADNVDVKVVAERLADGVDETYSAADAVNFDAILVANGAEGLFARDSFTARPANSTTATLYPAGRPLQILVDGFRYGKPVGALGSGAKALDAAEISTTRAGVYVANSTTDSFINGVRDGLRTFKFLDRFAIDEDAE

SEQ ID NO: 2255 - protein, 724 aa, Thermoascus aurantiacus; identical to SEQ ID NO: 12

SEQ ID NO: 2256 - protein, 724 aa, Thermoascus aurantiacus
ACPYMTGELPRSFAENPHAINRRAEGGGGAAAETEKFLSQFYLNDNDTFMTTDVGGPIEDQNSLSAGDRGPTLLEDFILRQKIQRFDHERVPERAVHARGAGAHGVFTSYADWSNITAASFLSAAGKETPVFVRFSTVAGSRGSADTARDVHGFATRFYTDEGNFDIVGNNIPVFFIQDAIQFPDLIHAVKPSPNNEIPQAATAHDSAWDFFSQQPSSLHTLFWAMAGHGIPRSYRNMAGFGIHTFRFVTDDGASKLVKFHWTSLQGKASLVWEEAQAVAGKNADYHRQDLWDAIEAGRYPEWELGVQIMDEEDQLRFGFDLLDPTKIVPEEYVPITKLGKMQLNRNPLNYFAETEQIMFQPGHVVRGIDFTEDPLLQGRLFSYLDTQLNRHGGPNFEQIPINRPRTPIHNNNRDGAAQMYIPLNKAAYTPNTLNNGSPKQANQTVGKGFFTTPGRTASGRLVRAVSSTFADVWSQPRLFYNSLVPAEQQFLINAIRFETAHITSDVVKNNVIIQLNRVSNNLAKRVARAIGVAEPEPDPTLYHNNKTANVGVFGKPLARLDGLQVGVLATVNKPDSIKQAASLKASFAADNVDVKVVAERLADGVDETYSAADAVNFDAILVANGAEGLFARDSFTARPANSTTATLYPAGRPLQILVDGFRYGKPVGALGSGAKALDAAEISTTRAGVYVANSTTDSFINGVRDGLRTFKFLDRFAIDEDAE

SEQ ID NO: 2257 - protein, 724 aa, Thermoascus aurantiacus
ACPYMTGELPRSFAENPHAINRRAEGGGGAAAETEKFLSQFYLNDNDTFMTTDVGGPIEDQNSLSAGDRGPTLLEDFILRQKIQRFDHERVPERAVAARGAGAHGVFTSYADWSNITAASFLSAAGKETPVFVRFSTVAGSRGSADTARDVHGFATRFYTDEGNFDIVGNNIPVFFIQDAIQFPDLIHAVKPSPNNEIPQAATAHDSAWDFFSQQPSSLHTLFWAMAGHGIPRSYRNMDGFGIHTFRFVTDDGASKLVKFHWTSLQGKASLVWEEAQAVAGKNADYHRQDLWDAIEAGRYPEWELGVQIMDEEDQLRFGFDLLDPTKIVPEEYVPITKLGKMQLNRNPLNYFAETEQIMFQPGHVVRGIDFTEDPLLQGRLFSYLDTQLNRHGGPNFEQIPINRPRTPIHNNNRDGAAQMYIPLNKAAYTPNTLNNGSPKQANQTVGKGFFTTPGRTASGRLVRAVSSTFADVWSQPRLFYNSLVPAEQQFLINAIRFETAHITSDVVKNNVIIQLNRVSNNLAKRVARAIGVAEPEPDPTLYHNNKTANVGVFGKPLARLDGLQVGVLATVNKPDSIKQAASLKASFAADNVDVKVVAERLADGVDETYSAADAVNFDAILVANGAEGLFARDSFTARPANSTTATLYPAGRPLQILVDGFRYGKPVGALGSGAKALDAAEISTTRAGVYVANSTTDSFINGVRDGLRTFKFLDRFAIDEDAE

SEQ ID NO: 2258 - protein, 724 aa, Thermoascus aurantiacus
ACPYMTGELPRSFAENPHAINRRAEGGGGAAAETEKFLSQFYLNDNDTFMTTDVGGPIEDQNSLSAGDRGPTLLEDFILRQKIQRFDHERVPERAVHARGAGAHGVFTSYADWSNITAASFLSAAGKETPVFVRFSTVAGSRGSADTARDVHGFATRFYTDEGNFDIVGANIPVFFIQDAIQFPDLIHAVKPSPNNEIPQAATAHDSAWDFFSQQPSSLHTLFWAMAGHGIPRSYRNMDGFGIHTFRFVTDDGASKLVKFHWTSLQGKASLVWEEAQAVAGKNADYHRQDLWDAIEAGRYPEWELGVQIMDEEDQLRFGFDLLDPTKIVPEEYVPITKLGKMQLNRNPLNYFAETEQIMFQPGHVVRGIDFTEDPLLQGRLFSYLDTQLNRHGGPNFEQIPINRPRTPIHNNNRDGAAQMYIPLNKAAYTPNTLNNGSPKQANQTVGKGFFTTPGRTASGRLVRAVSSTFADVWSQPRLFYNSLVPAEQQFLINAIRFETAHITSDVVKNNVIIQLNRVSNNLAKRVARAIGVAEPEPDPTLYHNNKTANVGVFGKPLARLDGLQVGVLATVNKPDSIKQAASLKASFAADNVDVKVVAERLADGVDETYSAADAVNFDAILVANGAEGLFARDSFTARPANSTTATLYPAGRPLQILVDGFRYGKPVGALGSGAKALDAAEISTTRAGVYVANSTTDSFINGVRDGLRTFKFLDRFAIDEDAE

SEQ ID NO: 2259 - protein, 724 aa, Thermoascus aurantiacus
ACPYMTGELPRSFAENPHAINRRAEGGGGAAAETEKFLSQFYLNDNDTFMTTDVGGPIEDQNSLSAGDRGPTLLEDFILRQKIQRFDHERVPERAVAARGAGAHGVFTSYADWSNITAASFLSAAGKETPVFVRFSTVAGSRGSADTARDVHGFATRFYTDEGNFDIVGANIPVFFIQDAIQFPDLIHAVKPSPNNEIPQAATAHDSAWDFFSQQPSSLHTLFWAMAGHGIPRSYRNMDGFGIHTFRFVTDDGASKLVKFHWTSLQGKASLVWEEAQAVAGKNADYHRQDLWDAIEAGRYPEWELGVQIMDEEDQLRFGFDLLDPTKIVPEEYVPITKLGKMQLNRNPLNYFAETEQIMFQPGHVVRGIDFTEDPLLQGRLFSYLDTQLNRHGGPNFEQIPINRPRTPIHNNNRDGAAQMYIPLNKAAYTPNTLNNGSPKQANQTVGKGFFTTPGRTASGRLVRAVSSTFADVWSQPRLFYNSLVPAEQQFLINAIRFETAHITSDVVKNNVIIQLNRVSNNLAKRVARAIGVAEPEPDPTLYHNNKTANVGVFGKPLARLDGLQVGVLATVNKPDSIKQAASLKASFAADNVDVKVVAERLADGVDETYSAADAVNFDAILVANGAEGLFARDSFTARPANSTTATLYPAGRPLQILVDGFRYGKPVGALGSGAKALDAAEISTTRAGVYVANSTTDSFINGVRDGLRTFKFLDRFAIDEDAE

SEQ ID NO: 2260 - protein, 714 aa, Aspergillus niger
QCPYLSGEMSFTQEQDNAGDTIEVTEQPIDNTLYVNDTGSYMTTDFGTPISDQTSLKAGPRGPTLLEDFIFRQKLQRFDHERVPERVVHARGAGAYGTFKSYADWSNVTAADFLSANDKETPMFCRFSTVVGFRGSVDTARDVHGHACRFYTDEGNYDIVGINFAPFFIQDAIQFPDLVHAIKPMPNNEIPQAATAHTSAWDFFSQQSTALHSALWLMSGNGIPRSFRHMNGYGVHSFRFVAANGTSKVVRYRWKSQQGVASLVWDEAQAAAGKNSDYHRQDLYNAIANGHYPKYELQAQIMDEADMLRFGFDLLDPTKLVPEEVVPYTPLGMMELNANPTNYFAEVEQAGFQPGHVVPGIDFTDDPLLQGRLFSYLDTQLTRHGGPNFEQIPVNRPRKPVHNNNRDGFGQQQIPTNNWAYTPNSMSNGYPMQANQTQGHGFFTAPYRYASGHLVRQTSPTFNDHWSQPAMFWNSLIPAEQQMVVNAIVFENSKVNSPHVRKNVVNQLNMVNNNLAVRVARGLGLDEPSPNPTYYTSNKTSNVGTFGKPLLSIEGLQVGFLASNSHPESIKQGQAMAAQFSAAGVDLNIVTEAYADGVNTTYALSDAIDFDALIIADGVQSLFASPALANQMNSTATSTLYPPARPFQILVDSFRYGKPVAAVGSGSVALKNAGIDSSRSGVYTGSSETTEKIAKEVLEGLYTFRFVDRFALDE

SEQ ID NO: 2261 - protein, 714 aa, Aspergillus niger
QCPYLSGEMSFTQEQDNAGDTIEVTEQPIDNTLYVNDTGSYMTTDFGTPISDQTSLKAGPRGPTLLEDFIFRQKLQRFDHERVPERVVHARGAGAYGTFKSYADWSNVTAADFLSANDKETPMFCRFSTVVGFRGSVDTARDVHGHACQFYTDEGNYDIVGINFAPFFIQDAIQFPDLVHAIKPMPNNEIPQAATAHTSAWDFFSQQSTALHSALWLMSGNGIPRSFRHMNGYGVHSFRFVAANGTSKVVRYRWKSQQGVASLVWDEAQAAAGKNSDYHRQDLYNAIANGHYPKYELQAQIMDEADMLRFGFDLLDPTKLVPEEVVPYTPLGMMELNANPTNYFAEVEQAGFQPGHVVPGIDFTDDPLLQGRLFSYLDTQLTRHGGPNFEQIPVNRPRKPVHNNNRDGFGQQQIPTNNWAYTPNSMSNGYPMQANQTQGHGFFTAPYRYASGHLVRQTSPTFNDHWSQPAMFWNSLIPAEQQMVVNAIVFQNSKVNSPHVRKNVVNQLNMVNNNLAVRVARGLGLDEPSPNPTYYTSNKTSNVGTFGKPLLSIEGLQVGFLASNSHPESIKQGQAMAAQFSAAGVDLNIVSEAYADGVNTTYALSDAIDFDALIIADGVQSLFASPALANQMNSTATSTLYPPARPFQILVDSFRYGKPVAAVGSGSVALKNAGIDSSRSGVYTGSSETTEKIAKEVLEGLYTFRFVDRFALDE

SEQ ID NO: 2262 - protein, 714 aa, Aspergillus niger
QCPYLSGEMSFTQEQDNAGDTIEVTEQPIDNTLYVNDTGSYMTTDFGTPISDQTSLKAGPRGPTLLEDFIFRQKLQRFDHERVPERVVHARGAGAYGTFKSYADWSNVTAADFLSANDKETPMFCRFSTVVGFRGSVDTARDVHGHACRFYTDEGNYDIVGINFAPFFIQDAIQFPDLVHAIKPMPNNEIPQAATAHTSAWDFFSQQSTALHSALWLMSGNGIPRSFRHMNGYGVHSFRFVAANGTSKVVRTPWKSQQGVASLVWDEAQAAAGKNSDYHRQDLYNAMPNGHYPKYELQAQIMDEADMLRFGFDLLDPTKLVPEEVVPYTPLGMMELNANPTNYFAEVEQAGFQPGHVVPGIDFTDDPLLQGRLFSYLDTQLTRHGGPNFEQIPVNRPRKPVHNNNRDGFGQQQIPTNNWAYTPNSMSNGYPMQANQTQGHGFFTAPYRYASGHLVRQTSPTFNDHWSQPAMFWNSLIPAEQQMVVNAIVFENSKVNSPHVRKNVVNQLNMVNNNLAVRVARGLGLDEPSPNPTYYTSNKTSNVGTFGKPLLSIEGLQVGFLASNSHPESIKQGQAMAAQFSAAGVDLNIVTEAYADGVNTTYALSDAIDFDALIIADGVQSLFASPALANQMNSTATSTLYPPARPFQILVDSFRYGKPVAAVGSGSVALKNAGIDSSRSGVYTGSSETTEKIAKEVLEGLYTFRFVDRFALDE

SEQ ID NO: 2263 - protein, 713 aa, Aspergillus niger
QCPYLSGEMSFTQEQDNAGDTIEVTEQPIDNTLYVNDTGSYMTTDFGTPISDQTSLKAGPRGPTLLEDFIFRQKLQRFDHERVPERVVHARGGAYGTFKSYADWSNVTAADFLSANDKETPMFCRFSTVVGFRGSVDTARDVHGHACRFYTDEGNYDIVGINFAPFFIQDAIQFPDLVHAIKPMPNNEIPQAATAHTSAWDFFSQQSTALHSALWLMSGNGIPRSFRHMNGYGVHSFRFVAANGTSKVVRTPWKSQQGVASLVWDEAQAAAGKNSDYHRQDLYNAMPNGHYPKYELQAQIMDEADMLRFGFDLLDPTKLVPEEVVPYTPLGMMELNANPTNYFAEVEQAGFQPGHVVPGIDFTDDPLLQGRLFSYLDTQLTRHGGPNFEQIPVNRPRKPVHNNNRDGFGQQQIPTNNWAYTPNSMSNGYPMQANQTQGHGFFTAPYRYASGHLVRQTSPTFNDHWSQPAMFWNSLIPAEQQMVVNAIVFENSKVNSPHVRKNVVNQLNMVNNNLAVRVARGLGLDEPSPNPTYYTSNKTSNVGTFGKPLLSIEGLQVGFLASNSHPESIKQGQAMAAQFSAAGVDLNIVTEAYADGVNTTYALSDAIDFDALIIADGVQSLFASPALANQMNSTATSTLYPPARPFQILVDSFRYGKPVAAVGSGSVALKNAGIDSSRSGVYTGSSETTEKIAKEVLEGLYTFRFVDRFALDE

SEQ ID NO: 2264 - protein, 714 aa, Aspergillus niger
QCPYLSGEMSFTQEQDNAGDTIEVTEQPIDNTLYVNDTGSYMTTDFGTPISDQTSLKAGPAGPTLLEDFIFAQKLQAFDHEAVPEAVVHAAGAGAYGTFKSYADWSNVTAADFLSANDKETPMFCAFSTVVGFAGSVDTAADVHGHACAFYTDEGNYDIVGINFAPFFIQDAIQFPDLVHAIKPMPNNEIPQAATAHTSAWDFFSQQSTALHSALWLMSGNGIPASFAHMNGYGVHSFAFVAANGTSKVVATPWKSQQGVASLVWDEAQAAAGKNSDYHAQDLYNAMPNGHYPKYELQAQIMDEADMLAFGFDLLDPTKLVPEEVVPYTPLGMMELNANPTNYFAEVEQAGFQPGHVVPGIDFTDDPLLQGALFSYLDTQLTAHGGPNFEQIPVNAPAKPVHNNNADGFGQQQIPTNNWAYTPNSMSNGYPMQANQTQGHGFFTAPYAYASGHLVAQTSPTFNDHWSQPAMFWNSLIPAEQQMVVNAIVFENSKVNSPHVAKNVVNQLNMVNNNLAVAVAAGLGLDEPSPNPTYYTSNKTSNVGTFGKPLLSIEGLQVGFLASNSHPESIKQGQAMAAQFSAAGVDLNIVTEAYADGVNTTYALSDAIDFDALIIADGVQSLFASPALANQMNSTATSTLYPPAAPFQILVDSFAYGKPVAAVGSGSVALKNAGIDSSASGVYTGSSETTEKIAKEVLEGLYTFAFVDAFALDE

SEQ ID NO: 2265 - protein, 723 aa, Thermoascus crustaceus
ACPYMTGELPRSFAENPHDIHRRAEGGGAADETEKFLSRFYLNDNDTFMTSDVGGPIAEQNSLSAGERGPTLLEDFIFRQKIQHFDHERVPERAVHARGVGAHGVFTSYGNWSNITAASFLAAEGKETPVFVRFSTVAGSRGSADTARDVHGFATRFYTDEGNFDIVGNNIPVFFIQDAILFPDLIHAVKPSPENEIPQAATAHDSAWDFFSQQPSSLHTLFWAMAGHGIPRSFRTVDGFGIHTFRFVTDDGASKLVKFHWKSLQGKASLVWEEAQAVAGKNADYHRQDLYNAIEAGRYPEWELGVQIMDEEDQLRFGFDVMDPTKIVPEEYVPITKLGKMQLNRNPLNYFSETEQIMFQPGHIVRGIDFSEDPLLQGRLFSYLDTQLNRHGGPNFEQIPINRPRIPIHNNNRDGAAQMYIPLNKAAYSPNTLNNGSPKQANQTVGKGFFTTPGRTANGKLVRSVSSTFADVWTQPRLFYNSLVPAEQQFLINAIRFETAHLKSSVVKNNVIIQLNRVSNNLAKRVARAIGVEEPEPDPTFYHNNKTANVAVFGQPLARLDGLQVGVLASVDKADSIKQAASLKDSFAKDNVDVMVVAERLADGVDLTYSAADAVNFDAILVANGADDLFTRDSFTAKPSNSSSATLYPAGRPLQILVDGFRFGKPVGAFGSGAKALDAAEISTKRAGVYVADSTSDDFVKGVKDGLRTFKFLDRFAIDEDAE

SEQ ID NO: 2266 - protein, 720 aa, Rasamsonia emersonii
CPYLTGQLDGREVHNPHEFQRRQDSGDAAASTEQFLSQFYLNDNNSYMTTDVGGPISDQNSLRAGERGPTLLEDFIFRQKIQHFDHERVPERAVHARGAGAHGTFTSYGNWSNITAASFLSAEGKETPVFVRFSTVAGSRGSSDTARDVHGFATRFYTDEGNFDIVGNNIPVFFIQDAILFPDLIHAVKPSPENEIPQAATAHDSAWDFFSQQPSALHTVFWAMSGHGIPRSFRHMDGFGVHTFRFVTDDGSSKLVKFHWTSLQGRAGLVWEEAQAAAGKNLDYMRQDLYDNIEAGRYPEWELGVQIVDEEDQLKFGFDLLDPTKILPVEYVPITPLGKLQLNRNPLNYFAETEQIMFQPGHIVRGIDFTEDPLLQGRLFSYLDTQLNRNGGPNFEQLPINRPRVPFHNNNRDGASQAFIPLNKAAYSPNTLNNGNPKQANQTVGDGFFTTPGRTASGRLLRAVSSTFSDVWSQPRLFYNSLVPAEQQFLINAIRFENSNVKSEVVRKNVITQLNRVDNDLARRVARAIGVEEPEPDPTYYHNNKTANVGTFGTPLKRIDGLKVGVLATVGDPDSISQGQSLSDTLSDSNVVVTVVAESFTDGVDALYTNSDATNFDAVIVADGAEGLFAPSSFTAQPTNSSSTASLYPAGRPLQILVDAFRFGKPVGALGSGSKALDAAGISKSRPGVYVANSISEAFTDAIEDGLRTFKFLDRFALDE

SEQ ID NO: 2267 - protein, 720 aa, Rasamsonia emersonii
CPYLTGQLDARDVHNPHEFQRRQDPGDAAASTEQFLSQFYLNDSNSYMTTDVGGPISDQNSLKAGERGPTLLEDFIFRQKIQHFDHERVPERAVHARGAGAHGTFTSYGNWSNITAASFLSAEGKETPVFVRFSTVAGSRGSADTARDVHGFATRFYTDEGNFDIVGNNIPVFFIQDAILFPDLIHAVKPSPDNEIPQAATAHDTAWDFFSQQPSALHTLFWAMSGHGIPRSFRHMDGFGVHTFRFVTDDGASKLVKFHWTSLQGRASLVWEEAQAAAGKNLDYMRQDLYDNIEAGRYPEWELGIQIVDEEDQLKFGFDLLDPTKIIPVEYVPITPLGKLQLNRNPLNYFAETEQIMFQPGHIVRGIDFTEDPLLQGRLFSYLDTQLNRNGGPNFEQLPINRPRVPWHNNNRDGFSQAFIPLNKAAYSPNTLNNGNPKQANQTVGDGFFTTPGRTTSGRLMRTVSSTFSDVWSQPRLFYNSLVPAEQQFLVNAIRFENSNVKSEVVRNNVIIQLNRVDNDLARRVARVIGVAEPEPDPTYYHNNKTANVGTFGTPLKRIDGLKVGVLATVGDPDSISQGQSLSDALSDSKVDVTVVAESFTDGVDALYTNSDATGFDAVIVADGAEGLFTPSSFTAKPTNSFSTTTLYPAGRPLQILVDAFRFGKPVGALGSGAKALDAAGISTSRPGVYVANSTSEAFTDDIEDGLRTFKFLDRFALDE

SEQ ID NO: 2268 - protein, 720 aa, Rasamsonia sp.
CPYLTGQLDGREVHNPHEFQRRQDSGDAAASTEQFLSQFYLNDSNSYMTTDVGGPISDQNSLRAGERGPTLLEDFIFRQKIQHFDHERVPERAVHARGAGAHGTFTSYGNWSNITAASFLSAEGKETPVFVRFSTVAGSRGSSDTARDVHGFATRFYTDEGNFDIVGNNIPVFFIQDAILFPDLIHAVKPSPENEIPQAATAHDSAWDFFSQQPSALHTVFWAMSGHGIPRSFRHMDGFGVHTFRFVTDDGSSKLVKFHWTSLQGRAGLVWEEAQAAAGKNLDYMRQDLYDNIEAGRYPEWELGVQIVDEEDQLKFGFDLLDPTKILPVEYVPITPLGKLQLNRNPLNYFAETEQIMFQPGHIVRGIDFTEDPLLQGRLFSYLDTQLNRNGGPNFEQLPINRPRVPFHNNNRDGASQAFIPLNKAAYSPNTLNNGNPKQANQTVGDGFFTTPGRTASGRLLRAVSSTFSDVWSQPRLFYNSLVPAEQQFLINAIRFENSNVKSEVVRKNVITQLNRVDNDLARRVARAIGVEEPEPDPTYYHNNKTANVGTFGTPLKRIDGLKVGVLATVGDPDSISQGQSLSDTLSDSNVVVTVVAESFTDGVDALYTNSDATNFDAVIVVDGAEGLFAPSSFTAQPTNSSSTASLYPAGRPLQILVDAFRFGKPVGALGSGSKALDAAGISKSRPGVYVANSISEAFTDAIEDGLRTFKFLDRFALDE

SEQ ID NO: 2269 - protein, 711 aa, Aspergillus lentulus
CPYMTGELNRRDEVSDGDAAAATEQFLSQYYLSDNDTFMTSDVGGPIEDQNSLSAGERGPTLLEDFIFRQKIQRFDHERVPERAVHARGAGAHGVFTSYGDFSNITAASFLGKEGKQTPVFVRFSTVAGSRGSSDLARDVHGFATRFYTDEGNFDIVGNNIPVFFIQDAILFPDLIHAVKPRGDNEIPQAASAHDSAWDFFSQQPSTMHTLLWAMSGHGIPRSFRHVDGFGVHTFRFVTDDGASKLVKFHWKSLQGKASMVWEEAQQTSGKNPDFMRQDLYDAIEAGRYPEWELGVQIMDEEDQLRFGFDLLDPTKIVPEEFVPITKLGKMQLNRNPRNYFAETEQVMFQPGHIVRGVDFTEDPLLQGRLFSYLDTQLNRHGGPNFEQLPINQPRVPVHNNNRDGARQMFIPLNPHAYSPKTPVNGSPKQANQTVGDGFFTAPGRTTSGKLVRAVSPSFADVWSQPRLFYNSLVPAEKQFVIDAIRFENANVKSPVVKNNVIIQLNRIDNDLARRVARAIGVAEPEPDPTFYHNNKTANVGTFGTKLKKLDGLKVGVLGSVQHPGSVEGASTLRDRLKDDGVDVVVVAERLANGVDQTYSASDAIQFDAVVVAAGAESLFTTSSFTGGSANATTGASSLYPTGRPLQILVDGFRFGKTVGALGSGAAALRNAGIATSRDGVYVAPSVTDDFANGIKEGLSTFKFLDRFPVD

SEQ ID NO: 2270 - protein, 711 aa, Aspergillus fumigatus
CPYMTGELNRRDEISDGDAAAATEEFLSQYYLNDNDAFMTSDVGGPIEDQNSLSAGERGPTLLEDFIFRQKIQRFDHERVPERAVHARGAGAHGVFTSYGDFSNITAASFLAKEGKQTPVFVRFSTVAGSRGSSDLARDVHGFATRFYTDEGNFDIVGNNIPVFFIQDAILFPDLIHAVKPRGDNEIPQAATAHDSAWDFFSQQPSTMHTLLWAMSGHGIPRSFRHVDGFGVHTFRFVTDDGASKLVKFHWKSLQGKASMVWEEAQQTSGKNPDFMRQDLHDAIEAGRYPEWELGVQIMDEEDQLRFGFDLLDPTKIVPEEFVPITKLGKMQLNRNPRNYFAETEQVMFQPGHIVRGVDFTEDPLLQGRLFSYLDTQLNRHGGPNFEQLPINQPRVPVHNNNRDGAGQMFIPLNPHAYSPKTSVNGSPKQANQTVGDGFFTAPGRTTSGKLVRAVSSSFEDVWSQPRLFYNSLVPAEKQFVIDAIRFENANVKSPVVKNNVIIQLNRIDNDLARRVARAIGVAEPEPDPTFYHNNKTADVGTFGTKLKKLDGLKVGVLGSVQHPGSVEGASTLRDRLKDDGVDVVLVAERLADGVDQTYSTSDAIQFDAVVVAAGAESLFAASSFTGGSANSASGASSLYPTGRPLQILIDGFRFGKTVGALGSGTAALRNAGIATSRDGVYVAQSVTDDFANDLKEGLRTFKFLDRFPVD

SEQ ID NO: 2271 - protein, 711 aa, Aspergillus fumigatus
CPYMTGELNRRDEISDGDAAAATEEFLSQYYFNDNDAFMTSDVGGPIEDQNSFSAGERGPTLLEDFIFRQKIQRFDHERVPERAVHARGAGAHGVFTSYGDFSNITAASFLAKEGKQTPVFVRFSTVAGSRGSSDLARDVHGFATRFYTDEGNFDIVGNNIPVFFIQDAILFPDLIHAVKPRGDNEIPQAATAHDSAWDFFSQQPSTMHTLLWAMSGHGIPRSFRHVDGFGVHTFRFVTDDGASKLVKFHWKSLQGKASMVWEEAQQTSGKNPDFMRQDLHDAIEAGRYPEWELGVQIMDEEDQLRFGFDLLDPTKIVPEEFVPITKLGKMQLNRNPRNYFAETEQVMFQPGHIVRGVDFTEDPLLQGRLFSYLDTQLNRHGGPNFEQLPINQPRVPVHNNNRDGAGQMFIPLNPHAYSPKTSVNGSPKQANQTVGDGFFTAPGRTTSGKLVRAVSSSFEDVWSQPRLFYNSLVPAEKQFVIDAIRFENANVKSPVVKNNVIIQLNRIDNDLARRVARAIGVAEPEPDPTFYHNNKTADVGTFGTKLKKLDGLKVGVLGSVQHPGSVEGASTLRDRLKDDGVDVVLVAERLADGVDQTYSTSDAIQFDAVVVAAGAESLFAASSFTGGSANSASGASSLYPTGRPLQILIDGFRFGKTVGALGSGTAALRNAGIATSRDGVYVAQSVTDDFANDLKEGLRTFKFLDRFPVD

SEQ ID NO: 2272 - protein, 711 aa, Aspergillus fumigatus
CPYMTGELNRRDEISDGDRAAATEEFLSQYYLNDNDAFMTSDVGGPIEDQNSLSAGERGPTLLEDFIFRQKIQRFDHERVPERAVHARGAGAHGVFTSYGDFSNITAASFLAKEGKQTPVFVRFSTVAGSRGSSDLARDVHGFATRFYTDEGNFDIVGNNIPVFFIQDAILFPDLIHAVKPRGDNEIPQAATAHDSAWDFFSQQPSTMHTLLWAMSGHGIPRSFRHVDGFGVHTFRFVTDDGASKLVKFHWKSLQGKASMVWEEAQQTSGKNPDFMRQDLHDAIEAGRYPERELGVQIMDEEDQLRFGFDLLDPTKIVPEEFVPITKLGKMQLNRNPRNYFAETEQVMFQPGHIVRGVDFTEDPLLQGRLFSYLDTQLNRHGGPNFEQLPINQPRVPVHNNNRDGAGQMFIPLNPHAYSPKTSVNGSPKQANQTVGDGFFTAPGRTTSGKLVRAVSSSFEDVWSQPRLFYNSLVPAEKQFVIDAIRFENANVKSPVVKNNVIIQLNRIDNDLARRVARAIGVAEPEPDPTFYHNNKTADVGTFGTKLKKLDGLKVGVLGSVQHPGSVEGASTLRDRLKEHGVDVVLVAEALADGVDQTYSTSDAIQFDAVVVAAGAESLFAASSFTGGSANSASGASSLYPTGRPLQILIDGFRFGKTVGALGSGTAALRNAGIATSRDGVYVAQSVTDDFANDLKEGLRTFKFLDRFPVD

SEQ ID NO: 2273 - protein, 709 aa, Aspergillus oryzae
ACPYMTGELERRDTGTDDATAATEEFLSQYYMADNDTFLTSDVGGPIEDQNSLQVGDRGPTLLEDFIFRQKIQRFDHERVPERAVHARGVGAHGVFTSYGDYSNITAASFLGAEGKETPVFVRFSTVAGSRGSSDLARDVHGFATRFYTDEGNFDIVGNNIPVFFIQDAILFPDLIHAVKPRGDNEIPQAATAHDSAWDFFSQQPSSLHTLLWAMSGHGIPRSLRHVDGFGIHTFRFVTDNGDSKLVKFHWKSLQGKASMVWEEAQQVSGKNPDFMRQDLFEAIEAGRYPEWELGVQIMDEEDQLKFGFDLFDPTKIVPEEYVPITKLGKMTLNRNPRNYFAETEQVMFQPGHIVRGVDFTEDPLLQGRLFSYLDTQLNRHGGPNFEQLPINQPRVPVHNNNRDGAGQMFIPLNPNAYSPNTLNKGSPKQANQTVGKGFFTAPGRESTGRFTRAVSPSFEDVWSQPRLFYNSLTPAEQQFVVDAIRFENSNVKSSVVRNNVIIQLNRVSNDLARRVARAIGVEEPEADPTYYHNNKTTDVGTFGQKLKKLDGLKVGFLASVETPASIEAASELSKQLSEDGVDVVVVAERLSDGVDQTYSGSDAIQFDAVIVAPGAEGLFSTFSFTAPSNATSSSTLFPAGRPLQIVIDGFRFGKPVGAVGSAATALKNAGIQTSRDGVYVDKSVTSGFVDGIKDGLRTFKFLDRFKLD

SEQ ID NO: 2274 - protein, 715 aa, Penicillium sumatraense
ACPYMTGEATGDYSPHELHRRADDGAAGDTEEFMSQFYLKDKDAFLTSDVGGPIEDQNSLSAGERGATLLEDFIFRQKIQHFDHERVPERAVHARGAGAHGVFTSYADWSNITAASFLSKKDKETPMFVRFSTVAGSRGSADTARDVHGFATRFYTDEGNFDIVGNNIPVFFIQDAIQFPDLIHSVKPSGDNEIPQAATAHDSAWDFFSQQPSSLHTLLWAMAGHGIPRSFRNVDGFGVHTFRFVTDSGKSKLVKFHWKGLQGKASLVWEEAQQISGKNPDYMRQDLWDAIEAERFPEWELGVQIMDEDDQLRFGFDLFDPTKIVPEELVPVTRLGKMTLNRNPKNYFAETEQVMFQPGHIVRGIDFTEDPLLQGRLFSYLDTQLNRHGGPNFEQLPINRPRVPIHNNNRDGAGQMFIPLNKDAYTPNTLNNGSPKQANQTVGNGFFTTPSRGAGNGKLQRTVSSTFEDVWSQPRLFWNSLIDAEKQFVVDAMRFENSNVVSEIVRNNVIIQLNRVSNDLAKRVAEAIGIEAPSPDPRFYHDNSTAHIGAFGQKLLKLEGLKVGVLASVQNDSSISSGATLAKQLKDVGVDVVVVGERLKDGVDQTYSGSDAIQFDAVIVADGAEGLFNPRSLTEKPVKASTLYPAGRPLDILVDAFRFGKPVGAIGKGVAALKAAQVSTEREGVYVAKSIGDKFVKSVKEGLRTFKFLDRFALD

SEQ ID NO: 2275 - protein, 716 aa, lium citrinum
ACPYMTGEVPGDYSPHELHRRADEGAADNTEEFLSQFYLNDKDAYLTSDVGGPIEDQNSLSAGERGPTLLEDFIFRQKIQHFDHERVPERAVHARGAGAHGVFTSYADWSNITAASFLSKKDKETPMFVRFSTVAGSRGSADTARDVHGFATRFYTDEGNFDIVGNNIPVFFIQDAIQFPDLIHAVKPSGDNEIPQAATAHDSAWDFFSQQPSSLHTLLWAMAGHGIPRSFRNVDGFGVHTFRFVTDSGKSKLVKFHWKGLQGKASLVWEEAQQISGKNPDFLRQDLWDAIEAGRFPEWELGVQIMDEEDQLRFGFDLLDPTKIVPEEIIPVTKLGKMTLNRNPRNYFAETEQVMFQPGHIVRGVDFTDDPLLQGRLFSYLDTQLNRHGGPNFEQLPINRPRTPIHNNNRDGAGQMFIPLNKDAYSPNTLNNASPKQANQTTGKGFFTTPSRKGNGKLQRTVSSTFEDVWSQPRLFWNSLVEAEKQFVVDATRFENSNVVSDIVRNNVIIQLNRISNDLAKRVAEAIGIEAPKPDPSFYHDNTTAHIGAFGQKLLKLEGLKVGVLASVQNASSVSSAASLQSQLKDAGVDVVVVAERLGDGVNQTYSGSDAIQFDAVVVADGAEGLFSSRSFTEKPVKNKASSLFPAGRPLDILVDAFRFGKPVGAIGKGAAALRAAQISSDREGVYAAKSIGNEFVKGLKEGLRIFKFLDRFALD

SEQ ID NO: 2276 - protein, 714 aa, Penicillium oxalicum
ACPYMTGETAGLDRRGEKDAASGTEEFLSEFYLKDDENVFLTSDVGGPIEDQNSLKAGERGPTLLEDFIFRQKIQRFDHERVPERAVHARGAGAHGVFTSYGDWSNITAASFLSAEGKETPMFVRFSTVAGSRGSADTARDVHGFATRFYTDEGNFDIVGNNIPVFFIQDAIKFPDLIHAVKPRGDNEIPQAATAHDSAWDFFSQQPSSLHTLLWAMAGHGIPRSFRHVDGFGVHTYRLVTDKGDTKLVKFHWKGLQGKASLVWEEAQQVAGKNGDFMRQDLFDAIEAGRYPEWELGVQIMEEDDQLRFGFDLLDPTKIVPEELVPVVKLGKMTLNRNPMNYFAETEQVMFQPGHIVRGVDFTDDPLLQGRIYSYLDTQLNRHGGPNFEQIPINRPRVPIHNNNRDGAGQMYIPLNPNAYSPNTLNKGSPKQANETVGKGFFTAPGRTSSGKLLRAVSSTFEDVWSQPRLFWNSLVPAEQQFVVDAMRFENANVMSQVVRNNVVIQLNRISNDLAKRVAEAIGVDAPQPDPTYYHDNTTANIGAFGQKLKKLEGLKVGVLASVANASSISQGAALQSQLKDVGVDLVVVGERMAHGVNQTYSASDAINFDAVIVADGAEGLFSTSSSTVSPKAKSSGATSLYPAGRPMDILLDAFRFGKPVGSLGQGSVALENAQISSDRDGVYAAKSVDEDFGDKVKEGLRTFKFLDRFALDE

SEQ ID NO: 2277 - protein, 547 aa, Myceliophthora thermophila
FADPAALQRRDDAPPADILEKYKVDDSKGYMSSDVGGPIGDQASLRAGGRGPTLLEDFIFRQKIQHFDHERVPERAVHARGAGAHGTFTSYADWSNLTAASFLSSAGKKTPVFVRFSTVAGSRGSADTARDVHGFATRFYTDEGNFDIVGNNIPVFFIQDAIQFPDLIHAVKPRPDNEIPQAATAHDSAWDFFSSQPSTLHTLFWAMAGNGIPRSYRHMDGFGIHTFRLVKEDGSSKLVKWHWKTRQGKASLVWEEAQAVAGKNADFHRQDLWDAIESGNGPEWELGVQVVDEDKALAFGFDLLDPTKIIPEELVPITPLGLMKLDRNPTNYFAETEQIMFQPGHVVRGIDFSEDPLLQGRLFSYLDTQLNRNGGPNFEQLPINMPRAPIHNNNRDGAGQTFIHTNIYPYSPNTLNKGYPLQANQTSGRGFFTAPGRRVTGELLRELSPTFNDHWSQPRLFYNSLKPVEQQFLINAIRFETSHIRSTTVKQNVLAQLNRVSHDVAVRVAAALGLEAPAPDDTYYHDNKTAGLSIFGEPLPTIKTLRV

SEQ ID NO: 2278 - protein, 688 aa, Penicillium sp.
ASSETEAFLSEFYLNDNDAYLTTDVGGPIEDQNSLKAGIRGSTLLEDFIFRQKIQHFDHERVPERAVHARGAGAHGVFTSYADWSNITAASFLGASGKETPTFVRFSTVAGSRGSADTARDVHGFATRFYTDEGNYDIVGNNIPVFFIQDAILFPDLIHSVKPQPANEIPQAATAHDTAYDFFGQQPSTLHTLFWAMAGHGIPRSFRHVDGFGVHTYRFVTDDGSSKLVKFHWTSLQGRASLVWEEAQATAGKNADFMRQDLYDSIEAGRYPEWELGVQIIEESDVLSYGFDLLDPTKILPVEKVPITALGKMQLNRNPLNYFAETEQVMFQPGHIVRGIDFTEDPLLQGRLFSYLDTQLNRNGGPNFEQIPINRPRVPIHNNNRDGFAQMFIPLNQAAYSPNTLNNGSPRQANETVGNGFFTAPGRSADGHLVRATSPTFADVWSQPGLFYNSLTATEQQFVINALRFELSNVKSEDVKSNFITQINRVNNTLATLVASAIGVSAPEPDSTYYHSNKTSNVGTFGTPLKKLDGLKVGVLASVNGESSIAEGQALAQSLAGSNVDVVIVAEHLTSNVSATYSGSDATNFDAVIVSSGAEGLFGPQTFTAESNTTLYPAGRPSQILVDAFRFGKPVGAVGGASAALSAVDISTDRSGVITGDSVSDDFVKQLTEDLATFKFLDRFAVDE

SEQ ID NO: 2279 - protein, 672 aa, Penicillium pinophilum
ACPMLTGEIPAGSVANPHHHGKRDDSNASSETEAFLSEFYLNDNDAYLTTDVGGPIEDQNSLKAGIRGSTLLEDFIFRQKIQHFDHERVPERAVHARGAGAHGVFTSYADWSNITAASFLGASGKETPTFVRFSTVAGSRGSADTARDVHGFATRFYTDEGNYDIVGNNIPVFFIQDAILFPDLIHSVKPQPANEIPQAATAHDTAYDFFGQQPSTLHTLFWAMAGHGIPRSFRHVDGFGVHTYRFVTDDGSSKLVKFHWTSLQGRASLVWEEAQATAGKNADFMRQDLYDSIEAGRYPEWELGVQIIEESDVLSYGFDLLDPTKILPVEKVPITALGKMQLNRNPLNYFAETEQVMFQPGHIVRGIDFTYYPLLQGRLFSYLDTQLNRNGGPNFEQIPINRPRVPIHNNNRDGFAQMFIPLNQAAYSPNTLNNGSPRQANETVGNGFFTAPGRSADGHLVRATSPTFADVWSQPGLFYNSLTATEQQFVINALRFELSNVKSEDVKSNFITQINRVNNTLATLVASAIGVSAPEPDSTYYHSNKTSNVGTFGTPLKKLDGLKVGVLASVNGESSIAEGQALAQSLAGSNVDVVIVAEHLTSNVSATYSGSDATNFDAVIVSSGAEGLFGPQTFTAESNTTLYPAGRPSQILVDAFRFGKPVGAVGGASAAL

SEQ ID NO: 2280 - protein, 688 aa, Penicillium sp.
ASSETEAFLSEFYLNDNDAYLTTDVGGPIEDQHSLKAGIRGSTLLEDFIFRQKIQHFDHERVPERAVHARGAGAHGVFTSYADWSNITAASFLGAAGKETPTFVRFSTVAGSRGSADTARDVHGFATRFYTDEGNYDIVGNNIPVFFIQDAILFPDLIHSVKPQPANEIPQAATAHDTAYDFFGQQPSTLHTLFWAMAGHGIPRSFRHVDGFGVHTYRFVTEDGSSKLVKFHWTSLQGRASLVWEEAQATAGKNADFMRQDLYDSIEAGRYPEWEFGVQIIDESDVLSYGFDLLDPTKILPVEKVPITPLGKMQLNRNPLNYFAETEQVMFQPGHIVRGIDFTEDPLLQGRLFSYLDTQLNRNGGPNFEQIPINRPRVPIHNNNRDGFAQMFIPLNQAAYSPNTLNNGSPRQANETVGNGFFTTPRRSADGHLVRATSPTFADVWSQPGLFYNSLTATEQQFVINALRFELSNVKSEDVKSNFITQINRVNNTLATLVASAIGVSAPEPDSTYYHSNKTSNVGTFGTPLKKLDGLKVGVLASVSDESSIAEGQALAQSLADSNVDVVIVAEHLTSNVSATYSGSDATNFDAVIVSSGAEGLFGPQTFTAESNTTLYPAGRPSQILVDAFRFGKPVGAVGGASAALSAVDISTDRSGVVTGDSVSDDFVNQLTEDLATFKFLDRFAVDE

SEQ ID NO: 2281 - protein, 712 aa, Aspergillus niger
ACPYMSRDLSARDSSDASESTEEFLSQYYLNDNNTYLTSDVGGPIEDQNSLSAGERGPTLLEDFIFRQKIQRFDHERVPERAVHARGVGAHGVFVSYGDFSNLTAASFLSEQGKETPMFVRFSTVAGSRGSTDLARDVHGFATRFYTDEGNFDLVGNNIPVFFIQDAIQFPDLIHAVKPRGDSEIPQAATAHDSAWDFFSQQPSALHTLFWAMAGHGIPRSFRHVDGFGVHTYRLVTDSGASKLVKFHWKSLQGKASMVWEEAQQVSGKNSDFMRQDLWTSIEYGRYPEWELGVQIMDEEDQLRFGFDLFDPTKIVPEEYVPITKLGKMTLNRNPLNYFAETEQVMFQPGHIVRGVDFTEDPLLQGRLFSYLDTQLNRHGGPNFEQLPINQPRVPIHNNNRDGAGQMYIPLNPNAYSPNTLNSASPKQANQTTGNGFFTSPGRTTSGHLLRSTSPTFQDVWSQPRLFYNSLVPTEQQFLIDAIRFETSNVKSTTVRQNVIIQLNRISNDLARRVARAIDVPAPDPDPTYYHDNKTADVGTFGTKLKKLSNLRVGFLASVQTPSSITAAQDLATELKDDEVDVVVVAERLTDGVDQTYSASDAIQFDAVVVAPGAEGLFASGSVTAPQLNSTASAVSTLYPAGRPLQVLVDAFRFGKTVGAVGSGKGALQNAGIDDEREGVVVGQTIGADFVDSVREGLRTFRFLDRFALDEE

SEQ ID NO: 2282 - protein, 714 aa, Talaromyces stipitatus
ACPMLTGEIPAGSIANPHHLGSRADSNASDETEAFLSEFYLNDNNSFLTTDVGGPIEDQNSLKAGIRGSTLLEDFIFRQKIQRFDHERVPERAVHARGAGAHGVFTSYADWSNITAASFLGAAGKETPTFVRFSTVAGSRGSADTARDVHGFATRFYTDEGNYDIVGNNIPVFFIQDAIQFPDLIHAVKPQPASEIPQAATAHDTAYDFFGQQPSTLHTLFWAMAGHGIPRSFRHVDGFGVHAYRFVTDDGSSKLVKFHWKSLQGRASLVWEEAQATAGKNADFMRQDLFDNIAAGRYPEWELGVQLIEEPDQLSYGFDLLDPTKILPVEQVPITPLGKMQLNRNPLNYFAETEQVMFQPGHIVRGIDFTEDPLLQGRLFSYLDTQLNRNGGPNFEQIPINRPRVPIHNNNRDGFGQMFIPLNDAAYSPNTLSDGNPKQANETVGNGFFTTPGRTANGNLVRAKSPTFADVWSQPGLFYNSLTATEQQFVINALRFELANVASETVKNNFITQINRVNNTLATLVATAIGVNAPEPDPTYYHHNKTSDVGTFGTPLKKIDGLKVGVLASVNDENSISEGQSLARSLADLNVDVVIVAERLAGNVSATYSASDAINFDAVIVTSGAKGLFGPQTFTAVSNTTLYPVGRPTQILVDAFRYGKPVGAVGSASEALTVSDIDTDRSGVITGDLNDEFVKQLSEDLATFKFLDRFTVDE

SEQ ID NO: 2283 - protein, 715 aa, Aspergillus niger
ACPMLTGEIPAGSVANPHHHGKRDDSNASSETEAFLSEFYLNDNDAYLTTDVGGPIEDQHSLKAGIRGSTLLEDFIFRQKIQHFDHERVPERAVHARGAGAHGVFTSYADWSNITAASFLGAAGKETPTFVRFSTVAGSRGSADTARDVHGFATRFYTDEGNYDIVGNNIPVFFIQDAILFPDLIHSVKPQPANEIPQAATAHDTAYDFFGQQPSTLHTLFWAMAGHGIPRSFRHVDGFGVHTYRFVTEDGSSKLVKFHWTSLQGRASLVWEEAQATAGKNADFMRQDLYDSIEAGRYPEWEFGVQIIDESDVLSYGFDLLDPTKILPVEKVPITPLGKMQLNRNPLNYFAETEQVMFQPGHIVRGIDFTEDPLLQGRLFSYLDTQLNRNGGPNFEQIPINRPRVPIHNNNRDGFAQMFIPLNQAAYSPNTLNNGSPRQANETVGNGFFTTPRRSADGHLVRATSPTFADVWSQPGLFYNSLTATEQQFVINALRFELSNVKSEDVKSNFITQINRVNNTLATLVASAIGVSAPEPDSTYYHSNKTSNVGTFGTPLKKLDGLKVGVLASVSDESSIAEGQALAQSLADSNVDVVIVAEHLTSNVSATYSGSDATNFDAVIVSSGAEGLFGPQTFTAESNTTLYPAGRPSQILVDAFRFGKPVGAVGSARAALSAVDISTDRSGVVTGDSVSDDFVNQLTEDLATFKFLDRFAVDE

SEQ ID NO: 2284 - protein, 715 aa, Penicillium sp.
ACPMLTGEIPAGSVANPHHHGKRDDSNASSETEAFLSEFYLNDNDAYLTTDVGGPIEDQNSLKAGIRGSTLLEDFIFRQKIQHFDHERVPERAVHARGAGAHGVFTSYADWSNITAASFLGASGKETPTFVRFSTVAGSRGSADTARDVHGFATRFYTDEGNYDIVGNNIPVFFIQDAILFPDLIHSVKPQPANEIPQAATAHDTAYDFFGQQPSTLHTLFWAMAGHGIPRSFRHVDGFGVHTYRFVTDDGSSKLVKFHWTSLQGRASLVWEEAQATAGKNADFMRQDLYDSIEAGRYPEWELGVQIIEESDVLSYGFDLLDPTKILPVEKVPITALGKMQLNRNPLNYFAETEQVMFQPGHIVRGIDFTEDPLLQGRLFSYLDTQLNRNGGPNFEQIPINRPRVPIHNNNRDGFAQMFIPLNQAAYSPNTLNNGSPRQANETVGNGFFTAPGRSADGHLVRATSPTFADVWSQPGLFYNSLTATEQQFVINALRFELSNVKSEDVKSNFITQINRVNNTLATLVASAIGVSAPEPDSTYYHSNKTSNVGTFGTPLKKLDGLKVGVLASVNGESSIAEGQALAQSLAGSNVDVVIVAEHLTSNVSATYSGSDATNFDAVIVSSGAEGLFGPQTFTAESNTTLYPAGRPSQILVDAFRFGKPVGAVGGASAALSAVDISTDRSGVITGDSVSDDFVKQLTEDLATFKFLDRFAVDE

SEQ ID NO: 2285 - protein, 715 aa, Penicillium sp.
ACPMLTGEIPAGSVANPHHHGKRDDSNASSETEAFLSEFYLNDNDAYLTTDVGGPIEDQHSLKAGIRGSTLLEDFIFRQKIQHFDHERVPERAVHARGAGAHGVFTSYADWSNITAASFLGAAGKETPTFVRFSTVAGSRGSADTARDVHGFATRFYTDEGNYDIVGNNIPVFFIQDAILFPDLIHSVKPQPANEIPQAATAHDTAYDFFGQQPSTLHTLFWAMAGHGIPRSFRHVDGFGVHTYRFVTEDGSSKLVKFHWTSLQGRASLVWEEAQATAGKNADFMRQDLYDSIEAGRYPEWEFGVQIIDESDVLSYGFDLLDPTKILPVEKVPITPLGKMQLNRNPLNYFAETEQVMFQPGHIVRGIDFTEDPLLQGRLFSYLDTQLNRNGGPNFEQIPINRPRVPIHNNNRDGFAQMFIPLNQAAYSPNTLNNGSPRQANETVGNGFFTTPRRSADGHLVRATSPTFADVWSQPGLFYNSLTATEQQFVINALRFELSNVKSEDVKSNFITQINRVNNTLATLVASAIGVSAPEPDSTYYHSNKTSNVGTFGTPLKKLDGLKVGVLASVSDESSIAEGQALAQSLADSNVDVVIVAEHLTSNVSATYSGSDATNFDAVIVSSGAEGLFGPQTFTAESNTTLYPAGRPSQILVDAFRFGKPVGAVGGASAALSAVDISTDRSGVVTGDSVSDDFVNQLTEDLATFKFLDRFAVDE

SEQ ID NO: 2286 - protein, 715 aa, Penicillium pinophilum
ACPMLTGEIPAGSVANPHHHGKRDDSNASSETEAFLSEFYLNDNDAYLTTDVGGPIEDQNSLKAGIRGSTLLEDFIFRQKIQHFDHERVPERAVHARGAGAHGVFTSYADWSNITAASFLGASGKETPTFVRFSTVAGSRGSADTARDVHGFATRFYTDEGNYDIVGNNIPVFFIQDAILFPDLIHSVKPQPANEIPQAATAHDTAYDFFGQQPSTLHTLFWAMAGHGIPRSFRHVDGFGVHTYRFVTDDGSSKLVKFHWTSLQGRASLVWEEAQATAGKNADFMRQDLYDSIEAGRYPEWELGVQIIEESDVLSYGFDLLDPTKILPVEKVPITALGKMQLNRNPLNYFAETEQVMFQPGHIVRGIDFTYYPLLQGRLFSYLDTQLNRNGGPNFEQIPINRPRVPIHNNNRDGFAQMFIPLNQAAYSPNTLNNGSPRQANETVGNGFFTAPGRSADGHLVRATSPTFADVWSQPGLFYNSLTATEQQFVINALRFELSNVKSEDVKSNFITQINRVNNTLATLVASAIGVSAPEPDSTYYHSNKTSNVGTFGTPLKKLDGLKVGVLASVNGESSIAEGQALAQSLAGSNVDVVIVAEHLTSNVSATYSGSDATNFDAVIVSSGAEGLFGPQTFTAESNTTLYPAGRPSQILVDAFRFGKPVGAVGGASAALSAVDISTDRSGVITGDSVSDDFVKQLTEDLATFKFLDRFAVDE

SEQ ID NO: 2287 - protein, 610 aa, Myceliophthora thermophila
FADPAALQRRDDAPPADILEKYKVDDSKGYMSSDVGGPIGDQASLRAGGRGPTLLEDFIFRQKIQHFDHERVPERAVHARGAGAHGTFTSYADWSNLTAASFLSSAGKKTPVFVRFSTVAGSRGSADTARDVHGFATRFYTDEGNFDIVGNNIPVFFIQDAIQFPDLIHAVKPRPDNEIPQAATAHDSAWDFFSSQPSTLHTLFWAMAGNGIPRSYRHMDGFGIHTFRLVKEDGSSKLVKWHWKTRQGKASLVWEEAQAVAGKNADFHRQDLWDAIESGNGPEWELGVQVVDEDKALAFGFDLLDPTKIIPEELVPITPLGLMKLDRNPTNYFAETEQIMFQPGHVVRGIDFSEDPLLQGRLFSYLDTQLNRNGGPNFEQLPINMPRAPIHNNNRDGAGQTFIHTNIYPYSPNTLNKGYPLQANQTSGRGFFTAPGRRVTGELLRELSPTFNDHWSQPRLFYNSLKPVEQQFLINAIRFETSHIRSTTVKQNVLAQLNRVSHDVAVRVAAALGLEAPAPDDTYYHDNKTAGLSIFGEPLPTIKTLRVGVLASVQKNSSALAQAGRLKAALEKDGLVVTVVGESLAEGVDQTYSAADATAFDAVIVAEGAE

SEQ ID NO: 2288 - protein, 704 aa, Unidentified
CPYMTGELGRRDTNPDATEATEEFLSEYYLDDTDSYLTTDVGGPIEDQQSLKAGARGSTLLEDFIFRQKIQRFDHERVPERAVHARGAGAHGVFTSYGDFSNITAASFLSAEGKETPVFVRFSTVAGSRGSSDLARDVHGFATRFYTDEGNFDIVGNNIPVFFIQDAIQFPDLIHAVKPKGDREIPQAATAHDAAWDFFSQQPSTLHTLLWAMAGHGIPRSFRHVDGFGVHTFRLVTEDGSTKLVKFHWKTLQGLASMVWEEAQQISGKNPDYMRQDLFESIEAGRYPEWELNVQIMDEEDQLRFGFDLFDPTKIVPEEYVPLTPLGKMTLNRNPRNYFAETEQVMFQPGHVVRGVDFTEDPLLQGRLFSYLDTQLNRNGGPNFEQLPINQPRVAIHNNNRDGAGQMFIPLNPDAYSPNTLKGSTLKQANQTAGRGFFTAPDRTANGNLVRAKSSTFDDAWSQPRLFWNSLLPAEKQFVVNAIRFENANVKSDVVKNNVIVQLNRISNDLATRVAKAIGVDAPEPDNTYYHDNTTSNIGAFGHRLQSLAGLKIAVLASVDAEESFSAATALKAELSNDNLDVIVVAERFSNGVNQTYSASDAIQFDAVVVAPGAEKLFGAKSAANSSSTLYPAGRPLEILVDAFRFGKPVAALGSGSTAFDNAGINTAVEGVYVADAVDESFANNLEEGLTVFKFLDRFALDSD

SEQ ID NO: 2289 - protein, 705 aa, ASPERGILLUS NIDULANS FGSC A4
CPYMTGELGRRDTNPDATEATEEFLSEYYLDDTDSYLTTDVGGPIEDQQSLKAGARGSTLLEDFIFRQKIQRFDHERVPERAVHARGAGAHGVFTSYGDFSNITAASFLSAEGKETPVFVRFSTVAGSRGSSDLARDVHGFATRFYTDEGNFDIVGNNIPVFFIQDAIQFPDLIHAVKPKGDREIPQAATAHDAAWDFFSQQPSTLHTLLWAMAGHGIPRSFRHVDGFGVHTFRLVTEDGSTKLVKFHWKTLQGLASMVWEEAQQISGKNPDYMRQDLFESIEAGRYPEWELNVQIMDEEDQLRFGFDLFDPTKIVPEEYVPLTPLGKMTLNRNPRNYFAETEQVMFQPGHVVRGVDFTEDPLLQQGRLFSYLDTQLNRNGGPNFEQLPINQPRVAIHNNNRDGAGQMFIPLNPDAYSPNTLKGSTLKQANQTAGRGFFTAPDRTANGNLVRAKSSTFDDAWSQPRLFWNSLLPAEKQFVVNAIRFENANVKSDVVKNNVIVQLNRISNDLATRVAKAIGVDAPEPDNTYYHDNTTSNIGAFGHRLQSLAGLKIAVLASVDAEESFSAATALKAELSNDNLDVIVVAERFSNGVNQTYSASDAIQFDAVVVAPGAEKLFGAKSAANSSSTLYPAGRPLEILVDAFRFGKPVAALGSGSTAFDNAGINTAVEGVYVADAVDESFANNLEEGLTVFKFLDRFALDSD

SEQ ID NO: 2290 - protein, 715 aa, Talaromyces marneffei
ACPMLTGELPAGSVANPHHHGKRDDSKASSETETFLSEFYLNDNDSFLTSDVGGPIEDQHSLKAGIRGSTLLEDFIFRQKIQHFDHERIPERAVHARGAGAHGVFTSYADWSNITAASFLGAAGKETPTFVRFSTVAGSRGSADTARDVHGFATRFYTEEGNYDIVGNNIPVFFIQDAILFPDLIHAVKPQPANEIPQAATAHDTAYDFFGQQPSTLHTLFWAMSGHGIPRSFRHVDGFGVHTYRFVTDNGSSKLVKFHWTSLQGRASLVWEEAQATAGKNADYMRQDLYDSIKAGRYPEWELGVQIINESDVLSYGFDLLDPTKILPVEEVPITPLGKMQLNRNPLNYFAETEQVMFQPGHIVRGIDFTEDPLLQGRLFSYLDTQLNRNGGPNFEQIPINRPRVPIHNNNRDGFGQMFIPLNQAAYSPNTLNSGSPKQANETVGNGFFTTPGRSADGHLVRATSPTFADVWSQPGLFYNSLTATEQQFVINGLRFELSNVGSEDVKRNFITQVNRVNNTLATLVATAIGVPAPKPEPTYYHKNKTSNVGTFGTPLKKLDGLRVAVLASVNDERSIAEGQALAKRLANSNVDVVIVAEKLASNVTATYSESDATNFDAVIVTSGADGLFGLQTFTSTSNITLYPAGRPTQIMVDAFRFGKPVGAVGSARSALSAVDISTNRTGVVIGDSVNDDFVNQLTKDLATFKFLDRFAVDK

SEQ ID NO: 2291 - protein, 711 aa, Malbranchea cinnamomea
ACPYLSGELDKRQADSSNDAAQATEEFLQQFYLNDNDTYMTTDTGTPIADQQSLSVGERGPTLLEDFIFRQKIQRFDHERVPERAVHARGAGAHGVFTSYGDFSNITAASFLSAEGKQTPVFVRFSTVAGSRGSSDMARDVHGFATRFYTDEGNFDIVGNNIPVFFIQDAIQFPDLIHAVKPKQDNEIPQAATAHDSAWDFFSQQPSTMHTLMWAMAGHGIPRSYRHMDGFGVHTFRFVTDEGQSKLVKFHFKTLQGRASMVWEEAQVISGKNTDFHRQDLFEAIESGTYPEWEFGVQIVDEEDELKFGFDLLDPTKIIPEDLVPVTPLGKLQLNRNPRNYFAETEQVMFQPGHIVRGIDFTDDPLLQGRLFSYLDTQLNRHGGPNFEQLPINQPRVPIHNNNRDGAGQMYIPLNPHAYSPNTLHASSPRQANETHGKGFFTTPGRTPSGTLQRSLSPTFADVWSQPRLFYNSLHPVERQFLVNAIRFETSNLASSVVRKNVIIQLNRISNDLARRVARFIGVEEPQPDEKFYHNNKTVPLGTFGTPLKSLAGLKIGILSSVNSYEEASRIKSALLEKDSSVKVSVVAERLVPGEEGTVAYTAADGTSFDGIIVSNGTADGFTPYASSPLFPAGRPLQILVDAYRYGKPVGAIGDAGLKALDNAGIQEAERDAEKGVFTASDADATFVEDFLDGLKVFRFLERFDIDEDAE

SEQ ID NO: 2292 - protein, 709 aa, Aspergillus oryzae
ACPYMTGELEAADTGTDDATAATEEFLSQYYMADNDTFLTSDVGGPIEDQNSLQVGDAGPTLLEDFIFAQKIQAFDHEAVPEAAVHAAGVGAHGVFTSYGDYSNITAASFLGAEGKETPVFVAFSTVAGSAGSSDLAADVHGFATAFYTDEGNFDIVGNNIPVFFIQDAILFPDLIHAVKPAGDNEIPQAATAHDSAWDFFSQQPSSLHTLLWAMSGHGIPASLAHVDGFGIHTFAFVTDNGDSKLVKFHWKSLQGKASMVWEEAQQVSGKNPDFMAQDLFEAIEAGAYPEWELGVQIMDEEDQLKFGFDLFDPTKIVPEEYVPITKLGKMTLNANPANYFAETEQVMFQPGHIVAGVDFTEDPLLQGALFSYLDTQLNAHGGPNFEQLPINQPAVPVHNNNADGAGQMFIPLNPNAYSPNTLNKGSPKQANQTVGKGFFTAPGAESTGAFTAAVSPSFEDVWSQPALFYNSLTPAEQQFVVDAIAFENSNVKSSVVANNVIIQLNAVSNDLAAAVAAAIGVEEPEADPTYYHNNKTTDVGTFGQKLKKLDGLKVGFLASVETPASIEAASELSKQLSEDGVDVVVVAEALSDGVDQTYSGSDAIQFDAVIVAPGAEGLFSTFSFTAPSNATSSSTLFPAGAPLQIVIDGFAFGKPVGAVGSAATALKNAGIQTSADGVYVDKSVTSGFVDGIKDGLATFKFLDAFKLD

SEQ ID NO: 2293 - protein, 693 aa, Aspergillus versicolor
RRDTNPDATEATEEFLSEYYFDDNDVYLTSDVGGPIEDQQSLKAGERGSTLLEDFIFRQKIQRFDHERVPERAVHARGTGAHGVFTSYGDYSNITAASFLSSKGKETPVFVRFSTVAGSRGSSDLARDVHGFATRFYTDEGNFDLVGNNIPIFFIQDAIQFPDLIHSVKPSGNNEIPQAATAHDAAWDFFSQQPSTMHTLLWAMSGNGIPRSFRHVDGFGVHTFRFVTDHGSTKFVKFHWKTLQGKAGLVWEEAQQISGKNPDYMRQDLYEAIDAGRFPEWELAVQIMDEEDQLRFGFDLLDPTKIVPEEYVPLTKIGKMTLNRNPRNYFAETEQVMFQPGHIVRGVDFSEDPLLQGRLFSYLDTQLNRNGGPNFEQLPINQPRVPVHNNNRDGAGQMFIPLNPNAYSPNTLNKASPKQANQTVGRGFFTAPDRKANGNLVRVKSSTFEDVWSQPRLFYNSLVPAEKQFVVNAIRFENANVKSEVVKKNVIIQLNRISNDLATRVASAIGVDAPEPDQKYYHDNTTVGVGAFGHKLQKLAGLKVAVLASVDADQSFSAATALSAELSDNGVDVVVVAERLAEGVNQTYSASDAIQFDAVVLAPGTEKLFNSTTTASSTLYPAGRPLQILTDAFRWGKPVAALGSSSGALKSASIGQKDDGVYVAKSVNSDFASQLEQGLTVFRFLDRFALDSD

SEQ ID NO: 2294 - protein, 700 aa, Botryotinia fuckeliana
AQCPYGMDKQPQKREPKDSQTSSSNFLDQFTLNDTNTYFTTDAGGPIQEDTSLKAGARGPTLLEDFIFRQKIQHFDHERVPERAVHARGAGAHGIFTSYGNYSNITAASFLNQEGKETPVFVRFSTVAESRGSADTARDVHGFATRFYTDEGNFDIVGNNIPVFFIQDAILFPDLIHAVKPSPDNEIPQAATAHDSAWDFFSQQPSSLHTLFWAMAGNGIPRSFRHMDGFGIHTFRLVTDSGTSKLVKWHWKSKQGKASLVWEEAQVLAGKNADFHRKDLWDAIESGNGPEWELGIQIVEEEDVLKFGFDLLDPTKILPEELVPVQKIGVMRLNANPRNYFAETEQVMFQPGHIVRGIDFTDDPLLQGRIFSYLDTQLNRHGGPNFEQLPINRPIVPVHNNNRDGAAHNYIPLNTAAYSPNTLNDAAPKQANQTVGRGFFTAPGRTVSGHLVREVSSTFSDVWSQPRLFYNSLIPVEQQFLINAIRFETSQLTSSVVKSNVLIQLNRVSHDLAARVASVLNLPVPEADNTYYNDNKTSSITIFGNELPTIATLNVGVLVSVKNNATLTQAANLATSFSTSGVNVKVIGEILTNGVDATYSASDATLFDGIIVTDGAENLFTNGSKSTYFPADRPRQILLDAYNWGKPVGTLGNARTSLNVASISTTPGVYSNSTSVSGLVKEFEAGLKTFRFVDRFALDD

SEQ ID NO: 2295 - protein, 693 aa, Thermothelomyces thermophilus
FADPAALQRRDDAPPADILEKYKVDDSKGYMSSDVGGPIGDQASLRAGGRGPTLLEDFIFRQKIQHFDHERVPERAVHARGAGAHGTFTSYADWSNLTAASFLSSAGKKTPVFVRFSTVAGSRGSADTARDVHGFATRFYTDEGNFDIVGNNIPVFFIQDAIQFPDLIHSVKPRPDNEIPQAATAHDSAWDFFSSQPSTLHTLFWAMAGNGIPRSYRHMDGFGIHTFRLVKEDGSSKLVKWHWKTRQGKASLVWEEAQAVAGKNADFHRQDLWDAIESGNGPEWELGVQVVDEDKALAFGFDLLDPTKIIPEELVPITPLGVMKLDRNPTNYFAETEQIMFQPGHIVRGIDFSEDPLLQGRLFSYLDTQLNRNGGPNFEQLPINMPRAPIHNNNRDGAGQTFIHTNIYPYSPNTLNKGYPLQANQTSGRGFFTAPGRRVTGELLRELSPTFNDHWSQPRLFYNSLKPVEQQFLINAIRFETSHIRSTTVKQNVLAQLNRVSHDVAARVAAALGLEAPAPDDTYYHDNKTAGLSIFGEPLPTIKTLRVGVLASAQKDSSTLAQAGLLKAALEKDGLVVTVVGESLAEGVDQTYSAADATAFDAVIVAEGAERLFAAAGASSPLFPAGRPGQILLDAYRWGKPVGVIGKAEGAYKSAGVPVGGKGVYTAAGVDAIVKNLEEGLKTFRFTDRFPLD

SEQ ID NO: 2296 - protein, 658 aa, Unidentified
FADPAALYRRQDTTSGQSPLAAYEVDDSTGYLTSDVGGPIQDQTSLKAGIRGPTLLEDFMFRQKIQHFDHERVPERAVHARGAGAHGTFTSYADWSNITAASFLNATGKQTPVFVRFSTVAGSRGSADTARDVHGFATRFYTDEGNFDIVGNNIPVFFIQDAIQFPDLIHSVKPSPDNEIPQAATAHDSAWDFFSQQPSAMHTLFWAMSGHGIPRSYRHMDGFGVHTFRFVKDDGSSKLIKWHFKSRQGKASLVWEEAQVLSGKNADFHRQDLWDAIESGNGPEWDVCVQIVDESQAQAFGFDLLDPTKIIPEEYAPLTKLGLLKLDRNPTNYFAETEQVMFQPGHIVRGVDFTEDPLLQGRLFSYLDTQLNRNGGPNFEQLPINMPRVPIHNNNRDGAGQMFIHRNKYPYTPNTLNSGYPRQANQNAGRGFFTAPGRTVSGALVREVSPTFNDHWSQPRLFFNSLTPVEQQFLVNAMRFEISLVKSEECRKNVLTQLNRVSHDVAVRVAAAIGLAAPDADDTYYHNNKTAGVSILGSGPLPTIKTLRVGILATTSESSALDQAAQLRTRLEKDGLVVTVVAETLREGVDQTYSTADATGFDGVVVVDGAAALFASTASSPLFPTGRPLQIFVDAYRWGKPVGVCGGKSSEVLDAADV

SEQ ID NO: 2297 - protein, 343 aa, Coprinopsis cinerea
QGPGGGGSVTCPGGQSTSNSQCCVWFDVLDDLQTNFYQGSKCESPVRKILRIVFHDAIGFSPALTAAGQFGGGGADGSIIAHSNIELAFPANGGLTDTVEALRAVGINHGVSFGDLIQFATAVGMSNCPGSPRLEFLTGRSNSSQPSPPSLIPGPGNTVTAILDRMGDAGFSPDEVVDLLAAHSLASQEGLNSAIFRSPLDSTPQVFDTQFYIETLLKGTTQPGPSLGFAEELSPFPGEFRMRSDALLARDSRTACRWQSMTSSNEVMGQRYRAAMAKMSVLGFDRNALTDCSDVIPSAVSNNAAPVIPGGLTVDDIEVSCPSEPFPEIATASGPLPSLAPAP

SEQ ID NO: 2298 - protein, 363 aa, Coprinopsis cinerea; identical to SEQ ID NO: 13

SEQ ID NO: 2299 - protein, 363 aa, Coprinopsis cinerea
MKLSLLSTFAAVIIGALALPQGPGGGGSVTCPGGQSTSNSQCCVWFDVLDDLQTNFYQGSKCESPVRKILRIVFHDAIGFSPALTAAGQFGGGGADGSIIAHSNIELAFPANGGLTDTIEALRAVGINHGVSFGDLIQFATAVGMSNCPGSPRLEFLTGRSNSSQPSPPSLIPGPGNTVTAILDRMGDAGFSPDEVVDLLAAHSLASQEGLNSAIFRSPLDSTPQVFDTQFYIETLLKGTTQPGPSLGFAEELSPFPGEFRMRSDALLARDSRTACRWQSMTSSNEVMGQRYRAAMAKMSVLGFDRNALTDCSDVIPSAVSNNAAPVIPGGLTVDDIEVSCPSEPFPEIATASGPLPSLAPAP

SEQ ID NO: 2300 - protein, 343 aa, Coprinopsis cinerea
QGPGGGGSVTCPGGQSTSNSQCCVWFDVLDDLQTNFYQGSKCESPVRKILRIVFHDAIGFSPALTAAGQFGGGGADGSIIAHSNIELAFPANGGLTDTVEALRAVGINHGVSFGDLIQFATAVGMSNCPGSPRLEFLTGRSNSSQPSPPSLIPGPGNTVTAILDRMGDAGFSPDEVVDLLAAHSLASQEGLNSAIFRSPLDSTPQVFDTQFYIETLLKGTTQPGPSLGFAEELSPFPGEFRXRSDALLARDSRTACRWQSMTSSNEVMGQRYRAAMAKMSVLGFDRNALTDCSDVIPSAVSNNAAPVIPGGLTVDDIEVSCPSEPFPEIATASGPLPSLAPAP

SEQ ID NO: 2301 - protein, 343 aa, Coprinopsis cinerea
QGPGGGGSVTCPGGQSTSNSQCCVWFDVLDDLQTNFYQGSKCESPVRSILRIVFHDAIGFSPALTAAGQFGGGGADGSIIAHSNIELAFPANGGLTDTVEALRAVGINHGVSFGDLIQFATAVGMSNCPGSPRLEFLTGRSNSSQPSPPSLIPGPGNTVTAILDRMGDAGFSPDEVVDLLAAHSLASQEGLNSAIFRSPLDSTPQVFDTQFYIETLLKGTTQPGPSLGFAEELSPFPGEFRMRSDALLARDSRTACRWQSMTSSNEVMGQRYRAAMAKMSVLGFDRNALTDCSDVIPSAVSNNAAPVIPGGLTVDDIEVSCPSEPFPEIATASGPLPSLAPAP

SEQ ID NO: 2302 - protein, 343 aa, Coprinopsis cinerea
QGPGGGGSVTCPGGQSTSNSQCCVWFDVLDDLQTNFYQGSKCESPVRKILRIVFHDAIGFSPALTAAGQFGGGGADGSIIAHSNIELAFPANGGLTDTVEALRAVGINHGVSFGDLIQFATAVGMSNCPGSPRLEFLTGRSNSSQPSPPSLIPGPGNTVTAILDRXGDAGFSPDEVVDLLAAHSLASQEGLNSAIFRSPLDSTPQVFDTQFYIETLLKGTTQPGPSLGFAEELSPFPGEFRMRSDALLARDSRTACRWQSMTSSNEVMGQRYRAAMAKMSVLGFDRNALTDCSDVIPSAVSNNAAPVIPGGLTVDDIEVSCPSEPFPEIATASGPLPSLAPAP

SEQ ID NO: 2303 - protein, 343 aa, Coprinopsis cinerea
QGPGGGGSVTCPGGQSTSNSQCCVWFDVLDDLQTNFYQGSKCESPVRKILRIXFHDAIGFSPALTAAGQFGGGGADGSIIAHSNIELAFPANGGLTDTVEALRAVGINHGVSFGDLIQFATAVGMSNCPGSPRLEFLTGRSNSSQPSPPSLIPGPGNTVTAILDRMGDAGFSPDEVVDLLAAHSLASQEGLNSAIFRSPLDSTPQVFDTQFYIETLLKGTTQPGPSLGFAEELSPFPGEFRMRSDALLARDSRTACRWQSMTSSNEVMGQRYRAAMAKMSVLGFDRNALTDCSDVIPSAVSNNAAPVIPGGLTVDDIEVSCPSEPFPEIATASGPLPSLAPAP

SEQ ID NO: 2304 - protein, 343 aa, Coprinopsis cinerea
QGPGGGGSVTCPGGQSTSNSQCCVWFDVLDDLQTNFYQGSKCESPVRKILRIVFHDAIGFSPALTAAGQFGGGGADGSIIAHSNIELAFPAKGGLTDTVEALRAVGINHGVSFGDLIQFATAVGMSNCPGSPRLEFLTGRSNSSQPSPPSLIPGPGNTVTAILDRMGDAGFSPDEVVDLLAAHSLASQEGLNSAIFRSPLDSTPQVFDTQFYIETLLKGTTQPGPSLGFAEELSPFPGEFRMRSDALLARDSRTACRWQSMTSSNEVMGQRYRAAMAKMSVLGFDRNALTDCSDVIPSAVSNNAAPVIPGGLTVDDIEVSCPSEPFPEIATASGPLPSLAPAP

SEQ ID NO: 2305 - protein, 343 aa, Coprinopsis cinerea
QGPGGGGSVTCPGGQSTSNSQCCVWFDVLDDLQTNFYQGSKCESPVRKILRIVFHDAIGFSPALTAAGQFGGGGADGSIIAHSNIELAFPANGGLTDTVEALRAVGINHGVSFGDLIQFATAVGMSNCPGSPRLEFLTGRSNSSQPSPPSLIPGPGNTVTAILDRMGDAGFSPDEVVDLLAAHSLASQEGLNSAIFRSPLDSTPQVFDTQFYIETLLKGTTQPGPSLGFAEELSPFPGEFRMRSDALLARDSRTACRWQSMTSSNEVMGQRFRAAMAKMSVLGFDRNALTDCSDVIPSAVSNNAAPVIPGGLTVDDIEVSCPSEPFPEIATASGPLPSLAPAP

SEQ ID NO: 2306 - protein, 343 aa, Coprinopsis cinerea
QGPGGGGSVTCPGGQSTSNSQCCVWFDVLDDLQTNFYQGSKCESPVRKILRIVFHDAIGFSPALTAAGQFGGGGADGSIIAHSNIELAFPANGGLTDTVEALRAVGINHGVSFGDLIQFATAVGMSNCPGSPRLEFLTGRSNSSQPSPPSLIPGPGNTVTAILDRMGDAGFSPDEVVDLLAAHSLASQEGLNSAIFRSPLDSTPQVFDTQFYIETLLKGTTQPGPSLGFAEELSPFPGEFRMRSDALLARDSRTACRWQSMTSSNEVMGQRYRAAMAKMSVLGFDRNALTDCSDVIPSAVSNNEAPVIPGGLTVDDIEVSCPSEPFPEIATASGPLPSLAPAP

SEQ ID NO: 2307 - protein, 343 aa, Coprinopsis cinerea
QGPGGGGSVTCPGGQSTSNSQCCVWFDVLDDLQTNFYQGSKCESPVRKILRIVFHDAIGFSPALTAAGQFGQGGADGSIIAHSNIELAFPANGGLTDTVEALRAVGINHGVSFGDLIQFATAVGMSNCPGSPRLEFLTGRSNSSQPSPPSLIPGPGNTVTAILDRMGDAGFSPDEVVDLLAAHSLASQEGLNSAIFRSPLDSTPQVFDTQFYIETLLKGTTQPGPSLGFAEELSPFPGEFRMRSDALLARDSRTACRWQSMTSSNEVMGQRYRAAMAKMSVLGFDRNALTDCSDVIPSAVSNNAAPVIPGGLTVDDIEVSCPSEPFPEIATASGPLPSLAPAP

SEQ ID NO: 2308 - protein, 343 aa, Coprinopsis cinerea
QGPGGGGSVTCPGGQSTSNSQCCVWFDVLDDLQTNFYQGSKCESPVRKILRIVFHDAIGFSPALTAAGQFGGGGADGSIIAHSNIELAFPANGGLTDTVEALRAVGINHGVSFGDLIQFATAVGMSNCPGSPRLEFLTGRSNSSQPSPPSLIPGPGNTVTAILDRMGDAGFSPDEVVDLLAAHSLASQEGLNSAIFRSPLDSTPQVFDTQFYIETLLKGTTQPGPSLGFAEELSPFPGEFRMRSDALLARDSRTACRWQSMTSSNEVMGQRXRAAMAKMSVLGFDRNALTDCSDVIPSAVSNNAAPVIPGGLTVDDIEVSCPSEPFPEIATASGPLPSLAPAP

SEQ ID NO: 2309 - protein, 343 aa, Coprinopsis cinerea
QGPGGGGSVTCPGGQSTSNSQCCVWFDVLDDLQTNFYQGSKCESPVRKILRIVFHDAIGFSPALTAAGQFGGGGADGSIIAHSNIELAFPCNGGLTDTVEALRAVGINHGVSFGDLIQFATAVGMSNCPGSPRLEFLTGRSNSSQPSPPSLIPGPGNTVTAILDRMGDAGFSPDEVVDLLAAHSLASQEGLNSAIFRSPLDSTPQVFDTQFYIETLLKGTTQPGPSLGFAEELSPFPGEFRMRSDALLARDSRTACRWQSMTSSNEVMGQRYRAAMAKMSVLGFDRNALTDCSDVIPSAVSNNAAPVIPGGLTVDDIEVSCPSEPFPEIATASGPLPSLAPAP

SEQ ID NO: 2310 - protein, 343 aa, Coprinopsis cinerea
QGPGGGGSVTCPGGQSTSNSQCCVWFDVLDDLQTNFYQGSKCESPVRKILRIVFHDAIGFSPALTAAGQFGGGGADGSIIAHSNIELAFPANGGLTDTVEALRAVGINHGVSFGDLIQFATAVGMSNCPGSPRLEFLTGRSNSSQPSPPSLIPGPGNTVTAILDRMGDAGFSPDEVVDLLAAHSLASQEGLNSAIFRSPLDSTPQVFDTQFYIETLLKGTTQPGPSLGFAEELSPFPGEFRMRSDALLARDSRTACRWQSMTSSNEVMGQRYRAASAKMSVLGFDRNALTDCSDVIPSAVSNNAAPVIPGGLTVDDIEVSCPSEPFPEIATASGPLPSLAPAP

SEQ ID NO: 2311 - protein, 343 aa, Coprinopsis cinerea
QGPGGGGSVTCPGGQSTSNSQCCVWFDVLDDLQTNFYQGSKCESPVRKILRIVFHDAIGFSPALTAAGQFGGGGADGSIIAHSNIELAFPANGGLTDTIEALRAVGINHGVSFGDLIQFATAVGMSNCPGSPRLEFLTGRSNSSQPSPPSLIPGPGNTVTAILDRMGDAGFSPDEVVDLLAAHSLASQEGLNSAIFRSPLDSTPQVFDTQFYIETLLKGTTQPGPSLGFAEELSPFPGEFRMRSDALLARDSRTACRWQSMTSSNEVMGQRYRAAMAKMSVLGFDRNALTDCSDVIPSAVSNNAAPVIPGGLTVDDIEVSCPSEPFPEIATASGPLPSLAPAP

SEQ ID NO: 2312 - protein, 343 aa, Coprinopsis cinerea
QGPGGGGSVTCPGGQSTSNSQCCVWFDVLDDLQTNFYQGSKCESPVRKILRIVFHDAIGFSPALTAAGQFGGGGADGSIIAHSNIELAFPANGGLTDTVEALRAVGINHGVSFGDLIQFATAVGMSNCPGSPRLEFLTGRSNSSQPSPPSLIPGPGNTVTAILDRMGDAGFSPDEVVDLLAAHSLASQEGLNSAIFRSPLDSTPQVFDTQFYIETLLKGTTQPGPSLGFAEELSPFPGEFRMRSDALLARDSRTACRWQSMTSSNEVMGQRYRAAMAKMSVLGFDRNALTDCSDVIPSAVSNNAAPVIPGGLTPDDIEVSCPSEPFPEIATASGPLPSLAPAP

SEQ ID NO: 2313 - protein, 343 aa, Coprinopsis cinerea
QGPGGGGSVTCPGGQSTSNSQCCVWFDVLDDLQTNFYQGSKCESPVRKILRIVFHDAIGFSPALTAAGQFGGGGADGSIIAHSNIELAFPANGGLTDTVEALRAVGINHGVSFGDLIQFATAVGMSNCPGSPRLEFLTGRSNSSQPSPPSLIPGPGNTVTAILDRMGDAGFSPDEVVDLLAAHSLASQEGLNSAIFRSPLDSTPQRFDTQFYIETLLKGTTQPGPSLGFAEELSPFPGEFRMRSDALLARDSRTACRWQSMTSSNEVMGQRYRAAMAKMSVLGFDRNALTDCSDVIPSAVSNNAAPVIPGGLTVDDIEVSCPSEPFPEIATASGPLPSLAPAP

SEQ ID NO: 2314 - protein, 343 aa, Coprinopsis cinerea
QGPGGGGSVTCPGGQSTSNSQCCVWFDVLDDLQTNFYQGSKCESPVRKILRIVFHDAIGFSPALTAAGQFGGGGADGSIIAHSNIELAFPANGGLTDTVEALRAVGINHGVSFGDLIQFATAVGMSNCPGSPRLEFLTGRSNSSQPSPPSLIPGPGNTVTAILDRMGDAGFSPDEVVDLLAAHSLASQEGLNSAIFRSPLDSTPQVFDTQFYIETLLKGTTQPGPSLGFAEELSPFPGEFRMRSDALLARDSRTACRWQSMTSSNEVMGQRYRAAXAKMSVLGFDRNALTDCSDVIPSAVSNNAAPVIPGGLTVDDIEVSCPSEPFPEIATASGPLPSLAPAP

SEQ ID NO: 2315 - protein, 343 aa, Coprinopsis cinerea
QGPGGGGSVTCPGGQSTSNSQCCVWFDVLDDLQTNFYQGSKCESPVRKILRIVFHDAIGFSPALTAAGQFGGGGADGSIIAHSNIELAFPANGGLTDTVEALRAVGINHGVSFGDLIQFATAVGMSNCPGSPRLEFLTGRSNSSQPSPPSLIPGPGNTVTAILDRMGDAGFSPDEVVDLLAAHSLASQEGLNSAIFRSPLDSTPQVFDTQFYIETLLKGTTQPGPSLGFAEELSPFPGEFRMRCDALLARDSRTACRWQSMTSSNEVMGQRYRAAMAKMSVLGFDRNALTDCSDVIPSAVSNNAAPVIPGGLTVDDIEVSCPSEPFPEIATASGPLPSLAPAP

SEQ ID NO: 2316 - protein, 343 aa, Coprinopsis cinerea
QGPGGGGSVTCPGGQSTSNSQCCVWFDVLDDLQTNFYQGSKCESPVRKILRIVFHDAIGFSPALTAAGQFGGGGADGSIIAHSNIELAFPANGGLTDTVEALRAVGINHGVSFGDLIQFATAVGMSNCPGSPRLEFLTGRSNSSQPSPPSLIPGPGNTVTAILDRMGDAGFSPDEVVDLLAAHSLASQEGLNSAIFRSPLDSTPQVFDTQFYIETLLKGTTQPGPSLGFCEELSPFPGEFRMRSDALLARDSRTACRWQSMTSSNEVMGQRYRAAMAKMSVLGFDRNALTDCSDVIPSAVSNNAAPVIPGGLTVDDIEVSCPSEPFPEIATASGPLPSLAPAP

SEQ ID NO: 2317 - protein, 343 aa, Coprinopsis cinerea
QGPGGGGSVTCPGGQSTSNSQCCVWFDVLDDLQTNFYQGSKCESPVRKILRIVFHDAIGFSPALTAAGQFGGGGADGSIIAHSNIELAFPANGGLTDTVEALRAVGINHGVSFGDLIQFATAVGMSNCPGSPRLEFLTGRSNSSQPQPPSLIPGPGNTVTAILDRMGDAGFSPDEVVDLLAAHSLASQEGLNSAIFRSPLDSTPQVFDTQFYIETLLKGTTQPGPSLGFAEELSPFPGEFRMRSDALLARDSRTACRWQSMTSSNEVMGQRYRAAMAKMSVLGFDRNALTDCSDVIPSAVSNNAAPVIPGGLTVDDIEVSCPSEPFPEIATASGPLPSLAPAP

SEQ ID NO: 2318 - protein, 343 aa, Coprinopsis cinerea
QGPGGGGSVTCPGGQSTSNSQCCVWFDVLDDLQTNFYQGSKCESPVRKILRIVFHDAIGFSPALTAAGQFGGGGADGSIIAHSNIELAFPANGGLTDTVEALRAVGINHGVSFGDLIQFATAVGMSNCPGSPRLEFLTGRSNSSQPSPPSLIPGPGNTVTAILDRMGDAGFSPDEVVDLLAAHSLASQEGLNSAIFRSPLDSTPQVFDTQFYIETLLKGTTQPGPSLGGAEELSPFPGEFRMRSDALLARDSRTACRWQSMTSSNEVMGQRYRAAMAKMSVLGFDRNALTDCSDVIPSAVSNNAAPVIPGGLTVDDIEVSCPSEPFPEIATASGPLPSLAPAP

SEQ ID NO: 2319 - protein, 343 aa, Coprinopsis cinerea
QGPGGGGSVTCPGGQSTSNSQCCVWFDVLDDLQTNFYQGSKCESPVRKILRIVFHDAIGFSPALTAAGQFGGGGADGSIIAHSNIELAFPANGGLTDTVEALRAVGINHGVSFGDLIQFATAVGMSNCPGSPRLEFLTGRSNSSQPSPPSLIPGPGNTVTAILDRMGDAGFSPDEVVDLLAAHSLASQEGLNSAIFRSPLDSTPQVFDTQFYIETLLKGTTQPGPSLGFAEELSPFPGEFRMRSDALLARDSRTACRWQSMTSSNEVMGQRYRAAMAKXSVLGFDRNALTDCSDVIPSAVSNNAAPVIPGGLTVDDIEVSCPSEPFPEIATASGPLPSLAPAP

SEQ ID NO: 2320 - protein, 343 aa, Coprinopsis cinerea
QGPGGGGSVTCPGGQSTSNSQCCVWFDVLDDLQTNFYQGSKCESPVRKILRIVFHDAIGFSPALTAAGQFGGGGADGSIIAHSNIELAFPANGGLTDTVEALRAVGINHGVSFGDLIQFATAVGMSNCPGSPRLEFLTGRSNSSQPSPPSLIPGPGNTVTAILDRMGDAGFSPDEVVDLLAAHSLASQEGLKSAIFRSPLDSTPQVFDTQFYIETLLKGTTQPGPSLGFAEELSPFPGEFRMRSDALLARDSRTACRWQSMTSSNEVMGQRYRAAMAKMSVLGFDRNALTDCSDVIPSAVSNNAAPVIPGGLTVDDIEVSCPSEPFPEIATASGPLPSLAPAP

SEQ ID NO: 2321 - protein, 343 aa, Coprinopsis cinerea
QGPGGGGSVTCPGGQSTSNSQCCVWFDVLDDLQTNFYQGSKCESPVRKILRIVFHDAIGFSPALTAAGQFGGGGADGSIIAHSNIELAFPANGGLTDTVEALRAVGINHGVSFGDLIQFATAVGMSNCPGSPRLEFLTGRSNSSQPSPPSLIPGPGNTVTAILDRMGDAGFSPDEVVDLLAAHSLASQEGLNSAIFRSPLDSTPQVFDTQFYIETLLRGTTQPGPSLGFAEELSPFPGEFRMRSDALLARDSRTACRWQSMTSSNEVMGQRYRAAMAKMSVLGFDRNALTDCSDVIPSAVSNNAAPVIPGGLTVDDIEVSCPSEPFPEIATASGPLPSLAPAP

SEQ ID NO: 2322 - protein, 343 aa, Coprinopsis cinerea
QGPGGGGSVTCPGGQSTSNSQCCVWFDVLDDLQTNFYQGSKCESPVRKILRIVFHDAIGFSPALTAAGQFGGGGADGSIIAHSNIELAFPANGGLTDTVEALRAVGINHGVSFGDLIQFATAVGMSNCPGSPRLEFLTGRSNSSQPSPPSLIPGPGNTVTAILDRMGDAGFSPDEVVDLLAAHSLASQEGLNSAIFRSPLDSTPQVFDTQFYIETLLKGTTQPGPSLGFAEELSPFPGEFRMRSDALLARDPRTACRWQSMTSSNEVMGQRYRAAMAKMSVLGFDRNALTDCSDVIPSAVSNNAAPVIPGGLTVDDIEVSCPSEPFPEIATASGPLPSLAPAP

SEQ ID NO: 2323 - protein, 343 aa, Coprinopsis cinerea
QGPGGGGSVTCPGGQSTSNSQCCVWFDVLDDLQTNFYQGSKCESPVRKILRIVFHDAIGFSPALTAAGQFGGGGADGSIIAHSNIELAFPANGGLTDTVEALRAVGINHGVSFGDLIQFATAVGMSNCPGSPRLEFLTGRSNSSQPSPPSLIPGPGNTVTAILDRMGDAGFSPDEVVDLLAAHSLASQEGLNSAIFRSPLDSTPQVFDTQFYIETLLKGTTQPGPSLGFAEELSPFPGEFRMRSDALLARDSRTACRWQSMTSSNEVXGQRYRAAMAKMSVLGFDRNALTDCSDVIPSAVSNNAAPVIPGGLTVDDIEVSCPSEPFPEIATASGPLPSLAPAP

SEQ ID NO: 2324 - protein, 343 aa, Coprinopsis cinerea
QGPGGGGSVTCPGGQSTSNSQCCVWFDVLDDLQTNFYQGSKCESPVRKILRIVFHDAIGFSPALTAAGQFGGGGADGSIIAHSNIELAFPANGGLTDTVEALRAVGINHGVSFGDLIQFATAVGMSNCPGSPRLEFLTGRSNSSQPSPPSLIPGPGNTVTAILDRMGDAGFSPDEVVDLLAAHSLASQEGLNSAIFRSPLDSTPQVFDTQFYIETLLKGTTQPGPSLGFAEELSPFPGEFRMRSDALLARDSRTACRWQSXTSSNEVMGQRYRAAMAKMSVLGFDRNALTDCSDVIPSAVSNNAAPVIPGGLTVDDIEVSCPSEPFPEIATASGPLPSLAPAP

SEQ ID NO: 2325 - protein, 343 aa, Coprinopsis cinerea
QGPGGGGSVTCPGGQSTSNSQCCVWFDVLDDLQTNFYQGSKCESPVRKILRIVFWDAIGFSPALTAAGQFGGGGADGSIIAHSNIELAFPANGGLTDTVEALRAVGINHGVSFGDLIQFATAVGMSNCPGSPRLEFLTGRSNSSQPSPPSLIPGPGNTVTAILDRMGDAGFSPDEVVDLLAAHSLASQEGLNSAIFRSPLDSTPQVFDTQFYIETLLKGTTQPGPSLGFAEELSPFPGEFRMRSDALLARDSRTACRWQSMTSSNEVMGQRYRAAMAKMSVLGFDRNALTDCSDVIPSAVSNNAAPVIPGGLTVDDIEVSCPSEPFPEIATASGPLPSLAPAP

SEQ ID NO: 2326 - protein, 343 aa, Coprinopsis cinerea
QGPGGGGSVTCPGGQSTSNSQCCVWFDVLDDLQTNFYQGSKCESPVRKILRIVFHDAIGFSPALTAAGQFGGGGADGSIIAHSNIELAFPANGGLTDTVEALRAVGINHGVSFGDLIQFATAVGMSNCPGSPRLEFLTGRSNSSQPSPPSLIPGPGNTVTAILDRMGDAGFSPDEVVDLLAAHSLASQEGLNSAIFRSPLDSTPQVFDTQFYIETLLKGTTQPGPSLGFAEELSPFPGEFRMRSDALLARDSRTACRXQSMTSSNEVMGQRYRAAMAKMSVLGFDRNALTDCSDVIPSAVSNNAAPVIPGGLTVDDIEVSCPSEPFPEIATASGPLPSLAPAP

SEQ ID NO: 2327 - protein, 343 aa, Coprinopsis cinerea
QGPGGGGSVTCPGGQSTSNSQCCVWFDVLDDLQTNFYQGSKCESPVRKILRIVFHDAIGFSPALTAAGQFGGGGADGSIIAHSNIELAFPANGGLTDTVEALRAVGINKGVSFGDLIQFATAVGMSNCPGSPRLEFLTGRSNSSQPSPPSLIPGPGNTVTAILDRMGDAGFSPDEVVDLLAAHSLASQEGLNSAIFRSPLDSTPQVFDTQFYIETLLKGTTQPGPSLGFAEELSPFPGEFRMRSDALLARDSRTACRWQSMTSSNEVMGQRYRAAMAKMSVLGFDRNALTDCSDVIPSAVSNNAAPVIPGGLTVDDIEVSCPSEPFPEIATASGPLPSLAPAP

SEQ ID NO: 2328 - protein, 343 aa, Coprinopsis cinerea
QGPGGGGSVTCPGGQSTSNSQCCVWFDVLDDLQTNFYQGSKCESPVRKILRIVFHDAIGFSPALTAAGQFGGGGADGSIIAHSNIELAFPANGGLTDTVEALRAVGINHGVSFGDLIQFATAVGMSNCPGSPRLEFLTGRSNSSQPSPPSLCPGPGNTVTAILDRMGDAGFSPDEVVDLLAAHSLASQEGLNSAIFRSPLDSTPQVFDTQFYIETLLKGTTQPGPSLGFAEELSPFPGEFRMRSDALLARDSRTACRWQSMTSSNEVMGQRYRAAMAKMSVLGFDRNALTDCSDVIPSAVSNNAAPVIPGGLTVDDIEVSCPSEPFPEIATASGPLPSLAPAP

SEQ ID NO: 2329 - protein, 343 aa, Coprinopsis cinerea
QGPGGGGSVTCPGGQSTSNSQCCVWFDVLDDLQTNFYQGSKCESPVRKILRIVFHDAIGFSPALTAAGQFGGGGADGSIIAHSNIELAFPANGGLTDTVEALRAVGINHGVSFGDLIQFATAVGMSNCPGSPRLEFLTGRSNSSQPSPPSLIPGPGNTVTAILDRMGDAGFSPDEVVDLLAAHSLASQEGLNSAIFRSPLDSTPQVFDTQFYIETLLKGTTQPGPSLGFAEELSPFPGEFRMRSDALLARDSRTACRWQSMTSSNEVMGQRYRAAMARMSVLGFDRNALTDCSDVIPSAVSNNAAPVIPGGLTVDDIEVSCPSEPFPEIATASGPLPSLAPAP

SEQ ID NO: 2330 - protein, 343 aa, Coprinopsis cinerea
QGPGGGGSVTCPGGQSTSNSQCCVWFDVLDDLQTNFYQGSKCESPVRKILRIVFHDAIGFSPALTAAGQFGGGGADGSIIAHSNIELAFPANGGLTDTVEALRAVGINHGVSFGDLIQFATAVGMSNCPGSPRLEFLTGRSNSSQPSPPSLIPGPGNTVTAILDRMGDAGFSPDEVVDLLAAHSLASQEGLNSAIFRSPLDSTPQVFDTQFYIETLLKGTTQPGPSLGFAEELSPFPGXFRMRSDALLARDSRTACRWQSMTSSNEVMGQRYRAAMAKMSVLGFDRNALTDCSDVIPSAVSNNAAPVIPGGLTVDDIEVSCPSEPFPEIATASGPLPSLAPAP

SEQ ID NO: 2331 - protein, 343 aa, Coprinopsis cinerea
QGPGGGGSVTCPGGQSTSNSQCCVWFDVLDDLQTNFYQGSKCESPVRKILRIVFHDAIGFSPALTAAGQFGGGGADGSIIAHSNIELAFPANGGLTDTVEALRAVGINHGVSFGDLIQFATAVGMSNCPGSPRLEFLTGRSNSSQPSPPSLIPGPGNTVTAILDRMGDAGFSPDEVVDLLAAHSLASQEGLNSAIFRSPLDSTPQVFDTQFYILTLLKGTTQPGPSLGFAEELSPFPGEFRMRSDALLARDSRTACRWQSMTSSNEVMGQRYRAAMAKMSVLGFDRNALTDCSDVIPSAVSNNAAPVIPGGLTVDDIEVSCPSEPFPEIATASGPLPSLAPAP

SEQ ID NO: 2332 - protein, 343 aa, Coprinopsis cinerea
QGPGGGGSVTCPGGQSTSNSQCCVWFDVLDDLQTNFYQGSKCESPVRKILRIVFHDAIGFSPALTAAGQFGGGGADGSIIAHSNIELAFPANGGLTDTVEALRAVGINHGVSFGDLIQFATAVGXSNCPGSPRLEFLTGRSNSSQPSPPSLIPGPGNTVTAILDRMGDAGFSPDEVVDLLAAHSLASQEGLNSAIFRSPLDSTPQVFDTQFYIETLLKGTTQPGPSLGFAEELSPFPGEFRMRSDALLARDSRTACRWQSMTSSNEVMGQRYRAAMAKMSVLGFDRNALTDCSDVIPSAVSNNAAPVIPGGLTVDDIEVSCPSEPFPEIATASGPLPSLAPAP

SEQ ID NO: 2333 - protein, 343 aa, Coprinopsis cinerea
QGPGGGGSVTCPGGQSTSNSQCCVWFDVLDDLQTNFYQGSKCESPVRKILRIVFHDAIGFSPALTAAGQFGGGGADGSIIAHSNIELAFPANGGLTDTVEALRAVGINHGVSFGDLIQFATAVGMSNCPGSPRLEFLTGRSNSSQPSPPSLIPGPGNTVTAILDRMGDAGFSPDEVVDLLAAHSLASQEGLNSAKFRSPLDSTPQVFDTQFYIETLLKGTTQPGPSLGFAEELSPFPGEFRMRSDALLARDSRTACRWQSMTSSNEVMGQRYRAAMAKMSVLGFDRNALTDCSDVIPSAVSNNAAPVIPGGLTVDDIEVSCPSEPFPEIATASGPLPSLAPAP

SEQ ID NO: 2334 - protein, 343 aa, Coprinopsis cinerea
QGPGGGGSVTCPGGQSTSNSQCCVWFDVLDDLQTNFYQGSKCESPVRKILRIVFHDAIGFSPALTAAGQFGGGGADGSIIAHSNIELAFPANGGLTDTVEALRAVGINHGVSFGDLIQFATAVGMSNCPGSPRLEFLTGRSNSSQPSPPSLIPGPGNTVTAILDRMGDAGFSPDEVVDLLAAHSLASQEGLNSAIFRSPLDSTPQVFDTQFYIETLLKGTTQPGPSLGFAEELSPFPGELRMRSDALLARDSRTACRWQSMTSSNEVMGQRYRAAMAKMSVLGFDRNALTDCSDVIPSAVSNNAAPVIPGGLTVDDIEVSCPSEPFPEIATASGPLPSLAPAP

SEQ ID NO: 2335 - protein, 343 aa, Coprinopsis cinerea
QGPGGGGSVTCPGGQSTSNSQCCVWFDVLDDLQTNFYQGSKCESPVRKILRIVFHDAIGFSPALTAAGQFGGGGADGSIIAHSNIELAFPANGGLTDTVEALRAVGINHGVSFGDLIQFATAVGMSNCPGSPRLEFLTGRSNSSQPSPPSLIPGPGNTVTAILDRMGDAGFSPDEVVDLLAAHSLASQEGLNSAIFRSPLDSTPQVFDTQFYIETLLKGTTQPGPSLGFAEELSPFPGKFRMRSDALLARDSRTACRWQSMTSSNEVMGQRYRAAMAKMSVLGFDRNALTDCSDVIPSAVSNNAAPVIPGGLTVDDIEVSCPSEPFPEIATASGPLPSLAPAP

SEQ ID NO: 2336 - protein, 343 aa, Coprinopsis cinerea
QGPGGGGSVTCPGGQSTSNSQCCVWFDVLDDLQTNFYQGSKCESPVRKILRIVFHDAIGFSPALTAAGQFGGGGADGSIIAHSNIELAFPANGGLTDTVEALRAVGINHGVSFGDLIEFATAVGMSNCPGSPRLEFLTGRSNSSQPSPPSLIPGPGNTVTAILDRMGDAGFSPDEVVDLLAAHSLASQEGLNSAIFRSPLDSTPQVFDTQFYIETLLKGTTQPGPSLGFAEELSPFPGEFRMRSDALLARDSRTACRWQSMTSSNEVMGQRYRAAMAKMSVLGFDRNALTDCSDVIPSAVSNNAAPVIPGGLTVDDIEVSCPSEPFPEIATASGPLPSLAPAP

SEQ ID NO: 2337 - protein, 343 aa, Coprinopsis cinerea
QGPGGGGSVTCPGGQSTSNSQCCVWFDVLDDLQTNFYQGSKCESPVRKILRIVFHDAIGFSPALTAAGQFGGGGADGSIIAHSNIELAFPANGGLTDTVEALRAVGINHGVSFGDLIQFATAVGMSNCPGSPRLEFLTGRSNSSQPSPPSLIPGCGNTVTAILDRMGDAGFSPDEVVDLLAAHSLASQEGLNSAIFRSPLDSTPQVFDTQFYIETLLKGTTQPGPSLGFAEELSPFPGEFRMRSDALLARDSRTACRWQSMTSSNEVMGQRYRAAMAKMSVLGFDRNALTDCSDVIPSAVSNNAAPVIPGGLTVDDIEVSCPSEPFPEIATASGPLPSLAPAP

SEQ ID NO: 2338 - protein, 343 aa, Coprinopsis cinerea
QGPGGGGSVTCPGGQSTSNSQCCVWFDVLDDLQTNFYQGSKCESPVRKILRIVFDDAIGFSPALTAAGQFGGGGADGSIIAHSNIELAFPANGGLTDTVEALRAVGINHGVSFGDLIQFATAVGMSNCPGSPRLEFLTGRSNSSQPSPPSLIPGPGNTVTAILDRMGDAGFSPDEVVDLLAAHSLASQEGLNSAIFRSPLDSTPQVFDTQFYIETLLKGTTQPGPSLGFAEELSPFPGEFRMRSDALLARDSRTACRWQSMTSSNEVMGQRYRAAMAKMSVLGFDRNALTDCSDVIPSAVSNNAAPVIPGGLTVDDIEVSCPSEPFPEIATASGPLPSLAPAP

SEQ ID NO: 2339 - protein, 344 aa, 'Arthromyces ramosus'
QGPGGGGGSVTCPGGQSTSNSQCCVWFDVLDDLQTNFYQGSKCESPVRKILRIVFHDAIGFSPALTAAGQFGGGGADGSIIAHSNIELAFPANGGLTDTIEALRAVGINHGVSFGDLIQFATAVGMSNCPGSPRLEFLTGRSNSSQPSPPSLIPGPGNTVTAILDRMGDAGFSPDEVVDLLAAHSLASQEGLNSAIFRSPLDSTPQVFDTQFYIETLLKGTTQPGPSLGFAEELSPFPGEFRMRSDALLARDSRTACRWQSMTSSNEVMGQRYRAAMAKMSVLGFDRNALTDCSDVIPSAVSNNAAPVIPGGLTVDDIEVSCPSEPFPEIATASGPLPSLAPAP

SEQ ID NO: 2340 - protein, 342 aa, Coprinopsis cinerea
GPGGGGSVTCPGGQSTSNSQCCVWFDVLDDLQTNFYQGSKCESPVRKILRIVFHDAIGFSPALTAAGQFGGGGADGSIIAHSNIELAFPANGGLTDTVEALRAVGINHGVSFGDLIQFATAVGMSNCPGSPRLEFLTGRSNSSQPSPPSLIPGPGNTVTAILDRMGDAGFSPDEVVDLLAAXSLASQEGLNSAIFRSPLDSTPQVFDTQFYIETLLKGTTQPGPSLGFAEELSPFPGEFRMRSDALLARDSRTACRWQSMTSSNEVMGQRYRAAMAKMSVLGFDRNALTDCSDVIPSAVSNNAAPVIPGGLTVDDIEVSCPSEPFPEIATASGPLPSLAPAP

SEQ ID NO: 2341 - protein, 336 aa, Coprinopsis cinerea
TVTCPGGQSTSNSQCCVWFDVLDDLQTNFYQGSKCESPVRKILRIVFHDAIGFSPALTAAGQFGGGGADGSIIAHSNIELAFPANGGLTDTVEALRAVGINHGVSFGDLIQFATAVGMSNCPGSPRLEFLTGRSNSSQPSPPSLIPGPGNTVTAILDRMGDAGFSPDEVVDLLAAHSLASQEGLNSAIFRSPLDSTPQVFDTQFYIETLLKGTTQPGPSLGFAEELSPFPGEFRMRSDALLARDSRTACRWQSMTSSNEVMGQRYRAAMAKMSVLGFDRNALTDCSDVIPSAVSNNAAPVIPGGLTVDDIEVSCPSEPFPEIATASGPLPSLAPAP

SEQ ID NO: 2342 - protein, 343 aa, Coprinopsis cinerea
QGPGGGGSVTCPGGQSTSNSQCCVWFDVLDDLQTNFYQGSKCESPVRKILRIVFHDAIGFSPALTAAGQFGGGGADGSIIAHSNIELAFPANGGLTDTIEALRAVGINHGVSFGDLIQFATAVGMSNCPGSPRLEFLTGRSNSSQPSPPSLIPGPGNTVTAILDRMGDAGFSPDEVVDLLAAHSLASQEGLNSAIFRSPLDSTPQVFDTQFYIETLLKGTTQPGPSLGYAEELSPFPGEFRMRSDALLARDSRTACRWQSMTSSNEVMGQRYRAAMAKMSVLGFDRNALTDCSDVIPSAVSNNAAPVIPGGLTVDDIEVSCPSEPFPEIATASGPLPSLAPAP

SEQ ID NO: 2343 - protein, 343 aa, Coprinopsis cinerea
QGPGGGGSVTCPGGQSTSNSQCCVWFDVLDDLQTNFYQGSKCESPVRKILRIVFHDAIGFSPALTAAGQFGGGGADGSIIAHSNIELAFPANGGLTDTVEALRAVGINHGVSFGDLIQFATAVGMSNCPGSPRLEFLTGRSNSSQPSPPSLIPGPGNTVTAILDRMGDAGFSPDEVVDLLAAHSLASQEGLNSAIFRSPLDSTPQVFDTQFYIETLLKGTTQPGPSLGFAEELSPFPGELRMRSDALLARDSRTACRWQSMTSSNEVMGQRYRAAMAKMSVLGFDRNALTDCSDVIPSAVSNNAAPVIPGGLTVDDIEVSCPYEPFPEIATASGPLPSLAPAP

SEQ ID NO: 2344 - protein, 343 aa, Coprinopsis cinerea
QGPGGGGSVTCPGGQSTSNSQCCVWFDVLDDLQTNFYQGSKCESPVRKILRIVFHDAIGFSPALTAAGQFGGGGADGSIIAHSNIELAFPANGGLTDTIEALRAVGINHGVSFGDLIQFATAVGMSNCPGSPRLEFLTGRSNSSQPSPPSLIPGPGNTVTAILDRMGDAGFSPDEVVDLLAAHSLASQEGLNSAIFRSPLDSTPQVFDTQFYIETLLKGTTQPGPSLGWAEELSPFPGEFRMRSDALLARDSRTACRWQSMTSSNEVMGQRYRAAMAKMSVLGFDRNALTDCSDVIPSAVSNNAAPVIPGGLTVDDIEVSCPSEPFPEIATASGPLPSLAPAP

SEQ ID NO: 2345 - protein, 343 aa, Coprinopsis cinerea
QGPGGGGSVTCPGGQSTSNSQCCVWFDVLDDLQTNFYQGSKCESPVRKILRIVFHDAIGFSPALTAAGQFGGGGADGSIIAHSNIELAFPANGGLTDTVEALRAVGINHGVSFGDLIQFATAVGMSNCPGSPRLEFLTGRSNSSQPSPPSLIPGPGNTVTAILDRFGDAGFSPDEVVDLLAAHSLASQEGLNSAIFRSPLDSTPQVFDTQFYIETLLKGTTQPGPSLGFAEELSPFPGKFRMRSDALLARDSRTACRWQSMTSSNEVMGQRYRAAMAKMSVLGFDRNALTDCSDVIPSAVSNNAAPVIPGGLTVDDIEVSCPSEPFPEIATASGPLPSLAPAP

SEQ ID NO: 2346 - protein, 343 aa, Coprinopsis cinerea
QGPGGGGSVTCPGGQSTSNSQCCVWFDVLDDLQTNFYQGSKCESPVRKILRIVFHDAIGFSPALTAAGQFGGGGADGSIIAHSNIELAFPANGGLTDTIEALRAVGINHGVSFGDLIQFATAVGMSNCPGSPRLEFLTGRSNSSQPSPPSLIPGPGNTVTAILDRMGDAGFSPDEVVDLLAAHSLASQEGLNSAIFRSPLDSTPQVFDTQFYIETLLKGTTQPGPSLGVAEELSPFPGEFRMRSDALLARDSRTACRWQSMTSSNEVMGQRYRAAMAKMSVLGFDRNALTDCSDVIPSAVSNNAAPVIPGGLTVDDIEVSCPSEPFPEIATASGPLPSLAPAP

SEQ ID NO: 2347 - protein, 343 aa, Coprinopsis cinerea
QGPGGGGSVTCPGGQSTSNSQCCVWFDVLDDLQTNFYQGSKCESPVRKILRIVFHDAIGFSPALTAAGQFGGGGADGSIIAHSNIELAFPANGGLTDTVEALRAVGINHGVSFGDLIQFATAVGMSNCPGSPRLEFLTGRSNSSQPSPPSLIPGPGNTVTAILDRMNDAGFSPDELVDLLAAHSLASQEGLNSAIFRSPLDSTPQVFDTQFYIETLLKGTTQPGPSLGFAEELSPFPGEFRMRSDALLARDSRTACRWQSMTSSNEVMGQRYRAAMAKMSVLGFDRNALTDCSDVIPSAVSNNAAPVIPGGLTVDDIEVSCPSEPFPEIATASGPLPSLAPAP

SEQ ID NO: 2348 - protein, 343 aa, Coprinopsis cinerea
QGPGGGGSVTCPGGQSTSNSQCCVWFDVLDDLQTNFYQGSKCESPVRKILRIVFHDAIGFSPALTAAGQFGGGGADGSIIAHSNIELAFPANGGLTDTIEALRAVGINHGVSFGDLIQFATAVGMSNCPGSPRLEFLTGRSNSSQPSPPSLIPGPGNTVTAILDRMGDAGFSPDEVVDLLAAHSLASQEGLNSAIFRSPLDSTPQVFDTQFYIETLLKGTTQPGPSLGHAEELSPFPGEFRMRSDALLARDSRTACRWQSMTSSNEVMGQRYRAAMAKMSVLGFDRNALTDCSDVIPSAVSNNAAPVIPGGLTVDDIEVSCPSEPFPEIATASGPLPSLAPAP

SEQ ID NO: 2349 - protein, 343 aa, Coprinopsis cinerea
QGPGGGGSVTCPGGQSTSNSQCCVWFDVLDDLQTNFYQGSKCESPVRKILRIVFHDAIGFSPALTAAGQFGGGGADGSIIAHSNIELAFPANGGLTDTIEALRAVGINHGVSFGDLIQFATAVGMSNCPGSPRLEFLTGRSNSSQPSPPSLIPGPGNTVTAILDRMGDAGFSPDEVVDLLAAHSLASQEGLNSAIFRSPLDSTPQVFDTQFYIETLLKGTTQPGPSLGGAEELSPFPGEFRMRSDALLARDSRTACRWQSMTSSNEVMGQRYRAAMAKMSVLGFDRNALTDCSDVIPSAVSNNAAPVIPGGLTVDDIEVSCPSEPFPEIATASGPLPSLAPAP

SEQ ID NO: 2350 - protein, 343 aa, Coprinopsis cinerea
QGPGGGGSVTCPGGQSTSNSQCCVWFDVLDDLQTNFYQGSKCESPVRKILRIVFHDAIGFSPALTAAGQFGGGGADGSIIAHSNIELAFPANGGLTDTVEALRAVGINHGVSFGDLIQFATAVGMSNCPGSPRLEFLTGRSNSSQPSPPSLIPGPGNTVTAILDRMGDAGFSPDEVVDLLAAHSLASQEGLNSAIFRSPLDSTPQVFDTQFYIETLLKGTTQPGPSLGFAEELSPFPGKFRMESDALLARDSRTACRWQSMTSSNEVMGQRYRAAMAKMSVLGFDRNALTDCSDVIPSAVSNNAAPVIPGGLTVDDIEVSCPSEPFPEIATASGPLPSLAPAP

SEQ ID NO: 2351 - protein, 343 aa, Coprinopsis cinerea
QGPGGGGSVTCPGGQSTSNSQCCVWFDVLDDLQTNFYQGSKCESPVRKILRIVFHDAIGFSPALTAAGQFGGGGADGSIIAHSNIELAFPANGGLTDTVEALRAVGINHGVSFGDLIQFATAVGMSNCPGSPRLEFLTGRSNSSQPSPPSLIPGPGNTVTAILDRMGDAGFSPDEVVDLLAAHSLASQEGLNSAIFRSPLDSTPQVFDTQFYILTLLKGTTQPGPSLGFAEELSPFPGLFRMRSDALLARDSRTACRWQSMTSSNEVMGQRYRAAMAKMSVLGFDRNALTDCSDVIPSAVSNNAAPVIPGGLTVDDIEVSCPSEPFPEIATASGPLPSLAPAP

SEQ ID NO: 2352 - protein, 343 aa, Coprinopsis cinerea
QGPGGGGSVTCPGGQSTSNSQCCVWFDVLDDLQTNFYQGSKCESPVRKILRIVFHDAIGFSPALTAAGQFGGGGADGSIIAHSNIELAFPANGGLTDTIEALRAVGINHGVSFGDLIQFATAVGMSNCPGSPRLEFLTGRSNSSQPSPPSLIPGPGNTVTAILDRMGDAGFSPDEVVDLLAAHSLASQEGLNSAIFRSPLDSTPQVFDTQFYIETLLKGTTQPGPSLGLAEELSPFPGEFRMRSDALLARDSRTACRWQSMTSSNEVMGQRYRAAMAKMSVLGFDRNALTDCSDVIPSAVSNNAAPVIPGGLTVDDIEVSCPSEPFPEIATASGPLPSLAPAP

SEQ ID NO: 2353 - protein, 343 aa, Coprinopsis cinerea
QGPGGGGSVTCPGGQSTSNSQCCVWFDVLDDLQTNFYQGSKCESPVRKILRIAFHDAIGFSPALTAAGQFGGGGADGSIIAHSNIELAFPANGGLTDTVEALRAVGINHGVSFGDLIQFATAVGMSNCPGSPRLEFLTGRSNSSQPSPPSLIPGPGNTVTAILDRMGDAGFSPDEVVDLLAAHSLASQEGLNSAIFRSPLDSTPQVFDTQFYIETLLKGTTQPGPSLGFAEELSPFPGGFRMRSDALLARDSRTACRWQSMTSSNEVMGQRYRAAMAKMSVLGFDRNALTDCSDVIPSAVSNNAAPVIPGGLTVDDIEVSCPSEPFPEIATASGPLPSLAPAP

SEQ ID NO: 2354 - protein, 343 aa, Coprinopsis cinerea
QGPGGGGSVTCPGGQSTSNSQCCVWFDVLDDLQTNFYQGSKCESPVRKILRIKFHDAIGFSPALTAAGQFGGGGADGSIIAHSNIELAFPANGGLTDTVEALRAVGINHGVSFGDLIEFATAVGMSNCPGSPRLEFLTGRSNSSQPSPPSLIPGPGNTVTAILDRMGDAGFSPDEVVDLLAAHSLASQEGLNSAIFRSPLDSTPQVFDTQFYIETLLKGTTQPGPSLGFAEELSPFPGEFRMRSDALLARDSRTACRWQSMTSSNEVMGQRYRAAMAKMSVLGFDRNALTDCSDVIPSAVSNNAAPVIPGGLTVDDIEVSCPSEPFPEIATASGPLPSLAPAP

SEQ ID NO: 2355 - protein, 343 aa, Coprinopsis cinerea
QGPGGGGSVTCPGGQSTSNSQCCVWFDVLDDLQTNFYQGSKCESPVRKILRIVFHDAIGFSPALTAAGQFGGGGADGSIIAHSNIELAFPANGGLTDTVEALRAVGINHGVSFGDLIQFATAVGMSNCPGSPRLEFLTGRSNSSQPSPPSLIPGCGNTVTAILDRMGDAGFSPDEVVDLLAAHSLASQEGLNSAIFRSPLDSTPQVFDTQFYIETLLKGTTQPGPSLGFCEELSPFPGEFRMRSDALLARDSRTACRWQSMTSSNEVMGQRYRAAMAKMSVLGFDRNALTDCSDVIPSAVSNNAAPVIPGGLTVDDIEVSCPSEPFPEIATASGPLPSLAPAP

SEQ ID NO: 2356 - protein, 343 aa, Coprinopsis cinerea
QGPGGGGSVTCPGGQSTSNSQCCVWFDVLDDLQTNFYQGSKCESPVRKILRIVFHDAIGFSPALTAAGQFGGGGADGSIIAHSNIELAFPCNGGLTDTVEALRAVGINHGVSFGDLIQFATAVGMSNCPGSPRLEFLTGRSNSSQPSPPSLCPGPGNTVTAILDRMGDAGFSPDEVVDLLAAHSLASQEGLNSAIFRSPLDSTPQVFDTQFYIETLLKGTTQPGPSLGFAEELSPFPGEFRMRSDALLARDSRTACRWQSMTSSNEVMGQRYRAAMAKMSVLGFDRNALTDCSDVIPSAVSNNAAPVIPGGLTVDDIEVSCPSEPFPEIATASGPLPSLAPAP

SEQ ID NO: 2357 - protein, 343 aa, Coprinopsis cinerea
QGPGGGGSVTCPGGQSTSNSQCCVWFDVLDDLQTNFYQGSRCESPVRRILRIVFHDAIGFSPALTAAGQFGGGGADGSIIAHSNIELAFPANGGLTDTVEALRAVGINHGVSFGDLIQFATAVGMSNCPGSPRLEFLTGRSNSSQPSPPSLIPGPGNTVTAILDRMGDAGFSPDEVVDLLAAHSLASQEGLNSAIFRSPLDSTPQVFDTQFYIETLLKGTTQPGPSLGFAEELSPFPGEFRMRSDALLARDSRTACRWQSMTSSNEVMGQRYRAAMAKMSVLGFDRNALTDCSDVIPSAVSNNAAPVIPGGLTVDDIEVSCPSEPFPEIATASGPLPSLAPAP

SEQ ID NO: 2358 - protein, 343 aa, Coprinopsis cinerea
QGPGGGGSVTCPGGQSTSNSQCCVWFDVLDDLQTNFYQGSKCESPVRKILRIVFHDAIGFSPALTAAGQFGGGGADGSIIAHSNIELAFPANGGLTDTVEALRAVGINHGVSFGDLIQFATAVGMSNCPGSPRLEFLTGRSNSSQPSPPSLIPGPGNTVTAILDRMGDAGFSPDEVVDLLAAHSLASQEGLNSAIFRSPLDSTPQVFDTQFYIETLLKGTTQPGPSLGFAEELSPFPGELRMRSDALLARDSRTACRWQSMTSSNEVMGQRYRAAMAKMSVLGFDRNALTDCSDVIPSAVSNNAAPVIPGGLTVDDIEVSCPSEPFPDIATASGPLPSLAPAP

SEQ ID NO: 2359 - protein, 343 aa, Coprinopsis cinerea
QGPGGGGSVTCPGGQSTSNSQCCVWFDVLDDLQTNFYQGSKCESPVRKILRIVFHDAIGFSPALTAAGQFGGGGADGSIIAHSNIELAFPANGGLTDTIEALRAVGINHGVSFGDLIQFATAVGMSNCPGSPRLEFLTGRSNSSQPSPPSLIPGPGNTVTAILDRMGDAGFSPDEVVDLLAAHSLASQEGLNSAIFRSPLDSTPQVFDTQFYIETLLKGTTQPGPSLGAAEELSPFPGEFRMRSDALLARDSRTACRWQSMTSSNEVMGQRYRAAMAKMSVLGFDRNALTDCSDVIPSAVSNNAAPVIPGGLTVDDIEVSCPSEPFPEIATASGPLPSLAPAP

SEQ ID NO: 2360 - protein, 343 aa, Coprinopsis cinerea
QGPGGGGSVTCPGGQSTSNSQCCVWFDVLDDLQTNFYQGSKCESPVRKILRIVFHDAIGFSPALTAAGQFGGGGADGSIIAHSNIELAFPANGGLTDTIEALRAVGINHGVSFGDLIQFATAVGMSNCPGSPRLEFLTGRSNSSQPSPPSLIPGPGNTVTAILDRMGDAGFSPDEVVDLLAAHSLASQEGLNSAIFRSPLDSTPQVFDTQFYIETLLKGTTQPGPSLGIAEELSPFPGEFRMRSDALLARDSRTACRWQSMTSSNEVMGQRYRAAMAKMSVLGFDRNALTDCSDVIPSAVSNNAAPVIPGGLTVDDIEVSCPSEPFPEIATASGPLPSLAPAP

SEQ ID NO: 2361 - protein, 343 aa, Coprinopsis cinerea
QGPGGGGSVTCPGGQSTSNSQCCVWFDVLDDLQTNFYQGSKCESPVRKILRIVFHDAIGFSPALTAAGQFGGGGADGSIIAHSNIELAFPANGGLTDTVEALRAVGINHGVSFGDLIQFATAVGMSNCPGSPRLEFLTGRSNSSQPSPPSLIPGCGNTVTAILDRMGDAGFSPDEVVDLLAAHSLASQEGLNSAIFRSPLDSTPQVFDTQFYIETLLKGTTQPGPSLGFAEELSPFPGEFRMRCDALLARDSRTACRWQSMTSSNEVMGQRYRAAMAKMSVLGFDRNALTDCSDVIPSAVSNNAAPVIPGGLTVDDIEVSCPSEPFPEIATASGPLPSLAPAP

SEQ ID NO: 2362 - protein, 336 aa, Coprinopsis cinerea
TVTCPGGQSTSNSQCCVWFDVLDDLQTNFYQGSKCESPVRKILRIVFHDAIGFSPALTAAGQFGGGGADGSIIAHSNIELAFPANGGLTDTVEALRAVGINHGVSFGDLIQFATAVGMSNCPGSPRLEFLTGRSNSSQPSPPSLIPGPGNTVTAILDRMGDAGFSPDEVVDLLAAHSLASQEGLNSAIFRSPLDSTPQVFDTQFYIETLLKGTTQPGPSLGFAEELSPFPGEFRMRSDALLARDSRTACRWQSMTSSNEVMGQRYRAAMAKMFVLGFDRNALTDCSDVIPSAVSNNAAPVIPGGLTVDDIEVSCPSEPFPEIATASGPLPSLAPAP

SEQ ID NO: 2363 - protein, 363 aa, Coprinopsis cinerea
MKLSLLSTFAAVIIGALALPQGPGGGGSVTCPGGQSTSNSQCCVWFDVLDDLQTNFYQGSKCESPVRKILRIVFHDAIGFSPALTAAGQFGGGGADGSIIAHSNIELAFPANGGLTDTVEALRAVGINHGVSFGDLIQFATAVGMSNCPGSPRLEFLTGRSNSSQPSPPSLIPGPGNTVTAILDRMGDAGFSPDEVVDLLAAHSLASQEGLNSAIFRSPLDSTPQVFDTQFYIETLLKGTTQPGPSLGFAEELSPFPGEFRMRSDALLARDSRTACRWQSMTSSNEVMGQRYXXXMAKMSVLGFDRNALTDCSDVIPSAVSNNAAPVIPGGLTVDDIEVSCPSEPFPEIATASGPLPSLAPAP

SEQ ID NO: 2364 - protein, 343 aa, Coprinopsis cinerea
QGPGGGGSVTCPGGQSTSNSQCCVWFDVLDDLQTNFYQGSKCESPVRKILRIVFHDAIGFSPALTAAGQFGGGGADGSIIAHSNIELAFPANGGLTDTVEALRAVGINHGVSFGDLIQFATAVGMSNCPGSPRLEFLTGRSNSSQPSPPSLIPGPGNTVTAILDRMGDAGFSPDEVVDLLAAHSLASQEGLNSAIFRSPLDSTPQVFDTQFYIETLLKGTTQPGPSLGFAEELSPFPGELRMRSDALLARDSRTACRWQSMTSSNEVMGQRYRAAMAKMSVLGFDRNALTDCSDVIPSAVSNNAAPVIPGGLTVDDIEVSCPYEPFPDIATASGPLPSLAPAP

SEQ ID NO: 2365 - protein, 343 aa, Coprinopsis cinerea
QGPGGGGSVTCPGGQSTSNSQCCVWFDVLDDLQTNFYQGSKCESPVRKXLRIXFHDAIGFSPALTAAGQFGGGGADGSIIAHSNIELAFPANGGLTDTVEALRAVGINHGVSFGDLIQFAXAVGMSNCPGSPRLEFLTGRSNSSQPSPPSLIPGPGNTVTAILDRMGDAGFSPDEVVDLLAAHSLASQEGLNSAIFRSPLDSTPQVFDTQFYIETLLKGTTQPGPSLGFAEELSPFPGEFRMRSDALLARDSRTACRWQSMTSSNEVMGQRYRAAMAKMSVLGFDRNALTDCSDVIPSAVSNNAAPVIPGGLTVDDIEVSCPSEPFPEIATASGPLPSLAPAP

SEQ ID NO: 2366 - protein, 343 aa, Coprinopsis cinerea
QGPGGGGSVTCPGGQSTSNSQCCVWFDVLDDLQTNFYQGSKCESPVRKILRIVFHDAIGFSPALTAAGQFGGGGADGSIIAHSNIELAFPANGGLTDTVEALRAVGINHGVSFGDLIQFATAVGMSNCPGSPRLEFLTGRSNSSQPSPPSLIPGPGNTVTAILDRMGDAGFSPDEVVDLLAAHSLASQEGLNSAIFRSPLDSTPQVFDTQFYIETLLKGTTQPGPSLGFAEELSPFPGKFRIRSDALLARDSRTACRWQSMTSSNEVMGQRFRAAMAKMSVLGFDRNALTDCSDVIPSAVSNNAAPVIPGGLTVDDIEVSCPSEPFPEIATASGPLPSLAPAP

SEQ ID NO: 2367 - protein, 343 aa, Coprinopsis cinerea
QGPGGGGSVTCPGGQSTSNSQCCVWFDVLDDLQTNFYQGSKCESPVRKILXIVXXDAIGFSPALTAAGQFGGGGADGSIIAHSNIELAFPANGGLTDTVEALRAVGINHGVSFGDLIQFATAVGMSNCPGSPRLEFLTGRSNSSQPSPPSLIPGPGNTVTAILDRMGDAGFSPDEVVDLLAAHSLASQEGLNSAIFRSPLDSTPQVFDTQFYIETLLKGTTQPGPSLGFAEELSPFPGEFRMRSDALLARDSRTACRWQSMTSSNEVMGQRYRAAMAKMSVLGFDRNALTDCSDVIPSAVSNNAAPVIPGGLTVDDIEVSCPSEPFPEIATASGPLPSLAPAP

SEQ ID NO: 2368 - protein, 364 aa, 'Arthromyces ramosus'
MKLSLFSTFAAVIIGALALPQGPGGGGGSVTCPGGQSTSNSQCCVWFDVLDDLQTNFYQGSKCESPVRKILRIVFHDAIGFSPALTAAGQFGGGGADGSIIAHSNIELAFPANGGLTDTIEALRAVGINHGVSFGDLIQFATAVGMSNCPGSPRLEFLTGRSKSSQPSPPSLIPGPGNTVTAILDRMGDAGFSPDEVVDLLAAHSLASQEGLNSAIFRSPLDSTPQVFDTQFYIETLLKGTTQPGPSLGFAEGLSPFPGEFRMRSDALLARDSRTACRWQSMTSSNEVMGQRYRAAMAKMSVLGFDRNALTDCSDVIPSAVSNNAAPVIPGGLTVDDIEVSCPSEPFPEIATASGPLPSLAPAP

SEQ ID NO: 2369 - protein, 343 aa, Coprinopsis cinerea
QGPGGGGSVTCPGGQSTSNSQCCVWFDVLDDLQTNFYQGSKCESPVRKILRIVFHDAIGFSPALTAAGQFGGGGADGSIIAHSNIELAFPANGGLTDTVEALRAVGINHGVSFGDLIQFATAVGMSNCPGSPRLEFLTGRSNSSQPSPPSLIPGPGNTVTAILDRFGDAGFSPDEVVDLLAAHSLASQEGLNSAIFRSPLDSTPQVFDTQFYIETLLKGTTQPGPSLGFAEELSPFPGKFRIRSDALLARDSRTACRWQSMTSSNEVMGQRFRAAMAKMSVLGFDRNALTDCSDVIPSAVSNNAAPVIPGGLTVDDIEVSCPSEPFPEIATASGPLPSLAPAP

SEQ ID NO: 2370 - protein, 342 aa, Coprinopsis cinerea
GPGGGGSVTCPGGQSTSNSQCCVWFDVLDDLQTNFYQGSKCESPVRKILAIVAADAIGFSPALTAAGQFGGGGADGSIIAHSNIELAFPANGGLTDTVEALRAVGINHGVSFGDLIQFATAVGMSNCPGSPRLEFLTGRSNSSQPSPPSLIPGPGNTVTAILDRMGDAGFSPDEVVDLLAAXSLASQEGLNSAIFRSPLDSTPQVFDTQFYIETLLKGTTQPGPSLGFAEELSPFPGEFRMRSDALLARDSRTACRWQSMTSSNEVMGQRYRAAMAKMSVLGFDRNALTDCSDVIPSAVSNNAAPVIPGGLTVDDIEVSCPSEPFPEIATASGPLPSLAPAP

SEQ ID NO: 2371 - protein, 342 aa, Coprinopsis cinerea
GPGGGGSVTCPGGQSTSNSQCCVWFDVLDDLQTNFYQGSKCESPVRKILAIVAEDAIGFSPALTAAGQFGGGGADGSIIAHSNIELAFPANGGLTDTVEALRAVGINHGVSFGDLIQFATAVGMSNCPGSPRLEFLTGRSNSSQPSPPSLIPGPGNTVTAILDRMGDAGFSPDEVVDLLAAXSLASQEGLNSAIFRSPLDSTPQVFDTQFYIETLLKGTTQPGPSLGFAEELSPFPGEFRMRSDALLARDSRTACRWQSMTSSNEVMGQRYRAAMAKMSVLGFDRNALTDCSDVIPSAVSNNAAPVIPGGLTVDDIEVSCPSEPFPEIATASGPLPSLAPAP

SEQ ID NO: 2372 - protein, 342 aa, Coprinopsis cinerea
GPGGGGSVTCPGGQSTSNSQCCVWFDVLDDLQTNFYQGSKCESPVRKILAIVAQDAIGFSPALTAAGQFGGGGADGSIIAHSNIELAFPANGGLTDTVEALRAVGINHGVSFGDLIQFATAVGMSNCPGSPRLEFLTGRSNSSQPSPPSLIPGPGNTVTAILDRMGDAGFSPDEVVDLLAAXSLASQEGLNSAIFRSPLDSTPQVFDTQFYIETLLKGTTQPGPSLGFAEELSPFPGEFRMRSDALLARDSRTACRWQSMTSSNEVMGQRYRAAMAKMSVLGFDRNALTDCSDVIPSAVSNNAAPVIPGGLTVDDIEVSCPSEPFPEIATASGPLPSLAPAP

SEQ ID NO: 2373 - protein, 336 aa, Coprinopsis cinerea
TVTCPGGQSTSNSQCCVWFDVLDDLQTNFYQGSKCESPVRKILRIVFHDAIGFSPALTAAGQFGGGGADGSIIAHSNIELAFPANGGLTDTVEALRAVGINHGVSFGDLIQFATAVGMSNCPGSPRLEFLTGRSNSSQPSPPSLIPGPGNTVTAILDRMGDAGFSPDEVVWLLAAHSLASQEGLNSAIFRSPLDSTPQVFDTQFYIETLLKGTTQPGPSLGFAEELSPFPGEFRMRSDALLARDSRTACEWQSMTSSNEVMGQDYRAAMAKMSVLGFDRNALTDCSDVIPSAVSNNAAPVIPGGLTVDDIEVSCPSEPFPEIATASGPLPSLAPAP

SEQ ID NO: 2374 - protein, 343 aa, Coprinopsis cinerea
QGPGGGGSVTCPGGQSTSNSQCCVWFDVLDDLQTNFYQGSKCESPVRKILRIVFHDAIGFSPALTAAGQFGGGGADGSIIAHSNIELAFPANGGLTDTVEALRAVGINHGVSFGDLIQFATAVGLSNCPGSPRLEFLTGRSNSSQPSPPSLIPGPGNTVTAILDRFGDAGFSPDEVVDLLAAHSLASQEGLNSAIFRSPLDSTPQVFDTQFYIETLLKGTTQPGPSLGFAEELSPFPGKFRIRSDALLARDSRTACRWQSMTSSNEVMGQRFRAAMAKMSVLGFDRNALTDCSDVIPSAVSNNAAPVIPGGLTVDDIEVSCPSEPFPEIATASGPLPSLAPAP

SEQ ID NO: 2375 - protein, 343 aa, Coprinopsis cinerea
QGPGGGGSVTCPGGQSTSNSQCCVWFDVLDDLQTNFYQGSKCESPVRKSLRIAFHDAIGFSPALTAAGQFGGGGADGSIIAHSNIELAFPANGGLTDTIEALRAVGINHGVSFGDLIQFATAVGMSNCPGSPRLEFLTGRSNSSQPSPPSLIPGPGNTVTAILDRFGDAGFSPDEVVDLLAAHSLASQEGLNSAIFRSPLDSTPQVFDTQFYIETLLKGTTQPGPSLGFAEELSPFPGEFRIRSDALLARDSRTACRWQSMTSSNEVMGQRYRAAMAKMSVLGFDRNALTDCSDVIPSAVSNNAAPVIPGGLTVDDIEVSCPSEPFPEIATASGPLPSLAPAP

SEQ ID NO: 2376 - protein, 343 aa, Coprinopsis cinerea
QGPGGGGSVTCPGGQSTSNSQCCVWFDVLDDLQTNFYQGSKCESPVRKSLRIAFHDAIGFSPALTAAGQFGGGGADGSIIAHSNIELAFPANGGLTDTIEALRAVGINHGVSFGDLIQFAAAVGMSNCPGSPRLEFLTGRSNSSQPSPPSLIPGPGNTVTAILDRFGDAGFSPDEVVDLLAAHSLASQEGLNSAIFRSPLDSTPQVFDTQFYIETLLKGTTQPGPSLGFAEELSPFPGEFRMRSDALLARDSRTACRWQSMTSSNEVMGQRFRAAMAKMSVLGFDRNALTDCSDVIPSAVSNNAAPVIPGGLTVDDIEVSCPSEPFPEIATASGPLPSLAPAP

SEQ ID NO: 2377 - protein, 362 aa, Coprinus comatus
KLSLLSTFAAVIIGALALPQGPGGGGSVTCPGGQSTSNSQCCVWFDVLDDLQTNFYQGSKCESPVRKSLRIAFHDAIGFSPALTAAGQFGGGGADGSIIAHSNIELAFPANGGLTDTVEALRAVGINHGVSFGDLIQFAAAVGMSNCPGSPRLEFLTGRSNSSQPSPPSLIPGPGNTVTAILDRFGDAGFSPDEVVDLLAAHSLASQEGLNSAIFRSPLDSTPQVFDTQFYIETLLKGTTQPGPSLGFAEELSPFPGGFRIRSDALLARDSRTACRWQSMTSSNEVMGQRFRAAMAKMSVLGFDRNALTDCSDVIPSAVSNNAAPVIPGGLTVDDIEVSCPSEPFPEIATASGPLPSLAPAP

SEQ ID NO: 2378 - protein, 343 aa, Coprinopsis cinerea
QGPGGGGSVTCPGGQSTSNSQCCVWFDVLDDLQTNFYQGSKCESPVRKTLRIAFHDAIGFSPALTAAGQFGGGGADGSIIAHSNIELAFPANGGLTDTVEALRAVGINHGVSFGDLIQFAAAVGMSNCPGSPRLEFLTGRSNSSQPSPPSLIPGPGNTVTAILDRFGDAGFSPDEVVDLLAAHSLASQEGLNSAIFRSPLDSTPQVFDTQFYIETLLKGTTQPGPSLGFAEELSPFPGGFRIRSDALLARDSRTACRWQSMTSSNEVMGQRFRAAMAKMSVLGFDRNALTDCSDVIPSAVSNNAAPVIPGGLTVDDIEVSCPSEPFPEIATASGPLPSLAPAP

SEQ ID NO: 2379 - protein, 343 aa, Coprinopsis cinerea
QGPGGGGSVTCPGGQSTSNSQCCVWFDVLDDLQTNFYQGSKCESPVRKXLRIXFHDAIGFSPALTAAGQFGGGGADGSIIAHSNIELAFPANGGLTDTVEALRAVGINHGVSFGDLIQFAXAVGMSNCPGSPRLEFLTGRSNSSQPSPPSLIPGPGNTVTAILDRFGDAGFSPDEVVDLLAAHSLASQEGLNSAIFRSPLDSTPQVFDTQFYIETLLKGTTQPGPSLGFAEELSPFPGGFRIRSDALLARDSRTACRWQSMTSSNEVMGQRFRAAMAKMSVLGFDRNALTDCSDVIPSAVSNNAAPVIPGGLTVDDIEVSCPSEPFPEIATASGPLPSLAPAP

SEQ ID NO: 2380 - protein, 343 aa, Coprinopsis cinerea
QGPGGGGSVTCPGGQSTSNSQCCVWFDVLDDLQTNFYQGSKCESPVRKSLRIAFHDAIGFSPALTAAGQFGGGGADGSIIAHSNIELAFPANGGLTDTVEALRAVGINHGVSFGDLIQFAAAVGMSNCPGSPRLEFLTGRSNSSQPSPPSLIPGPGNTVTAILDRFGDAGFSPDEVVDLLAAHSLASQEGLNSAIFRSPLDSTPQVFDTQFYIETLLKGTTQPGPSLGFAEELSPFPGGFRIRSDALLARDSRTACRWQSMTSSNEVMGQRFRAAMAKMSVLGFDRNALTDCSDVIPSAVSNNAAPVIPGGLTVDDIEVSCPSEPFPEIATASGPLPSLAPAP

SEQ ID NO: 2381 - protein, 362 aa, Coprinus comatus
KLSLLSTFAAVIIGALALPQGPGGGGSVTCPGGQSTSNSQCCVWFDVLDDLQTNFYQGSKCESPVRKSLRIAFHDAIGFSPALTAAGQFGGGGADGSIIAHSNIELAFPANGGLTDTVEALRAVGINHGVSFGDLIQFAAAVGMSNCPGSPRLEFLTGRSNSSQPSPPSLIPGPFNTVTAILDRFGDAGFSPDEVVDLLAAHSLASQEGLNSAIFRSPLDSTPQVFDTQFYIETLLKGTTQPGPSLGFAEELSPFPGGFRIRSDALLARDSRTACRWQSMTSSNEVMGQRFRAAMAKMSVLGFDRNALTDCSDVIPSAVSNNAAPVIPGGLTVDDIEVSCPSEPFPEIATASGPLPSLAPAP

SEQ ID NO: 2382 - protein, 253 aa, Rasamsonia emersonii; identical to SEQ ID NO: 14

SEQ ID NO: 2383 - protein, 228 aa, Thermoascus aurantiacus
HGFVQNIVIDGKNYGGYLVNQYPYMSNPPEVIAWSTTATDLGFVDGTGYQTPDIICHRGAKPGALTAPVSPGGTVELQWTPWPDSHHGPVINYLAPCNGDCSTVDKTQLEFFKIAESGLINDDNPPGIWASDNLIAANNSWTVTIPTTIAPGNYVLRHEIIALHSAQNQDGAQNYPQCINLQVTGGGSDNPAGTLGTALYHDTDPGILINIYQKLSSYIIPGPPLYTG

SEQ ID NO: 2384 - protein, 249 aa, Thermoascus aurantiacus; identical to SEQ ID NO: 15

SEQ ID NO: 2385 - protein, 228 aa, Rasamsonia emersonii
HGFVQGIVIGDQFYSGYIVNSFPYESNPPPVIGWATTATDLGFVDGTGYQGPDIICHRNATPAPLTAPVAAGGTVELQWTPWPDSHHGPVITYLAPCNGNCSTVDKTTLEFFKIDQQGLIDDTSPPGTWASDNLIANNNSWTVTIPNSVAPGNYVLRHEIIALHSANNKDGAQNYPQCINIEVTGGGSDAPEGTLGEDLYHDTDPGILVDIYEPIATYTIPGPPEPTF

SEQ ID NO: 2386 - protein, 253 aa, Rasamsonia emersonii
MLSSTTRTLAFTGLAGLLSAPLVKAHGFVQGIVIGDQFYSGYIVNSFPYESNPPPVIGWATTATDLGFVDGTGYQGPDIICHRNATPAPLTAPVAAGGTVELQWTPWPDSHHGPVITYLAPCNGNCSTVDKTTLEFFKIDQQGLIDDTSPPGTWASDNLIANNNSWTVTIPNSVAPGNYVLRHEIIALHSAMNKDGAQNYPQCINIEVTGGGSDAPEGTLGEDLYHDTDPGILVDIYEPIATYTIPGPPEPTF

SEQ ID NO: 2387 - protein, 253 aa, Rasamsonia emersonii
MLSSTTRTLAFTGLAGLLSAPLVKAHGFVQGIVIGDQFYSGYIVNSFPYESNPPPVIGWATTATDLGFVDGTGYQGPDIICHRNATPAPLTAPVAAGGTVELQWTPWPPSHHGPVITYLAPCNGNCSTVDKTTLEFFKIDQQGLIDDTSPPGTWASDNLIANNNSWTVTIPNSVAPGNYVLRHEIIALHSANNKDGAQNYPQCINIEVTGGGSDAPEGTLGEDLYHDTDPGILVDIYEPIATYTIPGPPEPTF

SEQ ID NO: 2388 - protein, 253 aa, Rasamsonia emersonii
MLSSTTRTLAFTGLAGLLSAPLVKAHGFVQGIVIGDQFYSGYIVNSFPYESNPPPVIGWATTATDLGFVDGTGYQGPDIICHRNATPAPLTAPVAAGGTVELQWTPWPDSHHGPVITYLAPCNGNCSTVDKTTLEFFKIDQQGLIDDTSPPGTWASDNLIANNNSWTVTIPNSVAPGNYVLRHEIIALHSAANKDGAQNYPQCINIEVTGGGSDAPEGTLGEDLYHDTDPGILVDIYEPIATYTIPGPPEPTF

SEQ ID NO: 2389 - protein, 253 aa, Rasamsonia emersonii
MLSSTTRTLAFTGLAGLLSAPLVKAHGFVQGIVIGDQFYSGYIVNSFPYESNPPPVIGWATTATDLGFVDGTGYQGPDIICHRNATPAPLTAPVAAGGTVELQWTPWPDSHHGPVITYLAPCNGNCSTVDKTTLEFFKIDQQGLIDDTSPPGTWASDNLIANNNSWTVTIPNSVAPGNYVLRHEIIALHSANKKDGAQNYPQCINIEVTGGGSDAPEGTLGEDLYHDTDPGILVDIYEPIATYTIPGPPEPTF

SEQ ID NO: 2390 - protein, 253 aa, Rasamsonia emersonii
MLSSTTRTLAFTGLAGLLSAPLVKAHGFVQGIVIGDQFYSGYIVNSFPYESNPPPVIGWATTATDLGFVDGTGYQGPDIICHRNATPAPLTAPVAAGGTVELQWTPWPKSHHGPVITYLAPCNGNCSTVDKTTLEFFKIDQQGLIDDTSPPGTWASDNLIANNNSWTVTIPNSVAPGNYVLRHEIIALHSANNKDGAQNYPQCINIEVTGGGSDAPEGTLGEDLYHDTDPGILVDIYEPIATYTIPGPPEPTF

SEQ ID NO: 2391 - protein, 253 aa, Rasamsonia emersonii
MLSSTTRTLAFTGLAGLLSAPLVKAHGFVQGIVIGDQFYSGYIVNSFPYESNPPPVIGWATTATDLGFVDGTGYQGPDIICHRNATPAPLTAPVAAGGTVELQWTPWPDSHHGPVITYLAPCNGNCSTVDKTTLEFFKIDQQGLIDDTSPPGTWASDNLIANNNSWTVTIPNSVAPGNYVLRHEIIALHSANMKDGAQNYPQCINIEVTGGGSDAPEGTLGEDLYHDTDPGILVDIYEPIATYTIPGPPEPTF

SEQ ID NO: 2392 - protein, 253 aa, Rasamsonia emersonii
MLSSTTRTLAFTGLAGLLSAPLVKAHGFVQGIVIGDQFYSGYIVNSFPYESNPPPVIGWATTATDLGFVDGTGYQGPDIICHRNATPAPLTAPVAAGGTVELQWTPWPDSHHGPVITYLAPCNGNCSTVDKTTLEFFKIDQQGLIDDTSPPGTWASDNLIANNNSWTVTIPNSVAPGNYVLRHEIIALHSAWNKDGAQNYPQCINIEVTGGGSDAPEGTLGEDLYHDTDPGILVDIYEPIATYTIPGPPEPTF

SEQ ID NO: 2393 - protein, 249 aa, Thermoascus aurantiacus
MSFSKIIATAGVLASASLVAGHGFVQNIVIDGKYYGGYLVNQYPYMSNPPEVIAWSTTATDLGFVDGTGYQTPDIICHRGAKPGALTAPVSPGGTVELQWTPWPDSHHGPVINYLAPCNGDCSTVDKTQLEFFKIAESGLINDDNPPGIWASDNLIAANNSWTVTIPTTIAPGNYVLRHEIIALHSAQNQDGAQNYPQCINLQVTGGGSDNPAGTLGTALYHDTDPGILINIYQKLSSYIIPGPPLYTG

SEQ ID NO: 2394 - protein, 250 aa, Thermoascus aurantiacus
MSFSKIIATAGVLASASLVAGHGFVQNIVIDGKKYYGGYLVNQYPYMSNPPEVIAWSTTATDLGFVDGTGYQTPDIICHRGAKPGALTAPVSPGGTVELQWTPWPDSHHGPVINYLAPCNGDCSTVDKTQLEFFKIAESGLINDDNPPGIWASDNLIAANNSWTVTIPTTIAPGNYVLRHEIIALHSAQNQDGAQNYPQCINLQVTGGGSDNPAGTLGTALYHDTDPGILINIYQKLSSYIIPGPPLYTG

SEQ ID NO: 2395 - protein, 229 aa, Thermoascus aurantiacus
HGFVQNIVIDGKKYYGGYLVNQYPYMSNPPEVIAWSTTATDLGFVDGTGYQTPDIICHRGAKPGALTAPVSPGGTVELQWTPWPDSHHGPVINYLAPCNGDCSTVDKTQLEFFKIAESGLINDDNPPGIWASDNLIAANNSWTVTIPTTIAPGNYVLRHEIIALHSAQNQDGAQNYPQCINLQVTGGGSDNPAGTLGTALYHDTDPGILINIYQKLSSYIIPGPPLYTG

SEQ ID NO: 2396 - protein, 228 aa, Thermoascus aurantiacus
GFVQNIVIDGKKYYGGYLVNQYPYMSNPPEVIAWSTTATDLGFVDGTGYQTPDIICHRGAKPGALTAPVSPGGTVELQWTPWPDSHHGPVINYLAPCNGDCSTVDKTQLEFFKIAESGLINDDNPPGIWASDNLIAANNSWTVTIPTTIAPGNYVLRHEIIALHSAQNQDGAQNYPQCINLQVTGGGSDNPAGTLGTALYHDTDPGILINIYQKLSSYIIPGPPLYTG

SEQ ID NO: 2397 - protein, 227 aa, Thermoascus aurantiacus
FVQNIVIDGKKYYGGYLVNQYPYMSNPPEVIAWSTTATDLGFVDGTGYQTPDIICHRGAKPGALTAPVSPGGTVELQWTPWPDSHHGPVINYLAPCNGDCSTVDKTQLEFFKIAESGLINDDNPPGIWASDNLIAANNSWTVTIPTTIAPGNYVLRHEIIALHSAQNQDGAQNYPQCINLQVTGGGSDNPAGTLGTALYHDTDPGILINIYQKLSSYIIPGPPLYTG

SEQ ID NO: 2398 - protein, 249 aa, Thermoascus aurantiacus
MSFSKIIATAGVLASASLVAGHGFVQNIVIDGKYYGGYLVNQYPYMSNPPEVIAWSTTATDLGFVDGTGYQTPDIICHRGAKPGALTAPVSPGGTVELQWTPWPDSHHGPVINYLAPCNGDCSTVDKTQLEFFKIAEKGLINDDNPPGIWASDNLIAANNSWTVTIPTTIAPGNYVLRHEIIALHSAQNQDGAQNYPQCINLQVTGGGSDNPAGTLGTALYHDTDPGILINIYQKLSSYIIPGPPLYTG

SEQ ID NO: 2399 - protein, 249 aa, Thermoascus aurantiacus
MSFSKIIATAGVLASASLVAGHGFVQNIVIDGKYYGGYLVNQYPYMSNPPEVIAWSTTATDLGFVDGTGYQTPDIICHRGAKPGALTAPVSPGGTVELQWTPWPDSHHGPVINYLAPCNGDCSTVDKTQLEFFKIAESGLINDDNPPGIWASDNLIAANNSWTVTIPTTIAPGNYVLRHEIIALHSAQNQDGAQNYPQCINLQVTGGGSDNPAGTLGTCLYHDTDPGILINIYQKLSSYIIPGPPLYTG

SEQ ID NO: 2400 - protein, 249 aa, Thermoascus aurantiacus
MSFSKIIATAGVLASASLVAGHGFVQNIVIDGKYYGGYLVNQYPYMSNPPEVIAWSTTATDLGFVDGTGYQTPDIICHRGAKPGALTAPVSPGGTVELQWTPWPDSHHGPVINYLAPCNGDCSTVDKTQLEFFKIAEEGLINDDNPPGIWASDNLIAANNSWTVTIPTTIAPGNYVLRHEIIALHSAQNQDGAQNYPQCINLQVTGGGSDNPAGTLGTALYHDTDPGILINIYQKLSSYIIPGPPLYTG

SEQ ID NO: 2401 - protein, 249 aa, Thermoascus aurantiacus
MSFSKIIATAGVLASASLVAGHGFVQNIVIDGKYYGGYLVNQYPYMSNPPEVIAWSTTATDLGFVDGTGYQTPDIICHRGAKPGALTAPVSPGGTVELQWTPWPDSHHGPVINYLAPCNGDCSTVDKTQLEFFKIAESGLINDDNPPGIWASDNLIAANNSWTVTIPTTIAPGNYVLRHEIIALHSAMNQDGAQNYPQCINLQVTGGGSDNPAGTLGTALYHDTDPGILINIYQKLSSYIIPGPPLYTG

SEQ ID NO: 2402 - protein, 249 aa, Thermoascus aurantiacus
MSFSKIIATAGVLASASLVAGHGFVQNIVIDGKYYGGYLVNQYPYMSNPPEVIAWSTTATDLGFVDGTGYQTPDIICHRGAKPGALTAPVSPGGTVELQWTPWPDSHHGPVINYLAPCNGDCSTVDKTQLEFFKIAESGLINDDNPPGIWASDNLIAANNSWVVTIPTTIAPGNYVLRHEIIALHSAQNQDGAQNYPQCINLQVTGGGSDNPAGTLGTALYHDTDPGILINIYQKLSSYIIPGPPLYTG

SEQ ID NO: 2403 - protein, 249 aa, Thermoascus aurantiacus
MSFSKIIATAGVLASASLVAGHGFVQNIVIDGKYYGGYLVNQYPYMSNPPEVIAWSTTATDLGFVDGTGYQTPDIICHRGAKPGALTAPVSPGGTVELQWTPWPDSHHGPVINYLAPCNGDCSTVDKTQLEFFKIAESGLINDDNPPGIWASDNLIAANNSWEVTIPTTIAPGNYVLRHEIIALHSAQNQDGAQNYPQCINLQVTGGGSDNPAGTLGTALYHDTDPGILINIYQKLSSYIIPGPPLYTG

SEQ ID NO: 2404 - protein, 249 aa, Thermoascus aurantiacus
MSFSKIIATAGVLASASLVAGHGFVQNIVIDGKYYGGYLVNQYPYMSNPPEVIAWSTTATDLGFVDGTGYQTPDIICHRGAKPGALTAPVSPGGTVELQWTPWPDSHHGPVINYLAPCNGDCRTVDKTQLEFFKIAESGLINDDNPPGIWASDNLIAANNSWTVTIPTTIAPGNYVLRHEIIALHSAQNQDGAQNYPQCINLQVTGGGSDNPAGTLGTALYHDTDPGILINIYQKLSSYIIPGPPLYTG

SEQ ID NO: 2405 - protein, 249 aa, Thermoascus aurantiacus
MSFSKIIATAGVLASASLVAGHGFVQNIVIDGKYYGGYLVNQYPYMSNPPEVIAWSTTATDLGFVDGTGYQTPDIICHRGAKPGALTAPVSPGGTVELQWTPWPDSHHGPVINYLAPCNGDCSTVDKTQLEFFKIAESGLINDDNPPGIWASDNLIAANNSWTVTIPTTIAPGNYVLRHEIIALHYAQNQDGAQNYPQCINLQVTGGGSDNPAGTLGTALYHDTDPGILINIYQKLSSYIIPGPPLYTG

SEQ ID NO: 2406 - protein, 249 aa, Thermoascus aurantiacus
MSFSKIIATAGVLASASLVAGHGFVQNIVIDGKYYGGYLVNQYPYMSNPPEVIAWSTTATDLGFVDGTGYQTPDIICHRGAKPGALTAPVSPGGTVELQWTPWPPSHHGPVINYLAPCNGDCSTVDKTQLEFFKIAESGLINDDNPPGIWASDNLIAANNSWTVTIPTTIAPGNYVLRHEIIALHSAQNQDGAQNYPQCINLQVTGGGSDNPAGTLGTALYHDTDPGILINIYQKLSSYIIPGPPLYTG

SEQ ID NO: 2407 - protein, 249 aa, Thermoascus aurantiacus
MSFSKIIATAGVLASASLVAGHGFVQNIVIDGKYYGGYLVNQYPYMSNPPEVIAWSTTATDLGFVDGTGYQTPDIICHRGAKPGALTAPVSPGGTVELQWTPWPDSHHGPVINYLAPCNGDCSTVDKTQLEFFKIAESGLINDDNPPGIWASDNLIAANNSWTVTIPTTIAPGNYVLRHEIIALHSAWNQDGAQNYPQCINLQVTGGGSDNPAGTLGTALYHDTDPGILINIYQKLSSYIIPGPPLYTG

SEQ ID NO: 2408 - protein, 249 aa, Thermoascus aurantiacus
MSFSKIIATAGVLASASLVAGHGFVQNIVIDGKYYGGYLVNQYPYMSNPPEVIAWSTTATDLGFVDGTGYQTPDIICHRGAKPGALTAPVSPGGTVELQWTPWPDSHHGPVINYLAPCNGDCSTVDKTQLEFFKIAESGLINDDNPPGIWASDNLIAANNSWTVTIPTTIAPGNYVLRHEIIALHTAQNQDGAQNYPQCINLQVTGGGSDNPAGTLGTALYHDTDPGILINIYQKLSSYIIPGPPLYTG

SEQ ID NO: 2409 - protein, 249 aa, Thermoascus aurantiacus
MSFSKIIATAGVLASASLVAGHGFVQNIVIDGKYYGGYLVNQYPYMSNPPEVIAWSTTATDLGFVDGTGYQTPDIICHRGAKPGALTAPVSPGGTVELQWTPWPDSHHGPVINYLAPCNGDCSTVDKTQLEFFKIAESGLINDDNPPGIWASDNLIAANNSWTVTIPTTIAPGNYVLRHEIIALHSAFNQDGAQNYPQCINLQVTGGGSDNPAGTLGTALYHDTDPGILINIYQKLSSYIIPGPPLYTG

SEQ ID NO: 2410 - protein, 249 aa, Thermoascus aurantiacus
MSFSKIIATAGVLASASLVAGHGFVINIVIDGKYYGGYLVNQYPYMSNPPEVIAWSTTATDLGFVDGTGYQTPDIICHRGAKPGALTAPVSPGGTVELQWTPWPDSHHGPVINYLAPCNGDCSTVDKTQLEFFKIAESGLINDDNPPGIWASDNLIAANNSWTVTIPTTIAPGNYVLRHEIIALHSAQNQDGAQNYPQCINLQVTGGGSDNPAGTLGTALYHDTDPGILINIYQKLSSYIIPGPPLYTG

SEQ ID NO: 2411 - protein, 249 aa, Thermoascus aurantiacus
MSFSKIIATAGVLASASLVAGHGFVQNIVIDGKYYGGYLVNIYPYMSNPPEVIAWSTTATDLGFVDGTGYQTPDIICHRGAKPGALTAPVSPGGTVELQWTPWPDSHHGPVINYLAPCNGDCSTVDKTQLEFFKIAESGLINDDNPPGIWASDNLIAANNSWTVTIPTTIAPGNYVLRHEIIALHSAQNQDGAQNYPQCINLQVTGGGSDNPAGTLGTALYHDTDPGILINIYQKLSSYIIPGPPLYTG

SEQ ID NO: 2412 - protein, 249 aa, Thermoascus aurantiacus
MSFSKIIATAGVLASASLVAGHGFVQNIVIDGKYYGGYLVNVYPYMSNPPEVIAWSTTATDLGFVDGTGYQTPDIICHRGAKPGALTAPVSPGGTVELQWTPWPDSHHGPVINYLAPCNGDCSTVDKTQLEFFKIAESGLINDDNPPGIWASDNLIAANNSWTVTIPTTIAPGNYVLRHEIIALHSAQNQDGAQNYPQCINLQVTGGGSDNPAGTLGTALYHDTDPGILINIYQKLSSYIIPGPPLYTG

SEQ ID NO: 2413 - protein, 249 aa, Thermoascus aurantiacus
MSFSKIIATAGVLASASLVAGHGFVQNIVIDGKYYGGYLVNQYPYMSNPPEVIAWSTTATDLGFVDGTGYQTPDIICHRGAKPGALTAPVSPGGTVELQWTPWPDSHHGPVINYLAPCNGDCSTVDKTQLEFFKIAELGLINDDNPPGIWASDNLIAANNSWTVTIPTTIAPGNYVLRHEIIALHSAQNQDGAQNYPQCINLQVTGGGSDNPAGTLGTALYHDTDPGILINIYQKLSSYIIPGPPLYTG

SEQ ID NO: 2414 - protein, 249 aa, Thermoascus aurantiacus
MSFSKIIATAGVLASASLVAGHGFVQNIVIDGKYYGGYLVNQYPYMSNPPEVIAWSTTATDLGFVDGTGYQTPDIICHRGAKPGALTAPVSPGGTVELQWTPWPDSHHGPVINYLAPCNGDCSTVDKTQLEFFKIAESGLINDDNPPGIWASDNLIAANNSWTVTIPTTIAPGNYVLRHEIIALHKAQNQDGAQNYPQCINLQVTGGGSDNPAGTLGTALYHDTDPGILINIYQKLSSYIIPGPPLYTG

SEQ ID NO: 2415 - protein, 249 aa, Thermoascus aurantiacus
MSFSKIIATAGVLASASLVAGHGFVQNIVIDGKYYGGYLVNQYPYMSNPPEVIAWSTTATDLGFVDGTGYQTPDIICHRGAKPGALTAPVSPGGTVELQWTPWPDSHHGPVINYLAPCNGDCSTVDKTQLEFFKIAESGLINDDNPPGIWASDNLIAANNSWTVTIPTTIAPGNYVLRHEIIALHSAQNQDGAQNYPQCINLQVTGGGSDNPAGTLGTALYHDTDPGILINIYQKLSSYIIPGPPLYRG

SEQ ID NO: 2416 - protein, 249 aa, Thermoascus aurantiacus
MSFSKIIATAGVLASASLVAGHGFVQNIVIDGKYYGGYLVNQYPYMSNPPEVIAWSTTATDLGFVDGTGYQTPDIICHRGAKPGALTAPVSPGGTVELQWTPWPDSHHGPVINYLAPCNGDCSTVDKTQLEFFKIAESGLINDDNPPGIWASDNLIAANNSWTVTIPTTIAPGNYVLRHEIIALHSAQNQDGAQNYPQCINLQVTGGGSDNPEGTLGTALYHDTDPGILINIYQKLSSYIIPGPPLYTG

SEQ ID NO: 2417 - protein, 249 aa, Thermoascus aurantiacus
MSFSKIIATAGVLASASLVAGHGFVQNIVIDGKYYGGYLVNQYPYMSNPPEVIAWSTTATDLGFVDGTGYQTPDIICHRGAKPGALTAPVSPGGTVELQWTPWPDSHHGPVINYLAPCNGDCSTVDKTQLEFFKIAESGLINDDNPPGIWASDNLIAANNSWTVTIPTTIAPGNYVLRHEIIALHSAQNQDGAQNYPQCINLQVTGGGSDNPAGTLGTQLYHDTDPGILINIYQKLSSYIIPGPPLYTG

SEQ ID NO: 2418 - protein, 249 aa, Thermoascus aurantiacus
MSFSKIIATAGVLASASLVAGHGFVQNIVIDGKYYGGYLVNQYPYMSNPPEVIAWSTTATDLGFVDGTGYQTPDIICHRGAKPGALTAPVSPGGTVELQWTPWPDSHHGPVINYLAPCNGDCSTVDKTQLEFFKIAESGLINDDNPPGIWASDNLIAANNSWTVTIPTTIAPGNYVLRHEIIALHSAQNQDGAQNYPQCINLQVTGGGSDNPAGTLGTELYHDTDPGILINIYQKLSSYIIPGPPLYTG

SEQ ID NO: 2419 - protein, 249 aa, Thermoascus aurantiacus
MSFSKIIATAGVLASASLVAGHGFVQNIVIDGKYYGGYLVNQYPYMSNPPEVIAWSTTATDLGFVDGTGYQTPDIICHRGAKPGALTAPVSPGGTVELQWTPWPKSHHGPVINYLAPCNGDCSTVDKTQLEFFKIAESGLINDDNPPGIWASDNLIAANNSWTVTIPTTIAPGNYVLRHEIIALHSAQNQDGAQNYPQCINLQVTGGGSDNPAGTLGTALYHDTDPGILINIYQKLSSYIIPGPPLYTG

SEQ ID NO: 2420 - protein, 249 aa, Thermoascus aurantiacus
MSFSKIIATAGVLASASLVAGHGFVQNIVIDGKYYGGYLVNQYPYMSNPPEVIAWSTTATDLGFVDGTGYQTPDIICHRGAKPGALTAPVSPGGTVELQWTPWPDSHHGPVINYLAPCNGDCSTVDKTQLEFFKIAESGLINDDNPPGIWASDNLIAANNSWTVTIPTTIAPGNYVLRHEIIALHSAQNQDGAQNYPQCVNLQVTGGGSDNPAGTLGTALYHDTDPGILINIYQKLSSYIIPGPPLYTG

SEQ ID NO: 2421 - protein, 249 aa, Thermoascus aurantiacus
MSFSKIIATAGVLASASLVAGHGFVQNIVIDGKYYGGYLVNQYPYMSNPPEVIAWSTTATDLGFVDGTGYQTPDIICHRGAKPGALTAPVSPGGTVELQWTPWPDSHHGPVINYLAPCNGDCSTVDKTQLEFFKIAESGLINDDNPPGIWASDNLIAANNSWTVTIPTTIAPGNYVLRHEIIALHFAQNQDGAQNYPQCINLQVTGGGSDNPAGTLGTALYHDTDPGILINIYQKLSSYIIPGPPLYTG

SEQ ID NO: 2422 - protein, 249 aa, Thermoascus aurantiacus var. levisporus
MSFSKIIATAGVLASASLVAGHGFVQNIVIDGKKYVIARRNQYPYMSNPPEVIAWSTTATDLGFVDGTGYQTPDIICHRGAKPGALTAPVSPGGTVELQWTPWPDSHHGPVINYLAPCNGDCSTVDKTQLEFFKIAESGLINDDNPPGIWASDNLIAANNSWTVTIPTTIAPGNYVLRHEIIALHSAQNQDGAQNYPQCINLQVTGGGSDNPAGTLGTALYHDTDPGTLINIYQKLSSYIIPGPPLYTG

SEQ ID NO: 2423 - protein, 228 aa, Thermoascus aurantiacus var. levisporus
HGFVQNIVIDGKKYVIARRNQYPYMSNPPEVIAWSTTATDLGFVDGTGYQTPDIICHRGAKPGALTAPVSPGGTVELQWTPWPDSHHGPVINYLAPCNGDCSTVDKTQLEFFKIAESGLINDDNPPGIWASDNLIAANNSWTVTIPTTIAPGNYVLRHEIIALHSAQNQDGAQNYPQCINLQVTGGGSDNPAGTLGTALYHDTDPGTLINIYQKLSSYIIPGPPLYTG

SEQ ID NO: 2424 - protein, 228 aa, Unidentified
HGFVQGIVIGDQFYSGYIVNEFPYESNPPPVIGWATTATDLGFVDGTEYQGPDIICHRNATPALLTAPVAAGGTVELQWTPWPSSHHGPVITYLANCNGNCSTVDKTQLEFFKIDQSGLINDTDPPGTWASDNLIANNNSWTVTIPSTLEPGNYVLRHEIIALHSAGNKDGAQNYPQCINIEVTGGGSVEPTGTLGEDLYHDTDPGILIDIYEPIATYTIPGPPEPTF

SEQ ID NO: 2425 - protein, 254 aa, Rasamsonia emersonii
MLSSKAPVTLAFAGLAGLLSAPLVKAHGFVQGIVIGDQFYSGYIVNEFPYESNPPPVIGWATTATDLGFVDGTEYQGPDIICHRNATPALLTAPVAAGGTVELQWTPWPSSHHGPVITYLANCNGNCSTVDKTQLEFFKIDQSGLINDTDPPGTWASDNLIANNNSWTVTIPSTLEPGNYVLRHEIIALHSAGNKDGAQNYPQCINIEVTGGGSVEPTGTLGEDLYHDTDPGILIDIYEPIATYTIPGPPEPTF

SEQ ID NO: 2426 - protein, 229 aa, Thermoascus crustaceus
HGFVQNIVIDGKSYGGYIVNQYPYMSDPPEVVGWSTTATDLGFVDGTGYQGPDIICHRGAKPAALTAQVAAGGTVKLEWTPWPDSHHGPVINYLAPCNGDCSTVDKTQLKFFKIAQAGLIDDNSPPGIWASDNLIAANNSWTVTIPTTTAPGNYVLRHEIIALHSAGNKDGAQNYPQCINLKVTGNGSGNPPAGALGTALYKDTDPGILINIYQKLSSYVIPGPALYTG

SEQ ID NO: 2427 - protein, 251 aa, Thermoascus crustaceus
MAFSQIMAITGVFLASASLVAGHGFVQNIVIDGKSYGGYIVNQYPYMSDPPEVVGWSTTATDLGFVDGTGYQGPDIICHRGAKPAALTAQVAAGGTVKLEWTPWPDSHHGPVINYLAPCNGDCSTVDKTQLKFFKIAQAGLIDDNSPPGIWASDNLIAANNSWTVTIPTTTAPGNYVLRHEIIALHSAGNKDGAQNYPQCINLKVTGNGSGNPPAGALGTALYKDTDPGILINIYQKLSSYVIPGPALYTG

SEQ ID NO: 2428 - protein, 246 aa, Rasamsonia byssochlamydoides
MLSSALALAGVLLSSAPFVSAHGFVQGIVIGDKFYSGYIVNEFPYESDPPPVIGWATTATDLGFVDGTEYAEPDIICHRNATPALLTAPVAAGGTVELQWTPWPSSHHGPVITYLAPCNGNCSEVDKTTLEFFKIDQGGLVNDTDPPGTWASDELIANNNSWTVTIPTSIAPGGYVLRHEIIALHSAENLDGAQNYPQCINIEVTQTSGTVTPSGTLGEALYTDTAPGILVDIYEPIATYTIPGPP

SEQ ID NO: 2429 - protein, 249 aa, Thermoascus aurantiacus
MSFSKIIATAGVLASASLVAGHGFVQNIVIDGKYYGGYLVNQYPYMSNPPEVIAWSTTATDLGFVDGTGYQTPDIICHRGAKPGKLTATVAAGSQIEFQWTTWPESHHGPLITYLAPCNGDCATVDKTTLKFVKIAAQGLIDGSNPPGVWADDEMIANNNTATVTIPASYAPGNYVLRHEIIALHSAGNLNGAQNYPQCFNIQITGGGSDNPAGTLGTALYHDTDPGILINIYQKLSSYIIPGPPLYTG

SEQ ID NO: 2430 - protein, 254 aa, unidentified
MLSSKAPVTLAFAGLAGLLSAPLVKAHGFVQGIVVDGTFYSGYIVNEYPYESNPPPVIGWATTATDLGFVDGSEYQGPDIICHRNGTPALLTAPVAAGGDVELQWTPWPSSHHGPVITYLANCNGDCATVDKTQLEFFKIDQSGLINGSDPPGTWASDNLIANNNTWTVKIPATLEPGNYVLRHEIIALHSAENLDGAQNYPQCINIEVTGGGSVEPTGVKGEALYHNTDPGILISIYEPIATYTIPGPPEPTF

SEQ ID NO: 2431 - protein, 228 aa, unidentified
HGFVQGIVVDGTFYSGYIVNEYPYESNPPPVIGWATTATDLGFVDGSEYQGPDIICHRNGTPALLTAPVAAGGDVELQWTPWPSSHHGPVITYLANCNGDCATVDKTQLEFFKIDQSGLINGSDPPGTWASDNLIANNNTWTVKIPATLEPGNYVLRHEIIALHSAENLDGAQNYPQCINIEVTGGGSVEPTGVKGEALYHNTDPGILISIYEPIATYTIPGPPEPTF

SEQ ID NO: 2432 - protein, 225 aa, unidentified
HGFVQGIVIGDKFYSGYIVDEYPYESDPPPVIGWATTATDLGFVDGTEYAEPDIICHRNATPALLTAEVKAGGTVELQWTPWPSSHHGPVITYLAPCNGNCSEVDKTTLEFFKIDQSGLVNDSDPPGVWASDELISNNNTWTVTIPTSIAPGGYVLRHEIIALHSAEQLDGAQNYPQCINIEITQTSGTVTPTGTLGEALYTDTAPGILVDIYEPIATYTIPGPP

SEQ ID NO: 2433 - protein, 254 aa, unidentified
MLSSKAPVTLAFAGLAGLLSAPLVKAHGFVSGIVVGDEFYSGYIVNEFPYQSNPPPVIGWATTATDLGFVDGTEYQDPDIICHRNATPALITAEVKAGGTVELQWTPWPSSHHGPVITYLANCNGNCSTVDKTQLEFFKIDQSGLVNDSDPPGTWASDNLISNNNSWTVTIPSTLEPGGYVLRHEIIALHSAGQLNGAQNYPQCINIKITQGGSVEPTGALGEDLYHNTDPGILIDIYEPIATYTIPGPAEPTF

SEQ ID NO: 2434 - protein, 254 aa, unidentified
MLSSKAPVTLAFAGLAGLLSAPLVKAHGFVQGIVIDGTFYSGYIVDEFPYMSNPPPVIGWSTTATDLGFVDGTEYQEPDIICHRNATPALLTAEVKAGGTVELQWTPWPSSHHGPVITYLANCGGNCSDVDKTQLEFFKIEQSGLINDSDPPGTWATDNLISNNNSWTVTIPSTLEPGNYVLRHEIIALHSAGNKDGAQNYPQCINIQVTGGGSVEPTGTKGEALYTDTDPGILIDIYETIATYDIPGPPEPTF

SEQ ID NO: 2435 - protein, 228 aa, unidentified
HGFVQGIVIDGTFYSGYIVDEFPYMSNPPPVIGWSTTATDLGFVDGTEYQEPDIICHRNATPALLTAEVKAGGTVELQWTPWPSSHHGPVITYLANCGGNCSDVDKTQLEFFKIEQSGLINDSDPPGTWATDNLISNNNSWTVTIPSTLEPGNYVLRHEIIALHSAGNKDGAQNYPQCINIQVTGGGSVEPTGTKGEALYTDTDPGILIDIYETIATYDIPGPPEPTF

SEQ ID NO: 2436 - protein, 228 aa, unidentified
HGFVSGIVVGDEFYSGYIVNEFPYQSNPPPVIGWATTATDLGFVDGTEYQDPDIICHRNATPALITAEVKAGGTVELQWTPWPSSHHGPVITYLANCNGNCSTVDKTQLEFFKIDQSGLVNDSDPPGTWASDNLISNNNSWTVTIPSTLEPGGYVLRHEIIALHSAGQLNGAQNYPQCINIKITQGGSVEPTGALGEDLYHNTDPGILIDIYEPIATYTIPGPAEPTF

SEQ ID NO: 2437 - protein, 225 aa, unidentified
HGFVSGIVIGDKFYSGYIVDEFPYMSDPPPVIGWATTATDLGFVDGTEYAEPDIICHRNATPALLTAPVAAGGDVELQWTPWPSSHHGPVITYLAPCNGNCSEVDKTTLKFFKIDEGGLVNDTDVPGTWASDELIANNNSWTVKIPTSIEPGGYVLRHEIIALHSAENLDGAQNYPQCINIKVTQTSGTVTPSGTLGTALYTDTAPGILIDIYEPIATYTIPGPP

SEQ ID NO: 2438 - protein, 225 aa, unidentified
HGFVQGIVVGDKFYSGYIVNEFPYESDPPPVIGWATTATDLGFVDGSEYAEPDIICHRDATPALLTAPVAAGGTVELQWTPWPSSHHGPVITYLAPCNGNCSEVDKTQLEFFKIDQSGLVNDSDPPGTWASDELIANNNSWTVTIPTSIEPGGYVLRHEIIALHSAEQLDGAQNYPQCINIEITQTSGTVTPSGTLGEALYTNTAAGIIIDIYEPIATYTIPGPP

SEQ ID NO: 2439 - protein, 254 aa, unidentified
MLSSKAPVTLAFAGLAGLLSAPLVKAHGFVSGIVVGDQFYSGYIVNEYPYQSDPPPVIGWATTATDLGFVDGSEYQDPDIICHRNATPALLTAPVAAGGDVELQWTPWPSSHHGPVITYLANCNGNCSEVDKTQLNFFKIDQSGLINGSDPPGTWASDELIANNNTWTVKIPTTLEPGNYVLRHEIIALHSAGNKDGAQNYPQCINIKITQGGTVEPTGTLGEALYHDTDPGIIIDIYEPIATYDIPGPPEYNF

SEQ ID NO: 2440 - protein, 225 aa, unidentified
HGFVQGIVVGDKFYSGYIVNEFPYESDPPPVIGWATTATDLGFVDGTEYAEPDIICHRNATPALLTAPVAAGGTVELQWTPWPSSHHGPVITYLAPCNGDCTEVDKTTLKFFKIDQGGLVNDTDPPGVWASDELISNNNTWTVTIPTSLAPGGYVLRHEIIALHSAEQLNGAQNYPQCINIQVTQTSGTVTPSGTLGEALYTNTAPGIIIDIYEPIATYTIPGPP

SEQ ID NO: 2441 - protein, 228 aa, unidentified
HGFVSGIVVGDQFYSGYIVNEYPYQSDPPPVIGWATTATDLGFVDGSEYQDPDIICHRNATPALLTAPVAAGGDVELQWTPWPSSHHGPVITYLANCNGNCSEVDKTQLNFFKIDQSGLINGSDPPGTWASDELIANNNTWTVKIPTTLEPGNYVLRHEIIALHSAGNKDGAQNYPQCINIKITQGGTVEPTGTLGEALYHDTDPGIIIDIYEPIATYDIPGPPEYNF

SEQ ID NO: 2442 - protein, 246 aa, unidentified
MLSSALALAGVLLSSAPFVSAHGFVQGIVIGDKFYSGYIVDEYPYESDPPPVIGWATTATDLGFVDGTEYAEPDIICHRNATPALLTAEVKAGGTVELQWTPWPSSHHGPVITYLAPCNGNCSEVDKTTLEFFKIDQSGLVNDSDPPGVWASDELISNNNTWTVTIPTSIAPGGYVLRHEIIALHSAEQLDGAQNYPQCINIEITQTSGTVTPTGTLGEALYTDTAPGILVDIYEPIATYTIPGPP

SEQ ID NO: 2443 - protein, 246 aa, unidentified
MLSSALALAGVLLSSAPFVSAHGFVQGIVVGDKFYSGYIVNEFPYESDPPPVIGWATTATDLGFVDGSEYAEPDIICHRDATPALLTAPVAAGGTVELQWTPWPSSHHGPVITYLAPCNGNCSEVDKTQLEFFKIDQSGLVNDSDPPGTWASDELIANNNSWTVTIPTSIEPGGYVLRHEIIALHSAEQLDGAQNYPQCINIEITQTSGTVTPSGTLGEALYTNTAAGIIIDIYEPIATYTIPGPP

SEQ ID NO: 2444 - protein, 246 aa, unidentified
MLSSALALAGVLLSSAPFVSAHGFVSGIVIGDKFYSGYIVDEFPYMSDPPPVIGWATTATDLGFVDGTEYAEPDIICHRNATPALLTAPVAAGGDVELQWTPWPSSHHGPVITYLAPCNGNCSEVDKTTLKFFKIDEGGLVNDTDVPGTWASDELIANNNSWTVKIPTSIEPGGYVLRHEIIALHSAENLDGAQNYPQCINIKVTQTSGTVTPSGTLGTALYTDTAPGILIDIYEPIATYTIPGPP

SEQ ID NO: 2445 - protein, 246 aa, unidentified
MLSSALALAGVLLSSAPFVSAHGFVQGIVVGDKFYSGYIVNEFPYESDPPPVIGWATTATDLGFVDGTEYAEPDIICHRNATPALLTAPVAAGGTVELQWTPWPSSHHGPVITYLAPCNGDCTEVDKTTLKFFKIDQGGLVNDTDPPGVWASDELISNNNTWTVTIPTSLAPGGYVLRHEIIALHSAEQLNGAQNYPQCINIQVTQTSGTVTPSGTLGEALYTNTAPGIIIDIYEPIATYTIPGPP

SEQ ID NO: 2446 - protein, 225 aa, Thermoascus aurantiacus
HGFVQNIVIDGKKYYGGYLVNQYPYMSNPPEVIAWSTTATDLGFVDGTGYQTPDIICHRGAKPGALTAPVSPGGTVELQWTPWPDSHHGPVINYLAPCNGDCSTVDKTQLEFFKIAESGLINDDNPPGIWASDNLIAANNSWTVTIPTTIAPGNYVLRHEIIALHSAQNQDGAQNYPQCINLQVTGGGSDNPAGTLGTALYHDTDPGILINIYQKLSSYIIPGPP

SEQ ID NO: 2447 - protein, 224 aa, Thermoascus aurantiacus
GFVQNIVIDGKKYYGGYLVNQYPYMSNPPEVIAWSTTATDLGFVDGTGYQTPDIICHRGAKPGALTAPVSPGGTVELQWTPWPDSHHGPVINYLAPCNGDCSTVDKTQLEFFKIAESGLINDDNPPGIWASDNLIAANNSWTVTIPTTIAPGNYVLRHEIIALHSAQNQDGAQNYPQCINLQVTGGGSDNPAGTLGTALYHDTDPGILINIYQKLSSYIIPGPP

SEQ ID NO: 2448 - protein, 223 aa, Thermoascus aurantiacus
FVQNIVIDGKKYYGGYLVNQYPYMSNPPEVIAWSTTATDLGFVDGTGYQTPDIICHRGAKPGALTAPVSPGGTVELQWTPWPDSHHGPVINYLAPCNGDCSTVDKTQLEFFKIAESGLINDDNPPGIWASDNLIAANNSWTVTIPTTIAPGNYVLRHEIIALHSAQNQDGAQNYPQCINLQVTGGGSDNPAGTLGTALYHDTDPGILINIYQKLSSYIIPGPP

SEQ ID NO: 2449 - protein, 254 aa, unidentified
MLSSKAPVTLAFAGLAGLLSAPLVKAHGFVSGIVIDGTFYSGYIVDEYPYMSNPPPVIGWSTTATDLGFVDGSEYQEPDIICHRNATPALLTAEVKAGGDVELQWTPWPSSHHGPVITYLANCGGNCSDVDKTQLEFFKIEQSGLVNDSDPPGTWATDNLISNNNTWTVTIPSTLEPGGYVLRHEIIALHSAGQLNGAQNYPQCINIQITGGGSVEPTGAKGEALYTNTDPGILIDIYETIATYDIPGPPEPTF

SEQ ID NO: 2450 - protein, 254 aa, unidentified
MLSSKAPVTLAFAGLAGLLSAPLVKAHGFVQGIVVDGTFYSGYIVDEYPYMSNPPPVIGWSTTATDLGFVDGSEYQEPDIICHRNATPALLTAEVKAGGDVELQWTPWPSSHHGPVITYLANCGGNCSDVDKTQLEFFKIEQSGLVNDSDPPGTWATDNLISNNNTWTVTIPSTLEPGGYVLRHEIIALHSAGQLNGAQNYPQCINIQVTQGGSVEPTGAKGEALYTNTDPGILIDIYETIATYDIPGPPEPTF

SEQ ID NO: 2451 - protein, 254 aa, unidentified
MLSSKAPVTLAFAGLAGLLSAPLVKAHGFVSGIVVDGTFYSGYIVDEFPYMSNPPPVIGWSTTATDLGFVDGTEYQEPDIICHRNATPALLTAEVKAGGTVELQWTPWPSSHHGPVITYLANCGGNCSDVDKTQLEFFKIEQSGLVNDSDPPGTWATDNLISNNNTWTVTIPSTLEPGGYVLRHEIIALHSAGQLNGAQNYPQCINIQITQGGSVEPTGAKGEALYTNTDPGILIDIYETIATYDIPGPAEPTF

SEQ ID NO: 2452 - protein, 254 aa, unidentified
MLSSKAPVTLAFAGLAGLLSAPLVKAHGFVQGIVVDGTFYSGYIVDEFPYMSNPPPVIGWSTTATDLGFVDGSEYQEPDIICHRNGTPALLTAEVKAGGTVELQWTPWPSSHHGPVITYLANCGGDCSDVDKTQLEFFKIEQSGLVNGSDPPGTWATDNLISNNNSWTVTIPSTLEPGGYVLRHEIIALHSAGQLNGAQNYPQCINIQITQGGSVEPTGTKGEALYTDTDPGILIDIYETIATYDIPGPAEPTF

SEQ ID NO: 2453 - protein, 254 aa, unidentified
MLSSKAPVTLAFAGLAGLLSAPLVKAHGFVSGIVVDGTFYSGYIVDEYPYMSNPPPVIGWSTTATDLGFVDGTEYQEPDIICHRNATPALLTAEVKAGGTVELQWTPWPSSHHGPVITYLANCGGNCSDVDKTQLEFFKIEQSGLVNDSDPPGTWATDNLISNNNSWTVTIPSTLEPGGYVLRHEIIALHSAGQLNGAQNYPQCINIQITQGGSVEPTGAKGEALYTNTDPGILIDIYETIATYDIPGPAEPTF

SEQ ID NO: 2454 - protein, 254 aa, unidentified
MLSSKAPVTLAFAGLAGLLSAPLVKAHGFVSGIVIDGTFYSGYIVDEYPYMSNPPPVIGWSTTATDLGFVDGTEYQEPDIICHRNGTPALLTAEVKAGGTVELQWTPWPSSHHGPVITYLANCGGDCSDVDKTQLEFFKIEQSGLVNDSDPPGTWATDNLISNNNTWTVTIPSTLEPGNYVLRHEIIALHSAGQLNGAQNYPQCINIQITGGGSVEPTGAKGEALYTNTDPGILIDIYETIATYDIPGPAEPTF

SEQ ID NO: 2455 - protein, 254 aa, unidentified
MLSSKAPVTLAFAGLAGLLSAPLVKAHGFVSGIVVDGTFYSGYIVDEFPYMSNPPPVIGWSTTATDLGFVDGSEYQEPDIICHRNATPALLTAEVKAGGDVELQWTPWPSSHHGPVITYLANCGGNCSDVDKTQLEFFKIEQSGLVNGSDPPGTWATDNLISNNNSWTVTIPSTLEPGGYVLRHEIIALHSAGNKDGAQNYPQCINIQITQGGTVEPTGAKGEALYTNTDPGILIDIYETIATYDIPGPAEPTF

SEQ ID NO: 2456 - protein, 254 aa, unidentified
MLSSKAPVTLAFAGLAGLLSAPLVKAHGFVSGIVVDGTFYSGYIVDEYPYMSNPPPVIGWSTTATDLGFVDGTEYQEPDIICHRNATPALLTAEVKAGGDVELQWTPWPSSHHGPVITYLANCGGDCSDVDKTQLEFFKIEQSGLINDSDPPGTWATDNLISNNNTWTVTIPSTLEPGNYVLRHEIIALHSAGQKDGAQNYPQCINIQITQGGTVEPTGAKGEALYTNTDPGILIDIYETIATYDIPGPAEPTF

SEQ ID NO: 2457 - protein, 224 aa, Thermoascus aurantiacus
HGFVQNIVIDGKNYGGYLVNQYPYMSNPPEVIAWSTTATDLGFVDGTGYQTPDIICHRGAKPGALTAPVSPGGTVELQWTPWPDSHHGPVINYLAPCNGDCSTVDKTQLEFFKIAESGLINDDNPPGIWASDNLIAANNSWTVTIPTTIAPGNYVLRHEIIALHSAQNQDGAQNYPQCINLQVTGGGSDNPAGTLGTALYHDTDPGILINIYQKLSSYIIPGPP

SEQ ID NO: 2458 - protein, 224 aa, Unidentified
HGFVQGIVIGDQFYSGYIVNEFPYESNPPPVIGWATTATDLGFVDGTEYQGPDIICHRNATPALLTAPVAAGGTVELQWTPWPSSHHGPVITYLANCNGNCSTVDKTQLEFFKIDQSGLINDTDPPGTWASDNLIANNNSWTVTIPSTLEPGNYVLRHEIIALHSAGNKDGAQNYPQCINIEVTGGGSVEPTGTLGEDLYHDTDPGILIDIYEPIATYTIPGPP

SEQ ID NO: 2459 - protein, 224 aa, Rasamsonia emersonii
HGFVQGIVIGDQFYSGYIVNSFPYESNPPPVIGWATTATDLGFVDGTGYQGPDIICHRNATPAPLTAPVAAGGTVELQWTPWPDSHHGPVITYLAPCNGNCSTVDKTTLEFFKIDQQGLIDDTSPPGTWASDNLIANNNSWTVTIPNSVAPGNYVLRHEIIALHSANNKDGAQNYPQCINIEVTGGGSDAPEGTLGEDLYHDTDPGILVDIYEPIATYTIPGPP

SEQ ID NO: 2460 - protein, 224 aa, Thermoascus crustaceus
HGFVQNIVIDGKSYGGYIVNQYPYMSDPPEVVGWSTTATDLGFVDGTGYQGPDIICHRGAKPAALTAQVAAGGTVKLEWTPWPDSHHGPVINYLAPCNGDCSTVDKTQLKFFKIAQAGLIDDNSPPGIWASDNLIAANNSWTVTIPTTTAPGNYVLRHEIIALHSAGNKDGAQNYPQCINLKVTGNGSGNPPAGALGTALYKDTDPGILINIYQKLSSYVIPGP

SEQ ID NO: 2461 - protein, 228 aa, unidentified
HGFVSGIVVDGTFYSGYIVDEYPYMSNPPPVIGWSTTATDLGFVDGTEYQEPDIICHRNATPALLTAEVKAGGDVELQWTPWPSSHHGPVITYLANCGGDCSDVDKTQLEFFKIEQSGLINDSDPPGTWATDNLISNNNTWTVTIPSTLEPGNYVLRHEIIALHSAGQKDGAQNYPQCINIQITQGGTVEPTGAKGEALYTNTDPGILIDIYETIATYDIPGPAEPTF

SEQ ID NO: 2462 - protein, 228 aa, Synthetic construct
HGFVSGIVVDGTFYSGYIVDEFPYMSNPPPVIGWSTTATDLGFVDGSEYQEPDIICHRNATPALLTAEVKAGGDVELQWTPWPSSHHGPVITYLANCGGNCSDVDKTQLEFFKIEQSGLVNGSDPPGTWATDNLISNNNSWTVTIPSTLEPGGYVLRHEIIALHSAGNKDGAQNYPQCINIQITQGGTVEPTGAKGEALYTNTDPGILIDIYETIATYDIPGPAEPTF

SEQ ID NO: 2463 - protein, 228 aa, unidentified
HGFVQGIVVDGTFYSGYIVDEYPYMSNPPPVIGWSTTATDLGFVDGSEYQEPDIICHRNATPALLTAEVKAGGDVELQWTPWPSSHHGPVITYLANCGGNCSDVDKTQLEFFKIEQSGLVNDSDPPGTWATDNLISNNNTWTVTIPSTLEPGGYVLRHEIIALHSAGQLNGAQNYPQCINIQVTQGGSVEPTGAKGEALYTNTDPGILIDIYETIATYDIPGPPEPTF

SEQ ID NO: 2464 - protein, 228 aa, unidentified
HGFVSGIVIDGTFYSGYIVDEYPYMSNPPPVIGWSTTATDLGFVDGTEYQEPDIICHRNGTPALLTAEVKAGGTVELQWTPWPSSHHGPVITYLANCGGDCSDVDKTQLEFFKIEQSGLVNDSDPPGTWATDNLISNNNTWTVTIPSTLEPGNYVLRHEIIALHSAGQLNGAQNYPQCINIQITGGGSVEPTGAKGEALYTNTDPGILIDIYETIATYDIPGPAEPTF

SEQ ID NO: 2465 - protein, 228 aa, unidentified
HGFVSGIVIDGTFYSGYIVDEYPYMSNPPPVIGWSTTATDLGFVDGSEYQEPDIICHRNATPALLTAEVKAGGDVELQWTPWPSSHHGPVITYLANCGGNCSDVDKTQLEFFKIEQSGLVNDSDPPGTWATDNLISNNNTWTVTIPSTLEPGGYVLRHEIIALHSAGQLNGAQNYPQCINIQITGGGSVEPTGAKGEALYTNTDPGILIDIYETIATYDIPGPPEPTF

SEQ ID NO: 2466 - protein, 228 aa, unidentified
HGFVQGIVVDGTFYSGYIVDEFPYMSNPPPVIGWSTTATDLGFVDGSEYQEPDIICHRNGTPALLTAEVKAGGTVELQWTPWPSSHHGPVITYLANCGGDCSDVDKTQLEFFKIEQSGLVNGSDPPGTWATDNLISNNNSWTVTIPSTLEPGGYVLRHEIIALHSAGQLNGAQNYPQCINIQITQGGSVEPTGTKGEALYTDTDPGILIDIYETIATYDIPGPAEPTF

SEQ ID NO: 2467 - protein, 228 aa, unidentified
HGFVSGIVVDGTFYSGYIVDEFPYMSNPPPVIGWSTTATDLGFVDGTEYQEPDIICHRNATPALLTAEVKAGGTVELQWTPWPSSHHGPVITYLANCGGNCSDVDKTQLEFFKIEQSGLVNDSDPPGTWATDNLISNNNTWTVTIPSTLEPGGYVLRHEIIALHSAGQLNGAQNYPQCINIQITQGGSVEPTGAKGEALYTNTDPGILIDIYETIATYDIPGPAEPTF

SEQ ID NO: 2468 - protein, 228 aa, unidentified
HGFVSGIVVDGTFYSGYIVDEYPYMSNPPPVIGWSTTATDLGFVDGTEYQEPDIICHRNATPALLTAEVKAGGTVELQWTPWPSSHHGPVITYLANCGGNCSDVDKTQLEFFKIEQSGLVNDSDPPGTWATDNLISNNNSWTVTIPSTLEPGGYVLRHEIIALHSAGQLNGAQNYPQCINIQITQGGSVEPTGAKGEALYTNTDPGILIDIYETIATYDIPGPAEPTF

SEQ ID NO: 2469 - protein, 228 aa, Talaromyces stipitatus
HGFVQNIVIDGKSYTGYLVNQYPYQSNPPAVIGWSTTATDLGFVDGSGYTNPDIICHKNAKPGQLSAPVAAGGKVELEWTTWPESHHGPVISYLANCNGDCTTVDKTKLEFVKIDQRGLIDDSNPPGTWAADQLIAANNSWTVTIPESIAPGNYVLRHEIIALHSANNATGAQNYPQCINLQITGSGTANPSGTPGEKLYTPTDPGILVNIYQSLSSYVIPGPTLWSG

SEQ ID NO: 2470 - protein, 224 aa, unidentified
HGFVQGIVIDGTFYSGYIVDEFPYMSNPPPVIGWSTTATDLGFVDGTEYQEPDIICHRNATPALLTAEVKAGGTVELQWTPWPSSHHGPVITYLANCGGNCSDVDKTQLEFFKIEQSGLINDSDPPGTWATDNLISNNNSWTVTIPSTLEPGNYVLRHEIIALHSAGNKDGAQNYPQCINIQVTGGGSVEPTGTKGEALYTDTDPGILIDIYETIATYDIPGPP

SEQ ID NO: 2471 - protein, 248 aa, Thermoascus thermophilus
MSFSKIFAIAGAITYASVAAAHGYVQGIVVDGSYYGGYLVTQYPYTSQPPEVIAWSTKATDLGFVDGTGYASPDIICHKGAEPGSLSAKVPAGGTVELQWTAWPESHKGPVIDYLAACNGNCSSVDKTALKFFKIDESGLTDGSGSGTWASDTLIKNNNSWTVTIPSTIAPGNYVLRHEIIALHSAENKDGAQNYPQCINLEVTGGGTDNPAGTLGTALYTDTDPGILVNIYQGLSNYSIPGPALYSG

SEQ ID NO: 2472 - protein, 241 aa, Unidentified
LAFAGLAGLLSAPLVKAHGFVQGIVIGDQFYSGYIVNEFPYESNPPPVIGWATTATDLGFVDGTEYQGPDIICHRNATPALLTAPVAAGGTVELQWTPWPSSHHGPVITYLANCNGNCSTVDKTQLEFFKIDQSGLINDTDPPGTWASDNLIANNNSWTVTIPSTLEPGNYVLRHEIIALHSAGNKDGAQNYPQCINIEVTGGGSVEPTGTLGEDLYHDTDPGILIDIYEPIATYTIPGPP

SEQ ID NO: 2473 - protein, 224 aa, Thermoascus aurantiacus var. levisporus
HGFVQNIVIDGKKYVIARRNQYPYMSNPPEVIAWSTTATDLGFVDGTGYQTPDIICHRGAKPGALTAPVSPGGTVELQWTPWPDSHHGPVINYLAPCNGDCSTVDKTQLEFFKIAESGLINDDNPPGIWASDNLIAANNSWTVTIPTTIAPGNYVLRHEIIALHSAQNQDGAQNYPQCINLQVTGGGSDNPAGTLGTALYHDTDPGTLINIYQKLSSYIIPGPP

SEQ ID NO: 2474 - protein, 229 aa, Thermoascus crustaceus
AAHGYVQGIVVDGSYYGGYMVTQYPYTAQPPELIAWSTKATDLGFVDGSGYTSPDIICHKGAEPGAQSAKVAAGGTVELQWTAWPESHKGPVIDYLAACDGDCSSVDKTALKFFKIDESGLIDGNGAGTWASDTLIKNNNSWTVTIPSTIASGNYVLRHEIIALHSAGNKDGAQNYPQCINLEVTGSGTENPAGTLGTALYTDTDPGLLVNIYQGLSNYSIPGPALYSG

SEQ ID NO: 2475 - protein, 228 aa, Neosartorya fischeri
HGFVSGAVVDGKYYTGYLVNQYPYMSSPPESIGWSETATDLGFVDGSGYSSGDIICHKSAKNGAISAEIKAGGKVEFQWTEWPESHHGPVITYMANCNGDCASVDKTSLEFFKIDESGLISDSNVPGTWASDNLIANNNSWTVTVPSSIAAGNYVMRHEIIALHSAGNQNGAQNYPQCINLKVTGGGSDKPAGTLGTALYKNTDAGILVNIYQSLSSYDIPGPALYSG

SEQ ID NO: 2476 - protein, 241 aa, unidentified
LAFAGLAGLLSAPLVKAHGFVQGIVIDGTFYSGYIVDEFPYMSNPPPVIGWSTTATDLGFVDGTEYQEPDIICHRNATPALLTAEVKAGGTVELQWTPWPSSHHGPVITYLANCGGNCSDVDKTQLEFFKIEQSGLINDSDPPGTWATDNLISNNNSWTVTIPSTLEPGNYVLRHEIIALHSAGNKDGAQNYPQCINIQVTGGGSVEPTGTKGEALYTDTDPGILIDIYETIATYDIPGPP

SEQ ID NO: 2477 - protein, 249 aa, Thermoascus aurantiacus
MSFSKIAAITGAITYASLAAAHGYVTGIVADGTYYGGYIVTQYPYMSTPPDVIAWSTKATDLGFVDPSSYASSDIICHKGAEPGALSAKVAAGGTVELQWTDWPESHKGPVIDYLAACNGDCSTVDKTKLEFFKIDESGLIDGSSAPGTWASDNLIANNNSWTVTIPSTIAPGNYVLRHEIIALHSAGNTNGAQNYPQCINLEVTGSGTDTPAGTLGTELYKATDPGILVNIYQTLTSYDIPGPALYTG

SEQ ID NO: 2478 - protein, 249 aa, Talaromyces stipitatus ATCC 10500
MPSTKVAALSAVLALASTVAGHGFVQNIVIDGKSYTGYLVNQYPYQSNPPAVIGWSTTATDLGFVDGSGYTNPDIICHKNAKPGQLSAPVAAGGKVELEWTTWPESHHGPVISYLANCNGDCTTVDKTKLEFVKIDQRGLIDDSNPPGTWAADQLIAANNSWTVTIPESIAPGNYVLRHEIIALHSANNATGAQNYPQCINLQITGSGTANPSGTPGEKLYTPTDPGILVNIYQSLSSYVIPGPTLWSG

SEQ ID NO: 2479 - protein, 224 aa, unidentified
HGFVQGIVVDGTFYSGYIVNEYPYESNPPPVIGWATTATDLGFVDGSEYQGPDIICHRNGTPALLTAPVAAGGDVELQWTPWPSSHHGPVITYLANCNGDCATVDKTQLEFFKIDQSGLINGSDPPGTWASDNLIANNNTWTVKIPATLEPGNYVLRHEIIALHSAENLDGAQNYPQCINIEVTGGGSVEPTGVKGEALYHNTDPGILISIYEPIATYTIPGPP

SEQ ID NO: 2480 - protein, 244 aa, Thermoascus aurantiacus
SFSKIIATAGVLASASLVAGHGFVQNIVIDGKYYGGYLVNQYPYMSNPPEVIAWSTTATDLGFVDGTGYQTPDIICHRGAKPGALTAPVSPGGTVELQWTPWPDSHHGPVINYLAPCNGDCSTVDKTQLEFFKIAESGLINDDNPPGIWASDNLIAANNSWTVTIPTTIAPGNYVLRHEIIALHSAQNQDGAQNYPQCINLQVTGGGSDNPEGTLGTALYHDTDPGILINIYQKLSSYIIPGPP

SEQ ID NO: 2481 - protein, 245 aa, Unidentified
SFSKIIATAGVLASASLVAGHGFVQNIVIDGKKYYGGYLVNQYPYMSNPPEVIAWSTTATDLGFVDGTGYQTPDIICHRGAKPGALTAPVSPGGTVELQWTPWPDSHHGPVINYLAPCNGDCSTVDKTQLEFFKIAESGLINDDNPPGIWASDNLIAANNSWTVTIPTTIAPGNYVLRHEIIALHSAQNQDGAQNYPQCINLQVTGGGSDNPAGTLGTALYHDTDPGILINIYQKLSSYIIPGPP

SEQ ID NO: 2482 - protein, 228 aa, Aspergillus fumigatus
HGFVTGAVVDGKYYTGYLVNQYPYMSSPPDSIGWSETATDLGFVDGSGYSSGDIICHKDAKNGAISAEIKAGGKVEFQWTEWPESHHGPVITYMANCNGDCASVDKTTLEFFKIDESGLISDSNVPGTWASDNLIANNNSWTVTVPSSIAAGNYVMRHEIIALHSAGNQNGAQNYPQCINLKVTGGGSDKPAGTLGTALYKNTDAGILVNIYQSLSSYEIPGPALYSG

SEQ ID NO: 2483 - protein, 247 aa, Neosartorya fischeri
MSVSKIAAVLLSSAALVAGHGFVSGAVVDGKYYTGYLVNQYPYMSSPPESIGWSETATDLGFVDGSGYSSGDIICHKSAKNGAISAEIKAGGKVEFQWTEWPESHHGPVITYMANCNGDCASVDKTSLEFFKIDESGLISDSNVPGTWASDNLIANNNSWTVTVPSSIAAGNYVMRHEIIALHSAGNQNGAQNYPQCINLKVTGGGSDKPAGTLGTALYKNTDAGILVNIYQSLSSYDIPGPALYSG

SEQ ID NO: 2484 - protein, 243 aa, Thermoascus crustaceus
SQIMAITGVFLASASLVAGHGFVQNIVIDGKSYGGYIVNQYPYMSDPPEVVGWSTTATDLGFVDGTGYQGPDIICHRGAKPAALTAQVAAGGTVKLEWTPWPDSHHGPVINYLAPCNGDCSTVDKTQLKFFKIAQAGLIDDNSPPGIWASDNLIAANNSWTVTIPTTTAPGNYVLRHEIIALHSAGNKDGAQNYPQCINLKVTGNGSGNPPAGALGTALYKDTDPGILINIYQKLSSYVIPGP

SEQ ID NO: 2485 - protein, 244 aa, Thermoascus aurantiacus
SFSKIIATAGVLASASLVAGHGFVQNIVIDGKYYGGYLVNQYPYMSNPPEVIAWSTTATDLGFVDGTGYQTPDIICHRGAKPGALTAPVSPGGTVELQWTPWPDSHHGPVINYLAPCNGDCSTVDKTQLEFFKIAESGLINDDNPPGIWASDNLIAANNSWTVTIPTTIAPGNYVLRHEIIALHSAQNQDGAQNYPQCINLQVTGGGSDNPAGTLGTQLYHDTDPGILINIYQKLSSYIIPGPP

SEQ ID NO: 2486 - protein, 244 aa, Thermoascus aurantiacus
SFSKIIATAGVLASASLVAGHGFVQNIVIDGKYYGGYLVNQYPYMSNPPEVIAWSTTATDLGFVDGTGYQTPDIICHRGAKPGALTAPVSPGGTVELQWTPWPDSHHGPVINYLAPCNGDCSTVDKTQLEFFKIAESGLINDDNPPGIWASDNLIAANNSWTVTIPTTIAPGNYVLRHEIIALHSAFNQDGAQNYPQCINLQVTGGGSDNPAGTLGTALYHDTDPGILINIYQKLSSYIIPGPP

SEQ ID NO: 2487 - protein, 244 aa, Thermoascus aurantiacus
SFSKIIATAGVLASASLVAGHGFVQNIVIDGKYYGGYLVNVYPYMSNPPEVIAWSTTATDLGFVDGTGYQTPDIICHRGAKPGALTAPVSPGGTVELQWTPWPDSHHGPVINYLAPCNGDCSTVDKTQLEFFKIAESGLINDDNPPGIWASDNLIAANNSWTVTIPTTIAPGNYVLRHEIIALHSAQNQDGAQNYPQCINLQVTGGGSDNPAGTLGTALYHDTDPGILINIYQKLSSYIIPGPP

SEQ ID NO: 2488 - protein, 244 aa, Thermoascus aurantiacus
SFSKIIATAGVLASASLVAGHGFVQNIVIDGKYYGGYLVNIYPYMSNPPEVIAWSTTATDLGFVDGTGYQTPDIICHRGAKPGALTAPVSPGGTVELQWTPWPDSHHGPVINYLAPCNGDCSTVDKTQLEFFKIAESGLINDDNPPGIWASDNLIAANNSWTVTIPTTIAPGNYVLRHEIIALHSAQNQDGAQNYPQCINLQVTGGGSDNPAGTLGTALYHDTDPGILINIYQKLSSYIIPGPP

SEQ ID NO: 2489 - protein, 244 aa, Thermoascus aurantiacus
SFSKIIATAGVLASASLVAGHGFVQNIVIDGKYYGGYLVNQYPYMSNPPEVIAWSTTATDLGFVDGTGYQTPDIICHRGAKPGALTAPVSPGGTVELQWTPWPDSHHGPVINYLAPCNGDCSTVDKTQLEFFKIAESGLINDDNPPGIWASDNLIAANNSWTVTIPTTIAPGNYVLRHEIIALHSAQNQDGAQNYPQCINLQVTGGGSDNPAGTLGTALYHDTDPGILINIYQKLSSYIIPGPP

SEQ ID NO: 2490 - protein, 244 aa, Thermoascus aurantiacus
SFSKIIATAGVLASASLVAGHGFVQNIVIDGKNYGGYLVNQYPYMSNPPEVIAWSTTATDLGFVDGTGYQTPDIICHRGAKPGALTAPVSPGGTVELQWTPWPDSHHGPVINYLAPCNGDCSTVDKTQLEFFKIAESGLINDDNPPGIWASDNLIAANNSWTVTIPTTIAPGNYVLRHEIIALHSAQNQDGAQNYPQCINLQVTGGGSDNPAGTLGTALYHDTDPGILINIYQKLSSYIIPGPP

SEQ ID NO: 2491 - protein, 244 aa, Thermoascus aurantiacus
SFSKIIATAGVLASASLVAGHGFVQNIVIDGKYYGGYLVNQYPYMSNPPEVIAWSTTATDLGFVDGTGYQTPDIICHRGAKPGALTAPVSPGGTVELQWTPWPDSHHGPVINYLAPCNGDCSTVDKTQLEFFKIAESGLINDDNPPGIWASDNLIAANNSWTVTIPTTIAPGNYVLRHEIIALHSAQNQDGAQNYPQCINLQVTGGGSDNPAGTLGTCLYHDTDPGILINIYQKLSSYIIPGPP

SEQ ID NO: 2492 - protein, 244 aa, Thermoascus aurantiacus
SFSKIIATAGVLASASLVAGHGFVQNIVIDGKYYGGYLVNQYPYMSNPPEVIAWSTTATDLGFVDGTGYQTPDIICHRGAKPGALTAPVSPGGTVELQWTPWPDSHHGPVINYLAPCNGDCSTVDKTQLEFFKIAESGLINDDNPPGIWASDNLIAANNSWTVTIPTTIAPGNYVLRHEIIALHSAQNQDGAQNYPQCINLQVTGGGSDNPAGTLGTELYHDTDPGILINIYQKLSSYIIPGPP

SEQ ID NO: 2493 - protein, 244 aa, Thermoascus aurantiacus
SFSKIIATAGVLASASLVAGHGFVQNIVIDGKYYGGYLVNQYPYMSNPPEVIAWSTTATDLGFVDGTGYQTPDIICHRGAKPGALTAPVSPGGTVELQWTPWPDSHHGPVINYLAPCNGDCSTVDKTQLEFFKIAESGLINDDNPPGIWASDNLIAANNSWTVTIPTTIAPGNYVLRHEIIALHSAWNQDGAQNYPQCINLQVTGGGSDNPAGTLGTALYHDTDPGILINIYQKLSSYIIPGPP

SEQ ID NO: 2494 - protein, 244 aa, Thermoascus aurantiacus
SFSKIIATAGVLASASLVAGHGFVQNIVIDGKYYGGYLVNQYPYMSNPPEVIAWSTTATDLGFVDGTGYQTPDIICHRGAKPGALTAPVSPGGTVELQWTPWPDSHHGPVINYLAPCNGDCSTVDKTQLEFFKIAEKGLINDDNPPGIWASDNLIAANNSWTVTIPTTIAPGNYVLRHEIIALHSAQNQDGAQNYPQCINLQVTGGGSDNPAGTLGTALYHDTDPGILINIYQKLSSYIIPGPP

SEQ ID NO: 2495 - protein, 244 aa, Thermoascus aurantiacus
SFSKIIATAGVLASASLVAGHGFVQNIVIDGKYYGGYLVNQYPYMSNPPEVIAWSTTATDLGFVDGTGYQTPDIICHRGAKPGALTAPVSPGGTVELQWTPWPDSHHGPVINYLAPCNGDCSTVDKTQLEFFKIAEEGLINDDNPPGIWASDNLIAANNSWTVTIPTTIAPGNYVLRHEIIALHSAQNQDGAQNYPQCINLQVTGGGSDNPAGTLGTALYHDTDPGILINIYQKLSSYIIPGPP

SEQ ID NO: 2496 - protein, 244 aa, Thermoascus aurantiacus
SFSKIIATAGVLASASLVAGHGFVQNIVIDGKYYGGYLVNQYPYMSNPPEVIAWSTTATDLGFVDGTGYQTPDIICHRGAKPGALTAPVSPGGTVELQWTPWPDSHHGPVINYLAPCNGDCSTVDKTQLEFFKIAESGLINDDNPPGIWASDNLIAANNSWTVTIPTTIAPGNYVLRHEIIALHSAMNQDGAQNYPQCINLQVTGGGSDNPAGTLGTALYHDTDPGILINIYQKLSSYIIPGPP

SEQ ID NO: 2497 - protein, 244 aa, Thermoascus aurantiacus
SFSKIIATAGVLASASLVAGHGFVQNIVIDGKYYGGYLVNQYPYMSNPPEVIAWSTTATDLGFVDGTGYQTPDIICHRGAKPGALTAPVSPGGTVELQWTPWPDSHHGPVINYLAPCNGDCSTVDKTQLEFFKIAELGLINDDNPPGIWASDNLIAANNSWTVTIPTTIAPGNYVLRHEIIALHSAQNQDGAQNYPQCINLQVTGGGSDNPAGTLGTALYHDTDPGILINIYQKLSSYIIPGPP

SEQ ID NO: 2498 - protein, 246 aa, Rasamsonia emersonii
STTRTLAFTGLAGLLSAPLVKAHGFVQGIVIGDQFYSGYIVNSFPYESNPPPVIGWATTATDLGFVDGTGYQGPDIICHRNATPAPLTAPVAAGGTVELQWTPWPDSHHGPVITYLAPCNGNCSTVDKTTLEFFKIDQQGLIDDTSPPGTWASDNLIANNNSWTVTIPNSVAPGNYVLRHEIIALHSAMNKDGAQNYPQCINIEVTGGGSDAPEGTLGEDLYHDTDPGILVDIYEPIATYTIPGPP

SEQ ID NO: 2499 - protein, 246 aa, Rasamsonia emersonii
STTRTLAFTGLAGLLSAPLVKAHGFVQGIVIGDQFYSGYIVNSFPYESNPPPVIGWATTATDLGFVDGTGYQGPDIICHRNATPAPLTAPVAAGGTVELQWTPWPDSHHGPVITYLAPCNGNCSTVDKTTLEFFKIDQQGLIDDTSPPGTWASDNLIANNNSWTVTIPNSVAPGNYVLRHEIIALHSAWNKDGAQNYPQCINIEVTGGGSDAPEGTLGEDLYHDTDPGILVDIYEPIATYTIPGPP

SEQ ID NO: 2500 - protein, 246 aa, Rasamsonia emersonii
STTRTLAFTGLAGLLSAPLVKAHGFVQGIVIGDQFYSGYIVNSFPYESNPPPVIGWATTATDLGFVDGTGYQGPDIICHRNATPAPLTAPVAAGGTVELQWTPWPDSHHGPVITYLAPCNGNCSTVDKTTLEFFKIDQQGLIDDTSPPGTWASDNLIANNNSWTVTIPNSVAPGNYVLRHEIIALHSANNKDGAQNYPQCINIEVTGGGSDAPEGTLGEDLYHDTDPGILVDIYEPIATYTIPGPP

SEQ ID NO: 2501 - protein, 246 aa, Rasamsonia emersonii
STTRTLAFTGLAGLLSAPLVKAHGFVQGIVIGDQFYSGYIVNSFPYESNPPPVIGWATTATDLGFVDGTGYQGPDIICHRNATPAPLTAPVAAGGTVELQWTPWPDSHHGPVITYLAPCNGNCSTVDKTTLEFFKIDQQGLIDDTSPPGTWASDNLIANNNSWTVTIPNSVAPGNYVLRHEIIALHSAANKDGAQNYPQCINIEVTGGGSDAPEGTLGEDLYHDTDPGILVDIYEPIATYTIPGPP

SEQ ID NO: 2502 - protein, 248 aa, Aspergillus fumigatus
MTLSKITSIAGLLASASLVAGHGFVSGIVADGKYYGGYLVNQYPYMSNPPDTIAWSTTATDLGFVDGTGYQSPDIICHRDAKNGKLTATVAAGSQIEFQWTPWPDSHHGPVITYLAPCNGDCATVDKTTLKFVKIAAQGLIDGSNPPGVWASDELIANNNTWTVTIPASYAPGNYVLRHEIIALHSAGNLNGAQNYPQCFNIQITGGGSAQGSGTAGTSLYKNTDPGIKFDIYSDLSGGYPIPGPALF

SEQ ID NO: 2503 - protein, 248 aa, Aspergillus fumigatus
MTLSKITSIAGLLASASLVAGHGFVSGIVADGKYYGGYLVNQYPYMSNPPDTIAWSTTATDLGFVDGTGYQTPDIICHRDAKNGKLTATVAAGSQIEFQWTTWPESHHGPVITYLAPCNGDCATVDKTTLKFVKIAAKGLIDGSNPPGIWASDELIANNNTWTVTIPASYAPGNYVLRHEIIALHSAFNLNGAQNYPQCFNIQITGGGSAQGSGTAGTSLYKNTDPGIWFDIYSDLSGGYPIPGPALF

SEQ ID NO: 2504 - protein, 249 aa, Talaromyces stipitatus
MPSTKVAALSAVLALASTVAGHGFVQNIVIDGKSYTGYLVNQYPYQSNPPAVIGWSTTATDLGFVDGSEYTNPDIICHKNAKPGQLSAPVAAGGKVELEWTTWPESHHGPVISYLANCNGDCTTVDKTKLEFVKIDQRGLIDDSNPPGTWAADQLIAANNSWTVTIPESIAPGNYVLRHEIIALHSANNANGAQNYPQCINLQITGSGTANPSGTPGEKLYTPTDPGILVNIYQSLSTYAIPGPTLWSG

SEQ ID NO: 2505 - protein, 248 aa, Thermoascus crustaceus
MSFSKILAIAGAITYASSAAAHGYVQGIVVDGSYYGGYMVTQYPYTAQPPELIAWSTKATDLGFVDGSGYTSPDIICHKGAEPGAQSAKVAAGGTVELQWTAWPESHKGPVIDYLAACDGDCSSVDKTALKFFKIDESGLIDGNGAGTWASDTLIKNNNSWTVTIPSTIASGNYVLRHEIIALHSAGNKDGAQNYPQCINLEVTGSGTENPAGTLGTALYTDTDPGLLVNIYQGLSNYSIPGPALYSG

SEQ ID NO: 2506 - protein, 244 aa, Thermoascus aurantiacus
SFSKIIATAGVLASASLVAGHGFVQNIVIDGKYYGGYLVNQYPYMSNPPEVIAWSTTATDLGFVDGTGYQTPDIICHRGAKPGALTAPVSPGGTVELQWTPWPDSHHGPVINYLAPCNGDCSTVDKTQLEFFKIAESGLINDDNPPGIWASDNLIAANNSWEVTIPTTIAPGNYVLRHEIIALHSAQNQDGAQNYPQCINLQVTGGGSDNPAGTLGTALYHDTDPGILINIYQKLSSYIIPGPP

SEQ ID NO: 2507 - protein, 244 aa, Thermoascus aurantiacus
SFSKIIATAGVLASASLVAGHGFVQNIVIDGKYYGGYLVNQYPYMSNPPEVIAWSTTATDLGFVDGTGYQTPDIICHRGAKPGALTAPVSPGGTVELQWTPWPPSHHGPVINYLAPCNGDCSTVDKTQLEFFKIAESGLINDDNPPGIWASDNLIAANNSWTVTIPTTIAPGNYVLRHEIIALHSAQNQDGAQNYPQCINLQVTGGGSDNPAGTLGTALYHDTDPGILINIYQKLSSYIIPGPP

SEQ ID NO: 2508 - protein, 244 aa, Thermoascus aurantiacus
SFSKIIATAGVLASASLVAGHGFVQNIVIDGKYYGGYLVNQYPYMSNPPEVIAWSTTATDLGFVDGTGYQTPDIICHRGAKPGALTAPVSPGGTVELQWTPWPDSHHGPVINYLAPCNGDCSTVDKTQLEFFKIAESGLINDDNPPGIWASDNLIAANNSWTVTIPTTIAPGNYVLRHEIIALHFAQNQDGAQNYPQCINLQVTGGGSDNPAGTLGTALYHDTDPGILINIYQKLSSYIIPGPP

SEQ ID NO: 2509 - protein, 244 aa, Thermoascus aurantiacus
SFSKIIATAGVLASASLVAGHGFVQNIVIDGKYYGGYLVNQYPYMSNPPEVIAWSTTATDLGFVDGTGYQTPDIICHRGAKPGALTAPVSPGGTVELQWTPWPDSHHGPVINYLAPCNGDCRTVDKTQLEFFKIAESGLINDDNPPGIWASDNLIAANNSWTVTIPTTIAPGNYVLRHEIIALHSAQNQDGAQNYPQCINLQVTGGGSDNPAGTLGTALYHDTDPGILINIYQKLSSYIIPGPP

SEQ ID NO: 2510 - protein, 244 aa, Thermoascus aurantiacus
SFSKIIATAGVLASASLVAGHGFVQNIVIDGKYYGGYLVNQYPYMSNPPEVIAWSTTATDLGFVDGTGYQTPDIICHRGAKPGALTAPVSPGGTVELQWTPWPKSHHGPVINYLAPCNGDCSTVDKTQLEFFKIAESGLINDDNPPGIWASDNLIAANNSWTVTIPTTIAPGNYVLRHEIIALHSAQNQDGAQNYPQCINLQVTGGGSDNPAGTLGTALYHDTDPGILINIYQKLSSYIIPGPP

SEQ ID NO: 2511 - protein, 244 aa, Thermoascus aurantiacus
SFSKIIATAGVLASASLVAGHGFVQNIVIDGKYYGGYLVNQYPYMSNPPEVIAWSTTATDLGFVDGTGYQTPDIICHRGAKPGALTAPVSPGGTVELQWTPWPDSHHGPVINYLAPCNGDCSTVDKTQLEFFKIAESGLINDDNPPGIWASDNLIAANNSWTVTIPTTIAPGNYVLRHEIIALHKAQNQDGAQNYPQCINLQVTGGGSDNPAGTLGTALYHDTDPGILINIYQKLSSYIIPGPP

SEQ ID NO: 2512 - protein, 244 aa, Thermoascus aurantiacus
SFSKIIATAGVLASASLVAGHGFVINIVIDGKYYGGYLVNQYPYMSNPPEVIAWSTTATDLGFVDGTGYQTPDIICHRGAKPGALTAPVSPGGTVELQWTPWPDSHHGPVINYLAPCNGDCSTVDKTQLEFFKIAESGLINDDNPPGIWASDNLIAANNSWTVTIPTTIAPGNYVLRHEIIALHSAQNQDGAQNYPQCINLQVTGGGSDNPAGTLGTALYHDTDPGILINIYQKLSSYIIPGPP

SEQ ID NO: 2513 - protein, 244 aa, Thermoascus aurantiacus
SFSKIIATAGVLASASLVAGHGFVQNIVIDGKYYGGYLVNQYPYMSNPPEVIAWSTTATDLGFVDGTGYQTPDIICHRGAKPGALTAPVSPGGTVELQWTPWPDSHHGPVINYLAPCNGDCSTVDKTQLEFFKIAESGLINDDNPPGIWASDNLIAANNSWTVTIPTTIAPGNYVLRHEIIALHTAQNQDGAQNYPQCINLQVTGGGSDNPAGTLGTALYHDTDPGILINIYQKLSSYIIPGPP

SEQ ID NO: 2514 - protein, 244 aa, Thermoascus aurantiacus
SFSKIIATAGVLASASLVAGHGFVQNIVIDGKYYGGYLVNQYPYMSNPPEVIAWSTTATDLGFVDGTGYQTPDIICHRGAKPGALTAPVSPGGTVELQWTPWPDSHHGPVINYLAPCNGDCSTVDKTQLEFFKIAESGLINDDNPPGIWASDNLIAANNSWTVTIPTTIAPGNYVLRHEIIALHYAQNQDGAQNYPQCINLQVTGGGSDNPAGTLGTALYHDTDPGILINIYQKLSSYIIPGPP

SEQ ID NO: 2515 - protein, 244 aa, Thermoascus aurantiacus
SFSKIIATAGVLASASLVAGHGFVQNIVIDGKYYGGYLVNQYPYMSNPPEVIAWSTTATDLGFVDGTGYQTPDIICHRGAKPGALTAPVSPGGTVELQWTPWPDSHHGPVINYLAPCNGDCSTVDKTQLEFFKIAESGLINDDNPPGIWASDNLIAANNSWVVTIPTTIAPGNYVLRHEIIALHSAQNQDGAQNYPQCINLQVTGGGSDNPAGTLGTALYHDTDPGILINIYQKLSSYIIPGPP

SEQ ID NO: 2516 - protein, 244 aa, Thermoascus aurantiacus
SFSKIIATAGVLASASLVAGHGFVQNIVIDGKYYGGYLVNQYPYMSNPPEVIAWSTTATDLGFVDGTGYQTPDIICHRGAKPGALTAPVSPGGTVELQWTPWPDSHHGPVINYLAPCNGDCSTVDKTQLEFFKIAESGLINDDNPPGIWASDNLIAANNSWTVTIPTTIAPGNYVLRHEIIALHSAQNQDGAQNYPQCVNLQVTGGGSDNPAGTLGTALYHDTDPGILINIYQKLSSYIIPGPP

SEQ ID NO: 2517 - protein, 246 aa, Rasamsonia emersonii
STTRTLAFTGLAGLLSAPLVKAHGFVQGIVIGDQFYSGYIVNSFPYESNPPPVIGWATTATDLGFVDGTGYQGPDIICHRNATPAPLTAPVAAGGTVELQWTPWPKSHHGPVITYLAPCNGNCSTVDKTTLEFFKIDQQGLIDDTSPPGTWASDNLIANNNSWTVTIPNSVAPGNYVLRHEIIALHSANNKDGAQNYPQCINIEVTGGGSDAPEGTLGEDLYHDTDPGILVDIYEPIATYTIPGPP

SEQ ID NO: 2518 - protein, 246 aa, Rasamsonia emersonii
STTRTLAFTGLAGLLSAPLVKAHGFVQGIVIGDQFYSGYIVNSFPYESNPPPVIGWATTATDLGFVDGTGYQGPDIICHRNATPAPLTAPVAAGGTVELQWTPWPPSHHGPVITYLAPCNGNCSTVDKTTLEFFKIDQQGLIDDTSPPGTWASDNLIANNNSWTVTIPNSVAPGNYVLRHEIIALHSANNKDGAQNYPQCINIEVTGGGSDAPEGTLGEDLYHDTDPGILVDIYEPIATYTIPGPP

SEQ ID NO: 2519 - protein, 246 aa, Rasamsonia emersonii
STTRTLAFTGLAGLLSAPLVKAHGFVQGIVIGDQFYSGYIVNSFPYESNPPPVIGWATTATDLGFVDGTGYQGPDIICHRNATPAPLTAPVAAGGTVELQWTPWPDSHHGPVITYLAPCNGNCSTVDKTTLEFFKIDQQGLIDDTSPPGTWASDNLIANNNSWTVTIPNSVAPGNYVLRHEIIALHSANKKDGAQNYPQCINIEVTGGGSDAPEGTLGEDLYHDTDPGILVDIYEPIATYTIPGPP

SEQ ID NO: 2520 - protein, 246 aa, Rasamsonia emersonii
STTRTLAFTGLAGLLSAPLVKAHGFVQGIVIGDQFYSGYIVNSFPYESNPPPVIGWATTATDLGFVDGTGYQGPDIICHRNATPAPLTAPVAAGGTVELQWTPWPDSHHGPVITYLAPCNGNCSTVDKTTLEFFKIDQQGLIDDTSPPGTWASDNLIANNNSWTVTIPNSVAPGNYVLRHEIIALHSANMKDGAQNYPQCINIEVTGGGSDAPEGTLGEDLYHDTDPGILVDIYEPIATYTIPGPP

SEQ ID NO: 2521 - protein, 232 aa, Trichoderma reesei
STKVAALSAVLALASTVAGHGFVQNIVIDGKSYSGYLVNQFPYESNPPAVIGWATTATDLGFVAPSEYTNADIICHKNATPGALSAPVAAGGTVELQWTTWPDSHHGPVISYLANCNGNCSTVDKTKLNFVKIDQGGLIDDTTPPGTWASDKLIAANNSWTVTIPSTIAPGNYVLRHEIIALHSAGNADGAQNYPQCINLEITGSGTAAPSGTAGEKLYTSTDPGILVNIYQ

SEQ ID NO: 2522 - protein, 248 aa, Aspergillus fumigatus
MTLSKITSIAGLLASASLVAGHGFVSGIVADGKYYGGYLVNQYPYMSNPPDTIAWSTTATDLGFVDGTGYQSPDIICHRDAKNGKLTATVAAGSQIEFQWTTWPESHHGPVITYLAPCNGDCATVDKTTLKFVKIAAKGLIDGSNPPGIWASDELIANNNTWTVTIPASYAPGNYVLRHEIIALHSAFNLNGAQNYPQCFNIQITGGGSAQGSGTAGTSLYKNTDPGIWFDIYSDLSGGYPIPGPALF

SEQ ID NO: 2523 - protein, 247 aa, Aspergillus fumigatus
MSVPKIAAALLSSAALVAGHGFVTGAVVDGKYYTGYLVNQYPYMSSPPDSIGWSETATDLGFVDGSGYSSGDIICHKDAKNGAISAEIKAGGKVEFQWTEWPESHHGPVITYMANCNGDCASVDKTTLEFFKIDESGLISDSNVPGTWASDNLIANNNSWTVTVPSSIAAGNYVMRHEIIALHSAGNQNGAQNYPQCINLKVTGGGSDKPAGTLGTALYKNTDAGILVNIYQSLSSYEIPGPALYSG

SEQ ID NO: 2524 - protein, 242 aa, Talaromyces pinophilus
STKVAALSAVLALASTVAGHGFVQNIVIDGKSYSGYLVNQFPYESNPPAVIGWATTATDLGFVAPSEYTNADIICHKNATPGALSAPVAAGGTVELQWTTWPDSHHGPVISYLANCNGNCSTVDKTKLDFVKIDQGGLIDDTTPPGTWASDKLIAANNSWTVTIPSTIAPGNYVLRHEIIALHSAGNADGAQNYPQCINLEITGSGTAAPEGTAGEKLYTSTDPGILVNIYQSLSTYVIPGP

SEQ ID NO: 2525 - protein, 242 aa, Talaromyces pinophilus
STKVAALSAVLALASTVAGHGFVQNIVIDGKFYSGYLVNQFPYESNPPAVIGWATTATDLGFVAPSEYTNADIICHKNATPGALSAPVAAGGTVELQWTTWPDSHHGPVISYLANCNGNCSTVDKTKLDFVKIDQGGLIDDTTPPGTWASDKLIAANNSWTVTIPSTIAPGNYVLRHEIIALHSAGNADGAQNYPQCINLEITGSGTAAPSGTAGEKLYTSTDPGILVNIYQSLSTYVIPGP

SEQ ID NO: 2526 - protein, 245 aa, Aspergillus aculeatus
MSVAKFAGVILGSAALVAGHGYVSGAVVDGTYYGGYIVTSYPYSSDPPETIGWSTEATDLGFVDGSEYADADIICHKSAKPGAISAEVKAGGTVELQWTTWPDSHHGPVLTYLANCNGDCSSVTKTDLEFFKIDESGLINDDDVPGTWASDNLIANNNSWTVTIPSDIAAGNYVLRHEIIALHSAGNKDGAQNYPQCINLKVTGGGDLAPSGTAGESLYKDTDAGILVNIYQSLSSYDIPGPAMY

SEQ ID NO: 2527 - protein, 245 aa, Aspergillus aculeatus
MSVAKFAGVILGSAALVAGHGYVSGAVVDGTYYGGYIVTSYPYSSDPPETIGWSTEATDLGFVDGSEYATADIICHKSAKPGAISAEVKAGGTVELQWTTWPDSHHGPVLTYLANCNGDCSSVTKTDLEFFKIDESGLINDDDVPGTWASDNLIANNNSWTVTIPSDIAAGNYVLRHEIIALHSAGNKDGAQNYPQCLNLKVTGGGDLAPSGTAGESLYKDTDAGILVNIYQSLSSYDIPGPAMY

SEQ ID NO: 2528 - protein, 245 aa, Aspergillus aculeatus
MSVAKFAGVILGSAALVAGHGYVSGAVVDGTYYGGYIVTSYPYSSDPPETIGWSTEATDLGFVDGSEYADADIICHKSAKPGAISAEVKAGGTVELQWTTWPDSHHGPVLTYLANCNGDCSSVTKTDLEFFKIDESGLINDDDVPGTWASDNLIANNNSWTVTIPSDIAAGNYVLRHEIIALHSAGNKDGAQNYPQCLNLKVTGGGDLAPSGTAGESLYKDTDAGILVNIYQSLSSYDIPGPPMY

SEQ ID NO: 2529 - protein, 245 aa, Aspergillus aculeatus
MSVAKFAGVILGSAALVAGHGYVSGAVVDGTYYGGYIVTSYPYSSDPPETIGWSTEATDLGFVDGSEYADADIICHKSAKPGAISAEVKAGGTVELQWTTWPDSHHGPVLTYLANCNGDCSSVTKTDLEFFKIDESGLINDDDVPGIWASDNLIANNNSWTVTIPSDIAAGNYVLRHEIIALHSAGNKDGAQNYPQCLNLKVTGGGDLAPSGTAGESLYKDTDAGILVNIYQSLSSYDIPGPAMY

SEQ ID NO: 2530 - protein, 248 aa, Aspergillus fumigatus
MTLSKITSIAGLLASASLVAGHGFVSGIVADGKYYGGYLVNQYPYMSNPPDTIAWSTTATDLGFVDGTGYQSPDIICHRDAKNGKLTATVAAGSQIEFQWTKWPESHHGPVITYLAPCNGDCATVDKTTLKFVKIAAQGLIDGSNPPGVWASDELIANNNTWTVTIPASYAPGNYVLRHEIIALHSAGNLNGAQNYPQCFNIQITGGGSAQGSGTAGTSLYKNTDPGIWFDIYSDLSGGYPIPGPALF

SEQ ID NO: 2531 - protein, 248 aa, Aspergillus fumigatus
MTLSKITSIAGLLASASLVAGHGFVSGIVADGKYYGGYLVNQYPYMSNPPDTIAWSTTATDLGFVDGTGYQSPDIICHRDAKNGKLTATVAAGSQIEFQWTTWPESHHGPVITYLAPCNGDCATVDKTTLKFVKIAAQGLIDGSNPPGVWASDELIANNNTWTVTIPACYAPGNYVLRHEIIALHSAFNLNGAQNYPQCFNIQITGGGSAQGSGTAGTSLYKNTDPGIWFDIYSDLSGGYPIPGPALF

SEQ ID NO: 2532 - protein, 248 aa, Aspergillus fumigatus
MTLSKITSIAGLLASASLVAGHGFVSGIVADGKYYGGYLVNQYPYMSNPPDTIAWSTTATDLGFVDGTGYQSPDIICHRDAKNGKLTATVAAGSQIEFQWTTWPESHHGPVITYLAPCNGDCATVDKTTLKFVKIAAKGLIDGSNPPGVWASDELIANNNTWTVTIPASYAPGNYVLRHEIIALHSAGNLNGAQNYPQCFNIQITGGGSAQGSGTAGTSLYKNTDPGIWFDIYSDLSGGYPIPGPALF

SEQ ID NO: 2533 - protein, 248 aa, Aspergillus fumigatus
MTLSKITSIAGLLASASLVAGHGFVSGIVADGKYYGGYLVNQYPYMSNPPDTIAWSTTATDLGFVDGTGYQSPDIICHRDAKNGKLTATVAAGSQIEFQWTTWPESHHGPVITYLAPCNGDCATVDKTTLKFVKIAAQGLIDGSNPPGVWASDELIANNNTWTVTIPASYAPGNYVLRHEIIALHSAANLNGAQNYPQCFNIQITGGGSAQGSGTAGTSLYKNTDPGIKFDIYSDLSGGYPIPGPALF

SEQ ID NO: 2534 - protein, 248 aa, Aspergillus fumigatus
MTLSKITSIAGLLASASLVAGHGFVSGIVADGKYYGGYLVNQYPYMSNPPDTIAWSTTATDLGFVDGTGYQSPDIICHRDAKNGKLTATVAAGSQIEFQWTKWPKSHHGPVITYLAPCNGDCATVDKTTLKFVKIAAQGLIDGSNPPGVWASDELIANNNTWTVTIPASYAPGNYVLRHEIIALHSAGNLNGAQNYPQCFNIQITGGGSAQGSGTAGTSLYKNTDPGIWFDIYSDLSGGYPIPGPALF

SEQ ID NO: 2535 - protein, 248 aa, Aspergillus fumigatus
MTLSKITSIAGLLASASLVAGHGFVSGIVADGKYYGGYLVNQYPYMSNPPDTIAWSTTATDLGFVDGTGYQSPDIICHRDAKNGKLTATVAAGSQIEFQWTTWPESHHGPVITYLAPCNGDCATVDKTTLKFVKIAAKGLIDGSNPPGIWASDELIANNNTWTVTIPASYAPGNYVLRHEIIALHSAFNLNGAQNYPQCFNIQITGPGSAQGSGTAGTSLYKNTDPGIWFDIYSDLSGGYPIPGPALF

SEQ ID NO: 2536 - protein, 248 aa, Aspergillus fumigatus
MTLSKITSIAGLLASASLVAGHGFVSGIVADGKYYGGYLVNQYPYMSNPPDTIAWSTTATDLGFVDGTGYQSPDIICHRDAKNGKLTATVAAGSQIEFQWTTWPESHHGPVITYLAPCNGDCATVDKTTLKFVKIAAQGLIDGSNPPGVWASDELIANNNTWTVTIPASYAPGNYVLRHEIIALHSAGNLNGAQNYPQCFNIQITGGGSAQGSGTYGTSLYKNTDPGIWFDIYSDLSGGYPIPGPALF

SEQ ID NO: 2537 - protein, 248 aa, Aspergillus fumigatus
MTLSKITSIAGLLASASLVAGHGFVSGIVADGKYYGGYLVNQYPYMSNPPDTIAWSTTATDLGFVDGTGYQSPDIICHRDAKNGKLTATVAAGSQIEFQWTTWPESHHGPVITYLAPCNGDCATVDKTTLKFVKIAAQGLIDGSNPPGVWASDELIANNNTWTVTIPASYAPGNYVLRHEIIALHSAGNLNGAQNYPQCFNIQITGGGSAQGSGTAGTSLYKNTDPGIWFDIYGDLSGGYPIPGPALF

SEQ ID NO: 2538 - protein, 248 aa, Aspergillus fumigatus
MTLSKITSIAGLLASASLVAGHGFVSGIVADGKYYGGYLVNQYPYMSNPPDTIAWSTTATDLGFVDGTGYQSPDIICHRDAKNGKLTATVAAGSQIEFQWTTWPESHHGPVITYLAPCNGDCATVDKTTLKFVKIAAQGLIDGSNPPGVWASDELIANNNTWTVTIPASYAPGNYVLRHEIIALHSAGNLNGAQNYPQCFNIQITGGGSAQGSGTAGTSLYKNTDPGIWFDIYSDLSGGYPIPGPALF

SEQ ID NO: 2539 - protein, 248 aa, Aspergillus fumigatus
MTLSKITSIAGLLASASLVAGHGFVSGIVADGKYYGGYLVNQYPYMSNPPDTIAWSTTATDLGFVDGTGYQSPDIICHRDAKNGKLTATVAAGSQIEFQWTTWPESHHGPVITYLAPCNGDCATVDKTTLKFVKIAAKGLIDGSNPPGVWASDELIANNNTWTVTIPASYAPGNYVLRHEIIALHSAFNLNGAQNYPQCFNIQITGGGSAQGSGTAGTSLYKNTDPGIWFDIYSDLSGGYPIPGPALF

SEQ ID NO: 2540 - protein, 248 aa, Aspergillus fumigatus
MTLSKITSIAGLLASASLVAGHGFVSGIVADGKYYGGYLVNQYPYMSNPPDTIAWSTTATDLGFVDGTGYQSPDIICHRDAKNGKLTATVAAGSQIEFQWTTWPESHHGPVITYLAPCNGDCATVDKTTLKFVKIAAQGLIDGSNPPGVWASDELIANNNTWTVTIPASYAPGNYVLRHEIIALHSAFNLNGAQNYPQCFNIQITGGGSAQGSGTAGTSLYKNTDPGIWFDIYSDLSGGYPIPGPALF

SEQ ID NO: 2541 - protein, 248 aa, Aspergillus fumigatus
MTLSKITSIAGLLASASLVAGHGFVSGIVADGKYYGGYLVNQYPYMSNPPDTIAWSTTATDLGFVDGTGYQSPDIICHRDAKNGKLTATVAAGSQIEFQWTTWPESHHGPVITYLAPCNGDCATVDKTTLKFVKIAAQGLIDGSNPPGVWASDELIANNNTWTVTIPASYAPGNYVLRHEIIALHSAGNLNGAQNYPQCFNIQITGGGSAQGSGTAGTSLYKNTDPGIKFDIYSDLSGGYPIPGPALF

SEQ ID NO: 2542 - protein, 243 aa, Talaromyces pinophilus
STKVAALSAVLALASTVAGHGFVQNIVIDGKSYSGYLVNQFPYESNPPAVIGWATTATDLGFVAPSEYTNADIICHKNATPGALSAPVAAGGTVELQWTTWPDSHHGPVISYLANCNGNCSTVDKTKLDFVKIDQGGLIDDTTPPGTWASDKLIAANNSWTVTIPSTIAPGNYVLRHEIIALHSAGNADGAQNYPQCINLEITGSGTAAPSGTAGEKLYTSTDPGILVNIYQSLSTYVIPGPP

SEQ ID NO: 2543 - protein, 224 aa, Aspergillus terreus
HGYVTGAVVDGKYYAGYDVTSAPYSSDPPATIGWSTTATDLGFVDGTEYSEPDIICHKDAKPGSLSAEITAGGKVELQWTEWPESHHGPVITYLANCNGDCSSVDKTSLEFFKIDQKGLIEGNTWASDQLISNNNSWTVTIPSSIASGNYVLRHEIIGLHSAGNKDGAQNYPQCMNLKVTGGGSDKPAGTLGTALYKDTDPGILVNIYQTLSSYVIPGPALYSG

SEQ ID NO: 2544 - protein, 241 aa, unidentified
LAFAGLAGLLSAPLVKAHGFVQGIVVDGTFYSGYIVNEYPYESNPPPVIGWATTATDLGFVDGSEYQGPDIICHRNGTPALLTAPVAAGGDVELQWTPWPSSHHGPVITYLANCNGDCATVDKTQLEFFKIDQSGLINGSDPPGTWASDNLIANNNTWTVKIPATLEPGNYVLRHEIIALHSAENLDGAQNYPQCINIEVTGGGSVEPTGVKGEALYHNTDPGILISIYEPIATYTIPGPP

SEQ ID NO: 2545 - protein, 242 aa, Talaromyces pinophilus
STKVAALSAVLALASTVAGHGFVQNIVIDGKSYSGYLVNIFPYESNPPAVIGWATTATDLGFVAPSEYTNADIICHKNATPGALSAPVAAGGTVELQWTTWPDSHHGPVISYLANCNGNCSTVDKTKLDFVKIDQGGLIDDTTPPGTWASDKLIAANNSWTVTIPSTIAPGNYVLRHEIIALHSAGNADGAQNYPQCINLEITGSGTAAPSGTAGEKLYTSTDPGILVNIYQSLSTYVIPGP

SEQ ID NO: 2546 - protein, 242 aa, Talaromyces pinophilus
STKVAALSAVLALASTVAGHGFVQNIVIDGKSYSGYLVNVFPYESNPPAVIGWATTATDLGFVAPSEYTNADIICHKNATPGALSAPVAAGGTVELQWTTWPDSHHGPVISYLANCNGNCSTVDKTKLDFVKIDQGGLIDDTTPPGTWASDKLIAANNSWTVTIPSTIAPGNYVLRHEIIALHSAGNADGAQNYPQCINLEITGSGTAAPSGTAGEKLYTSTDPGILVNIYQSLSTYVIPGP

SEQ ID NO: 2547 - protein, 242 aa, Talaromyces pinophilus
STKVAALSAVLALASTVAGHGFVQNIVIDGKSYSGYLVNQFPYESNPPAVIGWATTATDLGFVAPSEYTNADIICHKNATPGALSAPVAAGGTVELQWTTWPDSHHGPVISYLANCNGNCSTVDKTKLDFVKIDQGGLIDDTTPPGTWASDKLIAANNSWTVTIPSTIAPGNYVLRHEIIALHSAGNADGAQNYPQCINLEITGSGTAAPSGTAGEKLYTSTDPGILVNIYQSLSTYVIPGP

SEQ ID NO: 2548 - protein, 242 aa, Talaromyces pinophilus
STKVAALSAVLALASTVAGHGFVQNIVIDGKSYSGYLVNQFPYESNPPAVIGWATTATDLGFVAPSEYTNADIICHKNATPGALSAPVAAGGTVELQWTTWPDSHHGPVISYLANCNGNCSTVDKTKLNFVKIDQGGLIDDTTPPGTWASDKLIAANNSWTVTIPSTIAPGNYVLRHEIIALHSAGNADGAQNYPQCINLEITGSGTAAPSGTAGEKLYTSTDPGILVNIYQSLSTYVIPGP

SEQ ID NO: 2549 - protein, 242 aa, Talaromyces pinophilus
STKVAALSAVLALASTVAGHGFVQNIVIDGKSYSGYLVNQFPYESNPPAVIGWATTATDLGFVAPSEYTNADIICHKNATPGALSAPVAAGGTVELQWTTWPDSHHGPVISYLANCNGNCSTVDKTKLDFVKIDQGGLIDDTTPPGTWASDKLIAANNSWTVTIPSRIAPGNYVLRHEIIALHSAGNADGAQNYPQCINLEITGSGTAAPSGTAGEKLYTSTDPGILVNIYQSLSTYVIPGP

SEQ ID NO: 2550 - protein, 242 aa, Talaromyces pinophilus
STKVAALSAVLALASTVAGHGFVQNIVIDGKSYSGYLVNQFPYESNPPAVIGWATTATDLGFVAPSEYTNADIICHKNATPGALSAPVAAGGTVELQWTTWPDSHHGPVISYLANCNGNCSTVDKTKLDFVKIDQCGLIDDTTPPGTWASDKLIAANNSWTVTIPSTIAPGNYVLRHEIIALHSAGNADGAQNYPQCINLEITGSGTAAPSGTAGEKLYTSTDPGILVNIYQSLSTYVIPGP

SEQ ID NO: 2551 - protein, 242 aa, Talaromyces pinophilus
STKVAALSAVLALASTVAGHGFVQNIVIDGKSYSGYLVNQFPYESNPPAVIGWATTATDLGFVAPSEYTNADIICHKNATPGALSAPVAAGGTVELQWTTWPDSHHGPVISYLANCNGNCSTVDKTKLDFVKIDQGGLIDDTTPPGTWASDKLIAANNSWTVTIPSTIAPGNYVLRHEIIALHSAGNADGAQNYPQCINLEITGSGTAAPSGTAGEKLYRSTDPGILVNIYQSLSTYVIPGP

SEQ ID NO: 2552 - protein, 223 aa, unidentified
HGFVSGIVIDGTFYSGYIVDEYPYMSNPPPVIGWSTTATDLGFVDGTEYQEPDIICHRNGTPALLTAEVKAGGTVELQWTPWPSSHHGPVITYLANCGGDCSDVDKTQLEFFKIEQSGLVNDSDPPGTWATDNLISNNNTWTVTIPSTLEPGNYVLRHEIIALHSAGQLNGAQNYPQCINIQITGGGSVEPTGAKGEALYTNTDPGILIDIYETIATYDIPGP

SEQ ID NO: 2553 - protein, 223 aa, Talaromyces stipitatus
HGFVQNIVIDGKSYTGYLVNQYPYQSNPPAVIGWSTTATDLGFVDGSGYTNPDIICHKNAKPGQLSAPVAAGGKVELEWTTWPESHHGPVISYLANCNGDCTTVDKTKLEFVKIDQRGLIDDSNPPGTWAADQLIAANNSWTVTIPESIAPGNYVLRHEIIALHSANNATGAQNYPQCINLQITGSGTANPSGTPGEKLYTPTDPGILVNIYQSLSSYVIPGP

SEQ ID NO: 2554 - protein, 249 aa, Talaromyces pinophilus
MPSTKVAALSAVLALASTVAGHGFVQNIVIDGKSYSGYLVNQFPYESNPPAVIGWATTATDLGFVAPSEYTNADIICHKNATPGALSAPVAAGGTVELQWTTWPDSHHGPVISYLANCNGNCSTVDKTKLDFVKIDQGGLIDDTTPPGTWASDKLIAANNSWTVTIPSTIAPGNYVLRHEIIALHSAGNADGAQNYPQCINLEITGSGTAAPSGTAGEKLYTSTDPGILVNIYQSLSTYVIPGPPLWSG

SEQ ID NO: 2555 - protein, 249 aa, Talaromyces pinophilus
MPSTKVAALSAVLALASTVAGHGFVQNIVIDGKSYSGYLVNQFPYESNPPAVIGWATTATDLGFVAPSEYTNADIICHKNATPGALSAPVAAGGTVELQWTTWPDSHHGPVISYLANCNGNCSTVDKTKLDFVKIDQGGLIDDTTPPGIWASDKLIAANNSWTVTIPSTIAPGNYVLRHEIIALHSAGNADGAQNYPQCINLEITGSGTAAPSGTAGEKLYTSTDPGILVNIYQSLSTYVIPGPTLWSG

SEQ ID NO: 2556 - protein, 245 aa, Aspergillus aculeatus
MSVAKFAGVILGSAALVAGHGYVSGAVVDGTYYGGYIVTSYPYSSDPPETIGWSTEATDLGFVDGSEYADADIICHKSAKPGAISAEVKAGGTVELQWTTWPDSHHGPVLTYLANCNGDCSSVTKTDLEFFKIDESGLINDDDVPGTWASDNLIANNNSWTVTIPSDIAAGNYVLRHEIIALHSAWNKDGAQNYPQCLNLKVTGGGDLAPSGTAGESLYKDTDAGILVNIYQSLSSYDIPGPAMY

SEQ ID NO: 2557 - protein, 245 aa, Aspergillus aculeatus
MSVAKFAGVILGSAALVAGHGYVSGAVVDGTYYGGYIVTSYPYSSDPPETIGWSTEATDLGFVDGSEYADADIICHKSAKPGAISAEVKAGGTVELQWTTWPDSHHGPVLTYLANCNGDCSSVTKTDLEFFKIDESGLINDDDVPGTWASDNLIANNNSWTVTIPSDIAAGNYVLRHEIIALHSAGNKDGAQNYPQCLNLKVTGGGDLAPSGTAGEMLYKDTDAGILVNIYQSLSSYDIPGPAMY

SEQ ID NO: 2558 - protein, 245 aa, Aspergillus aculeatus
MSVAKFAGVILGSAALVAGHGYVSGAVVDGTYYGGYIVTSYPYSSDPPETIGWSTEATDLGFVDGSEYAQADIICHKSAKPGAISAEVKAGGTVELQWTTWPDSHHGPVLTYLANCNGDCSSVTKTDLEFFKIDESGLINDDDVPGTWASDNLIANNNSWTVTIPSDIAAGNYVLRHEIIALHSAGNKDGAQNYPQCLNLKVTGGGDLAPSGTAGESLYKDTDAGILVNIYQSLSSYDIPGPAMY

SEQ ID NO: 2559 - protein, 245 aa, Aspergillus aculeatus
MSVAKFAGVILGSAALVAGHGYVSGAVVDGTYYGGYIVTSYPYSSDPPETIGWSTEATDLGFVDGSEYADADIICHKSAKPGAISAEVKAGGTVELQWTTWPDSHHGPVLTYLANCNGDCSSVTKTDLEFFKIDESGLINDDDVPGTWASDNLIANNNSWTVTIPSDIAAGNYVLRHEIIALHSAFNKDGAQNYPQCLNLKVTGGGDLAPSGTAGESLYKDTDAGILVNIYQSLSSYDIPGPAMY

SEQ ID NO: 2560 - protein, 245 aa, Aspergillus aculeatus
MSVAKFAGVILGSAALVAGHGYVSGAVVDGTYYGGYIVTSYPYSSDPPETIGWSTEATDLGFVDGSEYADADIICHKSAKPGAISAEVKAGGTVELQWTTWPDSHHGPVLTYLANCNGDCSSVTKTDLEFFKIDESGLINDDDVPGTWASDNLIANNNSWTVTIPSDIAAGNYVLRHEIIALHSAGNKDGAQNYPQCLNLKVTGGGDLAPSGTAGESLYRDTDAGILVNIYQSLSSYDIPGPAMY

SEQ ID NO: 2561 - protein, 245 aa, Aspergillus aculeatus
MSVAKFAGVILGSAALVAGHGYVSGAVVDGTYYGGYIVTSYPYSSDPPETIGWSTEATDLGFVDGSEYADADIICHKSAKPGAISAEVKAGGTVELQWTTWPDSHHGPVLTYLANCNGDCSSVTKTDLEFFKIDESGLINDDDVPGTWASDNLIANNNSWTVTIPSDIAAGNYVLRHEIIALHSAANKDGAQNYPQCLNLKVTGGGDLAPSGTAGESLYKDTDAGILVNIYQSLSSYDIPGPAMY

SEQ ID NO: 2562 - protein, 245 aa, Aspergillus aculeatus
MSVAKFAGVILGSAALVAGHGYVSGAVVDGTYYGGYIVTSYPYSSDPPETIGWSTEATDLGFVDGSEYADADIICHKSAKPGAISAEVKAGGTVELQWTTWPDSHHGPVLTYLANCNGDCSSVTKTDLEFFKIDESGLINDDDVPGTWASDNLIANNNSWTVTIPSRIAAGNYVLRHEIIALHSAGNKDGAQNYPQCLNLKVTGGGDLAPSGTAGESLYKDTDAGILVNIYQSLSSYDIPGPAMY

SEQ ID NO: 2563 - protein, 245 aa, Aspergillus aculeatus
MSVAKFAGVILGSAALVAGHGYVSGAVVDGTYYGGYIVTSYPYSSDPPETIGWSTEATDLGFVDGSEYADADIICHKSAKPGAISAEVKAGGTVELQWTTWPDSHHGPVLTYLANCNGDCSSVTKTDLEFFKIDESGLINDDDVPGTWASDNLIANNNSWTVTIPSDIAAGNYVLRHEIIALHSAGNKDGAQNYPQCVNLKVTGGGDLAPSGTAGESLYKDTDAGILVNIYQSLSSYDIPGPAMY

SEQ ID NO: 2564 - protein, 245 aa, Aspergillus aculeatus
MSVAKFAGVILGSAALVAGHGYVSGAVVDGTYYGGYIVTSYPYSSDPPETIGWSTEATDLGFVDGSEYADADIICHKSAKPGAISAEVKAGGTVELQWTTWPDSHHGPVLTYLANCNGDCSSVTKTDLEFFKIDESGLINDDDVPGTWASDNLIANNNSWTVTIPSDIAAGNYVLRHEIIALHSAMNKDGAQNYPQCLNLKVTGGGDLAPSGTAGESLYKDTDAGILVNIYQSLSSYDIPGPAMY

SEQ ID NO: 2565 - protein, 245 aa, Aspergillus aculeatus
MSVAKFAGVILGSAALVAGHGYVSGAVVDGTYYGGYIVTSYPYSSDPPETIGWSTEATDLGFVDGSEYADADIICHKSAKPGAISAEVKAGGTVELQWTTWPDSHHGPVLTYLANCNGDCSSVTKTDLEFFKIDESGLINDDDVPGTWASDNLIANNNSWTVTIPSDIAAGNYVLRHEIIALHSAGNKDGAQNYPQCLNLKVTGGGDLAPSGTAGESLYKDTDAGILVNIYQSLSSYDIPGPAMY

SEQ ID NO: 2566 - protein, 245 aa, Aspergillus aculeatus
MSVAKFAGVILGSAALVAGHGYVSGAVVDGTYYGGYIVTSYPYSSDPPETIGWSTEATDLGFVDGSEYADADIICHKSAKPGAISAEVKAGGTVELQWTTWPDSHHGPVLTYLANCNGDCSSVTKTDLEFFKIDESGLINDDDVPGTWASDNLIANNNSWTVTIPSDIAAGNYVLRHEIIALHSAGNKDGAQNYPQCLNLKVTGGGDLAPSGTAGEQLYKDTDAGILVNIYQSLSSYDIPGPAMY

SEQ ID NO: 2567 - protein, 248 aa, Aspergillus fumigatus
MTLSKITSIAGLLASASLVAGHGFVSGIVADGKYYGGYLVNQYPYMENPPDTIAWSTTATDLGFVDGTGYQSPDIICHRDAKNGKLTATVAAGSQIEFQWTTWPESHHGPVITYLAPCNGDCATVDKTTLKFVKIAAQGLIDGSNPPGVWASDELIANNNTWTVTIPASYAPGNYVLRHEIIALHSAGNLNGAQNYPQCFNIQITGGGSAQGSGTAGTSLYKNTDPGIWFDIYSDLSGGYPIPGPALF

SEQ ID NO: 2568 - protein, 248 aa, Aspergillus fumigatus
MTLSKITSIAGLLASASLVAGHGFVSGIVADGKYYGGYLVNQYPYMSNPPDTIAWSETATDLGFVDGTGYQSPDIICHRDAKNGKLTATVAAGSQIEFQWTTWPESHHGPVITYLAPCNGDCATVDKTTLKFVKIAAQGLIDGSNPPGVWASDELIANNNTWTVTIPASYAPGNYVLRHEIIALHSAGNLNGAQNYPQCFNIQITGGGSAQGSGTAGTSLYKNTDPGIWFDIYSDLSGGYPIPGPALF

SEQ ID NO: 2569 - protein, 248 aa, Aspergillus fumigatus
MTLSKITSIAGLLASASLVAGHGFVSGIVADGKYYGGYLVNQYPYMSNPPDTIAWSTTATDLGFVDGTGYQSPDIICHRDAKNGKLTATVAAGSQIEFQWTTWPESHHGPVITYLAPCNGDCATVDKTTLKFVKIAAQGLIDGSNPPGVWASDELIANNNTWTVTIPASYAPGNYVLRHEIIALHSAGKLNGAQNYPQCFNIQITGGGSAQGSGTAGTSLYKNTDPGIKFDIYSDLSGGYPIPGPALF

SEQ ID NO: 2570 - protein, 248 aa, Aspergillus fumigatus
MTLSKITSIAGLLASASLVAGHGFVSGIVADGKYYGGYLVNQYPYMSNPPDTIAWSTTATDLGFVDGTGYQSPDIICHRDAKNGKLTATVAAGSQIEFQWTTWPESHHGPVITYLAPCNGDCATVDKTTLKFVKIAAQGLIDGSNPPGVWASDELIANNNTWTVTIPASYAPGNYVLRHEIIALHTAGNLNGAQNYPQCFNIQITGGGSAQGSGTAGTSLYKNTDPGIWFDIYSDLSGGYPIPGPALF

SEQ ID NO: 2571 - protein, 248 aa, Aspergillus fumigatus
MTLSKITSIAGLLASASLVAGHGFVSGIVADGKYYGGYLVNQYPYMSNPPDTIAWATTATDLGFVDGTGYQSPDIICHRDAKNGKLTATVAAGSQIEFQWTTWPESHHGPVITYLAPCNGDCATVDKTTLKFVKIAAQGLIDGSNPPGVWASDELIANNNTWTVTIPASYAPGNYVLRHEIIALHSAGNLNGAQNYPQCFNIQITGGGSAQGSGTAGTSLYKNTDPGIWFDIYSDLSGGYPIPGPALF

SEQ ID NO: 2572 - protein, 248 aa, Aspergillus fumigatus
MTLSKITSIAGLLASASLVAGHGFVSGIVADGKYYGGYLVNQYPYMSNPPDTIAWSTTATDLGFVDGTGYQSPDIICHRDAKNGKLTATVAAGSQIEFQWTTWPESHHGPVITYLAPCNGDCATVDKTTLKFVKIAAQGLIDGSNPPGVWASDELIANNNTWTVTIPASYAPGNYVLRHEIIALHSAGKLNGAQNYPQCFNIQITGGGSAQGSGTAGTSLYKNTDPGIWFDIYSDLSGGYPIPGPALF

SEQ ID NO: 2573 - protein, 228 aa, Unidentified
HGYVQGIVADGKYYGGYIVTQYPYTNDPPELVAWSTEATDLGFVDGSGYASGDIICHKSAQPAALAAEVPAGGKVELQWTEWPESHHGPVLDYLAPCNGNCADVDKTALEFFKIDQGGLVDDSSPPGTWASDQLISNNNSWTVTIPSTIAPGNYVLRHEIIALHSAGNKDGAQNYPQCINIKVTGSGTDSPSGTLGTSLYKDTDPGILVNIYQTLSDYSIPGPALYEG

SEQ ID NO: 2574 - protein, 225 aa, Aspergillus oryzae
HGYVSGAVVDGQYYSGYDMSYHYMSNPPQVIGWSTDATDLGFVDGSSYADADIICHKNAKNGAISAEIAAGKQVELQWTAWPESHKGPVITYLANCNGDCATVDKTQLEFFKIDEKGLISGSDNTWASDNLISSNNSWTVTIPSSIAAGNYVMRHEIIALHSAGNKDGAQNYPQCLNFKVTGGGSDKPEGTLGTALYKDTDPGIEINIYQTLSSYTIPGPALYTG

SEQ ID NO: 2575 - protein, 242 aa, Talaromyces pinophilus
STKVAALSAVLALASTVAGHGFVQNIVIDGKSYSGYLVNQFPYESNPPAVIGWATTATDLGFVAPSEYTNADIICHKNATPGALSAPVAAGGTVELQWTTWPDSHHGPVISYLANCNGNCSTVDKTKLDFVKIDQGGLIDDTTPPGTWASDKLIAANNSWTVTIPSTIAPGNYVLRHEIIALHKAGNADGAQNYPQCINLEITGSGTAAPSGTAGEKLYTSTDPGILVNIYQSLSTYVIPGP

SEQ ID NO: 2576 - protein, 242 aa, Talaromyces pinophilus
STKVAALSAVLALASTVAGHGFVQNIVIDGKSYSGYLVNQFPYESNPPAVIGWATTATDLGFVAPSEYTNADIICHKNATPGALSAPVAAGGTVELQWTTWPDSHHGPVISYLANCNGNCSTVDKTKLDFVKIDQGGLIDDTTPPGTWASDKLIAANNSWTCTIPSTIAPGNYVLRHEIIALHSAGNADGAQNYPQCINLEITGSGTAAPSGTAGEKLYTSTDPGILVNIYQSLSTYVIPGP

SEQ ID NO: 2577 - protein, 242 aa, Talaromyces pinophilus
STKVAALSAVLALASTVAGHGFVQNIVIDGKSYSGYLVNQFPYESNPPAVIGWETTATDLGFVAPSEYTNADIICHKNATPGALSAPVAAGGTVELQWTTWPDSHHGPVISYLANCNGNCSTVDKTKLDFVKIDQGGLIDDTTPPGTWASDKLIAANNSWTVTIPSTIAPGNYVLRHEIIALHSAGNADGAQNYPQCINLEITGSGTAAPSGTAGEKLYTSTDPGILVNIYQSLSTYVIPGP

SEQ ID NO: 2578 - protein, 242 aa, Talaromyces pinophilus
STKVAALSAVLALASTVAGHGFVQNIVIDGKSYSGYLVNQFPYELNPPAVIGWATTATDLGFVAPSEYTNADIICHKNATPGALSAPVAAGGTVELQWTTWPDSHHGPVISYLANCNGNCSTVDKTKLDFVKIDQGGLIDDTTPPGTWASDKLIAANNSWTVTIPSTIAPGNYVLRHEIIALHSAGNADGAQNYPQCINLEITGSGTAAPSGTAGEKLYTSTDPGILVNIYQSLSTYVIPGP

SEQ ID NO: 2579 - protein, 242 aa, Talaromyces pinophilus
STKVAALSAVLALASTVAGHGFVQNIVIDGKSYSGYLVNQFPYESNPPAVIGWATTATDLGFVAPSEYTNADIICHKNATPGALSAPVAAGGTVELQWTTWPDSHHGPVISYLANCNGNCSTVDKTKLDFVKIDQGGLIDDTTPPGTWASDKLIAANNSWTVTIPSTIAPGNYVLRHEIIALHTAGNADGAQNYPQCINLEITGSGTAAPSGTAGEKLYTSTDPGILVNIYQSLSTYVIPGP

SEQ ID NO: 2580 - protein, 242 aa, Talaromyces pinophilus
STKVAALSAVLALASTVAGHGFVQNIVIDGKSYSGYLVNQFPYESNPPAVIGWATTATDLGFVAPSEYTNADIICHKNATPGALSAPVAAGGTVELQWTTWPDSHHGPVISYLANCNGNCSTVDKTKLDFVKIDQGGLIDDTTPPGTWASDKLIAANNSWTVTIPSTIAPGNYVLRHEIIALHFAGNADGAQNYPQCINLEITGSGTAAPSGTAGEKLYTSTDPGILVNIYQSLSTYVIPGP

SEQ ID NO: 2581 - protein, 242 aa, Talaromyces pinophilus
STKVAALSAVLALASTVAGHGFVQNIVIDGKSYSGYLVNQFPYESNPPAVIGWATTATDLGFVAPSEYTNADIICHKNATPGALSAPVAAGGTVELQWTTWPDSHHGPVISYLANCNGNCSTVDKTKLDFVKIDQGGLIDDTTPPGTWASDKLIAANNSWTLTIPSTIAPGNYVLRHEIIALHSAGNADGAQNYPQCINLEITGSGTAAPSGTAGEKLYTSTDPGILVNIYQSLSTYVIPGP

SEQ ID NO: 2582 - protein, 242 aa, Talaromyces pinophilus
STKVAALSAVLALASTVAGHGFVQNIVIDGKSYSGYLVNQFPYESNPPAVIGWATTATDLGFVAPSEYTNADIICHKNATPGALSAPVAAGGTVELQWTTWPDSHHGPVISYLANCNGNCSTVDKTKLDFVKIDQGGLIDDTTPPGTWASDKLIAANNSWTVTIPSTIAPGNYVLRHEIIALHYAGNADGAQNYPQCINLEITGSGTAAPSGTAGEKLYTSTDPGILVNIYQSLSTYVIPGP

SEQ ID NO: 2583 - protein, 242 aa, Talaromyces pinophilus
STKVAALSAVLALASTVAGHGFVQNIVIDGKSYSGYLVNQFPYESNPPAVIGWATTATDLGFVAPSEYTNADIICHKNATPGALSAPVAAGGTVELQWTTWPDSHHGPVISYLANCNGNCSTVDKTKLDFVKIDQGGLIDDTTPPGIWASDKLIAANNSWTVTIPSTIAPGNYVLRHEIIALHSAGNADGAQNYPQCINLEITGSGTAAPSGTAGEKLYTSTDPGILVNIYQSLSTYVIPGP

SEQ ID NO: 2584 - protein, 242 aa, Talaromyces pinophilus
STKVAALSAVLALASTVAGHGFVQNIVIDGKSYSGYLVNQFPYESNPPAVIGWCTTATDLGFVAPSEYTNADIICHKNATPGALSAPVAAGGTVELQWTTWPDSHHGPVISYLANCNGNCSTVDKTKLDFVKIDQGGLIDDTTPPGTWASDKLIAANNSWTVTIPSTIAPGNYVLRHEIIALHSAGNADGAQNYPQCINLEITGSGTAAPSGTAGEKLYTSTDPGILVNIYQSLSTYVIPGP

SEQ ID NO: 2585 - protein, 242 aa, Talaromyces pinophilus
STKVAALSAVLALASTVAGHGFVQNIVIDGKSYSGYLVNQFPYESNPPAVIGWATTATDLGFVAPSEYTNADIICHKNATPGALSAPVAAGGTVELQWTTWPDSHHGPVISYLANCNGNCSTVDKTKLDFVKIDQGGLIDDTTPPGTWASDKLIAANNSWTVTIPSTIAPGNYVLRHEIIALHSAGNADGAQNYPQCVNLEITGSGTAAPSGTAGEKLYTSTDPGILVNIYQSLSTYVIPGP

SEQ ID NO: 2586 - protein, 242 aa, Talaromyces pinophilus
STKVAALSAVLALASTVAGHGFVQNIVIDGKSYSGYLVNQFPYESNPPAVIGWATTATDLGFVAPSEYTNADIICHKNATPGALSAPVAAGGTVELQWTTWPDSHHGPVISYLANCNGNCSTVDKTKLDFVKIDQGGLIDDTTPPGTWASDKLIAANNSWTVTLPSTIAPGNYVLRHEIIALHSAGNADGAQNYPQCINLEITGSGTAAPSGTAGEKLYTSTDPGILVNIYQSLSTYVIPGP

SEQ ID NO: 2587 - protein, 223 aa, unidentified
HGFVSGIVVDGTFYSGYIVDEYPYMSNPPPVIGWSTTATDLGFVDGTEYQEPDIICHRNATPALLTAEVKAGGDVELQWTPWPSSHHGPVITYLANCGGDCSDVDKTQLEFFKIEQSGLINDSDPPGTWATDNLISNNNTWTVTIPSTLEPGNYVLRHEIIALHSAGQKDGAQNYPQCINIQITQGGTVEPTGAKGEALYTNTDPGILIDIYETIATYDIPGP

SEQ ID NO: 2588 - protein, 249 aa, Talaromyces pinophilus
MPSTKVAALSAVLALASTVAGHGFVQNIVIDGKFYSGYLVNQFPYESNPPAVIGWATTATDLGFVAPSEYTNADIICHKNATPGALSAPVAAGGTVELQWTTWPDSHHGPVISYLANCNGNCSTVDKTKLDFVKIDQGGLIDDTTPPGTWASDKLIAANNSWTVTIPSTIAPGNYVLRHEIIALHSAGNADGAQNYPQCINLEITGSGTAAPSGTAGEKLYTSTDPGILVNIYQSLSTYVIPGPTLWSG

SEQ ID NO: 2589 - protein, 249 aa, Talaromyces pinophilus
MPSTKVAALSAVLALASTVAGHGFVQNIVIDGKSYSGYLVNQFPYESNPPAVIGWATTATDLGFVAPSEYTNADIICHKNATPGALSAPVAAGGTVELQWTTWPDSHHGPVISYLANCNGNCSTVDKTKLDFVKIDQCGLIDDTTPPGTWASDKLIAANNSWTVTIPSTIAPGNYVLRHEIIALHSAGNADGAQNYPQCINLEITGSGTAAPSGTAGEKLYTSTDPGILVNIYQSLSTYVIPGPTLWSG

SEQ ID NO: 2590 - protein, 249 aa, Talaromyces pinophilus
MPSTKVAALSAVLALASTVAGHGFVQNIVIDGKSYSGYLVNQFPYESNPPAVIGWCTTATDLGFVAPSEYTNADIICHKNATPGALSAPVAAGGTVELQWTTWPDSHHGPVISYLANCNGNCSTVDKTKLDFVKIDQGGLIDDTTPPGTWASDKLIAANNSWTVTIPSTIAPGNYVLRHEIIALHSAGNADGAQNYPQCINLEITGSGTAAPSGTAGEKLYTSTDPGILVNIYQSLSTYVIPGPTLWSG

SEQ ID NO: 2591 - protein, 249 aa, Talaromyces pinophilus
MPSTKVAALSAVLALASTVAGHGFVQNIVIDGKSYSGYLVNQFPYESNPPAVIGWATTATDLGFVAPSEYTNADIICHKNATPGALSAPVAAGGTVELQWTTWPDSHHGPVISYLANCNGNCSTVDKTKLDFVKIDQGGLIDDTTPPGTWASDKLIAANNSWTVTIPSTIAPGNYVLRHEIIALHSAGNADGAQNYPQCINLEITGSGTAAPSGTAGEKLYRSTDPGILVNIYQSLSTYVIPGPTLWSG

SEQ ID NO: 2592 - protein, 249 aa, Talaromyces pinophilus
MPSTKVAALSAVLALASTVAGHGFVQNIVIDGKSYSGYLVNQFPYESNPPAVIGWATTATDLGFVAPSEYTNADIICHKNATPGALSAPVAAGGTVELQWTTWPDSHHGPVISYLANCNGNCSTVDKTKLDFVKIDQGGLIDDTTPPGTWASDKLIAANNSWTVTIPSTIAPGNYVLRHEIIALHSAGNADGAQNYPQCINLEITGSGTAAPEGTAGEKLYTSTDPGILVNIYQSLSTYVIPGPTLWSG

SEQ ID NO: 2593 - protein, 249 aa, Talaromyces pinophilus
MPSTKVAALSAVLALASTVAGHGFVQNIVIDGKSYSGYLVNQFPYESNPPAVIGWETTATDLGFVAPSEYTNADIICHKNATPGALSAPVAAGGTVELQWTTWPDSHHGPVISYLANCNGNCSTVDKTKLDFVKIDQGGLIDDTTPPGTWASDKLIAANNSWTVTIPSTIAPGNYVLRHEIIALHSAGNADGAQNYPQCINLEITGSGTAAPSGTAGEKLYTSTDPGILVNIYQSLSTYVIPGPTLWSG

SEQ ID NO: 2594 - protein, 249 aa, Penicillium pinophilum
MPSTKVAALSAVLALASTVAGHGFVQNIVIDGKSYSGYLVNQFPYESNPPAVIGWATTATDLGFVAPSEYTNADIICHKNATPGALSAPVAAGGTVELQWTTWPDSHHGPVISYLANCNGNCSTVDKTKLDFVKIDQGGLIDDTTPPGTWASDKLIAANNSWTVTIPSTIAPGNYVLRHEIIALHSAGNADGAQNYPQCINLEITGSGTAAPSGTAGEKLYTSTDPGILVNIYQSLSTYVIPGPTLWSG

SEQ ID NO: 2595 - protein, 249 aa, Acremonium cellulolyticus
MPSTKVAALSAVLALASTVAGHGFVQNIVIDGKSYSGYLVNQFPYESNPPAVIGWATTATDLGFVAPSEYTNADIICHKNATPGALSAPVAAGGTVELQWTTWPDSHHGPVISYLANCNGNCSTVDKTKLNFVKIDQGGLIDDTTPPGTWASDKLIAANNSWTVTIPSTIAPGNYVLRHEIIALHSAGNADGAQNYPQCINLEITGSGTAAPSGTAGEKLYTSTDPGILVNIYQSLSTYVIPGPTLWSG

SEQ ID NO: 2596 - protein, 244 aa, Thermoascus aurantiacus var. levisporus
SFSKIIATAGVLASASLVAGHGFVQNIVIDGKKYVIARRNQYPYMSNPPEVIAWSTTATDLGFVDGTGYQTPDIICHRGAKPGALTAPVSPGGTVELQWTPWPDSHHGPVINYLAPCNGDCSTVDKTQLEFFKIAESGLINDDNPPGIWASDNLIAANNSWTVTIPTTIAPGNYVLRHEIIALHSAQNQDGAQNYPQCINLQVTGGGSDNPAGTLGTALYHDTDPGTLINIYQKLSSYIIPGPP

SEQ ID NO: 2597 - protein, 245 aa, Aspergillus aculeatus
MSVAKFAGVILGSAALVAGHGYVSGAVVDGTYYGGYIVTSYPYSSDPPETIGWSTEATDLGFVDGSEYADADIICHKSAKPGAISAEVKAGGTVELQWTTWPDSHHGPVLTYLANCNGDCSSVTKTDLEFFKIDESGLINDDDVPGTWASDNLIANNNSWTVTIPSDIAAGNYVLRHEIIALHYAGNKDGAQNYPQCLNLKVTGGGDLAPSGTAGESLYKDTDAGILVNIYQSLSSYDIPGPAMY

SEQ ID NO: 2598 - protein, 245 aa, Aspergillus aculeatus
MSVAKFAGVILGSAALVAGHGYVSGAVVDGTYYGGYIVTSYPYSSDPPETIGWSTEATDLGFVDGSEYADADIICHKSAKPGAISAEVKAGGTVELQWTTWPDSHHGPVLTYLANCNGDCSSVTKTDLEFFKIDESGLINDDDVPGTWASDNLIANNNSWTVTIPSDIAAGNYVLRHEIIALHKAGNKDGAQNYPQCLNLKVTGGGDLAPSGTAGESLYKDTDAGILVNIYQSLSSYDIPGPAMY

SEQ ID NO: 2599 - protein, 245 aa, Aspergillus aculeatus
MSVAKFAGVILGSAALVAGHGYVSGAVVDGTYYGGYIVTSYPYSSDPPETIGWSTEATDLGFVDGSEYADADIICHKSAKPGAISAEVKAGGTVELQWTTWPDSHHGPVLTYLANCNGDCSSVTKTDLEFFKIDESGLINDDDVPGTWASDLLIANNNSWTVTIPSDIAAGNYVLRHEIIALHSAGNKDGAQNYPQCLNLKVTGGGDLAPSGTAGESLYKDTDAGILVNIYQSLSSYDIPGPAMY

SEQ ID NO: 2600 - protein, 245 aa, Aspergillus aculeatus
MSVAKFAGVILGSAALVAGHGYVSGAVVDGTYYGGYIVTSYPYSSDPPETIGWSTEATDLGFVDGSEYADADIICHKSAKPGAISAEVKAGGTVELQWTTWPPSHHGPVLTYLANCNGDCSSVTKTDLEFFKIDESGLINDDDVPGTWASDNLIANNNSWTVTIPSDIAAGNYVLRHEIIALHSAGNKDGAQNYPQCLNLKVTGGGDLAPSGTAGESLYKDTDAGILVNIYQSLSSYDIPGPAMY

SEQ ID NO: 2601 - protein, 245 aa, Aspergillus aculeatus
MSVAKFAGVILGSAALVAGHGYVSGAVVDGTYYGGYIVTSYPYSSDPPETIGWSTEATDLGFVDGSEYADADIICHKSAKPGAISAEVKAGGTVELQWTTWPDSHHGPVLTYLANCNGDCSSVTKTDLEFFKIDESGLINDDDVPGTWASDNLIANNNSWVVTIPSDIAAGNYVLRHEIIALHSAGNKDGAQNYPQCLNLKVTGGGDLAPSGTAGESLYKDTDAGILVNIYQSLSSYDIPGPAMY

SEQ ID NO: 2602 - protein, 245 aa, Aspergillus aculeatus
MSVAKFAGVILGSAALVAGHGYVSGAVVDGTYYGGYIVTSYPYSSDPPETIGWSTEATDLGFVDGSEYADADIICHKSAKPGAISAEVKAGGTVELQWTTWPDSHHGPVLTYLANCNGDCSSVTKTDLEFFKIDESGLINDDDVPGTWASDNLIANNNSWTVTIPSDIAAGNYVLRHEIIALHSAGKKDGAQNYPQCLNLKVTGGGDLAPSGTAGESLYKDTDAGILVNIYQSLSSYDIPGPAMY

SEQ ID NO: 2603 - protein, 245 aa, Aspergillus aculeatus
MSVAKFAGVILGSAALVAGHGYVSGAVVDGTYYGGYIVTSYPYSSDPPETIGWSTEATDLGFVDGSEYADADIICHKSAKPGAISAEVKAGGTVELQWTTWPDSHHGPVLTYLANCNGDCSSVTKTDLEFFKIDESGLINDDDVPGTWASDNLIANNNSWTVTIPSDIAAGNYVLRHEIIALHSAGHKDGAQNYPQCLNLKVTGGGDLAPSGTAGESLYKDTDAGILVNIYQSLSSYDIPGPAMY

SEQ ID NO: 2604 - protein, 245 aa, Aspergillus aculeatus
MSVAKFAGVILGSAALVAGHGYVSGAVVDGTYYGGYIVTSYPYSSDPPETIGWSTEATDLGFVDGSEYADADIICHKSAKPGAISAEVKAGGTVELQWTTWPDSHHGPVLTYLANCNGDCSSVTKTDLEFFKIDESGLINDDDVPGTWASDNLIANNNSWFVTIPSDIAAGNYVLRHEIIALHSAGNKDGAQNYPQCLNLKVTGGGDLAPSGTAGESLYKDTDAGILVNIYQSLSSYDIPGPAMY

SEQ ID NO: 2605 - protein, 245 aa, Aspergillus aculeatus
MSVAKFAGVILGSAALVAGHGYVSGAVVDGTYYGGYIVTSYPYSSDPPETIGWSTEATDLGFVDGSEYADADIICHKSAKPGAISAEVKAGGTVELQWTTWPDSHHGPVLTYLANCNGDCSSVTKTDLEFFKIDECGLINDDDVPGTWASDNLIANNNSWTVTIPSDIAAGNYVLRHEIIALHSAGNKDGAQNYPQCLNLKVTGGGDLAPSGTAGESLYKDTDAGILVNIYQSLSSYDIPGPAMY

SEQ ID NO: 2606 - protein, 245 aa, Aspergillus aculeatus
MSVAKFAGVILGSAALVAGHGYVSGAVVDGTYYGGYIVTSYPYSSDPPETIGWSTEATDLGFVDGSEYADADIICHKSAKPGAISAEVKAGGTVELQWTTWPKSHHGPVLTYLANCNGDCSSVTKTDLEFFKIDESGLINDDDVPGTWASDNLIANNNSWTVTIPSDIAAGNYVLRHEIIALHSAGNKDGAQNYPQCLNLKVTGGGDLAPSGTAGESLYKDTDAGILVNIYQSLSSYDIPGPAMY

SEQ ID NO: 2607 - protein, 245 aa, Aspergillus aculeatus
MSVAKFAGVILGSAALVAGHGYVSGAVVDGTYYGGYIVTSYPYSSDPPETIGWSTEATDLGFVDGSEYADADIICHKSAKPGAISAEVKAGGTVELQWTTWPDSHHGPVLTYLANCNGDCSSVTKTDLEFFKIDEGGLINDDDVPGTWASDNLIANNNSWTVTIPSDIAAGNYVLRHEIIALHSAGNKDGAQNYPQCLNLKVTGGGDLAPSGTAGESLYKDTDAGILVNIYQSLSSYDIPGPAMY

SEQ ID NO: 2608 - protein, 245 aa, Aspergillus aculeatus
MSVAKFAGVILGSAALVAGHGYVSGAVVDGTYYGGYIVTSYPYSSDPPETIGWSTEATDLGFVDGSEYADADIICHKSAKPGAISAEVKAGGTVELQWTTWPDSHHGPVLTYLANCNGDCSSVTKTDLEFFKIDESGLINDDDVPGTWASDNLIANNNSWTVTIPSDIAAGNYVLRHEIIALHTAGNKDGAQNYPQCLNLKVTGGGDLAPSGTAGESLYKDTDAGILVNIYQSLSSYDIPGPAMY

SEQ ID NO: 2609 - protein, 248 aa, Aspergillus fumigatus
MTLSKITSIAGLLASASLVAGHGFVSGIVADGKYYGGYLVNQYPYMSNPPDTIAWSTTATDLGFVDGTGYQSPDIICHRDAKNGKLTATVAAGSQIEFQWTTWPESHHGPVITYLAPCNGDCATVDKTTLKFVKIAAQGLIDGSNPPGVWASDEILANNNTWTVTIPASYAPGNYVLRHEIIALHSAWNLNGAQNYPQCFNIQITGGGSAQGSGTAGTSLYKNTDPGIKFDIYSDLSGGYPIPGPALF

SEQ ID NO: 2610 - protein, 243 aa, Aspergillus terreus
MSVAKIAGVVLGSAALVAGHGYVTGAVVDGKYYAGYDVTSAPYSSDPPATIGWSTTATDLGFVDGTEYSEPDIICHKDAKPGSLSAEITAGGKVELQWTEWPESHHGPVITYLANCNGDCSSVDKTSLEFFKIDQKGLIEGNTWASDQLISNNNSWTVTIPSSIASGNYVLRHEIIGLHSAGNKDGAQNYPQCMNLKVTGGGSDKPAGTLGTALYKDTDPGILVNIYQTLSSYVIPGPALYSG

SEQ ID NO: 2611 - protein, 229 aa, unidentified
HGFVSGIVIGDKFYSGYIVDEFPYMSDPPPVIGWATTATDLGFVDGTEYAEPDIICHRNATPALLTAPVAAGGDVELQWTPWPSSHHGPVITYLAPCNGNCSEVDKTTLKFFKIDEGGLVNDTDVPGTWASDELIANNNSWTVKIPTSIEPGGYVLRHEIIALHSAENLDGAQNYPQCINIKVTQTSGTVTPSGTLGTALYTDTAPGILIDIYEPIATYTIPGPPLYTG

SEQ ID NO: 2612 - protein, 249 aa, Talaromyces pinophilus
MPSTKVAALSAVLALASTVAGHGFVQNIVIDGKSYSGYLVNQFPYESNPPAVIGWATTATDLGFVAPSEYTNADIICHKNATPGALSAPVAAGGTVELQWTTWPDSHHGPVISYLANCNGNCSTVDKTKLDFVKIDQGGLIDDTTPPGTWASDKLIAANNSWTLTIPSTIAPGNYVLRHEIIALHSAGNADGAQNYPQCINLEITGSGTAAPSGTAGEKLYTSTDPGILVNIYQSLSTYVIPGPTLWSG

SEQ ID NO: 2613 - protein, 249 aa, Talaromyces pinophilus
MPSTKVAALSAVLALASTVAGHGFVQNIVIDGKSYSGYLVNQFPYESNPPAVIGWATTATDLGFVAPSEYTNADIICHKNATPGALSAPVAAGGTVELQWTTWPDSHHGPVISYLANCNGNCSTVDKTKLDFVKIDQGGLIDDTTPPGTWASDKLIAANNSWTVTLPSTIAPGNYVLRHEIIALHSAGNADGAQNYPQCINLEITGSGTAAPSGTAGEKLYTSTDPGILVNIYQSLSTYVIPGPTLWSG

SEQ ID NO: 2614 - protein, 249 aa, Talaromyces pinophilus
MPSTKVAALSAVLALASTVAGHGFVQNIVIDGKSYSGYLVNQFPYESNPPAVIGWATTATDLGFVAPSEYTNADIICHKNATPGALSAPVAAGGTVELQWTTWPDSHHGPVISYLANCNGNCSTVDKTKLDFVKIDQGGLIDDTTPPGTWASDKLIAANNSWTVTIPSRIAPGNYVLRHEIIALHSAGNADGAQNYPQCINLEITGSGTAAPSGTAGEKLYTSTDPGILVNIYQSLSTYVIPGPTLWSG

SEQ ID NO: 2615 - protein, 249 aa, Talaromyces pinophilus
MPSTKVAALSAVLALASTVAGHGFVQNIVIDGKSYSGYLVNQFPYESNPPAVIGWATTATDLGFVAPSEYTNADIICHKNATPGALSAPVAAGGTVELQWTTWPDSHHGPVISYLANCNGNCSTVDKTKLDFVKIDQGGLIDDTTPPGTWASDKLIAANNSWTVTIPSTIAPGNYVLRHEIIALHFAGNADGAQNYPQCINLEITGSGTAAPSGTAGEKLYTSTDPGILVNIYQSLSTYVIPGPTLWSG

SEQ ID NO: 2616 - protein, 249 aa, Talaromyces pinophilus
MPSTKVAALSAVLALASTVAGHGFVQNIVIDGKSYSGYLVNQFPYESNPPAVIGWATTATDLGFVAPSEYTNADIICHKNATPGALSAPVAAGGTVELQWTTWPDSHHGPVISYLANCNGNCSTVDKTKLDFVKIDQGGLIDDTTPPGTWASDKLIAANNSWTVTIPSTIAPGNYVLRHEIIALHYAGNADGAQNYPQCINLEITGSGTAAPSGTAGEKLYTSTDPGILVNIYQSLSTYVIPGPTLWSG

SEQ ID NO: 2617 - protein, 249 aa, Talaromyces pinophilus
MPSTKVAALSAVLALASTVAGHGFVQNIVIDGKSYSGYLVNQFPYESNPPAVIGWATTATDLGFVAPSEYTNADIICHKNATPGALSAPVAAGGTVELQWTTWPDSHHGPVISYLANCNGNCSTVDKTKLDFVKIDQGGLIDDTTPPGTWASDKLIAANNSWTVTIPSTIAPGNYVLRHEIIALHSAGNADGAQNYPQCVNLEITGSGTAAPSGTAGEKLYTSTDPGILVNIYQSLSTYVIPGPTLWSG

SEQ ID NO: 2618 - protein, 249 aa, Talaromyces pinophilus
MPSTKVAALSAVLALASTVAGHGFVQNIVIDGKSYSGYLVNIFPYESNPPAVIGWATTATDLGFVAPSEYTNADIICHKNATPGALSAPVAAGGTVELQWTTWPDSHHGPVISYLANCNGNCSTVDKTKLDFVKIDQGGLIDDTTPPGTWASDKLIAANNSWTVTIPSTIAPGNYVLRHEIIALHSAGNADGAQNYPQCINLEITGSGTAAPSGTAGEKLYTSTDPGILVNIYQSLSTYVIPGPTLWSG

SEQ ID NO: 2619 - protein, 249 aa, Talaromyces pinophilus
MPSTKVAALSAVLALASTVAGHGFVQNIVIDGKSYSGYLVNQFPYESNPPAVIGWATTATDLGFVAPSEYTNADIICHKNATPGALSAPVAAGGTVELQWTTWPDSHHGPVISYLANCNGNCSTVDKTKLDFVKIDQGGLIDDTTPPGTWASDKLIAANNSWTVTIPSTIAPGNYVLRHEIIALHTAGNADGAQNYPQCINLEITGSGTAAPSGTAGEKLYTSTDPGILVNIYQSLSTYVIPGPTLWSG

SEQ ID NO: 2620 - protein, 249 aa, Talaromyces pinophilus
MPSTKVAALSAVLALASTVAGHGFVQNIVIDGKSYSGYLVNVFPYESNPPAVIGWATTATDLGFVAPSEYTNADIICHKNATPGALSAPVAAGGTVELQWTTWPDSHHGPVISYLANCNGNCSTVDKTKLDFVKIDQGGLIDDTTPPGTWASDKLIAANNSWTVTIPSTIAPGNYVLRHEIIALHSAGNADGAQNYPQCINLEITGSGTAAPSGTAGEKLYTSTDPGILVNIYQSLSTYVIPGPTLWSG

SEQ ID NO: 2621 - protein, 249 aa, Talaromyces pinophilus
MPSTKVAALSAVLALASTVAGHGFVQNIVIDGKSYSGYLVNQFPYESNPPAVIGWATTATDLGFVAPSEYTNADIICHKNATPGALSAPVAAGGTVELQWTTWPDSHHGPVISYLANCNGNCSTVDKTKLDFVKIDQGGLIDDTTPPGTWASDKLIAANNSWTCTIPSTIAPGNYVLRHEIIALHSAGNADGAQNYPQCINLEITGSGTAAPSGTAGEKLYTSTDPGILVNIYQSLSTYVIPGPTLWSG

SEQ ID NO: 2622 - protein, 249 aa, Talaromyces pinophilus
MPSTKVAALSAVLALASTVAGHGFVQNIVIDGKSYSGYLVNQFPYESNPPAVIGWATTATDLGFVAPSEYTNADIICHKNATPGALSAPVAAGGTVELQWTTWPDSHHGPVISYLANCNGNCSTVDKTKLDFVKIDQGGLIDDTTPPGTWASDKLIAANNSWTVTIPSTIAPGNYVLRHEIIALHKAGNADGAQNYPQCINLEITGSGTAAPSGTAGEKLYTSTDPGILVNIYQSLSTYVIPGPTLWSG

SEQ ID NO: 2623 - protein, 249 aa, Talaromyces pinophilus
MPSTKVAALSAVLALASTVAGHGFVQNIVIDGKSYSGYLVNQFPYELNPPAVIGWATTATDLGFVAPSEYTNADIICHKNATPGALSAPVAAGGTVELQWTTWPDSHHGPVISYLANCNGNCSTVDKTKLDFVKIDQGGLIDDTTPPGTWASDKLIAANNSWTVTIPSTIAPGNYVLRHEIIALHSAGNADGAQNYPQCINLEITGSGTAAPSGTAGEKLYTSTDPGILVNIYQSLSTYVIPGPTLWSG

SEQ ID NO: 2624 - protein, 238 aa, Trichoderma reesei
MPSTKVAALSAVLALASTVAGHGFVQNIVIDGKSYSGYLVNQFPYESNPPAVIGWATTATDLGFVAPSEYTNADIICHKNATPGALSAPVAAGGTVELQWTTWPDSHHGPVISYLANCNGNCSTVDKTKLNFVKIDQGGLIDDTTPPGTWASDKLIAANNSWTVTIPSTIAPGNYVLRHEIIALHSAGNADGAQNYPQCINLEITGSGTAAPSGTAGEKLYTSTDPGILVNIYQSFGA

SEQ ID NO: 2625 - protein, 227 aa, Penicillium oxalicum
HGFVSSIMAGGKNYTGYLANSYPYMSNPPQSVGWATTATDLGFEDGTEYQSANIICHRDGKNAALSAPVTAGSKVEIQWTSWPDSHHGPVITYLASCGGDCSTVDKTTLKFFKIDEAGLIDDSNPPGTWATDQLIAAGNRWTVTIPKSIASGNYVMRHEIIALHSSGSKDGAQNYPQCLNLQVTGGGSAKPQGTLGEALYKDTDPGILINIYQSLKSYVIPGPALYS

SEQ ID NO: 2626 - protein, 223 aa, unidentified
HGFVSGIVVDGTFYSGYIVDEYPYMSNPPPVIGWSTTATDLGFVDGTEYQEPDIICHRNATPALLTAEVKAGGTVELQWTPWPSSHHGPVITYLANCGGNCSDVDKTQLEFFKIEQSGLVNDSDPPGTWATDNLISNNNSWTVTIPSTLEPGGYVLRHEIIALHSAGQLNGAQNYPQCINIQITQGGSVEPTGAKGEALYTNTDPGILIDIYETIATYDIPGP

SEQ ID NO: 2627 - protein, 223 aa, unidentified
HGFVQGIVVDGTFYSGYIVDEFPYMSNPPPVIGWSTTATDLGFVDGSEYQEPDIICHRNGTPALLTAEVKAGGTVELQWTPWPSSHHGPVITYLANCGGDCSDVDKTQLEFFKIEQSGLVNGSDPPGTWATDNLISNNNSWTVTIPSTLEPGGYVLRHEIIALHSAGQLNGAQNYPQCINIQITQGGSVEPTGTKGEALYTDTDPGILIDIYETIATYDIPGP

SEQ ID NO: 2628 - protein, 226 aa, Aspergillus niger
HGYVSGAVIDGEYYGGYIVSSYPYESDPPETIAWSTTATDLGFVDGSEYSDPDIICHKSAKPGAISADVKAGGTVELQWTDWPSSHHGPVLTYLANCNGDCSDVTKTDLEFFKIDESGLISDTEVPGTWATDNLISNNNSWTVTIPSTLEAGNYVLRHEIIALHSAENKDGAQNYPQCLNLKVTGSGSSTYSGTKGEALYKDTDPGILVNIYETLSSYDIPGPAMY

SEQ ID NO: 2629 - protein, 248 aa, Aspergillus fumigatus
MTLSKITSIAGLLASASLVAGHGFVSGIVADGKYYGGYLVNQYPYMSNPPDTIAWSTTATDLGFVDGTGYQSPDIICHRDAKNGKLTATVAAGSQIEFQWTTWPESHHGPLITYLAPCNGDCATVDKTTLKFVKIAAQGLIDGSNPPGVWADDEMIANNNTATVTIPASYAPGNYVLRHEIIALHSAGNLNGAQNYPQCFNIQITGGGSAQGSGTLGTSLYKNTDPGIKFDIYSDLSGGYPIPGPALF

SEQ ID NO: 2630 - protein, 248 aa, Aspergillus fumigatus
MTLSKITSIAGLLASASLVAGHGFVSGIVADGKYYGGYLVNQYPYMSNPPDTIAWSTTATDLGFVDGTGYQSPDIICHRDAKNGKLTATVAAGSQIEFQWTTWPESHHGPLITYLAPCNGDCATVDKTTLKFVKIAAQGLIDGSNPPGVWASDEMIANNNTATVTIPASYAPGNYVLRHEIIALHSAGNLNGAQNYPQCFNIQITGGGSAQGSGTAGTSLYKNTDPGIKFDIYSDLSGGYPIPGPALF

SEQ ID NO: 2631 - protein, 248 aa, Aspergillus fumigatus
MTLSKITSIAGLLASASLVAGHGFVSGIVADGKYYGGYLVNQYPYMSNPPDTIAWSTTATDLGFVDGTGYQSPDIICHRDAKNGKLTATVAAGSQIEFQWTTWPESHHGPLITYLAPCNGDCATVDKTTLKFVKIAAQGLIDGSNPPGIWADDEMIANNNTATVTIPASYAPGNYVLRHEIIALHSAGNLNGAQNYPQCFNIQITGGGSAQGSGTAGTSLYKNTDPGIKFDIYSDLSGGYPIPGPALF

SEQ ID NO: 2632 - protein, 248 aa, Aspergillus fumigatus
MTLSKITSIAGLLASASLVAGHGFVSGIVADGKYYGGYLVNQYPYMSNPPDTIAWSTTATDLGFVDGTGYQTPDIICHRDAKNGKLTATVAAGSQIEFQWTTWPESHHGPLITYLAPCNGDCATVDKTTLKFVKIAAQGLIDGSNPPGVWADDEMIANNNTATVTIPASYAPGNYVLRHEIIALHSAGNLNGAQNYPQCFNIQITGGGSAQGSGTAGTSLYKNTDPGIKFDIYSDLSGGYPIPGPALF

SEQ ID NO: 2633 - protein, 248 aa, Aspergillus fumigatus
MTLSKITSIAGLLASASLVAGHGFVSGIVADGKYYGGYLVNQYPYMSNPPDTIAWSTTATDLGFVDGTGYQSPDIICHRDAKNGKLTATVAAGSQIEFQWTTWPESHHGPLITYLAPCNGDCATVDKTTLKFVKIAAQGLIDGSNPPGVWADDEMIANNNTATVTIPASYAPGNYVLRHEIIALHSAGNLNGAQNYPQCINIQITGGGSAQGSGTAGTSLYKNTDPGIKFDIYSDLSGGYPIPGPALF

SEQ ID NO: 2634 - protein, 248 aa, Aspergillus fumigatus
MTLSKITSIAGLLASASLVAGHGFVSGIVADGKYYGGYLVNQYPYMSNPPDTIAWSTTATDLGFVDGTGYQSPDIICHRDAKNGKLTATVAAGSQIEFQWTPWPESHHGPLITYLAPCNGDCATVDKTTLKFVKIAAQGLIDGSNPPGVWADDEMIANNNTATVTIPASYAPGNYVLRHEIIALHSAGNLNGAQNYPQCFNIQITGGGSAQGSGTAGTSLYKNTDPGIKFDIYSDLSGGYPIPGPALF

SEQ ID NO: 2635 - protein, 248 aa, Aspergillus fumigatus
MTLSKITSIAGLLASASLVAGHGFVSGIVADGKYYGGYLVNQYPYMSNPPDTIAWSTTATDLGFVDGTGYQSPDIICHRDAKNGKLTATVAAGSQIEFQWTTWPESHHGPLITYLAPCNGDCATVDKTTLKFVKIAAQGLIDGSNPPGVWADDEMIANNNTATVTIPASYAPGNYVLRHEIIALHSAGNLNGAQNYPQCFNIQITGGGSAQGSGTAGTSLYKNTDPGIKFDIYSDLSGGYPIPGPPLF

SEQ ID NO: 2636 - protein, 244 aa, Aspergillus oryzae
MSIAKIAGVVLGSAALVAGHGYVSGAVVDGQYYSGYDMSYHYMSNPPQVIGWSTDATDLGFVDGSSYADADIICHKNAKNGAISAEIAAGKQVELQWTAWPESHKGPVITYLANCNGDCATVDKTQLEFFKIDEKGLISGSDNTWASDNLISSNNSWTVTIPSSIAAGNYVMRHEIIALHSAGNKDGAQNYPQCLNFKVTGGGSDKPEGTLGTALYKDTDPGIEINIYQTLSSYTIPGPALYTG

SEQ ID NO: 2637 - protein, 228 aa, Penicillium capsulatum
HGYVSGAVVDGTYYGGYLVNQYPYESDPPETIGWSEDETDLGFIDGSEYSNANIICHKDGKPGALSAPVKAGGSVELQWTDWPSSHHGPVITYLANCNGDCSSVDKTTLKFFKIDEGGLINDDDVPGTWATDQLISNNNSRTVTIPSSIEAGNYVLRHEIIALHSAGQKDGAQNYPQCLNLKVTGGGSDSPTGTLGTSLYKDTDPGILVNIYQSLSTYDIPGPALYTG

SEQ ID NO: 2638 - protein, 248 aa, Rasamsonia byssochlamydoides
SSALALAGVLLSSAPFVSAHGFVQGIVIGDKFYSGYIVNEFPYESDPPPVIGWATTATDLGFVDGTEYAEPDIICHRNATPALLTAPVAAGGTVELQWTPWPSSHHGPVITYLAPCNGNCSEVDKTTLEFFKIDQGGLVNDTDPPGTWASDELIANNNSWTVTIPTSIAPGGYVLRHEIIALHSAENLDGAQNYPQCINIEVTQTSGTVTPSGTLGEALYTDTAPGILVDIYEPIATYTIPGPPLYTG

SEQ ID NO: 2639 - protein, 224 aa, unidentified
HGFVSGIVIDGTFYSGYIVDEYPYMSNPPPVIGWSTTATDLGFVDGSEYQEPDIICHRNATPALLTAEVKAGGDVELQWTPWPSSHHGPVITYLANCGGNCSDVDKTQLEFFKIEQSGLVNDSDPPGTWATDNLISNNNTWTVTIPSTLEPGGYVLRHEIIALHSAGQLNGAQNYPQCINIQITGGGSVEPTGAKGEALYTNTDPGILIDIYETIATYDIPGPP

SEQ ID NO: 2640 - protein, 224 aa, unidentified
HGFVQGIVVDGTFYSGYIVDEYPYMSNPPPVIGWSTTATDLGFVDGSEYQEPDIICHRNATPALLTAEVKAGGDVELQWTPWPSSHHGPVITYLANCGGNCSDVDKTQLEFFKIEQSGLVNDSDPPGTWATDNLISNNNTWTVTIPSTLEPGGYVLRHEIIALHSAGQLNGAQNYPQCINIQVTQGGSVEPTGAKGEALYTNTDPGILIDIYETIATYDIPGPP

SEQ ID NO: 2641 - protein, 240 aa, unidentified
LAFAGLAGLLSAPLVKAHGFVSGIVIDGTFYSGYIVDEYPYMSNPPPVIGWSTTATDLGFVDGTEYQEPDIICHRNGTPALLTAEVKAGGTVELQWTPWPSSHHGPVITYLANCGGDCSDVDKTQLEFFKIEQSGLVNDSDPPGTWATDNLISNNNTWTVTIPSTLEPGNYVLRHEIIALHSAGQLNGAQNYPQCINIQITGGGSVEPTGAKGEALYTNTDPGILIDIYETIATYDIPGP

SEQ ID NO: 2642 - protein, 223 aa, Unidentified
HGYVQGIVADGKYYGGYIVTQYPYTNDPPELVAWSTEATDLGFVDGSGYASGDIICHKSAQPAALAAEVPAGGKVELQWTEWPESHHGPVLDYLAPCNGNCADVDKTALEFFKIDQGGLVDDSSPPGTWASDQLISNNNSWTVTIPSTIAPGNYVLRHEIIALHSAGNKDGAQNYPQCINIKVTGSGTDSPSGTLGTSLYKDTDPGILVNIYQTLSDYSIPGP

SEQ ID NO: 2643 - protein, 226 aa, unidentified
HGFVSGIVVGDQFYSGYIVNEYPYQSDPPPVIGWATTATDLGFVDGSEYQDPDIICHRNATPALLTAPVAAGGDVELQWTPWPSSHHGPVITYLANCNGNCSEVDKTQLNFFKIDQSGLINGSDPPGTWASDELIANNNTWTVKIPTTLEPGNYVLRHEIIALHSAGNKDGAQNYPQCINIKITQGGTVEPTGTLGEALYHDTDPGIIIDIYEPIATYDIPGPPEY

SEQ ID NO: 2644 - protein, 227 aa, Aspergillus fumigatus
HGFVSGIVADGKYYGGYLVNQYPYMSNPPDTIAWSTTATDLGFVDGTGYQSPDIICHRDAKNGKLTATVAAGSQIEFQWTTWPESHHGPLITYLAPCNGDCATVDKTTLKFVKIAAQGLIDGSNPPGVWADDEMIANNNTATVTIPASYAPGNYVLRHEIIALHSAGNLNGAQNYPQCFNIQITGGGSAQGSGTAGTSLYKNTDPGIKFDIYSDLSGGYPIPGPALF

SEQ ID NO: 2645 - protein, 248 aa, Aspergillus fumigatus
MTLSKITSIAGLLASASLVAGHGFVSGIVADGKYYGGYLVNQYPYMSNPPDTIAWSTTATDLGFVDGTGYQSPDIICHRDAKNGKLTATVAAGSQIEFQWTTWPESHHGPLITYLAPCNGDCATVDKTTLKFVKIAAQGLIDGSNPPGVWADDIMIANNNTATVTIPASYAPGNYVLRHEIIALHSAGNLNGAQNYPQCFNIQITGGGSAQGSGTAGTSLYKNTDPGIKFDIYSDLSGGYPIPGPALF

SEQ ID NO: 2646 - protein, 248 aa, Aspergillus fumigatus
MTLSKITSIAGLLASASLVAGHGFVSGIVADGKYYGGYLVNQYPYMSNPPDTIAWSTTATDLGFVDGTGYQSPDIICHRDAKNGKLTATVAAGSQIEFQWTTWPESHHGPLITYLAPCNGDCATVDKTTLKFVKIAAMGLIDGSNPPGVWADDEMIANNNTATVTIPASYAPGNYVLRHEIIALHSAGNLNGAQNYPQCFNIQITGGGSAQGSGTAGTSLYKNTDPGIKFDIYSDLSGGYPIPGPALF

SEQ ID NO: 2647 - protein, 248 aa, Aspergillus fumigatus
MTLSKITSIAGLLASASLVAGHGFVSGIVADGKYYGGYLVNQYPYMSNPPDTIAWSTTATDLGFVDGTGYQSPDIICHRDAKNGKLTATVAAGSQIEFQWTTWPESHHGPLITYLAPCNGDCATVDKTTLKFVKIAAGGLIDGSNPPGVWADDEMIANNNTATVTIPASYAPGNYVLRHEIIALHSAGNLNGAQNYPQCFNIQITGGGSAQGSGTAGTSLYKNTDPGIKFDIYSDLSGGYPIPGPALF

SEQ ID NO: 2648 - protein, 248 aa, Aspergillus fumigatus
MTLSKITSIAGLLASASLVAGHGFVSGIVADGKYYGGYLVNQYPYMSNPPDTIAWSTTATDLGFVDGTGYQSPDIICHRDAKNGKLTATVAAGSQIEFQWTTWPESHHGPLITYLAPCNGDCATVDKTTLKFVKIAACGLIDGSNPPGVWADDEMIANNNTATVTIPASYAPGNYVLRHEIIALHSAGNLNGAQNYPQCFNIQITGGGSAQGSGTAGTSLYKNTDPGIKFDIYSDLSGGYPIPGPALF

SEQ ID NO: 2649 - protein, 248 aa, Aspergillus fumigatus
MTLSKITSIAGLLASASLVAGHGFVSGIVADGKYYGGYLVNQYPYMSNPPDTIAWSTTATDLGFVDGTGYQSPDIICHRDAKNGKLTATVAAGSQIEFQWTTWPESHHGPLITYLAPCNGDCATVDKTTLKFVKIAAQGLIDGSNPPGVWADDEMIANNNTATVTIPASYAPGNYVLRHEIIALHSAMNLNGAQNYPQCFNIQITGGGSAQGSGTAGTSLYKNTDPGIKFDIYSDLSGGYPIPGPALF

SEQ ID NO: 2650 - protein, 248 aa, Aspergillus fumigatus
MTLSKITSIAGLLASASLVAGHGFVSGIVADGKYYGGYLVNQYPYMSNPPDTIAWSTTATDLGFVDGTGYQSPDIICHRDAKNGKLTATVAAGSQIEFQWTTWPESHHGPLITYLAPCNGDCATVDKTTLKFVKIAAQGLIDGSNPPGVWADDEMIANNNTATVTIPASYAPGNYVLRHEIIALHSAGNLNGAQNYPQCFNIQITGGGSAQGSGTAGTSLYKNTDPGIIFDIYSDLSGGYPIPGPALF

SEQ ID NO: 2651 - protein, 248 aa, Aspergillus fumigatus
MTLSKITSIAGLLASASLVAGHGFVSGIVADGKYYGGYLVNQYPYMSNPPDTIAWSTTATDLGFVDGTGYQSPDIICHRDAKNGKLTATVAAGSQIEFQWTTWPESHHGPLITYLAPCNGDCATVDKTTLKFVKIAAQGLIDGSNPPGVWADDEMIANNNTATVTIPASYAPGNYVLRHEIIALHSAGNLNGAQNYPQCFNIQITGGGSAQGSGTYGTSLYKNTDPGIKFDIYSDLSGGYPIPGPALF

SEQ ID NO: 2652 - protein, 248 aa, Aspergillus fumigatus
MTLSKITSIAGLLASASLVAGHGFVSGIVADGKYYGGYLVNQYPYMSNPPDTIAWSTTATDLGFVDGTGYQQPDIICHRDAKNGKLTATVAAGSQIEFQWTTWPESHHGPLITYLAPCNGDCATVDKTTLKFVKIAAQGLIDGSNPPGVWADDEMIANNNTATVTIPASYAPGNYVLRHEIIALHSAGNLNGAQNYPQCFNIQITGGGSAQGSGTAGTSLYKNTDPGIKFDIYSDLSGGYPIPGPALF

SEQ ID NO: 2653 - protein, 248 aa, Aspergillus fumigatus
MTLSKITSIAGLLASASLVAGHGFVSGIVADGKYYGGYLVNQYPYMSNPPDTIAWSTTATDLGFVDGTGYQSPDIICHRDAKNGKLTATVAAGSQIEFQWTTWPESHHGPLITYLAPCNGDCATVDKTTLKFVKIAAQGLIDGSNPPGVWADDEMIANNNTATVTIPASYAPGNYVLRHEIIALHSAGNLNGAQNYPQCFNIQITGGGSAQGSGTAGTSLYRNTDPGIKFDIYSDLSGGYPIPGPALF

SEQ ID NO: 2654 - protein, 248 aa, Aspergillus fumigatus
MTLSKITSIAGLLASASLVAGHGFVIGIVADGKYYGGYLVNQYPYMSNPPDTIAWSTTATDLGFVDGTGYQSPDIICHRDAKNGKLTATVAAGSQIEFQWTTWPESHHGPLITYLAPCNGDCATVDKTTLKFVKIAAQGLIDGSNPPGVWADDEMIANNNTATVTIPASYAPGNYVLRHEIIALHSAGNLNGAQNYPQCFNIQITGGGSAQGSGTAGTSLYKNTDPGIKFDIYSDLSGGYPIPGPALF

SEQ ID NO: 2655 - protein, 248 aa, Aspergillus fumigatus
MTLSKITSIAGLLASASLVAGHGFVSGIVADGKYYGGYLVNQYPYMSNPPDTIAWSTTATDLGFVDGTGYQSPDIICHRDAKNGKLTATVAAGSQIEFQWTTWPESHHGPLITYLAPCNGDCATVDKTTLKFVKIAAQGLIDGSNPPGVWADDEMIANNNTATVTIPASYAPGNYVLRHEIIALHSAFNLNGAQNYPQCFNIQITGGGSAQGSGTAGTSLYKNTDPGIKFDIYSDLSGGYPIPGPALF

SEQ ID NO: 2656 - protein, 248 aa, Aspergillus fumigatus
MTLSKITSIAGLLASASLVAGHGFVSGIVADGKYYGGYLVNQYPYMSNPPDTIAWSTTATDLGFVDGTGYQSPDIICHRDAKNGKLTATVAAGSQIEFQWTTWPPSHHGPLITYLAPCNGDCATVDKTTLKFVKIAAQGLIDGSNPPGVWADDEMIANNNTATVTIPASYAPGNYVLRHEIIALHSAGNLNGAQNYPQCFNIQITGGGSAQGSGTAGTSLYKNTDPGIKFDIYSDLSGGYPIPGPALF

SEQ ID NO: 2657 - protein, 248 aa, Aspergillus fumigatus
MTLSKITSIAGLLASASLVAGHGFVSGIVADGKYYGGYLVNQYPYMSNPPDTIAWSTTATDLGFVDGTGYQSPDIICHRDAKNGKLTATVAAGSQIEFQWTTWPESHHGPLITYLAPCNGDCATVDKTTLKFVKIAAEGLIDGSNPPGVWADDEMIANNNTATVTIPASYAPGNYVLRHEIIALHSAGNLNGAQNYPQCFNIQITGGGSAQGSGTAGTSLYKNTDPGIKFDIYSDLSGGYPIPGPALF

SEQ ID NO: 2658 - protein, 248 aa, Aspergillus fumigatus
MTLSKITSIAGLLASASLVAGHGFVSGIVADGKYYGGYLVNQYPYMSNPPDTIAWSTTATDLGFVDGTGYQSPDIICHRDAKNGKLTATVAAGSQIEFQWTTWPESHHGPLITYLAPCNGDCATVDKTTLKFVKIAAQGLIDGSNPPGVWADDLMIANNNTATVTIPASYAPGNYVLRHEIIALHSAGNLNGAQNYPQCFNIQITGGGSAQGSGTAGTSLYKNTDPGIKFDIYSDLSGGYPIPGPALF

SEQ ID NO: 2659 - protein, 248 aa, Aspergillus fumigatus
MTLSKITSIAGLLASASLVAGHGFVSGIVADGKYYGGYLVNQYPYMSNPPDTIAWSTTATDLGFVDGTGYQSPDIICHRDAKNGKLTATVAAGSQIEFQWTTWPESHHGPLITYLAPCNGDCATVDKTTLKFVKIAAQGLIDGSNPPGVWADDEMIANNNTATVTIPASYAPGNYVLRHEIIALHSAGNLNGAQNYPQCFNIQITGGGSAQGSGTAGTSLYKNTDPGIHFDIYSDLSGGYPIPGPALF

SEQ ID NO: 2660 - protein, 248 aa, Aspergillus fumigatus
MTLSKITSIAGLLASASLVAGHGFVSGIVADGKYYGGYLVNQYPYMSNPPDTIAWSTTATDLGFVDGTGYQSPDIICHRDAKNGKLTATVAAGSQIEFQWTTWPESHHGPLITYLAPCNGDCATVDKTTLKFVKIAAQGLIDGSNPPGVWADDEMIANNNTATVTIPASYAPGNYVLRHEIIALHSAGNLNGAQNYPQCFNIQITGGGSAQGSGTAGTSLYKNTDPGIYFDIYSDLSGGYPIPGPALF

SEQ ID NO: 2661 - protein, 248 aa, Aspergillus fumigatus
MTLSKITSIAGLLASASLVAGHGFVSGIVADGKYYGGYLVNQYPYMSNPPDTIAWSTTATDLGFVDGTGYQSPDIICHRDAKNGKLTATVAAGSQIEFQWTTWPESHHGPLITYLAPCNGDCATVDKTTLKFVKIAAQGLIDGSNPPGVWADDEMIANNNTATVTIPASYAPGNYVLRHEIIALHSAGNLNGAQNYPQCFNIQITGGGSAQGSGTAGTMLYKNTDPGIKFDIYSDLSGGYPIPGPALF

SEQ ID NO: 2662 - protein, 247 aa, Penicillium capsulatum
MSLSKIAGVVLGSAALVAGHGYVSGAVVDGTYYGGYLVNQYPYESDPPETIGWSEDETDLGFIDGSEYSNANIICHKDGKPGALSAPVKAGGSVELQWTDWPSSHHGPVITYLANCNGDCSSVDKTTLKFFKIDEGGLINDDDVPGTWATDQLISNNNSRTVTIPSSIEAGNYVLRHEIIALHSAGQKDGAQNYPQCLNLKVTGGGSDSPTGTLGTSLYKDTDPGILVNIYQSLSTYDIPGPALYTG

SEQ ID NO: 2663 - protein, 248 aa, Aspergillus fumigatus
MTLSKITSIAGLLASASLVAGHGFVSGIVADGKYYGGYLVNQYPYMSNPPDTIAWSTTATDLGFVDGTGYQSPDIICHRDAKNGKLTATVAAGSQIEFQWTTWPESHHGPLITYLAPCNGDCATVDKTTLKFVKIAAQGLIDGSNPPGVWADDEMIANNNTATVTIPASYAPGNYVLRHEIIALHSAANLNGAQNYPQCFNIQITGGGSAQGSGTAGTSLYKNTDPGIKFDIYSDLSGGYPIPGPALF

SEQ ID NO: 2664 - protein, 248 aa, Aspergillus fumigatus
MTLSKITSIAGLLASASLVAGHGFVSGIVADGKYYGGYLVNQYPYMSNPPDTIAWSTTATDLGFVDGTGYQSPDIICHRDAKNGKLTATVAAGSQIEFQWTTWPESHHGPLITYLAPCNGDCATVDKTTLKFVKIAAQGLIDGSNPPGVWADDEMIANNNTATVTIPASYAPGNYVLRHEIIALHSAGNLNGAQNYPQCFNIQITGGGSAQGSGTAGTSLYKNTDPGIWFDIYSDLSGGYPIPGPALF

SEQ ID NO: 2665 - protein, 248 aa, Aspergillus fumigatus
MTLSKITSIAGLLASASLVAGHGFVSGIVADGKYYGGYLVNQYPYMSNPPDTIAWSTTATDLGFVDGTGYQSPDIICHRDAKNGKLTATVAAGSQIEFQWTTWPESHHGPLITYLAPCNGDCATVDKTTLKFVKIAAKGLIDGSNPPGVWADDEMIANNNTATVTIPASYAPGNYVLRHEIIALHSAGNLNGAQNYPQCFNIQITGGGSAQGSGTAGTSLYKNTDPGIKFDIYSDLSGGYPIPGPALF

SEQ ID NO: 2666 - protein, 248 aa, Aspergillus fumigatus
MTLSKITSIAGLLASASLVAGHGFVSGIVADGKYYGGYLVNQYPYMSNPPDTIAWSTTATDLGFVDGTGYQSPDIICHRDAKNGKLTATVAAGSQIEFQWTTWPRSHHGPLITYLAPCNGDCATVDKTTLKFVKIAAQGLIDGSNPPGVWADDEMIANNNTATVTIPASYAPGNYVLRHEIIALHSAGNLNGAQNYPQCFNIQITGGGSAQGSGTAGTSLYKNTDPGIKFDIYSDLSGGYPIPGPALF

SEQ ID NO: 2667 - protein, 248 aa, Aspergillus fumigatus
MTLSKITSIAGLLASASLVAGHGFVSGIVADGKYYGGYLVNQYPYMSNPPDTIAWSTTATDLGFVDGTGYQSPDIICHRDAKNGKLTATVAAGSQIEFQWTTWPESHHGPLITYLAPCNGDCATVDKTTLKFVKIAAQGLIDGSNPPGVWADDEMIANNNTATVTIPARYAPGNYVLRHEIIALHSAGNLNGAQNYPQCFNIQITGGGSAQGSGTAGTSLYKNTDPGIKFDIYSDLSGGYPIPGPALF

SEQ ID NO: 2668 - protein, 248 aa, Aspergillus fumigatus
MTLSKITSIAGLLASASLVAGHGFVSGIVADGKYYGGYLVNQYPYMSNPPDTIAWSTTATDLGFVDGTGYQSPDIICHRDAKNGKLTATVAAGSQIEFQWTTWPESHHGPLITYLAPCNGDCATVDKTTLKFVKIAAQGLIDGSNPPGVWADDEMIANNNTATVTIPASYAPGNYVLRHEIIALHSAGNLNGAQNYPQCFNIQITGGGSAQGSGTAGTQLYKNTDPGIKFDIYSDLSGGYPIPGPALF

SEQ ID NO: 2669 - protein, 248 aa, Aspergillus fumigatus
MTLSKITSIAGLLASASLVAGHGFVSGIVADGKYYGGYLVNQYPYMSNPPDTIAWSTTATDLGFVDGTGYQSPDIICHRDAKNGKLTATVAAGSQIEFQWTTWPESHHGPLITYLAPCNGDCATVDKTTLKFVKIAAQGLIDGSNPPGVWADDEMIANNNTATVTIPASYAPGNYVLRHEIIALHSAGNLNGAQNYPQCFNIQITGGGSAQGEGTAGTSLYKNTDPGIKFDIYSDLSGGYPIPGPALF

SEQ ID NO: 2670 - protein, 248 aa, Aspergillus fumigatus
MTLSKITSIAGLLASASLVAGHGFVSGIVADGKYYGGYLVNQYPYMSNPPDTIAWSTTATDLGFVDGTGYQSPDIICHRDAKNGKLTATVAAGSQIEFQWTTWPESHHGPLITYLAPCNGDCATVDKTTLKFVKIAAQGLIDGSNPPGVWADDEMIANNNTATVTIPASYAPGNYVLRHEIIALHSAWNLNGAQNYPQCFNIQITGGGSAQGSGTAGTSLYKNTDPGIKFDIYSDLSGGYPIPGPALF

SEQ ID NO: 2671 - protein, 248 aa, Aspergillus fumigatus
MTLSKITSIAGLLASASLVAGHGFVSGIVADGKYYGGYLVNQYPYMSNPPDTIAWSTTATDLGFVDGTGYQSPDIICHRDAKNGKLTATVAAGSQIEFQWTTWPESHHGPLITYLAPCNGDCATVDKTTLKFVKIAAQGLIDGSNPPGVWADDEMIANNNTATVTIPASYAPGNYVLRHEIIALHSAGNLNGAQNYPQCFNIQITGGGSAQGSGTAGTSLYKNTDPGIKFDIYGDLSGGYPIPGPALF

SEQ ID NO: 2672 - protein, 248 aa, Aspergillus fumigatus
MTLSKITSIAGLLASASLVAGHGFVSGIVADGKYYGGYLVNQYPYMSNPPDTIAWSTTATDLGFVDGTGYQSPDIICHRDAKNGKLTATVAAGSQIEFQWTTWPESHHGPLITYLAPCNGDCATVDKTTLKFVKIAAQGLIDGSNPPGVWADDEMIANNNTATVTIPASYAPGNYVLRHEIIALHSAGNLNGAQNYPQCFNIQITGGGSAQGSGTAGTSLYKNTDPGIKFDIYSDLSGGYPIPGPALF

SEQ ID NO: 2673 - protein, 248 aa, Aspergillus fumigatus
MTLSKITSIAGLLASASLVAGHGFVSGIVADGKYYGGYLVNQYPYMSNPPDTIAWSTTATDLGFVDGTGYQSPDIICHRDAKNGKLTATVAAGSQIEFQWTTWPESHHGPLITYLAPCNGDCATVDKTTLKFVKIAAQGLIDGSNPPGVWADDEMIANNNTATVTIPASYAPGNYVLRHEIIALHSAGNLNGAQNYPQCVNIQITGGGSAQGSGTAGTSLYKNTDPGIKFDIYSDLSGGYPIPGPALF

SEQ ID NO: 2674 - protein, 248 aa, Aspergillus fumigatus
MTLSKITSIAGLLASASLVAGHGFVSGIVADGKFYGGYLVNQYPYMSNPPDTIAWSTTATDLGFVDGTGYQSPDIICHRDAKNGKLTATVAAGSQIEFQWTTWPESHHGPLITYLAPCNGDCATVDKTTLKFVKIAAQGLIDGSNPPGVWADDEMIANNNTATVTIPASYAPGNYVLRHEIIALHSAGNLNGAQNYPQCFNIQITGGGSAQGSGTAGTSLYKNTDPGIKFDIYSDLSGGYPIPGPALF

SEQ ID NO: 2675 - protein, 248 aa, Aspergillus fumigatus
MTLSKITSIAGLLASASLVAGHGFVSGIVADGKYYGGYLVNQYPYMSNPPDTIAWSTTATDLGFVDGTGYQSPDIICHRDAKNGKLTATVAAGSQIEFQWTTWPESHHGPLITYLAPCNGDCATVDKTTLKFVKIAALGLIDGSNPPGVWADDEMIANNNTATVTIPASYAPGNYVLRHEIIALHSAGNLNGAQNYPQCFNIQITGGGSAQGSGTAGTSLYKNTDPGIKFDIYSDLSGGYPIPGPALF

SEQ ID NO: 2676 - protein, 248 aa, Aspergillus fumigatus
MTLSKITSIAGLLASASLVAGHGFVSGIVADGKYYGGYLVNQYPYMSNPPDTIAWSTTATDLGFVDGTGYQSPDIICHRDAKNGKLTATVAAGSQIEFQWTTWPESHHGPLITYLAPCNGDCATVDKTTLKFVKIAAQGLIDGSNPPGVWADDEMIANNNTATVTIPASYAPGNYVLRHEIIALHSAGNLNGAQNYPQCFNIQITGGGSAQGSGTAGTSLYKNTDPGIKFDIYKDLSGGYPIPGPALF

SEQ ID NO: 2677 - protein, 248 aa, Aspergillus fumigatus
MTLSKITSIAGLLASASLVAGHGFVSGIVADGKYYGGYLVNQYPYMSNPPDTIAWSTTATDLGFVDGTGYQSPDIICHRDAKNGKLTATVAAGSQIEFQWTTWPESHHGPLITYLAPCNGDCATVDKTTLKFVKIAAQGLIDGSNPPGVWADDEMIANNNTATVTIPASYAPGNYVLRHEIIALHSAGNLNGAQNYPQCFNIQITGGGSAQGSGTAGTELYKNTDPGIKFDIYSDLSGGYPIPGPALF

SEQ ID NO: 2678 - protein, 248 aa, Aspergillus fumigatus
MTLSKITSIAGLLASASLVAGHGFVSGIVADGKYYGGYLVNQYPYMSNPPDTIAWSTTATDLGFVDGTGYQSPDIICHRDAKNGKLTATVAAGSQIEFQWTKWPESHHGPLITYLAPCNGDCATVDKTTLKFVKIAAQGLIDGSNPPGVWADDEMIANNNTATVTIPASYAPGNYVLRHEIIALHSAGNLNGAQNYPQCFNIQITGGGSAQGSGTAGTSLYKNTDPGIKFDIYSDLSGGYPIPGPALF

SEQ ID NO: 2679 - protein, 248 aa, Aspergillus fumigatus
MTLSKITSIAGLLASASLVAGHGFVSGIVADGKYYGGYLVNQYPYMSNPPDTIAWSTTATDLGFVDGTGYQSPDIICHRDAKNGKLTATVAAGSQIEFQWTTWPKSHHGPLITYLAPCNGDCATVDKTTLKFVKIAAQGLIDGSNPPGVWADDEMIANNNTATVTIPASYAPGNYVLRHEIIALHSAGNLNGAQNYPQCFNIQITGGGSAQGSGTAGTSLYKNTDPGIKFDIYSDLSGGYPIPGPALF

SEQ ID NO: 2680 - protein, 248 aa, Aspergillus fumigatus
MTLSKITSIAGLLASASLVAGHGFVSGIVADGKYYGGYLVNQYPYMSNPPDTIAWSTTATDLGFVDGTGYQSPDIICHRDAKNGKLTATVAAGSQIEFQWTTWPESHHGPLITYLAPCNGDCRTVDKTTLKFVKIAAQGLIDGSNPPGVWADDEMIANNNTATVTIPASYAPGNYVLRHEIIALHSAGNLNGAQNYPQCFNIQITGGGSAQGSGTAGTSLYKNTDPGIKFDIYSDLSGGYPIPGPALF

SEQ ID NO: 2681 - protein, 248 aa, Aspergillus fumigatus
MTLSKITSIAGLLASASLVAGHGFVSGIVADGKYYGGYLVNQYPYMSNPPDTIAWSTTATDLGFVDGTGYQSPDIICHRDAKNGKLTATVAAGSQIEFQWTTWPESHHGPLITYLAPCNGDCATVDKTTLKFVKIAAQGLIDGSNPPGVWADDEMIANNNTATVTIPASYAPGNYVLRHEIIALHSAGNLNGAQNYPQCFNIQITGGGSAQGSGTAGTCLYKNTDPGIKFDIYSDLSGGYPIPGPALF

SEQ ID NO: 2682 - protein, 225 aa, Aspergillus niger
HGYVSGAVIDGEYYGGYIVSSYAYESDPPETIAWSTTATDLGFVDGSEYSDPDIICHKSAKPGAISADVKAGGTVELQWTDWPSSHHGPVLTYLANCNGDCSDVTKTDLEFFKIDESGLISDTEVPGTWATDNLISNNNSWTVTIPSTLEAGNYVLRHEIIALHSAENKDGAQNYPQCLNLKVTGSGSSTYSGTKGEALYKDTDPGILVNIYETLSSYDIPGPAI

SEQ ID NO: 2683 - protein, 229 aa, unidentified
HGFVQGIVVGDKFYSGYIVNEFPYESDPPPVIGWATTATDLGFVDGSEYAEPDIICHRDATPALLTAPVAAGGTVELQWTPWPSSHHGPVITYLAPCNGNCSEVDKTQLEFFKIDQSGLVNDSDPPGTWASDELIANNNSWTVTIPTSIEPGGYVLRHEIIALHSAEQLDGAQNYPQCINIEITQTSGTVTPSGTLGEALYTNTAAGIIIDIYEPIATYTIPGPPLYTG

SEQ ID NO: 2684 - protein, 229 aa, unidentified
HGFVQGIVIGDKFYSGYIVDEYPYESDPPPVIGWATTATDLGFVDGTEYAEPDIICHRNATPALLTAEVKAGGTVELQWTPWPSSHHGPVITYLAPCNGNCSEVDKTTLEFFKIDQSGLVNDSDPPGVWASDELISNNNTWTVTIPTSIAPGGYVLRHEIIALHSAEQLDGAQNYPQCINIEITQTSGTVTPTGTLGEALYTDTAPGILVDIYEPIATYTIPGPPMYTG

SEQ ID NO: 2685 - protein, 249 aa, Unidentified
MPFSKIAILATILGTASLVSGHGYVQGIVADGKYYGGYIVTQYPYTNDPPELVAWSTEATDLGFVDGSGYASGDIICHKSAQPAALAAEVPAGGKVELQWTEWPESHHGPVLDYLAPCNGNCADVDKTALEFFKIDQGGLVDDSSPPGTWASDQLISNNNSWTVTIPSTIAPGNYVLRHEIIALHSAGNKDGAQNYPQCINIKVTGSGTDSPSGTLGTSLYKDTDPGILVNIYQTLSDYSIPGPALYEG

SEQ ID NO: 2686 - protein, 240 aa, unidentified
LAFAGLAGLLSAPLVKAHGFVSGIVVDGTFYSGYIVDEYPYMSNPPPVIGWSTTATDLGFVDGTEYQEPDIICHRNATPALLTAEVKAGGDVELQWTPWPSSHHGPVITYLANCGGDCSDVDKTQLEFFKIEQSGLINDSDPPGTWATDNLISNNNTWTVTIPSTLEPGNYVLRHEIIALHSAGQKDGAQNYPQCINIQITQGGTVEPTGAKGEALYTNTDPGILIDIYETIATYDIPGP

SEQ ID NO: 2687 - protein, 245 aa, Aspergillus niger CBS 513.88
MSVAKIAGVVLGSAALVAGHGYVSGAVIDGEYYGGYIVSSYPYESDPPETIAWSTTATDLGFVDGSEYSDPDIICHKSAKPGAISADVKAGGTVELQWTDWPSSHHGPVLTYLANCNGDCSDVTKTDLEFFKIDESGLISDTEVPGTWATDNLISNNNSWTVTIPSTLEAGNYVLRHEIIALHSAENKDGAQNYPQCLNLKVTGSGSSTYSGTKGEALYKDTDPGILVNIYETLSSYDIPGPAMY

SEQ ID NO: 2688 - protein, 223 aa, unidentified
HGFVSGIVVGDEFYSGYIVNEFPYQSNPPPVIGWATTATDLGFVDGTEYQDPDIICHRNATPALITAEVKAGGTVELQWTPWPSSHHGPVITYLANCNGNCSTVDKTQLEFFKIDQSGLVNDSDPPGTWASDNLISNNNSWTVTIPSTLEPGGYVLRHEIIALHSAGQLNGAQNYPQCINIKITQGGSVEPTGALGEDLYHNTDPGILIDIYEPIATYTIPGP

SEQ ID NO: 2689 - protein, 223 aa, unidentified
HGFVSGIVVDGTFYSGYIVDEFPYMSNPPPVIGWSTTATDLGFVDGTEYQEPDIICHRNATPALLTAEVKAGGTVELQWTPWPSSHHGPVITYLANCGGNCSDVDKTQLEFFKIEQSGLVNDSDPPGTWATDNLISNNNTWTVTIPSTLEPGGYVLRHEIIALHSAGQLNGAQNYPQCINIQITQGGSVEPTGAKGEALYTNTDPGILIDIYETIATYDIPGP

SEQ ID NO: 2690 - protein, 219 aa, Aspergillus terreus
HGYVTGAVVDGKYYAGYDVTSAPYSSDPPATIGWSTTATDLGFVDGTEYSEPDIICHKDAKPGSLSAEITAGGKVELQWTEWPESHHGPVITYLANCNGDCSSVDKTSLEFFKIDQKGLIEGNTWASDQLISNNNSWTVTIPSSIASGNYVLRHEIIGLHSAGNKDGAQNYPQCMNLKVTGGGSDKPAGTLGTALYKDTDPGILVNIYQTLSSYVIPGP

SEQ ID NO: 2691 - protein, 226 aa, Unidentified
HGYVSGAVVDGQYYGGYIVSSYAYESDPPETIAWSTEATDLGFVDGSEYAEPDIICHKSAKPGAISADVKAGGTVELQWTDWPSSHHGPVLTYLANCNGDCSDVTKTDLEFFKIDESGLISDTEVPGTWATDNLISNNNSWTVTIPSTLESGNYVLRHEIIALHSAGNKDGAQNYPQCLNLKVTGSGSSTYSGTKGEALYKDTDPGILVNIYQSLSSYDIPGPAMY

SEQ ID NO: 2692 - protein, 248 aa, Aspergillus fumigatus
MTLSKITSIAGLLASASLVAGHGFVSGIVADGKYYGGYLVNQYPYMSNPPDTIAWSTTATDLGFVDGTGYQSPDIICHRDAKNGKLTATVAAGSQIEFQWTTWPESHHGPLITYLAPCNGDCATVDKTTLKFVKIAAQGLIDGSNPPGVWADDEMIANNNTAFVTIPASYAPGNYVLRHEIIALHSAGNLNGAQNYPQCFNIQITGGGSAQGSGTAGTSLYKNTDPGIKFDIYSDLSGGYPIPGPALF

SEQ ID NO: 2693 - protein, 248 aa, Aspergillus fumigatus
MTLSKITSIAGLLASASLVAGHGFVSGIVADGKYYGGYLVNQYPYMSNPPDTIAWETTATDLGFVDGTGYQSPDIICHRDAKNGKLTATVAAGSQIEFQWTTWPESHHGPLITYLAPCNGDCATVDKTTLKFVKIAAQGLIDGSNPPGVWADDEMIANNNTATVTIPASYAPGNYVLRHEIIALHSAGNLNGAQNYPQCFNIQITGGGSAQGSGTAGTSLYKNTDPGIKFDIYSDLSGGYPIPGPALF

SEQ ID NO: 2694 - protein, 248 aa, Aspergillus fumigatus
MTLSKITSIAGLLASASLVAGHGFVSGIVADGKYYGGYLVNQYPYMSNPPDTIAWSTTATDLGFVDGTGYQSPDIICHRDAKNGKLTATVAAGSQIEFQWTTWPESHHGPLITYLAPCNGDCATVDKTTLKFVKIAAQGLIDGSNPPGVWADDEMIANNNTATVTIPASYAPGNYVLRHEIIALHKAGNLNGAQNYPQCFNIQITGGGSAQGSGTAGTSLYKNTDPGIKFDIYSDLSGGYPIPGPALF

SEQ ID NO: 2695 - protein, 248 aa, Aspergillus fumigatus
MTLSKITSIAGLLASASLVAGHGFVSGIVADGKYYGGYLVNQYPYMSNPPDTIAWSTTATDLGFVDGTGYQSPDIICHRDAKNGKLTATVAAGSQIEFQWTTWPESHHGPLITYLAPCNGDCATVDKTTLKFVKIAAQGLIDGSNPPGVWADDEMIANNNTATVTIPASYAPGNYVLRHEIIALHFAGNLNGAQNYPQCFNIQITGGGSAQGSGTAGTSLYKNTDPGIKFDIYSDLSGGYPIPGPALF

SEQ ID NO: 2696 - protein, 248 aa, Aspergillus fumigatus
MTLSKITSIAGLLASASLVAGHGFVSGIVADSKYYGGYLVNQYPYMSNPPDTIAWSTTATDLGFVDGTGYQSPDIICHRDAKNGKLTATVAAGSQIEFQWTTWPESHHGPLITYLAPCNGDCATVDKTTLKFVKIAAQGLIDGSNPPGVWADDEMIANNNTATVTIPASYAPGNYVLRHEIIALHSAGNLNGAQNYPQCFNIQITGGGSAQGSGTAGTSLYKNTDPGIKFDIYSDLSGGYPIPGPALF

SEQ ID NO: 2697 - protein, 248 aa, Aspergillus fumigatus
MTLSKITSIAGLLASASLVAGHGFVSGIVADGKYYGGYLVNQYPYMSNPPDTIAWSTTATDLGFVDGTGYQSPDIICHRDAKNGKLTATVAAGSQIEFQWTTWPESHHGPLITYLAPCNGDCATVDKTTLKFVKIAAQGLIDGSNPPGVWADDEMIANNNTATVTIPASYAPGNYVLRHEIIALHSAGKLNGAQNYPQCFNIQITGGGSAQGSGTAGTSLYKNTDPGIKFDIYSDLSGGYPIPGPALF

SEQ ID NO: 2698 - protein, 248 aa, Aspergillus fumigatus
MTLSKITSIAGLLASASLVAGHGFVSGIVADGKYYGGYLVTQYPYMSNPPDTIAWSTTATDLGFVDGTGYQSPDIICHRDAKNGKLTATVAAGSQIEFQWTTWPESHHGPLITYLAPCNGDCATVDKTTLKFVKIAAQGLIDGSNPPGVWADDEMIANNNTATVTIPASYAPGNYVLRHEIIALHSAGNLNGAQNYPQCFNIQITGGGSAQGSGTAGTSLYKNTDPGIKFDIYSDLSGGYPIPGPALF

SEQ ID NO: 2699 - protein, 248 aa, Aspergillus fumigatus
MTLSKITSIAGLLASASLVAGHGFVSGIVADGKYYGGYLVNQYPYMSNPPDTIAWCTTATDLGFVDGTGYQSPDIICHRDAKNGKLTATVAAGSQIEFQWTTWPESHHGPLITYLAPCNGDCATVDKTTLKFVKIAAQGLIDGSNPPGVWADDEMIANNNTATVTIPASYAPGNYVLRHEIIALHSAGNLNGAQNYPQCFNIQITGGGSAQGSGTAGTSLYKNTDPGIKFDIYSDLSGGYPIPGPALF

SEQ ID NO: 2700 - protein, 248 aa, Aspergillus fumigatus
MTLSKITSIAGLLASASLVAGHGFVSGIVADGKYYGGYLVNQYPYMRNPPDTIAWSTTATDLGFVDGTGYQSPDIICHRDAKNGKLTATVAAGSQIEFQWTTWPESHHGPLITYLAPCNGDCATVDKTTLKFVKIAAQGLIDGSNPPGVWADDEMIANNNTATVTIPASYAPGNYVLRHEIIALHSAGNLNGAQNYPQCFNIQITGGGSAQGSGTAGTSLYKNTDPGIKFDIYSDLSGGYPIPGPALF

SEQ ID NO: 2701 - protein, 248 aa, Aspergillus fumigatus
MTLSKITSIAGLLASASLVAGHGFVSGIVADGKYYGGYLVNQYPYMSNPPDTIAWTTTATDLGFVDGTGYQSPDIICHRDAKNGKLTATVAAGSQIEFQWTTWPESHHGPLITYLAPCNGDCATVDKTTLKFVKIAAQGLIDGSNPPGVWADDEMIANNNTATVTIPASYAPGNYVLRHEIIALHSAGNLNGAQNYPQCFNIQITGGGSAQGSGTAGTSLYKNTDPGIKFDIYSDLSGGYPIPGPALF

SEQ ID NO: 2702 - protein, 248 aa, Aspergillus fumigatus
MTLSKITSIAGLLASASLVAGHGFVSGIVADGKYYGGYLVNQYPYMSNPPDTIAWSTTATDLGFVDGTGYQSPDIICHRDAKNGKLTATVAAGSQIEFQWTTWPESHHGPLITYLAPCNGDCATVDKTTLKFVKIAAQGLIDGSNPPGVWADDEMIANNNTAEVTIPASYAPGNYVLRHEIIALHSAGNLNGAQNYPQCFNIQITGGGSAQGSGTAGTSLYKNTDPGIKFDIYSDLSGGYPIPGPALF

SEQ ID NO: 2703 - protein, 248 aa, Aspergillus fumigatus
MTLSKITSIAGLLASASLVAGHGFVSGIVADGKYYGGYLVNQYPYMSNPPDTIAWSTTATDLGFVDGTGYQSPDIICHRDAKNGKLTATVAAGSQIEFQWTTWPESHHGPLITYLAPCNGDCATVDKTTLKFVKIAAQGLIDGSNPPGVWADDEMIANNNTATLTIPASYAPGNYVLRHEIIALHSAGNLNGAQNYPQCFNIQITGGGSAQGSGTAGTSLYKNTDPGIKFDIYSDLSGGYPIPGPALF

SEQ ID NO: 2704 - protein, 248 aa, Aspergillus fumigatus
MTLSKITSIAGLLASASLVAGHGFVSGIVADGKYYGGYLVNQYPYMSNPPDTIAWSTTATDLGFVDGTGYQSPDIICHRDAKNGKLTATVAAGSQIEFQWTTWPESHHGPLITYLAPCNGDCATVDKTTLKFVKIAAQGLIDGSNPPGVWADDEMIANNNTATVTIPASYAPGNYVLRHEIIALHYAGNLNGAQNYPQCFNIQITGGGSAQGSGTAGTSLYKNTDPGIKFDIYSDLSGGYPIPGPALF

SEQ ID NO: 2705 - protein, 248 aa, Aspergillus fumigatus
MTLSKITSIAGLLASASLVAGHGFVSGIVADGKYYGGYLVNEYPYMSNPPDTIAWSTTATDLGFVDGTGYQSPDIICHRDAKNGKLTATVAAGSQIEFQWTTWPESHHGPLITYLAPCNGDCATVDKTTLKFVKIAAQGLIDGSNPPGVWADDEMIANNNTATVTIPASYAPGNYVLRHEIIALHSAGNLNGAQNYPQCFNIQITGGGSAQGSGTAGTSLYKNTDPGIKFDIYSDLSGGYPIPGPALF

SEQ ID NO: 2706 - protein, 248 aa, Aspergillus fumigatus
MTLSKITSIAGLLASASLVAGHGFVSGIVADGKYYGGYLVNQYPYMSNPPDTIAWSTTATDLGFVDGTGYQSPDIICHRDAKNGKLTATVAAGSQIEFQWTTWPESHHGPLITYLAPCNGDCATVDKTTLKFVKIAAQGLIDGSNPPGVWADDEMIANNNTAVVTIPASYAPGNYVLRHEIIALHSAGNLNGAQNYPQCFNIQITGGGSAQGSGTAGTSLYKNTDPGIKFDIYSDLSGGYPIPGPALF

SEQ ID NO: 2707 - protein, 248 aa, Aspergillus fumigatus
MTLSKITSIAGLLASASLVAGHGFVSGIVADGKYYGGYLVNQYPYMSNPPDTIAWSTTATDLGFVDGTGYQSPDIICHRDAKNGKLTATVAAGSQIEFQWTTWPESHHGPLITYLAPCNGDCATVDKTTLKFVKIAAQGLIDGSNPPGVWADDEMIANNNTATVTLPASYAPGNYVLRHEIIALHSAGNLNGAQNYPQCFNIQITGGGSAQGSGTAGTSLYKNTDPGIKFDIYSDLSGGYPIPGPALF

SEQ ID NO: 2708 - protein, 248 aa, Aspergillus fumigatus
MTLSKITSIAGLLASASLVAGHGFVSGIVADGKYYGGYLVNQYPYMENPPDTIAWSTTATDLGFVDGTGYQSPDIICHRDAKNGKLTATVAAGSQIEFQWTTWPESHHGPLITYLAPCNGDCATVDKTTLKFVKIAAQGLIDGSNPPGVWADDEMIANNNTATVTIPASYAPGNYVLRHEIIALHSAGNLNGAQNYPQCFNIQITGGGSAQGSGTAGTSLYKNTDPGIKFDIYSDLSGGYPIPGPALF

SEQ ID NO: 2709 - protein, 248 aa, Aspergillus fumigatus
MTLSKITSIAGLLASASLVAGHGFVSGIVADGKYYGGYLVNQYPYMSNPPDTIAWSTTATDLGFVDGTGYQSPDIICHRDAKNGKLTATVAAGSQIEFQWTTWPESHHGPLITYLAPCNGDCATVDKTTLKFVKIAAQGLIDGSNPPGVWADDEMIANNNTATVTIPASYAPGNYVLRHEIIALHTAGNLNGAQNYPQCFNIQITGGGSAQGSGTAGTSLYKNTDPGIKFDIYSDLSGGYPIPGPALF

SEQ ID NO: 2710 - protein, 248 aa, Aspergillus fumigatus
MTLSKITSIAGLLASASLVAGHGFVSGIVADEKYYGGYLVNQYPYMSNPPDTIAWSTTATDLGFVDGTGYQSPDIICHRDAKNGKLTATVAAGSQIEFQWTTWPESHHGPLITYLAPCNGDCATVDKTTLKFVKIAAQGLIDGSNPPGVWADDEMIANNNTATVTIPASYAPGNYVLRHEIIALHSAGNLNGAQNYPQCFNIQITGGGSAQGSGTAGTSLYKNTDPGIKFDIYSDLSGGYPIPGPALF

(The sequence listing continues in the following parts.)

1. (canceled)

2. A method comprising applying an enzymatically active protein, to a plant, plant part, plant growth medium and/or agricultural/floricultural/horticultural/silvicultural apparatus/facility, said enzymatically active protein selected from the group consisting of:
i. polypeptides having at least 70% sequence identity to one or more of SEQ ID NO(s): 1-91, 45906, 72144, 72147 and 72149;
ii. polypeptides comprising any one of SEQ ID NO(s): 1-91, 183-72144, 72147 and 72149;
iii. enzymatically active fragments/mutants/variants of any one of SEQ ID NO(s): 1-91, 183-72144, 72147 and 72149;
iv. enzymatically active polypeptides derived from any one of SEQ ID NO(s): 1-91, 183-72144, 72147 and 72149 by substitution, deletion, or insertion of one or more amino acids;
v. enzymatically active polypeptides derived from the polypeptide of any one of i) through iv) wherein the N- and/or C-terminal end has been extended by the addition of one or more amino acids;
vi. enzymatically active fragments of the polypeptide of any one of i) through v); and
vii. fusion proteins comprising a first polypeptide having a first enzymatic activity and a second polypeptide having a second enzymatic activity, wherein at least one of said first polypeptide and said second polypeptide comprises the polypeptide of any one of i) through vi).

3. A formulation comprising an enzymatically active protein in an agriculturally acceptable carrier, said enzymatically active protein selected from the group consisting of:
i. polypeptides having at least 70% sequence identity to one or more of SEQ ID NO(s): 1-91, 45906, 72144, 72147 and 72149;
ii. polypeptides comprising any one of SEQ ID NO(s): 1-91, 183-72144, 72147 and 72149;
iii. enzymatically active fragments/mutants/variants of any one of SEQ ID NO(s): 1-91, 183-72144, 72147 and 72149;
iv. enzymatically active polypeptides derived from any one of SEQ ID NO(s): 1-91, 183-72144, 72147 and 72149 by substitution, deletion, or insertion of one or more amino acids;
v. enzymatically active polypeptides derived from the polypeptide of any one of i) through iv) wherein the N- and/or C-terminal end has been extended by the addition of one or more amino acids;
vi. enzymatically active fragments of the polypeptide of any one of i) through v); and
vii. fusion proteins comprising a first polypeptide having a first enzymatic activity and a second polypeptide having a second enzymatic activity, wherein at least one of said first polypeptide and said second polypeptide comprises the polypeptide of any one of i) through vi).

4. A method comprising applying the formulation of claim 3 to a plant, plant part, plant growth medium and/or agricultural/floricultural/horticultural/silvicultural apparatus/facility.

5-9. (canceled)

10. A method comprising introducing an enzymatically active protein into an agriculturally acceptable carrier that comprises one or more pesticides, pest attractants, pest feeding stimulants, plant growth regulators, rain fasteners and/or UV protectants, said enzymatically active protein selected from the group consisting of:
i. polypeptides having at least 70% sequence identity to one or more of SEQ ID NO(s): 1-91, 45906, 72144, 72147 and 72149;
ii. polypeptides comprising any one of SEQ ID NO(s): 1-91, 183-72144, 72147 and 72149;
iii. enzymatically active fragments/mutants/variants of any one of SEQ ID NO(s): 1-91, 183-72144, 72147 and 72149;
iv. enzymatically active polypeptides derived from any one of SEQ ID NO(s): 1-91, 183-72144, 72147 and 72149 by substitution, deletion, or insertion of one or more amino acids;
v. enzymatically active polypeptides derived from the polypeptide of any one of i) through iv) wherein the N- and/or C-terminal end has been extended by the addition of one or more amino acids;
vi. enzymatically active fragments of the polypeptide of any one of i) through v); and
vii. fusion proteins comprising a first polypeptide having a first enzymatic activity and a second polypeptide having a second enzymatic activity, wherein at least one of said first polypeptide and said second polypeptide comprises the polypeptide of any one of i) through vi).

11. The method of claim 1, wherein application of said enzymatically active protein comprises applying a microorganism that expresses said enzymatically active protein to said plant, plant part, plant growth medium and/or agricultural/floricultural/horticultural/silvicultural apparatus/facility.

12. The method of claim 1, wherein application of said enzymatically active protein comprises introducing a heterologous polynucleotide that encodes said enzymatically active protein into said plant or plant part.
